United States Patent Application Publication US 2021/0199660 A1 - sequence listing, part 54

SEQ ID NO: 774240 - DNA, 120 bp, Artificial Sequence
  ENSG00000241322_25 (sequence is synthesized)
agcccatgattatccgctccaggttctctggcagcttaaagggtggagaccaagtgaccagttcaattgaaagggctgtgtgcagtacgggtcccctgaccagtatgcaggtcattaaac

SEQ ID NO: 774241 - DNA, 120 bp, Artificial Sequence
  ENSG00000241322_26 (sequence is synthesized)
caaaccgcatgctagctccacaagtgggcacagccaccctgtctcttaagaaagaacggcctcgcatctatacagcccttgatccttttagagtgaacgctgagttcgtgctgttgaccg

SEQ ID NO: 774242 - DNA, 120 bp, Artificial Sequence
  ENSG00000241322_27 (sequence is synthesized)
tgaaggaggagaaggagcaccaggaagccaagatgaaggaatatcaggccagggagtccactggagtggttgatccaggaaaagccagcaaagctgcatggatcaggaagatcaaaggcc

SEQ ID NO: 774243 - DNA, 120 bp, Artificial Sequence
  ENSG00000241322_28 (sequence is synthesized)
tgcctattgataatttcacgaagcaagggaaaacagcggcccctgaacttggacaaaatgtatttatctaaaccagccttgggaaattacagtgttttacaataaacagaaagccaagcg

SEQ ID NO: 774244 - DNA, 120 bp, Artificial Sequence
  ENSG00000241322_29 (sequence is synthesized)
ggcagaccttctgctccctgtagacatcgtgttctctgcacctcaccctctctgcttccctcctcttccacctgggacccatttttccccaccatcttctctgtctgactgttagcctct

SEQ ID NO: 774245 - DNA, 120 bp, Artificial Sequence
  ENSG00000241322_30 (sequence is synthesized)
ggattcaaatccaggcccctgactctaagctgaaccatgagaatctgctgcctcccaactaactaattatctacatgggttctacgcagtatgatcctttgggccctcaggaactctcac

SEQ ID NO: 774246 - DNA, 120 bp, Artificial Sequence
  ENSG00000241322_31 (sequence is synthesized)
gtaaagtggttaagagagtcaggattagagtgttctggattcatataggttctgtcccttcctggctatagggcagctaggtttcacttactcctctctataagagaaatgatcatcttt

SEQ ID NO: 774247 - DNA, 120 bp, Artificial Sequence
  ENSG00000241322_32 (sequence is synthesized)
tcctcctagggttgaagactgactgagacaatgcctcctgcacagtgttccattttatatttagtcatgaacaaacaacttcagacacaatattggaagatttgggcagaaaatactacc

SEQ ID NO: 774248 - DNA, 120 bp, Artificial Sequence
  ENSG00000241322_33 (sequence is synthesized)
gtacattctaagtatgctggggtgtatgaggggatttcccagacacctcccctcttggcccagttctggggtttctgggtccatcttttttttttttccaggaatgctggatagacacac

SEQ ID NO: 774249 - DNA, 120 bp, Artificial Sequence
  ENSG00000241343_0 (sequence is synthesized)
ctatatacttccgtttgcctcgcggtttctttctttccgcgccgatagcgctcacgcaagcatggttaacgtccctaaaacccgccggactttctgtaagaagtgtggcaagcaccaacc

SEQ ID NO: 774250 - DNA, 120 bp, Artificial Sequence
  ENSG00000241343_1 (sequence is synthesized)
gaagcagagtggctatggtgggcaaactaagccgattttccggaaaaaggctaaaactacaaagaagattgtgctaaggcttgagtgcgttgagcccaactgcagatctaagagaatgct

SEQ ID NO: 774251 - DNA, 79 bp, Artificial Sequence
  ENSG00000241343_2 (sequence is synthesized)
ggctattaaaagatgcagtgatccagttctaagtgtcatcttttattatgaagacaataaaatcttgagtttatgttca

SEQ ID NO: 774252 - DNA, 120 bp, Artificial Sequence
  ENSG00000241343_3 (sequence is synthesized)
ggttgagttcacatcatatgttgcaattttctaatttggcacttcaatcactaggggccttatgaggcagtttgtcattatgcaatggttattggttatcatgtgagtagacacatttca

SEQ ID NO: 774253 - DNA, 120 bp, Artificial Sequence
  ENSG00000241343_4 (sequence is synthesized)
ggctaatagggagaagtcagtaacacattcatagtgaatatgagatgtctttgctaagagttaagtgtcagatctttgttataacagttaatttaataaagaattttggcattgttcttc

SEQ ID NO: 774254 - DNA, 120 bp, Artificial Sequence
  ENSG00000241343_5 (sequence is synthesized)
ctgggaggagataagaagagaaaggtatataattatgggtggaaggtgcaatctttttcatagctttattatttgaaaaggtgaacatctattcattgtggcatagagctcaggggtaat

SEQ ID NO: 774255 - DNA, 120 bp, Artificial Sequence
  ENSG00000241343_6 (sequence is synthesized)
cctctaaaaatattagatctatagctaaagatatgtgaggtcttttgctacaaggaggaaaggaagaatgaggcagcttaacagcatggtgagtattttaggaacagataatgttcttaa

SEQ ID NO: 774256 - DNA, 120 bp, Artificial Sequence
  ENSG00000241343_7 (sequence is synthesized)
tggggcagtagttcatggcaaaatacaaaacaacttttttctgttctgttacagggccaagtgatccagttctaagtgtcatcttttattatgaagacaataaaatcttgagtttatgtt

SEQ ID NO: 774257 - DNA, 120 bp, Artificial Sequence
  ENSG00000241343_8 (sequence is synthesized)
agttaattgccgtaaggatatgcacttgtctctagtccacacacttcatgatataggtatagcgttagtttagcgaagttttcactgcactgatatatctagtaggtgatggagctggga

SEQ ID NO: 774258 - DNA, 120 bp, Artificial Sequence
  ENSG00000241343_9 (sequence is synthesized)
atgcaactcatgtctgactagtccacaatactgcactatttcagtgtttacgattttttatcctttcccttctgaagaggcaaaaaattgaggaatgtgccctgctttcctaagaactga

SEQ ID NO: 774259 - DNA, 120 bp, Artificial Sequence
  ENSG00000241343_10 (sequence is synthesized)
agtgtgagtacactggtaaatcctttcatttgccttgttccttatctgtcaatatgtctgaatcctcgcttgttggttgcactaagaattgttctgttgtttctcatcacagaaatctgc

SEQ ID NO: 774260 - DNA, 120 bp, Artificial Sequence
  ENSG00000241343_11 (sequence is synthesized)
agtcaactacctgttctcgtgaagtcttaaaactcttatagaatagccatttaggcctttctgctagcctcctgaattctgtattctcaggctgagcgagtttctgtttactctcaaacc

SEQ ID NO: 774261 - DNA, 120 bp, Artificial Sequence
  ENSG00000241343_12 (sequence is synthesized)
ttaggtgatttggctaactcttaaagtaattagcacgatgattggaacggagcattctctccaacacagcatttcttttggcactttgcttcttgtgcagtttagctccagaaagtatta

SEQ ID NO: 774262 - DNA, 120 bp, Artificial Sequence
  ENSG00000241343_13 (sequence is synthesized)
aggaatgactttagtgctcatttggatgcagtaagtggtttgatctcagggtggcaaaaagaatgctttttttataccttttcacattcggataacttgtttagaagacagaggttctaa

SEQ ID NO: 774263 - DNA, 120 bp, Artificial Sequence
  ENSG00000241343_14 (sequence is synthesized)
ctaggttttggcctattaagaactgcaaactagcagcagcagaactctggctaaaggggcaagcttattaggaaattgagtatttaaaagttgagctaccatatgatccaacaatcccac

SEQ ID NO: 774264 - DNA, 120 bp, Artificial Sequence
  ENSG00000241343_15 (sequence is synthesized)
tagctaagatttagaagcaaccttagtgtccatcgggatgaatggataaagaaaatgtacctatacgcggccaggcacggtggcttgtgcctagcactttggaaagccgaggcgggtgga

SEQ ID NO: 774265 - DNA, 120 bp, Artificial Sequence
  ENSG00000241343_16 (sequence is synthesized)
agggaaaaagaaaatgcacctatacacagtggtactattcagccataaaaagaatgagatccagtcatttacaacaacatgggtggaactggagatcgttatgttaagtgaaataggcac

SEQ ID NO: 774266 - DNA, 120 bp, Artificial Sequence
  ENSG00000241343_17 (sequence is synthesized)
acaaagacaagcatcacatgttcttgtttgtgggatctaaaaatcaaaacaagtggacttgtcatatagagagtagaaggatggttaccagaagctgagaacttctggtggcgggaggtg

SEQ ID NO: 774267 - DNA, 120 bp, Artificial Sequence
  ENSG00000241343_18 (sequence is synthesized)
gggatggttaatgggtacaaaaagaaaaaagaatgaattagaccaactatttgatagcacgacagcgtgactaaagtcaataacttagttacatattttaaaataacttagagtgtaatt

SEQ ID NO: 774268 - DNA, 120 bp, Artificial Sequence
  ENSG00000241343_19 (sequence is synthesized)
ggattgtttgtacctcaaagaaaaaatgcaataaaactttacagtggagaaacctaacaagcactacctcagccaggtaatcaaggttaacatcaacagtcacgagtcatgttgatatat

SEQ ID NO: 774269 - DNA, 120 bp, Artificial Sequence
  ENSG00000241343_20 (sequence is synthesized)
acccttgataaggtgtgatgaaaatgacacttaaacctaaaaatccataaccctatctaatgagaaaaataacaaatcccaagaggggcattttacaaaatacttgaccagtagtgcgga

SEQ ID NO: 774270 - DNA, 120 bp, Artificial Sequence
  ENSG00000241343_21 (sequence is synthesized)
aattgtcaaggtcatcaaaaaagtctgagaaattgccacagccaaaggagtctagagacatgatgactaaatgttaggtggtgtcctgcgtggggtcctagaacagaaaaaggacattag

SEQ ID NO: 774271 - DNA, 120 bp, Artificial Sequence
  ENSG00000241343_22 (sequence is synthesized)
ttattttctccctatggcttaagagtatactgagtactatttaaagcaaagcattgcaaaagaatagttgccccactattcatttgcaatgctttgctttaaatagtacttaaagtagtc

SEQ ID NO: 774272 - DNA, 120 bp, Artificial Sequence
  ENSG00000241343_23 (sequence is synthesized)
gtcggggtgagtggaccaccctttaggcggagtccttccttaagctcccgcccgcggctccgaactgagtcctctcagccgcccgagggcgctgcgctgagccttacactctatgattgc

SEQ ID NO: 774273 - DNA, 120 bp, Artificial Sequence
  ENSG00000241343_24 (sequence is synthesized)
aaggattctctgtacgcccagggtaagatggattccgcataatttggtgttaatgtgacatttgtgttgtagaataacatacgagtccgggtctctctccctccacgcctggcttgagcg

SEQ ID NO: 774274 - DNA, 120 bp, Artificial Sequence
  ENSG00000241343_25 (sequence is synthesized)
aacaaataccaattcgttttcccaggaaagcggcgttatgacaggaagcagagtggctatggtgggcaaactaagccgattttccggaaaaaggtgagtggtagttactatttgacgttt

SEQ ID NO: 774275 - DNA, 120 bp, Artificial Sequence
  ENSG00000241343_26 (sequence is synthesized)
atgccgggatgggtccaggctcctgtgtggactcgatatatcagagcaacccaatcttgccgggatcaaccctaaagggaccgggctacggggccaggaattgaagtgatgggttcaaag

SEQ ID NO: 774276 - DNA, 120 bp, Artificial Sequence
  ENSG00000241343_27 (sequence is synthesized)
aggtagagttagccgggggtggagttaatgaggtctcttccctctttggggctcgacggagggaggaagctctgcttgaagcacatggggctggcccaccctgtagtcagaggtagcaag

SEQ ID NO: 774277 - DNA, 120 bp, Artificial Sequence
  ENSG00000241351_0 (sequence is synthesized)
gtcagagccctggggaggaactgctcagttaggacccagagggaaccatggaagccccagctcagcttctcttcctcctgctactctggctcccagataccaccggagaaattgtgttga

SEQ ID NO: 774278 - DNA, 120 bp, Artificial Sequence
  ENSG00000241351_1 (sequence is synthesized)
ggggaaagagccaccctctcctgcagggccagtcagagtgttagcagctacttagcctggtaccaacagaaacctggccaggctcccaggctcctcatctatgatgcatccaacagggcc

SEQ ID NO: 774279 - DNA, 120 bp, Artificial Sequence
  ENSG00000241351_2 (sequence is synthesized)
actggcatcccagccaggttcagtggcagtgggtctgggacagacttcactctcaccatcagcagcctagagcctgaagattttgcagtttattactgtcagcagcgtagcaactggcct

SEQ ID NO: 774280 - DNA, 120 bp, Artificial Sequence
  ENSG00000241360_0 (sequence is synthesized)
ggaggccggcggccggccggctgcatggcgcgctgcgagaggctgcgcggagcggccctgcgcgacgtgctgggccgggcgcagggggtcctgttcgactgtgacggggtgctgtggaac

SEQ ID NO: 774281 - DNA, 120 bp, Artificial Sequence
  ENSG00000241360_1 (sequence is synthesized)
ggggtcctgttcgactgtgacggggtgctgtggaacggcgagcgcgccgtgccgggcgccccggagctgctggagcggctggcgcgggccggcaaggcggctctgtttgtgagcaacaac

SEQ ID NO: 774282 - DNA, 120 bp, Artificial Sequence
  ENSG00000241360_2 (sequence is synthesized)
gtgagcaacaacagccggcgcgcgcggcccgagctggccctgcgcttcgcgcgcctcggcttcggggggctgcgcgccgagcagctcttcagctccgcgctgtgcgccgcgcgcctgctg

SEQ ID NO: 774283 - DNA, 80 bp, Artificial Sequence
  ENSG00000241360_3 (sequence is synthesized)
gcgcctggccggggacccgagcgcgggggacggcgcggccccgcgcgtgcgcgccgtgcttgtgggctacgacgagcact

SEQ ID NO: 774284 - DNA, 120 bp, Artificial Sequence
  ENSG00000241360_4 (sequence is synthesized)
ccgcgcgtgcgcgccgtgcttgtgggctacgacgagcacttctccttcgccaagctgagggaggcgtgcgcgcacctgcgcgaccccgagtgcctactcgtggccaccgaccgtgaccca

SEQ ID NO: 774285 - DNA, 120 bp, Artificial Sequence
  ENSG00000241360_5 (sequence is synthesized)
tggcacccgctgagcgacggcagccggacccctggcaccgggagcctggccgctgcagtggagacagcctcgggacgccaggccctggtggtgggcaagcccagcccctacatgttcgag

SEQ ID NO: 774286 - DNA, 120 bp, Artificial Sequence
  ENSG00000241360_6 (sequence is synthesized)
tgcatcacggagaacttcagcatcgaccccgcacgcacgcttatggtgggtgaccgcctggagaccgacatcctctttggccaccgctgcggcatgaccactgtgctcacgctcacagga

SEQ ID NO: 774287 - DNA, 120 bp, Artificial Sequence
  ENSG00000241360_7 (sequence is synthesized)
gtctcccgcctagaagaggcccaggcctacctagcggccggccagcacgacctcgtgccccattactatgtggagagcatcgcagacttgacagaggggttggaggactgagcccactgc

SEQ ID NO: 774288 - DNA, 120 bp, Artificial Sequence
  ENSG00000241360_8 (sequence is synthesized)
gtccagttctgcaccggggtggggctgggacccggggaaggtttgagggcccttgcaaccccctcccagcagtggctgggcactctttgctgccccagaagctggtcccctatggattca

SEQ ID NO: 774289 - DNA, 120 bp, Artificial Sequence
  ENSG00000241360_9 (sequence is synthesized)
tcttggcctgacccagccaggtggccttatttcttccctgtcacctcccctccttgaaatctgggccctggtgcctgctgaagattccctctatccctgagtacttagtcttctccccct

SEQ ID NO: 774290 - DNA, 120 bp, Artificial Sequence
  ENSG00000241360_10 (sequence is synthesized)
tccctggggcttctagagctctctctgcccctcaggtcctggcccttgggtccttgtcaaccagaggtctagggaaccacaacccttattgtcctgggtggaccaatccaaaggctaagt

SEQ ID NO: 774291 - DNA, 120 bp, Artificial Sequence
  ENSG00000241360_11 (sequence is synthesized)
gatagtgactcatcaatgttgggtcctgtggggtaccagtttaggttcctaagtaatagtgaccctttcacgtcctggagcccgagtggaccaatcggaagcctaagtgacgatgaccct

SEQ ID NO: 774292 - DNA, 120 bp, Artificial Sequence
  ENSG00000241360_12 (sequence is synthesized)
cgcatgtcctaggtccctgggtggacccatcaggaccccaagtgatagtgacccagtggtcttttagatcctcagtagaacagtccagaagcctgagagacagtggccccttgataatct

SEQ ID NO: 774293 - DNA, 120 bp, Artificial Sequence
  ENSG00000241360_13 (sequence is synthesized)
gggtctcacgggaccagctaggggtccaggtttcagtcagtaaataagagtggtccacgtcctaaagacacctctcctttacaaagacttgtgatgctctggggcttctgtggccaagcc

SEQ ID NO: 774294 - DNA, 120 bp, Artificial Sequence
  ENSG00000241360_14 (sequence is synthesized)
ccaccctttcctggtcatggtacccgtacagcgttgatggccacagctcgaaggggggctttcgtgtccccctgtgcggtcagtgttttcagtaccacctctctcccgtgcccacttggc

SEQ ID NO: 774295 - DNA, 120 bp, Artificial Sequence
  ENSG00000241360_15 (sequence is synthesized)
tatttacttatttatttattgtgtgccagtgatggtgggtgggggctgggccttccccgccacctccacccctgttgtgacctgtccttccgtacttaataaagtgcgcgtgggagtgtt

SEQ ID NO: 774296 - DNA, 120 bp, Artificial Sequence
  ENSG00000241360_16 (sequence is synthesized)
atcactttcccgggggacgcggactgggtcagaggtgcgaacatttctgtgccccgctgtgttccaaaggggctgtgccagtttctaacgccagccgcgtgaattcctgcagcagtaacc

SEQ ID NO: 774297 - DNA, 120 bp, Artificial Sequence
  ENSG00000241370_0 (sequence is synthesized)
gagcgcggcggtgatggcggggccggtgaaggaccgcgaggccttccagaggctcaacttcctgtaccaggccgcccattgtgtccttgcccaggaccccgagaaccaggcgctggcgag

SEQ ID NO: 774298 - DNA, 120 bp, Artificial Sequence
  ENSG00000241370_1 (sequence is synthesized)
gttttactgctacactgagaggaccattgcgaagcggctcgtcttgcggcgggatccctcggtgaagaggactctctgtcgaggctgctcttccctcctcgtcccgggcctcacctgcac

SEQ ID NO: 774299 - DNA, 120 bp, Artificial Sequence
  ENSG00000241370_2 (sequence is synthesized)
ctgcctaacatgccagcgcagccaacgcttcctcaatgatcccgggcatttactctggggagacaggcctgaggcccagctcgggagccaagcagattccaaaccactacaacccttgcc

SEQ ID NO: 774300 - DNA, 120 bp, Artificial Sequence
  ENSG00000241370_3 (sequence is synthesized)
aaacacagcccactccatttcagaccgccttcctgaggagaaaatgcagactcagggttccagtaaccagtgatggattcaccccatctcccaaataaagtttacttgttttacattcca

SEQ ID NO: 774301 - DNA, 120 bp, Artificial Sequence
  ENSG00000241370_4 (sequence is synthesized)
ggtggggggcgggcactggaggccaacagcgcctttctcactgtagatggatgttgggtgtgggattcgcaggagtcttccttcttcgggtttggattaagttcctaacgccacttgcac

SEQ ID NO: 774302 - DNA, 120 bp, Artificial Sequence
  ENSG00000241370_5 (sequence is synthesized)
aaactagggtttgggctcggctgttttttttttttttcttccagtgtgggcaataaataataacttttaagaggcaaccccacccatgcacaataatagatgttgttcggctttgtggag

SEQ ID NO: 774303 - DNA, 120 bp, Artificial Sequence
  ENSG00000241370_6 (sequence is synthesized)
gacgattcccatcaccattcatttattaagcaaatacttattttctaaaatgtgtcaggctgcaggggacagcgctggaccgtacagacctgcctaacatgccagcgcagccaacgcttc

SEQ ID NO: 774304 - DNA, 120 bp, Artificial Sequence
  ENSG00000241370_7 (sequence is synthesized)
gagcgcggcggtgatggcggggccggtgaaggaccgcgaggccttccagaggctcaacttcctgtaccaggtgagtctgcgacaagggccccacggggacggtgctcggcgtcccagagt

SEQ ID NO: 774305 - DNA, 120 bp, Artificial Sequence
  ENSG00000241370_8 (sequence is synthesized)
gccctggagcgcggcggtgatggcggggccggtgaaggaccgcgaggccttccagaggctcaacttcctgtaccagggatccctcggtgaagaggactctctgtcgaggctgctcttccc

SEQ ID NO: 774306 - DNA, 120 bp, Artificial Sequence
  ENSG00000241370_9 (sequence is synthesized)
taagaaacaaaatggtgtagaaaaagattaactgggggagtagaatgctcacttactcatgccagtggtggcgaagtttatgataagcaaagggagtgagagatggaaattctaggcatg

SEQ ID NO: 774307 - DNA, 120 bp, Artificial Sequence
  ENSG00000241370_10 (sequence is synthesized)
tgtgcagactctgagacaagagagcttgtggtgctgtcaaagaaatgagagttcaggaggctggagtttgaggtaggagggcaaaacatgagactggagggggaaacaggccagttcttg

SEQ ID NO: 774308 - DNA, 120 bp, Artificial Sequence
  ENSG00000241370_11 (sequence is synthesized)
aagtcttgttagggagtttgaactttatcttaaagagttccaggaaatcgatggagcttatgccgaggcctgacaccatcaaatgtgcattcaaattgggggtgtggtgggggagcgggg

SEQ ID NO: 774309 - DNA, 120 bp, Artificial Sequence
  ENSG00000241370_12 (sequence is synthesized)
atacctactgaaaaacactggaggcaaaactggcagcaagagaccgttacttctaaacgtggacagtctttttcccatgttcaccctaggctgcaggggacagcgctggaccgtacagac

SEQ ID NO: 774310 - DNA, 120 bp, Artificial Sequence
  ENSG00000241399_0 (sequence is synthesized)
acccgccgtcatgctccgggccgcgctgcccgcgctcctgctgccgttgctgggcctcgccgctgctgccgtcgcggactgtccttcatctacttggattcagttccaagacagttgtta

SEQ ID NO: 774311 - DNA, 120 bp, Artificial Sequence
  ENSG00000241399_1 (sequence is synthesized)
catttttctccaagaagccatcaaagtagaaagcatagaggatgtcagaaatcagtgtactgaccatggagcggacatgataagcatacataatgaagaagaaaatgcttttatactgga

SEQ ID NO: 774312 - DNA, 120 bp, Artificial Sequence
  ENSG00000241399_2 (sequence is synthesized)
tactttgaaaaagcaatggaaaggcccagatgatatcctactaggcatgttttatgacacagatgatgcgagtttcaagtggtttgataattcaaatatgacatttgataagtggacaga

SEQ ID NO: 774313 - DNA, 120 bp, Artificial Sequence
  ENSG00000241399_3 (sequence is synthesized)
ccaagatgatgatgaggatttagttgacacctgtgcttttctgcacatcaagacaggtgaatggaaaaaaggaaattgtgaagtttcttctgtggaaggaacactatgcaaaacagctat

SEQ ID NO: 774314 - DNA, 120 bp, Artificial Sequence
  ENSG00000241399_4 (sequence is synthesized)
cccatacaaaaggaaatatttatcagataaccacattttaatatcagcattggtgattgctagcacggtaattttgacagttttgggagcaatcatttggttcctgtacaaaaaacattc

SEQ ID NO: 774315 - DNA, 120 bp, Artificial Sequence
  ENSG00000241399_5 (sequence is synthesized)
tgattctcgtttcaccacagttttttcaaccgcaccccaatcaccttataatgaagactgtgttttggtagttggagaagaaaatgaatatcctgttcaatttgactaagtttttggtaa

SEQ ID NO: 774316 - DNA, 120 bp, Artificial Sequence
  ENSG00000241399_6 (sequence is synthesized)
tcttgcactaagacatcaacaaaatgccctggcagagataacttgggaaagattttaatataaaacttgacattggatattagagctttaatggtattccttattccagtaacattttta

SEQ ID NO: 774317 - DNA, 120 bp, Artificial Sequence
  ENSG00000241399_7 (sequence is synthesized)
tgtactcatctgctgtgaaaagtctttaggttcattaaaaaaacaggttttagaaatgatcttagatctaatatagtgattttaagcatcccgtcaaaggcagaatctgtcacttgaatg

SEQ ID NO: 774318 - DNA, 120 bp, Artificial Sequence
  ENSG00000241399_8 (sequence is synthesized)
aaggaaagcttaaagcccaagcagataaaaataaaagcccagcctatttgtcttgcctgctgtatcttccctatttagttgacccactttagtttatatgtttattagtaaacatgaaat

SEQ ID NO: 774319 - DNA, 120 bp, Artificial Sequence
  ENSG00000241399_9 (sequence is synthesized)
ggggaataagtgattttaagtacatcccatacatttaaatatctttgataattgttatttttttggcagataattcctctagaatgtgtatctttttatgatttagatgaagaaaatttt

SEQ ID NO: 774320 - DNA, 120 bp, Artificial Sequence
  ENSG00000241399_10 (sequence is synthesized)
acaacttttaacaccccacaccaattttagtttcattacttttacacacaccattttatcacaaatgactcaagttttaatgaatgtttataaattatttgaaacaaaatatgatcgctg

SEQ ID NO: 774321 - DNA, 120 bp, Artificial Sequence
  ENSG00000241399_11 (sequence is synthesized)
tgtccaggatggcatagagaaagctggcaattaggttaacacttacatattatagtgcccctttaaggatttctctcttgccaccataccttttgtactttcccctatacaagatgtatc

SEQ ID NO: 774322 - DNA, 120 bp, Artificial Sequence
  ENSG00000241399_12 (sequence is synthesized)
tcattctcctcaagcatttataaatttttccttcaatgacatgaaaactgtgcaagcaaaaaccgaagaaaaacacttaagtacaactgtagtgacagtgatcaaagttttcagtgcatt

SEQ ID NO: 774323 - DNA, 120 bp, Artificial Sequence
  ENSG00000241399_13 (sequence is synthesized)
tattgtacattttaagaaaaaggtgaaaatcatttggggagtaaaaaaatgaaaaagctgaaacgagtaattttcctcaccatcaataaaccaaaaacaggaaagataaagaatgtataa

SEQ ID NO: 774324 - DNA, 120 bp, Artificial Sequence
  ENSG00000241399_14 (sequence is synthesized)
atttcacgtaaattagtcacgtatcacttatcaatggggatacgttctaagaaatgcatagttagggaatcttgtgtgaaaatcagcttgtatttacacaaacccagatggtagagccta

SEQ ID NO: 774325 - DNA, 120 bp, Artificial Sequence
  ENSG00000241399_15 (sequence is synthesized)
ttttgtcccaaacctacacagcatgttactgtgctgaatactgcagacaattgtaacacaatatttgtgtatctaaatatagaaaaggtacagtaaaaatatggtctactaaggaaacac

SEQ ID NO: 774326 - DNA, 120 bp, Artificial Sequence
  ENSG00000241399_16 (sequence is synthesized)
tcaattatcttactttcttctggggagatagatagatatactatctcactagcttgactaatggcaacaaagttccagcttgtgtagtctctttttattgaccacatgaatcgaaaacac

SEQ ID NO: 774327 - DNA, 120 bp, Artificial Sequence
  ENSG00000241399_17 (sequence is synthesized)
tcatcacaattaatggcactatcattaatgagacatgagtaactaaaaagtgatagaaaactattaacagtgcggctacatggtactgaaaatgcaggcattacaccagctgttacacaa

SEQ ID NO: 774328 - DNA, 120 bp, Artificial Sequence
  ENSG00000241399_18 (sequence is synthesized)
gcacaagcatgctctgtaagagctttacatttctgagattttgtatagtgattgagatgtctattttattattgatagactattactaatgtcaatattgaacactaccctggaattcct

SEQ ID NO: 774329 - DNA, 120 bp, Artificial Sequence
  ENSG00000241399_19 (sequence is synthesized)
gcctggttttcctacccaaattgtaccactccttgaagaactacaggcacagtaaaaaaaatatggcgtattatgtgaactaaaagagttctaaaggagttcttaaaggagtggtagaat

SEQ ID NO: 774330 - DNA, 120 bp, Artificial Sequence
  ENSG00000241399_20 (sequence is synthesized)
ttgggtaggaaagtgattaagtccaacttaaaaccaacagtctcaaacgtctacaactacaatgtccaatgagccactagccacatgaggctatttaagtaaatttagtttaaaatccag

SEQ ID NO: 774331 - DNA, 120 bp, Artificial Sequence
  ENSG00000241399_21 (sequence is synthesized)
ttttcgaattacattagccacattgtcaagtgttcaaatcacaggtggttagtggctactgtactgggcaacatacattatagaacattttcattataggaagttttattgggcagtgct

SEQ ID NO: 774332 - DNA, 120 bp, Artificial Sequence
  ENSG00000241399_22 (sequence is synthesized)
gctcttaaatcctaccttccactcaactcccatacaactttcttttgtacattttgatactttctacctaatggcagctcttccaaaatagctgctttaaactctgatttaattttcaat

SEQ ID NO: 774333 - DNA, 120 bp, Artificial Sequence
  ENSG00000241399_23 (sequence is synthesized)
atttggtttcatttttcaacaggccaagaggcctctggtaatgaagtgctatatatatatatatgatggagtctcactgtgctgcccaggctacagtgcagtggctcgatcttggctctc

SEQ ID NO: 774334 - DNA, 77 bp, Artificial Sequence
  ENSG00000241399_24 (sequence is synthesized)
gctgcccaggctacagtgcagtggctcgatcttggctctctccaatctccgccttgcaggtcacagacatctgtcac

SEQ ID NO: 774335 - DNA, 120 bp, Artificial Sequence
  ENSG00000241399_25 (sequence is synthesized)
tatataccagaacatctataacaggcaccttatctactcattagtgaagagataattggattacacaggcaggcttgtttactacatccagaatgtagaaactgctttcttcaacatctt

SEQ ID NO: 774336 - DNA, 120 bp, Artificial Sequence
  ENSG00000241399_26 (sequence is synthesized)
ggttctagctagtaataacaatataattctttggcagatattcagaataacattttaaactacattttcttagaaaattgcattcttgtagtgagcagtgtatggtctcttttgttcaga

SEQ ID NO: 774337 - DNA, 120 bp, Artificial Sequence
  ENSG00000241399_27 (sequence is synthesized)
atttaaaactgataaccaatgaaagccttttctcttattcctctaccgtcatttacatgataatctgaagctaatatgacaatatttaaatactaagtggtactagggaactacaagaat

SEQ ID NO: 774338 - DNA, 120 bp, Artificial Sequence
  ENSG00000241399_28 (sequence is synthesized)
actgtaaagcttaagccattgttatcactgtcatttagcatttaataacaaaactatacagaattatgtgcataccaatgaatgttttgtaccatctagttaaattttttaaataaagtt

SEQ ID NO: 774339 - DNA, 120 bp, Artificial Sequence
  ENSG00000241399_29 (sequence is synthesized)
ttatgggttaagcagaagacaactgtcatactgaattttattaaaagtatatatacttcaaattcaaagcatcccttaggacccacagaatatattaaaactaccacccttaaattttat

SEQ ID NO: 774340 - DNA, 120 bp, Artificial Sequence
  ENSG00000241399_30 (sequence is synthesized)
atttttgctttaagacagacaatgcaaaggtaactggcaagaggtgagcaaatgttttagaacatttatattattgcttaaaatgagatttgaaattgtaataaaattcttggttatgaa

SEQ ID NO: 774341 - DNA, 75 bp, Artificial Sequence
  ENSG00000241399_31 (sequence is synthesized)
gacatgataagcatacataatgaagaagaaaatgcttttatactggatactttgaaaaagcaatggaaaggccca

SEQ ID NO: 774342 - DNA, 120 bp, Artificial Sequence
  ENSG00000241404_0 (sequence is synthesized)
accagtctgagctgcttctgctgaggctggtctgcttgaagcctcccaggagaaagaagccagcctgtagggtccagcgtcaaagcgaatcatggggtccagggctgagctgtgcactct

SEQ ID NO: 774343 - DNA, 120 bp, Artificial Sequence
  ENSG00000241404_1 (sequence is synthesized)
cttaggcggattctccttcctcctgctactgataccaggcgagggggccaagggtggatccctcagagagagtcagggagtctgctccaagcagacactggtggtcccgctccactacaa

SEQ ID NO: 774344 - DNA, 120 bp, Artificial Sequence
  ENSG00000241404_2 (sequence is synthesized)
cgagtcctacagccaaccagtgtacaagccctacctgaccttgtgcgctgggaggcgcatctgcagcacttacaggaccatgtaccgcgttatgtggcgggaggtgaggcgggaggttca

SEQ ID NO: 774345 - DNA, 120 bp, Artificial Sequence
  ENSG00000241404_3 (sequence is synthesized)
gcagacccatgcagtgtgctgccagggctggaagaagcggcacccgggggcgctcacctgtgaagccatctgcgccaagccttgcctgaacggaggcgtctgcgttaggcctgaccagtg

SEQ ID NO: 774346 - DNA, 120 bp, Artificial Sequence
  ENSG00000241404_4 (sequence is synthesized)
cgagtgcgcccccggctggggagggaagcactgtcatgtggacgtggatgaatgtaggaccagcatcaccctctgctcgcaccattgttttaatacggcaggcagcttcacctgcggctg

SEQ ID NO: 774347 - DNA, 120 bp, Artificial Sequence
  ENSG00000241404_5 (sequence is synthesized)
aggcggaaaaagatgagcgcgctctgaagcaggagattcacgagctgcgagggcgcctggagcggctggagcagtgggccggtcaggctggggcctgggtcagagcggtgctgcccgtgc

SEQ ID NO: 774348 - DNA, 120 bp, Artificial Sequence
  ENSG00000241404_6 (sequence is synthesized)
cgcctgaagagctgcagccagaacaggtggctgagctgtggggccggggtgaccggatcgaatctctcagcgaccaggtgctgctgctggaggagaggctaggtgcctgctcctgtgagg

SEQ ID NO: 774349 - DNA, 120 bp, Artificial Sequence
  ENSG00000241404_7 (sequence is synthesized)
acaacagcctgggcctcggcgtcaatcatcgataagaagcctctacagcacccctgccccctaatttatacagaaaccggacccactaatcctctgggattggccgactgtgagctgcag

SEQ ID NO: 774350 - DNA, 120 bp, Artificial Sequence
  ENSG00000241404_8 (sequence is synthesized)
ataaggctatcagccaccaaagagcaatgaacaatggaaacttcagagagctgaagaaagggggaggcctgtgttcttggcctgcccctgagtcttctggctgggggcaggttgcctggg

SEQ ID NO: 774351 - DNA, 120 bp, Artificial Sequence
  ENSG00000241404_9 (sequence is synthesized)
caagaactgcttcttcaattccttaacaaatgcaaccaccaacacccagatctctctctctctttattttcagtttttttgctgttatccagataattaataaaaaccaaccacgcaaaa

SEQ ID NO: 774352 - DNA, 120 bp, Artificial Sequence
  ENSG00000241404_10 (sequence is synthesized)
gctgcttctgctgaggctggtctgcttgaagcctcccaggagaaagaagccaggtgggaatggagagagagaggaagcctgtagggtccagcgtcaaagcgaatcatggggtccagggct

SEQ ID NO: 774353 - DNA, 82 bp, Artificial Sequence
  ENSG00000241404_11 (sequence is synthesized)
gccgagatcgcaccactgcactccagccagggtgacagcgagactccgtctccctagctatataccctcacaccctacaaaa

SEQ ID NO: 774354 - DNA, 65 bp, Artificial Sequence
  ENSG00000241404_12 (sequence is synthesized)
caaaaaaaaaaccaaaaaaaaaaaaccctagctatataccctcacaccctacaaaacaaaacaaa

SEQ ID NO: 774355 - DNA, 120 bp, Artificial Sequence
  ENSG00000241404_13 (sequence is synthesized)
atcacttgaacctggggggcggaggtcgtgcggtgaggcaagaacatgccattgcattccagcctgggtagtaagagcgaaactccttctcaaaaacaaaaacaaaaaaaaacccaaaaa

SEQ ID NO: 774356 - DNA, 120 bp, Artificial Sequence
  ENSG00000241404_14 (sequence is synthesized)
ggagggttgactgtgtgtccctccaggttgtgcagaggggattagaagtaagtaggttagaggggaggtggagggagtgtgctggggtgtgagcttttatgatgctgaaaggatcatgat

SEQ ID NO: 774357 - DNA, 120 bp, Artificial Sequence
  ENSG00000241404_15 (sequence is synthesized)
atgctaaggacaggatagtgttgggttgtacacacaggtgtaggcaatcctggtggctagtatgtaaaagtgaatgtcctgactcccttagagggtacctgcagagtgcccttggaggga

SEQ ID NO: 774358 - DNA, 120 bp, Artificial Sequence
  ENSG00000241404_16 (sequence is synthesized)
ctgctgggggtggggcttcacaggaggcaaaacataactgtaagtttagaatgggggtgagaggctgtcatctggagggagagcggggggcctcagtagcctcttgagggaagtgggact

SEQ ID NO: 774359 - DNA, 120 bp, Artificial Sequence
  ENSG00000241404_17 (sequence is synthesized)
ggtgagccaagcctgctgggtggggcgaggccagacgtcactgtcaataccctgaggcatctcttcctttctagtgggccggtcaggctggggcctgggtcagagcggtgctgcccgtgc

SEQ ID NO: 774360 - DNA, 120 bp, Artificial Sequence
  ENSG00000241404_18 (sequence is synthesized)
ccccctctctcagccccttccttttttcggtaactagacgtggatgaatgtaggaccagcatcaccctctgctcgcaccattgttttaatacggcaggcagcttcacctgcggctgcccc

SEQ ID NO: 774361 - DNA, 120 bp, Artificial Sequence
  ENSG00000241468_0 (sequence is synthesized)
gcggacaccaggactccaaaatggcgtcagttgtaccagtgaaggacaagaaacttctggaggtcaaactgggggagctgccaagctggatcttgatgcgggacttcagtcctagtggca

SEQ ID NO: 774362 - DNA, 120 bp, Artificial Sequence
  ENSG00000241468_1 (sequence is synthesized)
agcatctcggggattaccatggtgctggcatgctacgtgctctttagctactccttttcctacaagcatctcaagcacgagcggctccgcaaataccactgaagaggacacactctgcac

SEQ ID NO: 774363 - DNA, 120 bp, Artificial Sequence
  ENSG00000241468_2 (sequence is synthesized)
cacagcggacaccaggactccaaaatggcgtcagttggtgagtgtccggccccagcagtgctttgaaagcatgaagcataccctgcactccctggctccctgcaggattccagcctcctg

SEQ ID NO: 774364 - DNA, 120 bp, Artificial Sequence
  ENSG00000241468_3 (sequence is synthesized)
ccgggctccctgcacaggaccagagccagcctcacgctgacccacagagctgcttcccgggaaacctggaagtgcagacctgagcggggaccctggggactccttccagcagggagcaca

SEQ ID NO: 774365 - DNA, 120 bp, Artificial Sequence
  ENSG00000241468_4 (sequence is synthesized)
tctctgccagactccgtgccagccccactgactccacccgggctcccgcttctccacgcaggccactcaggacagctgaggccacgcattctctaagcagggctcaaggcaagtttgttg

SEQ ID NO: 774366 - DNA, 120 bp, Artificial Sequence
  ENSG00000241468_5 (sequence is synthesized)
agatgtcaccaggatcatggctcctggagagaaggaaccagctcgggcctgagaggcaatgcccacgctggagggagaagtgggtttcagggagaaggtggacgtggacagaaaccaacc

SEQ ID NO: 774367 - DNA, 120 bp, Artificial Sequence
  ENSG00000241468_6 (sequence is synthesized)
acggacataatgcagccagctgcacaactcgctgcttccgggtcaccctcgttagcctcaaatccgagtgattgaaagagctccaaacactgaagcactccaaagtgatgcgcggggcca

SEQ ID NO: 774368 - DNA, 120 bp, Artificial Sequence
  ENSG00000241468_7 (sequence is synthesized)
ggcacagcggacaccaggactccaaaatggcgtcagttgtgggtattttttctcactcttccgtttcagtaccagtgaaggacaagaaacttctggaggtcaaactgggggagctgccaa

SEQ ID NO: 774369 - DNA, 120 bp, Artificial Sequence
  ENSG00000241468_8 (sequence is synthesized)
actgcaggaccctcggatttttgctgtccaggcacctcgcccttcgcttcatggccttctagtagttccagggtgttcgcagttgtgacctgcttcccgtgagcctctgctctacgcccc

SEQ ID NO: 774370 - DNA, 120 bp, Artificial Sequence
  ENSG00000241468_9 (sequence is synthesized)
tggatggggcgtgcattccctacccagcagccctcgcgcggtccggcacagcggacaccaggactccaaaatggcgtcagttggtgagtgtccggccccagtaccagtgaaggacaagaa

SEQ ID NO: 774371 - DNA, 120 bp, Artificial Sequence
  ENSG00000241468_10 (sequence is synthesized)
atattacagccaagaacatgtttcctgttgcttggaatcagtatgtctgcctctgtcttagagaaatcctaagacttctttaagaggaaaatgaattggaaccgtagtgggcattagtct

SEQ ID NO: 774372 - DNA, 120 bp, Artificial Sequence
  ENSG00000241468_11 (sequence is synthesized)
ataatatgatgctctcctccctgccagaacttcaggacaaatatttgaaatggcctatcttggcctggtgtggtggcttatgcctgtaatcccggcacttcgggaggccaaggctggagg

SEQ ID NO: 774373 - DNA, 120 bp, Artificial Sequence
  ENSG00000241468_12 (sequence is synthesized)
ctttcctgtccgccacgttactgcttttttcgagacccttttctggagttactcccagcaagctgttactcagacgtcctgttggttaataaagctgtccctgcagcagttctgctattg

SEQ ID NO: 774374 - DNA, 120 bp, Artificial Sequence
  ENSG00000241468_13 (sequence is synthesized)
tatagactcagtcttaaaatagtgggcttgatgtgacatatttcttcataatattgtgtatgtgcagcctctgtgtaattgcattatgcacctttattgcatagttgaagcagtggcagg

SEQ ID NO: 774375 - DNA, 120 bp, Artificial Sequence
  ENSG00000241468_14 (sequence is synthesized)
tctttagctactccttttcctacaagcatctcagtgagtgcctctgcggcgtcttgcctttagttcccatgagagggtggtggtgactgatttcattagatacagcagcccaccttcttc

SEQ ID NO: 774376 - DNA, 120 bp, Artificial Sequence
  ENSG00000241468_15 (sequence is synthesized)
tgaggctgagggacctttagttaaagttccttatgtttccacctaaaagaattggagggacctatcagagtacagtatgtgggatattgtttgaaatgagaaaattgtgacaaagagaac

SEQ ID NO: 774377 - DNA, 120 bp, Artificial Sequence
  ENSG00000241468_16 (sequence is synthesized)
gggacttcagtcctagtggcattttcggagcgtttcaaagaggtcagagccttgtggatgtctgtaaatgaaagcaaatctctgggtcttcagatctcttttttgccatgaattaatttg

SEQ ID NO: 774378 - DNA, 120 bp, Artificial Sequence
  ENSG00000241476_0 (sequence is synthesized)
actttctctctctttcgattcttccatactcagagtacgcacggtctgattttctctttggattcttccaaaatcagagtcagactgctcccggtgccatgaacggagacgacgcctttg

SEQ ID NO: 774379 - DNA, 120 bp, Artificial Sequence
  ENSG00000241476_1 (sequence is synthesized)
caaggagacccacggttggtgctcaaataccagagaagatccaaaaggccttcgatgatattgccaaatacttctctaaggaagagtgggaaaagatgaaagcctcggagaaaatcttct

SEQ ID NO: 774380 - DNA, 120 bp, Artificial Sequence
  ENSG00000241476_2 (sequence is synthesized)
atgtgtatatgaagagaaagtatgaggctatgactaaactaggtttcaaggccaccctcccacctttcatgtgtaataaacgggccgaagacttccaggggaatgatttggataatgacc

SEQ ID NO: 774381 - DNA, 120 bp, Artificial Sequence
  ENSG00000241476_3 (sequence is synthesized)
ctaaccgtgggaatcaggttgaacgtcctcagatgactttcggcaggctccagggaatctccccgaagatcatgcccaagaagccagcagaggaaggaaatgattcggaggaagtgccag

SEQ ID NO: 774382 - DNA, 120 bp, Artificial Sequence
  ENSG00000241476_4 (sequence is synthesized)
aagcatctggcccacaaaatgatgggaaagagctgtgccccccgggaaaaccaactacctctgagaagattcacgagagatctggacccaaaaggggggaacatgcctggacccacagac

SEQ ID NO: 774383 - DNA, 89 bp, Artificial Sequence
  ENSG00000241476_5 (sequence is synthesized)
agatgacgagtaactcccctcagggatacgacacatgcccatgatgagaagcagaacgtggtgacctttcacgaacatgggcatggctg

SEQ ID NO: 774384 - DNA, 120 bp, Artificial Sequence
  ENSG00000241476_6 (sequence is synthesized)
tttcttagtgtgccaagagttcgatgttagcgtttacgttgtattttcttacactgtgtcattctgttagatactaacattttcattgatgagcaagacatacttaatgcatattttggt

SEQ ID NO: 774385 - DNA, 120 bp, Artificial Sequence
  ENSG00000241476_7 (sequence is synthesized)
ttgtgtatccatgcacctaccttagaaaacaagtattgtcggttacctctgcatggaacagcattaccctcctctctccccagatgtgactactgagggcagttctgagtgtttaatttc

SEQ ID NO: 774386 - DNA, 78 bp, Artificial Sequence
  ENSG00000241476_8 (sequence is synthesized)
cagatgtgactactgagggcagttctgagtgtttaatttcagattttttcctctgcatttacacacacacgcacacaa

SEQ ID NO: 774387 - DNA, 120 bp, Artificial Sequence
  ENSG00000241476_9 (sequence is synthesized)
ttcccattgccatgcgtcctggtcaagctcccctcactctgtttcctggtcagcatgtactcccctcatccgattcccctgtagcagtcactgacagttaataaacctttgcaaacgttc

SEQ ID NO: 774388 - DNA, 120 bp, Artificial Sequence
  ENSG00000241484_0 (sequence is synthesized)
ggccggcggggtccgtggccagagctgcagagagacaaggcggcggcggctgctgtgctgggtgcagtgaggaagaggccctcggtggtgcccatggctggccaggatcctgcgctgagc

SEQ ID NO: 774389 - DNA, 120 bp, Artificial Sequence
  ENSG00000241484_1 (sequence is synthesized)
acgagtcacccgttctacgacgtggccagacatggcattctgcaggtggcaggggatgaccgctttggaagacgtgttgtcacgttcagctgctgccggatgccaccctcccacgagctg

SEQ ID NO: 774390 - DNA, 120 bp, Artificial Sequence
  ENSG00000241484_2 (sequence is synthesized)
gaccaccagcggctgctggagtatttgaagtacacactggaccaatacgttgagaacgattataccatcgtctatttccactacgggctgaacagccggaacaagccttccctgggctgg

SEQ ID NO: 774391 - DNA, 120 bp, Artificial Sequence
  ENSG00000241484_3 (sequence is synthesized)
ctccagagcgcatacaaggagttcgataggaagtacaagaagaacttgaaggccctctacgtggtgcaccccaccagcttcatcaaggtcctgtggaacatcttgaagcccctcatcagt

SEQ ID NO: 774392 - DNA, 120 bp, Artificial Sequence
  ENSG00000241484_4 (sequence is synthesized)
cacaagtttgggaagaaagtcatctatttcaactacctgagtgagctccacgaacaccttaaatacgaccagctggtcatccctcccgaagttttgcggtacgatgagaagctccagagc

SEQ ID NO: 774393 - DNA, 120 bp, Artificial Sequence
  ENSG00000241484_5 (sequence is synthesized)
ctgcacgagggccggacgccgcctcccaccaagacaccaccgccgcggcccccgctgcccacacagcagtttggcgtcagtctgcaatacctcaaagacaaaaatcaaggcgaactcatc

SEQ ID NO: 774394 - DNA, 120 bp, Artificial Sequence
  ENSG00000241484_6 (sequence is synthesized)
acgtacctgagagagaaaggcctgcgcaccgagggcctgttccggagatccgccagcgtgcagaccgtccgcgagatccagaggctctacaaccaagggaagcccgtgaactttgacgac

SEQ ID NO: 774395 - DNA, 120 bp, Artificial Sequence
  ENSG00000241484_7 (sequence is synthesized)
tacggggacattcacatccctgccgtgatcctgaagaccttcctgcgagagctgccccagccgcttctgaccttccaggcctacgagcagattctcgggatcacctgtgtggagagcagc

SEQ ID NO: 774396 - DNA, 120 bp, Artificial Sequence
  ENSG00000241484_8 (sequence is synthesized)
ctgcgtgtcactggctgccgccagatcttacggagcctcccagagcacaactacgtcgtcctccgctacctcatgggcttcctgcatgcggtgtcccgggagagcatcttcaacaaaatg

SEQ ID NO: 774397 - DNA, 120 bp, Artificial Sequence
  ENSG00000241484_9 (sequence is synthesized)
aacagctctaacctggcctgtgtcttcgggctgaatttgatctggccatcccagggggtctcctccctgagtgcccttgtgcccctgaacatgttcactgaactgctgatcgagtactat

SEQ ID NO: 774398 - DNA, 120 bp, Artificial Sequence
  ENSG00000241484_10 (sequence is synthesized)
gaaaagatcttcagcaccccggaggcacctggggagcacggcctggcaccatgggaacaggggagcagggcagcccctttgcaggaggctgtgccacggacacaagccacgggcctcacc

SEQ ID NO: 774399 - DNA, 120 bp, Artificial Sequence
  ENSG00000241484_11 (sequence is synthesized)
aagcctaccctacctccgagtcccctgatggcagccagaagacgtctctagtgttgcgaacactctgtatatttcgagctacctcccacacctgtctgtgcacttgtatgttttgtaaac

SEQ ID NO: 774400 - DNA, 120 bp, Artificial Sequence
  ENSG00000241484_12 (sequence is synthesized)
ttggcatctgtaaaaataaccagccattagatgaattcagaaccttctaatgaaaactccatgcctctggtccttggactcttgtccatggttcctgagctgtggaccgggatagaataa

SEQ ID NO: 774401 - DNA, 120 bp, Artificial Sequence
  ENSG00000241484_13 (sequence is synthesized)
caagccttcagggacgtgggtgtgggctgcttgtggcaggaggaggcattgtggccacaaggggtcgcagagtgtgcagtgggggaggggtctggtagggcggagggtggagggtgagca

SEQ ID NO: 774402 - DNA, 120 bp, Artificial Sequence
  ENSG00000241484_14 (sequence is synthesized)
agggcggagggtggagggtgagcaaatgtggggcagtggaggttcacctcccctctgggccaagctctggaatcccgggcaggggttggcactcatttttttttttctttctttcttttt

SEQ ID NO: 774403 - DNA, 120 bp, Artificial Sequence
  ENSG00000241484_15 (sequence is synthesized)
ctgctgggcctcggttttctatctgtaaagtggggggattatttccagcgtacggctggtcatgaagatgaacttggaccacgtgcataaagccacaggtgatggatgctcactcagcag

SEQ ID NO: 774404 - DNA, 120 bp, Artificial Sequence
  ENSG00000241484_16 (sequence is synthesized)
gtgtcgcctccgaggaacgctgctgcctgtgcctcccagctcgggctggactggccaaggaggctgctttttgctaagtgcctgaggattttctaggagaaggtggcacagaggctcacc

SEQ ID NO: 774405 - DNA, 120 bp, Artificial Sequence
  ENSG00000241484_17 (sequence is synthesized)
tctggggtggccgaggtgacgtgtacccaccctcctcctgttgccatctggcactgcagggcaagagagggggttgttggggctgcccccaccatgcacagccagtccacactgtccaaa

SEQ ID NO: 774406 - DNA, 120 bp, Artificial Sequence
  ENSG00000241484_18 (sequence is synthesized)
ggcagaggaggtggggtcggtcagggttgtccaggccggtctctcaggcacagctgggccaggaggcagggtgatggggggctctctagatttggggctcatcatcctggtcaaagtcct

SEQ ID NO: 774407 - DNA, 120 bp, Artificial Sequence
  ENSG00000241484_19 (sequence is synthesized)
gcctgtaaccgctcccaggccccagaccctcagctctctcatctagaaagggctctcggcatttctccccagatcattgtaggatgccaagcatatatcacaggaactgagcagctatag

SEQ ID NO: 774408 - DNA, 120 bp, Artificial Sequence
  ENSG00000241484_20 (sequence is synthesized)
atgggtcaaatgctcagtgtggctgagcacagatgactcgtaaaaaactccgtaacagcatctcaaaacactggtgaatgctaaggaaagtgatgcctcgaaagaaccataaaacccctc

SEQ ID NO: 774409 - DNA, 120 bp, Artificial Sequence
  ENSG00000241484_21 (sequence is synthesized)
aggccttcatctaagtcatcgaacaccgtcttttcaaatgggactacctccagcgccctcctttcttcttggagcactaacagtcgaaggggggagctgattttggtgtgaattctgaag

SEQ ID NO: 774410 - DNA, 120 bp, Artificial Sequence
  ENSG00000241484_22 (sequence is synthesized)
cagctcggttaagatatcgtaaagacaaatcttgaatcttaaaatcaatgtttctaccccactgtgtattcaagaatcacatttgcccaaagggcagcctggcctttgtcctggcccctg

SEQ ID NO: 774411 - DNA, 120 bp, Artificial Sequence
  ENSG00000241484_23 (sequence is synthesized)
gggggtgacttctgaaccttgcactttcccaaggggcaggagttacctttgtcactcatcaggggccctgatggtttatggtaactcatggttatggtgtgactcaagataggggtgtag

SEQ ID NO: 774412 - DNA, 120 bp, Artificial Sequence
  ENSG00000241484_24 (sequence is synthesized)
gggtggccattccagaaagaccaattacatggttagagggtgcgggctttgagtgatgtgagaccagcctgacctctggggagggcatggggctggagactgatttcagtctcaaggcgt

SEQ ID NO: 774413 - DNA, 120 bp, Artificial Sequence
  ENSG00000241484_25 (sequence is synthesized)
cctgtcaaggtcgctggaccccaaactcccctcaaaggcaaatttacacccatttactcagcagtgctcctaagcgcctgccaaatgcaacgccctttctgagatggggaaggtctctcc

SEQ ID NO: 774414 - DNA, 120 bp, Artificial Sequence
  ENSG00000241484_26 (sequence is synthesized)
tacaccctggaagaccatgaaagatgttgagggctgactgactttggctagtggatgggaagcctgggagagttcagagccaggctgagcctcatggagacaaatttgatcatgcgcata

SEQ ID NO: 774415 - DNA, 120 bp, Artificial Sequence
  ENSG00000241484_27 (sequence is synthesized)
gaggtacctatctggtggagacagaaggaggcactacattcagcagcatcctaccagccggggccagagcaggcaagatggacaatgctccatcacctgaatgcgccaggctgtgtccta

SEQ ID NO: 774416 - DNA, 120 bp, Artificial Sequence
  ENSG00000241484_28 (sequence is synthesized)
gagagaagcttccagaagcctcccaacttcattagcccctgcagagggatgatgactccagcctctgtaggttcctgcttgagaaaactcaatgctgccaggcgaacttactgtttgttc

SEQ ID NO: 774417 - DNA, 120 bp, Artificial Sequence
  ENSG00000241484_29 (sequence is synthesized)
aacttactgtttgttccagccaaaacctggtgacagggagataggccctggaacccctctttgagcagcagttcctttagaaagcttgcaattgtgggccaggcatggtggctcacacct

SEQ ID NO: 774418 - DNA, 120 bp, Artificial Sequence
  ENSG00000241484_30 (sequence is synthesized)
actgtctcctgcaaggctttgaagcaagaatgctgtagctgtgtccctgtgccctgggaggggtgcatacctcaggaggtgcccctgcattgccagggagggggatgtgtccaggtggga

SEQ ID NO: 774419 - DNA, 120 bp, Artificial Sequence
  ENSG00000241484_31 (sequence is synthesized)
cctggtgcccccagaagtttgcttcccagctgtttgcttggcttgtaacagcaggcaaggggcagctccccgaagggtgtgaacacagggtcccagcctgggtctcgctcctgtgcccct

SEQ ID NO: 774420 - DNA, 120 bp, Artificial Sequence
  ENSG00000241484_32 (sequence is synthesized)
agaaggcaggcccaggggcctcggctgggacacgctgggcctcccctgcttggcacccggggtcctgcaccctgccagggaggccaacctgatcctgggtctgcatgcgaggccctgcca

SEQ ID NO: 774421 - DNA, 120 bp, Artificial Sequence
  ENSG00000241484_33 (sequence is synthesized)
gctggctccaccacctccacccatctgcctcctgccctcagaagccgtggtctggtctccgggatcagagctgcagagagacaaggcggcggcggctgctgtgctgggtgcagtgaggaa

SEQ ID NO: 774422 - DNA, 120 bp, Artificial Sequence
  ENSG00000241484_34 (sequence is synthesized)
agacccggcacgcaggtgggggccggcggggtccgtggccaggcatactctaccacctcccgctgggcccaggccttccccttggcacagttggagcagcctctgttatgagctgcagag

SEQ ID NO: 774423 - DNA, 120 bp, Artificial Sequence
  ENSG00000241484_35 (sequence is synthesized)
caagccttccctgggctggctccagagcgcatacaaggagttcgataggaaagacggggatctcactatgtggcccaggctggtctcgaactccaagctcaagcgatcctcccacctcag

SEQ ID NO: 774424 - DNA, 120 bp, Artificial Sequence
  ENSG00000241484_36 (sequence is synthesized)
ccagggcgtgtacggggacaaggggccgctggccgggcatactctaccacctcccgctgggcccaggccttccccttggcacagttggagcagcctctgttatggtcttatttttctccc

SEQ ID NO: 774425 - DNA, 120 bp, Artificial Sequence
  ENSG00000241553_0 (sequence is synthesized)
aaggtgggcctcgagcaaagccgctagaggtggggtgcgggtggtcggcctcaggcgagccccggggcacagcccggggcgggaggcggagcttggcggccgagatctccgcgctgcagt

SEQ ID NO: 774426 - DNA, 120 bp, Artificial Sequence
  ENSG00000241553_1 (sequence is synthesized)
tagccccgccgagcgccaggagctgcgggtaggaggggcgagagaaaggatgggggtacagaaccggaagaaacgaagggctcgtccgcttcggcttgtcctaatttggtgcccaatctg

SEQ ID NO: 774427 - DNA, 120 bp, Artificial Sequence
  ENSG00000241553_2 (sequence is synthesized)
aagctgggctgtaccattgcatacctgggggaggctgtggcaaaggtgacaagaaggccgaaggcacaaagggaagctgcacccattcctggaggagcttaaatagtgactcgagtgcaa

SEQ ID NO: 774428 - DNA, 120 bp, Artificial Sequence
  ENSG00000241553_3 (sequence is synthesized)
gaatttaaaaataccgagacagccctaggtggaaaacttccggaaggcccaagcgttcgtaagggctctctaccccgctcggagcatagatggtaccgtccggaagtccgggcggagacc

SEQ ID NO: 774429 - DNA, 120 bp, Artificial Sequence
  ENSG00000241553_4 (sequence is synthesized)
gtagctgcgcttctcgcgaaagggcaggcatcgcggggctggccacttccgtacttccgctttccggcccagccagcgcccgcgatgactgccactctccgcccctacctgagtgccgtg

SEQ ID NO: 774430 - DNA, 120 bp, Artificial Sequence
  ENSG00000241553_5 (sequence is synthesized)
cgggccacattgcaggctgccctctgcctggagaacttctcctcccaggttgtggaacgacacaacaagccggaagtggaagtcaggagtagcaaagagctcctgttacaacctgtgacc

SEQ ID NO: 774431 - DNA, 120 bp, Artificial Sequence
  ENSG00000241553_6 (sequence is synthesized)
atcagcaggaatgagaaggaaaaggttctgattgagggctccatcaactctgtccgggtcagcattgctgtgaaacaggctgatgagatcgagaagattttgtgccacaagttcatgcgc

SEQ ID NO: 774432 - DNA, 120 bp, Artificial Sequence
  ENSG00000241553_7 (sequence is synthesized)
ttcatgatgatgcgagcagagaacttctttatccttcgaaggaagcctgtggaggggtatgatatcagctttctgatcaccaacttccacacagagcagatgtacaaacacaagttggtg

SEQ ID NO: 774433 - DNA, 120 bp, Artificial Sequence
  ENSG00000241553_8 (sequence is synthesized)
gactttgtgatccacttcatggaggagattgacaaggagatcagtgagatgaagctgtcagtcaatgcccgtgcccgcattgtggctgaagagttccttaagaatttttaaaccatctgg

SEQ ID NO: 774434 - DNA, 120 bp, Artificial Sequence
  ENSG00000241553_9 (sequence is synthesized)
ctggatctcgtggccttccccctcagactacccatgtctccacgaaggcgtcctggagtcactccccgagcagcgcggcggcggcagggagttgggttggggtgggcatttgatgcggga

SEQ ID NO: 774435 - DNA, 120 bp, Artificial Sequence
  ENSG00000241553_10 (sequence is synthesized)
gtgcctggtcaggctggcttctgatgttcagtcccctgggccgggacagattttttttaacgtcttgaaacttaaactctgtgcttgtaggatactgtaacctttttgtctttttttttt

SEQ ID NO: 774436 - DNA, 120 bp, Artificial Sequence
  ENSG00000241553_11 (sequence is synthesized)
tttttttttttaaacctccacctccagtggctgtgactggtcccagtgattatacgttattggttgctgtgggtctgggcgggcctggagccagaaggcgacttattttttctctcctat

SEQ ID NO: 774437 - DNA, 120 bp, Artificial Sequence
  ENSG00000241553_12 (sequence is synthesized)
gccaccccaggtggggagggagggaggtttcagactccagtttctcccttgcccttttattcccaagcctccttggccccagtataagtgttgggaactctctgccagcttcctgagttc

SEQ ID NO: 774438 - DNA, 120 bp, Artificial Sequence
  ENSG00000241553_13 (sequence is synthesized)
tgcctaaagatggccccccagcactggttggggacaagggccaaattggtgaccaccagtcatgcctaggacctggggcccaaaagccgggcaacctctggctacaggggccattgggtg

SEQ ID NO: 774439 - DNA, 120 bp, Artificial Sequence
  ENSG00000241553_14 (sequence is synthesized)
ccctcccagttgagaggggccgctgtttcgccttgtccgtcagtgccagtgcctgtgccagaggtggcgaggtgagtcctccagagcttcctggccgggccctcctcctgcctgttctgg

SEQ ID NO: 774440 - DNA, 120 bp, Artificial Sequence
  ENSG00000241553_15 (sequence is synthesized)
ctcctctgctcccacgctagctgtcccttttctgattctggtggatcctccctcccctaattaaagtctctttttgcccctttggggctgcatgaggtctatgctgtgtgtgtgtgtgaa

SEQ ID NO: 774441 - DNA, 120 bp, Artificial Sequence
  ENSG00000241553_16 (sequence is synthesized)
aggaggggaggtggggcttcttttccctgagaccagatggctggtaattgtgcctggagctccccactgggtgcagtctcatgattggtcctgccattattcctgccaggggtcccaacc

SEQ ID NO: 774442 - DNA, 120 bp, Artificial Sequence
  ENSG00000241553_17 (sequence is synthesized)
cagagactccattcattgcagtccaggcaccattaatttctgaaactgctctgtctgcctatacagagctttggtgcttttcacataaggaacttacttgggctaaaaagtaacctcaga

SEQ ID NO: 774443 - DNA, 120 bp, Artificial Sequence
  ENSG00000241553_18 (sequence is synthesized)
gaaacagtgctcccatttggtggataaggaaactgaggttccaaacatgagatgtaatagcttgccccaaatctagccagtgagcaagagagtagacttttgcctgtgccaaaacagtaa

SEQ ID NO: 774444 - DNA, 120 bp, Artificial Sequence
  ENSG00000241553_19 (sequence is synthesized)
tcaccatccacaagtggctatttaaattttaattattacaattaaataaagtttaaaatccagttccccagtcccactggcaacttaacagctaccagtgactgtaccatatataacagc

SEQ ID NO: 774445 - DNA, 120 bp, Artificial Sequence
  ENSG00000241553_20 (sequence is synthesized)
atatatagacatacagcatatacaacacatacatagagattcccatcattgcagaaagttccattggatagtactagaccttagtaacaccttgaagtaaaaagacaaaagacccttgtg

SEQ ID NO: 774446 - DNA, 120 bp, Artificial Sequence
  ENSG00000241553_21 (sequence is synthesized)
gggtccaagcagtgtgtttatatctcctgagctctctaggacccctggggcacagcaggtcagtcaggtgctttggagctagaggaccccaagttcatctctgagagctacaaggcattt

SEQ ID NO: 774447 - DNA, 120 bp, Artificial Sequence
  ENSG00000241553_22 (sequence is synthesized)
aaagtaacagaggaggctggatttcaaaaccttttcgccctgacttcagagcctgtgctctttctgctgaagaacacactcactggcccccatcttggagcactcctgcttgagtagcaa

SEQ ID NO: 774448 - DNA, 120 bp, Artificial Sequence
  ENSG00000241553_23 (sequence is synthesized)
gcagttgacattttgtcttgctgccagctgaatggtgattcccaatttggagttaagaaaatagggtcagtgggttggcaggacagaacccaggggaaaagacaagattggttaacacaa

SEQ ID NO: 774449 - DNA, 120 bp, Artificial Sequence
  ENSG00000241553_24 (sequence is synthesized)
ggtatgacttctcagagcagggctgttgatgaagtctctcctgtggcattgttgaaaacactggtagtttaaggaatggtcagataattgttatctgagattccatctccatacttttct

SEQ ID NO: 774450 - DNA, 120 bp, Artificial Sequence
  ENSG00000241553_25 (sequence is synthesized)
tccagagatgtctgatacacacagaattctcaacggggttcagttgcttggatccaacctagacaccctcccccagagcagctgggctgctgactggaagggggtatgatatcagctttc

SEQ ID NO: 774451 - DNA, 120 bp, Artificial Sequence
  ENSG00000241563_0 (sequence is synthesized)
atagtagaagaatgtctctgaaattactggatgagtttcagtcatactttcacatgggcacaatttcacattcaagctccttatcctaggctaattttatattatgttaaatcacttgtt

SEQ ID NO: 774452 - DNA, 120 bp, Artificial Sequence
  ENSG00000241563_1 (sequence is synthesized)
tttgttctcacggcttcctgcctgctataggcataattacgaggaagcagaacttctccagaagcaagcgcacatgcgttccaaaataagagcaaattcgctctaaacacaggaaaagac

SEQ ID NO: 774453 - DNA, 120 bp, Artificial Sequence
  ENSG00000241563_2 (sequence is synthesized)
ctgaagctttaattaaggggttacatccaaccccagagcgcttttgtgggcactgattgctccagcttctgcgtcactgcgcgagggaagagggaagaggatccaggcgttagacatgta

SEQ ID NO: 774454 - DNA, 120 bp, Artificial Sequence
  ENSG00000241563_3 (sequence is synthesized)
tagacacaaaaacagctggagattgggcttaaaatacccaccaagctccaaagaagagacccaagtccccaaaacattgatttcagggctgccaggaaggaagagcagcagcagggtggg

SEQ ID NO: 774455 - DNA, 120 bp, Artificial Sequence
  ENSG00000241563_4 (sequence is synthesized)
tgctgctgctctccggggccacggccaccgctgccctgcccctggagggtggccccaccggccgagacagcgagcatatgcaggaagcggcaggaataaggaaaagcagcctcctgactt

SEQ ID NO: 774456 - DNA, 120 bp, Artificial Sequence
  ENSG00000241563_5 (sequence is synthesized)
tcctcgcttggtggtttgagtggacctcccaggccagtgccgggcccctcataggagaggaagcccgggaggtggccaggcggcaggaaggcgcacccccccagcaatctgcgcgccggg

SEQ ID NO: 774457 - DNA, 120 bp, Artificial Sequence
  ENSG00000241563_6 (sequence is synthesized)
acagaatgccctgcaggaacttcttctggaagaccttctcctcctgcaaataaaacctcacccatgaatgctcacgcaagtgtaatgacagacctgaataaaatgtattaagcagcagtg

SEQ ID NO: 774458 - DNA, 120 bp, Artificial Sequence
  ENSG00000241563_7 (sequence is synthesized)
atctttcctctcctccttcccaagtcatttgaaaagtgtttgttatttaaattccaataatgcccaatactgacgtgtcttgagtaatttggaacccaaagtgaagatctttgataaaga

SEQ ID NO: 774459 - DNA, 120 bp, Artificial Sequence
  ENSG00000241563_8 (sequence is synthesized)
tttttttgtggttcgactggactgtgctgagtgcgggcactgggcttttcttctgatgttcattatggtgctgggaagctctgtctttgatttaaaataaaatagctaaaggctacacaa

SEQ ID NO: 774460 - DNA, 120 bp, Artificial Sequence; identical to SEQ ID NO: 774212
  ENSG00000241566_0 (sequence is synthesized)

SEQ ID NO: 774461 - DNA, 120 bp, Artificial Sequence
  ENSG00000241566_1 (sequence is synthesized)
atctccttcaggtctagtcaaagcctcgtacacagtgatggaaacacctacttgagttggcttcagcagaggccaggccagcctccaagactcctaatttataaggtttctaaccggttc

SEQ ID NO: 774462 - DNA, 120 bp, Artificial Sequence
  ENSG00000241566_2 (sequence is synthesized)
tctggggtcccagacagattcagtggcagtggggcagggacagatttcacactgaaaatcagcagggtggaagctgaggatgtcggggtttattactgcacgcaagctacacaatttcct

SEQ ID NO: 774463 - DNA, 120 bp, Artificial Sequence
  ENSG00000241595_0 (sequence is synthesized)
tctgaacagaagcccaccctctacccctgacaccatgacccactgttgctccccttgctgtcagcctacatgctgcaggaccacctgctgcaggaccacctgctggaagcccaccactgt

SEQ ID NO: 774464 - DNA, 120 bp, Artificial Sequence
  ENSG00000241595_1 (sequence is synthesized)
gaccacctgcagcagcacaccctgctgccagccctcctgctgtgtttccagctgctgccagccttgctgccgcccaacttgctgtcaaaacacctgctgccagcccacctgtgtgaccag

SEQ ID NO: 774465 - DNA, 120 bp, Artificial Sequence
  ENSG00000241595_2 (sequence is synthesized)
ctgctgccagccttcctgctgcagcacaccctgctgccagcccacctgctgtgggtccagctgtgaccagagcagctcctgtgcacctgtgtactgcagaagaacctgctactaccccac

SEQ ID NO: 774466 - DNA, 120 bp, Artificial Sequence
  ENSG00000241595_3 (sequence is synthesized)
aactgtctgcctgcctggttgcctaaaccagagctgtggctccaactgctgccagccctgctgccgcccagcctgctgtgagaccacttgcttccagcccacctgtgtgtccagctgctg

SEQ ID NO: 774467 - DNA, 120 bp, Artificial Sequence
  ENSG00000241595_4 (sequence is synthesized)
ttttgctgctgatcaagtcccaagagaaccaccatcctcacacaacaactttctgctcaactgacttatcttttgggggactaatttaatttgctgctgacagccaccatgctctcaccc

SEQ ID NO: 774468 - DNA, 120 bp, Artificial Sequence
  ENSG00000241595_5 (sequence is synthesized)
aaatttttatgaattctctacctgtttaaaatcttgggaatctacttgagggagggcagaatacttcatcctgattctctttttccttacactttgtggatcatgtgccagcttcgtgtg

SEQ ID NO: 774469 - DNA, 120 bp, Artificial Sequence
  ENSG00000241595_6 (sequence is synthesized)
ttctcaattttgagtcatggtctcagctttgactcaaaagtcaagagcttcattctctgcttctaaggaatttaggtttctgcaactgatcaataatctttgcaatcatatttttgtttt

SEQ ID NO: 774470 - DNA, 120 bp, Artificial Sequence
  ENSG00000241595_7 (sequence is synthesized)
caatatcctcctcatggttcttgtatccttctttcttcttttcataactttgggttatgtttctgctaccagcagagattcttagctatatgtttctgaataaactctgaaccatcctca

SEQ ID NO: 774471 - DNA, 120 bp, Artificial Sequence
  ENSG00000241598_0 (sequence is synthesized)
tctcatctgctcctctacctgctccaccctcaatccaccagaaccatgggctgctgtggctgctctggaggctgtggctccggctgtgggggctgtggctccggctgtgggggctgtggc

SEQ ID NO: 774472 - DNA, 120 bp, Artificial Sequence
  ENSG00000241598_1 (sequence is synthesized)
tctggctgtgggggctgtggctccggctgtgggggctgtggctccggctgtgggggctgtggctccagctgctgtgtgcccatctgctgctgcaaacctgtgtgctgctgtgtgccagcc

SEQ ID NO: 774473 - DNA, 120 bp, Artificial Sequence
  ENSG00000241598_2 (sequence is synthesized)
tgttcctgctccagctgtggctcctgtgggggctccaaggggggctatggctcttgtgggggttccaaggggggctgtgtctcctgtgggggttccaaggggggctgtggctcctgtggg

SEQ ID NO: 774474 - DNA, 120 bp, Artificial Sequence
  ENSG00000241598_3 (sequence is synthesized)
ggctccaaggggggctgtggctcctgtgggggttccaaggggggctgtggctcctgtgggggctccaaaggaggctgtggctcttgtggctgctcccagtgcagctgctgtaagccctgc

SEQ ID NO: 774475 - DNA, 120 bp, Artificial Sequence
  ENSG00000241598_4 (sequence is synthesized)
ctgcaagccctactgctgccagtccagctgctgtaagccctgctgctcctcctcaggttgtgggtcatcctgctgccagtccagttgctgcaatccctgctgctcccagtctagttgctg

SEQ ID NO: 774476 - DNA, 120 bp, Artificial Sequence
  ENSG00000241598_5 (sequence is synthesized)
tgtccctgtgtgctgccagtgtaagatctgaggctctggactcaggcctcatgtgagtcctgctaatcctgtcttccaaagctgtgacctgtccttcattgttgagccccaaatcattgc

SEQ ID NO: 774477 - DNA, 120 bp, Artificial Sequence
  ENSG00000241598_6 (sequence is synthesized)
tcagggtccattccctgctgtagaacgatgccatatctggctgccttttcctaagaagagtccaccctaattaatgtccattgtctctcctaacaaattctctccccaagtcaactgcaa

SEQ ID NO: 774478 - DNA, 120 bp, Artificial Sequence
  ENSG00000241598_7 (sequence is synthesized)
ttgcagctgaatcacccctcacccactagcctcgcctttgctcatcttttcagaggcctgagctcctgaacccacttgcagtcctgtcttttccagctggagcagctgggcataagcgtc

SEQ ID NO: 774479 - DNA, 120 bp, Artificial Sequence
  ENSG00000241598_8 (sequence is synthesized)
ccagctggagcagctgggcataagcgtcccacctgcaacaaggtgggcgtttaagaggcttccttggagtggctttgcatgtccaacactctgctgtatctttttttttttttttttttt

SEQ ID NO: 774480 - DNA, 120 bp, Artificial Sequence
  ENSG00000241635_0 (sequence is synthesized)
aagtaggagagggcgaacctctggcaggagcaaaggcgccatggctgtggagtcccagggcggacgcccacttgtcctgggcctgctgctgtgtgtgctgggcccagtggtgtcccatgc

SEQ ID NO: 774481 - DNA, 120 bp, Artificial Sequence
  ENSG00000241635_1 (sequence is synthesized)
tgggaagatactgttgatcccagtggatggcagccactggctgagcatgcttggggccatccagcagctgcagcagaggggacatgaaatagttgtcctagcacctgacgcctcgttgta

SEQ ID NO: 774482 - DNA, 120 bp, Artificial Sequence
  ENSG00000241635_2 (sequence is synthesized)
catcagagacggagcattttacaccttgaagacgtaccctgtgccattccaaagggaggatgtgaaagagtcttttgttagtctcgggcataatgtttttgagaatgattctttcctgca

SEQ ID NO: 774483 - DNA, 120 bp, Artificial Sequence
  ENSG00000241635_3 (sequence is synthesized)
gcgtgtgatcaaaacatacaagaaaataaaaaaggactctgctatgcttttgtctggctgttcccacttactgcacaacaaggagctcatggcctccctggcagaaagcagctttgatgt

SEQ ID NO: 774484 - DNA, 120 bp, Artificial Sequence
  ENSG00000241635_4 (sequence is synthesized)
catgctgacggaccctttccttccttgcagccccatcgtggcccagtacctgtctctgcccactgtattcttcttgcatgcactgccatgcagcctggaatttgaggctacccagtgccc

SEQ ID NO: 774485 - DNA, 120 bp, Artificial Sequence
  ENSG00000241635_5 (sequence is synthesized)
caacccattctcctacgtgcccaggcctctctcctctcattcagatcacatgaccttcctgcagcgggtgaagaacatgctcattgccttttcacagaactttctgtgcgacgtggttta

SEQ ID NO: 774486 - DNA, 120 bp, Artificial Sequence
  ENSG00000241635_6 (sequence is synthesized)
ttccccgtatgcaacccttgcctcagaattccttcagagagaggtgactgtccaggacctattgagctctgcatctgtctggctgtttagaagtgactttgtgaaggattaccctaggcc

SEQ ID NO: 774487 - DNA, 120 bp, Artificial Sequence
  ENSG00000241635_7 (sequence is synthesized)
catcatgcccaatatggtttttgttggtggaatcaactgccttcaccaaaatccactatcccaggaatttgaagcctacattaatgcttctggagaacatggaattgtggttttctcttt

SEQ ID NO: 774488 - DNA, 120 bp, Artificial Sequence
  ENSG00000241635_8 (sequence is synthesized)
gggatcaatggtctcagaaattccagagaagaaagctatggcaattgctgatgctttgggcaaaatccctcagacagtcctgtggcggtacactggaacccgaccatcgaatcttgcgaa

SEQ ID NO: 774489 - DNA, 120 bp, Artificial Sequence; identical to SEQ ID NO: 773385
  ENSG00000241635_9 (sequence is synthesized)

SEQ ID NO: 774490 - DNA, 120 bp, Artificial Sequence; identical to SEQ ID NO: 773386
  ENSG00000241635_10 (sequence is synthesized)

SEQ ID NO: 774491 - DNA, 120 bp, Artificial Sequence; identical to SEQ ID NO: 773387
  ENSG00000241635_11 (sequence is synthesized)

SEQ ID NO: 774492 - DNA, 120 bp, Artificial Sequence; identical to SEQ ID NO: 773388
  ENSG00000241635_12 (sequence is synthesized)

SEQ ID NO: 774493 - DNA, 120 bp, Artificial Sequence; identical to SEQ ID NO: 773389
  ENSG00000241635_13 (sequence is synthesized)

SEQ ID NO: 774494 - DNA, 120 bp, Artificial Sequence; identical to SEQ ID NO: 773390
  ENSG00000241635_14 (sequence is synthesized)

SEQ ID NO: 774495 - DNA, 120 bp, Artificial Sequence; identical to SEQ ID NO: 773391
  ENSG00000241635_15 (sequence is synthesized)

SEQ ID NO: 774496 - DNA, 120 bp, Artificial Sequence; identical to SEQ ID NO: 773392
  ENSG00000241635_16 (sequence is synthesized)

SEQ ID NO: 774497 - DNA, 120 bp, Artificial Sequence; identical to SEQ ID NO: 773393
  ENSG00000241635_17 (sequence is synthesized)

SEQ ID NO: 774498 - DNA, 120 bp, Artificial Sequence; identical to SEQ ID NO: 773394
  ENSG00000241635_18 (sequence is synthesized)

SEQ ID NO: 774499 - DNA, 120 bp, Artificial Sequence
  ENSG00000241635_19 (sequence is synthesized)
ggaagacagatgtgaagagctggagcatgttcagatgagaggagacggaacacggggacacaccagcttgagcaagggacaacaggggaggactgatgactgacttcccacctttgaggt

SEQ ID NO: 774500 - DNA, 120 bp, Artificial Sequence
  ENSG00000241635_20 (sequence is synthesized)
gctaatgtgtgtgtggtggcactggataaaagatcaatgttggctaggcaccatggcacacgcctgtagtcccagccactctggaggctaaggcgggaggattgcttgagcccagaagtt

SEQ ID NO: 774501 - DNA, 71 bp, Artificial Sequence
  ENSG00000241635_21 (sequence is synthesized)
gaaaagtccacataacctgagcatcatgtgcccagagcgttgggtggtgtggtcccattccttccttccag

SEQ ID NO: 774502 - DNA, 120 bp, Artificial Sequence
  ENSG00000241635_22 (sequence is synthesized)
cttccttccagcggcttcttctggccacctcaatgtcaggatgtcctgctcacatatcaataccattaaaacctgacttctttccctgcactgttgaagctccttcttgaggctcacatt

SEQ ID NO: 774503 - DNA, 120 bp, Artificial Sequence
  ENSG00000241635_23 (sequence is synthesized)
atggatataattttgattctttcttcagtggtatagataactacttgtaacctaagaacaacttggtgaaagtcctctaatacattattttttaaaaaaacacaaatcaatgagctcaac

SEQ ID NO: 774504 - DNA, 120 bp, Artificial Sequence
  ENSG00000241635_24 (sequence is synthesized)
ttattaactaactttcatctattcatttttgagccatccctgtctgattgtgaatctccatgattccaacactctgagctggggatagtgcctacacaaaataaaaagaagtggaaaatt

SEQ ID NO: 774505 - DNA, 120 bp, Artificial Sequence
  ENSG00000241635_25 (sequence is synthesized)
ggaaaattttcaaacatcagtttatgctgacaaccaggccataataggtgctcaattactattgaatgaatgaatgaaagttctggccaggtacggtggctcatgcctgtagtcccaaca

SEQ ID NO: 774506 - DNA, 90 bp, Artificial Sequence
  ENSG00000241635_26 (sequence is synthesized)
aaccaacctgaccaacatgaagaaaccttatctctaccaaaaaaatataaaaaaattacccaggcatggtggtgtatgcctgtaatccca

SEQ ID NO: 774507 - DNA, 120 bp, Artificial Sequence
  ENSG00000241635_27 (sequence is synthesized)
ttacttaaaaaaaaaaaaaagaaggttccaagaaaattcatcttaaggtttatgtaaaaggaagatgatatttaacatgattcatggccaagtactaatattacattataataatgtttc

SEQ ID NO: 774508 - DNA, 120 bp, Artificial Sequence
  ENSG00000241635_28 (sequence is synthesized)
tggccaagtactaatattacattataataatgtttccaaataacattatagatatgtttaaagacagtgtattaggctgttcttgcattgctgtaaagaaatacccaagactgggtaatt

SEQ ID NO: 774509 - DNA, 87 bp, Artificial Sequence
  ENSG00000241635_29 (sequence is synthesized)
tataaagaaaagaggtttcattggctcgtgtttctgcaggctgtacaggaagcttagtgctgacatcacttggctgccgggggaatg

SEQ ID NO: 774510 - DNA, 120 bp, Artificial Sequence
  ENSG00000241635_30 (sequence is synthesized)
agagagagttgggggggaaggtgccacacactttttaatgaccggctctcacaataactcatgaaaactcactatcaggaagacagcactaaagcacaagggatccgaccccatgatcca

SEQ ID NO: 774511 - DNA, 120 bp, Artificial Sequence
  ENSG00000241635_31 (sequence is synthesized)
aacacctcccaccaggccccatctccagcactggggattacaattcaacatgagatctgagtgtggacaaatatccaaactgtatcagtcaacagcgatcataattagtcctgaatagga

SEQ ID NO: 774512 - DNA, 120 bp, Artificial Sequence
  ENSG00000241635_32 (sequence is synthesized)
gtgcctttttttttctttcttctcccttttcttttctacttcctcctccttttccctctcctcttcaatctcctcttcattcctgtagcaccaagggttgaagcacctaacccgttttgg

SEQ ID NO: 774513 - DNA, 120 bp, Artificial Sequence
  ENSG00000241635_33 (sequence is synthesized)
attgagatgttctgattgggcaatgaacactgtccagaataaacagaaatccattttgcactaagtggctgcacagaccctgcctcatgctaaatctagcacccagatagtttaatgttt

SEQ ID NO: 774514 - DNA, 120 bp, Artificial Sequence
  ENSG00000241635_34 (sequence is synthesized)
caatgactgaattacaaatatatcatcaccttggatttggcacttacaaatggctgttaatttggccagaggtggttgtttacaacttcaaataggagactattcataatttctgacgtg

SEQ ID NO: 774515 - DNA, 120 bp, Artificial Sequence
  ENSG00000241644_0 (sequence is synthesized)
acatttcagggacaccatgaagggtggcttcactgggggtgatgagtaccagaagcacttcctgcccagggactacttggctacttactacagcttcgatggcagcccctcacccgaggc

SEQ ID NO: 774516 - DNA, 120 bp, Artificial Sequence
  ENSG00000241644_1 (sequence is synthesized)
cgagatgctgaagtttaacttggaatgtctccacaagaccttcggccctggaggcctccaaggggacacgctgattgacattggctcaggtcctaccatctaccaagttcttgctgcctg

SEQ ID NO: 774517 - DNA, 120 bp, Artificial Sequence
  ENSG00000241644_2 (sequence is synthesized)
tgattccttccaagacatcactctctccgactttaccgaccgcaaccgggaggagctggaaaagtggctgaagaaggagccgggggcctatgactggaccccagcggtgaaattcgcctg

SEQ ID NO: 774518 - DNA, 120 bp, Artificial Sequence
  ENSG00000241644_3 (sequence is synthesized)
tgagctggaaggaaacagcggccgatgggaggagaaggaggagaagctgcgggcagcggtgaagcgggtgctcaagtgcgatgtccacctgggcaacccgctggccccggctgtgttgcc

SEQ ID NO: 774519 - DNA, 120 bp, Artificial Sequence
  ENSG00000241644_4 (sequence is synthesized)
tctcgccgactgtgtgctcaccctgctggccatggagtgtgcctgctgtagccttgatgcctaccgcgctgccctgtgcaaccttgcctcactgctcaagccgggtggccacctggtgac

SEQ ID NO: 774520 - DNA, 120 bp, Artificial Sequence
  ENSG00000241644_5 (sequence is synthesized)
cactgtcacgcttcggctcccgtcctacatggtggggaagcgtgaattttcctgcgtggccctggagaaagaggaggtggagcaggctgtcctggatgctggctttgacattgaacagct

SEQ ID NO: 774521 - DNA, 120 bp, Artificial Sequence
  ENSG00000241644_6 (sequence is synthesized)
cctacacagtccccagagctactctgtcaccaatgctgccaacaatggggtctgcttcattgtggctcgcaagaagcctgggccctgagccaggagggccagccagaggtctggtcaggc

SEQ ID NO: 774522 - DNA, 120 bp, Artificial Sequence
  ENSG00000241644_7 (sequence is synthesized)
tgtgaggccttggccatctgtatgctagagaggggtgaggaatggatactgtctaacagtctctgatttcaacactaacattccatcttctgaaattctgagattctaacatccttgttt

SEQ ID NO: 774523 - DNA, 120 bp, Artificial Sequence
  ENSG00000241644_8 (sequence is synthesized)
tagaattctaagtttccaacattcctcattctaggatcctaggagtggaattttccattttctaatatactaagccttacagctatcttagatgcgatctgactcctgtgtgactgtgga

SEQ ID NO: 774524 - DNA, 120 bp, Artificial Sequence
  ENSG00000241644_9 (sequence is synthesized)
gcacccagggacgtggttttagagtctacctaatatgttaaggacaaggaaacctctgagtctacctaatatgttaaggacaaggaaacctctggacagtggtatattggggaatttttt

SEQ ID NO: 774525 - DNA, 120 bp, Artificial Sequence
  ENSG00000241644_10 (sequence is synthesized)
ggcgtgagccaccgcacccagccagggggaatgttctataaccagctctgtaaaggaaaagcactgatgtgtggtagtcaccaatttctgtggtgtaaatactcccaccatggttgattt

SEQ ID NO: 774526 - DNA, 120 bp, Artificial Sequence
  ENSG00000241644_11 (sequence is synthesized)
ccaatttctgtggtgtaaatactcccaccatggttgatttcaagccaccagtggtttaataaccagctcataaatctcctaaatattttacagttgactctcatgagctgattggagtca

SEQ ID NO: 774527 - DNA, 120 bp, Artificial Sequence
  ENSG00000241644_12 (sequence is synthesized)
gctggaacataccactgcctctagactaaggtcagcagatttagcaaatacagactgccccagttcattgaattttagataaatgaaataaatctataaggttaagtatgtccccagaac

SEQ ID NO: 774528 - DNA, 120 bp, Artificial Sequence
  ENSG00000241644_13 (sequence is synthesized)
tgcatggaacatgcttaatctaaacaatgatttgttgttcacctgaaattcaaatttagctgggtgtcctgtatttcatctggcaaccctacttcagacccaggtgtaaggtacatggat

SEQ ID NO: 774529 - DNA, 120 bp, Artificial Sequence
  ENSG00000241644_14 (sequence is synthesized)
tgtaaggtacatggatgtgctttggtcaaggaataggccaaggcagagatccatgcctgcatgactcagtgggtttggtgcacaggcacacacctccacttgttatataacctgtttgtg

SEQ ID NO: 774530 - DNA, 120 bp, Artificial Sequence
  ENSG00000241644_15 (sequence is synthesized)
ctgagccactgttgtctgtaaaaggtaattgtcctgctaatgctgtacaggggctcttggggttcggctcagctcaacatggcttgacatggtgggcacactggcgcccagtaagagaga

SEQ ID NO: 774531 - DNA, 120 bp, Artificial Sequence
  ENSG00000241644_16 (sequence is synthesized)
gagagagccaaagctgtccgttttgcagatggacaggaaggagccaggacacagctcagcttgctcacgcccagagagagaaaaagttaagctgctgaccctgaaggcaagggagagcag

SEQ ID NO: 774532 - DNA, 120 bp, Artificial Sequence
  ENSG00000241644_17 (sequence is synthesized)
gctgcacagctgtgtgtggaagccacgggctcaagcagccaaggcagggcggacagtgtgagagagctagtgtaagctgttgatgagagctgttgctgaataaaaccatattcacctgcc

SEQ ID NO: 774533 - DNA, 120 bp, Artificial Sequence
  ENSG00000241644_18 (sequence is synthesized)
ttcagaccctggatcctccccatgggcagtcctccttaaacactggatgaataactgagaagcctccaaggctgggctctcctgggctgccttccctcccgactgcctgctccaggtctc

SEQ ID NO: 774534 - DNA, 120 bp, Artificial Sequence
  ENSG00000241644_19 (sequence is synthesized)
atcgtctcaggacccgggaaaaagtcccattgccatgaaggccccgtgagaggaaggctgggctttggcgtcagaaaggccgaggtttaagtgctctccagctgcttacatgctgagtgg

SEQ ID NO: 774535 - DNA, 120 bp, Artificial Sequence
  ENSG00000241644_20 (sequence is synthesized)
cctagtcatgagagctgggagctccgtgctcctggcgccccacctcgtggactcccactccctgcacttacgtattggagcggcggtgggaggaggcagagcaggcagaggaggaggtgt

SEQ ID NO: 774536 - DNA, 120 bp, Artificial Sequence
  ENSG00000241644_21 (sequence is synthesized)
gggacgtagaggaggcctgggggccctgagggacccctcatgccagtagtggctgggggttagggactggagcctgctgcccagcacggtggtcacaccctggccagccccaccccaccc

SEQ ID NO: 774537 - DNA, 120 bp, Artificial Sequence
  ENSG00000241644_22 (sequence is synthesized)
ggccctggaggggaggccaaggtaaggccttgggcatgaggaggtattctccacccacttcttccacagggcagtggtgaccccgccccacagcccacagcctccaggttatttatagct

SEQ ID NO: 774538 - DNA, 120 bp, Artificial Sequence
  ENSG00000241685_0 (sequence is synthesized)
ctctgggcttccgtcctccgcccgcgcccgacggagcctgttcgcgtcgactgcccagagtccgcgaatcctccgctccgagcccgtccggactcccccgatcccagctttctctccttt

SEQ ID NO: 774539 - DNA, 120 bp, Artificial Sequence
  ENSG00000241685_1 (sequence is synthesized)
gaaaacactaagaataatgtcactgcatcagtttttactagagccaatcacctgtcatgcctggaacagggatcgtactcagattgccctcagtcccaataatcacgaagtgcacatcta

SEQ ID NO: 774540 - DNA, 120 bp, Artificial Sequence
  ENSG00000241685_2 (sequence is synthesized)
taagaagaacgggagccagtgggtgaaagctcatgaactcaaggagcacaacggacacatcacaggtattgactgggctcccaagagcgaccgcattgtcacttgtggggcagaccgcaa

SEQ ID NO: 774541 - DNA, 120 bp, Artificial Sequence
  ENSG00000241685_3 (sequence is synthesized)
tgcctatgtctggagtcagaaagatggtgtttggaagccaaccctggtgatcctgagaattaatcgcgcagctacttttgtgaagtggtcccccctagagaacaaatttgctgtgggaag

SEQ ID NO: 774542 - DNA, 120 bp, Artificial Sequence
  ENSG00000241685_4 (sequence is synthesized)
tggagcacgactcatttctgtttgttactttgagtctgaaaatgactggtgggtgagcaagcacattaaaaagccgattcgctccacagtcctcagcttggattggcatcccaacaacgt

SEQ ID NO: 774543 - DNA, 120 bp, Artificial Sequence
  ENSG00000241685_5 (sequence is synthesized)
tttgctggcagcaggatcatgtgacttcaaatgcagagtgttttctgcctacattaaagaagtggatgaaaagccagccagcacgccctggggcagcaagatgccttttgggcagctgat

SEQ ID NO: 774544 - DNA, 120 bp, Artificial Sequence
  ENSG00000241685_6 (sequence is synthesized)
actggtggctgggtccacggggtaagcttctctgccagtgggagccgcctggcctgggtcagccacgacagcaccgtgtctgttgctgatgcctcaaaaagtgtgcaggtctcgactctg

SEQ ID NO: 774545 - DNA, 120 bp, Artificial Sequence
  ENSG00000241685_7 (sequence is synthesized)
aagacagagttcctgccgctcctaagtgtgtcatttgtctcagagaacagcgtcgtggctgctggccatgactgctgcccaatgctctttaactacgatgaccgcggctgcctgaccttc

SEQ ID NO: 774546 - DNA, 120 bp, Artificial Sequence
  ENSG00000241685_8 (sequence is synthesized)
gtctccaagttagatattccaaaacagagcatccaacgcaacatgtctgccatggaacgcttccgcaacatggacaagagagccacaactgaggaccgcaacacggccttggagacgctg

SEQ ID NO: 774547 - DNA, 120 bp, Artificial Sequence
  ENSG00000241685_9 (sequence is synthesized)
caccagaatagcatcactcaagtctctatttatgaggtggacaagcaagattgtcgcaaattttgcactactggcatcgatggagccatgacaatttgggatttcaagaccctcgagtct

SEQ ID NO: 774548 - DNA, 120 bp, Artificial Sequence
  ENSG00000241685_10 (sequence is synthesized)
tccatccagggcctccggataatgtgaagctgagtgagcctccgccatccagcatgacaaactgtggccgaccgcagctgtgccgtggcacgatggcgaggaagccagccccaaggaaac

SEQ ID NO: 774549 - DNA, 120 bp, Artificial Sequence
  ENSG00000241685_11 (sequence is synthesized)
actgaaaacacatatcacgccaatgccgtgtggttttgtttgaatataaaattggtgaaagtgttggtttttttaaggcagtaatttttttgtttgtttttttgcgatttcattccattc

SEQ ID NO: 774550 - DNA, 120 bp, Artificial Sequence
  ENSG00000241685_12 (sequence is synthesized)
ttgaccaaagcttctctttaagtagtttattatggaaaattgtcacactaacttaaaagacagggtgagggagatatgtaaattgtccactagaaaattaaataaaagaactgaatgtgg

SEQ ID NO: 774551 - DNA, 120 bp, Artificial Sequence
  ENSG00000241685_13 (sequence is synthesized)
gttgcaatctgaggtggtggggcctcagggcagctgcttcctagggtaccctttctcagctactcgagaacaaaaggagacattcctgaatgctgcgttcccacagtagtgcacacataa

SEQ ID NO: 774552 - DNA, 120 bp, Artificial Sequence
  ENSG00000241685_14 (sequence is synthesized)
cagaaagcgaagttacagcctgttggaaaaggtaactgtagctgtcgtttcaagtaatggatacaaataagaagattatttaattaaaggaacagaatttcttatcatcatgatgacaaa

SEQ ID NO: 774553 - DNA, 120 bp, Artificial Sequence
  ENSG00000241697_0 (sequence is synthesized)
gtctttgtgacgcggtggcaacggccacggacacaaagggaaggcgaggaggcgagcaagaggctgggcctgcctccggcccgcgacccccgcccgccgcgcgcgcgcccgcccgctccc

SEQ ID NO: 774554 - DNA, 80 bp, Artificial Sequence
  ENSG00000241697_1 (sequence is synthesized)
ctcgccgcggtgtcccccacgccggctcgcaccctcgcgcgcacccttgcgcgcccgcgaccctcgcacgcgcccggacc

SEQ ID NO: 774555 - DNA, 80 bp, Artificial Sequence
  ENSG00000241697_2 (sequence is synthesized)
gacgctgcgggtggggcggggatgctgacgggctgctccccggctcagcggcgcggctgctaggaggcaccgaggcagcg

SEQ ID NO: 774556 - DNA, 120 bp, Artificial Sequence
  ENSG00000241697_3 (sequence is synthesized)
gctccctgcgcttcccgccgtccaggggcaccagtcatgggcgccgcagccgctgaggcgccgctccggctgcctgccgcgcctccgctcgccttctgctgctacacgtcggtgcttctg

SEQ ID NO: 774557 - DNA, 120 bp, Artificial Sequence
  ENSG00000241697_4 (sequence is synthesized)
ctcttcgccttctctctgcccgggagccgcgcgtccaaccagcccccgggtggtggcggcggcagcggcggggactgtcccggcggcaaaggcaagagcatcaactgctcagaattaaat

SEQ ID NO: 774558 - DNA, 120 bp, Artificial Sequence
  ENSG00000241697_5 (sequence is synthesized)
gtgagggagtctgacgtaagagtttgtgatgagtcatcatgtaaatatggaggagtctgtaaagaagatggagatggtttgaaatgtgcatgccaatttcagtgccatacaaattatatt

SEQ ID NO: 774559 - DNA, 120 bp, Artificial Sequence
  ENSG00000241697_6 (sequence is synthesized)
cctgtctgtggatcaaatggggacacttatcaaaatgaatgctttctcagaagggctgcttgtaagcaccagaaagagataacagtaatagcaagaggaccatgctactctgataatgga

SEQ ID NO: 774560 - DNA, 120 bp, Artificial Sequence
  ENSG00000241697_7 (sequence is synthesized)
tctggatctggagaaggagaagaggaagggtcaggggcagaagttcacagaaaacactccaagtgtggaccctgcaaatataaagctgagtgtgatgaagatgcagaaaatgttgggtgt

SEQ ID NO: 774561 - DNA, 120 bp, Artificial Sequence
  ENSG00000241697_8 (sequence is synthesized)
gtatgtaatatagattgcagtggatacagttttaatcctgtgtgtgcttctgatgggagttcctataacaatccctgttttgttcgagaagcatcttgtataaagcaagaacaaattgat

SEQ ID NO: 774562 - DNA, 120 bp, Artificial Sequence
  ENSG00000241697_9 (sequence is synthesized)
ataaggcatcttggtcattgcacagatacagatgacactagtttgttgggaaagaaagatgatggactacaatatcgaccagatgtgaaagatgctagtgatcaaagagaagatgtttat

SEQ ID NO: 774563 - DNA, 120 bp, Artificial Sequence
  ENSG00000241697_10 (sequence is synthesized)
aatgtgaattcatctattctactcagaaggcttcttgtagatgtgaatctggctacactggacagcactgtgaaaagacagactttagtattctctatgtagtgccaagtaggcaaaagc

SEQ ID NO: 774564 - DNA, 120 bp, Artificial Sequence
  ENSG00000241697_11 (sequence is synthesized)
tcactcatgttcttattgcagcaattattggagctgtacagattgccatcatagtagcaattgtaatgtgcataacaagaaaatgccccaaaaacaatagaggacgtcgacagaagcaaa

SEQ ID NO: 774565 - DNA, 120 bp, Artificial Sequence
  ENSG00000241697_12 (sequence is synthesized)
acctaggtcattttacttcagatacgtcatccagaatggtttaaactgatgacttttatatgtacactgaccatgtgatgtacatttattatgtctttttttaaagaatggaaatattta

SEQ ID NO: 774566 - DNA, 120 bp, Artificial Sequence
  ENSG00000241697_13 (sequence is synthesized)
tttcagaggccttatttttggacatttttagtgtagtactgttggctcgtatttagaatattcagctacgacagttttggactgtttagtagtctttgttttatgtttttaaatacagaa

SEQ ID NO: 774567 - DNA, 120 bp, Artificial Sequence
  ENSG00000241697_14 (sequence is synthesized)
attgctttcacaaatttgtaccacatggtaattctaagacttgttctttacccatggaatgtaatatttttgcaaagatggactacttcacaaatggttataaagtcatatccacttctt

SEQ ID NO: 774568 - DNA, 120 bp, Artificial Sequence
  ENSG00000241697_15 (sequence is synthesized)
ccacaatgaccacagcaaatgaccaagcatgaactaaaggtaaagatgtttacagattacttttcttacaaaaaaaatctagaagacactgtgtttaaatagatatttaaatgtttttga

SEQ ID NO: 774569 - DNA, 120 bp, Artificial Sequence
  ENSG00000241697_16 (sequence is synthesized)
gatttagtaactgattttttagacactgcctatcgcatgaactgtaaagctgtgtgtattaggtgtaaaatatttataagatatatggactggggaatttgattattcctccctttgaaa

SEQ ID NO: 774570 - DNA, 120 bp, Artificial Sequence
  ENSG00000241697_17 (sequence is synthesized)
aaatagtcctaataatttgaacaaatatgttagtaatgatggaacagatcaatgaaaagtagatatagatattgtgaaaataggctgtttaacaaacagattggaataaagcctattcta

SEQ ID NO: 774571 - DNA, 120 bp, Artificial Sequence
  ENSG00000241697_18 (sequence is synthesized)
ccagttaaactactttaatacacattcatttttaaagaaaatgtttgttttaacataaataaacaaatcgtatcagtgtttgtgaataaaatacaaaaatgattgttaatgattggtgct

SEQ ID NO: 774572 - DNA, 120 bp, Artificial Sequence
  ENSG00000241697_19 (sequence is synthesized)
cttaaagtgagcttaaaatttatccaagacgtatatccaaatttgtcctgtagtaatagattaatattcatagattgttggtgtttaaagatctgaagtgtgagtagaatgtattcagct

SEQ ID NO: 774573 - DNA, 120 bp, Artificial Sequence
  ENSG00000241697_20 (sequence is synthesized)
tgagtagaatgtattcagctgtttaacatgtagtttagatattcaaaagtatgcatgtagaatttaaagaatatgttaaaaattattaattttaatattttgtttggaaaagcatgttat

SEQ ID NO: 774574 - DNA, 65 bp, Artificial Sequence
  ENSG00000241755_0 (sequence is synthesized)
tcccactctggctcccaggtgccagatgtgacatccagttgacccagtctccatccttcctgtct

SEQ ID NO: 774575 - DNA, 120 bp, Artificial Sequence
  ENSG00000241755_1 (sequence is synthesized)
acagagtcaccatcacttgccgggccagtcagggcattagcagttatttagcctggtatcagcaaaaaccagggaaagcccctaagctcctgatctatgctgcatccactttgcaaagtg

SEQ ID NO: 774576 - DNA, 75 bp, Artificial Sequence
  ENSG00000241755_2 (sequence is synthesized)
cctaagctcctgatctatgctgcatccactttggaattcactctcacaatcagcagcctgcagcctgaagatttt

SEQ ID NO: 774577 - DNA, 120 bp, Artificial Sequence
  ENSG00000241794_0 (sequence is synthesized)
aaacccctggtacctgagcactgatctgccttggagaacctgatcctgagactccagcaggatgtcttatcaacagcagcagtgcaagcagccctgccagccacctcctgtgtgccccac

SEQ ID NO: 774578 - DNA, 120 bp, Artificial Sequence
  ENSG00000241794_1 (sequence is synthesized)
gccaaagtgcccagagccatgtccacccccgaagtgccctgagccctgcccaccaccaaagtgtccacagccctgcccacctcagcagtgccagcagaaatatcctcctgtgacaccttc

SEQ ID NO: 774579 - DNA, 120 bp, Artificial Sequence
  ENSG00000241794_2 (sequence is synthesized)
atatttggctcacctcgttccacagctccaccttcatcttctcatcaaagcctaccatggatacacagggagcttctttctccttagccagtaatctgcccatgatgatccctgacagca

SEQ ID NO: 774580 - DNA, 120 bp, Artificial Sequence
  ENSG00000241794_3 (sequence is synthesized)
aaaagtttcttttctgaggctgccatactgccactgtccaggtggagactgagcaaaggaagtcctgggctgtgccagctcccagagcttcggaagaaagagcagcagctctctccctgg

SEQ ID NO: 774581 - DNA, 120 bp, Artificial Sequence
  ENSG00000241794_4 (sequence is synthesized)
gaaccatcagagaattctgttgatgtgttctgtgtctgtctgtcacctggtcacgagcttctaccacctttgcaattgtcacttatctttcactccctgaataaagtatctatgcatata

SEQ ID NO: 774582 - DNA, 120 bp, Artificial Sequence
  ENSG00000241837_0 (sequence is synthesized)
ctcttcccactcgggtttgacctacagccgcccgggagaagatggctgccccagcagtgtccgggctctcccggcaggtgcgatgcttcagtacctctgtggtcagaccatttgccaagc

SEQ ID NO: 774583 - DNA, 120 bp, Artificial Sequence
  ENSG00000241837_1 (sequence is synthesized)
ttgtgaggcctcctgttcaggtatacggtattgaaggtcgctatgccacagctctttattctgctgcatcaaaacagaataagctggagcaagtagaaaaggagttgttgagagtagcac

SEQ ID NO: 774584 - DNA, 120 bp, Artificial Sequence
  ENSG00000241837_2 (sequence is synthesized)
aaatcctgaaggaacccaaagtggctgcttctgttttgaatccctatgtgaagcgttccattaaagtgaaaagcctaaatgacatcacagcaaaagagaggttctctcccctcactacca

SEQ ID NO: 774585 - DNA, 120 bp, Artificial Sequence
  ENSG00000241837_3 (sequence is synthesized)
gcaatacccaaggagtcgtttctgccttttctaccatgatgagtgtccatcgcggagaggtaccttgcacagtgacctctgcatctcctttagaagaagccacactctctgaattaaaaa

SEQ ID NO: 774586 - DNA, 120 bp, Artificial Sequence
  ENSG00000241837_4 (sequence is synthesized)
ctgtcctcaagagcttcctaagtcaaggccaagtattgaaattggaggctaagactgatccgtcaatcttgggtggaatgattgtgcgcattggcgagaaatatgttgacatgtctgtca

SEQ ID NO: 774587 - DNA, 120 bp, Artificial Sequence
  ENSG00000241837_5 (sequence is synthesized)
agaccaagattcagaagctgggcagggctatgcgggagattgtctaaaagtgttggttttctgccatcagtgaaaattcttaaacttggagcaacaataaaaagcttccagaacagatca

SEQ ID NO: 774588 - DNA, 120 bp, Artificial Sequence
  ENSG00000241837_6 (sequence is synthesized)
tcctgggatgaccggtaccaaacctcgagcaccagggtgcgatgcttcagtacctctgtggtcagaccatttgccaagcttgtgaggcctcctgttcaggtatacggtattgaaggtcgc

SEQ ID NO: 774589 - DNA, 120 bp, Artificial Sequence
  ENSG00000241837_7 (sequence is synthesized)
agagaaaggtggtcctgagagccagtgggaggatccctcctgggatgaccggtaccaaacctcgagcaccagggtgcgatgcttcggctggggaagtctggcagtcttcaaggttatggg

SEQ ID NO: 774590 - DNA, 120 bp, Artificial Sequence
  ENSG00000241837_8 (sequence is synthesized)
acctggcgagtgggagcgactcaggacgacccagcgtttgtcccccgggatgcctacggggcagtaggcgcggggctgcgcgtgccgtaaccttggcgtcttccgagcacagcccctgga

SEQ ID NO: 774591 - DNA, 120 bp, Artificial Sequence
  ENSG00000241837_9 (sequence is synthesized)
ccccaaatcagcttcctttgccattgtggtaaaacctgtcagagatcacttactagtaatgctaaggaatatttgtaaaacacatttcacagttttataaataaaatgaggccgaaaagt

SEQ ID NO: 774592 - DNA, 120 bp, Artificial Sequence
  ENSG00000241837_10 (sequence is synthesized)
ttaaatgagtctttggctgctcagtcagtaagtggtagaattgagatttgaacccacggaatcacccagaagatcgagtttgaaaaaatgttatgctgtttgtgctgcatctcaccatgg

SEQ ID NO: 774593 - DNA, 120 bp, Artificial Sequence
  ENSG00000241837_11 (sequence is synthesized)
tgctttacatatcatgaccccttcctggcatcttaggtgcgatgcttcagtacctctgtggtcagaccatttgccaagcttgtgaggcctcctgttcaggtatacggtattgaaggtcgc

SEQ ID NO: 774594 - DNA, 120 bp, Artificial Sequence
  ENSG00000241837_12 (sequence is synthesized)
ggaaggggcatggactagcccccaaatcagcttcctttgccattgtggtgcgatgcttcagtacctctgtggtcagaccatttgccaagcttgtgaggcctcctgttcaggtatacggta

SEQ ID NO: 774595 - DNA, 120 bp, Artificial Sequence
  ENSG00000241837_13 (sequence is synthesized)
tttacatatcatgaccccttcctggcatcttaggtaattttttcataagcattaaaaagtcttaatcctcacaagcagttttgataaaacacgttccatagctggagtatttgaaggtga

SEQ ID NO: 774596 - DNA, 120 bp, Artificial Sequence
  ENSG00000241837_14 (sequence is synthesized)
cctgtgatctgtgacctgtgcgcttgcaggtgatttttaaactgtgtattccagctctgtcttttgatgggcaggatagtgtctctcagaactaaggcttcttgtcagatcaaactctgc

SEQ ID NO: 774597 - DNA, 120 bp, Artificial Sequence
  ENSG00000241837_15 (sequence is synthesized)
ggcagtactcaaaaaattcatctttattttcagatagcatttgcattccgaggagggtacgtctgttgcaaatgatctgctcaagggtctgttaatagaaacgccaaaattttggttaaa

SEQ ID NO: 774598 - DNA, 120 bp, Artificial Sequence
  ENSG00000241837_16 (sequence is synthesized)
tatttttgaaacatgcactccttggaagttagtgtttttctgtcttacgggtatgctagcctcggtccattcctagcaaactaggaggttcgtgggaaggtgatttcccaagcaacttgg

SEQ ID NO: 774599 - DNA, 120 bp, Artificial Sequence
  ENSG00000241837_17 (sequence is synthesized)
cataatcctcattgggtaagtttaccccttagtaatagtaagtagctcaccctcatgtaatatgtgaatatacaaagagacaaaagtaatgattttaaggttatttaaaattttttgttg

SEQ ID NO: 774600 - DNA, 120 bp, Artificial Sequence
  ENSG00000241837_18 (sequence is synthesized)
cggagaggtaccttgcacagtgacctctgcatctgtaagtaacgggttgttgctgctgtgtttgccttgatattacatgtgtcaccttttgcaggaagaaaagggaaaaacagggtaaaa

SEQ ID NO: 774601 - DNA, 120 bp, Artificial Sequence
  ENSG00000241837_19 (sequence is synthesized)
tcaagaaattgggaaaggtaacttgtcacctgggatgtttgtttcatttttatatcagcttctgtgaccctttgctttggaaaagccagcgtgtatcttattagtgcttctgtaaccagt

SEQ ID NO: 774602 - DNA, 120 bp, Artificial Sequence
  ENSG00000241837_20 (sequence is synthesized)
gattattcataaggcctgggttaaatgtaaagtacatcaaaatgtgttggaaaagagtggtttagactctattatatgtttgaattattttatgaataccacttgaagtagtttcctgaa

SEQ ID NO: 774603 - DNA, 72 bp, Artificial Sequence
  ENSG00000241837_21 (sequence is synthesized)
tgaattattttatgaataccacttgaagtagtttcctgaaactagaattctagagtttaacacagtcacacc

SEQ ID NO: 774604 - DNA, 120 bp, Artificial Sequence
  ENSG00000241837_22 (sequence is synthesized)
ctcagcttcctgagtagctgggattacagtgcacccccaccacacccggctaatttttgtgtgttttttatagtgatggaggttttactgtgttctccaggcttgtctcgaacttctggg

SEQ ID NO: 774605 - DNA, 120 bp, Artificial Sequence
  ENSG00000241837_23 (sequence is synthesized)
acctgccttggcctcctaaagtgctgggaataaaggtgtaagctaccacacctggcctgaaactagagttactaacctttcatctttggtggtggtgagtgggaaggagtagagccgttg

SEQ ID NO: 774606 - DNA, 120 bp, Artificial Sequence
  ENSG00000241837_24 (sequence is synthesized)
gtagagccgttgggcctttgtatctttttgacttgatagtgggctataattggctaccgtttattgaaccctactatatgctgggtgctttattatgttattcagtatcaaaagattcat

SEQ ID NO: 774607 - DNA, 120 bp, Artificial Sequence
  ENSG00000241837_25 (sequence is synthesized)
gtgagatagaagtataattaacctcattttacagatgaggaaaccgaatgcagggagatgaagtcgcttgcccaaagtcatacgagcctttagaagaagccacactctctgaattaaaaa

SEQ ID NO: 774608 - DNA, 120 bp, Artificial Sequence
  ENSG00000241837_26 (sequence is synthesized)
tgtcttgaaactatgactggaaatgtggtccatggactgtgggcggcatcagcatcacctgggagcctgttggcagtgaagaatctcaggcctcacagcaacctgctgaatcagagtctg

SEQ ID NO: 774609 - DNA, 120 bp, Artificial Sequence
  ENSG00000241837_27 (sequence is synthesized)
tatcttaaccagctccctaagtgaatcgtttgcacattgaagtgtgaggagcatcgtctaaaggatactaggacctaagcatgtctaattgtatagtcagtagtttcaactgtggaggcg

SEQ ID NO: 774610 - DNA, 120 bp, Artificial Sequence
  ENSG00000241837_28 (sequence is synthesized)
gtcgtttctgccttttctaccatgatgagtgtccatcgcggagaggtaccttgcacagtgacctctgcatctgcttgtctcgaacttctgggctcaagtgacccacctgccttggcctcc

SEQ ID NO: 774611 - DNA, 120 bp, Artificial Sequence
  ENSG00000241837_29 (sequence is synthesized)
aggagtcgtttctgccttttctaccatgatgagtgtccatcgcggagaggtaccttgcacagtgacctctgcatcttgatggaggttttactgtgttctccaggcttgtctcgaacttct

SEQ ID NO: 774612 - DNA, 120 bp, Artificial Sequence
  ENSG00000241839_0 (sequence is synthesized)
agaacgcggagagtcgccgcctggccgggcgtagacgcggtggcagagcccgcgcggcgctggaagcgagtggcggagcggcgggacctcggcggactcgccatggaggaggagggtgtg

SEQ ID NO: 774613 - DNA, 120 bp, Artificial Sequence
  ENSG00000241839_1 (sequence is synthesized)
aaggaagccggtgagaagcctcggggagcacagatggtggacaaggctggctggatcaagaagagcagtgggggcctcctgggtttctggaaagaccgatatctgctcctctgccaggcc

SEQ ID NO: 774614 - DNA, 120 bp, Artificial Sequence
  ENSG00000241839_2 (sequence is synthesized)
cagctgctggtctatgagaatgaggatgatcagaagtgtgtggagactgtggagctgggcagctatgagaagtgccaggaccttcgtgccctcctcaagcgaaaacaccgctttatcctg

SEQ ID NO: 774615 - DNA, 120 bp, Artificial Sequence
  ENSG00000241839_3 (sequence is synthesized)
ctgcgatccccagggaacaaggtcagcgacatcaaattccaggcacccaccggggaggagaaggaatcctggatcaaagccctcaatgaagggattaaccgaggcaaaaacaaggctttc

SEQ ID NO: 774616 - DNA, 120 bp, Artificial Sequence
  ENSG00000241839_4 (sequence is synthesized)
gatgaggtaaaggtggacaagagctgcgccctggagcatgtgacacgggaccgggtgcgagggggccagcgacgccggccaccaacgagagtccacctgaaggaggtggccagtgcagct

SEQ ID NO: 774617 - DNA, 120 bp, Artificial Sequence
  ENSG00000241839_5 (sequence is synthesized)
tctgacggtcttctgcgcctggatcttgatgttccggacagtgggccaccagtgtttgcccccagcaatcatgtcagtgaagcccaacctcgggagacaccccggcccctcatgcctcct

SEQ ID NO: 774618 - DNA, 120 bp, Artificial Sequence
  ENSG00000241839_6 (sequence is synthesized)
accaagcctttcctagcacctgagaccaccagccctggtgacagggtggagacccctgtgggggagagagccccaacccctgtctcagcaagctctgaggtctcccctgagagccaagag

SEQ ID NO: 774619 - DNA, 120 bp, Artificial Sequence
  ENSG00000241839_7 (sequence is synthesized)
gactcagagaccccagcagaggaggacagtggctctgagcagcctcccaacagcgtcctgcctgacaaactgaaggtgagctgggagaaccccagcccccaggaggcccctgctgcagag

SEQ ID NO: 774620 - DNA, 120 bp, Artificial Sequence
  ENSG00000241839_8 (sequence is synthesized)
agtgcagaaccgtcccaggcaccctgttctgagacttctgaggctgcccccagggagggtgggaagccccctacacccccacccaagatcttatcagagaaactgaaagcctccatgggt

SEQ ID NO: 774621 - DNA, 120 bp, Artificial Sequence
  ENSG00000241839_9 (sequence is synthesized)
gagatgcaggcttctgggccacctgctccaggcacagtgcaggtctcagtgaatggcatggatgacagtcctgagcctgccaagccctctcaggctgagggcaccccaggaactcctcca

SEQ ID NO: 774622 - DNA, 120 bp, Artificial Sequence
  ENSG00000241839_10 (sequence is synthesized)
aaggatgcaacaacatccacagcactgcccccctgggacctgccacctcagttccatccccgctgctcctcccttggggacttgcttggggaaggcccgcggcatcccttgcagcccagg

SEQ ID NO: 774623 - DNA, 120 bp, Artificial Sequence
  ENSG00000241839_11 (sequence is synthesized)
gaacggctatatcgggcccagctggaggtgaaggtggcctcggaacagacggagaaactgttgaacaaggtgctgggcagtgagccggcccctgttagtgccgaaacattgctcagccag

SEQ ID NO: 774624 - DNA, 120 bp, Artificial Sequence
  ENSG00000241839_12 (sequence is synthesized)
gctgtggagcagctgaggcaggccacccaggtcctgcaggaaatgagagatttgggagagctgagccaggaagcacctgggctaagggagaagcggaaggagctggtgaccctctacagg

SEQ ID NO: 774625 - DNA, 120 bp, Artificial Sequence
  ENSG00000241839_13 (sequence is synthesized)
agaagtgcaccctagggccttctgggccagaggcaccatcccttctggccatccatcaagtccatcaaggcccagccctgctgagaaatgtgcttctgcttctacagcaatggctgcagg

SEQ ID NO: 774626 - DNA, 120 bp, Artificial Sequence
  ENSG00000241839_14 (sequence is synthesized)
agggccattgggcatgtcagggtttggccatgacccgaagagactcctggcgtccttcctactctgctctggccagtggtgccaggtgccacccagggctactgcctggctatctggcct

SEQ ID NO: 774627 - DNA, 120 bp, Artificial Sequence
  ENSG00000241839_15 (sequence is synthesized)
gcggcacttggggtttctgggaatgacatcatctctgttccccatccccagtagtttacattcctgacttctgaatacagcacagctgagccccctgcagctcccatctccagctattcc

SEQ ID NO: 774628 - DNA, 120 bp, Artificial Sequence
  ENSG00000241839_16 (sequence is synthesized)
taggcaaagagcctcatggctaaggcagcctcaaagccagcccctcctcccacctattctgagtagctgcagaggccttgggtccaggctctaggttcatccctcagttggggggaacgt

SEQ ID NO: 774629 - DNA, 120 bp, Artificial Sequence
  ENSG00000241839_17 (sequence is synthesized)
aggacccagctggagcctcttgagggagatgagaggcctctttgtgaggaggacattagctgtgtggcctctctctctttggccctgtttccttttttgcaaaacaaggacattttctgc

SEQ ID NO: 774630 - DNA, 120 bp, Artificial Sequence
  ENSG00000241839_18 (sequence is synthesized)
agccccttcctctcagtgagctatgattggagggcttaggtctggaggattcaagagtggaagaggaatttaaggggtcccctagtctagtctctgcccctggatagtgtccagccttgt

SEQ ID NO: 774631 - DNA, 120 bp, Artificial Sequence
  ENSG00000241839_19 (sequence is synthesized)
atatttctgaagaggtggatcccagagtggctctgatgtccacattagaaaaacttacttgtaatgatcatgtcagccttcagaagagaatccccaccaacttctgtgcctcctcagatg

SEQ ID NO: 774632 - DNA, 120 bp, Artificial Sequence
  ENSG00000241839_20 (sequence is synthesized)
gggatttatctggatctctgtggttccttctcagccgaaacaggtccagtatcccagtcatttcttcaaatgctgataggggtatgttggaatccgaagccacttccccgccttcaagcc

SEQ ID NO: 774633 - DNA, 120 bp, Artificial Sequence
  ENSG00000241839_21 (sequence is synthesized)
ccagatgggctgctctcctgtaactttctaggagaagagacattttcttctttccctttcctggtccatccctgcaccctggtcctctcccagcctctcccccacattgtccctgactct

SEQ ID NO: 774634 - DNA, 120 bp, Artificial Sequence
  ENSG00000241839_22 (sequence is synthesized)
aggggcacatccagtctccatcgtgctgcagcagctggactgagggcagagcctgtaggtgcagaggccctggctcccgaggtccagccactctccctggggcctctggggtgagagcag

SEQ ID NO: 774635 - DNA, 120 bp, Artificial Sequence
  ENSG00000241839_23 (sequence is synthesized)
cttccgataggacctgcccagatttctgcatgtgcacttttgtttactgaaagagagaaaggggggggtcacagcaacatgccctggcctttctgctctgttccccaaccccactgaggc

SEQ ID NO: 774636 - DNA, 120 bp, Artificial Sequence
  ENSG00000241839_24 (sequence is synthesized)
ctgctgcacaggtcaatgccttcgttatcgttattgtactgtcactttgttcttgaggtagtagtcaaggatcaggaggggcagatgtcttctctgggctgcgtggggccggagcagagg

SEQ ID NO: 774637 - DNA, 120 bp, Artificial Sequence
  ENSG00000241839_25 (sequence is synthesized)
tgagcagcaatgcactggttcgggagcccccatcagcctccttgtgcaaactgggcccccatgccacagtctggctttccctccatctgccccaggacaagagcaagaaggacatcagtt

SEQ ID NO: 774638 - DNA, 120 bp, Artificial Sequence
  ENSG00000241839_26 (sequence is synthesized)
gcccagtcatgtgatcccctgccatcttgccttaggaacagccttcccccaccagcagccatggctggctggggctttagccaagccacctactgccaggaattggagcctcagttccct

SEQ ID NO: 774639 - DNA, 120 bp, Artificial Sequence
  ENSG00000241839_27 (sequence is synthesized)
cctgtgtcaagtagctaactgcagcagctggactgagggcagagtctgtgggtgcagagaccctgcatgtaggtcacaggttgaggcccagccactctccctggggcctggtgggtaggc

SEQ ID NO: 774640 - DNA, 120 bp, Artificial Sequence
  ENSG00000241839_28 (sequence is synthesized)
aagtagctctggggccacctcaagtgaccaaatgctattaatttccatcctttagcaggctgggccctaggcaggaagctggcttctgggagaggagtgagaacgtgcagggcctgccta

SEQ ID NO: 774641 - DNA, 120 bp, Artificial Sequence
  ENSG00000241839_29 (sequence is synthesized)
gcttgcgtgcttgaggaaggtggcattccgtgcttgcctccttgaggagggtggcattctgtgtcttctgcttatgaagcgcctttcttaaagtttggcaataaatccatttttatggaa

SEQ ID NO: 774642 - DNA, 120 bp, Artificial Sequence
  ENSG00000241839_30 (sequence is synthesized)
aagtttcttgggcccccggcagccggcgggacagaacgcggagagtcgccgcctggccgggcgtagacgcggtggcagagcccgcgcggcgctggaagcgagtggcggagcggcgggacc

SEQ ID NO: 774643 - DNA, 80 bp, Artificial Sequence
  ENSG00000241852_0 (sequence is synthesized)
gtgtctgggggccgcgcccagctgggtcgggacgcgctccctgagctgcccgagctccgcggggactcgggccgggatcc

SEQ ID NO: 774644 - DNA, 120 bp, Artificial Sequence
  ENSG00000241852_1 (sequence is synthesized)
ccatgatgggccggcggcgcgccttcgccgtggacggccgggatggggctggcgagggcctggcacggggctgcatagtgcctggagtcaccagcacctacagacggatccccgacgctg

SEQ ID NO: 774645 - DNA, 120 bp, Artificial Sequence
  ENSG00000241852_2 (sequence is synthesized)
cccacgggtgctcatcctgggagagaggtgacaagttcagaggtgtcggcagggaggcactctttctcaaactggcctcccgggactcaggagtggagatggcagttggggacagccccc

SEQ ID NO: 774646 - DNA, 120 bp, Artificial Sequence
  ENSG00000241852_3 (sequence is synthesized)
tggccgccttaccgggcctttctcaggactccctggactttgaatcctcagggagttctgagccccccgcccaggtaggccgactcctggccagccagaagctgggggaggtgttggagc

SEQ ID NO: 774647 - DNA, 120 bp, Artificial Sequence
  ENSG00000241852_4 (sequence is synthesized)
ggtcccgccggctcccaacagctcccaccagcttgtcaggacaacaccgctccctgcggctggcaagcaagcctgagcgtgaagtgccccttggagcagggcaacaggagtccatggagg

SEQ ID NO: 774648 - DNA, 120 bp, Artificial Sequence
  ENSG00000241852_5 (sequence is synthesized)
cagacacagacctagaggcaggcctggaagaagaggcggtggggggcctggggcctggagcctgggcctgcctccccgggcagggtcttcgctatctggaacacctgtgcctggtgctgg

SEQ ID NO: 774649 - DNA, 120 bp, Artificial Sequence
  ENSG00000241852_6 (sequence is synthesized)
agcagatggcaaggctccagcagctctacctgcagctgcggatccagaggcccccaggggatcccggcgaggaggagtcgacccgagcccctttaccgtccccgttacacaccccaggca

SEQ ID NO: 774650 - DNA, 120 bp, Artificial Sequence
  ENSG00000241852_7 (sequence is synthesized)
atcgggggcaggggccatgggagctgctaagccagacagagcacacaggagcaaaggctgcttcacccccaaaggtggaggtgcccagtgccaaccctcccaggctgccagaaaccccag

SEQ ID NO: 774651 - DNA, 120 bp, Artificial Sequence
  ENSG00000241852_8 (sequence is synthesized)
cttgccatcctcccagggacacaagcgggatatctcccactgggacaaggtcaaggtcctgctcaaccggatctgccggagaagccaccaccaccctgagccccctgcccctcctgatgg

SEQ ID NO: 774652 - DNA, 120 bp, Artificial Sequence
  ENSG00000241852_9 (sequence is synthesized)
ctctgaccccaggatcgagtccagggacctccctgaaaggcctcagtgccgcccccaccggaagacctttatgccatcattagtggttaagaagcaacgagcaaaaaacctttctgtagg

SEQ ID NO: 774653 - DNA, 120 bp, Artificial Sequence
  ENSG00000241852_10 (sequence is synthesized)
ctgagacctctcggtgcacctggtgaccctgggtggaggggacttgctgtgaagtcttcctcgccctctgccctcttgctgcttctccacattgccaggaaaagctgctgacgcctgccc

SEQ ID NO: 774654 - DNA, 120 bp, Artificial Sequence
  ENSG00000241852_11 (sequence is synthesized)
tcctctcttgagtcgagggctgaatctttctcctctaagcagtctggtcaggaaccttggtttcttgagaggcccccaagatgccgcagctccagggctcttcctcctcaccagaaatcc

SEQ ID NO: 774655 - DNA, 120 bp, Artificial Sequence
  ENSG00000241852_12 (sequence is synthesized)
ctgggcttccacaatgtgaactcactcattgtcaggtgtccgtggagtgtttttggcatggtgacctgtctgggcccagcatgttgcagatgtgtatttatgcgcaatggtatgcatatc

SEQ ID NO: 774656 - DNA, 120 bp, Artificial Sequence
  ENSG00000241852_13 (sequence is synthesized)
tctgtgtgactgtcagtgttgcaagctggctggatccaaccatctcttctgaaataatgcatccaaagggttgatattctgggggaggtcactgcagaaggatggaactgacctttattc

SEQ ID NO: 774657 - DNA, 120 bp, Artificial Sequence
  ENSG00000241852_14 (sequence is synthesized)
cccagtgggcagttactgagctttcctcctcagagccatgctggcagccctgggacagagaacggtgtggctttggctgcctctgcatggaatcttgccccggactcctgaagactgcac

SEQ ID NO: 774658 - DNA, 120 bp, Artificial Sequence
  ENSG00000241852_15 (sequence is synthesized)
aaggaatgaggaagatcagggacaacctgggaactgaataactttcaaagccagtgctcagcttctctgctccgtactagcgtttacaggtcttaattcaaaccagatgcctgtactagt

SEQ ID NO: 774659 - DNA, 120 bp, Artificial Sequence
  ENSG00000241852_16 (sequence is synthesized)
ttttagaccccaagtcaacctttctgagccacagcttcccgctgggaataatgatgcctgccctatctacctcacagacttgttatgaggataaagtgagattaaactgcctcaaagtgc

SEQ ID NO: 774660 - DNA, 120 bp, Artificial Sequence
  ENSG00000241852_17 (sequence is synthesized)
gggaggtgggggatgcatgggcaccctgggggccagcaactctggggaaatgacaggattgattcctgtttggagcaggcgacttgtcctggctgtggcgacagctgtctctgggagctt

SEQ ID NO: 774661 - DNA, 120 bp, Artificial Sequence
  ENSG00000241852_18 (sequence is synthesized)
cctgctcaaccggatctgccggagaagccaccaccaccctgagccccctgcccctcctgatggctctgaccccaggtgagccccgtgcccagcccaggttagggcacggagaggagactg

SEQ ID NO: 774662 - DNA, 120 bp, Artificial Sequence
  ENSG00000241852_19 (sequence is synthesized)
ataagccaggatgctgagattgtcatgccagttgtcattattgtccccgcaaaacttgagaggcagtctgggaggggctgctagaagaaacagtagttaaaacaccccatttacagataa

SEQ ID NO: 774663 - DNA, 120 bp, Artificial Sequence
  ENSG00000241852_20 (sequence is synthesized)
ggaggcagggttctgggtggggttgggggtagttgcttttccaaagccgcacggtgagtcagtgacagctaggaccagaatgtgggaaatctgcctaccctagctcagcaacccctcacc

SEQ ID NO: 774664 - DNA, 120 bp, Artificial Sequence
  ENSG00000241852_21 (sequence is synthesized)
tcccaccagcaggtcctctgagccgaagcttgatggggtgtcttctggccctggccaacctgactgtctttctgaaggagcaaaggctgcttcacccccaaaggtggaggtgcccagtgc

SEQ ID NO: 774665 - DNA, 120 bp, Artificial Sequence
  ENSG00000241852_22 (sequence is synthesized)
gccgggcaccctctctcagtttcttgcccagccccgcgcaccccgcgggcggagcccgcgccgctgcgcctccctcgccgcctccctggaggggcggtcatcaggggacgccatgcaggc

SEQ ID NO: 774666 - DNA, 120 bp, Artificial Sequence
  ENSG00000241852_23 (sequence is synthesized)
tggaacccctttgggcccaggcgttaaaccagccaccgcctccgccccacttcctccggctccgcttccctcgccttcccgctccttctgaggatgtgggaatccgcccgcgccccagcc

SEQ ID NO: 774667 - DNA, 120 bp, Artificial Sequence
  ENSG00000241852_24 (sequence is synthesized)
ccctccgtggctgcggacccctctcccacccagtgacctcctggcccacttccttgcccagaggggcctgggttggcattcggctcccgcgtgccccgcagctcgtccccgcccccctag

SEQ ID NO: 774668 - DNA, 120 bp, Artificial Sequence
  ENSG00000241852_25 (sequence is synthesized)
tctttcattttaaacttttcataaaatcttcactattgctcacttacaacaaaagcccaaatcggttatagcggtgatttttatcactctcccggtgagctgcaggagagacttcacctg

SEQ ID NO: 774669 - DNA, 120 bp, Artificial Sequence
  ENSG00000241878_0 (sequence is synthesized)
ggaagctggagccacctgcggctctgagagggacagacggtgctcagcctgtgtcctggggcaaagctggattcattttcctccctggcgatcttctggggcccacagctggtgatatgg

SEQ ID NO: 774670 - DNA, 120 bp, Artificial Sequence
  ENSG00000241878_1 (sequence is synthesized)
aggcactgacaccctggtctcggcgcttgttttagaagaggcagaacagtgataaagacaaggatctaaatgggcaaggacgccctgccctcactgggctcactggcagccctgaccctc

SEQ ID NO: 774671 - DNA, 120 bp, Artificial Sequence
  ENSG00000241878_2 (sequence is synthesized)
tattctgcaccctgtgagccaccgagactgaaccaaacccaggaagcggcgccaccaaccagcctcgcagaggcagaggccctggagcagtgacagcacaggagatctgctggctcgggg

SEQ ID NO: 774672 - DNA, 120 bp, Artificial Sequence
  ENSG00000241878_3 (sequence is synthesized)
gaaggggaggaaagaggaaaacaaagggagtgatcgagtgagcctcgccccgccctccctgcgccggcccatgatgtgtcagtcagaggcgcggcaaggaccagagctccgcgcggcgaa

SEQ ID NO: 774673 - DNA, 120 bp, Artificial Sequence
  ENSG00000241878_4 (sequence is synthesized)
atggttgcacttcccccagctggccctgaggcggaggctggggcagctgagctgcatgtccagacccgctctgaaactgcgctcctggcccttgaccgtcctctactacctcctgccctt

SEQ ID NO: 774674 - DNA, 120 bp, Artificial Sequence
  ENSG00000241878_5 (sequence is synthesized)
cggcgccctcagaccgctcagccgggtgggatggaggcccgtaagcagggtggctttgtacaagtcagtgccaacgcgcttgctgtcacgggcctggggtcgcctcaatcaggtggagct

SEQ ID NO: 774675 - DNA, 120 bp, Artificial Sequence
  ENSG00000241878_6 (sequence is synthesized)
gccacactggctgcgcaggcccgtctacagcctgtacatctggacgtttggggtgaacatgaaagaggccgctgtggaggacctgcatcactaccgcaacctcagcgagttcttccggcg

SEQ ID NO: 774676 - DNA, 120 bp, Artificial Sequence
  ENSG00000241878_7 (sequence is synthesized)
caagctgaagccgcaggcccggcctgtctgtggcctgcacagcgtgattagcccatcggatggaaggatcctcaactttgggcaggtgaagaactgtgaggtggagcaggtaaagggggt

SEQ ID NO: 774677 - DNA, 120 bp, Artificial Sequence
  ENSG00000241878_8 (sequence is synthesized)
cacctactccctggagtcgttcctgggcccgcgtatgtgcacagaggacctgcccttcccaccagccgcgtcgtgtgactccttcaagaaccagctggtcacccgggaagggaatgagct

SEQ ID NO: 774678 - DNA, 120 bp, Artificial Sequence
  ENSG00000241878_9 (sequence is synthesized)
ctatcactgtgtcatctacctggcccctggggactaccactgcttccactcccccaccgactggactgtgtcccaccggcgccacttcccaggctccctgatgtcagtgaaccctggcat

SEQ ID NO: 774679 - DNA, 120 bp, Artificial Sequence
  ENSG00000241878_10 (sequence is synthesized)
ggctcgctggatcaaagagctcttctgccataacgagcgggtggtcctgacgggggactggaaacatggcttcttctcactgacagctgtgggggccaccaacgtgggctccattcgcat

SEQ ID NO: 774680 - DNA, 120 bp, Artificial Sequence
  ENSG00000241878_11 (sequence is synthesized)
cctgcacacaaacagcccaaggcacagcaagggctcctacaatgacttcagcttcgtgacgcacaccaatagagagggcgtccccatgcgtaagggcgagcacctgggcgagttcaacct

SEQ ID NO: 774681 - DNA, 120 bp, Artificial Sequence
  ENSG00000241878_12 (sequence is synthesized)
gggctccaccatcgtgctcatcttcgaggcccccaaggacttcaatttccagctgaaaacaggacagaaaatccgctttggggaagccctgggctcgctctagagtctctttcctgatta

SEQ ID NO: 774682 - DNA, 120 bp, Artificial Sequence
  ENSG00000241878_13 (sequence is synthesized)
tggctgctaagggatcttttccaaacagagtgagggtcttttcaagagggaggcccatgaggccatccaggtaagggcctgcctcagcgtggttgggagtctgaccaggtaggacttgaa

SEQ ID NO: 774683 - DNA, 120 bp, Artificial Sequence
  ENSG00000241878_14 (sequence is synthesized)
tgattcggctaccacctgttccagaggtgcagacaagaggtggcgagagcccccatcatgcccctcaacctatcccgttccttctgcctacaaataaaaagtgcaggctggaatgatctc

SEQ ID NO: 774684 - DNA, 120 bp, Artificial Sequence
  ENSG00000241878_15 (sequence is synthesized)
agtcacatttggatctttttaaacactgtatagacggaagagcctgcattcctgaccgaaccttcagttggtctcggttgtcgttttttcttgctgctcctccccccatcacctgagctg

SEQ ID NO: 774685 - DNA, 120 bp, Artificial Sequence
  ENSG00000241878_16 (sequence is synthesized)
ttttctgttggccccttttgttttttggccttaacgctcctgctgcacagggtgaggtgcctccttggcacagactgtggatgcctctcccccagcagagccacacagccttcgtgacaa

SEQ ID NO: 774686 - DNA, 120 bp, Artificial Sequence
  ENSG00000241878_17 (sequence is synthesized)
ctgctttccgttcccacattcacctcatcctgctctttagaaaaagcagtctttgtgcttgtggctgaacgcatcaccctggactctgctagtgtcttctgaggacactgatgacactga

SEQ ID NO: 774687 - DNA, 120 bp, Artificial Sequence
  ENSG00000241878_18 (sequence is synthesized)
ttaatgatacagacctttgcaggacctgatgagtgacccttctggagctggccaggtcctctgcagcaggcaagaccaatcaatcactgaacctgcctcatggcaccagagtgaacaggg

SEQ ID NO: 774688 - DNA, 120 bp, Artificial Sequence
  ENSG00000241878_19 (sequence is synthesized)
caggcaggtagtaggcccagctggggaaatgggagagttcctgtccccctccacatatccctacatgaaatatgggaaagttgctgctattgattcagggtctgtcttggaggcagagga

SEQ ID NO: 774689 - DNA, 120 bp, Artificial Sequence
  ENSG00000241878_20 (sequence is synthesized)
cccttggtggatagttggtcagtgcctggaaaacctgtcccagtttatcaggaacgcaggcctggggagcccccagtggcggggacagggccagatttcatgttgaccctggggatgctg

SEQ ID NO: 774690 - DNA, 120 bp, Artificial Sequence
  ENSG00000241878_21 (sequence is synthesized)
tgaatttctcctgcaggagagacatcattgaattttttcaactgtatcagtagcacagtatttttgtatgaaaagtgggagacttctgaacagtaattcatttaattgcaaagcattttg

SEQ ID NO: 774691 - DNA, 120 bp, Artificial Sequence
  ENSG00000241878_22 (sequence is synthesized)
ctgcgaccaagcccaggtttagcgaaacctacagctccactagttcccctacctccgcaggtgccaagcgggttaggtggggagtagccacagggcggagcttagtcggctccgccccca

SEQ ID NO: 774692 - DNA, 120 bp, Artificial Sequence
  ENSG00000241878_23 (sequence is synthesized)
acccgcgcttttctcattggcccactgaactcgagactcgtgacgccttaagcgtgcgcccagcgtgtgaagggggcgtggcacgctgagaaggagcagacaagatggcgacgtccgtgg

SEQ ID NO: 774693 - DNA, 120 bp, Artificial Sequence
  ENSG00000241878_24 (sequence is synthesized)
ggcaccgatgtctgggattactgcacggggtcgcgccgtggcggagcagcctccatccctgtgagatcactgccctgagccaatccctacagcccttacggaagctgccttttagagcct

SEQ ID NO: 774694 - DNA, 120 bp, Artificial Sequence
  ENSG00000241878_25 (sequence is synthesized)
ttcgcacagatgccagaaaaatccacactgcccctgcccgaaccatgttcctgctgcgtcccctgcccattctgttggtgacaggcggcgggtatgcagggtaccggcagtatgagaagt

SEQ ID NO: 774695 - DNA, 120 bp, Artificial Sequence
  ENSG00000241878_26 (sequence is synthesized)
accagagctccgcgcggcgaaatggtgagatgctgcccaccgcgccctaaccccacggttccccgccacgacctccggaaggtcagagttcacatccagcggcctcgcagtagaggtggc

SEQ ID NO: 774696 - DNA, 120 bp, Artificial Sequence
  ENSG00000241878_27 (sequence is synthesized)
aagtggggcctgaaagccctggcagcagtggctggtcccctccctgtcatggcttactggaccgggcagccctagggccttgccccctactgcctccccaggccagctgaggaagaggat

SEQ ID NO: 774697 - DNA, 120 bp, Artificial Sequence
  ENSG00000241878_28 (sequence is synthesized)
gagcagtgcaggctggctcagccctgggtagcagggacagagcaggtggccaggactggggacagtgggctttagtgcaggggcttttgcactggactgcaagccctgagcaggtgacct

SEQ ID NO: 774698 - DNA, 120 bp, Artificial Sequence
  ENSG00000241878_29 (sequence is synthesized)
ggtgggtcactgcacaggcggggctaggcagccctgctgctgtgtggctggaccgggagggaggggaatgctggggaaggaactgaggctggcatgtggggcctccctgagaatccatgt

SEQ ID NO: 774699 - DNA, 120 bp, Artificial Sequence
  ENSG00000241878_30 (sequence is synthesized)
gcagaccacactcgggctccgtgctgggtgctcactgtgttggtggcccccacgtctgctcctactccacagccgcgtcgtgtgactccttcaagaaccagctggtcacccgggaaggga

SEQ ID NO: 774700 - DNA, 120 bp, Artificial Sequence
  ENSG00000241878_31 (sequence is synthesized)
ccttcatccccccttcctcgcccctccacagacccagggcatttggtggacacttttgcttgcagttaggtcaagtggaggtatggaagaacatggaaatccatggaggaggaccctatc

SEQ ID NO: 774701 - DNA, 120 bp, Artificial Sequence
  ENSG00000241878_32 (sequence is synthesized)
gtgagcggagccggcgccccggccctgccgggagccccaggtgacttctcagggaggcgccccaccctgcccgctcagagggccagtgccgggtgggggtgcccttctagggccttcggt

SEQ ID NO: 774702 - DNA, 120 bp, Artificial Sequence
  ENSG00000241878_33 (sequence is synthesized)
cgcaggtgggctctcccagctgtgacgacgcggccccggcctgaggagccccgcggacaaggttgagcgagtcgtgggctttttttccgtccccacgtgggcacggcccgggctgcgtga

SEQ ID NO: 774703 - DNA, 120 bp, Artificial Sequence
  ENSG00000241878_34 (sequence is synthesized)
gcaggagccagttctcagggtccttggctgaacacacaagctgcaaagctacatatactccggcagagctggctgcgggctgcagactgcagggccggtcactccgcgcaagtttgggtt

SEQ ID NO: 774704 - DNA, 120 bp, Artificial Sequence
  ENSG00000241878_35 (sequence is synthesized)
ctccccagcacagcccccctggtctccagcgtatctggaaggggcaggatgacaaggggaggtgggggctgtctcctggggggaggagaccctgctctccctggcagcaagcctctcctg

SEQ ID NO: 774705 - DNA, 120 bp, Artificial Sequence
  ENSG00000241878_36 (sequence is synthesized)
cccttgcccccaccctcgcccccgggggaagtgcatggcccgcagtcaggccactggacacaggatttggggccctggaagtttctgctgaggcttcaagaggggtggtcctggcgttcc

SEQ ID NO: 774706 - DNA, 120 bp, Artificial Sequence
  ENSG00000241878_37 (sequence is synthesized)
aggcgcttcccatcagacagcaggagccagttctcagggtccttggctgaacacacaagctgcaaagctacatatactccggcagagctggctgcgggctgcagactgcaggtgacagtg

SEQ ID NO: 774707 - DNA, 120 bp, Artificial Sequence
  ENSG00000241878_38 (sequence is synthesized)
ccatatccctcactgcctgctccgccttgctaaggcttgaaccagaatccactaggagcaggactggccggtcactccgcgcaagtttgggttcctgttttagaactgccacctaagccc

SEQ ID NO: 774708 - DNA, 120 bp, Artificial Sequence
  ENSG00000241935_0 (sequence is synthesized)
agatcccactggagataccgaaggagatactctttagtattgggatcccagaaaccagtcctatatctggccagagggacactgggttgtggcatctctctagctgctacccagaaggaa

SEQ ID NO: 774709 - DNA, 120 bp, Artificial Sequence
  ENSG00000241935_1 (sequence is synthesized)
cagggccccctggggcctataggccttgcccctgaccctgggaacacccagctcaggcctgccccagtggccacaagtcagggaggccgcaaatttttaactagaaacattgatcattaa

SEQ ID NO: 774710 - DNA, 120 bp, Artificial Sequence
  ENSG00000241935_2 (sequence is synthesized)
tagggggttagaaagagttcaaactaagtctcactctgggacatagaccaattgtgcttcaggcctcctgcagagatgctgggtccccaagtctggtcttctgtgaggcaggggctaagc

SEQ ID NO: 774711 - DNA, 120 bp, Artificial Sequence
  ENSG00000241935_3 (sequence is synthesized)
aggagcttgtccaggaatgtgggggtctgggcctcaggggaggggaagaaggtggacattgcgggtatctacccccctgtgaccacccccttcactgccactgcagaggtggactatggg

SEQ ID NO: 774712 - DNA, 120 bp, Artificial Sequence
  ENSG00000241935_4 (sequence is synthesized)
aaactggaggagaatctgcacaaactgggcaccttccccttccgaggcttcgtggtccagggctccaatggcgagtttcctttcctgaccagcagtgagcgcctcgaggtggtgagccgt

SEQ ID NO: 774713 - DNA, 120 bp, Artificial Sequence
  ENSG00000241935_5 (sequence is synthesized)
gtgcgccaggccatgcccaagaacaggctcctgctagctggctccggatgcgagtccactcaagccacagtggagatgaccgtcagcatggcccaggtcggggctgacgcggccatggtg

SEQ ID NO: 774714 - DNA, 120 bp, Artificial Sequence
  ENSG00000241935_6 (sequence is synthesized)
gtgaccccttgctactatcgtggccgcatgagcagtgcggccctcattcaccactacaccaaggttgctgatctctctccaatccctgtggtgctgtacagtgtcccagccaacacaggg

SEQ ID NO: 774715 - DNA, 120 bp, Artificial Sequence
  ENSG00000241935_7 (sequence is synthesized)
ctggacctgcctgtggatgcagtggtcacgctttcccagcacccgaatattgtgggcatgaaggacagcggtggtgatgtgaccaggattgggctgattgttcacaagaccaggaagcag

SEQ ID NO: 774716 - DNA, 120 bp, Artificial Sequence
  ENSG00000241935_8 (sequence is synthesized)
gattttcaggtgttggctggatcggctggctttctgatggccagctatgccttgggagctgtggggggcgtctgcgccctggccaatgtcctgggggctcaggtgtgccagctggagcga

SEQ ID NO: 774717 - DNA, 120 bp, Artificial Sequence
  ENSG00000241935_9 (sequence is synthesized)
ctgtgctgcacggggcaatgggaagatgcccagaaactgcagcaccgcctcattgagccaaacgctgcggtgacccggcgctttgggatcccagggctgaagaaaatcatggactggttt

SEQ ID NO: 774718 - DNA, 120 bp, Artificial Sequence
  ENSG00000241935_10 (sequence is synthesized)
agccccgctgaggaggaggcactgcgcatggatttcaccagcaacggctggctctgagggcaggcagggtccatggctggcctgagcccatctcagcctcctgccttgcacttgcagcct

SEQ ID NO: 774719 - DNA, 120 bp, Artificial Sequence
  ENSG00000241935_11 (sequence is synthesized)
gaagcggagagcacagggggatgagggtggcaggcagcggggagccgatagaggctcctttgcctgctgtggtcctccaggcagcctttcacaggcacgcccatgcatatctcctattct

SEQ ID NO: 774720 - DNA, 120 bp, Artificial Sequence
  ENSG00000241935_12 (sequence is synthesized)
aacggcccctgacctctcccttttggatcctaaactgtgtctctggtctgaagactgggaaggagcaatttctcaatttatctttctactgtggatgctttcctacgccctgaggcacat

SEQ ID NO: 774721 - DNA, 87 bp, Artificial Sequence
  ENSG00000241935_13 (sequence is synthesized)
tctttctactgtggatgctttcctacgccctgaggcacatgaagtcagaaaggaagggcagaggggcaagtaggcacagtaagggaa

SEQ ID NO: 774722 - DNA, 67 bp, Artificial Sequence
  ENSG00000241935_14 (sequence is synthesized)
ggccgggaatttatcaaaggggggactacttagatttggggcttcaaacctgagtctagcacaatgc

SEQ ID NO: 774723 - DNA, 120 bp, Artificial Sequence
  ENSG00000241935_15 (sequence is synthesized)
acttagatttggggcttcaaacctgagtctagcacaatgcagctggaggccagggctactcctacaaacccaagttctgactccttccagggaagtatcagcttaagaaacttgatcagg

SEQ ID NO: 774724 - DNA, 120 bp, Artificial Sequence
  ENSG00000241935_16 (sequence is synthesized)
aaagtgacactggtctttcaaagagccctctttaccctcccatccctgccctccacactgcaagctgcattccagccacaacgcccttttctaaatctattttcattcatctcctattct

SEQ ID NO: 774725 - DNA, 120 bp, Artificial Sequence
  ENSG00000241935_17 (sequence is synthesized)
ggtctgtagccttgattccaaccattgaatgcacggagacagcccagtggcttgtcagattggtaaataatgacacctggtggataaatgttacattctagaagactattctggtcagcc

SEQ ID NO: 774726 - DNA, 120 bp, Artificial Sequence
  ENSG00000241935_18 (sequence is synthesized)
taggtctgaaacactaaggagacttggcctgagatagggccatccacttgcctacaggcactctgcttttattattaaaaatagtcactttgttactataataaaatttaacagaaaaaa

SEQ ID NO: 774727 - DNA, 120 bp, Artificial Sequence
  ENSG00000241935_19 (sequence is synthesized)
tacaccaaggtgtgtgtgaggcctgagaccaagaggaggctctgcccagggagaggagataagggaagctgggaatagggtggtgcttcacatgaacggcagctataggaaacgggtgga

SEQ ID NO: 774728 - DNA, 120 bp, Artificial Sequence
  ENSG00000241935_20 (sequence is synthesized)
ctgccaccatggatcagctgcacgacattgggaggcttacctgaccactctgtgttactgctttctcccctctaaaattggaggaatgatgtcatctgtctcatagggttgcagtgagca

SEQ ID NO: 774729 - DNA, 120 bp, Artificial Sequence
  ENSG00000241935_21 (sequence is synthesized)
ttaaatgagatcaggaacataaaggccttagaactgtgcgtggcatatggaaagcactccataaatatgacccactgtgattgcttacactcggggcacgtagcatgggagggaggcctg

SEQ ID NO: 774730 - DNA, 120 bp, Artificial Sequence
  ENSG00000241935_22 (sequence is synthesized)
cacttttgctcctgagggcagctctgagatctgtttccaaccttggcttctgtgtggattctctctgtcgtgcgggctctctgggactttcttgagggcatctctttgagcactgggctt

SEQ ID NO: 774731 - DNA, 120 bp, Artificial Sequence
  ENSG00000241935_23 (sequence is synthesized)
tcattccaccacacttacccggccctcatccaggatgaggctctgggcacagctctcacaccacatttgctgttgcaggtgaccaggattgggctgattgttcacaagaccaggaagcag

SEQ ID NO: 774732 - DNA, 120 bp, Artificial Sequence
  ENSG00000241935_24 (sequence is synthesized)
gattttcaggtgttggctggatcggctggctttctgatggccagctatgccttgggtaggccgcccactgctctcaaattgtcatgggtgaccaagagatacccaggtacctgggtcttc

SEQ ID NO: 774733 - DNA, 120 bp, Artificial Sequence
  ENSG00000241935_25 (sequence is synthesized)
cgggagagatcgtgagggctggggctgggtctgcagatggtagtttgccagcctgcccactctgaaaactcagaaacctggccacgccgcttacctgtctgaattcgggatgctgtgagt

SEQ ID NO: 774734 - DNA, 120 bp, Artificial Sequence
  ENSG00000241935_26 (sequence is synthesized)
aaccttgttggctgaaggaggatggccgtgtacaatccctggcctgtagtagggatgcctgcagtttgttctgagtcctgagctccatgattagatgacaaacttagctgctctaatccc

SEQ ID NO: 774735 - DNA, 120 bp, Artificial Sequence
  ENSG00000241935_27 (sequence is synthesized)
accttgtacatcattctctgagggcagaggccctggggccctcctctgtagttcaggagtccattttcctctcccctgtcccagaccagaatgaattgtcagatctacagagttgagcca

SEQ ID NO: 774736 - DNA, 120 bp, Artificial Sequence
  ENSG00000241935_28 (sequence is synthesized)
gggatcttcagttgcctgatcagattctgttccaatccaggatccctaggaatgtcacttagatcaactgctcttgtctgtttggggtcagggtccttgggtttggattagatttgagcc

SEQ ID NO: 774737 - DNA, 120 bp, Artificial Sequence
  ENSG00000241935_29 (sequence is synthesized)
ctggagggaagggagaagaagggaagctgttcccttcagctgaagccccagtgagtagagatttgagggacttttccagcactgcaggggagaatgcttgttcctattccatctggtccc

SEQ ID NO: 774738 - DNA, 120 bp, Artificial Sequence
  ENSG00000241935_30 (sequence is synthesized)
tccagactttggctggttgtctaggcctttgtacatctcccctgccatgtcatggcctctacggtgaaggggaagaagaagggatccatttctccctcattcctggaagtggagtagatt

SEQ ID NO: 774739 - DNA, 120 bp, Artificial Sequence
  ENSG00000241935_31 (sequence is synthesized)
cccagtgtgggaactccttgtgactcccagaaaatcctgacttcggacaaagtcgagcaccactgattgtcaaacttaagtgtgcattaaaatttccttgggggcgaattaaagttccaa

SEQ ID NO: 774740 - DNA, 120 bp, Artificial Sequence
  ENSG00000241945_0 (sequence is synthesized)
acacgtgcgacggccgtgatgaagttcgcttaccggttttcaaatttgctgggtacggtgtaccggcgtgggaacctaaattttacctgcgatggaaattcagttatcagtcccgtgggc

SEQ ID NO: 774741 - DNA, 120 bp, Artificial Sequence
  ENSG00000241945_1 (sequence is synthesized)
aatagagtcactgtatttgaccttaaaaacaacaaatctgacacgctgcccctggccactcggtacaacgtcaagtgcgtggggctgtccccggatggccgcctcgctatcatcgtcgat

SEQ ID NO: 774742 - DNA, 120 bp, Artificial Sequence
  ENSG00000241945_2 (sequence is synthesized)
gaagggggcgatgcgctgctggtcagcctggtctgcaggtctgtgctgcaccacttccacttcaagggctctgtgcacagtgtgtccttctcccctgatggcaggaagtttgttgtcaca

SEQ ID NO: 774743 - DNA, 120 bp, Artificial Sequence
  ENSG00000241945_3 (sequence is synthesized)
aagggtaacattgcccagatgtatcatgcccctgggaagaagcgggagttcaacgccttcgttctggacaagacctattttgggccctacgatgagaccacctgcatcgactggacggat

SEQ ID NO: 774744 - DNA, 120 bp, Artificial Sequence
  ENSG00000241945_4 (sequence is synthesized)
gactccaggtgctttgtggttgggagcaaagacatgtccacctgggtgttcggagccgagcgctgggacaacctcatctactatgcactggggggacataaggatgccatcgtggcctgc

SEQ ID NO: 774745 - DNA, 120 bp, Artificial Sequence
  ENSG00000241945_5 (sequence is synthesized)
ttctttgaatccaacagcctggacctgtactcactcagccaggacggagtgctgtgcatgtggcagtgtgacacgccccccgagggcttgcggctgaagccccctgcgggctggaaagca

SEQ ID NO: 774746 - DNA, 120 bp, Artificial Sequence
  ENSG00000241945_6 (sequence is synthesized)
gacctgttgcagcgggaggaggaagaggaggaggaggaggaccaggagggcgacagagagaccaccatccggggaaaagccactccggccgaggaggagaagacaggaaaagtgaagtac

SEQ ID NO: 774747 - DNA, 120 bp, Artificial Sequence
  ENSG00000241945_7 (sequence is synthesized)
tcacggctggccaagtacttcttcaataaagaaggggattttaacaacctgacagctgcagcatttcataagaagtctcacctcttggtcactggctttgcttctggaatcttccatctt

SEQ ID NO: 774748 - DNA, 120 bp, Artificial Sequence
  ENSG00000241945_8 (sequence is synthesized)
catgagctgccagagtttaacctcatccactccctgagcatttcagatcagagcatcgcctcagtggccatcaatagctcgggggactggattgcttttggctgttcaggcctgggccag

SEQ ID NO: 774749 - DNA, 120 bp, Artificial Sequence
  ENSG00000241945_9 (sequence is synthesized)
ctgctggtgtgggagtggcagagtgagtcctacgtgctcaagcagcagggccacttcaacagcatggtggccctggcctactcgcccgacggacagtacatcgtgactggcggggacgac

SEQ ID NO: 774750 - DNA, 120 bp, Artificial Sequence
  ENSG00000241945_10 (sequence is synthesized)
ggcaaggtcaaggtgtggaacaccctcagcggcttctgcttcgtcacttttacggagcactccagcggggtgaccggtgtgacctttactgccaccggctacgttgtggtgacctcatcc

SEQ ID NO: 774751 - DNA, 120 bp, Artificial Sequence
  ENSG00000241945_11 (sequence is synthesized)
atggacgggaccgtgcgagcctttgaccttcacaggtaccgaaacttccgcaccttcacctctccacgccccacccagttctcctgtgtggcggtggatgcgagcggtgagatcgtctct

SEQ ID NO: 774752 - DNA, 120 bp, Artificial Sequence
  ENSG00000241945_12 (sequence is synthesized)
gcaggggcgcaggactcctttgagattttcgtgtggtccatgcagacaggcaggctccttgatgttttgtctggacacgaagggcccatcagtggtctgtgttttaacccaatgaagtcc

SEQ ID NO: 774753 - DNA, 120 bp, Artificial Sequence
  ENSG00000241945_13 (sequence is synthesized)
ggagacgctggccctgacctctgatgctctggctgtgacttttcgccctgatggtgcggagctggctgtggccacactgaactcacagatcaccttctgggaccctgagaacgcggtgca

SEQ ID NO: 774754 - DNA, 120 bp, Artificial Sequence
  ENSG00000241945_14 (sequence is synthesized)
gacgggctccattgagggcaggcatgacctcaagactggcaggaaggagctggacaagattacagccaagcacgcggccaaggggaaggccttcaccgccctgtgctactctgcagacgg

SEQ ID NO: 774755 - DNA, 120 bp, Artificial Sequence
  ENSG00000241945_15 (sequence is synthesized)
ccacagcatcctggcgggaggcatgtccaagttcgtgtgcatctaccacgtccgtgagcagattctcatgaagaggttcgagatctcttgcaacctgtctttggacgccatggaggaatt

SEQ ID NO: 774756 - DNA, 120 bp, Artificial Sequence
  ENSG00000241945_16 (sequence is synthesized)
tttgaaccgaagaaaaatgacagagtttggcaacctggcactaattgatcaggatgctgggcaggaggatggagtcgcgataccactgccaggcgtcaggaaaggtgacatgagttctcg

SEQ ID NO: 774757 - DNA, 120 bp, Artificial Sequence
  ENSG00000241945_17 (sequence is synthesized)
gcacttcaaacctgagatcagggtgacctcactccgcttctctcccactgggcgctgctgggcggccaccaccacggagggactcctcatctactccctggacacccgcgtgctctttga

SEQ ID NO: 774758 - DNA, 120 bp, Artificial Sequence
  ENSG00000241945_18 (sequence is synthesized)
cccgtttgagctggacaccagcgtcacccccgggagggtgcgcgaggcactgcgccagcaggacttcaccagggccatcctcatggccctccggctcaacgagagcaaactggtgcagga

SEQ ID NO: 774759 - DNA, 120 bp, Artificial Sequence
  ENSG00000241945_19 (sequence is synthesized)
ggccctggaggcggtgcccaggggcgagattgaagtggtcacctcctcccttcctgaactgtatgtggagaaagtgctggagtttttagcttcctcctttgaagtgtctcgccacctgga

SEQ ID NO: 774760 - DNA, 120 bp, Artificial Sequence
  ENSG00000241945_20 (sequence is synthesized)
attctacctcctctggactcacaaactgctcatgttgcacggacagaagctgaagtccagagccgggacgctgctgcctgtcattcagttcctccagaagagcatccagcggcacctgga

SEQ ID NO: 774761 - DNA, 120 bp, Artificial Sequence
  ENSG00000241945_21 (sequence is synthesized)
cgacctgtcgaaactctgtagctggaaccactataacatgcagtacgcactagcagtttccaagcagcggggcacaaaacgctccctagacccgctgggaagtgaggaggaggcagaagc

SEQ ID NO: 774762 - DNA, 120 bp, Artificial Sequence
  ENSG00000241945_22 (sequence is synthesized)
atctgaagatgacagcctgcatctgcttggaggaggaggcagagactcagaagaagagatgctggcctagagccagccggttgcagcgttggattgtgccggctaagacctgccagggag

SEQ ID NO: 774763 - DNA, 120 bp, Artificial Sequence
  ENSG00000241945_23 (sequence is synthesized)
atgggacccttgtgccacctgggccagcaaagaggaggggtccagagaacagctgaaatactgtcactagtggtagtgacttgcttttcctgtgcacacatgtagcccatcaggacagcg

SEQ ID NO: 774764 - DNA, 120 bp, Artificial Sequence
  ENSG00000241945_24 (sequence is synthesized)
agccgacgggtcacgccaggggccggcacgcactggcacctggccccaggagcggggccgtgtgaacggtgatgaatgttgaaaatgcgtctcagagaggtattcacatgaactttgtat

SEQ ID NO: 774765 - DNA, 120 bp, Artificial Sequence
  ENSG00000241945_25 (sequence is synthesized)
gagacttatttatatctttaacataaaggtttgataaagaacttagggattaaaaaaaagatggagttttctaacgtgaggatgaagtctacacttcagattaaaaagggttatgttgta

SEQ ID NO: 774766 - DNA, 120 bp, Artificial Sequence
  ENSG00000241945_26 (sequence is synthesized)
ggttcctcctgatttttgcactttgtcccaggggaatgtacttaatactgtttctttaaaaaaaaaaaaaaagaaaaaaaatgttgggaggaatgagcttaaatttttaggaaagcactg

SEQ ID NO: 774767 - DNA, 120 bp, Artificial Sequence
  ENSG00000241945_27 (sequence is synthesized)
gcctgcctcagttgtgacctgcaaccactgggttgcacgggcggggcccatcactggctggtgaagctgcagcatcgggcagtggtcccagcctatgcttgggggtttgtgcgtttcacc

SEQ ID NO: 774768 - DNA, 120 bp, Artificial Sequence
  ENSG00000241945_28 (sequence is synthesized)
tcctggccagtgcctcctgggacaagacagtgcgcctatgggacatgtttgacagctggaggaccaaggagacgctggccctgacctctgatggtgagcacgaggcagcaggcaggagca

SEQ ID NO: 774769 - DNA, 120 bp, Artificial Sequence
  ENSG00000241945_29 (sequence is synthesized)
gcggcctggggaccagcagcatgctgtcacacccactgccctgttcctcgttgtgggtttggtgtgaaccttctggtgggaagcagggggtggcttttatccagacctgctggtgtggca

SEQ ID NO: 774770 - DNA, 120 bp, Artificial Sequence
  ENSG00000241945_30 (sequence is synthesized)
gcccttgaggttggcagtacctaggagacagcagattggcgagtcaggccagcgtggcttccacaagtccttgtggggctcccgctctgtgggcaagtacgccaggcaggagagaacagc

SEQ ID NO: 774771 - DNA, 120 bp, Artificial Sequence
  ENSG00000241945_31 (sequence is synthesized)
tccccgagggtgaagggctgctgccgcagctgcttcctgattttcggagttgctttggagctctgccagggctgtgtcactgggagaaggacacagggaccatggggggcccagacgctg

SEQ ID NO: 774772 - DNA, 120 bp, Artificial Sequence
  ENSG00000241945_32 (sequence is synthesized)
gatgcggccagtcccggaatctgcagactgggagaaggatgagggggccataggtgggcccggaagccagatgcggctgcccagggatctgcagactggcctcaggccactgcctgtctt

SEQ ID NO: 774773 - DNA, 120 bp, Artificial Sequence
  ENSG00000241945_33 (sequence is synthesized)
tctgacggggctgtactagaggcagccgtggcctcctgtgttcatatggtctgtggctgtcaatgcctcagcggcggtgttgaaagaccacgtggctcacaaagacccagcccatccatg

SEQ ID NO: 774774 - DNA, 120 bp, Artificial Sequence
  ENSG00000241945_34 (sequence is synthesized)
tccgggtgtggacagactctgccatcccaggaggctggttctctctgcttcccgctgcctcaccccacccccaggcctggcattggccaggcttttggcatcacatgtggcttctttgca

SEQ ID NO: 774775 - DNA, 120 bp, Artificial Sequence
  ENSG00000241945_35 (sequence is synthesized)
gaggctctgtattctagtctgtccagccgccctcagtaaccaccatcactcacccatcagcctcaccttcccagcgccccctccatcggcctttgtgggtcctgtggccccagctggacc

SEQ ID NO: 774776 - DNA, 120 bp, Artificial Sequence
  ENSG00000241945_36 (sequence is synthesized)
gcctggtgctcttcactggcgctgagttgttcctcacctgtctgggttggagcttctcctgggaggagattcttgtgtaccagaccaaacaggcgctggtctcttaggggtgccagggca

SEQ ID NO: 774777 - DNA, 120 bp, Artificial Sequence
  ENSG00000241945_37 (sequence is synthesized)
ttctgcactcctggctccatggggccttgggcacagttgtggtgcttgtcctgtatctaagtgcacgggcccctcacctgccccagcagagtccggccgtgaagccagcacctgcctcag

SEQ ID NO: 774778 - DNA, 120 bp, Artificial Sequence
  ENSG00000241945_38 (sequence is synthesized)
ctgtgtgtggagccacggtccccaacccttttggcatttgggaccggtttcgtggaaggcaatttttccacagacagggttggggggattgattttgggatgaaactgtttcacctcaga

SEQ ID NO: 774779 - DNA, 120 bp, Artificial Sequence
  ENSG00000241945_39 (sequence is synthesized)
tcaagatcaccaggcattagattctcagaaggagggtgcaacctagatccctcacgtgtcgttcacaatagggttcgcactcctgtgagaatctaatgctgccactgatctgtcaggagg

SEQ ID NO: 774780 - DNA, 120 bp, Artificial Sequence
  ENSG00000241945_40 (sequence is synthesized)
cggagctcaggtggtgatgcgagcaatggggagcggctgtaaattcagatgaagcttcactcattcacctgcccaccactcacctcctgccgtgcagcctgtttcctaacagaccatggg

SEQ ID NO: 774781 - DNA, 120 bp, Artificial Sequence
  ENSG00000241945_41 (sequence is synthesized)
ccagtaccaggggttgggaaccactgctgtggatgaccctgccgaggctggttgctaggaggctggagctgtgaggggcagtgcccagcacacgctggctcaggagacacggacatctgt

SEQ ID NO: 774782 - DNA, 120 bp, Artificial Sequence
  ENSG00000241945_42 (sequence is synthesized)
cagggaaggagtgaacgaagagggtgctggtaggccctgcccgatggcttcctgcccggggtcctgtgtacaaggctctgccttcactgtccccactggtgcctgcccttccccctcagc

SEQ ID NO: 774783 - DNA, 120 bp, Artificial Sequence
  ENSG00000241945_43 (sequence is synthesized)
acagccctcggctcaggtcccactcacatgctggctcctgcaggacctcagaatgagagtgaggaagccctggtagcctctaagcaggggtgtggctgctgggttcacctgtccacgccc

SEQ ID NO: 774784 - DNA, 120 bp, Artificial Sequence
  ENSG00000241945_44 (sequence is synthesized)
catcggggcagaagcccactgtcccctaaatgtttctgggggaaagtgtccttggcattttcacaagggagtagacggccatcctcgctgtgagccccagcctttgtgatggtggcagca

SEQ ID NO: 774785 - DNA, 120 bp, Artificial Sequence
  ENSG00000241945_45 (sequence is synthesized)
atgccagcatgtagacctcagtccatccccctccgcagcctccgcacctgccctgctccacagcttccacacccaccctgtctgcagctagctctgcaggaagagtccctggggcactgc

SEQ ID NO: 774786 - DNA, 120 bp, Artificial Sequence
  ENSG00000241945_46 (sequence is synthesized)
agggctctctccccgtccttgttctagacagggctgaggcttgtctggtgttggggtcaaagagcaagggtaggagacgagggccaggcggccaggccatcagaagcaaggcgtccactg

SEQ ID NO: 774787 - DNA, 120 bp, Artificial Sequence
  ENSG00000241945_47 (sequence is synthesized)
tgccatagcaaggctggccaccatggagctgtctgcaggctctgggctgtgccctgtgcccctgggtaagaacatggccctgcaaaccctgcaggccacaagatggctgttgtccctgag

SEQ ID NO: 774788 - DNA, 120 bp, Artificial Sequence
  ENSG00000241945_48 (sequence is synthesized)
gatggatggctgtcacggtgccaacctcagatgcactgagctttgaaacatggcaggcctggtatgcccttgctctagcagctccccgagtgccctggacgtgctgcctgggggcggctc

SEQ ID NO: 774789 - DNA, 120 bp, Artificial Sequence
  ENSG00000241945_49 (sequence is synthesized)
tgccatcacggagagcccgtctcctgcgcactgcccccatcctctcgcagtggggaggagggtctgtgccacaggcctgtggagcctggcggtgcacatggtccccacacagaggagcca

SEQ ID NO: 774790 - DNA, 120 bp, Artificial Sequence
  ENSG00000241945_50 (sequence is synthesized)
ggagcagggctattggcaagcgtgctccagcctagactgagtgtcagagccaggggcagagaggcccatgtgagccaggggtctgtgccctcgggcccaagggccaaatctggctggcca

SEQ ID NO: 774791 - DNA, 120 bp, Artificial Sequence
  ENSG00000241945_51 (sequence is synthesized)
cctgctttggtcactgatgttttactgggacattttactgggcgtttttttgttggcggatccttctggctgtctctagtgatccgtgcagcactgagtaggtgcagcagagaccacagg

SEQ ID NO: 774792 - DNA, 120 bp, Artificial Sequence
  ENSG00000241945_52 (sequence is synthesized)
gcctgcggagctgaagacgcctgagctagacagaagacttggctggctcccggcgtcaagagaggaggacgcatgcgtgtacatatttgcttatatgtgcatccctgggagagtaacttc

SEQ ID NO: 774793 - DNA, 120 bp, Artificial Sequence
  ENSG00000241945_53 (sequence is synthesized)
tgggatgatccattcattccttcccaggggagtagtggggtgggggctagaggcagacgtcccggttcctcctgatttttgcactttgtcccaggggaatgtacttaatactgtttcttt

SEQ ID NO: 774794 - DNA, 120 bp, Artificial Sequence
  ENSG00000241962_0 (sequence is synthesized)
gagcgacgcgtacgtctacctgcctgccttacagggcacctaggagggaccccttcctggcccatccgcgccgcgcaggcgcacgcccacgcagcgcctagacgcccgagccgagcgtcc

SEQ ID NO: 774795 - DNA, 120 bp, Artificial Sequence
  ENSG00000241962_1 (sequence is synthesized)
cgtctcctagtaaccagccgctagcccccttttccacgactcatttcttaatctctgcctgaggctgccgcacctggatggaacgcgcatgcgcaaggctgtctctcgcagccccgcctt

SEQ ID NO: 774796 - DNA, 120 bp, Artificial Sequence
  ENSG00000241962_2 (sequence is synthesized)
ccctcagcttgaaacacctgctgcttcgcggcggtggctttgtgccacttttcccagggcttgggcatcattctggacccatgttcggtgaaccggttactctcagagctgctttcgggc

SEQ ID NO: 774797 - DNA, 120 bp, Artificial Sequence
  ENSG00000241962_3 (sequence is synthesized)
gcagctcctgctgcagccagggcccgttttaagagaggcttccaggtccagccctcccgctgcagcctgcagggagcgagccggcctgtcccgatgacatagacactaggtttttacagc

SEQ ID NO: 774798 - DNA, 120 bp, Artificial Sequence
  ENSG00000241962_4 (sequence is synthesized)
aattctctgatgaccttgatatggtagaacgctgtgtatttcaagagtaagctctcgtttgaggagactaacaattcctgttttcgccagatttcttcttgaatggcaacctaaatgcca

SEQ ID NO: 774799 - DNA, 120 bp, Artificial Sequence
  ENSG00000241962_5 (sequence is synthesized)
gtccaaagaggcccccaatagacttgttcacccttcatgtcctcaactctggggaagttaagtaatcaagttgaagaaacacttccactacttaaaaagcctctaaagagagcaatcact

SEQ ID NO: 774800 - DNA, 120 bp, Artificial Sequence
  ENSG00000241962_6 (sequence is synthesized)
acacttatggctgggattttgcgcttagtagttcaatggcccccaggcagactacagactgtgacaaaaggtgtggagtctcttatttgtacagattggattcgtcacaaattcaccaga

SEQ ID NO: 774801 - DNA, 120 bp, Artificial Sequence
  ENSG00000241962_7 (sequence is synthesized)
tcaagaattccagaaaaagtgtttcaggcctcacctgaagatcatgaaaaatacggtggggatccacagaaccctcataaactgcatattgttaccagaataaaaagtacaagaagacgt

SEQ ID NO: 774802 - DNA, 120 bp, Artificial Sequence
  ENSG00000241962_8 (sequence is synthesized)
atgcttggattagaaaaagcacatacccctcaagttcacaagaatatcccttcagtgaatgcaaaattgaaagtagttaagcatttgataagaatcaagcccttgaagttgccacaagga

SEQ ID NO: 774803 - DNA, 120 bp, Artificial Sequence
  ENSG00000241962_9 (sequence is synthesized)
cttccagcagaggagaacatgtctaacacgtgcctcaaaagcactggggagttagtagtgcagtggcatctgaaacctgtggagcagaaagcacatgagtcctaatgccccagcagcttc

SEQ ID NO: 774804 - DNA, 89 bp, Artificial Sequence
  ENSG00000241962_10 (sequence is synthesized)
ggagcagaaagcacatgagtcctaatgccccagcagcttccgattggaaaatgcaaattgtttttatttaaagatgactaatgccacgg

SEQ ID NO: 774805 - DNA, 120 bp, Artificial Sequence
  ENSG00000241962_11 (sequence is synthesized)
tcagcctcccgagtagctgggaccacagaaaccacaacaaaggtgcttgcccatggctcctcgcttccctctgcctcatgactgatgccaattattccccttgtggccccctgtggtgtg

SEQ ID NO: 774806 - DNA, 120 bp, Artificial Sequence
  ENSG00000241962_12 (sequence is synthesized)
ccctgtggtgtgacatgtactccctctccggggatccgaaatgaaaccaatttctacaacataggaatgatttcggcatgtctaggagagtcagagaaaagacgggagggaaatggggga

SEQ ID NO: 774807 - DNA, 120 bp, Artificial Sequence
  ENSG00000241962_13 (sequence is synthesized)
gaaagaaaaacgtgagagaaccttctacttcctgaaaggcaccatgactctggaatgttacctgtaattaagaatgtcagaagaaccgagcctccattctaaagtttctgtggtgaagtc

SEQ ID NO: 774808 - DNA, 120 bp, Artificial Sequence
  ENSG00000241962_14 (sequence is synthesized)
atctgtatttcctaggaaacttgaagaggaacaaactgaaacttgacaaaactcggaagagacttacaagaatcagaagtgcacacatggtgccatatttggaagtcatgaagaaaaact

SEQ ID NO: 774809 - DNA, 120 bp, Artificial Sequence
  ENSG00000241962_15 (sequence is synthesized)
gaacagcattaccgaggaaaaacttcttactcctaaatatgcaacgctgtcagtaagaagcacattaaggctaagggttactaataatatttaaataaatgtggccattatgcttctagg

SEQ ID NO: 774810 - DNA, 80 bp, Artificial Sequence
  ENSG00000241973_0 (sequence is synthesized)
ggatgcacctacgcctgcgccctgaggtcgggcgctcgcgggccaggagcggggagccggcgggcagcgccgcggctcgt

SEQ ID NO: 774811 - DNA, 120 bp, Artificial Sequence
  ENSG00000241973_1 (sequence is synthesized)
gaggcggaggcggcggcggctgctccggctccggctccagcgcctcgcggggcttctatttcaacacggtcctgtcactggcccgctccctggcggtgcagagaccagcatccttggaga

SEQ ID NO: 774812 - DNA, 120 bp, Artificial Sequence
  ENSG00000241973_2 (sequence is synthesized)
aggtccaaaagcttctttgcatgtgtccagtggatttccatgggatcttccagttagatgaaagacggagagatgcagtgattgcattgggcatttttctgattgaatctgatcttcagc

SEQ ID NO: 774813 - DNA, 120 bp, Artificial Sequence
  ENSG00000241973_3 (sequence is synthesized)
acaaagattgtgtggttccttaccttcttcgacttctcaaaggtcttccaaaagtgtattgggtagaagaaagcacagctcggaaaggcagaggtgccctcccggttgcagagagcttca

SEQ ID NO: 774814 - DNA, 120 bp, Artificial Sequence
  ENSG00000241973_4 (sequence is synthesized)
gcttctgcttggtaactctgctgtctgatgtggcctatagggatccttcacttagggatgagattttagaggtgcttttgcaggttttgcatgtcctcttggggatgtgccaggccttgg

SEQ ID NO: 774815 - DNA, 120 bp, Artificial Sequence
  ENSG00000241973_5 (sequence is synthesized)
agattcaagacaaagaatacctttgcaagtatgctatcccatgcctgataggaatctcgcgagcatttgggcgttacagcaacatggaagagtctctcctctcaaagctctttcccaaaa

SEQ ID NO: 774816 - DNA, 120 bp, Artificial Sequence
  ENSG00000241973_6 (sequence is synthesized)
tccctcctcattccctccgtgtcctggaagagcttgaaggtgttcgaaggcgttcctttaatgacttccgctccatcctccccagcaatctgctgactgtctgtcaggagggtaccctga

SEQ ID NO: 774817 - DNA, 120 bp, Artificial Sequence
  ENSG00000241973_7 (sequence is synthesized)
agaggaaaaccagcagtgtgtccagcatctctcaggtcagccctgaacgcggcatgccccctcccagttcccctggaggatctgcctttcactactttgaagcctcctgcttgcccgatg

SEQ ID NO: 774818 - DNA, 120 bp, Artificial Sequence
  ENSG00000241973_8 (sequence is synthesized)
ggactgccctagagcctgagtactacttttcaaccatcagctccagcttctcagtctctccccttttcaacggtgtcacatataaggagtttaacattccattggaaatgcttcgggaac

SEQ ID NO: 774819 - DNA, 120 bp, Artificial Sequence
  ENSG00000241973_9 (sequence is synthesized)
tcttaaacctggtgaagaagatcgttgaggaggctgttctcaaatctttggatgccattgtagccagtgtgatggaggccaaccccagtgctgatctctactacacttccttcagtgacc

SEQ ID NO: 774820 - DNA, 120 bp, Artificial Sequence
  ENSG00000241973_10 (sequence is synthesized)
ctctctacctgaccatgttcaagatgctgcgtgacactctgtactacatgaaggacctcccgacctcttttgtgaaggagatccatgattttgtgctggagcagttcaacacgagccagg

SEQ ID NO: 774821 - DNA, 120 bp, Artificial Sequence
  ENSG00000241973_11 (sequence is synthesized)
gggagctccagaagattctacatgacgcagaccggatccacaatgagctgagccccctcaaactgcgctgtcaggcgaatgctgcctgtgtggacctcatggtgtgggctgtgaaggacg

SEQ ID NO: 774822 - DNA, 120 bp, Artificial Sequence
  ENSG00000241973_12 (sequence is synthesized)
agcagggtgcagaaaacctttgcatcaagctatctgagaagctgcagtccaagacgtccagcaaagtcattattgctcacttgcccctgctgatctgctgtctgcagggtttgggccgcc

SEQ ID NO: 774823 - DNA, 120 bp, Artificial Sequence
  ENSG00000241973_13 (sequence is synthesized)
tgtgcgagaggttcccggtggtggtgcactctgtgacaccgtccttgcgagacttcctggtcatcccgtccccagttctggtgaagctctacaagtaccacagtcagtaccacacagttg

SEQ ID NO: 774824 - DNA, 120 bp, Artificial Sequence
  ENSG00000241973_14 (sequence is synthesized)
ctggcaatgatataaaaatcagtgtgaccaatgagcattccgagtcaaccctgaacgtcatgtcgggtaagaagagccagccctccatgtacgagcagctccgagacatcgctattgaca

SEQ ID NO: 774825 - DNA, 120 bp, Artificial Sequence
  ENSG00000241973_15 (sequence is synthesized)
acatctgcaggtgcctgaaggctggattgacggtggacccagtgattgtggaggcgttcttggccagcctgtccaaccggctctacatctctcaggagagcgacaaggacgctcacttga

SEQ ID NO: 774826 - DNA, 120 bp, Artificial Sequence
  ENSG00000241973_16 (sequence is synthesized)
ttcccgaccacacaatccgagccttgggacacattgcggtggccttgagggacaccccgaaggtcatggagcccattctgcagatcctacagcagaaattctgccagccaccctcccccc

SEQ ID NO: 774827 - DNA, 120 bp, Artificial Sequence
  ENSG00000241973_17 (sequence is synthesized)
tcgatgtgctgattattgaccagctgggctgcctggttatcaccggaaatcaatacatctatcaggaagtgtggaacctcttccagcagatcagtgtgaaggccagctccgttgtatact

SEQ ID NO: 774828 - DNA, 120 bp, Artificial Sequence
  ENSG00000241973_18 (sequence is synthesized)
cagccaccaaagattacaaggaccacggctataggcattgctccctggcagtgattaatgccctggccaacatcgcggccaacatccaagacgagcacctggtggatgagctgctcatga

SEQ ID NO: 774829 - DNA, 120 bp, Artificial Sequence
  ENSG00000241973_19 (sequence is synthesized)
acctgttggagttgtttgtgcagctggggctggaggggaagcgagccagcgagagggcaagcgagaagggccctgccctaaaggcttctagcagtgcagggaacttgggagtactcattc

SEQ ID NO: 774830 - DNA, 120 bp, Artificial Sequence
  ENSG00000241973_20 (sequence is synthesized)
ctgtaatagctgtgctcacccgacgactgccacccatcaaagaagctaagcctcggttacagaagctcttccgagacttctggctgtattccgttctgatgggattcgctgtggagggct

SEQ ID NO: 774831 - DNA, 120 bp, Artificial Sequence
  ENSG00000241973_21 (sequence is synthesized)
caggactctggccagaagaatggtacgagggggtctgtgaaatagccactaagtcccccttgctcacctttcccagcaaggagccactgcggtccgtcctccagtataactcagccatga

SEQ ID NO: 774832 - DNA, 120 bp, Artificial Sequence
  ENSG00000241973_22 (sequence is synthesized)
agaatgacacggtcacccccgctgagctgagtgagctccgcagcactatcatcaacctgctggacccccctcccgaggtgtccgcactcatcaacaagctggacttcgccatgtccacct

SEQ ID NO: 774833 - DNA, 120 bp, Artificial Sequence
  ENSG00000241973_23 (sequence is synthesized)
acctcctctctgtgtaccggctggagtacatgagggtactgcgttcaacagatcctgatcgcttccaggtaatgttctgctactttgaggataaagctattcagaaagacaaatctggga

SEQ ID NO: 774834 - DNA, 120 bp, Artificial Sequence
  ENSG00000241973_24 (sequence is synthesized)
tgatgcagtgtgtgattgcagtcgcggacaaagtattcgatgccttcctgaacatgatggcggataaagccaagaccaaggagaacgaggaggagctggagcggcacgctcagttcctgt

SEQ ID NO: 774835 - DNA, 120 bp, Artificial Sequence
  ENSG00000241973_25 (sequence is synthesized)
tggtgaacttcaaccacatccacaagaggataaggagggtggcagacaagtatctatctggtctggtggataagtttccccacttgctctggagcgggactgtgctgaagaccatgctgg

SEQ ID NO: 774836 - DNA, 120 bp, Artificial Sequence
  ENSG00000241973_26 (sequence is synthesized)
acatcctgcagaccctgtcactgtcactgagcgctgatattcacaaggatcagccttactatgacatccccgacgccccctaccggatcacggttcctgacacgtacgaagcccgtgaga

SEQ ID NO: 774837 - DNA, 120 bp, Artificial Sequence
  ENSG00000241973_27 (sequence is synthesized)
gcattgtgaaggacttcgctgcacgctgtgggatgatcctccaggaggccatgaagtgggcacctaccgtcaccaagtcccacctgcaggaatatctgaacaaacatcagaactgggtat

SEQ ID NO: 774838 - DNA, 120 bp, Artificial Sequence
  ENSG00000241973_28 (sequence is synthesized)
ggccactgagagcatccttcactttgctggctacaacaagcagaacacaactcttggggcaactcagctgagcgagcgcccggcctgtgtgaagaaagactactccaacttcatggcatc

SEQ ID NO: 774839 - DNA, 120 bp, Artificial Sequence
  ENSG00000241973_29 (sequence is synthesized)
cctgaatctgcgcaaccgctacgcgggcgaggtgtatggaatgattcggttctcaggcaccacaggccagatgtctgacctgaacaaaatgatggtccaggatctacattcagctttaga

SEQ ID NO: 774840 - DNA, 120 bp, Artificial Sequence
  ENSG00000241973_30 (sequence is synthesized)
ccgcagtcatcctcagcactacacgcaggccatgttcaagctgaccgcaatgctcattagcagtaaagattgtgacccgcagctccttcatcatctgtgctggggtcccctccggatgtt

SEQ ID NO: 774841 - DNA, 120 bp, Artificial Sequence
  ENSG00000241973_31 (sequence is synthesized)
caatgagcatggcatggagacggccctggcctgctgggagtggctgctggctggcaaggatggagtggaagtgccgttcatgcgggagatggcaggggcctggcacatgacggtggagca

SEQ ID NO: 774842 - DNA, 120 bp, Artificial Sequence
  ENSG00000241973_32 (sequence is synthesized)
gaaatttggcctgttttctgctgagataaaggaagcagaccccctggctgcctcggaagcaagtcaacccaaaccctgtccccccgaagtgaccccccactacatctggatcgacttcct

SEQ ID NO: 774843 - DNA, 120 bp, Artificial Sequence
  ENSG00000241973_33 (sequence is synthesized)
ggtgcagcggtttgagatcgccaagtactgcagctctgaccaagtggagatcttctccagcctgctgcagcgctccatgtccctgaacatcggcggggccaaggggagcatgaaccggca

SEQ ID NO: 774844 - DNA, 120 bp, Artificial Sequence
  ENSG00000241973_34 (sequence is synthesized)
cgtggcggccatcgggccccgcttcaagctgctgaccctggggctgtccctcctgcatgccgatgtggttccaaatgcaaccatccgcaatgtgcttcgcgagaagatctactccactgc

SEQ ID NO: 774845 - DNA, 120 bp, Artificial Sequence
  ENSG00000241973_35 (sequence is synthesized)
ctttgactacttcagctgtcccccaaagttccctactcaaggagagaagcggctgcgtgaagacataagcatcatgattaaattttggaccgccatgttctcagataagaagtacctgac

SEQ ID NO: 774846 - DNA, 120 bp, Artificial Sequence
  ENSG00000241973_36 (sequence is synthesized)
cgccagccagcttgttcccccagataatcaggacacccggagcaacctggacataactgtcggctctcggcaacaagccacccaaggctggatcaacacataccccctgtccagcggcat

SEQ ID NO: 774847 - DNA, 120 bp, Artificial Sequence
  ENSG00000241973_37 (sequence is synthesized)
gtccaccatctccaagaaatcaggcatgtctaagaaaaccaaccggggctcccagctgcacaaatactacatgaagcgcaggacgctgctgctgtccctgctggccactgagatcgagcg

SEQ ID NO: 774848 - DNA, 120 bp, Artificial Sequence
  ENSG00000241973_38 (sequence is synthesized)
tctcatcacatggtacaacccgctgtcagccccggaactggaactagaccaggccggagagaacagcgtggccaactggagatctaagtacatcagcctgagtgagaagcagtggaagga

SEQ ID NO: 774849 - DNA, 120 bp, Artificial Sequence
  ENSG00000241973_39 (sequence is synthesized)
caacgtgaacctcgcctggagcatctctccctacctagccgtgcagctgcctgccaggtttaagaacacagaagccattgggaacgaagtgacccgtctcgttcggttggacccgggagc

SEQ ID NO: 774850 - DNA, 120 bp, Artificial Sequence
  ENSG00000241973_40 (sequence is synthesized)
cgttagtgatgtgcctgaagcaatcaagttcctggtcacctggcacaccatcgacgccgatgctccagagctcagccatgtgctgtgctgggcgcccacggacccacccacaggcctctc

SEQ ID NO: 774851 - DNA, 120 bp, Artificial Sequence
  ENSG00000241973_41 (sequence is synthesized)
ctacttctccagcatgtacccgccgcaccctctcacggcgcagtacggggtgaaagtcctgcggtccttccctccggacgccatcctcttctacatcccccagattgtgcaggccctcag

SEQ ID NO: 774852 - DNA, 120 bp, Artificial Sequence
  ENSG00000241973_42 (sequence is synthesized)
gtacgacaagatgggctatgtgcgggagtatattctgtgggcagcgtctaaatcccagcttctggcacaccagttcatctggaacatgaagactaacatttatctagatgaagagggcca

SEQ ID NO: 774853 - DNA, 120 bp, Artificial Sequence
  ENSG00000241973_43 (sequence is synthesized)
ccagaaagaccctgacatcggcgacctcctggatcagttggtagaggagatcacaggctccttgtccggcccagcgaaggacttttaccagcgggagtttgatttctttaacaagatcac

SEQ ID NO: 774854 - DNA, 120 bp, Artificial Sequence
  ENSG00000241973_44 (sequence is synthesized)
caacgtgtcggctatcatcaagccctaccctaaaggcgacgagagaaagaaggcttgtctgtcggccctgtctgaagtgaaggtgcagccgggctgctacctgcccagcaaccctgaggc

SEQ ID NO: 774855 - DNA, 120 bp, Artificial Sequence
  ENSG00000241973_45 (sequence is synthesized)
cattgtgctggacatcgactacaagtctgggaccccgatgcagagtgctgcaaaagccccatatctggccaagttcaaggtgaagcgatgtggagttagtgaacttgaaaaagaaggtct

SEQ ID NO: 774856 - DNA, 120 bp, Artificial Sequence
  ENSG00000241973_46 (sequence is synthesized)
gcggtgccgctcagactccgaggatgagtgcagcacgcaggaggccgacggccagaagatctcctggcaggcagccatcttcaaggtgggagacgactgccggcaggacatgctggccct

SEQ ID NO: 774857 - DNA, 120 bp, Artificial Sequence
  ENSG00000241973_47 (sequence is synthesized)
gcagatcatcgacctcttcaagaacatcttccagctggtcggcctggacctctttgtttttccctaccgcgtggtggccactgcccctgggtgcggggtgatcgagtgcatccccgactg

SEQ ID NO: 774858 - DNA, 120 bp, Artificial Sequence
  ENSG00000241973_48 (sequence is synthesized)
cacctcccgggaccagctgggccgccagacagacttcggcatgtacgactacttcacacgccagtacggggatgagtccactctggccttccagcaggcccgctacaacttcatccgaag

SEQ ID NO: 774859 - DNA, 120 bp, Artificial Sequence
  ENSG00000241973_49 (sequence is synthesized)
catggccgcctacagcctcctgctgttcctgctgcagatcaaggacagacacaacggcaacattatgctggacaagaagggtcatatcatccacatcgactttggcttcatgtttgaaag

SEQ ID NO: 774860 - DNA, 120 bp, Artificial Sequence
  ENSG00000241973_50 (sequence is synthesized)
ctcgccgggcggcaatctcggctgggaacccgacatcaagctgacggatgagatggtgatgatcatggggggcaagatggaggccacacccttcaagtggttcatggagatgtgtgtccg

SEQ ID NO: 774861 - DNA, 120 bp, Artificial Sequence
  ENSG00000241973_51 (sequence is synthesized)
aggctacctggctgtgcggccctacatggacgcggtcgtctccctggtcactctcatgttggacacgggcctgccctgttttcgcggccagacaatcaagctcttgaagcacaggtttag

SEQ ID NO: 774862 - DNA, 120 bp, Artificial Sequence
  ENSG00000241973_52 (sequence is synthesized)
ccccaacatgactgagcgcgaggctgcaaatttcatcatgaaggtcatccagagctgcttcctcagcaacaggagccggacctacgacatgatccagtactatcagaatgacatccccta

SEQ ID NO: 774863 - DNA, 120 bp, Artificial Sequence
  ENSG00000241973_53 (sequence is synthesized)
ctgaggaggggaccttcgagggcctctgccccatgtgccctcaaagctgtcccacaatcatggagccctgcgacctccctgccctgccgccacatgcagtggaggagaggcctgtggccc

SEQ ID NO: 774864 - DNA, 120 bp, Artificial Sequence
  ENSG00000241973_54 (sequence is synthesized)
aaagaacctggtagcgcctcctggggcagcacgtgggtggcgcagccttggtaacgccatggactgcagcgacaatcaatggatggtgctgtctatgcacaggtgtgagtcctctgtttg

SEQ ID NO: 774865 - DNA, 120 bp, Artificial Sequence
  ENSG00000241973_55 (sequence is synthesized)
cactggacatattccctacctgtcttatttcataggtacatgaagtattgtgtataaaaaaagagataagatttaaccaacatcaacaaaataaaaacccaaaatagtgctgtgttggaa

SEQ ID NO: 774866 - DNA, 120 bp, Artificial Sequence
  ENSG00000241973_56 (sequence is synthesized)
catgtacccgccgcaccctctcacggcgcagtacggggtgaaagtcctgcggtccttccctccggacgccatcctcttctacatcccccagattgtgcaggccctcaggtacgacaaggt

SEQ ID NO: 774867 - DNA, 120 bp, Artificial Sequence
  ENSG00000241973_57 (sequence is synthesized)
ccagcttgtgcccggtctgtccccagccctcacaggctcctcagagcctcctcaggggcagggctgcccagcagtccccttgctccccctaccccaggccctgtgattgtcccttgatac

SEQ ID NO: 774868 - DNA, 120 bp, Artificial Sequence
  ENSG00000241973_58 (sequence is synthesized)
ctgtgcaagctacgttaaactcttgactataagggatgtacaaatacagattaaatataccttgcagatgagctaaatgctgacaacggttttaatgcggagtagtaagaatagtgtaag

SEQ ID NO: 774869 - DNA, 120 bp, Artificial Sequence
  ENSG00000241973_59 (sequence is synthesized)
ttgaaatgagcctgtctctctgcatgcatgagctccactttggggcagcgaggcacccaccagtgccaccacaagtgtggtctggtggcttccagaaccttacccacattgcctggatta

SEQ ID NO: 774870 - DNA, 120 bp, Artificial Sequence
  ENSG00000241973_60 (sequence is synthesized)
cagggcctggtggtcccagcagcctgagtccagcccccggtggtcagaaaggaaggccttccagactcttgctcggctgtggtctccccacctcactccatctctgggtgcttggctttt

SEQ ID NO: 774871 - DNA, 120 bp, Artificial Sequence
  ENSG00000241973_61 (sequence is synthesized)
gaccacggctataggtaactggacctcattgtcacttttttatcatgacagtatttaacttactttaaaaatgtgaggtttgtgaatttgtctcttaaataaactcttcttgcaagaaaa

SEQ ID NO: 774872 - DNA, 120 bp, Artificial Sequence
  ENSG00000241973_62 (sequence is synthesized)
agatgccagtgaggtccctccctttactgtagatgccagtgtgacccttcccttcactgtagatgccagcgaggtccctccattcactgtagatgccagcgaggtccctccattcactgt

SEQ ID NO: 774873 - DNA, 120 bp, Artificial Sequence
  ENSG00000241973_63 (sequence is synthesized)
agatgccagcgaggtccctccctttactgtagatgccagcaaggtccctcccttcactgtagatgccagcatggcccttcccttcactgtagatgccagcgaggtccttctgtctgctca

SEQ ID NO: 774874 - DNA, 120 bp, Artificial Sequence
  ENSG00000241973_64 (sequence is synthesized)
tcaccttcacctttgaggtttatccaggatctgacaagtcccagcatcccagctgctgccctctggcctggcctcctgctccccaaccccaggcatcttccccttctccacatgcggttg

SEQ ID NO: 774875 - DNA, 120 bp, Artificial Sequence
  ENSG00000241973_65 (sequence is synthesized)
gcgcaagccaggggggaatcagagcccccctacagactcgaagttcatgcgggagatggcaggggcctggcacatgacggtggagcagaaatttggcctgttttctgctgagataaagga

SEQ ID NO: 774876 - DNA, 120 bp, Artificial Sequence
  ENSG00000241973_66 (sequence is synthesized)
aaaacatttctcgtctccgtttgacagcacagagaccggcgagtccacaccagccctgccccaggctcacctcggaagaggcgaccccaaccttctcggactcgtacatgagggccaggg

SEQ ID NO: 774877 - DNA, 120 bp, Artificial Sequence
  ENSG00000241973_67 (sequence is synthesized)
acctgctggtgctggcggccgtggcctcagccctgcggaggacctcctgccgcaagtactgctgcctgtccgcgggcgcgtcgggcccgtcggggaggtctcgggcgtccctccaagggg

SEQ ID NO: 774878 - DNA, 120 bp, Artificial Sequence
  ENSG00000241973_68 (sequence is synthesized)
aagcagaacacaactcttggggtatgtgcgagccttctgaagagcagtgaccccttagaccataggagccacagtgcaggggaaggcttagagctcggctgtcgcttttcatgacgcaca

SEQ ID NO: 774879 - DNA, 120 bp, Artificial Sequence
  ENSG00000241973_69 (sequence is synthesized)
tggtttctaaatcttattcagtgagcacgtgttcctttttttaattagagaaaacttgacagtagcccctttttgtgtttcacagaggagctaacattccttctgtacctgtagttcatg

SEQ ID NO: 774880 - DNA, 120 bp, Artificial Sequence
  ENSG00000241973_70 (sequence is synthesized)
aaaaccatcagatctcctgagaactcattcgctgtcatgagatcaacaagggggaaccgtccccatgatccagtcacctcccaccaggtctcttcctcaacacctgaggattacaattca

SEQ ID NO: 774881 - DNA, 120 bp, Artificial Sequence
  ENSG00000241973_71 (sequence is synthesized)
agatgacatttgggtggggacacaaaacctaatcatatcagtgtgtcagtttgtgaaggaggtatctctgcatgtttctggaacctgtctgtcactttggaacattgttctaaacaacca

SEQ ID NO: 774882 - DNA, 120 bp, Artificial Sequence
  ENSG00000241973_72 (sequence is synthesized)
gctcacaagtgagtttttagtacccagcctgctttttctcgtacttgacaactccagaaattggtttgagagttgtgcttcttaaacccatgggaagacacagaggagacaaaggctgac

SEQ ID NO: 774883 - DNA, 120 bp, Artificial Sequence
  ENSG00000241973_73 (sequence is synthesized)
tgtcgcccgctttgcaaccctgccccccaggtcccagcccccagccagctggaacttggcctggccactggctggactcaacatcaatcctggagagcttgtccacaccactagagccac

SEQ ID NO: 774884 - DNA, 120 bp, Artificial Sequence
  ENSG00000241973_74 (sequence is synthesized)
actgggcttgctgctccccaaggctccaggcccgccagagtccaatctcatatgcagaaatgtgaatcttttccttctcttatatggttcaggtgccacggggtaaattagggcttctgc

SEQ ID NO: 774885 - DNA, 120 bp, Artificial Sequence
  ENSG00000241973_75 (sequence is synthesized)
aaaacccagaggcctctccttccagcccctttcccactgtccccgccatgccagtgcccacctgagggaactgtccaggggttgggtgccttatctcacacaccccaccagacagctcag

SEQ ID NO: 774886 - DNA, 120 bp, Artificial Sequence
  ENSG00000241973_76 (sequence is synthesized)
agccagccacagcgccaccctcctctcccttcacccctggcacccaggggtggatagggatccccaccccacagagaggagaatgcccaggaccaccctgccaggagtgtcagggtccag

SEQ ID NO: 774887 - DNA, 120 bp, Artificial Sequence
  ENSG00000241973_77 (sequence is synthesized)
ctctgaggtccgaactgtcggccaccaagctgttctgctgtagagggtgcctggccccggccccagggagctagggcgagagccgccattgctctgagtcagaagctggagctgggcgga

SEQ ID NO: 774888 - DNA, 120 bp, Artificial Sequence
  ENSG00000241973_78 (sequence is synthesized)
gtggggctggtccaggttcagtgccccagcttggctccttcctccacttcctcccttctctttctctgcctgctgccccaccacccaccccatcactgtctccaagaaaacacaacctgc

SEQ ID NO: 774889 - DNA, 120 bp, Artificial Sequence
  ENSG00000241973_79 (sequence is synthesized)
ctgttgggggtggagggggtgctcctgttgcagtccttttccactcctcaaaacagaccacttgtccttgcccgccctggctcctacccagtcacaggcagctctttggggttttgcaga

SEQ ID NO: 774890 - DNA, 120 bp, Artificial Sequence
  ENSG00000241973_80 (sequence is synthesized)
ggttccagagagtgaggtaggtgctagcagccacctgctgacctacacctgtcctttggtcacctctgtctgcccacctgtgccagtaaattcttgctctggacatctaattccaaccac

SEQ ID NO: 774891 - DNA, 120 bp, Artificial Sequence
  ENSG00000241973_81 (sequence is synthesized)
cttccccacgatcctgcccacgccttcagccatgggctctccctttctgggcatcccatccaccctgtcaccaaagcctgagcacctgccaccccacaggctacgtgccaaagatgggct

SEQ ID NO: 774892 - DNA, 120 bp, Artificial Sequence
  ENSG00000241973_82 (sequence is synthesized)
ttgtcccagtttcatatacaggtcacttggccaaggccacagtccaacctgggttcatccccactgccctgcagagaaaggcaggtcagcgtgtctgcatcccacccaagtgcagaagcc

SEQ ID NO: 774893 - DNA, 120 bp, Artificial Sequence
  ENSG00000241973_83 (sequence is synthesized)
atggccggcagccttatgtgggggacagggcaggacactcagcctgtccagagtgcgtgtgggcagcccttgcctgggcggtatgggttaccaagtgcagcagatcgaaagttgcctcgg

SEQ ID NO: 774894 - DNA, 120 bp, Artificial Sequence
  ENSG00000241973_84 (sequence is synthesized)
ggatgtgcaagatgtggcaggcgaggtgggtggcaggagcccacacctgaggctgttggcatcagccagtccacaggactacaggcagggccaccacctaggctggcctcagcccaccgc

SEQ ID NO: 774895 - DNA, 120 bp, Artificial Sequence
  ENSG00000241973_85 (sequence is synthesized)
atcacggtacttctgtagacggggaacacatttcagtgagctgctcctggaagggcagggaagagagtccataaggtgaacttggccccaggccaggctcctgctctaactgggtccggg

SEQ ID NO: 774896 - DNA, 120 bp, Artificial Sequence
  ENSG00000241973_86 (sequence is synthesized)
gctccctcacaggctgctgaccctggggctgtccctcctgcatgccgatgtggttccaaatgcaaccatccgcaatgtgcttcgcgagaagatctactccactgcctttgactacttcag

SEQ ID NO: 774897 - DNA, 120 bp, Artificial Sequence
  ENSG00000241973_87 (sequence is synthesized)
ttttttcaacttctcccaagacatgcaaactttctgaaaaaccaagcaaaaacaccctctacttttctcgtatgcccctccttcatgaccaccagacaccacgtatagtaacacctccca

SEQ ID NO: 774898 - DNA, 120 bp, Artificial Sequence
  ENSG00000241973_88 (sequence is synthesized)
acaaaaacagccgcttggcaacttcagtgctattcatggtttttctgatttcctgtgttttctatttcttgtctgtagcatttattttgttcacagtagaaaaaaatgtaatgcacttca

SEQ ID NO: 774899 - DNA, 120 bp, Artificial Sequence
  ENSG00000241973_89 (sequence is synthesized)
agtacatttccagggcgtggctctcagctgaagtccgtccccatggaagaccctcctcccactgggccagggagccagcacggccctgcccatggcagccctgacacagcctctccccca

SEQ ID NO: 774900 - DNA, 120 bp, Artificial Sequence
  ENSG00000242019_0 (sequence is synthesized)
gtctgcaccggcagcaccatgtcgctcatggtcgtcagcatggcgtgtgttgggttcttcttgctggaggggccctggccacatgtgggtggtcaggacaagcccttcctctctgcctgg

SEQ ID NO: 774901 - DNA, 120 bp, Artificial Sequence
  ENSG00000242019_1 (sequence is synthesized)
cccggcactgtggtgtctgaaggacaacatgtgactcttcagtgtcgctctcgtcttgggtttaatgaattcagtctgtccaaagaagacgggatgcctgtccctgagctctacaacaga

SEQ ID NO: 774902 - DNA, 120 bp, Artificial Sequence
  ENSG00000242019_2 (sequence is synthesized)
atattccggaacagctttctcatgggccctgtgaccccagcacatgcagggacctacagatgttgcagttcacacccacactcccccactgggtggtcggcacccagcaaccctgtggtg

SEQ ID NO: 774903 - DNA, 120 bp, Artificial Sequence
  ENSG00000242019_3 (sequence is synthesized)
atcatggtcacaggagtccacagaaaaccttccctcctggcccacccaggtcccctggtgaaatcaggagagacggtcatcctgcaatgttggtcagatgtcaggtttgagcgcttcctt

SEQ ID NO: 774904 - DNA, 120 bp, Artificial Sequence
  ENSG00000242019_4 (sequence is synthesized)
ctgcacagagaggggatcactgaggaccccttgcgcctcgttggacagctccacgatgcgggttcccaggtcaactattccatgggtcccatgacacctgcccttgcagggacctacaga

SEQ ID NO: 774905 - DNA, 120 bp, Artificial Sequence
  ENSG00000242019_5 (sequence is synthesized)
tgctttggttctgtcactcacttaccctatgagttgtcggctcccagtgaccctctggacatcgtggtcgtaggtctatatgggaaaccttctctctcagcccagccgggccccacggtt

SEQ ID NO: 774906 - DNA, 120 bp, Artificial Sequence
  ENSG00000242019_6 (sequence is synthesized)
caggcaggagagaatgtgaccttgtcctgcagctcccggagcttgtttgacatttaccatctatccagggaggcggaggccggtgaacttaggctcactgcagtgctgagggtcaatgga

SEQ ID NO: 774907 - DNA, 120 bp, Artificial Sequence
  ENSG00000242019_7 (sequence is synthesized)
caacttccctctgggccctgtgacccacggagggaactacagatgcttcggctctttccgtgccctgccccatgcgtggtcagacccgagtgacccactgcccgtttctgtcacaggtaa

SEQ ID NO: 774908 - DNA, 120 bp, Artificial Sequence
  ENSG00000242019_8 (sequence is synthesized)
ctccagaaacctgcacgttctgattgggacctcagtggtcatcatcccctttgctatcctcctcttctttctccttcatcgctggtgtgccaacaaaaagaatgctgttgtaatggacca

SEQ ID NO: 774909 - DNA, 120 bp, Artificial Sequence
  ENSG00000242019_9 (sequence is synthesized)
agagcctgcagggaacagaacagtgaacagggaggactctgatgaacaagaccctcaggaggtgacatacgcacagttgaatcactgcgttttcacacagagaaaaatcactcgcccttc

SEQ ID NO: 774910 - DNA, 120 bp, Artificial Sequence
  ENSG00000242019_10 (sequence is synthesized)
tcagaggcccaagacacccccaacagataccagcgtgtaacacggaacttccaaatgctgagcgcagatccaaagttgtcttctgtccactagcaccacagtcaggccttgatgggatct

SEQ ID NO: 774911 - DNA, 120 bp, Artificial Sequence
  ENSG00000242019_11 (sequence is synthesized)
tctagggagacaatagccctgtctcaaaaccgggttgccagctcccatgtaccagcagctggactctgaaggcgtgagtctgcatcttagggcatcgctcttcctcacaccacgaatctg

SEQ ID NO: 774912 - DNA, 120 bp, Artificial Sequence
  ENSG00000242019_12 (sequence is synthesized)
aacatgcctctctcttgcttacaaatgtctaaggtccccactgcctgctggagagaaaacacacttgcttagcccacaattctccatttcacttgacccctgcccacctctccaacctaa

SEQ ID NO: 774913 - DNA, 120 bp, Artificial Sequence
  ENSG00000242019_13 (sequence is synthesized)
ctggcttacttcctagtctacttgaggctgcgatcacactgaggaactcacaattccaaacatataagaggctccctcttaacacggcacttagatacgtgctattccacctttcctcag

SEQ ID NO: 774914 - DNA, 120 bp, Artificial Sequence
  ENSG00000242028_0 (sequence is synthesized)
tctttatcctcacctgaaactcatagctgtaaaccttgacaatccacaggggtccaaatacctcagccaggtaggaggcctcattgctgagaaagaatagagttcttaagctggtttagt

SEQ ID NO: 774915 - DNA, 120 bp, Artificial Sequence
  ENSG00000242028_1 (sequence is synthesized)
taaatagggattatctgggggcatttactaccaattggtccatactggtaatcctcaaaagggtaccatactccctgtgcccttttccaccaaagatttagaattctattcatgtgagag

SEQ ID NO: 774916 - DNA, 120 bp, Artificial Sequence
  ENSG00000242028_2 (sequence is synthesized)
ccctaaggtctttggacatattttaaattctcaagtcattccccccacccccttcatctcatacagatcatctgacaaagtactattcttagaatttgtccctgtttgtggggagctttt

SEQ ID NO: 774917 - DNA, 120 bp, Artificial Sequence
  ENSG00000242028_3 (sequence is synthesized)
ctcactctagtcttgctctaaactttaaataatggtcccagacattgtcctgaccatccttccctgtcttgggcaccctcctttcatacctccacccttgacacctttacgcaccaagca

SEQ ID NO: 774918 - DNA, 120 bp, Artificial Sequence
  ENSG00000242028_4 (sequence is synthesized)
aaaagcacacaagcatacatgatgctagcactcagcattgctagagagatatctggtgtttggggttccattttactcaggccaggcaggcacagggtgtgattctgtccttgaaggatt

SEQ ID NO: 774919 - DNA, 120 bp, Artificial Sequence
  ENSG00000242028_5 (sequence is synthesized)
actgggaagggacaacagaagagatgggtattaacaatgagctaggtatttggcaggggcaaaaaaaggtcttagcatggagaatccaggtcctgtcccttacctctctctggaggacgg

SEQ ID NO: 774920 - DNA, 120 bp, Artificial Sequence
  ENSG00000242028_6 (sequence is synthesized)
ctggacagtgcagagaaagtcagatacatgatatagcagctgatgacagaagcttgtaggaggccagagcggggttgctctggggagtaagtataattgctttagtctacaggctggtaa

SEQ ID NO: 774921 - DNA, 120 bp, Artificial Sequence
  ENSG00000242028_7 (sequence is synthesized)
tttcctccatttctacccccacttgtacttctgtctccccatcctttggtggggatagggaagcagagattcttttatcaaataattgagattagggaggtaatgaaacttgctatgctt

SEQ ID NO: 774922 - DNA, 120 bp, Artificial Sequence
  ENSG00000242028_8 (sequence is synthesized)
ttaaggcccccaaaacctggaatgctgtaggacatgtacccactgaggcggatgcaaggagcgatggagaggaaggagatgaggccacagaagcaaaggtgcagactgaggagcatcttg

SEQ ID NO: 774923 - DNA, 120 bp, Artificial Sequence
  ENSG00000242028_9 (sequence is synthesized)
ttaagcaggcagccagctgggtgtgtataatagtggaataggagcacagctcccacacctgccatgctgtagaatcctagggtggccagcaggacagccaggaaccagctacagtcttga

SEQ ID NO: 774924 - DNA, 120 bp, Artificial Sequence
  ENSG00000242028_10 (sequence is synthesized)
ggaaccagctacagtcttgagctgcacctgtctgcctaagggtggaaagtgggcaatggcttggagctccagcattttttttttttttgagttgggagtcttgctctgttgcccaggctg

SEQ ID NO: 774925 - DNA, 120 bp, Artificial Sequence
  ENSG00000242028_11 (sequence is synthesized)
tcttttacccattaccaactactcccctgctctcagaagactggtgtgactagccatcctacttggcccacgcagtcatcacattcctaagcttttttgatactgctcagtgggaagctg

SEQ ID NO: 774926 - DNA, 120 bp, Artificial Sequence
  ENSG00000242028_12 (sequence is synthesized)
tgggaccagtgctctgccgtgccttttgcccagccctttccatgtagtaatactagaaacctccccaggaaaagcctttagggttatgtgccccttaccagttcttgttccaggaatggg

SEQ ID NO: 774927 - DNA, 120 bp, Artificial Sequence
  ENSG00000242028_13 (sequence is synthesized)
caaaagctgtaataagcaccaactgcagtaggatgaatgcaaagcctccacagatgccaatgtaatgccatgctgcaagatgggcaccagtggaaaaatgtcaaattgttactttttttt

SEQ ID NO: 774928 - DNA, 120 bp, Artificial Sequence
  ENSG00000242028_14 (sequence is synthesized)
tacaggcgtgagccactgcacccggccattactcctcttcttacccacttgttatcttagaaaacttagcctactcctgccaagagtgtgggagggagagtacctgggaagagatgctca

SEQ ID NO: 774929 - DNA, 120 bp, Artificial Sequence
  ENSG00000242028_15 (sequence is synthesized)
gaaagaaaaacagactcaggagaaaaggcaaaggacagtgaagagtgcctatggggaaaggcaaaagagaaaccaaaaatataggaaagaggacagacgagacaactaaggaggaaccaa

SEQ ID NO: 774930 - DNA, 120 bp, Artificial Sequence
  ENSG00000242028_16 (sequence is synthesized)
tcccaaatgagagggggttgggacaggcctactgcaccttattccaaattctaactcaaagatacttaatagcatctgggcaatgttttacagtttataaaggattgtgttaccaagata

SEQ ID NO: 774931 - DNA, 120 bp, Artificial Sequence
  ENSG00000242028_17 (sequence is synthesized)
accccactgttacctccattttagatgctagaagcacaaagtctggctcaaggttacacagcaagtacacgagaagcagggacttaaacctgttttctgtctttttacagtgctattact

SEQ ID NO: 774932 - DNA, 120 bp, Artificial Sequence
  ENSG00000242028_18 (sequence is synthesized)
tcatcccggaatttcctttacccagcctatgtctactttccctcctctgtcccctccccacccagaaagtacacacaaacctattatgcagctgtgcccgcgggctggtgggggagtgga

SEQ ID NO: 774933 - DNA, 120 bp, Artificial Sequence
  ENSG00000242028_19 (sequence is synthesized)
ggtggaccagcaacacagcctgcagcaggtggaaggtggcggttcctgcacatactcggtacacagccccagagccactgagcactggacagtcagagaggccaaacaggtgggcacaca

SEQ ID NO: 774934 - DNA, 120 bp, Artificial Sequence
  ENSG00000242028_20 (sequence is synthesized)
accccgagggcatctggatctgggagtgtgtgtgagagaaatggcaggacaagtcataatgcatggaaaggtacctacttgtcacgggtatgaccactcatttgtctcctgcccccaacc

SEQ ID NO: 774935 - DNA, 120 bp, Artificial Sequence
  ENSG00000242028_21 (sequence is synthesized)
gaaaccttttctatcttagggtttttccttttatctcttcccacctgacaacccgaccccctctcacttaccctgtgtgtcttgccccacaccctttccactactgtccttgacagcagg

SEQ ID NO: 774936 - DNA, 120 bp, Artificial Sequence
  ENSG00000242028_22 (sequence is synthesized)
aggcagcagattgctgaggcccccacatggaggaggatgtagaacaggcggctgcaagtggatgcggtgagagagggccacctagagtggcagcagctggcacaaggagcaggcccacag

SEQ ID NO: 774937 - DNA, 120 bp, Artificial Sequence
  ENSG00000242028_23 (sequence is synthesized)
cagcacacctgggagtagagcagatgcaaggcagcgaggtggagacttgctgaggaaaggcatacgttaatgtatgtgtgaggttaacccaggaggttgaattccaaaatttccccttcc

SEQ ID NO: 774938 - DNA, 120 bp, Artificial Sequence
  ENSG00000242028_24 (sequence is synthesized)
cctttcttccttttactcaggttctgtttcaagctgattccagccatttgggattgccgcccactgacaacttagtagggctttcattataagcaggcttgagatatctgacctttctct

SEQ ID NO: 774939 - DNA, 120 bp, Artificial Sequence
  ENSG00000242028_25 (sequence is synthesized)
cgacctaaacacctggggctggaaacatggcgggagagatttacagattatacctggggcaacgaaccagaacgacattagaggagaaaagaggcctgtcgtttttattggcttctgcac

SEQ ID NO: 774940 - DNA, 120 bp, Artificial Sequence
  ENSG00000242028_26 (sequence is synthesized)
gtcttcctccccagcttcggccactctccccttcgcaccctctcacctgacagaagggacttttcactaggacactgctgcctccgctgtgctgctgtgccaggcccagggaggtgccgg

SEQ ID NO: 774941 - DNA, 120 bp, Artificial Sequence
  ENSG00000242028_27 (sequence is synthesized)
ggctggggccggccttggcacccaccatccttgtcccagggattaggcttaggtccaccagatggaaggcagatgagagcagcagttgcttctgtcctcagcccattggactgccactgt

SEQ ID NO: 774942 - DNA, 120 bp, Artificial Sequence
  ENSG00000242028_28 (sequence is synthesized)
gttggggctgagcacccggtcccgggcagaatggagacgtccggaagagaacactgacctccaggttgcgcttctagaactggagcagaaagaaggtgtggcccagggccagccccgcct

SEQ ID NO: 774943 - DNA, 120 bp, Artificial Sequence
  ENSG00000242028_29 (sequence is synthesized)
cctccccgggcggaagctgtgtcagttgccggaagtcggcgtgaggtggggcttatgcggcggcgtggtgaaatagatatggcgaccgagggggatgtggagctggagttggagactgag

SEQ ID NO: 774944 - DNA, 120 bp, Artificial Sequence
  ENSG00000242028_30 (sequence is synthesized)
accagtggaccagagcggcctccggagaagccacggaaacatgacagcggtgcggcggacttggagcgggtcaccgactatgcagaggagaaggagatccagagttccaatctggagacg

SEQ ID NO: 774945 - DNA, 120 bp, Artificial Sequence
  ENSG00000242028_31 (sequence is synthesized)
gccatgtctgtgattggagacagaaggtcccgggagcagaaagccaaacaggagcgggagaaagaactggcaaaagtcactatcaagaaggaagatctggagctaataatgactgagatg

SEQ ID NO: 774946 - DNA, 120 bp, Artificial Sequence
  ENSG00000242028_32 (sequence is synthesized)
gagatatctcgagcagcagcagaacgcagtttgcgggaacacatgggcaacgtggtagaggcgcttattgccctaaccaactgatgcgtgctttctcaaatatacctactggattaattt

SEQ ID NO: 774947 - DNA, 120 bp, Artificial Sequence
  ENSG00000242028_33 (sequence is synthesized)
atggcaataaaatttttttttgtctttttcagttttatcatcttgggtcaagtagagtgtatactatatcctatgttgtggagaatttatatgttggagactaactgaatttaagtgacc

SEQ ID NO: 774948 - DNA, 120 bp, Artificial Sequence
  ENSG00000242028_34 (sequence is synthesized)
cattaaaatctagcacacctgtatgaaaaatcagtgtagaagaatacctcatgtgcagatgctaggtggcaggccagtctcattcatctgactagctctcaacagtattcaaggtacatc

SEQ ID NO: 774949 - DNA, 120 bp, Artificial Sequence
  ENSG00000242028_35 (sequence is synthesized)
agaaggcctcgcacaaaacactgtacaaacccgaaaggaagtctgagagacgaaccgccttcctccctgaagcttctagaactggagcagaaagaaggtgtggcccagggccagccccgc

SEQ ID NO: 774950 - DNA, 120 bp, Artificial Sequence
  ENSG00000242028_36 (sequence is synthesized)
ccactatatatatagatagatgtaggttatgaacccagttcataggccaccttgagttagaattttggtacctacaacatgcttgattttgagtgattaaaaaaaaataatttggctggg

SEQ ID NO: 774951 - DNA, 120 bp, Artificial Sequence
  ENSG00000242028_37 (sequence is synthesized)
gagtggtagtgcctaactagtgtatgcggaggggaggctattctgcttaatttgggttgtttcctgaaacaagcggagtcagtatatttggtggcacattaatgcctgggaacctatgta

SEQ ID NO: 774952 - DNA, 84 bp, Artificial Sequence
  ENSG00000242028_38 (sequence is synthesized)
ctggaggctgaggcaggaatcgcttgaaattggatactactgtactccagcctgggggaaagagtgaaactccatctcaaaaaa

SEQ ID NO: 774953 - DNA, 120 bp, Artificial Sequence
  ENSG00000242028_39 (sequence is synthesized)
catgcctgtaatcccaacaccttgggaagctgaggcaagacgatcacttgagcccagcagtttgagaccagcttgggcaacacagtgagatttcgtctctaccgcgctccccccaccacc

SEQ ID NO: 774954 - DNA, 120 bp, Artificial Sequence
  ENSG00000242028_40 (sequence is synthesized)
cggtccccagacaaaaataaaaaccattattaagcctttataccgttcttcaaatttatcaccaattcctgcagatctaggcgccacaactttactcttgttagcagaaggcctcctggc

SEQ ID NO: 774955 - DNA, 120 bp, Artificial Sequence
  ENSG00000242028_41 (sequence is synthesized)
aacacctgctgccaagactccaggggaaaggagtattagtgggagtttttattttcaatcaagggtttatcaagatttatttacagggcacttctgggaatgacccttcctgggagttta

SEQ ID NO: 774956 - DNA, 120 bp, Artificial Sequence
  ENSG00000242028_42 (sequence is synthesized)
tggtgttggttgagaatgaggactaatatatttaaatatttttgcagggagaaagaactggcaaaagtcactatcaagaaggaagatctggagctaatagtgagtggtagtgcctaacta

SEQ ID NO: 774957 - DNA, 120 bp, Artificial Sequence; identical to SEQ ID NO: 773141
  ENSG00000242076_0 (sequence is synthesized)

SEQ ID NO: 774958 - DNA, 82 bp, Artificial Sequence
  ENSG00000242076_1 (sequence is synthesized)
gtgcaggagtcagtcccaaccaggacacagcatggacatgagggtccctgctcagctcctggggctcctgctgctctggctc

SEQ ID NO: 774959 - DNA, 88 bp, Artificial Sequence; identical to SEQ ID NO: 773143
  ENSG00000242076_2 (sequence is synthesized)

SEQ ID NO: 774960 - DNA, 120 bp, Artificial Sequence
  ENSG00000242110_0 (sequence is synthesized)
ggaagcgccatggcactgcagggcatctcggtcgtggagctgtccggcctggccccgggcccgttctgtgctatggtcctggctgacttcggggcgcgtgtggtacgcgtggaccggccc

SEQ ID NO: 774961 - DNA, 120 bp, Artificial Sequence
  ENSG00000242110_1 (sequence is synthesized)
ggctcccgctacgacgtgagccgcttgggccggggcaagcgctcgctagtgctggacctgaagcagccgcggggagccgccgtgctgcggcgtctgtgcaagcggtcggatgtgctgctg

SEQ ID NO: 774962 - DNA, 120 bp, Artificial Sequence
  ENSG00000242110_2 (sequence is synthesized)
gagcccttccgccgcggtgtcatggagaaactccagctgggcccagagattctgcagcgggaaaatccaaggcttatttatgccaggctgagtggatttggccagtcaggaagcttctgc

SEQ ID NO: 774963 - DNA, 120 bp, Artificial Sequence
  ENSG00000242110_3 (sequence is synthesized)
actatttggctttgtcaggtggaaggaacagcatatttaagttcttttctgtggaaaactcagaaattgagtctgtgggaagcacctcgaggacagaacatgttggatggtggagcacct

SEQ ID NO: 774964 - DNA, 120 bp, Artificial Sequence
  ENSG00000242110_4 (sequence is synthesized)
ttctatacgacttacaggacagcagatggggaattcatggctgttggagcaatagaaccccagttctacgagctgctgatcaaaggtctgggagaactgatcttgctgaaaatacaacag

SEQ ID NO: 774965 - DNA, 120 bp, Artificial Sequence
  ENSG00000242110_5 (sequence is synthesized)
gaagcagtatcgtgccaggcaaggcaaaccctcgtcagtgtgaagcaatggccatcgttgcagcccaagtcatggggttttgtgtggcagtaaccgttggaggcggcaatggccattttg

SEQ ID NO: 774966 - DNA, 120 bp, Artificial Sequence
  ENSG00000242110_6 (sequence is synthesized)
agttggatgttttcaagccaatgatgattaaaaatttatgttacactcaggctgctgggggatgcttcagtttccttcacagaaaactaaatagtgggaatccggaccaataaagaaagg

SEQ ID NO: 774967 - DNA, 120 bp, Artificial Sequence
  ENSG00000242110_7 (sequence is synthesized)
cggttagctggccacgatatcaactatttggctttgtcaggtgttctctcaaaaattggcagaagtggtgagaatccgtatgccccgctgaatctcctggctgactttgctggtggtggc

SEQ ID NO: 774968 - DNA, 120 bp, Artificial Sequence
  ENSG00000242110_8 (sequence is synthesized)
tagaaccccagttctacgagctgctgatcaaaggacttggactaaagtctgatgaacttcccaatcagatgagcatggatgattggccagaaatgaagaagaagtttgcagatgtatttg

SEQ ID NO: 774969 - DNA, 120 bp, Artificial Sequence
  ENSG00000242110_9 (sequence is synthesized)
cagagaagacgaaggcagagtggtgtcaaatctttgacggcacagatgcctgtgtgactccggttctgacttttgaggaggttgttcatcatgatcacaacaaggaacggggctcgttta

SEQ ID NO: 774970 - DNA, 120 bp, Artificial Sequence
  ENSG00000242110_10 (sequence is synthesized)
tcaccagtgaggagcaggacgtgagcccccgccctgcacctctgctgttaaacaccccagccatcccttctttcaaaagggatcctttcataggagaacacactgaggagatacttgaag

SEQ ID NO: 774971 - DNA, 120 bp, Artificial Sequence
  ENSG00000242110_11 (sequence is synthesized)
aatttggattcagccgcgaagagatttatcagcttaactcagataaaatcattgaaagtaataaggctggtagcaagttctggatcttatacccaacacacagcaacatccagaaataaa

SEQ ID NO: 774972 - DNA, 120 bp, Artificial Sequence
  ENSG00000242110_12 (sequence is synthesized)
gccgcgaagagatttatcagcttaactcagataaaatcattgaaagtaataaggtaaaagctagtctctaacttccaggcccacggctcaagtgaatttgaatactgcatttacagtgta

SEQ ID NO: 774973 - DNA, 120 bp, Artificial Sequence
  ENSG00000242110_13 (sequence is synthesized)
gagtaacacataacattgtatgcatggaaacatggaggaacagtattacagtgtcctaccactctaatcaagaaaagaattacagactctgattctacagtgatgattgaattctaaaaa

SEQ ID NO: 774974 - DNA, 120 bp, Artificial Sequence
  ENSG00000242110_14 (sequence is synthesized)
tggttatcattagggcttttgatttataaaactttgggtacttatactaaattatggtagttattctgccttccagtttgcttgatatatttgttgatattaagattcttgacttatatt

SEQ ID NO: 774975 - DNA, 120 bp, Artificial Sequence
  ENSG00000242110_15 (sequence is synthesized)
ttgaatgggttctagtgaaaaaggaatgatatattcttgaagacatcgatatacatttatttacactcttgattctacaatgtagaaaatgaggaaatgccacaaattgtatggtgataa

SEQ ID NO: 774976 - DNA, 120 bp, Artificial Sequence
  ENSG00000242110_16 (sequence is synthesized)
aagtcacgtgaaacagagtgattggttgcatccaggccttttgtcttggtgttcatgatctccctctaagcacattccaaactttagcaacagttatcacactttgtaatttgcaaagaa

SEQ ID NO: 774977 - DNA, 120 bp, Artificial Sequence
  ENSG00000242110_17 (sequence is synthesized)
aagtttcacctgtattgaatcagaatgccttcaactgaaaaaaacatatccaaaataatgaggaaatgtgttggctcactacgtagagtccagagggacagtcagttttagggttgcctg

SEQ ID NO: 774978 - DNA, 120 bp, Artificial Sequence
  ENSG00000242110_18 (sequence is synthesized)
tatccagtaactcggggcctgtttccccgtgggtctctgggctgtcagctttcctttctccatgtgtttgatttctcctcaggctggtagcaagttctggatcttatacccaacacacag

SEQ ID NO: 774979 - DNA, 120 bp, Artificial Sequence
  ENSG00000242110_19 (sequence is synthesized)
caacatccagaaataaagatctcaggaccccccagcaagtcgttttgtgtctccttggactgagttaagttacaagcctttcttatacctgtctttgacaaagaagacgggattgtcttt

SEQ ID NO: 774980 - DNA, 120 bp, Artificial Sequence
  ENSG00000242110_20 (sequence is synthesized)
acataaaaccagcctgctcctggagcttccctggactcaacttcctaaaggcatgtgaggaaggggtagattccacaatctaatccgggtgccatcagagtagagggagtagagaatgga

SEQ ID NO: 774981 - DNA, 120 bp, Artificial Sequence
  ENSG00000242110_21 (sequence is synthesized)
ccatactttaatctgtatcttcagtttctgaacataagtatgcaaaatctttttaaggtgcatactctgctgcgtccctgctattttctaggacaaaaataatctgaaaacactgagaat

SEQ ID NO: 774982 - DNA, 120 bp, Artificial Sequence
  ENSG00000242110_22 (sequence is synthesized)
agggcttcttagttcatgtttcccttagcgcctcagtgattttttcatggtggcttaggccaaaagaaatatctaaccattcaatttataaataattaggtccccaacgaattaaatatt

SEQ ID NO: 774983 - DNA, 120 bp, Artificial Sequence
  ENSG00000242110_23 (sequence is synthesized)
atgtcctaccaacttattagctgcttgaaaaatataatacacataaataaaaaaatatatttttcatttctatttcattgttaatcacaactacttactaaggagatgtatgcacctatt

SEQ ID NO: 774984 - DNA, 120 bp, Artificial Sequence
  ENSG00000242110_24 (sequence is synthesized)
ggacactgtgcaacttctcacctggaatgagattggacactgctgccctcattttctgctccatgttggtgtccatatagtacttgattttttatcagatggcctggaaaacccagtctc

SEQ ID NO: 774985 - DNA, 120 bp, Artificial Sequence
  ENSG00000242110_25 (sequence is synthesized)
acaaaaatatgaaattatcagaaggattatagtgcaatcttatgttgaaagaatgaactacctcactagtagttcacgtgatgtctgacagatgttgagtttcattgtgtttgtgtgttc

SEQ ID NO: 774986 - DNA, 120 bp, Artificial Sequence
  ENSG00000242110_26 (sequence is synthesized)
aaatttttaaatattctgagatactcttgtgaggtcactctaatgccctgggtgccttggcacagttttagaaataccagttgaaaatatttgctcaggaatatgcaactaggaaggggc

SEQ ID NO: 774987 - DNA, 120 bp, Artificial Sequence
  ENSG00000242110_27 (sequence is synthesized)
agaatcagaatttaagctttcatattctagccttcagtcttgttcttcaaccatttttaggaactttcccataaggttatgttttccagcccaggcatggaggatcacttgaggccaaga

SEQ ID NO: 774988 - DNA, 120 bp, Artificial Sequence
  ENSG00000242110_28 (sequence is synthesized)
gttcgagaccagcctggggaacttggctggacctccgtttctacgaaataaaaataaaaaaattatccaggtatggtggtgtgtgcctgtagtcctatctactcaagggtggggcaggag

SEQ ID NO: 774989 - DNA, 120 bp, Artificial Sequence
  ENSG00000242110_29 (sequence is synthesized)
gatcacttgagcccaggaatttgaggccacagtgaattaggattgcaccactgcactctagcccaggcaacagaacaagaacctgtctctaaataaataaataaaaataataataataaa

SEQ ID NO: 774990 - DNA, 120 bp, Artificial Sequence
  ENSG00000242110_30 (sequence is synthesized)
aaagatgttttccctacaactcagacttttcatttgaactcggtccagcaaggaaaatataacccactcgaagtctttaaaacagaggaaatttaatataaagaattccactggtgacga

SEQ ID NO: 774991 - DNA, 120 bp, Artificial Sequence
  ENSG00000242110_31 (sequence is synthesized)
aagagcagagaagcccagaagatagtgaggcaaccctgataggaacataactaggaagccaagaccactcctatggttgcaggggtgatgggaaagctggtgtacttggacccagaagcc

SEQ ID NO: 774992 - DNA, 120 bp, Artificial Sequence
  ENSG00000242110_32 (sequence is synthesized)
aaagttgctgcacccaccttggagacatagacactggcagtaatacctcagggagaagaaagaaatctagggaaatatcctggcttctttccttctctctctcccctagtcttcctacca

SEQ ID NO: 774993 - DNA, 120 bp, Artificial Sequence
  ENSG00000242110_33 (sequence is synthesized)
gtgtctcccattagccaaatctacctagaagccagaaaacaagggaaccctggaaatgtagccccataagataaagagcaccaaaggaaatagatctgagcagacaggcagcacaaaatg

SEQ ID NO: 774994 - DNA, 120 bp, Artificial Sequence
  ENSG00000242110_34 (sequence is synthesized)
cagtgtgtatggtttattcactcagtaattcctttagcaaatgtttattgaggatctactaggtgccaggtatcatgatacttgctggggataccataatgaacaaaacagacctgttct

SEQ ID NO: 774995 - DNA, 120 bp, Artificial Sequence
  ENSG00000242110_35 (sequence is synthesized)
ccgctcttgaggaaatcaaagacaaacacaggatatggaataaacccagaattatctcattgtaaaatgtgttaagtaccacgaggagaaatatcagggcgatctgacacagctaatgat

SEQ ID NO: 774996 - DNA, 120 bp, Artificial Sequence
  ENSG00000242110_36 (sequence is synthesized)
ttgaagaagggtgtgacctgccaccattttaaatctagttatttcactcctgagctgtgtgtgtggaaaacttgtagtaaaaaatagaatgtctatatttataaaaagtttatgaaaaga

SEQ ID NO: 774997 - DNA, 120 bp, Artificial Sequence
  ENSG00000242110_37 (sequence is synthesized)
aaactgccgttgaacttggctctctcacagcagagcagtttgatgaatgggtaaaacctaaggacatgctgggtccaaagtgacttaaataagttttaatgaaaataaacgtgtaaaatt

SEQ ID NO: 774998 - DNA, 120 bp, Artificial Sequence
  ENSG00000242110_38 (sequence is synthesized)
ctgatcaaaggctgctgggggatgcttcagtttccttcacagaaaactaaatagtgggaatccggaccaataaagaaaggatcaagaagctaatgaattagtcgctaatgctggtgacag

SEQ ID NO: 774999 - DNA, 120 bp, Artificial Sequence
  ENSG00000242114_0 (sequence is synthesized)
cttcggcgcgggactttcggcgggtcccggccgggcagacccaagtgccggcggcggagactgcagtggagccagtaccggctgtagtggccggggccgtggcgggagagtcatgtcaga

SEQ ID NO: 775000 - DNA, 120 bp, Artificial Sequence
  ENSG00000242114_1 (sequence is synthesized)
gccgcagccgcggggcgcagagcgcgatctctaccgggacacgtgggtgcgatacctgggctatgccaatgaggtgggcgaggctttccgctctcttgtgccagcggcggtggtgtggct

SEQ ID NO: 775001 - DNA, 120 bp, Artificial Sequence
  ENSG00000242114_2 (sequence is synthesized)
gagctatggcgtggccagctcctacgtgctggcggatgccattgacaaaggcaagaaggctggagaggtgcccagccctgaagcaggccgcagcgccagggtgactgtggctgtggtgga

SEQ ID NO: 775002 - DNA, 120 bp, Artificial Sequence
  ENSG00000242114_3 (sequence is synthesized)
cacctttgtatggcaggctctagcctctgtggccattccgggcttcaccatcaaccgcgtgtgtgctgcctctctctatgtcctgggcactgccacccgctggcccctggctgtccgcaa

SEQ ID NO: 775003 - DNA, 120 bp, Artificial Sequence
  ENSG00000242114_4 (sequence is synthesized)
ttgacaggtcggtggatttcctcctggactccagcctgcgcaagctctacccaacagtggggaagcccagctcctcctgatcatactctggtacctggcctgtgcatcggcctcctgctt

SEQ ID NO: 775004 - DNA, 120 bp, Artificial Sequence
  ENSG00000242114_5 (sequence is synthesized)
catgtcaacctcctactcctgccagggaatgtggacacctggctccctggtgtccaaagaccctggcacctgggtgggtttgagctggacagaagcttagagacaaaggcttcaagaagc

SEQ ID NO: 775005 - DNA, 120 bp, Artificial Sequence
  ENSG00000242114_6 (sequence is synthesized)
agtggctgcagggagtcacagaagggcaggacctgaacgctgtctgcttccctggaatccaagatgctgagtggaagtggaccctgggtgggcccggccctgtctttttcaggaaaatta

SEQ ID NO: 775006 - DNA, 120 bp, Artificial Sequence
  ENSG00000242114_7 (sequence is synthesized)
catcctcccatggaggatgagagactgaggctcagggagggcaaggaataggcccaagatcacttggcaagctgggcacccaggacccccaggtgcttgacagagtcaccccatggtggt

SEQ ID NO: 775007 - DNA, 120 bp, Artificial Sequence
  ENSG00000242114_8 (sequence is synthesized)
atggctgaacaaggagcggcagacaactcagggagaaactcaggagtgcagtaccagggacacctcaggacagattctctggccaggcccttccctgacccaataaatcctgaagaggtt

SEQ ID NO: 775008 - DNA, 120 bp, Artificial Sequence
  ENSG00000242114_9 (sequence is synthesized)
aaggctggagaggtgagtgttagcctattttccaacccccaaccctagctctcttcttgtgtggttcagtccacagccttgcatgtgataaagtccctgtgggacactccagtccctaca

SEQ ID NO: 775009 - DNA, 120 bp, Artificial Sequence
  ENSG00000242114_10 (sequence is synthesized)
accttgcctagtgcagtccatagacagtcctgtttgtaggacagtgtacccctgcccccacactcccactccccgaactggatgtggcagactgtaccccactcctgggtgcggacaagt

SEQ ID NO: 775010 - DNA, 120 bp, Artificial Sequence
  ENSG00000242114_11 (sequence is synthesized)
ccactggccacttgcccctcccggtctagcctcgtgccccttgtcgcaggattttctgcctctgccccagctggattaagtgtctctgcgcccaccaggtgcccagccctgaagcaggcc

SEQ ID NO: 775011 - DNA, 120 bp, Artificial Sequence
  ENSG00000242114_12 (sequence is synthesized)
actcagtcctgggagcgattagcgccaacagctcagagaaaacgtgacgaaaaccagtctgtaaaacccgagcctgggagaggggcttcggtgcgcggggggaatttgcagacgctccct

SEQ ID NO: 775012 - DNA, 120 bp, Artificial Sequence
  ENSG00000242120_0 (sequence is synthesized)
agaggaatgctggacatccagagacaagggaggctgcagctcactgctccccagtcccacaccttgggcctccctttggaacacacagatgtcagaaactgagctggaaaagataaaagt

SEQ ID NO: 775013 - DNA, 120 bp, Artificial Sequence
  ENSG00000242120_1 (sequence is synthesized)
aagaacagctgagcatttagaaaatgataaaaataacatttcttggttgaaagaagatacgcaactcacgaatgcaaagcatgcagatgagaaacccattaatgctattgttataaattc

SEQ ID NO: 775014 - DNA, 120 bp, Artificial Sequence
  ENSG00000242120_2 (sequence is synthesized)
agtatctgacttcaatatcacagatggaccagccaaggaaaaccccaatgagaaaaaactgtcagaatccagcacatcactgtcctcccttgaagaatgccaaacaacattttcttacct

SEQ ID NO: 775015 - DNA, 120 bp, Artificial Sequence
  ENSG00000242120_3 (sequence is synthesized)
ccaaactgatacttcagttcatcacagagacactgatgaggagtgtgcctcccttatcctcgcctgtctgttttgccagttttgggactgtctcctgatgctccccggcacctgcgaaac

SEQ ID NO: 775016 - DNA, 120 bp, Artificial Sequence
  ENSG00000242120_4 (sequence is synthesized)
ggtgtgtaccaaaatgtgctgcccctctcgccggtatcaccacacctcggatgaaaaccactctcggaatgattgcagctgcaattgtgacatggactgcagcctttttgaatcttgcca

SEQ ID NO: 775017 - DNA, 120 bp, Artificial Sequence
  ENSG00000242120_5 (sequence is synthesized)
tgagaccagcgagtgtctggaactggccatggagatttcagaaatctgttaccgctagcacagtgaagtaaccacattccggcagtccttttggccacggtgggaaattccattacaaca

SEQ ID NO: 775018 - DNA, 120 bp, Artificial Sequence
  ENSG00000242120_6 (sequence is synthesized)
agactgatttccatgtgctgaaatgtaaggactgtacacatttcttggatgctataggccattttattctgcacctgtctaggaaagctagtattatcaactcaatggtcttattccaaa

SEQ ID NO: 775019 - DNA, 120 bp, Artificial Sequence
  ENSG00000242120_7 (sequence is synthesized)
tttcacaaccgcatggctcactgaaaaataagattcttgatcacatgtgatgaacaaatcttaaatacctcttaaatgctgtaggtacaagatgtttcttgactataaaatagcatgtta

SEQ ID NO: 775020 - DNA, 120 bp, Artificial Sequence
  ENSG00000242120_8 (sequence is synthesized)
agccactgcgttattgcactcatcagcttgcattatggattcaacctcattcacaaattcaggacaaattagtgcattcttttagaattgacatacattagctcgtctttctaatggact

SEQ ID NO: 775021 - DNA, 120 bp, Artificial Sequence
  ENSG00000242120_9 (sequence is synthesized)
aatggactcatgcataaacattatgcattgttggttattattaataatgtattgtataacatcattttgtaattaaaaatttatttatacagtctcttaaaattcacttatatgtacagt

SEQ ID NO: 775022 - DNA, 120 bp, Artificial Sequence
  ENSG00000242120_10 (sequence is synthesized)
gaaagggaattaaatgaattagaaaccatgttcctgtaattacaacagatgtctctaaaacatctccagtgaattttgaatatggtgtacttcaagagagtactataattctagaccata

SEQ ID NO: 775023 - DNA, 120 bp, Artificial Sequence
  ENSG00000242120_11 (sequence is synthesized)
ttattgtatgtctatgactatgtcataacaggttattcatattcttaattcgttacagaaaggctcttagttattctaataagcataaatgagaattatgtgcaagtttcaaaaaaatct

SEQ ID NO: 775024 - DNA, 120 bp, Artificial Sequence
  ENSG00000242120_12 (sequence is synthesized)
aagaaataagcgttgagggtacttattcagcaccaagcttcttaatatagcatgtgcttcagaaaccatgtttttctttgtctgataattaaagtgatcaataattatgtcaagtactta

SEQ ID NO: 775025 - DNA, 120 bp, Artificial Sequence
  ENSG00000242120_13 (sequence is synthesized)
ttttacttatttttttaagaaaaagatgtgatatagactggaaagtgattttcgactcaaataagtttaaacagtttgtggtgaaaacacatctaggttaaagttactttggaatgttct

SEQ ID NO: 775026 - DNA, 120 bp, Artificial Sequence
  ENSG00000242120_14 (sequence is synthesized)
ttactttctgtagaaacaattctatagtccttgggcaaatacattgctcattactttgtgttaatttccatggatatatcttaatattttcactgaatataaaaaagcatcatgcatgag

SEQ ID NO: 775027 - DNA, 120 bp, Artificial Sequence
  ENSG00000242120_15 (sequence is synthesized)
taaccaaacaaagaacacaaaagtgaaatggagaattgagggaatttttttgtgtgtaatttagggaaacagcaacaacaaaagaaagctccaaaatacctgttttttcctgacttaggt

SEQ ID NO: 775028 - DNA, 120 bp, Artificial Sequence
  ENSG00000242120_16 (sequence is synthesized)
aatttcaggcaaaatcaccatttgctttatttctgtagcaaactagcacatttttccaatttgaaataaactctcccaaacattgaaaactattcatctgttaaaaatatttgtaaactg

SEQ ID NO: 775029 - DNA, 120 bp, Artificial Sequence
  ENSG00000242120_17 (sequence is synthesized)
cctctaaaaaggcatttaaccactctcaacttgctcctggaagtgcagtgcacccatggttaatgctgatttcattcctgtttgatgaccatgttattcacaaaccacggagcatgaaag

SEQ ID NO: 775030 - DNA, 120 bp, Artificial Sequence
  ENSG00000242120_18 (sequence is synthesized)
tgccccacaccttccatgaaaaagtctttctgcttttcagaagctcgaagaaacagctctatactcaatgcatagaacttgtagatcattagaagaaaaaaaaatagattcctagaacag

SEQ ID NO: 775031 - DNA, 120 bp, Artificial Sequence
  ENSG00000242120_19 (sequence is synthesized)
gaagggaacataaggctgttcttatgcaacctttttatatttcacaggggaaaagagaggccccatgaactgacttattcaagaccacacagtgaattattggcagtgtcaggaactcta

SEQ ID NO: 775032 - DNA, 120 bp, Artificial Sequence
  ENSG00000242120_20 (sequence is synthesized)
acttgggttctaattttctgactacctgcactacccaattctcagtccagctggtactcagtggtgcaggtgttacaattgttaaaatactaaaacactaccagactgactcatcaacag

SEQ ID NO: 775033 - DNA, 120 bp, Artificial Sequence
  ENSG00000242120_21 (sequence is synthesized)
ttgtttccttgcacctcctagtgcttccttatgtcccatccctcttggctcctctctgagcacccacccctctacccgtggtctagtcactaaaggaggaacacctgggggtctctggaa

SEQ ID NO: 775034 - DNA, 120 bp, Artificial Sequence
  ENSG00000242120_22 (sequence is synthesized)
ccctattcctataatatggtacctggtatcattggtgaggccatgccatattggtgttaaatatttcaattatcattcccttattctttctactctacataccctcaaattatgcaaaga

SEQ ID NO: 775035 - DNA, 120 bp, Artificial Sequence
  ENSG00000242120_23 (sequence is synthesized)
ttgtgcatttcaaatgtgaattgaatgcttgtcaattagagacataaaaatcaccaggtcttatgtggtaatgtggtcagaacactacaagatctttctgtggccttgctttccacggtt

SEQ ID NO: 775036 - DNA, 120 bp, Artificial Sequence
  ENSG00000242120_24 (sequence is synthesized)
tgttaactttgttcctcactttcagaattcactgtgctataacagaaagggtcggttatacaaagtgtgaaatttcttttctttataaccaataataaaacatcatcctttttgcaaaca

SEQ ID NO: 775037 - DNA, 80 bp, Artificial Sequence
  ENSG00000242173_0 (sequence is synthesized)
cccgggccgcgcgccgccatgctgggcctggacgcgtgcgagctgggggcgcagctgctggagctgctccggctggcgct

SEQ ID NO: 775038 - DNA, 120 bp, Artificial Sequence
  ENSG00000242173_1 (sequence is synthesized)
gcgcagctgctggagctgctccggctggcgctgtgcgcccgagtcctcctggctgacaaggagggtgggccgccggcagtggacgaggtgttggatgaggctgtgcccgagtaccgggcg

SEQ ID NO: 775039 - DNA, 120 bp, Artificial Sequence
  ENSG00000242173_2 (sequence is synthesized)
ccggggaggaagagcctcttggagatccggcagctggacccggacgacaggagcctggccaagtacaagcgggtgctgctggggcccctgccaccggccgtggacccaagcctgcccaat

SEQ ID NO: 775040 - DNA, 120 bp, Artificial Sequence
  ENSG00000242173_3 (sequence is synthesized)
gtgcaggtgaccaggctgacactcctgtcggaacaggctccggggcccgtcgtcatggatctcacaggggacctggctgttctgaaggaccaggtgtttgtcctgaaggaaggtgttgat

SEQ ID NO: 775041 - DNA, 120 bp, Artificial Sequence
  ENSG00000242173_4 (sequence is synthesized)
gagtgaagatctccttcaaggtccacagggagattgtcagcggcctcaagtgtctgcaccacacctaccgccggggcctgcgcgtggacaagaccgtctacatggtgggcagctatggcc

SEQ ID NO: 775042 - DNA, 120 bp, Artificial Sequence
  ENSG00000242173_5 (sequence is synthesized)
cgagcgcccaggagtatgagtttgtgactccggtggaggaagcgccgaggggtgcgctggtgcggggcccctatctggtggtgtccctcttcaccgacgatgacaggacgcaccacctgt

SEQ ID NO: 775043 - DNA, 120 bp, Artificial Sequence
  ENSG00000242173_6 (sequence is synthesized)
cctgggagtggggtctctgcatctgccaggactggaaggactgaacccccagtccgtgtctcccctacctccctcagttgttgcacagggacccccaagcatccccagcaccccccgtga

SEQ ID NO: 775044 - DNA, 120 bp, Artificial Sequence
  ENSG00000242173_7 (sequence is synthesized)
gtgaccagaccctcccctgctgcccctgctgcccctgctgcccctgctctgtcccgggaccccctggcctggcgctgtcccctgagctgtcccattaaacatggccctgtctctctcggt

SEQ ID NO: 775045 - DNA, 120 bp, Artificial Sequence
  ENSG00000242173_8 (sequence is synthesized)
gtgggcagggactcagaaacccctgcccagggcaccagggagaggggcttcaggaggccaccagcccggggcgccatgggaggcggcgcagagcctgagcccagggatttggagacagcc

SEQ ID NO: 775046 - DNA, 120 bp, Artificial Sequence
  ENSG00000242173_9 (sequence is synthesized)
gcccccggcacccgagcaccatggggaggaactcctagactgtgggaaagtgttcagagaccccagtccagagcagggtggtggagggccctagagggtcagtaggcttggggggccgcc

SEQ ID NO: 775047 - DNA, 120 bp, Artificial Sequence
  ENSG00000242173_10 (sequence is synthesized)
gagggccctagagggtcagtaggtttgggggccgccgagggccctagagggtcagtaggtttgggggccgccgagggccgctgctctctagcaggtagcccctgaccctgggctgccctc

SEQ ID NO: 775048 - DNA, 120 bp, Artificial Sequence
  ENSG00000242173_11 (sequence is synthesized)
atctgaagtcttcgctcccccgccctttggtctccgagtcagggagggggcccttgtggacatctgggccagaggagctgcaggcctggcggtctctggaggcccctcctgaaggtctgg

SEQ ID NO: 775049 - DNA, 120 bp, Artificial Sequence
  ENSG00000242173_12 (sequence is synthesized)
gtgcggtgcggcacctccccaggccgccctgctctctctgctcgctctctccctgagcccccagaggcttcccttgagtccctttggatagtgggaggtacagctggccagagggggctc

SEQ ID NO: 775050 - DNA, 80 bp, Artificial Sequence
  ENSG00000242173_13 (sequence is synthesized)
gcgacccgggtgccggcccgtgcgggcgacacgcgcgtctctgcggggctgcgcggggtccggagcggctgggggctctc

SEQ ID NO: 775051 - DNA, 120 bp, Artificial Sequence
  ENSG00000242220_0 (sequence is synthesized)
gctgctctctggtctctggatatgaggcaggagggcttggggacaactgtggggacatggcccagatgatctgatcctggcagtagtgactgttggggaccaggatgctggcaggtcaac

SEQ ID NO: 775052 - DNA, 120 bp, Artificial Sequence
  ENSG00000242220_1 (sequence is synthesized)
tcgaggccagggaccccaaagagggcacccacccagaggacccgtgcccaggagctggggctgtcatggagaagacagctgtggcagccgaggttctcacggaggactgcaacactgggg

SEQ ID NO: 775053 - DNA, 120 bp, Artificial Sequence
  ENSG00000242220_2 (sequence is synthesized)
agatgccaccattacagcagcagatcatcagactccaccaagagcttgggagacagaagtctctgtgggctgatgttcatggaaaactccggagtcatatagatgctttgagggagcaga

SEQ ID NO: 775054 - DNA, 120 bp, Artificial Sequence
  ENSG00000242220_3 (sequence is synthesized)
acatggagctccgagaaaagctgagagctctgcagctgcagcggtggaaagccaggaagaaatctgcagcgtccccacacgcggggcaagaatcgcacactctggcattggaacctgctt

SEQ ID NO: 775055 - DNA, 120 bp, Artificial Sequence
  ENSG00000242220_4 (sequence is synthesized)
ttggaaaaatttcacctctgtcagctgatgaagagacaatacccaaatacgctggccacaagaatcagagtgccactctcctgggacaaagatcgtcatctaacaattcagctcctccaa

SEQ ID NO: 775056 - DNA, 120 bp, Artificial Sequence
  ENSG00000242220_5 (sequence is synthesized)
agccaatgagtttaaagatagaaagaattagctcgtggaaaacaccaccacaggaaaatagagataaaaatctttccaggagacgtcaagacagaagagcaacacctactggaaggccaa

SEQ ID NO: 775057 - DNA, 120 bp, Artificial Sequence
  ENSG00000242220_6 (sequence is synthesized)
ctccctgtgcagagagacgggggggtgtctgaagatggaaaggtggcctcggacacctgtgtcactctacactggccccttggaaaattcagattcagataaagttccacttaggtctaa

SEQ ID NO: 775058 - DNA, 120 bp, Artificial Sequence
  ENSG00000242220_7 (sequence is synthesized)
taaaagtactcaatttgttattcaaaatagacctagtaatttattaaactaattatgtttctatagataaaaacttgaagttcttcagacatgtctctaatgctataaaagcaaacaact

SEQ ID NO: 775059 - DNA, 120 bp, Artificial Sequence
  ENSG00000242220_8 (sequence is synthesized)
tggattgggttttataaatcagttgctttcctgagctctgtagttggtatatttctgcagagtctttaaaaaaattaacccaccttgtagtatggagtgtcgggctgttgggtgagccct

SEQ ID NO: 775060 - DNA, 120 bp, Artificial Sequence
  ENSG00000242220_9 (sequence is synthesized)
ggggtcttgctggaaatcgaggatggctgaagatggctttgtgctcccagcctttgggctcaaggcattgcccgctccagggaccttgtgacaaggcgggcctgtgactgtcattgcccc

SEQ ID NO: 775061 - DNA, 120 bp, Artificial Sequence
  ENSG00000242220_10 (sequence is synthesized)
aggctatgcatccatcttcccgaagtctgcaaaacttgagtggcagaaaatcaccagtgcaggcttcccaggccgccatgctgcaggagcagatggcagcagccggaggagctggtgagc

SEQ ID NO: 775062 - DNA, 120 bp, Artificial Sequence
  ENSG00000242220_11 (sequence is synthesized)
agagttggggactcctgtttctatgctccccgtgaaatgcggggctttctcgtggatacgcgtgagcagaacatcttactatggcaaggacatgtccttcctggagctgcctaatttgtg

SEQ ID NO: 775063 - DNA, 120 bp, Artificial Sequence
  ENSG00000242220_12 (sequence is synthesized)
gccactttttgtctgattccctcgttgggtcctcacctgtgagacttgccaacacccccagccctccaccccacacacagcccacatgccggtctccaggggccgtgactggagattccg

SEQ ID NO: 775064 - DNA, 120 bp, Artificial Sequence
  ENSG00000242220_13 (sequence is synthesized)
aatcctagcggtcacttccctctgagcacactcccagcagaaggcgtgtggctggggctagatgcacttgggtgctttgttcccctttctccatttgccagcccatggcattgctgccac

SEQ ID NO: 775065 - DNA, 120 bp, Artificial Sequence
  ENSG00000242220_14 (sequence is synthesized)
cctgatggagcgccctctcatctggcaccttcctggcctctttcccaggccccagttctgtccatgcagctgtgggtgcttcctgcattgcgggtctcacggggaggagacgagagtgcc

SEQ ID NO: 775066 - DNA, 120 bp, Artificial Sequence
  ENSG00000242220_15 (sequence is synthesized)
cttggtaaagaaacggggcctatgtggtggccgagcctcaggtgtggccgagcttcaggtgtggcccttatgcacagcacagcccaagcctgtgggcaccactcgccctgggctgcctgg

SEQ ID NO: 775067 - DNA, 120 bp, Artificial Sequence
  ENSG00000242220_16 (sequence is synthesized)
cacctggactccttcccatccttggccgaggtctgcgtggcccttcagggccgaatctgacactgtcttcctcctgagtctgccccccgggcttcctgcccacccccaggctgtttcatg

SEQ ID NO: 775068 - DNA, 120 bp, Artificial Sequence
  ENSG00000242220_17 (sequence is synthesized)
gcctctgcagggagcttcgtagaggtgaggctggtgccatctgtctgcttcagaccacctcaggctctgcgtgccctcacagtcccctctgcacttctctgtggggcagggaagcccttc

SEQ ID NO: 775069 - DNA, 120 bp, Artificial Sequence
  ENSG00000242220_18 (sequence is synthesized)
ccatcaggtctgctccagcctggctaccttgttcctgctgtcccctccccttcaggcccccggacaagacttcagtgtacttgctggtgccgggcagaatgggggaccttgcctctcaca

SEQ ID NO: 775070 - DNA, 120 bp, Artificial Sequence
  ENSG00000242220_19 (sequence is synthesized)
cacacctgctagtatctccgcaacctccaggcatcatctcagctgacagtgacgccatcctggggaagctcccctgactcctggctctcctggaagcctgtggtgctccttcacaatggc

SEQ ID NO: 775071 - DNA, 120 bp, Artificial Sequence
  ENSG00000242220_20 (sequence is synthesized)
ccgtggcccttcataggtcccgtaagccagtgtcacagggattcggcttttctcttctgtgtttgcctgctgcgggactgtgagcagcttcagggccaagacagtgcctttccatccgtg

SEQ ID NO: 775072 - DNA, 120 bp, Artificial Sequence
  ENSG00000242220_21 (sequence is synthesized)
aatctcctgatccatcagaatactcgaaagagaaataccgactgagtgtattcattaaagaattaatgttccttacaggatcatttgttgttgaactgacctgacatgtgtatagtaatc

SEQ ID NO: 775073 - DNA, 120 bp, Artificial Sequence
  ENSG00000242220_22 (sequence is synthesized)
tcatgaacaagaaagaatgtgttcacacgtttgcttaaattgaatttagcaatcgcattaggatactgatatttccacaatgtatatacactatccttttaaatttaacttatttgcttt

SEQ ID NO: 775074 - DNA, 120 bp, Artificial Sequence
  ENSG00000242220_23 (sequence is synthesized)
ttagacggaagctcctcagtcttagagagttctgaaggtggatttctcagccacgttcaacctgatgagttcactgcttcttccccaaacattgcagagctgcaggtaggtgggctgagt

SEQ ID NO: 775075 - DNA, 120 bp, Artificial Sequence
  ENSG00000242220_24 (sequence is synthesized)
ggcttctgcaagggtggcccgccaggttcccctgagggagacctgagaagctcaccttttcatcctggggaagtgagattcggagtgggtgtcaagagatggttgcatcttcttgacaag

SEQ ID NO: 775076 - DNA, 120 bp, Artificial Sequence
  ENSG00000242220_25 (sequence is synthesized)
aacagaaaattaagatgattccaaatgtctctttatttcctgaggttcagcctttcaaacagagactttcttttatagatttaagttggttgcatttagcacatagtcaaacaggattaa

SEQ ID NO: 775077 - DNA, 120 bp, Artificial Sequence
  ENSG00000242220_26 (sequence is synthesized)
tatttttcatggcttaagagtttcccaagtcaaagtttcattttttatcattttgatttacagttctcaattgacattaatagactcgaaggcacgaatagcaaacatatttctaagccc

SEQ ID NO: 775078 - DNA, 120 bp, Artificial Sequence
  ENSG00000242220_27 (sequence is synthesized)
tagctagtggtccacttgtaacatgctatattttacaaaaaatgtcaataaaatgaaattattttctctacggcaggaaatttgggctgtgaacttacgtgtgatgtaagtaggcacctg

SEQ ID NO: 775079 - DNA, 120 bp, Artificial Sequence
  ENSG00000242220_28 (sequence is synthesized)
gcggggaagtctgggaacacaggtcccgcttgttttctgttctcccgagaaaaacccacattctgttctgcccttttcaacatcttcagtggggggacgagtgggaacatttttcttggg

SEQ ID NO: 775080 - DNA, 120 bp, Artificial Sequence
  ENSG00000242220_29 (sequence is synthesized)
attttattttgtttggggatccagctaatgggtttgcctggaagcctcagggctaatgatctgcatttagaaacagtgccacagtcatggcaggtgttatttgtatgttatttgtatgtc

SEQ ID NO: 775081 - DNA, 120 bp, Artificial Sequence
  ENSG00000242220_30 (sequence is synthesized)
tctgtgtgttatttgtatcaggtgttgaatgtggcggttgtcactgtggccaccctgaccccagagcaaacatataagtgggagataaccactttaataaaacacaaaacatggtccaaa

SEQ ID NO: 775082 - DNA, 120 bp, Artificial Sequence
  ENSG00000242220_31 (sequence is synthesized)
ggaactgtccgctgctctctggtctctggatatgaggcaggagggcttggggacaactgtggggacatggcccagatgatctgatcctggcagtagtgactgttggggaccagccattac

SEQ ID NO: 775083 - DNA, 120 bp, Artificial Sequence
  ENSG00000242220_32 (sequence is synthesized)
agctgcaggaaatttgggctgtgaacttacgtgtgatgtttactattatgcaaatgctcagacgacacacacgacctaccctgatggtttggaagttgtgcagtttcttaacaagcagac

SEQ ID NO: 775084 - DNA, 81 bp, Artificial Sequence
  ENSG00000242220_33 (sequence is synthesized)
ctgatggtttggaagttgtgcagtttcttaacaagcagacagatcagaccctctagttgcaggaaaaaaagctcagggcgg

SEQ ID NO: 775085 - DNA, 89 bp, Artificial Sequence
  ENSG00000242220_34 (sequence is synthesized)
ggaggccaaggtgggcagatcacaaggtgaggagttcgagaccaacctggtaaacatagggaaaccctatctcttctaaaaaaaaatgg

SEQ ID NO: 775086 - DNA, 120 bp, Artificial Sequence
  ENSG00000242220_35 (sequence is synthesized)
aaggtggatttctcagccacgttcaacctgatgagttcactgcttcttccccaaacattgcagagctgcaggtttactattatgcaaatgctcagacgacacacacgacctaccctgatg

SEQ ID NO: 775087 - DNA, 120 bp, Artificial Sequence
  ENSG00000242220_36 (sequence is synthesized)
ttcctgtcccagctttgtgtcaccctcatactcaggaagcaaatctcgtgagtccacagccagcaactgatactgggttgatgtggatggagaaggcgcccccaactcctgaagatgatt

SEQ ID NO: 775088 - DNA, 120 bp, Artificial Sequence
  ENSG00000242221_0 (sequence is synthesized)
gggaattgctgctgccccaggaagaggctcagtgcagaaggaggaaggacagcacagctgacagccgtgctcaggaagtttctggatcctaggctcatctccacagaggagaacacacag

SEQ ID NO: 775089 - DNA, 120 bp, Artificial Sequence
  ENSG00000242221_1 (sequence is synthesized)
gcagcagagaccatggggcccctctcagcccctccctgcacagagcacatcaaatggaaggggctcctggtcacagcatcacttttaaacttctggaacctgcccaccactgcccaagtc

SEQ ID NO: 775090 - DNA, 120 bp, Artificial Sequence
  ENSG00000242221_2 (sequence is synthesized)
acgattgaagcccagccaccaaaagtttccgaggggaaggatgttcttctacttgtccacaatttgccccagaatcttactggctacatctggtacaaagggcaaatcagggacctctac

SEQ ID NO: 775091 - DNA, 120 bp, Artificial Sequence
  ENSG00000242221_3 (sequence is synthesized)
cattacattacatcatatgtagtagacggtcaaataattatatatgggcctgcatatagtggacgagaaacagcatattccaatgcatccctgctgatccagaatgtcacccgggaggac

SEQ ID NO: 775092 - DNA, 120 bp, Artificial Sequence
  ENSG00000242221_4 (sequence is synthesized)
gcaggatcctacaccttacacatcataaagcgaggtgatgggactagaggagtaactggatatttcaccttcaccttatacctggagactcccaagccctccatctccagcagcaactta

SEQ ID NO: 775093 - DNA, 120 bp, Artificial Sequence
  ENSG00000242221_5 (sequence is synthesized)
aaccccagggaggccatggaaactgtgatcttaacctgtgatcctgagactccggacacaagctaccagtggtggatgaatggtcagagcctccctatgactcataggtttcagctgtcc

SEQ ID NO: 775094 - DNA, 120 bp, Artificial Sequence
  ENSG00000242221_6 (sequence is synthesized)
ccctctttctatttggtgtcacaaagtatactgcaggaccctatgaatgtgaaatacggaactcagggagtgccagccgcagtgacccagtcaccctgaatctcctccatggtccagacc

SEQ ID NO: 775095 - DNA, 120 bp, Artificial Sequence
  ENSG00000242221_7 (sequence is synthesized)
tccccagaattcacccttcatacaccaattaccgttcaggagataacctctacttgtcttgcttcgcgaactctaacccaccggcacagtattcttggacaattaatgggaagtttcagc

SEQ ID NO: 775096 - DNA, 120 bp, Artificial Sequence
  ENSG00000242221_8 (sequence is synthesized)
aatcaggacaaaatctgtttatcccccaaattactacaaagcatagcgggctctatgtttgctctgttcgtaactcagccactggcgaggaaagctccacatcgttgacagtcaaagtct

SEQ ID NO: 775097 - DNA, 120 bp, Artificial Sequence
  ENSG00000242221_9 (sequence is synthesized)
ctgcttctacaagaataggacttcttcctctccttaatccaacatagcagctgtgatgtcatttctgtatttcaggaagactggcaggagatttatggaaaggtctcttacaaggactct

SEQ ID NO: 775098 - DNA, 120 bp, Artificial Sequence
  ENSG00000242221_10 (sequence is synthesized)
tgaatacaagctcctgataacttcaagatcataccactggactaagaactttcaaaattttaatgaacaggctgataccttcatgaaattcaagacaaagaagaaaaatactcaatgtta

SEQ ID NO: 775099 - DNA, 120 bp, Artificial Sequence
  ENSG00000242221_11 (sequence is synthesized)
ttggactaaataatcaaaaggataatgatttcataattttctatttgaaaatgtgctgattcttggaatgtttcattctccagatttatgaacattttttcttgagcaattggtaaagta

SEQ ID NO: 775100 - DNA, 120 bp, Artificial Sequence
  ENSG00000242221_12 (sequence is synthesized)
tacttttgtaaacaaaaattgaaacatttccttttgctctctatctgagtgccccagaattgggaatctattcatgagtattcatatgtttatggtaataaagctatttgcacaagttca

SEQ ID NO: 775101 - DNA, 120 bp, Artificial Sequence
  ENSG00000242221_13 (sequence is synthesized)
aaagagggcaaaggtcgtgaatgtgtaccccgacccagggccatggggacagcaggaggctgaggcccaggactgtccttgcccaacctgcaggcgaagctgcccaagccctaaatcacc

SEQ ID NO: 775102 - DNA, 120 bp, Artificial Sequence
  ENSG00000242221_14 (sequence is synthesized)
atcaacaacttaaaccccagggagaataaggatgtattagccttcacctgtgaacctaagagtgagagctacacctacatttggtggctaaatggtcagagcctcccggtcagtcccagg

SEQ ID NO: 775103 - DNA, 120 bp, Artificial Sequence
  ENSG00000242221_15 (sequence is synthesized)
aaaaaaaaaaaagagagaagaaagaaataaaaggaaagaaggctctgttggagcctggataggggaaaatataccagagagggacaggggtcaaaacaggaaaatcacattgaactggaa

SEQ ID NO: 775104 - DNA, 120 bp, Artificial Sequence
  ENSG00000242221_16 (sequence is synthesized)
attgaactggaattggtaagaggtaggaaaatcttaagtgttctgttttcctgattaatcatcaggggccacattttgaaaaatgataataataactatatcagatgacacttcaaataa

SEQ ID NO: 775105 - DNA, 120 bp, Artificial Sequence
  ENSG00000242221_17 (sequence is synthesized)
aaatataagcaggacgtgaaacactgtcctcagcaaaaaacctcaacaattgggggagaaaaaaaaaaacaccaagggtgtggagggccctgagaagtctcacatctacaggagtctgca

SEQ ID NO: 775106 - DNA, 120 bp, Artificial Sequence
  ENSG00000242221_18 (sequence is synthesized)
cccttcatcacaagcaacatgtgacctcgtggagaacaaagactttaggattaacatgtgaacctgagactcagaacacaacctatgtgtggttgagatcttttcctgatgatcagttca

SEQ ID NO: 775107 - DNA, 120 bp, Artificial Sequence
  ENSG00000242221_19 (sequence is synthesized)
tgtgttcaaaaaacatacagaaatgaagaaggcaaggtccctaccccaggagacataaagcctaagacaggaaatgagacctgaaaataatcatgataccaaaatagaaaaaattgaatg

SEQ ID NO: 775108 - DNA, 120 bp, Artificial Sequence
  ENSG00000242221_20 (sequence is synthesized)
ccacaagaaatcagagaaatctgatgggaaatagagctacacattggaatcactggaaaacatttctaaaagtggatgctcaagccccacccattagttccagttcaaaggtctggagag

SEQ ID NO: 775109 - DNA, 120 bp, Artificial Sequence
  ENSG00000242247_0 (sequence is synthesized)
gcggcctcgtcgctcctgctgaggcggtagccgcttttcgtcgactcttaccggttggctgggccagctgcgccgcggctcacagctgacgatgggggaccccagcaagcaggacatctt

SEQ ID NO: 775110 - DNA, 120 bp, Artificial Sequence
  ENSG00000242247_1 (sequence is synthesized)
gaccatcttcaagcgcctccgctcggtgcccactaacaaggtgtgttttgattgtggtgccaaaaatcccagctgggcaagcataacctatggagtgttcctttgcattgattgctcagg

SEQ ID NO: 775111 - DNA, 120 bp, Artificial Sequence
  ENSG00000242247_2 (sequence is synthesized)
gtcccaccggtcacttggtgttcacttgagttttattcgatctacagagttggattccaactggtcatggtttcagttgcgatgcatgcaagtcggaggaaacgctagtgcatcttcctt

SEQ ID NO: 775112 - DNA, 120 bp, Artificial Sequence
  ENSG00000242247_3 (sequence is synthesized)
ttttcatcaacatgggtgttccaccaatgacaccaatgccaagtacaacagtcgtgctgctcagctctatagggagaaaatcaaatcgctcgcctctcaagcaacacggaagcatggcac

SEQ ID NO: 775113 - DNA, 120 bp, Artificial Sequence
  ENSG00000242247_4 (sequence is synthesized)
tgatctgtggcttgatagttgtgtggttccacctttgtcccctccaccaaaggaggaagatttttttgcctctcacgtttctcctgaggtgagtgacacagcgtgggcatcagcaatagc

SEQ ID NO: 775114 - DNA, 120 bp, Artificial Sequence
  ENSG00000242247_5 (sequence is synthesized)
agaaccatcttctttaacatcaaggcctgtggaaaccactttggaaaataatgaaggtggacaagagcaaggaccaagtgtggaaggtcttaatgtaccaacaaaggctactttagaggt

SEQ ID NO: 775115 - DNA, 120 bp, Artificial Sequence
  ENSG00000242247_6 (sequence is synthesized)
atcctctatcataaaaaagaaaccaaatcaagctaaaaaaggccttggggccaaaaaaggaagtttgggagctcagaaactggcaaacacatgctttaatgaaattgaaaaacaagctca

SEQ ID NO: 775116 - DNA, 120 bp, Artificial Sequence
  ENSG00000242247_7 (sequence is synthesized)
agctgcggataaaatgaaggagcaggaagacctggccaaggtggtatctaaagaagaatcaattgtttcatcattacgattagcctataaggatcttgaaattcaaatgaagaaagacga

SEQ ID NO: 775117 - DNA, 120 bp, Artificial Sequence
  ENSG00000242247_8 (sequence is synthesized)
aaagatgaacattagtggcaaaaaaaatgttgactcagacagactcggcatgggatttggaaattgcagaagtgttatttcacattcagtgacttcagatatgcagaccatagagcagga

SEQ ID NO: 775118 - DNA, 120 bp, Artificial Sequence
  ENSG00000242247_9 (sequence is synthesized)
atcacccattatggcaaaaccaagaaaaaagtataatgatgacagtgacgattcatattttacttccagctcaagttactttgacgagccagtggagttaaggagcagttctttctctag

SEQ ID NO: 775119 - DNA, 120 bp, Artificial Sequence
  ENSG00000242247_10 (sequence is synthesized)
ctgggatgacagttcagattcctattggaaaaaagagaccagcaaagatactgaaacagttctgaaaaccacaggctattcagacagacctactgctcgccgcaagccagattatgagcc

SEQ ID NO: 775120 - DNA, 120 bp, Artificial Sequence
  ENSG00000242247_11 (sequence is synthesized)
gattatgagaccagggcccgcctagagaggctgtcggcaagttcctccataagctcggctgatctgttcgaggagccgaggaagcagccagcagggaactacagcctgtccagtgtgctg

SEQ ID NO: 775121 - DNA, 120 bp, Artificial Sequence
  ENSG00000242247_12 (sequence is synthesized)
cccaacgcccccgacatggcgcagttcaagcagggagtgagatcggttgctggaaaactctccgtctttgctaatggagtcgtgacttcaattcaggatcgctacggttcttaatactga

SEQ ID NO: 775122 - DNA, 120 bp, Artificial Sequence
  ENSG00000242247_13 (sequence is synthesized)
agtcatgatgtgtatttcctggagaaattcctctttaaatgaacaagtaaccacatctcaggcggcagtgaagtccagatagttttgcagattgttttgctactttttcatatggtatat

SEQ ID NO: 775123 - DNA, 120 bp, Artificial Sequence
  ENSG00000242247_14 (sequence is synthesized)
gtttctgatttttaatatttcttttgagaaattctgagttctgatgtaggagctttcctgtgatttctgtttcacgttccttcctgtcacaccctcctttggcgtctctgtgtatatcct

SEQ ID NO: 775124 - DNA, 120 bp, Artificial Sequence
  ENSG00000242247_15 (sequence is synthesized)
tgctttattttcttggaacctttgatttcaacactgagggcctggagacctcggctcctcctgctcctgaaccaggaggcttcatgtgggggaggaggagaggtctccatgtgacacatg

SEQ ID NO: 775125 - DNA, 120 bp, Artificial Sequence
  ENSG00000242247_16 (sequence is synthesized)
ggctcagggctgccagaatcagcggatgctggatgggcctgcagaaacaacactcaccacacacacttccttcaaaagaccaaaagtgactggtgtctcgtgtgacagattgcttcattt

SEQ ID NO: 775126 - DNA, 120 bp, Artificial Sequence
  ENSG00000242247_17 (sequence is synthesized)
atgtttctacatagtaaggtgactgccaaataatatttgaagtcatctgtctctttgtaaattattttatatgacctataaatttaaaaatgtttttcagtgagtgcttttaacaaactt

SEQ ID NO: 775127 - DNA, 120 bp, Artificial Sequence
  ENSG00000242247_18 (sequence is synthesized)
aagcttctgccctgccaagggaattaatgttatcttgtgaaaggtgttgctgtttgaattgatgagaaatggaagatgagaactccctaagagttctcataataaatcatctcatcacaa

SEQ ID NO: 775128 - DNA, 120 bp, Artificial Sequence
  ENSG00000242247_19 (sequence is synthesized)
atcaatacggtatacagagttaaagtggaatgaggtaagaagatacagctacagaaaatagttgcgtgtatgggagaacagtcattgtaattgggtagttttgttaataaatatttttaa

SEQ ID NO: 775129 - DNA, 120 bp, Artificial Sequence
  ENSG00000242247_20 (sequence is synthesized)
atcttgcttttcagaaattaccgaatgtgtataaacaaataaagaaaaataatttagctgtgttttagacagcattagaatatattgttcagcacagtaaaatatatttgaaatttgata

SEQ ID NO: 775130 - DNA, 120 bp, Artificial Sequence
  ENSG00000242247_21 (sequence is synthesized)
agccaaaaatgtggttttgaatgaatattttgtgaatctttcttaaaagctcaaatttgtagacttctaaatagaataaacacttgcagcagatggcattgcctacatttttccctgaaa

SEQ ID NO: 775131 - DNA, 120 bp, Artificial Sequence
  ENSG00000242247_22 (sequence is synthesized)
cctcaacccgcactgccatctctccatgaacgtgacacaaaagcccttggtttcagaaagccagtttccgggcaaagaaagctttccacccagggcctggcgtgagctgagggcaagaat

SEQ ID NO: 775132 - DNA, 120 bp, Artificial Sequence
  ENSG00000242247_23 (sequence is synthesized)
tccacccagggcctggcgtgagctgagggcaagaattaaaaagagtcgggcgcggcggctcacgtctgtaatcccagcaatttggaaggccgaagtgggtggatcacctgaagtcaggag

SEQ ID NO: 775133 - DNA, 120 bp, Artificial Sequence
  ENSG00000242247_24 (sequence is synthesized)
tgttacatgggtgtttttttcccttttttcttttctttttttgagacagtgtcttgccttgtcgcctgtcaccttggctgcaggagtgccatcatagctcactgggctcaagtgaactca

SEQ ID NO: 775134 - DNA, 120 bp, Artificial Sequence
  ENSG00000242247_25 (sequence is synthesized)
agtgccatcatagctcactgggctcaagtgaactcagcctctacaaaaaataaaaaatgttgtggtgtgatgatgtataactctagtcctagttactcaggaggctgaagtgggaggatc

SEQ ID NO: 775135 - DNA, 120 bp, Artificial Sequence
  ENSG00000242252_0 (sequence is synthesized)
aggccagctgagtcctgagcagcagcccagcgcagccaccgagacaccatgagagccctcacactcctcgccctattggccctggccgcactttgcatcgctggccaggcaggtgcgaag

SEQ ID NO: 775136 - DNA, 120 bp, Artificial Sequence
  ENSG00000242252_1 (sequence is synthesized)
cccagcggtgcagagtccagcaaaggtgcagcctttgtgtccaagcaggagggcagcgaggtagtgaagagacccaggcgctacctgtatcaatggctgggagccccagtcccctacccg

SEQ ID NO: 775137 - DNA, 120 bp, Artificial Sequence
  ENSG00000242252_2 (sequence is synthesized)
gtgtgagctcaatccggactgtgacgagttggctgaccacatcggctttcaggaggcctatcggcgcttctacggcccggtctagggtgtcgctctgctggcctggccggcaaccccagt

SEQ ID NO: 775138 - DNA, 120 bp, Artificial Sequence
  ENSG00000242252_3 (sequence is synthesized)
tctgctcctctccaggcacccttctttcctcttccccttgcccttgccctgacctcccagccctatggatgtggggtccccatcatcccagctgctcccaaataaactccagaagaggaa

SEQ ID NO: 775139 - DNA, 120 bp, Artificial Sequence
  ENSG00000242252_4 (sequence is synthesized)
agctgagtcctgagcagcagcccagcgcagccaccgagacaccatgagagccctcacactcctcgccctattggccctggccgcactttgcatcgctggccaggcaggtgagtgccccca

SEQ ID NO: 775140 - DNA, 120 bp, Artificial Sequence
  ENSG00000242252_5 (sequence is synthesized)
cctcccctcaggccgcattgcagtgggggctgagaggaggaagcaccatggcccacctcttctcacccctttggctggcagtccctttgcagtctaaccaccttgttgcaggctcaatcc

SEQ ID NO: 775141 - DNA, 120 bp, Artificial Sequence
  ENSG00000242252_6 (sequence is synthesized)
atttgccccagctctgcccttgcagagggagaggagggaagagcaagctgcccgagacgcaggggaaggaggatgagggccctggggatgagctggggtgaaccaggctccctttccttt

SEQ ID NO: 775142 - DNA, 120 bp, Artificial Sequence
  ENSG00000242252_7 (sequence is synthesized)
gctacctgtatcaatggctggggtgagagaaaaggcagagctgggccaaggccctgcctctccgggatggtctgtgggggagctgcagcagggagtggcctctctgggttgtggtggggg

SEQ ID NO: 775143 - DNA, 120 bp, Artificial Sequence
  ENSG00000242252_8 (sequence is synthesized)
tacaggcagcctgccctggtgggcaccctggagccccatgtgtagggagaggagggatgggcattttgcacgggggctgatgccaccacgtcgggtgtctcagagccccagtcccctacc

SEQ ID NO: 775144 - DNA, 120 bp, Artificial Sequence
  ENSG00000242259_0 (sequence is synthesized)
cgcccagacatggcggacggcagcggctggcagccgccgcgcccctgcgaggcctaccgcgccgagtggaagctctgccgcagcgccaggcacttcctacaccactactacgtccacggc

SEQ ID NO: 775145 - DNA, 120 bp, Artificial Sequence
  ENSG00000242259_1 (sequence is synthesized)
gagcggccggcctgcgaacagtggcagcgcgacctggccagctgccgcgactgggaggagcgccggaacgccgaggcccagcaatccctctgtgagagcgagcgggcacgagtccgggct

SEQ ID NO: 775146 - DNA, 120 bp, Artificial Sequence
  ENSG00000242259_2 (sequence is synthesized)
gcacggaagcacatcctggtgtgggccccgaggcagagcccccctccagactggcatctccctctgccacaggagaaggacgagtgacaagcatccctgccattggcctgtgcagcttcc

SEQ ID NO: 775147 - DNA, 120 bp, Artificial Sequence
  ENSG00000242259_3 (sequence is synthesized)
tcagtctgtttcaagttgctgttgcacagccctggggactgtgaccagcctacacagtctggtgggtccctgtgagctcttgctcacaggaacatggagcaggacattgctagccctact

SEQ ID NO: 775148 - DNA, 120 bp, Artificial Sequence
  ENSG00000242259_4 (sequence is synthesized)
tgcccacccctcacctgcatgcaggataccctgacactgcgatgttctgcaggacaattgcaccgctttagagcttccaggaggccaagcattatggcaggtacttgtgagcagccaggt

SEQ ID NO: 775149 - DNA, 120 bp, Artificial Sequence
  ENSG00000242259_5 (sequence is synthesized)
ggagatggcggtcctgaggtctaggcttctcaggtaaactgaagggtagccctgacctgtgtggacacacaggtgggtcataatgaggtagctaaacagttgtgccactgtgaatgtctt

SEQ ID NO: 775150 - DNA, 120 bp, Artificial Sequence
  ENSG00000242259_6 (sequence is synthesized)
tcctagtccttgggaaactgcctgccacgtcccaggtttggtgagcattgtgagtgctcacactctgctccactcgctcagttccactgcacatgcaggcaggtgtgccgagcaggtagg

SEQ ID NO: 775151 - DNA, 120 bp, Artificial Sequence
  ENSG00000242259_7 (sequence is synthesized)
gcttgctggcccctctgcaccagcaggcttcacttcttaggctcccaggtcggcccctggagactctggtttttaagaaatgcacacagctacagaacacacaaccttgcataaagaggg

SEQ ID NO: 775152 - DNA, 120 bp, Artificial Sequence
  ENSG00000242259_8 (sequence is synthesized)
tttgtggactcagctgaagaaatccaagtccaagacatatggaattaagcactccttccctcaaaatttcccctggtggttaatgtatcaaaagctatttcatctgatttcaaatagaag

SEQ ID NO: 775153 - DNA, 120 bp, Artificial Sequence
  ENSG00000242259_9 (sequence is synthesized)
ctgaaaattaagttcacacttgttagattttgtgtgtaacagtgttgtacctggacagtattagaaatttgtatgcttattctcttgttaagtgttttaaaatgtatgaaccaccaaaaa

SEQ ID NO: 775154 - DNA, 60 bp, Artificial Sequence
  ENSG00000242259_10 (sequence is synthesized)
aggctgaggcagaagaatcacttgaggataggagtttgaggttgcagttaaatgttttaa

SEQ ID NO: 775155 - DNA, 120 bp, Artificial Sequence
  ENSG00000242259_11 (sequence is synthesized)
aaaaataaatgttttggataaaaccccatattaataataagtattttacattattatctggcatagactgttatatatagcatattattgttgaaatacaaaacaatatgtatccgtact

SEQ ID NO: 775156 - DNA, 120 bp, Artificial Sequence
  ENSG00000242259_12 (sequence is synthesized)
agcaactcagatgaaactcaaggaaattcttcagagcaaaaacagccaatcttgaaaacatacatgtagcaggattccatttatgtaacattggtgaaataatgtaattatagagatgga

SEQ ID NO: 775157 - DNA, 120 bp, Artificial Sequence
  ENSG00000242259_13 (sequence is synthesized)
aaacagattaaaggttaccaggggtttaggttagggatggtgagggggtggttcatacgagggagtcctgtggtgttgaaaaccatctgtcagcctgactggtggttacacagggctata

SEQ ID NO: 775158 - DNA, 120 bp, Artificial Sequence
  ENSG00000242259_14 (sequence is synthesized)
catgaagttaaaattgtgtagagttaggtacacaaaggagtacagatgtaactggggaaactgagtatgttctgtagactgtaccaatgtcaatttctgcgtcctgatgctgtgctgtag

SEQ ID NO: 775159 - DNA, 120 bp, Artificial Sequence
  ENSG00000242259_15 (sequence is synthesized)
tgtataaggtgttaacattgggggaggctggggcaagggtacccaggacctccctagacaacctcctatgcaacctcctgtgaatctataattacttcaaaataaaaagttgaaaacaaa

SEQ ID NO: 775160 - DNA, 120 bp, Artificial Sequence
  ENSG00000242259_16 (sequence is synthesized)
atatgtcatgcccaaccaatctcagttactttgcgagttcacctccatcctgagtggacgctcaagcaagactgctggagctgcagatctgggaggttcgctgcaccaccttgatgctca

SEQ ID NO: 775161 - DNA, 120 bp, Artificial Sequence
  ENSG00000242259_17 (sequence is synthesized)
gtatgtacttttgaaaatataccggattgttgagatttgagaaaatctcataaagctgctgaaaagaactggccagagccgtgtgatttgagaggcggctgacgtaaggtagctgcgcgg

SEQ ID NO: 775162 - DNA, 120 bp, Artificial Sequence
  ENSG00000242259_18 (sequence is synthesized)
cccaggatgcccgcctggcccggggtgaatggcgctgtcgtcgcggtggtcgcgtaggcttcgcgccaggtctcgccccggatttaccctgcgaccccggccctccgcgcgcgccgcagc

SEQ ID NO: 775163 - DNA, 120 bp, Artificial Sequence
  ENSG00000242259_19 (sequence is synthesized)
cgccctcggttgctattggttgctcgtcctgtttgtcggcgcttctcgaagaagggggcgaagacgtgattgaatgtgtcggtgctcattagttcttctgtcagtcgatcacgaggtgcc

SEQ ID NO: 775164 - DNA, 120 bp, Artificial Sequence
  ENSG00000242259_20 (sequence is synthesized)
agaatggtttctcatcctatggtggccctgttgtgtgatgctgagggctaggctgggtctgtgcccagcaccctccctgctctcttcctggacacaggcagcaagttgaatatcttttaa

SEQ ID NO: 775165 - DNA, 120 bp, Artificial Sequence
  ENSG00000242259_21 (sequence is synthesized)
tttgttctttggggcagaataatctatcacgttagaagggtgtccattaaagaacagtatttccctgcttgagtgtgttttctcctgtgctccctaagagcccctgtgtctgtgaacagt

SEQ ID NO: 775166 - DNA, 120 bp, Artificial Sequence
  ENSG00000242259_22 (sequence is synthesized)
gggggtgggggtgggggttgtgctcacgggatcccaagagcaggagcatctaaagaggagccagcgttcccccatcatcaggggagtactgatgtgtctaaggcaaccagggtgcctcca

SEQ ID NO: 775167 - DNA, 120 bp, Artificial Sequence
  ENSG00000242259_23 (sequence is synthesized)
gcatggctgtggctggtttaataatgagcatttccacccagtgagggaagagaggaagactgctagagatctacaaggtttttcttactcttaaacacagggacggggcatctgaatttg

SEQ ID NO: 775168 - DNA, 120 bp, Artificial Sequence
  ENSG00000242259_24 (sequence is synthesized)
cgacagagtgagactcttgtctcaaagataaaataataaaatgagtttgcagcctgcatgtgatgcctgggattgcagcagctgccttcaggttcctggggcagagctggagagtgcagc

SEQ ID NO: 775169 - DNA, 120 bp, Artificial Sequence
  ENSG00000242259_25 (sequence is synthesized)
agtgcagcaaaagccagggcatgccagccagcaccccagtccatgaggggcttcccctcagtgcagccacgctccctgccacctgcttgtttagcaaggtatgcattgtgcggctgcatg

SEQ ID NO: 775170 - DNA, 120 bp, Artificial Sequence
  ENSG00000242259_26 (sequence is synthesized)
ctctgttaggaagcattaagtcctgcctctgtagtgtgactatcatgttttgcctcctccttcactactcaagttccacatcaacagataatctctctggacaggatgttcctgcatttg

SEQ ID NO: 775171 - DNA, 120 bp, Artificial Sequence
  ENSG00000242259_27 (sequence is synthesized)
tttctatgtcaattgcttcacaacatctgagtgtccacatgttggacagggtttgaggcttataagaccacagttttgaaacagacaagttgtcttcaaagagtttctgttgtagtttgg

SEQ ID NO: 775172 - DNA, 120 bp, Artificial Sequence
  ENSG00000242259_28 (sequence is synthesized)
caaagagtttctgttgtagtttgggtaaaagacagacattaaacatcaataaataggaatttaaaacggtggctggatgtggtggctcacggctgttatcccagcactttgggaggctga

SEQ ID NO: 775173 - DNA, 120 bp, Artificial Sequence
  ENSG00000242259_29 (sequence is synthesized)
gagttcgagaccagcctgggcaacgtaacaagaccccatctctacaaaaaataaatgagctatgcatggtggcgtgcatttgtagttccagctacttcggaggctgagataggaggattg

SEQ ID NO: 775174 - DNA, 76 bp, Artificial Sequence
  ENSG00000242259_30 (sequence is synthesized)
ccactgcacttcaacctgggtgacagagcaatatcctgtctcaaaataaataaaaataaaatggtggtaatttctg

SEQ ID NO: 775175 - DNA, 120 bp, Artificial Sequence
  ENSG00000242259_31 (sequence is synthesized)
tcgcaactggaggacaagggcaggattctgggaaggttgtgatctggaatatgtctccagtcctccaggaggatgacgagaaggatgaaaatattcccaagatgctttgccagatggaca

SEQ ID NO: 775176 - DNA, 120 bp, Artificial Sequence
  ENSG00000242259_32 (sequence is synthesized)
atcacttagcatgtgtgaactgtgtgcggtggtcaaacagtgggatgtatttagcttctgggggagatgacaaactgattatggtgtggaagcgggctacgtacatcggccccagcaccg

SEQ ID NO: 775177 - DNA, 120 bp, Artificial Sequence
  ENSG00000242259_33 (sequence is synthesized)
tgttcggctccagtggtaagcttgccaatgtggagcagtggcggtgtgtctctatcctccggaatcattcaggcgatgtgatggatgtagcatggtctccccacgatgcctggctagcct

SEQ ID NO: 775178 - DNA, 120 bp, Artificial Sequence
  ENSG00000242259_34 (sequence is synthesized)
catgcagcgtggataacactgtcgtcatctggaatgctgtaaagttcccagaaattctagctactctgagaggtcattctggcttggtcaaagggttgacatgggaccctgttggtaaat

SEQ ID NO: 775179 - DNA, 120 bp, Artificial Sequence
  ENSG00000242259_35 (sequence is synthesized)
acatagcttctcaagctgatgaccgcagcctaaaggtgtggaggacgctggactggcagttggagaccagcatcaccaagccttttgatgagtgtggaggaacgacccatgtgttgcggc

SEQ ID NO: 775180 - DNA, 120 bp, Artificial Sequence
  ENSG00000242259_36 (sequence is synthesized)
tcagctggtcacctgatgggcattacctggtgtctgcccatgccatgaacaactcaggccccactgcccagatcatcgaacgggagggatggaagaccaacatggactttgttgggcacc

SEQ ID NO: 775181 - DNA, 120 bp, Artificial Sequence
  ENSG00000242259_37 (sequence is synthesized)
ggaaagctgtgactgtcgtgaaattcaacccaaaaatcttcaaaaagaagcagaagaatgggagttctgcgaagcctagctgcccgtactgctgctgtgctgttggcagcaaggaccgct

SEQ ID NO: 775182 - DNA, 120 bp, Artificial Sequence
  ENSG00000242259_38 (sequence is synthesized)
cgctttctgtctggctcacatgtctgaaacggccgctggtggtcatccatgaactgtttgacaaatccatcatggatatttcctggactctgaatgggctgggcatcttggtatgctcta

SEQ ID NO: 775183 - DNA, 120 bp, Artificial Sequence
  ENSG00000242259_39 (sequence is synthesized)
tggacggctctgtggcattcctcgacttctcccaggatgagcttggcgatcccctgagcgaggaggagaagagccgcattcaccagtccacctatggcaagagcctagccatcatgaccg

SEQ ID NO: 775184 - DNA, 120 bp, Artificial Sequence
  ENSG00000242259_40 (sequence is synthesized)
aggcccagctctccacagccgtcattgagaaccctgagatgctcaagtaccagcgaaggcagcagcagcagcagctggaccagaagagtgctgcgaccagggagatgggctcagccacct

SEQ ID NO: 775185 - DNA, 120 bp, Artificial Sequence
  ENSG00000242259_41 (sequence is synthesized)
tcacgcctctctgcatagcacagctggacactggggacttctccacggcattctttaacagcatccccctctcgggctccctggcgggcaccatgctctcttctcatagcagtccacagc

SEQ ID NO: 775186 - DNA, 120 bp, Artificial Sequence
  ENSG00000242259_42 (sequence is synthesized)
tactgccactggactccagtacccctaactccttcggcgcctcgaagccttgcacagagcctgtggtggctgccagtgccagacctgcaggcgattctgtcaataaagacagtatgaatg

SEQ ID NO: 775187 - DNA, 120 bp, Artificial Sequence
  ENSG00000242259_43 (sequence is synthesized)
ctacctctactcctgctgcattgtcaccttctgtgttaacgaccccgtccaagatcgaacccatgaaagcgtttgactcccggttcacagagcggtccaaagccacaccaggtgctcctg

SEQ ID NO: 775188 - DNA, 120 bp, Artificial Sequence
  ENSG00000242259_44 (sequence is synthesized)
ccctgaccagcatgactccgacagctgtggaaaggttaaaagagcagaaccttgtgaaagagctgaggccccgagacctcctggagagcagcagtgacagcgatgagaaagtccctttgg

SEQ ID NO: 775189 - DNA, 120 bp, Artificial Sequence
  ENSG00000242259_45 (sequence is synthesized)
ctaaggcttcctcactgtccaagcgaaaacttgagcttgaggtagagacagtagagaagaagaagaaagggcggcctcggaaggactctcgtctcatgcctgtgtctctgtctgtccagt

SEQ ID NO: 775190 - DNA, 120 bp, Artificial Sequence
  ENSG00000242259_46 (sequence is synthesized)
ctccagctgccctaaccgcagagaaggaggccatgtgtctgtctgcaccagcacttgcactgaagctgccaattccaagcccccagagagcattcaccctccaggtcagctccgatcctt

SEQ ID NO: 775191 - DNA, 120 bp, Artificial Sequence
  ENSG00000242259_47 (sequence is synthesized)
ccatgtacattgaggtggagaatgaagtgacagtggtggggggcgtgaagctgagccgcctgaagtgcaaccgggaagggaaggagtgggagacggtactcaccagccggatcctcactg

SEQ ID NO: 775192 - DNA, 120 bp, Artificial Sequence
  ENSG00000242259_48 (sequence is synthesized)
ctgcgggcagctgtgacgtggtgtgtgtcgcctgtgaaaaaaggatgctgtcagtgttctccacctgtggtcgccgtctcctctctcccatcctcctgccatccccgatctctactttgc

SEQ ID NO: 775193 - DNA, 120 bp, Artificial Sequence
  ENSG00000242259_49 (sequence is synthesized)
attgcacaggctcctacgtcatggcgctcaccgctgcagccacactctctgtctgggatgttcacagacaggtggttgtggtgaaagaagagtctctacactccatcctggcaggaacct

SEQ ID NO: 775194 - DNA, 120 bp, Artificial Sequence
  ENSG00000242259_50 (sequence is synthesized)
ggtttctgacaagcaggactcactggctcagtgtgcagactttaggagcagcctgccatcccaggacgccatgctgtgctcaggaccgttagccataatccagggccgcacctccaactc

SEQ ID NO: 775195 - DNA, 120 bp, Artificial Sequence
  ENSG00000242259_51 (sequence is synthesized)
gggaaggcaggctgcccggctcttctccgtgcctcatgtggtgcagcaagagaccaccctggcctacctagagaaccaggtggcagcagcactcaccctgcagtccagccacgagtaccg

SEQ ID NO: 775196 - DNA, 120 bp, Artificial Sequence
  ENSG00000242259_52 (sequence is synthesized)
ccattggctcctcgtctacgcacggtacctcgtaaacgaagggtttgaataccgacttcgagaaatatgcaaggacttactgggtccggttcactactccactggaagccagtgggagtc

SEQ ID NO: 775197 - DNA, 120 bp, Artificial Sequence
  ENSG00000242265_0 (sequence is synthesized)
ctcctcggtgcaacctatataaggctcacagtctgcgctcctggtacacgcgcttcaacttcggttggtgtgtgtcgaagaaacctgactgcgccctgaggagaacagcggagaaggtcc

SEQ ID NO: 775198 - DNA, 120 bp, Artificial Sequence
  ENSG00000242265_1 (sequence is synthesized)
accgagcctggcgaaaggtccgctgagcgggctgtcgtccggagccactccgggctgcggagcacccagtggagaccgcgcctggctcaggtgtgggaccccatccttcctgtcttcgca

SEQ ID NO: 775199 - DNA, 120 bp, Artificial Sequence
  ENSG00000242265_2 (sequence is synthesized)
gaggagtcctcgcgtgaaataagcgggttttgaaaacaaaaaaaagaaggagtggaagagggggccaggatccaggcctccatccccacagaagtgaagctacagctgggaggtctcctc

SEQ ID NO: 775200 - DNA, 120 bp, Artificial Sequence
  ENSG00000242265_3 (sequence is synthesized)
ccaccccaaccgtcaccctgggtcccgactgcccacctcctcctcctccccctccccccaacaacaacaacaacaacaactccaagcacaccggccataagagtgcgtgtgtccccaaca

SEQ ID NO: 775201 - DNA, 120 bp, Artificial Sequence
  ENSG00000242265_4 (sequence is synthesized)
tgaccgaacgaagaagggacgagctctctgaagagatcaacaacttaagagagaaggtcatgaagcagtcggaggagaacaacaacctgcagagccaggtgcagaagctcacagaggaga

SEQ ID NO: 775202 - DNA, 120 bp, Artificial Sequence
  ENSG00000242265_5 (sequence is synthesized)
acaccacccttcgagagcaagtggaacccacccctgaggatgaggatgatgacatcgagctccgcggtgctgcagcagctgctgccccaccccctccaatagaggaagagtgcccagaag

SEQ ID NO: 775203 - DNA, 120 bp, Artificial Sequence
  ENSG00000242265_6 (sequence is synthesized)
acctcccagagaagttcgatggcaacccagacatgctggctcctttcatggcccagtgccagatcttcatggaaaagagcaccagggatttctcagttgatcgtgtccgtgtctgcttcg

SEQ ID NO: 775204 - DNA, 120 bp, Artificial Sequence
  ENSG00000242265_7 (sequence is synthesized)
tgacaagcatgatgaccggccgtgctgcccgttgggcctcagcaaagctggagcgctcccactacctgatgcacaactacccagctttcatgatggaaatgaagcatgtctttgaagacc

SEQ ID NO: 775205 - DNA, 120 bp, Artificial Sequence
  ENSG00000242265_8 (sequence is synthesized)
ctcagaggcgagaggttgccaaacgcaagatcagacgcctgcgccaaggcatggggtctgtcatcgactactccaatgctttccagatgattgcccaggacctggattggaacgagcctg

SEQ ID NO: 775206 - DNA, 120 bp, Artificial Sequence
  ENSG00000242265_9 (sequence is synthesized)
cgctgattgaccagtaccacgagggcctcagcgaccacattcaggaggagctctcccacctcgaggtcgccaagtcgctgtctgctctgattgggcagtgcattcacattgagagaaggc

SEQ ID NO: 775207 - DNA, 120 bp, Artificial Sequence
  ENSG00000242265_10 (sequence is synthesized)
tggccagggctgctgcagctcgcaagccacgctcgccaccccgggcgctggtgttgcctcacattgcaagccaccaccaggtagatccaaccgagccggtgggaggtgcccgcatgcgcc

SEQ ID NO: 775208 - DNA, 120 bp, Artificial Sequence
  ENSG00000242265_11 (sequence is synthesized)
tgacgcaggaagaaaaagaaagacgcagaaagctgaacctgtgcctctactgtggaacaggaggtcactacgctgacaattgtcctgccaaggcctcaaagtcttcgccggcgggaaact

SEQ ID NO: 775209 - DNA, 120 bp, Artificial Sequence
  ENSG00000242265_12 (sequence is synthesized)
ccccggccccgctgtagagggaccttcagcgaccgggccagaaataataaggtccccacaagatgatgcctcatctccacacttgcaagtgatgctccagattcatcttccgggcagaca

SEQ ID NO: 775210 - DNA, 120 bp, Artificial Sequence
  ENSG00000242265_13 (sequence is synthesized)
caccctgttcgtccgagccatgatcgattctggtgcttctggcaacttcattgatcacgaatatgttgctcaaaatggaattcctctaagaatcaaggactggccaatacttgtggaagc

SEQ ID NO: 775211 - DNA, 120 bp, Artificial Sequence
  ENSG00000242265_14 (sequence is synthesized)
aattgatgggcgccccatagcatcgggcccagttgtccacgaaactcacgacctgatagttgacctgggagatcaccgagaggtgctgtcatttgatgtgactcagtctccattcttccc

SEQ ID NO: 775212 - DNA, 120 bp, Artificial Sequence
  ENSG00000242265_15 (sequence is synthesized)
tgtcgtcctaggggttcgctggctgagcacacatgatcccaatatcacatggagcactcgatctatcgtctttgattctgaatactgccgctaccactgccggatgtattctccaatacc

SEQ ID NO: 775213 - DNA, 120 bp, Artificial Sequence
  ENSG00000242265_16 (sequence is synthesized)
accatcgctcccaccaccagcaccacaaccgccactctattatccagtagatggatacagagtttaccaaccagtgaggtattactatgtccagaatgtgtacactccagtagatgagca

SEQ ID NO: 775214 - DNA, 120 bp, Artificial Sequence
  ENSG00000242265_17 (sequence is synthesized)
cgtctacccagatcaccgcctggttgaccctcacatagaaatgatacctggagcacacagtattcccagtggacatgtgtattcactgtccgaacctgaaatggcagctcttcgagattt

SEQ ID NO: 775215 - DNA, 120 bp, Artificial Sequence
  ENSG00000242265_18 (sequence is synthesized)
tgtggcaagaaatgtaaaagatgggctaattactccaacgattgcacctaatggagcccaagttctccaggtgaagagggggtggaaactgcaagtttcttatgattgccgagctccaaa

SEQ ID NO: 775216 - DNA, 120 bp, Artificial Sequence
  ENSG00000242265_19 (sequence is synthesized)
caattttactatccagaatcagtatcctcgcctatctattccaaatttagaagaccaagcacacctggcaacgtacactgaattcgtacctcaaatacctggataccaaacataccccac

SEQ ID NO: 775217 - DNA, 120 bp, Artificial Sequence
  ENSG00000242265_20 (sequence is synthesized)
atatgccgcgtacccgacctacccagtaggattcgcctggtacccagtgggacgagacggacaaggaagatcactatatgtacctgtgatgatcacttggaatccacactggtaccgcca

SEQ ID NO: 775218 - DNA, 120 bp, Artificial Sequence
  ENSG00000242265_21 (sequence is synthesized)
gcctccggtaccacagtacccgccgccacagccgccgcctccaccaccaccaccgccgccgcctccatcttacagtaccctgtaaatacctgtcatgtccttcaggatctctgccctcaa

SEQ ID NO: 775219 - DNA, 120 bp, Artificial Sequence
  ENSG00000242265_22 (sequence is synthesized)
aatttattcctgttcagcttctcaatcagtgactgtgtgctaaattttaggctactgtatcttcaggccacctgaggcacatcctctctgaaacggctatggaaggttagggccactctg

SEQ ID NO: 775220 - DNA, 120 bp, Artificial Sequence
  ENSG00000242265_23 (sequence is synthesized)
gactggcacacatcctaaagcaccaaaagaccttcaacattttctgagagcaacagagtatttgccaataaatgatctctcatttttccaccttgactgccaatctaactaaaataatta

SEQ ID NO: 775221 - DNA, 120 bp, Artificial Sequence
  ENSG00000242265_24 (sequence is synthesized)
ataagtttactttccagccagtcctggaagtctgggttttacctgccaaaacctccatcaccatctaaattataggctgccaaatttgctgtttaacatttacagagaagctgatacaaa

SEQ ID NO: 775222 - DNA, 120 bp, Artificial Sequence
  ENSG00000242265_25 (sequence is synthesized)
cgcaggaaatgctgatttctttatggagggggagacgaggaggaggaggacatgacttttcttgcggtttcggtaccctctttttaaatcactggaggactgaggccttattaaggaagc

SEQ ID NO: 775223 - DNA, 120 bp, Artificial Sequence
  ENSG00000242265_26 (sequence is synthesized)
caaaattatcggtgcagtgtggaaaggcttccgtgatcctctcgctgcacccttagaaacttcaccgtcttcaaactccatttccatggttctgttaattctcaaggagcagcaactcga

SEQ ID NO: 775224 - DNA, 120 bp, Artificial Sequence
  ENSG00000242265_27 (sequence is synthesized)
ggaaaaacccttgtgacatgaaacatctcaggcctgaaaagaaagtgctctctcagatggactcttgcatgttaagactatgtcttcacatcatggtgcaaatcacatgtacccaatgac

SEQ ID NO: 775225 - DNA, 120 bp, Artificial Sequence
  ENSG00000242265_28 (sequence is synthesized)
tccggctttgacacaacaccttaccatcatcatgccatgatggcttccacaaagcattaaacctggtaaccagagattactggtggctccagcgttgttagatgttcatgaaatgtgacc

SEQ ID NO: 775226 - DNA, 120 bp, Artificial Sequence
  ENSG00000242265_29 (sequence is synthesized)
acctctcaatcacctttgagggctaaagagtagcacatcaaaaggactccaaaatcccatacccaactcttaagagatttgtcctggtacttcagaaagaattttcatgagtgttcttaa

SEQ ID NO: 775227 - DNA, 120 bp, Artificial Sequence
  ENSG00000242265_30 (sequence is synthesized)
ttggctggaaaagcaccagctgacgttttggaagaatctatccatgtgtctgcctccatatgcatctgggcatttcatcttcagtcccctcattagactgtagcattaggatgtgtggag

SEQ ID NO: 775228 - DNA, 120 bp, Artificial Sequence
  ENSG00000242265_31 (sequence is synthesized)
agaggagaaatgatttagcacccagattcacactcctatgcctggaagggggacatctttgaagaagaggaattagggctgtggacactgtcttgaggatgtggacttccttagtgagct

SEQ ID NO: 775229 - DNA, 120 bp, Artificial Sequence
  ENSG00000242265_32 (sequence is synthesized)
ccacattacttgatggtaaccacttcaaaaggatcagaatccacgtaatgaaaaaggtccctctagaggatggagctgatgtgaagctgccaatggatgaaaagcctcagaaagcaactc

SEQ ID NO: 775230 - DNA, 120 bp, Artificial Sequence
  ENSG00000242265_33 (sequence is synthesized)
aaaggactcaaagcaacggacaacacaagagttgtcttcagcccagtgacacctctgatgtcccctggaagctttgtgctaacctgggactgcctgacttcctttagcctggtcccttgc

SEQ ID NO: 775231 - DNA, 120 bp, Artificial Sequence
  ENSG00000242265_34 (sequence is synthesized)
tactaccttgaactgttttatctaacctctctttttctgtttaattctttgctactgccattgaccctgctgcaggatttgtgtcattttcctgcctggttgctgagactccattttgct

SEQ ID NO: 775232 - DNA, 120 bp, Artificial Sequence
  ENSG00000242265_35 (sequence is synthesized)
gccacacacagagatgtaagaggcaggctttaattgccaaagcacagtttgagcagtagaaaacaacatggtgtatatctcaaattgcctgacatgaagaggagtctaacggtgaagttt

SEQ ID NO: 775233 - DNA, 120 bp, Artificial Sequence
  ENSG00000242265_36 (sequence is synthesized)
cacttttcatcagcatcatctttcacatgttcattatcatctgctcttattcttgcatgtttaaacacttaaaatttttagtataatttttagtgtgttttgaagtggtgactaggcttt

SEQ ID NO: 775234 - DNA, 120 bp, Artificial Sequence
  ENSG00000242265_37 (sequence is synthesized)
caaaaacttccattgaattacaaagcactatccagttcttattgttaaactaagtaaaaatgataagtaacatagtgtaaaatattcctttactgtgaacttcttacaatgctgtgaatg

SEQ ID NO: 775235 - DNA, 120 bp, Artificial Sequence
  ENSG00000242265_38 (sequence is synthesized)
agaggctcctcagaactggagcatttgtataataattcatcctgttcatcttcaattttaacatcatatataatttcaattctatcaattgggcctttaaaaatcatataaaaggatata

SEQ ID NO: 775236 - DNA, 120 bp, Artificial Sequence
  ENSG00000242265_39 (sequence is synthesized)
aaatttgaaaagagaaacctaattggctatttaatccaaaacaactttttttttccttcaatggaatcagaaagcttgtcaatcactcatgtgttttagagtaattacttttaaaatggt

SEQ ID NO: 775237 - DNA, 120 bp, Artificial Sequence
  ENSG00000242265_40 (sequence is synthesized)
gcatttgtgcttctgaactattttgaagagtcacttctgtttacctcaagtatcaattcatcctccatacatttgaattcaagttgtttttttgtcaaatttacagttgtcaattgatct

SEQ ID NO: 775238 - DNA, 120 bp, Artificial Sequence
  ENSG00000242265_41 (sequence is synthesized)
tcaagctgcagggtgcctagaaatgggccgttgtctgtagccctggcatgtgcacacggacatttgccaccactgcaagcaaaagtctggagaagttcaccaacgacaagaacgattagg

SEQ ID NO: 775239 - DNA, 120 bp, Artificial Sequence
  ENSG00000242265_42 (sequence is synthesized)
gaaaatatgctgctgtgggttaacaactcagaaagtccctgatccacatttggctgtttactaaagcttgtgattaactttttggcagtgtgtactatgctctattgctatatatgctat

SEQ ID NO: 775240 - DNA, 120 bp, Artificial Sequence
  ENSG00000242265_43 (sequence is synthesized)
aaatgtagatgttaaggataagtaattctaaatttattattctatagttttgaagtttggttaagtttcctttcactcaattgatttattttgttgttaatcaaatttatgttaattgga

SEQ ID NO: 775241 - DNA, 120 bp, Artificial Sequence
  ENSG00000242265_44 (sequence is synthesized)
tggatcctttaaattttttttggcattttccaacaaaaatggctttattcataagaaaggaaaaaaatcaatggaatttgatatctaaagaagttagaaagggagcaaaataaaaaacat

SEQ ID NO: 775242 - DNA, 120 bp, Artificial Sequence
  ENSG00000242265_45 (sequence is synthesized)
aaaggagatagatgaattagtaagcaaatcagtagtcgagtttttcaaactggcaaaattaattaattgacttttagcccaaatttacattgttaattaaatcaagaaggaagaagatct

SEQ ID NO: 775243 - DNA, 120 bp, Artificial Sequence
  ENSG00000242265_46 (sequence is synthesized)
aagagctcccattgataggcaagcctagagagaactagctaaatttatcatgctaggatattgaaacacagaaagtttacatacatttatgaagggtcaatttagtttggacagtgaggt

SEQ ID NO: 775244 - DNA, 120 bp, Artificial Sequence
  ENSG00000242265_47 (sequence is synthesized)
atttgtcttagtggaaaaaaggagaattagtctgatcaaatcgtgaagtaatacagtgaacttgcaggtgcacaaaataagagggccacatctatatggtgcagtctggaattctgttta

SEQ ID NO: 775245 - DNA, 120 bp, Artificial Sequence
  ENSG00000242265_48 (sequence is synthesized)
agtttgtaggtacctcttggacttctgaattgatccagttgtcatccaccacagacatctcacatcagatacagacagttccaagattgacaacagagaacaacctgctggaaagacctg

SEQ ID NO: 775246 - DNA, 120 bp, Artificial Sequence
  ENSG00000242265_49 (sequence is synthesized)
ggcagaaatggagagccctgcgggaaccatgctacattttcatctaaagagagaatgcacatctgatgagactgaaagttctttgttgttttagattgtagaatggtattgaattggtct

SEQ ID NO: 775247 - DNA, 120 bp, Artificial Sequence
  ENSG00000242265_50 (sequence is synthesized)
gtggaaaattgcattgcttttatttctttgtgtaatcaagtttaagtaataggggatatataatcataagcattttagggtgggagggactattaagtaattttaagtgggtggggttat

SEQ ID NO: 775248 - DNA, 120 bp, Artificial Sequence
  ENSG00000242265_51 (sequence is synthesized)
ttagaatgttagaataatattatgtattagatatcgctataagtggacatgcgtacttacttgtaaccctttaccctataattgctatccttaaagatttcaaataaactcggagggaac

SEQ ID NO: 775249 - DNA, 120 bp, Artificial Sequence
  ENSG00000242265_52 (sequence is synthesized)
tgcagggagaccaacttatttagagcgaattggacatggataaaaaccccagtgggagaaagttcaaaggtgattagattaataatttaatagaggatgagtgacctctgataaattact

SEQ ID NO: 775250 - DNA, 120 bp, Artificial Sequence
  ENSG00000242265_53 (sequence is synthesized)
gctagaatgaacttgtcaatgatggatggtaaattttcatggaagttataaaagtgataaataaaaacccttgcttttacccctgtcagtagccctcctcctaccactgaaccccattgc

SEQ ID NO: 775251 - DNA, 120 bp, Artificial Sequence
  ENSG00000242265_54 (sequence is synthesized)
ccctacccctccttctaactttattgctgtattctcttcactctatatttctctctatttgctaatattgcattgctgttacaataaaaattcaataaagatttagtggttaagtgcaaa

SEQ ID NO: 775252 - DNA, 120 bp, Artificial Sequence
  ENSG00000242366_0 (sequence is synthesized)
cttccgcctactgtatcatagcagcttagaatcccagctgctggctcgggctgcagttctctcatggctcgcacagggtggaccagccccattcccctatgtgtttctctgctgctgacc

SEQ ID NO: 775253 - DNA, 120 bp, Artificial Sequence
  ENSG00000242366_1 (sequence is synthesized)
tgtggctttgctgaggcagggaagctgctggtagtgcccatggatgggagtcactggttcaccatgcagtcggtggtggagaaacttatcctcagggggcatgaggtggttgtagtcatg

SEQ ID NO: 775254 - DNA, 120 bp, Artificial Sequence
  ENSG00000242366_2 (sequence is synthesized)
ccagaggtgagttggcaactgggaaaatcactgaattgcacagtgaagacttactcaacctcatacactctggaggatctggaccgggaattcatggatttcgccgatgctcaatggaaa

SEQ ID NO: 775255 - DNA, 120 bp, Artificial Sequence
  ENSG00000242366_3 (sequence is synthesized)
gcacaagtacgaagtttgttttctctatttctgagttcatccaatggtttttttaacttatttttttcgcattgcaggagtttgtttaatgaccgaaaattagtagaatacttaaaggag

SEQ ID NO: 775256 - DNA, 120 bp, Artificial Sequence
  ENSG00000242366_4 (sequence is synthesized)
agttcttttgatgcggtgtttcttgatccttttgatgcctgtggcttaattgttgccaaatatttctccctcccctctgtggtcttcgccaggggaatagcttgccactatcttgaagaa

SEQ ID NO: 775257 - DNA, 120 bp, Artificial Sequence
  ENSG00000242366_5 (sequence is synthesized)
ggtgcacagtgccctgctcctctttcctatgtccccagaattctcttagggttctcagatgccatgactttcaaggagagagtacggaaccacatcatgcacttggaggaacatttattt

SEQ ID NO: 775258 - DNA, 120 bp, Artificial Sequence
  ENSG00000242366_6 (sequence is synthesized)
tgccagtatttttccaaaaatgccctagaaatagcctctgaaattctccaaacacctgtcacagcatatgatctctacagccacacatcaatttggttgttgcgaacagactttgttttg

SEQ ID NO: 775259 - DNA, 120 bp, Artificial Sequence
  ENSG00000242366_7 (sequence is synthesized)
gactatcccaaacccgtgatgcccaatatgatcttcattggtggtatcaactgccatcagggaaagccattgcctatggaatttgaagcctacattaatgcttctggagaacatggaatt

SEQ ID NO: 775260 - DNA, 120 bp, Artificial Sequence
  ENSG00000242366_8 (sequence is synthesized)
gtggttttctctttgggatcaatggtctcagaaattccagagaagaaagctatggcaattgctgatgctttgggcaaaatccctcagacagtcctgtggcggtacactggaacccgacca

SEQ ID NO: 775261 - DNA, 120 bp, Artificial Sequence
  ENSG00000242366_9 (sequence is synthesized)
tcgaatcttgcgaacaacacgatacttgttaagtggctaccccaaaacgatctgcttggtcacccgatgacccgtgcctttatcacccatgctggttcccatggtgtttatgaaagcata

SEQ ID NO: 775262 - DNA, 120 bp, Artificial Sequence
  ENSG00000242366_10 (sequence is synthesized)
gcgttcccatggtgatgatgcccttgtttggtgatcagatggacaatgcaaagcgcatggagactaagggagctggagtgaccctgaatgttctggaaatgacttctgaagatttagaaa

SEQ ID NO: 775263 - DNA, 120 bp, Artificial Sequence
  ENSG00000242366_11 (sequence is synthesized)
atgctctaaaagcagtcatcaatgacaaaagttacaaggagaacatcatgcgcctctccagccttcacaaggaccgcccggtggagccgctggacctggccgtgttctgggtggagtttg

SEQ ID NO: 775264 - DNA, 120 bp, Artificial Sequence
  ENSG00000242366_12 (sequence is synthesized)
tgatgaggcacaagggcgcgccacacctgcgccccgcagcccacgacctcacctggtaccagtaccattccttggacgtgattggtttcctcttggccgtcgtgctgacagtggccttca

SEQ ID NO: 775265 - DNA, 120 bp, Artificial Sequence
  ENSG00000242366_13 (sequence is synthesized)
tcacctttaaatgttgtgcttatggctaccggaaatgcttggggaaaaaagggcgagttaagaaagcccacaaatccaagacccattgagaagtgggtgggaaataaggtaaaattttga

SEQ ID NO: 775266 - DNA, 120 bp, Artificial Sequence
  ENSG00000242366_14 (sequence is synthesized)
accattccctagtcatttccaaacttgaaaacagaatcagtgttaaattcattttattcttattaaggaaatactttgcataaattaatcagccccagagtgctttaaaaaattctctta

SEQ ID NO: 775267 - DNA, 120 bp, Artificial Sequence
  ENSG00000242366_15 (sequence is synthesized)
aataaaaataatagactcgctagtcagtaaagatatttgaatatgtatcgtgccccctctggtgtctttgatcaggatgacatgtgccatttttcagaggacgtgcagacaggctggcat

SEQ ID NO: 775268 - DNA, 120 bp, Artificial Sequence
  ENSG00000242366_16 (sequence is synthesized)
tctagattacttttcttactctgaaacatggcctgtttgggagtgcgggattcaaaggtggtcccacggctgcccctactgcaaatggcagttttaatcttatcttttggcttctgcaga

SEQ ID NO: 775269 - DNA, 120 bp, Artificial Sequence
  ENSG00000242366_17 (sequence is synthesized)
tggttgcaattgatccttaaccaataatggtcagtcctcatctctgtcgtgcttcataggtgccaccttgtgtgtttaaagaagggaagctttgtacctttagagtgtaggtgaaatgaa

SEQ ID NO: 775270 - DNA, 120 bp, Artificial Sequence
  ENSG00000242366_18 (sequence is synthesized)
tgaatggcttggagtgcactgagaacagcatatgatttcttgctttggggaaaaagaatgatgctatgaaattggtgggtggtgtatttgagaagataatcattgcttatgtcaaatgga

SEQ ID NO: 775271 - DNA, 120 bp, Artificial Sequence
  ENSG00000242366_19 (sequence is synthesized)
gctgaatttgataaaaacccaaaatacagctatgaagtgctgggcaagtttactttttttctgatgtttcctacaactaaaaataaattaataaatttatataaattctatttaagtgtt

SEQ ID NO: 775272 - DNA, 66 bp, Artificial Sequence
  ENSG00000242371_0 (sequence is synthesized)
cgcaccctgtgcaggagtcagtctcaactctggctccgaggtgccagatgtgacatccagatgacc

SEQ ID NO: 775273 - DNA, 77 bp, Artificial Sequence
  ENSG00000242371_1 (sequence is synthesized)
agctcctgatctatgctgcatccagtttgcaaagtggggtcccatcaaggttcagctgcaacctgaagattttgcaa

SEQ ID NO: 775274 - DNA, 120 bp, Artificial Sequence
  ENSG00000242372_0 (sequence is synthesized)
gtgaggggaacctgggagggtcagctccggtcctgggtcgggaggggtgggggccagaggattcagggccggaggttctggtgggggcccagtgggcgggacccgaggacggaggggccg

SEQ ID NO: 775275 - DNA, 120 bp, Artificial Sequence
  ENSG00000242372_1 (sequence is synthesized)
ggaggccgagaggggcggggtcgcggcggggcctgagggacggaggccgggatacttgggaaaggatccgccggccttgaactcccgcctccgccgcccctaggcctcatggcggtccga

SEQ ID NO: 775276 - DNA, 120 bp, Artificial Sequence
  ENSG00000242372_2 (sequence is synthesized)
gcttcgttcgagaacaactgtgagatcggctgctttgccaagctcaccaacacctactgtctggtagcgatcggaggctcagagaacttctacagtgtgttcgagggcgagctctccgat

SEQ ID NO: 775277 - DNA, 120 bp, Artificial Sequence
  ENSG00000242372_3 (sequence is synthesized)
accatccccgtggtgcacgcgtctatcgccggctgccgcatcatcgggcgcatgtgtgtggggaacaggcacggtctcctggtacccaacaataccaccgaccaggagctgcaacacatt

SEQ ID NO: 775278 - DNA, 120 bp, Artificial Sequence
  ENSG00000242372_4 (sequence is synthesized)
cgcaacagcctcccagacacagtgcagattaggcgggtggaggagcggctctcagccttgggcaatgtcaccacctgcaatgactacgtggccttggtccacccagacttggacagggag

SEQ ID NO: 775279 - DNA, 120 bp, Artificial Sequence
  ENSG00000242372_5 (sequence is synthesized)
tggccgaccaggtgctagtaggaagctactgtgtcttcagcaatcagggagggctggtgcatcccaagacttcaattgaagaccaggatgagctgtcctctcttcttcaagtcccccttg

SEQ ID NO: 775280 - DNA, 120 bp, Artificial Sequence
  ENSG00000242372_6 (sequence is synthesized)
tggcggggactgtgaaccgaggcagtgaggtgattgctgctgggatggtggtgaatgactggtgtgccttctgtggcctggacacaaccagcacagagctgtcagtggtggagagtgtct

SEQ ID NO: 775281 - DNA, 120 bp, Artificial Sequence
  ENSG00000242372_7 (sequence is synthesized)
tcaagctgaatgaagcccagcctagcaccattgccaccagcatgcgggattccctcattgacagcctcacctgagtcaccttccaagttgttccatgggctcctggctctggactgtggc

SEQ ID NO: 775282 - DNA, 120 bp, Artificial Sequence
  ENSG00000242372_8 (sequence is synthesized)
caaccttctccacattccgcccaatctgtaccggatgctggcagggaggtggcagagagctcactgggactgaggggctgggcacccaacccttttccacctgtgcttatcgcctggatc

SEQ ID NO: 775283 - DNA, 120 bp, Artificial Sequence
  ENSG00000242372_9 (sequence is synthesized)
tatcattactgcaaaaacctgctctgttgtgctggctggcaggccctgtggctgctggctgagggttctgctgtcctgtgccaccccattaaagtgcagttccctccgggccattctgaa

SEQ ID NO: 775284 - DNA, 120 bp, Artificial Sequence
  ENSG00000242372_10 (sequence is synthesized)
gggagggtgccggcccctctgccccgccaccaccgagtccatgtccctacagtgtgttcgagggcgagctctccgataccatccccgtggtgcacgcgtctatcgccggctgccgcatca

SEQ ID NO: 775285 - DNA, 120 bp, Artificial Sequence
  ENSG00000242372_11 (sequence is synthesized)
gtcgatgacagctcctaaaaagctcctgaatgaataatgaatgaatgaacgcgagcaggctaggcgtggggccaggcggggtcgcgcccagaccgctcgcgaccatagagtccgccggag

SEQ ID NO: 775286 - DNA, 120 bp, Artificial Sequence; identical to SEQ ID NO: 770183
  ENSG00000242389_0 (sequence is synthesized)

SEQ ID NO: 775287 - DNA, 120 bp, Artificial Sequence; identical to SEQ ID NO: 770184
  ENSG00000242389_1 (sequence is synthesized)

SEQ ID NO: 775288 - DNA, 120 bp, Artificial Sequence; identical to SEQ ID NO: 770185
  ENSG00000242389_2 (sequence is synthesized)

SEQ ID NO: 775289 - DNA, 82 bp, Artificial Sequence
  ENSG00000242389_3 (sequence is synthesized)
caggaagtctgagatctgcaagaggaagccgtggaggaacaagagggtggcttccctcacaagaagggcacctgttctaggg

SEQ ID NO: 775290 - DNA, 120 bp, Artificial Sequence; identical to SEQ ID NO: 770187
  ENSG00000242389_4 (sequence is synthesized)

SEQ ID NO: 775291 - DNA, 120 bp, Artificial Sequence; identical to SEQ ID NO: 770188
  ENSG00000242389_5 (sequence is synthesized)

SEQ ID NO: 775292 - DNA, 120 bp, Artificial Sequence; identical to SEQ ID NO: 770189
  ENSG00000242389_6 (sequence is synthesized)

SEQ ID NO: 775293 - DNA, 120 bp, Artificial Sequence; identical to SEQ ID NO: 770190
  ENSG00000242389_7 (sequence is synthesized)

SEQ ID NO: 775294 - DNA, 120 bp, Artificial Sequence; identical to SEQ ID NO: 562624
  ENSG00000242389_8 (sequence is synthesized)

SEQ ID NO: 775295 - DNA, 80 bp, Artificial Sequence; identical to SEQ ID NO: 562625
  ENSG00000242389_9 (sequence is synthesized)

SEQ ID NO: 775296 - DNA, 120 bp, Artificial Sequence
  ENSG00000242389_10 (sequence is synthesized)
tagagatgcacttcagagatacgggaccgctcatggtgcaccacctgcaagagggcctcggatgtcctatggtggaagcacctgccacgcatatagtaatacacgagatagatatggcag

SEQ ID NO: 775297 - DNA, 120 bp, Artificial Sequence; identical to SEQ ID NO: 562627
  ENSG00000242389_11 (sequence is synthesized)

SEQ ID NO: 775298 - DNA, 120 bp, Artificial Sequence
  ENSG00000242389_12 (sequence is synthesized)
atgtggtagctcaagttatgtggcatctatagtagatggtggggagagtcgatctgaaaaaggagactcgagcagatattaaagcaagcattgaaagtaatagttattgcataccaatcc

SEQ ID NO: 775299 - DNA, 120 bp, Artificial Sequence
  ENSG00000242389_13 (sequence is synthesized)
gtaatagttattgcataccaatccttgtttgcaaatcaaaaattgaaatgttatttctgcattgttacctgcatattactgaaagaaacatgttggttttgtggagagaggtagatacta

SEQ ID NO: 775300 - DNA, 120 bp, Artificial Sequence; identical to SEQ ID NO: 770197
  ENSG00000242389_14 (sequence is synthesized)

SEQ ID NO: 775301 - DNA, 120 bp, Artificial Sequence
  ENSG00000242419_0 (sequence is synthesized)
atgctccgcaaggtgagaagctggacagaaatctggcggtgggctacccttttgttcctcttttaccacctgggttacgtttgtgggcagatccgctacccggtcccagaggagtcacag

SEQ ID NO: 775302 - DNA, 120 bp, Artificial Sequence
  ENSG00000242419_1 (sequence is synthesized)
gaagggacttttgtagggaatgtcgctcaagatttcctgctggatacggacagtctgtcagctcgcaggctgcaggtcgctggagaggtgaaccaaagacacttccgtgtggatttggac

SEQ ID NO: 775303 - DNA, 120 bp, Artificial Sequence
  ENSG00000242419_2 (sequence is synthesized)
agcggagccctgctcatcaagaacccaatcgaccgagaggcactgtgtgggctcagtgccagctgcatcgtgcccctggagtttgtcaccgaaggtcctttggaaatgtaccgagcagag

SEQ ID NO: 775304 - DNA, 120 bp, Artificial Sequence
  ENSG00000242419_3 (sequence is synthesized)
gtagagatcgtagatgtgaatgatcacgccccccgttttccgcggcagcagctggacttggaaattggggaggcagctcctccaggacagcgtttcccgttggaaaaggctcaggatgca

SEQ ID NO: 775305 - DNA, 120 bp, Artificial Sequence
  ENSG00000242419_4 (sequence is synthesized)
gatgtggggagcaattcgattagcagctataggctgagctccaatgaacactttgcactggatgtgaagaagcgcagcgacggcagcctggtcccagagctgctcctggagaagcctttg

SEQ ID NO: 775306 - DNA, 120 bp, Artificial Sequence
  ENSG00000242419_5 (sequence is synthesized)
gatcgagagaagcaatcggactaccgcctggtgctgactgctgtcgatggagggaacccgccgagatctggcaccgcagagctccgggtatccgtgctggacgtaaacgacaacgcccca

SEQ ID NO: 775307 - DNA, 120 bp, Artificial Sequence
  ENSG00000242419_6 (sequence is synthesized)
gccttccagcaatccagctacaggattagtgtgttggagagcgcaccagcgggcatggtgctcatccagctcaatgcctcagacccggacctgggtcccagtggtaacgtcaccttttat

SEQ ID NO: 775308 - DNA, 120 bp, Artificial Sequence
  ENSG00000242419_7 (sequence is synthesized)
ttcagtggtcatacccctgatcgtgtaagaaacctctttagcctgcaccccactactggaaagcttactcttttggggcccctagactttgagagtgagaattactatgaatttgatgtg

SEQ ID NO: 775309 - DNA, 120 bp, Artificial Sequence
  ENSG00000242419_8 (sequence is synthesized)
cgggctcgcgatgggggttctccagccatggagcaacattgcagccttcgagtggatctgctggacgtaaatgacaatgccccttacatcacagtgacctcagagcttggaaccctcccc

SEQ ID NO: 775310 - DNA, 120 bp, Artificial Sequence
  ENSG00000242419_9 (sequence is synthesized)
gagagtgcagaacctggcactgtggtggcacttatcagtgtgcaggatccagactcagggtcaaacggagatgtgagcctccgcattcctgaccacttgccatttgccctcaagtctgcc

SEQ ID NO: 775311 - DNA, 120 bp, Artificial Sequence
  ENSG00000242419_10 (sequence is synthesized)
ttcaggaaccagttctccctggtgactgctggacccttggatcgagaggccaaatctagctatgacatcatggtcactgcttctgatgctgggaaccctcctctcagtacccacagaact

SEQ ID NO: 775312 - DNA, 120 bp, Artificial Sequence
  ENSG00000242419_11 (sequence is synthesized)
attttcctcaatatttcagatgtgaatgataatccaccctctttctttcagaggtcacatgaggtgtttgttcctgagaacaatcgcccaggggacctgctttgctcccttgcagcctct

SEQ ID NO: 775313 - DNA, 120 bp, Artificial Sequence
  ENSG00000242419_12 (sequence is synthesized)
gacccagactctggcttgaatgcgcttatctcctactcactcctggagcccaggaatcgagatgtatcagcttcctctttcatctctctgaacccccagacaggagctgttcatgctact

SEQ ID NO: 775314 - DNA, 120 bp, Artificial Sequence
  ENSG00000242419_13 (sequence is synthesized)
cgatcctttgactatgagcaaacccagacactgcagtttgaggtgcaggcccgggatcggggcaacccaccccttagcagcactgtaacagttcgtctatttgtgctggacctcaatgac

SEQ ID NO: 775315 - DNA, 120 bp, Artificial Sequence
  ENSG00000242419_14 (sequence is synthesized)
aatgctccagctgtgctccgtcctcgggcccggcctggttccttatgtccccaagcactgcctccatcagttggtgctggccacctaatcacaaaggtgactgctgtggacttggattca

SEQ ID NO: 775316 - DNA, 120 bp, Artificial Sequence
  ENSG00000242419_15 (sequence is synthesized)
ggttacaatgcttgggtttcctatcagctcctggaggccccagatcccagcctgtttgcagtctctcgatatgctggggaggtgcggacggctgttcctatcccagctgacctcccacca

SEQ ID NO: 775317 - DNA, 120 bp, Artificial Sequence
  ENSG00000242419_16 (sequence is synthesized)
cagaagctggtcattgtggtaaaggatagtggtagtccaccactctctacctctgttactctcttagtgtccttagaggaagacactcatccagttgtcccagatcttcgagaatcttca

SEQ ID NO: 775318 - DNA, 120 bp, Artificial Sequence
  ENSG00000242419_17 (sequence is synthesized)
gctccaagggaaggagaatctcgtctaaccctctacttggctgtgtccctagtggcaatttgctttgtctcctttggctcattcgtggcactactctctaagtgtcttcgtggggcagcc

SEQ ID NO: 775319 - DNA, 120 bp, Artificial Sequence
  ENSG00000242419_18 (sequence is synthesized)
tgtggagtcacatgctttcctgctggcacctgtgcctgtctcaccagatctcgaaggagggaggggcttcccccttccaatgggatcctccgaatccagctagggtcagatgaccctatc

SEQ ID NO: 775320 - DNA, 120 bp, Artificial Sequence
  ENSG00000242419_19 (sequence is synthesized)
agtgatagcttcatgatggtgaagtcacccagtgcacctatggcaggggagcctgttcgcccaagctgcccaccctctgatcttctctatgggctagagcaagccccgcccaacacggac

SEQ ID NO: 775321 - DNA, 120 bp, Artificial Sequence; identical to SEQ ID NO: 773797
  ENSG00000242419_20 (sequence is synthesized)

SEQ ID NO: 775322 - DNA, 120 bp, Artificial Sequence; identical to SEQ ID NO: 773798
  ENSG00000242419_21 (sequence is synthesized)

SEQ ID NO: 775323 - DNA, 120 bp, Artificial Sequence; identical to SEQ ID NO: 773799
  ENSG00000242419_22 (sequence is synthesized)

SEQ ID NO: 775324 - DNA, 120 bp, Artificial Sequence; identical to SEQ ID NO: 773800
  ENSG00000242419_23 (sequence is synthesized)

SEQ ID NO: 775325 - DNA, 120 bp, Artificial Sequence; identical to SEQ ID NO: 773801
  ENSG00000242419_24 (sequence is synthesized)

SEQ ID NO: 775326 - DNA, 120 bp, Artificial Sequence; identical to SEQ ID NO: 773802
  ENSG00000242419_25 (sequence is synthesized)

SEQ ID NO: 775327 - DNA, 120 bp, Artificial Sequence; identical to SEQ ID NO: 773803
  ENSG00000242419_26 (sequence is synthesized)

SEQ ID NO: 775328 - DNA, 120 bp, Artificial Sequence; identical to SEQ ID NO: 773804
  ENSG00000242419_27 (sequence is synthesized)

SEQ ID NO: 775329 - DNA, 120 bp, Artificial Sequence; identical to SEQ ID NO: 773805
  ENSG00000242419_28 (sequence is synthesized)

SEQ ID NO: 775330 - DNA, 120 bp, Artificial Sequence; identical to SEQ ID NO: 773806
  ENSG00000242419_29 (sequence is synthesized)

SEQ ID NO: 775331 - DNA, 120 bp, Artificial Sequence; identical to SEQ ID NO: 773807
  ENSG00000242419_30 (sequence is synthesized)

SEQ ID NO: 775332 - DNA, 120 bp, Artificial Sequence; identical to SEQ ID NO: 773808
  ENSG00000242419_31 (sequence is synthesized)

SEQ ID NO: 775333 - DNA, 120 bp, Artificial Sequence; identical to SEQ ID NO: 773809
  ENSG00000242419_32 (sequence is synthesized)

SEQ ID NO: 775334 - DNA, 120 bp, Artificial Sequence; identical to SEQ ID NO: 773810
  ENSG00000242419_33 (sequence is synthesized)

SEQ ID NO: 775335 - DNA, 120 bp, Artificial Sequence; identical to SEQ ID NO: 773811
  ENSG00000242419_34 (sequence is synthesized)

SEQ ID NO: 775336 - DNA, 120 bp, Artificial Sequence; identical to SEQ ID NO: 773812
  ENSG00000242419_35 (sequence is synthesized)

SEQ ID NO: 775337 - DNA, 120 bp, Artificial Sequence; identical to SEQ ID NO: 773813
  ENSG00000242419_36 (sequence is synthesized)

SEQ ID NO: 775338 - DNA, 120 bp, Artificial Sequence; identical to SEQ ID NO: 773814
  ENSG00000242419_37 (sequence is synthesized)

SEQ ID NO: 775339 - DNA, 120 bp, Artificial Sequence
  ENSG00000242419_38 (sequence is synthesized)
agacaaatctaccccgccaccagcaaaaacggcgcgtaacccttgcggcgccggccgaaccgcgccagagctggcgcggggaaagggagataggtgtctccagctgctgtggctgtttgg

SEQ ID NO: 775340 - DNA, 120 bp, Artificial Sequence
  ENSG00000242419_39 (sequence is synthesized)
tggctaggccatgtcctagagagtactggcctctcagtaagtgcccatagtgatgtcaccatttttgtaagaggtaactatgtggtagacgctgtgctttgtaactgtttcgtgaattaa

SEQ ID NO: 775341 - DNA, 120 bp, Artificial Sequence
  ENSG00000242419_40 (sequence is synthesized)
gcggggaaagggagataggtgtctccagctgctgtggctgtttggggcgggtcggcttcatccgcgtctcaggagcaagtagagaattagcgggcggcagcaatgctccgcaagcaagcc

SEQ ID NO: 775342 - DNA, 120 bp, Artificial Sequence
  ENSG00000242441_0 (sequence is synthesized)
aggtgctggaggtgctgtcatggcctgcctcaacccggtgcctaaactctacagatctgtaattgaagatgtaattgaaggagttcggaatctatttgctgaagaaggtatagaggaaca

SEQ ID NO: 775343 - DNA, 120 bp, Artificial Sequence
  ENSG00000242441_1 (sequence is synthesized)
agttttaaaagacttgaagcagctctgggaaaccaaggttttgcagtctaaagcaacagaagacttcttcagaaatagcatccaatcacctctgtttactcttcagttgccgcacagctt

SEQ ID NO: 775344 - DNA, 120 bp, Artificial Sequence
  ENSG00000242441_2 (sequence is synthesized)
gcaccaaacattgcaatcgtcaacagcatcattagttattcctgctggtagaactcttccaagttttaccacagcagaactgggcacttcaaactccagtgcaaactttacttttcctgg

SEQ ID NO: 775345 - DNA, 120 bp, Artificial Sequence
  ENSG00000242441_3 (sequence is synthesized)
ttatcccattcatgtaccagcaggtgtgacactacagactgtatctggtcacctttataaagtcaatgtaccaattatggtgacagagacttctggaagagcaggtattcttcagcatcc

SEQ ID NO: 775346 - DNA, 120 bp, Artificial Sequence
  ENSG00000242441_4 (sequence is synthesized)
aattcagcaagtatttcaacagcttggccagccttcagtaatacaaactagtgttccacaattgaatccatggtctcttcaagcaactactgaaaaatcacagagaattgaaaccgtgct

SEQ ID NO: 775347 - DNA, 120 bp, Artificial Sequence
  ENSG00000242441_5 (sequence is synthesized)
acagcaacccgcaattctaccttctgggccagtagataggaaacacttagaaaatgccaccagtgatatacttgtatctcctggaaatgagcataaaatcgtgcctgaagctttgttgtg

SEQ ID NO: 775348 - DNA, 120 bp, Artificial Sequence
  ENSG00000242441_6 (sequence is synthesized)
tctcaaacaaattctaatgtggagtcagtgctcagtggttcagctagcatggctcaaaatctgcatgatgagtccctctccacaagccctcatggggctctccaccagcacgtgactgat

SEQ ID NO: 775349 - DNA, 120 bp, Artificial Sequence
  ENSG00000242441_7 (sequence is synthesized)
attcagcttcatattcttaaaaataggatgtatggatgtgattctgtaaagcaaccaagaaatatagaggaacccagcaacatacctgtatcagagaaggattctaattctcaggtggat

SEQ ID NO: 775350 - DNA, 120 bp, Artificial Sequence
  ENSG00000242441_8 (sequence is synthesized)
ttaagcattcgggttactgatgatgatattggtgaaataattcaagtagatggaagcggtgatacatcttccaatgaagaaataggaagtacaagagatgcagatgagaatgaatttcta

SEQ ID NO: 775351 - DNA, 120 bp, Artificial Sequence
  ENSG00000242441_9 (sequence is synthesized)
gggaatattgacgggggagatctgaaggtacctgaagaagaagctgacagtatttcaaatgaggattcagccacaaacagtagtgataatgaagaccctcaagtaaacattgtagaagag

SEQ ID NO: 775352 - DNA, 120 bp, Artificial Sequence
  ENSG00000242441_10 (sequence is synthesized)
gaccctttaaattctggagatgatgttagtgaacaggatgtgccagacctgtttgacacggataatgttattgtctgtcagtatgataagattcatcgaagcaagaacaaatggaaattc

SEQ ID NO: 775353 - DNA, 120 bp, Artificial Sequence
  ENSG00000242441_11 (sequence is synthesized)
tatttgaaagatggtgttatgtgttttggagggagagactatgtatttgcaaaagccattggtgatgcagagtggtaaaccttgtgagctcagtacatctattttgtgaacatcagttgg

SEQ ID NO: 775354 - DNA, 120 bp, Artificial Sequence
  ENSG00000242441_12 (sequence is synthesized)
attatattgcatattgtgaattcatttttattttgaatatagtccagcacagagctgttcaaatttttagttcactgtatggaatttaataaaattataattcagatgcagatacaatta

SEQ ID NO: 775355 - DNA, 120 bp, Artificial Sequence
  ENSG00000242441_13 (sequence is synthesized)
catcgtttaacacctaaactcatttaacaaaggatccgagaagaacagggacagtgtgggaagaaatcttcttgtgatggcatatttgcttcctatatttcttctggaatcatgttcgct

SEQ ID NO: 775356 - DNA, 120 bp, Artificial Sequence
  ENSG00000242441_14 (sequence is synthesized)
tggcttcctgattaaaaacacagttttattgctctctgcactgccaaaccaataaatttacagaagagaaagctgtattccactgtaccccttgcagcatcaataaaactgacagccaaa

SEQ ID NO: 775357 - DNA, 120 bp, Artificial Sequence
  ENSG00000242441_15 (sequence is synthesized)
aggtgctggaggtgctgtcatggcctgcctcaacccggtggggctggggctcttcttcacgtctgtgttggaggaagctgctgagggccagtagttcagcaggaagttgggccagccccg

SEQ ID NO: 775358 - DNA, 120 bp, Artificial Sequence
  ENSG00000242485_0 (sequence is synthesized)
atttccgacccgggcaagatggcagcggcgctgcgcgtgcgttgttgagtgttcgggacgccggcctgcaggcgccatggtcttcctcaccgcgcagctctggctgcggaatcgcgtcac

SEQ ID NO: 775359 - DNA, 120 bp, Artificial Sequence
  ENSG00000242485_1 (sequence is synthesized)
cgaccgctactttcggatccaggaggtgctgaagcacgccaggcacttccggggaaggaaaaatcgctgctacaggttggcggtcagaaccgtgattcgagcctttgtgaaatgcaccaa

SEQ ID NO: 775360 - DNA, 120 bp, Artificial Sequence
  ENSG00000242485_2 (sequence is synthesized)
aatttagttaagtgccaggtggagctcaacaggaaagtcctagcggatctggccatctacgagccaaagactttcaaatctttggctgccttggccagtaggaggcgacacgaaggattt

SEQ ID NO: 775361 - DNA, 120 bp, Artificial Sequence
  ENSG00000242485_3 (sequence is synthesized)
gctgctgccttgggggatgggaaggaacctgaaggcattttttccagagtggtgcagtaccactgaggactgttgctgtattgattaggaaaagagacagagtaatttgcagtttgtttg

SEQ ID NO: 775362 - DNA, 120 bp, Artificial Sequence
  ENSG00000242485_4 (sequence is synthesized)
atttatacttttgtttatctacaacccaataacagacatgagggatggccctgtctctctgggacagagcctcacagatgatgtccatgttttgtgtgaatgaaactcaaacactcttca

SEQ ID NO: 775363 - DNA, 120 bp, Artificial Sequence
  ENSG00000242485_5 (sequence is synthesized)
caggaacatggactgaagtatccagcgctcattgggaatttagttaaggcacttccaggttggcttaaagggttaccctaggccagcagtcagctcagtcagggtggtgaccaaggaccc

SEQ ID NO: 775364 - DNA, 120 bp, Artificial Sequence
  ENSG00000242485_6 (sequence is synthesized)
ctgcctggaagtcctctgctgtgccacccagataggattctcctaggccttccctccccccaggcgagtgtgcagctgggttcttcctgagccagcgccgcaaccacgcggagccggagt

SEQ ID NO: 775365 - DNA, 120 bp, Artificial Sequence
  ENSG00000242485_7 (sequence is synthesized)
gtgtgtctcacactgacagcaggttctgattcattcttttttcagtgccaggtggagctcaacaggaaagtcctagcggatctggccatctacgagccaaagactttcaaatctttggct

SEQ ID NO: 775366 - DNA, 120 bp, Artificial Sequence
  ENSG00000242485_8 (sequence is synthesized)
atgaggaccgtaagcgtggacccgggacacccgccggccagcgcactcgcggcccctgcgtttctgcgccgcgacccagctagtgtgcagccgcccggccaccctcagccccttcctttc

SEQ ID NO: 775367 - DNA, 120 bp, Artificial Sequence
  ENSG00000242485_9 (sequence is synthesized)
ataccttgcttcgaaactccgacaaattatgtcgccccgcaggcaaactgtgggacatccgttctcccgccccgccgccacccccactgtcaccccctgctccagcccctcgcccgggcc

SEQ ID NO: 775368 - DNA, 120 bp, Artificial Sequence
  ENSG00000242485_10 (sequence is synthesized)
actgcagagccgccttgacactctccctgcgtcgccagccaccgccctagtcgctgctgctctcatccctccggtggcttcccttccctttggcagctgaagtcaacccagccccttgcc

SEQ ID NO: 775369 - DNA, 120 bp, Artificial Sequence
  ENSG00000242485_11 (sequence is synthesized)
aaccctccagggctactatctgctgccgtggtgctcctcgaagagaccacgcctgctgccaagctctgcccacccggaaccccccgcatttctgggaggctggcgcctccactctgtcca

SEQ ID NO: 775370 - DNA, 120 bp, Artificial Sequence
  ENSG00000242485_12 (sequence is synthesized)
cgtgccgcctcattactgcgcctcaccactcccgtctcagcctcatgaacctagcatctaacgtaccccggtttttttttcttaccccgagacggagtctcgcgctgtcacccaggctgg

SEQ ID NO: 775371 - DNA, 120 bp, Artificial Sequence
  ENSG00000242485_13 (sequence is synthesized)
gatctaggcttaatgcaacctcgtctcccgggttcaagcgattttcccgccccagtctcccgagtaactgtgactgcaggtgtgcgccaccaagctattttttgtatttttagtagagac

SEQ ID NO: 775372 - DNA, 120 bp, Artificial Sequence
  ENSG00000242485_14 (sequence is synthesized)
ctgtttttaattttgaaacagggtcttgatttcgcttaggccagagtgatggcaccatcatagctcactgattttgctatttacttttagaaaaatattctttagatcaattagaggctt

SEQ ID NO: 775373 - DNA, 120 bp, Artificial Sequence
  ENSG00000242485_15 (sequence is synthesized)
tgctgggacataacatccagaagtcatttttaagtatcttcatgttttcttatttcagctctggattaatcgaattacagctgctagccaggaacatggactgaagtatccagcgctcat

SEQ ID NO: 775374 - DNA, 86 bp, Artificial Sequence
  ENSG00000242485_16 (sequence is synthesized)
tgattcgagcctttgtgaaatgcaccaaagcccgatacctgaagaaaaagaacatgaggaccacggagtctcgcgaggcttaatgc

SEQ ID NO: 775375 - DNA, 120 bp, Artificial Sequence
  ENSG00000242485_17 (sequence is synthesized)
cgcgatctaggcttaatgcaacctcgtctcccgggttcaagcgattttcccgccccagtctcccgagtaactgtgactgcagctctggattaatcgaattacagctgctagccaggaaca

SEQ ID NO: 775376 - DNA, 120 bp, Artificial Sequence
  ENSG00000242485_18 (sequence is synthesized)
ttgggaatttagttaaggtatgggtgagtatgtgggtcccactgaaattctggacatctgcagaaaccatcatgcggggcgtggtggtgcttcctgtagtcccagctaatcaggaggctg

SEQ ID NO: 775377 - DNA, 120 bp, Artificial Sequence
  ENSG00000242485_19 (sequence is synthesized)
gcctaaggaggggtgaaccagcccaggctggaaacggagcaggtcacaattcccatgttgatgagtgatgagattgtgcctaggaatagtgccagcaacagcctgggcaacatagtgaga

SEQ ID NO: 775378 - DNA, 120 bp, Artificial Sequence
  ENSG00000242485_20 (sequence is synthesized)
ccactctctacaaaaaaataaaatttgctgggtgtggtggtacagagacatgtaatgtcagctactgaggagtctgaagcagggggatcactttgagcccccaggagtttgaagctgcag

SEQ ID NO: 775379 - DNA, 120 bp, Artificial Sequence
  ENSG00000242485_21 (sequence is synthesized)
tgagctatgatggtaccactgcactctagcctaggtgagagcaggaccccgtctgacagaataaagaaagccatggctgggcagggtggctcaggcctgtgatcccagcactttgggagg

SEQ ID NO: 775380 - DNA, 120 bp, Artificial Sequence
  ENSG00000242498_0 (sequence is synthesized)
attcccggatccgccggctgggaatcgcgggtccccgcgcgtcctgcagcacttcccgcgccgcgcccccagcccagtgcgccggctctgtgccggggtgcccgggcggtcgggagaatg

SEQ ID NO: 775381 - DNA, 120 bp, Artificial Sequence
  ENSG00000242498_1 (sequence is synthesized)
agccgcatctaccacgacggcgcgctccggaacaaggcggtgcagagcgtccggctgccaggggcctgggaccccgccgcccaccaggggggaaatggtgtcctgctggagggagaactg

SEQ ID NO: 775382 - DNA, 120 bp, Artificial Sequence
  ENSG00000242498_2 (sequence is synthesized)
atcgatgtatctcggcacagcatcttggacactcatggcaggaaggagcgctactacgtgctgtatatccggcccagtcacatccatcgccgtaaattcgacgccaagggaaatgaaatc

SEQ ID NO: 775383 - DNA, 120 bp, Artificial Sequence
  ENSG00000242498_3 (sequence is synthesized)
gagcccaacttcagcgccaccaggaaggtgaacacgggcttcctcatgtcgtcctacaaggtggaagccaagggggacactgacaggctcacgcccgaggcgctgaaggggctggtcaac

SEQ ID NO: 775384 - DNA, 120 bp, Artificial Sequence
  ENSG00000242498_4 (sequence is synthesized)
aagccagagctgctcgcgctgacagagagcctcacccccgaccacacagtggcgttctggatgcccgagtcagagatggaggtgatggaactcgagctgggggccggggtacggctgaag

SEQ ID NO: 775385 - DNA, 120 bp, Artificial Sequence
  ENSG00000242498_5 (sequence is synthesized)
actcggggcgatggtcccttcctggattcattggccaaacttgaggctggaacagtgaccaagtgtaatttcactggtgatggaaagacaggggcatcctggacagacaacatcatggcc

SEQ ID NO: 775386 - DNA, 120 bp, Artificial Sequence
  ENSG00000242498_6 (sequence is synthesized)
caaaagtgttcgaagggggctgcagcggagatccgagagcagggggatggggcagaggacgaggagtgggatgactgagggacgtggctgcctctgggggcaccagcaccttctgtagca

SEQ ID NO: 775387 - DNA, 120 bp, Artificial Sequence
  ENSG00000242498_7 (sequence is synthesized)
ttgtggaacatttcttccatgaacttctactctggagctggagagaacagtctgccaagtcttacctggttcttccccatagccaccttggaatactctttgaacaagctctgctaaaac

SEQ ID NO: 775388 - DNA, 120 bp, Artificial Sequence
  ENSG00000242498_8 (sequence is synthesized)
caaacccatgaccactgtgttggtggtggggcctcatgctgtggctcagggagggcccctccctgcatgtgagtctagccttcctagacattacatgatgaccctttaaaaaaaaattag

SEQ ID NO: 775389 - DNA, 70 bp, Artificial Sequence
  ENSG00000242498_9 (sequence is synthesized)
tcctggactcaagcgatccacccccctccagttgaccctggccctggatagcagctttgtttgtagaggc

SEQ ID NO: 775390 - DNA, 120 bp, Artificial Sequence
  ENSG00000242498_10 (sequence is synthesized)
gttgaccctggccctggatagcagctttgtttgtagaggcaggtggtgggagagaccctaggacagcctgagagtaactggacctggtattggtgcggagtggggaatatcccttgtcta

SEQ ID NO: 775391 - DNA, 120 bp, Artificial Sequence
  ENSG00000242498_11 (sequence is synthesized)
aatgcagagcagctgagagaagttagcggggctcttcctccgttctcattgtttcctgctttccttccccacccaccccttcctcagcactctgtgttgtagcctgtactatcctgcttc

SEQ ID NO: 775392 - DNA, 120 bp, Artificial Sequence
  ENSG00000242498_12 (sequence is synthesized)
aagcctccgtgtcccttgtaccttccccctaccttgagttgccagttctttactccctcaaatgttcccatgccacctctggggtttctgttatctgacatccctggctgctttcctggt

SEQ ID NO: 775393 - DNA, 120 bp, Artificial Sequence
  ENSG00000242498_13 (sequence is synthesized)
agatgccattcccagagaggccaacagcgttcccaggcgtggctggctggtccgcatctctcagactcactctgccaggctacagttttgagaataccttttttgttgttgttttgtacc

SEQ ID NO: 775394 - DNA, 120 bp, Artificial Sequence
  ENSG00000242498_14 (sequence is synthesized)
tggagaactttttatgaatgagtaaatcttcagaaaggaattcctccacccttactgggttattgtcaggtgtaaacggcctttcagctgagcaatgttcctatgagaaggaagccattt

SEQ ID NO: 775395 - DNA, 120 bp, Artificial Sequence
  ENSG00000242498_15 (sequence is synthesized)
ctcttggctcatgaacactgccttttgggtagtatacccacacccagatctgtgaagagacctggaattgaagtctccatgtcgtcaggacttggtggcatgtggatcttgcttgacttg

SEQ ID NO: 775396 - DNA, 120 bp, Artificial Sequence
  ENSG00000242498_16 (sequence is synthesized)
ggaaaagagagggtggtggtgaactaataattatggagtccccctaatgtgtcgaacacaatgctagatgatttccatgataataattactcatacttgtgctaagcacttgcgatatcg

SEQ ID NO: 775397 - DNA, 120 bp, Artificial Sequence
  ENSG00000242498_17 (sequence is synthesized)
tacttctcacaacagtccatgaggtactgattattattcccattttctcatgagactaaagctcagagctctaggatagtatacagtggcaagaggaatttacatccaagcactcagatt

SEQ ID NO: 775398 - DNA, 120 bp, Artificial Sequence
  ENSG00000242498_18 (sequence is synthesized)
tcaaagcccacattcttaactaccggactattcatattacagagcaggaaaagggtctcagacaggttaagcaacctgcccagagtcacacagctaatgagtagcagaatcaggattcaa

SEQ ID NO: 775399 - DNA, 120 bp, Artificial Sequence
  ENSG00000242498_19 (sequence is synthesized)
acccagagctgtcaaaagcaaaccttatgttccttccactgtcccctgcttccttgcccttcagaaaggtcttggaaacaggggccagaggatgtggtagccacttcactggtgttctgt

SEQ ID NO: 775400 - DNA, 120 bp, Artificial Sequence
  ENSG00000242498_20 (sequence is synthesized)
gtctgaatgggactttctcacaggcaggccatgctgggacctcagccatgggggtggccagggaggtggttgagcagaaggatagctggggacactgactgggggtagagtcacccagtg

SEQ ID NO: 775401 - DNA, 120 bp, Artificial Sequence
  ENSG00000242498_21 (sequence is synthesized)
tctttagacatcctgctgtctaaagcactgtgtccaaagggtatggcacacttatatggacaggtcaccattccaaacaaggaggcccagtgtgtcaataggagaggtcctaaagcaaca

SEQ ID NO: 775402 - DNA, 120 bp, Artificial Sequence
  ENSG00000242498_22 (sequence is synthesized)
aaaagggcggggtgtcttggatgggcttcaggaagggaaagaccattgtgtctggagctcagagaatgggggctggtgtttgagatgaggctggagattgggcatggcatcctcacgcat

SEQ ID NO: 775403 - DNA, 120 bp, Artificial Sequence
  ENSG00000242498_23 (sequence is synthesized)
gttaaggaattggggactttatccttaacatcctggaagccagtgatcccatggagagtgagaagatctgatctgtgtttcaaaggtcacttgactgccgagcagctggaggcgagttgc

SEQ ID NO: 775404 - DNA, 120 bp, Artificial Sequence
  ENSG00000242498_24 (sequence is synthesized)
tcctttaggagactgctgcagttgcctgggtgagaggctagaggggtctggtctatagcagtggcaggggagatggaaagaagagaatgatttgaggggcattcggggggcaaaatcaac

SEQ ID NO: 775405 - DNA, 120 bp, Artificial Sequence
  ENSG00000242498_25 (sequence is synthesized)
aggacctggggggagacgaagggatcaagaatgatgcccagattctgggtgagtggcagtgctgtggtgcacaagtagtgatgttatgtttccgggtgacctgctgtttagcaggagccc

SEQ ID NO: 775406 - DNA, 120 bp, Artificial Sequence
  ENSG00000242498_26 (sequence is synthesized)
agcctgtggctaagaagtatagagaactgaaactagctccctagggatgggaaaaccaagtgggctgaggataagaacagggccccagggctgggtgcagtcgctcacgcctgtaatctt

SEQ ID NO: 775407 - DNA, 78 bp, Artificial Sequence
  ENSG00000242498_27 (sequence is synthesized)
aggagttcgaaaccagcctgatccccggacatggtggcacatgcctgtagttccagcgccttgggaggctgaggcatg

SEQ ID NO: 775408 - DNA, 78 bp, Artificial Sequence
  ENSG00000242498_28 (sequence is synthesized)
tctctaccaaaaaatacaaaaattacccggacatggtggcacatgcctgtagttccagcgccttgggaggctgaggca

SEQ ID NO: 775409 - DNA, 120 bp, Artificial Sequence
  ENSG00000242498_29 (sequence is synthesized)
caaaaaaaaaaaaaaaaaaaagaatagggtcccaggctcagcaggtagggacactgaggtaaaatcctattccctaggactagggactaggaagggagaaaataggaagctgctgtggca

SEQ ID NO: 775410 - DNA, 120 bp, Artificial Sequence
  ENSG00000242498_30 (sequence is synthesized)
ctgtggcataggcatctgcatgggcagatggtgaggccaaagcccctgattttgccatacctcctgccctggtcaggactggttcaggcattagggcaggcccagccagggcagaagcct

SEQ ID NO: 775411 - DNA, 120 bp, Artificial Sequence
  ENSG00000242498_31 (sequence is synthesized)
gaactacagcagggctgaaaccctgctttcaggggcccccatgtggctggtaggggcagcttttggaagctagactggatcctattactccccagatgaaaagttcaaattccttaatac

SEQ ID NO: 775412 - DNA, 120 bp, Artificial Sequence
  ENSG00000242498_32 (sequence is synthesized)
aactcagagctcatcacaatgtcacaaccctcctttctcggctcgcttcctccttaagagctctggggcgattctttcagaccagcctgagggatcttccacaggttgttaatagggcta

SEQ ID NO: 775413 - DNA, 120 bp, Artificial Sequence
  ENSG00000242498_33 (sequence is synthesized)
gaaacaaaaagtggtggtgtttctatgatctaatttgttggaacaaacgtagtgttaaactcaaacatttctgtaggatttcttggagctttaactatactaacatttactgtaactctt

SEQ ID NO: 775414 - DNA, 120 bp, Artificial Sequence
  ENSG00000242498_34 (sequence is synthesized)
caggacagggtatgattacgtatttcccacatttctttggtcagagaacccgtttttgtgaggagcatttcatgggacagctgttgtgagaaacagtttgggaagggctgtgttggtccc

SEQ ID NO: 775415 - DNA, 120 bp, Artificial Sequence
  ENSG00000242498_35 (sequence is synthesized)
atggaggggctggctgttcccagagcaggtcactcccccacttgcattgccttgcctggactcttttcttggagggaggtccctttcctctacccatctgaatttttttttcttccacca

SEQ ID NO: 775416 - DNA, 120 bp, Artificial Sequence
  ENSG00000242498_36 (sequence is synthesized)
gtgtccagcttgcctttcaccatgggcctaatgatggaaattacagttattttgtatcttcaaacagaaccaagcaaatcctctgagcttcattcatatgggaaattttctttctttctt

SEQ ID NO: 775417 - DNA, 61 bp, Artificial Sequence
  ENSG00000242498_37 (sequence is synthesized)
tttctcctgcctcagcaggaggattactgtaatcccaagtagctgggattacaggcctgcg

SEQ ID NO: 775418 - DNA, 84 bp, Artificial Sequence
  ENSG00000242498_38 (sequence is synthesized)
cctcagcaggaggattactgtaagactagctaattttgtacttttagtagagatgcgatttcaccatgttggctaggctggtct

SEQ ID NO: 775419 - DNA, 120 bp, Artificial Sequence
  ENSG00000242498_39 (sequence is synthesized)
tgggattacaggcatgagccacagtgccggacattatgggaaaattttttgagggactaaactaatctccacaaatagcaatgcatttaggaaatatatttaaaggggaaaaaaagactc

SEQ ID NO: 775420 - DNA, 120 bp, Artificial Sequence
  ENSG00000242498_40 (sequence is synthesized)
atttaggaaatatatttaaaggggaaaaaaagactcatagtttcactcagtcatgttcataatttttagtatttgggttttttagcatgtaatttgtgtacatagttttggtttttgtaa

SEQ ID NO: 775421 - DNA, 120 bp, Artificial Sequence
  ENSG00000242498_41 (sequence is synthesized)
acttgcataggggttttctggtacaaactggaaaacctgctagacaaattctgaaacatctgtaatgcttgtaggtagttgttgtaacactatgcccacacataatcactttccatattg

SEQ ID NO: 775422 - DNA, 68 bp, Artificial Sequence
  ENSG00000242498_42 (sequence is synthesized)
gttgtaacactatgcccacacataatcactttccatattgctgcatagtctttgtaaccatttttctt

SEQ ID NO: 775423 - DNA, 80 bp, Artificial Sequence
  ENSG00000242498_43 (sequence is synthesized)
cctgtaaccattatttttaagattgctaccattggatagttctgtcatggtccaacttttggatatttaaaattgatccc

SEQ ID NO: 775424 - DNA, 120 bp, Artificial Sequence
  ENSG00000242498_44 (sequence is synthesized)
tctgtcatggtccaacttttggatatttaaaattgatccctgtgtggctaacagaattaatgtttccaaaaatgttgaaaattatatagttctcttaattccccacctctaactatattt

SEQ ID NO: 775425 - DNA, 120 bp, Artificial Sequence
  ENSG00000242498_45 (sequence is synthesized)
ttgggttatttctttaggaacagatgcccaggagtcatattactgagaatctagaaatcttttgcaaagttcttgttatattgccaaattgcttcccaaaagggttgttctaaaccataa

SEQ ID NO: 775426 - DNA, 120 bp, Artificial Sequence
  ENSG00000242498_46 (sequence is synthesized)
tttcaccagcaatgtaggggagaaccatttttatgctgcccttgtgagaattgggtatgaaaacatttttaaaatgatttttgatgaggtgaaaataatatttgaatatattttaatttg

SEQ ID NO: 775427 - DNA, 120 bp, Artificial Sequence
  ENSG00000242498_47 (sequence is synthesized)
cctttcccccacttatagtgagcttaaacattttttccttttcctagctgtatttctccctttgttattcgttctttcgtccatttatctactggggagatggggagtgttatcttttta

SEQ ID NO: 775428 - DNA, 120 bp, Artificial Sequence
  ENSG00000242498_48 (sequence is synthesized)
atcagttatttgcattttaaatataaccatttgccatattttaacaacgatttttccattaaataattctttttataaaaaaactttatatatctgttgatgttttgtgatttttattgc

SEQ ID NO: 775429 - DNA, 120 bp, Artificial Sequence
  ENSG00000242498_49 (sequence is synthesized)
ttgcttctaagctaatacagatttttggatcttattcaatttcgctttcttctgtttaggttattatctggttttatacctaactacttattttcaaattgctaaccagttatcctaata

SEQ ID NO: 775430 - DNA, 120 bp, Artificial Sequence
  ENSG00000242498_50 (sequence is synthesized)
gtatttactgaattccttcccactcctacatcacatattaaaattattttatgcctaaattatttataatatttcagttattcttcctataattacaatttgaaccatcaaagtaggttt

SEQ ID NO: 775431 - DNA, 120 bp, Artificial Sequence
  ENSG00000242498_51 (sequence is synthesized)
tcatagttggcagagctagttcttcttcataattctgtttcagaattttctttgatattcttcctcaacattttaaacattttgtcaagtttcagtgcaactgacttttggtttttattt

SEQ ID NO: 775432 - DNA, 73 bp, Artificial Sequence
  ENSG00000242498_52 (sequence is synthesized)
tttgtcaagtttcagtgcaactgacttttggtttttatttatttaaaaactgggcactgagatgggtgaatca

SEQ ID NO: 775433 - DNA, 70 bp, Artificial Sequence
  ENSG00000242498_53 (sequence is synthesized)
tggactaggcgtggtggcggtttgggagactgaggctggaggattgcctgaggccagcagtttgaggtta

SEQ ID NO: 775434 - DNA, 120 bp, Artificial Sequence
  ENSG00000242498_54 (sequence is synthesized)
tgaggctggaggattgcctgaggccagcagtttgaggttacagtgaggtatgactgtgccactgcactccaacctgggtaagaccctatctctgaaaaacaaacaagcaaaccccagaac

SEQ ID NO: 775435 - DNA, 120 bp, Artificial Sequence
  ENSG00000242498_55 (sequence is synthesized)
tctggctgcaaaagtagtacatatttctttgaaggaaaaaaaggaaaacttgataatcctaccacccaaagatgtttttaaatcacttatgtggtactcagttatgtgccatgcactgtc

SEQ ID NO: 775436 - DNA, 120 bp, Artificial Sequence
  ENSG00000242498_56 (sequence is synthesized)
caagtgcttacaaatattatactaactccctttgtgtttataacaactgtctgaagtcagtagactcattttccagttttccagtttaggaaactgatattacaccttttctacagatgg

SEQ ID NO: 775437 - DNA, 120 bp, Artificial Sequence
  ENSG00000242498_57 (sequence is synthesized)
ggaaacttgcccagggtgcccaggcagtccgcagaaccatgctttgaatcagggcagtgtggttccagggtcctgtacagatcaaacaccctgactctgccattccatcagatacatgat

SEQ ID NO: 775438 - DNA, 120 bp, Artificial Sequence
  ENSG00000242498_58 (sequence is synthesized)
tcatattttggtgtatttgcctccaatcttgagcaaagtgggttgtccctgtacatactttgtgtaatcttttagcttaacaggtgtcatgaacacttccgtatcataaatctttcccag

SEQ ID NO: 775439 - DNA, 120 bp, Artificial Sequence
  ENSG00000242498_59 (sequence is synthesized)
catgatttttattatctatttaatatttctcatattcaatgtagaacaatgcacttaaccaatttctcatttttgtaataattttcttcccattttcccctgtaataacactgctgagat

SEQ ID NO: 775440 - DNA, 120 bp, Artificial Sequence
  ENSG00000242498_60 (sequence is synthesized)
atatatttttttcttcttttttttactgttctgaagatactctggcagaaatgtatgttcctcaggctaaatcttttcacacatccacaatcattttatcataaattctagagctggaaa

SEQ ID NO: 775441 - DNA, 120 bp, Artificial Sequence
  ENSG00000242498_61 (sequence is synthesized)
cctggtgttggtgcagttgtatctcctggcaggagcatggtacatactggttgaggttgtgggtaggatgagaagacgacaggatgaatcttaccccccagctttagtggaattctgtga

SEQ ID NO: 775442 - DNA, 120 bp, Artificial Sequence
  ENSG00000242498_62 (sequence is synthesized)
aacacctgggaatgtgttagcatcaggagaattcctctaaggtatgaagaatgacaacctgggacctttcttgtaggtggctctgaacctaactattccccaaagattcccaagtggtag

SEQ ID NO: 775443 - DNA, 120 bp, Artificial Sequence
  ENSG00000242498_63 (sequence is synthesized)
gaaggagggggtgcagagggatattaatcatggtcattaagtctcaaaacatttctacttcaagtgaatacattaaccatgctgaggcagttgaacaactgaatgcgtagtttttcctcc

SEQ ID NO: 775444 - DNA, 120 bp, Artificial Sequence
  ENSG00000242498_64 (sequence is synthesized)
aacaggatcgggtgggggggtgggatgcgggtgggggaaaactggggttgccaaagccgcctctccgccttcagtccgcccctccagtccgccgctcccggcgcccctgccgccgcgccc

SEQ ID NO: 775445 - DNA, 120 bp, Artificial Sequence
  ENSG00000242498_65 (sequence is synthesized)
gcccagcgaccccatgacacagatcggcttaaagctccccgcctgtccgcctgccctcgagagagggtcccgacccccagacaggtctccgaaggctgggcttcgcctcacgccgacctc

SEQ ID NO: 775446 - DNA, 120 bp, Artificial Sequence
  ENSG00000242498_66 (sequence is synthesized)
cggccccaccccacccgcgtaactataaactccagctacttgccgcgctgcttttgcacagactcatgccctgccccagaagggacagtggccgtgctgtggcgggaacagcgggcgggc

SEQ ID NO: 775447 - DNA, 120 bp, Artificial Sequence
  ENSG00000242498_67 (sequence is synthesized)
tggtccagagcagggcctgcctgggtgaggaggatttggagggccaggccctgtcgtcacagggttatgaggccgaagggaccattccatttacaactgcgctgaagaattgtgctaagt

SEQ ID NO: 775448 - DNA, 120 bp, Artificial Sequence
  ENSG00000242498_68 (sequence is synthesized)
gaaataagccagatacagaaagacaaatactgtgtgatctcgtatatggaacctataaaagcgttgaaccatagaaacggcagaacagaccaggcgctgtggttcacgcctgtaatccca

SEQ ID NO: 775449 - DNA, 120 bp, Artificial Sequence
  ENSG00000242515_0 (sequence is synthesized)
gtacttcttccgcctactgtatcatagcagcttagaatcccagctgctggctcgggctgcagttctctcatggctcgcgcagggtggaccagccccgttcctttatgtgtgtgtctactg

SEQ ID NO: 775450 - DNA, 120 bp, Artificial Sequence
  ENSG00000242515_1 (sequence is synthesized)
ctgacctgtggctttgccgaggcagggaagctgctggtagtgcccatggatgggagtcactggttcaccatgcagtcggtggtggagaaacttatcctcagggggcatgaggtggttgta

SEQ ID NO: 775451 - DNA, 120 bp, Artificial Sequence
  ENSG00000242515_2 (sequence is synthesized)
gtcatgccagaggtgagttggcaactggaaagatcactgaattgcacagtgaagacttactcaacctcgtacactctggaagatcagaaccgggaattcatggttttcgcccatgctcaa

SEQ ID NO: 775452 - DNA, 120 bp, Artificial Sequence
  ENSG00000242515_3 (sequence is synthesized)
tggaaagcacaggcacaaagtatattttctctattaatgagttcatccagtggttttcttgacttatttttttcgcattgcaggagtttgtttaatgaccgaaaattagtagaatactta

SEQ ID NO: 775453 - DNA, 120 bp, Artificial Sequence
  ENSG00000242515_4 (sequence is synthesized)
aaggagagttcttttgatgcagtgtttctggatccttttgatacctgtggcttaattgttgctaaatatttctccctcccctctgtggtcttcaccaggggaatattttgccaccatctt

SEQ ID NO: 775454 - DNA, 120 bp, Artificial Sequence
  ENSG00000242515_5 (sequence is synthesized)
gaagaaggtgcacagtgccctgctcctctttcctatgtccccaatgatctcttagggttctcagatgccatgactttcaaggagagagtatggaaccacatcgtgcacttggaggaccat

SEQ ID NO: 775455 - DNA, 120 bp, Artificial Sequence
  ENSG00000242515_6 (sequence is synthesized)
ttattttgccagtatctttttagaaatgccctagaaatagcctctgaaattctccaaacccctgtcacggcatatgatctctacagtcacacatcaatttggttgttgcgaacggacttt

SEQ ID NO: 775456 - DNA, 120 bp, Artificial Sequence
  ENSG00000242515_7 (sequence is synthesized)
gttttggactatcccaaacccgtgatgcccaacatgatcttcattggtggtatcaactgtcatcagggaaagccattgcctatggaatttgaagcctacattaatgcttctggagaacat

SEQ ID NO: 775457 - DNA, 120 bp, Artificial Sequence
  ENSG00000242515_8 (sequence is synthesized)
ggaattgtggttttctctttgggatcaatggtctcagaaattccagagaagaaagctatggcaattgctgatgctttgggcaaaatccctcagacagtcctgtggcggtacactggaacc

SEQ ID NO: 775458 - DNA, 120 bp, Artificial Sequence
  ENSG00000242515_9 (sequence is synthesized)
cgaccatcgaatcttgcgaacaacacgatacttgttaagtggctaccccaaaacgatctgcttggtcacccgatgacccgtgcctttatcacccatgctggttcccatggtgtttatgaa

SEQ ID NO: 775459 - DNA, 120 bp, Artificial Sequence
  ENSG00000242515_10 (sequence is synthesized)
caatggcgttcccatggtgatgatgcccttgtttggtgatcagatggacaatgcaaagcgcatggagactaagggagctggagtgaccctgaatgttctggaaatgacttctgaagattt

SEQ ID NO: 775460 - DNA, 120 bp, Artificial Sequence
  ENSG00000242515_11 (sequence is synthesized)
agaaaatgctctaaaagcagtcatcaatgacaaaagttacaaggagaacatcatgcgcctctccagccttcacaaggaccgcccggtggagccgctggacctggccgtgttctgggtgga

SEQ ID NO: 775461 - DNA, 120 bp, Artificial Sequence
  ENSG00000242515_12 (sequence is synthesized)
gtttgtgatgaggcacaagggcgcgccacacctgcgccccgcagcccacgacctcacctggtaccagtaccattccttggacgtgattggtttcctcttggccgtcgtgctgacagtggc

SEQ ID NO: 775462 - DNA, 120 bp, Artificial Sequence
  ENSG00000242515_13 (sequence is synthesized)
cttcatcacctttaaatgttgtgcttatggctaccggaaatgcttggggaaaaaagggcgagttaagaaagcccacaaatccaagacccattgagaagtgggtgggaaataaggtaaaat

SEQ ID NO: 775463 - DNA, 120 bp, Artificial Sequence
  ENSG00000242515_14 (sequence is synthesized)
tttgaaccattccctagtcatttccaaacttgaaaacagaatcagtgttaaattcattttattcttattaaggaaatactttgcataaattaatcagccccagagtgctttaaaaaattc

SEQ ID NO: 775464 - DNA, 120 bp, Artificial Sequence
  ENSG00000242515_15 (sequence is synthesized)
tcttaaataaaaataatagactcgctagtcagtaaagatatttgaatatgtatcgtgccccctctggtgtctttgatcaggatgacatgtgccatttttcagaggacgtgcagacaggct

SEQ ID NO: 775465 - DNA, 120 bp, Artificial Sequence
  ENSG00000242515_16 (sequence is synthesized)
ggcattctagattacttttcttactctgaaacatggcctgtttgggagtgcgggattcaaaggtggtcccacggctgcccctactgcaaatggcagttttaatcttatcttttggcttct

SEQ ID NO: 775466 - DNA, 120 bp, Artificial Sequence
  ENSG00000242515_17 (sequence is synthesized)
gcagatggttgcaattgatccttaaccaataatggtcagtcctcatctctgtcgtgcttcataggtgccaccttgtgtgtttaaagaagggaagctttgtacctttagagtgtaggtgaa

SEQ ID NO: 775467 - DNA, 120 bp, Artificial Sequence
  ENSG00000242515_18 (sequence is synthesized)
atgaatgaatggcttggagtgcactgagaacagcatatgatttcttgctttggggaaaaagaatgatgctatgaaattggtgggtggtgtatttgagaagataatcattgcttatgtcaa

SEQ ID NO: 775468 - DNA, 120 bp, Artificial Sequence
  ENSG00000242515_19 (sequence is synthesized)
atggagctgaatttgataaaaacccaaaatacagctatgaagtgctgggcaagtttactttttttctgatgtttcctacaactaaaaataaattaataaatttatataaattctatttaa

SEQ ID NO: 775469 - DNA, 120 bp, Artificial Sequence
  ENSG00000242515_20 (sequence is synthesized)
gaagagctggagcatgttcagatgagaggagacggaacacggggacacaccagcttgagcaagggacaacaggggaggactgatgactgacttcccacctttgaggtgctaatgtgtgtg

SEQ ID NO: 775470 - DNA, 120 bp, Artificial Sequence
  ENSG00000242515_21 (sequence is synthesized)
tggtggcactggataaaagatcaatgttggctaggcaccatggcacacgcctgtagtcccagccactctggaggctaaggcgggaggattgcttgagcccagaagttggaggctgctatg

SEQ ID NO: 775471 - DNA, 84 bp, Artificial Sequence
  ENSG00000242515_22 (sequence is synthesized)
gaaaagtccacataacctgagcatcatgtgcccagagcgttgggtggtgtggtcccattccttccttccagcggcttcttctgg

SEQ ID NO: 775472 - DNA, 120 bp, Artificial Sequence
  ENSG00000242515_23 (sequence is synthesized)
tggtgtggtcccattccttccttccagcggcttcttctggccacctcaatgtcaggatgtcctgctcacatatcaataccattaaaacctgacttctttccctgcactgttgaagctcct

SEQ ID NO: 775473 - DNA, 120 bp, Artificial Sequence
  ENSG00000242515_24 (sequence is synthesized)
tcttgaggctcacattatggatataattttgattctttcttcagtggtatagataactacttgtaacctaagaacaacttggtgaaagtcctctaatacattattttttaaaaaaacaca

SEQ ID NO: 775474 - DNA, 120 bp, Artificial Sequence
  ENSG00000242515_25 (sequence is synthesized)
aatcaatgagctcaacttattaactaactttcatctattcatttttgagccatccctgtctgattgtgaatctccatgattccaacactctgagctggggatagtgcctacacaaaataa

SEQ ID NO: 775475 - DNA, 120 bp, Artificial Sequence
  ENSG00000242534_0 (sequence is synthesized)
gatattgtgatgactcagtctccactctccctgcccgtcacccctggagagccggcctccatctcctgcaggtctagtcagagcctcctgcatagtaatggatacaactatttggattgg

SEQ ID NO: 775476 - DNA, 120 bp, Artificial Sequence
  ENSG00000242534_1 (sequence is synthesized)
gtccctgacaggttcagtggcagtggatcaggcacagattttacactgaaaatcagcagagtggaggctgaggatgttggggtttattactgcatgcaagctctacaaactcctcccaca

SEQ ID NO: 775477 - DNA, 120 bp, Artificial Sequence
  ENSG00000242550_0 (sequence is synthesized)
agttgaaagtttctcaactcttcagccacaatctcttactacaggagcaaattgccaattctgctccagtgggagaaaacaaggtttcctcaatggactctctagcaacatcaatcaacc

SEQ ID NO: 775478 - DNA, 120 bp, Artificial Sequence
  ENSG00000242550_1 (sequence is synthesized)
agtttgccctggagttgagcaaaaagctagctgaatctgctcagggtaaaaatatcttcttttcttcctggagcatctcaacttccttgaccatagtgtatttgggcgccaaaggtacca

SEQ ID NO: 775479 - DNA, 120 bp, Artificial Sequence
  ENSG00000242550_2 (sequence is synthesized)
ctgcagcccaaatggcccaggtgcttcaatttaacagagaccagggagtcaaatgtgaccctgaaagtgaaaaaaaaaggaaaatggaattcaacttgagcaactcggaagaaatacact

SEQ ID NO: 775480 - DNA, 120 bp, Artificial Sequence
  ENSG00000242550_3 (sequence is synthesized)
ctgatttccaaacacttatctcagaaatcctcaagcccaacgatgactacttacttaaaacagccaatgcgatatatggagagaaaacgtatgcatttcacaataaatatttagaagaca

SEQ ID NO: 775481 - DNA, 120 bp, Artificial Sequence
  ENSG00000242550_4 (sequence is synthesized)
tgaaaacatattttggtgcagaacctcagcctgttaactttgtggaagcttctgatcaaatcagaaaggacatcaactcttgggttgaaagacagaccgagggtaaaatccagaatctcc

SEQ ID NO: 775482 - DNA, 120 bp, Artificial Sequence
  ENSG00000242550_5 (sequence is synthesized)
tgcctgatgactctgtggattccacaaccaggatgattctggtgaacgccctatactttaaaggaatctgggaacatcaattcttagtgcaaaacaccacagaaaagccttttagaataa

SEQ ID NO: 775483 - DNA, 120 bp, Artificial Sequence
  ENSG00000242550_6 (sequence is synthesized)
acgagactacaagcaaaccagtgcaaatgatgtttatgaagaaaaagcttcacatttttcacatagaaaagccaaaagcagtgggccttcaactctactacaaaagccgtgacctcagcc

SEQ ID NO: 775484 - DNA, 120 bp, Artificial Sequence
  ENSG00000242550_7 (sequence is synthesized)
tgcttatactactgccagaagacattaatgggctggaacagctggaaaaggccatcacctatgagaagctgaatgagtggaccagtgcagacatgatggagttgtatgaagtgcagctac

SEQ ID NO: 775485 - DNA, 120 bp, Artificial Sequence
  ENSG00000242550_8 (sequence is synthesized)
aagaaacctatttttgtccaatgttttccataaggcttttgtggaaataaatgaacaaggtactgaagctgcagctggcagtgggagtgagatagatatacgaattagagtcccatccat

SEQ ID NO: 775486 - DNA, 120 bp, Artificial Sequence
  ENSG00000242550_9 (sequence is synthesized)
tgaattcaatgcaaatcacccattcctcttcttcatcaggcacaataaaaccaacaccattcttttttatggaagattatgctccccctaaatcctgcatatctctcaacaaacaagacc

SEQ ID NO: 775487 - DNA, 120 bp, Artificial Sequence
  ENSG00000242550_10 (sequence is synthesized)
atcttacagtgtgaaaaatgtaccatgagatggaaaagcacaattttcacaaaaatgagtttgtagtctaaacctttttcacatttgaatataagtaaatagatcttgaaataatgcatt

SEQ ID NO: 775488 - DNA, 120 bp, Artificial Sequence
  ENSG00000242550_11 (sequence is synthesized)
ctaatgatcctgtcatatctgtacagctggagagaatgacgatttttatttttaacacgttaacattttgtctaatgtgactttcatttacatttcagaagtactatgctattcaactga

SEQ ID NO: 775489 - DNA, 120 bp, Artificial Sequence
  ENSG00000242550_12 (sequence is synthesized)
atgccttacaattcttgatcacttgcaatatccatgatacttgttatcatatatttcatatacatcattaaatgaaaaaaaatctttataaaggtgatatgatattgataaatacgaagt

SEQ ID NO: 775490 - DNA, 120 bp, Artificial Sequence
  ENSG00000242550_13 (sequence is synthesized)
tttataaaggtgatatgatattgataaatacgaagtttctcaagaatatcgttttgatcaaaaatttagcccggcatggtggtgcacacctgtgttcccagctactcaggaggctgaggt

SEQ ID NO: 775491 - DNA, 120 bp, Artificial Sequence
  ENSG00000242550_14 (sequence is synthesized)
agagcaagaccctgtctcaaaaaaatcattttggtggctcataaattatgattgtaaaactaaaccccctttttctgctatttaaaaaatacttatattgacattagcttaaaaaactag

SEQ ID NO: 775492 - DNA, 120 bp, Artificial Sequence
  ENSG00000242550_15 (sequence is synthesized)
tttaaaaaatacttatattgacattagcttaaaaaactagtgaaatccaaatgaaatttgaagtttagctagtagcaatctctcaatgttggtgccctagttttgacaaatgtaccgtgg

SEQ ID NO: 775493 - DNA, 120 bp, Artificial Sequence
  ENSG00000242550_16 (sequence is synthesized)
tcatgtaagatgttatcacttggggaaactgtactggagtatatgagaattagctgtattatctctgcacctcttctgccaatctaaaattattccaaaataaaagttttattaaaaata

SEQ ID NO: 775494 - DNA, 120 bp, Artificial Sequence
  ENSG00000242550_17 (sequence is synthesized)
aagtgtcaataagctgtttggtgagaagtctgcgagcttccgggaagaatatattcgactctgtcagaaatattactcctcagaaccccaggcagtagacttcctagaatgtgcagaaga

SEQ ID NO: 775495 - DNA, 120 bp, Artificial Sequence
  ENSG00000242550_18 (sequence is synthesized)
agctagaaaaaagattaattcctgggtcaagactcaaaccaaaggcaaaatcccaaacttgttacctgaaggttctgtagatggggataccaggatggtcctggtgaatgctgtctactt

SEQ ID NO: 775496 - DNA, 120 bp, Artificial Sequence
  ENSG00000242550_19 (sequence is synthesized)
caaaggaaagtggaaaactccatttgagaagaaactaaatgggctttatcctttccgtgtaaactcggctcagcgcacacctgtacagatgatgtacttgcgtgaaaagctaaacattgg

SEQ ID NO: 775497 - DNA, 120 bp, Artificial Sequence
  ENSG00000242550_20 (sequence is synthesized)
atatgctggagatgttagcatgttcttgttgcttccagatgaaattgccgatgtgtccactggcttggagctgctggaaagtgaaataacctatgacaaactcaacaagtggaccagcaa

SEQ ID NO: 775498 - DNA, 120 bp, Artificial Sequence
  ENSG00000242574_0 (sequence is synthesized)
actggactcccgtgagctggaaggaacagatttaatatctaggggctgggtatccccacatcactcatttggggggtcaagggacccgggcaatatagtattctgctcagtgtctggaga

SEQ ID NO: 775499 - DNA, 120 bp, Artificial Sequence
  ENSG00000242574_1 (sequence is synthesized)
tcatctacccaggctggggcttctgggacaggcgaggacccacggaccctggaagagctggtccaggggactgaactcccggcatctttacagagcagagcatgatcacattcctgccgc

SEQ ID NO: 775500 - DNA, 120 bp, Artificial Sequence
  ENSG00000242574_2 (sequence is synthesized)
tgctgctggggctcagcctgggctgcacaggagcaggtggcttcgtggcccatgtggaaagcacctgtctgttggatgatgctgggactccaaaggatttcacatactgcatctccttca

SEQ ID NO: 775501 - DNA, 120 bp, Artificial Sequence
  ENSG00000242574_3 (sequence is synthesized)
acaaggatctgctgacctgctgggatccagaggagaataagatggccccttgcgaatttggggtgctgaatagcttggcgaatgtcctctcacagcacctcaaccaaaaagacaccctga

SEQ ID NO: 775502 - DNA, 120 bp, Artificial Sequence
  ENSG00000242574_4 (sequence is synthesized)
tgcagcgcttgcgcaatgggcttcagaattgtgccacacacacccagcccttctggggatcactgaccaacaggacacggccaccatctgtgcaagtagccaaaaccactccttttaaca

SEQ ID NO: 775503 - DNA, 120 bp, Artificial Sequence
  ENSG00000242574_5 (sequence is synthesized)
tgtgtggggcttctatccagcagaagtgactatcacgtggaggaagaacgggaagcttgtcatgcctcacagcagtgcgcacaagactgcccagcccaatggagactggacataccagac

SEQ ID NO: 775504 - DNA, 120 bp, Artificial Sequence
  ENSG00000242574_6 (sequence is synthesized)
cctctcccatttagccttaaccccctcttacggggacacttacacctgtgtggtagagcacactggggctcctgagcccatccttcgggactggacacctgggctgtcccccatgcagac

SEQ ID NO: 775505 - DNA, 120 bp, Artificial Sequence
  ENSG00000242574_7 (sequence is synthesized)
cctgaaggtttctgtgtctgcagtgactctgggcctgggcctcatcatcttctctcttggtgtgatcagctggcggagagctggccactctagttacactcctcttcctgggtccaatta

SEQ ID NO: 775506 - DNA, 120 bp, Artificial Sequence
  ENSG00000242574_8 (sequence is synthesized)
ttcagaaggatggcacatttcctagaggcagaatcctacaacttccactccaagtgagaaggagattcaaactcaatgatgctaccatgcctctccaacatcttcaaccccctgacatta

SEQ ID NO: 775507 - DNA, 120 bp, Artificial Sequence
  ENSG00000242574_9 (sequence is synthesized)
tcttggatcctatggtttctccatccaattctttgaatttcccagtctcccctatgtaaaacttagcaacttgggggacctcattcctgggactatgctgtaaccaaattattgtccaag

SEQ ID NO: 775508 - DNA, 120 bp, Artificial Sequence
  ENSG00000242574_10 (sequence is synthesized)
gctatatttctgggatgaatataatctgaggaagggagttaaagaccctcctggggctctcagtgtgccatagaggacagcaactggtgattgtttcagagaaataaactttggtggaaa

SEQ ID NO: 775509 - DNA, 120 bp, Artificial Sequence
  ENSG00000242574_11 (sequence is synthesized)
cagcccttctggggatcactgaccaacaggacacgtgaggagagaggggtgcagaggggctaccaggaagtgcagttaggagggcaggccagggaggatcccacagtggcccaggggttt

SEQ ID NO: 775510 - DNA, 120 bp, Artificial Sequence
  ENSG00000242574_12 (sequence is synthesized)
gagatttgagcagcaaataagagaaaatgtgtggatctgaaatgtagaaagacggaggattgaacctcaaggggaacaaggtggctgacgtgagtggaacaggagtaaagaaggggaggt

SEQ ID NO: 775511 - DNA, 120 bp, Artificial Sequence
  ENSG00000242574_13 (sequence is synthesized)
gaggcttgaaccgcgaggtgccatgtggggagcttatgcagaggctggggcatctcaggatgcatacccaagatgttcttgccttgttatcccagattttgatgttccagatctgatgtg

SEQ ID NO: 775512 - DNA, 120 bp, Artificial Sequence
  ENSG00000242574_14 (sequence is synthesized)
ggcccaggcatgggaatatttggaatcccaggggattctgacacatgctttttctcacccttaaactcttgcattgacaatggcttgaagtttgtgaaagtaaacttgaagatctccaca

SEQ ID NO: 775513 - DNA, 120 bp, Artificial Sequence
  ENSG00000242574_15 (sequence is synthesized)
gtacagaacagtgtgtctcaagggtggtttctgaaccacctttctcagaattgcctggaggaggtgcttgttaaagatgcaagccccttagtaccactccagatctgttgaaagaaagta

SEQ ID NO: 775514 - DNA, 120 bp, Artificial Sequence
  ENSG00000242574_16 (sequence is synthesized)
tctggggatacagcctaggaaatctgcattttaacataattccttggatttttatttaagattgtgtttgaaaaatgtcaagatagaggcaagcaagaggatcacctaggagagtaaatt

SEQ ID NO: 775515 - DNA, 120 bp, Artificial Sequence
  ENSG00000242574_17 (sequence is synthesized)
agtaaaagatggcagtattagcaatctcattagtttgactacattcattccaaatttaagagtgagtcctaagttaggcttgtttccttgaactatgtgaggagaaaaagctttaactag

SEQ ID NO: 775516 - DNA, 120 bp, Artificial Sequence
  ENSG00000242574_18 (sequence is synthesized)
caaaagaacgtattaaacaagatttggagaaaaattccttttccaccttaaaaaaacccaatgtacaactctggattactcttagcttccttatttcaaatactttccagtttatgtact

SEQ ID NO: 775517 - DNA, 120 bp, Artificial Sequence
  ENSG00000242574_19 (sequence is synthesized)
tgaaataaatacaacaacttctagaacagcttgcagttcagatctggcttttactaattgtaatcaaacataattctggaggaggaaagaaagaaaggggcaatgaaggaatgggagaga

SEQ ID NO: 775518 - DNA, 120 bp, Artificial Sequence
  ENSG00000242574_20 (sequence is synthesized)
agaaagagtaatgcaggaatacattctaacggttccccttcaaggggcagcatggcagagggggctggggtggaaagtgggttgcaaaatctacgaagagttgcgatagggaagaaacca

SEQ ID NO: 775519 - DNA, 120 bp, Artificial Sequence
  ENSG00000242574_21 (sequence is synthesized)
ggttgaggaagcagccagaatgtcaccctccttcctaaacatgtttttttctcctatgcagggccaccatctgtgcaagtagccaaaaccactccttttaacacgagggagcctgtgatg

SEQ ID NO: 775520 - DNA, 120 bp, Artificial Sequence
  ENSG00000242574_22 (sequence is synthesized)
gatggatggaattagggtcaaagcagagaaaatgagatgtggatcgatacatggtacatggtagacagcgaagtgctgaaaatggggactgagtctggaggaacttacggggggcttagg

SEQ ID NO: 775521 - DNA, 79 bp, Artificial Sequence
  ENSG00000242574_23 (sequence is synthesized)
gtggcaaaaaccgcaattacttttgcaccagtttaatatttagtctgtgctattgctgctctggtggtgtggctgatgt

SEQ ID NO: 775522 - DNA, 120 bp, Artificial Sequence
  ENSG00000242574_24 (sequence is synthesized)
gctattgctgctctggtggtgtggctgatgttgctgcgtctatgtttgagggtgagaggggagcgtgcttgctttgaaatgaggctgtaaatttggcaatcatattttcagaaccccaaa

SEQ ID NO: 775523 - DNA, 120 bp, Artificial Sequence
  ENSG00000242574_25 (sequence is synthesized)
ttgtaatacactattctagcctccttagatttcaactattctggtgccagaagcagatgggagctgaaggaatgatgaaggttgaagaaggggggcttttcttggtgtggggcagtactg

SEQ ID NO: 775524 - DNA, 120 bp, Artificial Sequence
  ENSG00000242574_26 (sequence is synthesized)
catttggcctgctctaccaagcatacgggagtagtaaagccacggctggcagaccatttggcatgcatgctcaggggccagtggataaagaattacttacagttcaaacactgtttgaac

SEQ ID NO: 775525 - DNA, 120 bp, Artificial Sequence
  ENSG00000242574_27 (sequence is synthesized)
tcagtgtcgggagtagttaaaggtatcgtgagaagttgcacacagctttggggactcttggaaaagaaagaggaagaaatgaggaagaggaagggtgtctacaaagggccagagaacagg

SEQ ID NO: 775526 - DNA, 120 bp, Artificial Sequence
  ENSG00000242574_28 (sequence is synthesized)
atctcagatcagctgctgtaaccaggtttccccttgtgggaagtgttgtttcttgctgggcagttgggaagggaatggagaacagagaagagagtggaaatcacatgctcacttgaactt

SEQ ID NO: 775527 - DNA, 120 bp, Artificial Sequence
  ENSG00000242574_29 (sequence is synthesized)
tcctggggaacgtctcctcacagcgtgcacaagagcctccctttagaaatggagtgttcattttatcatgggaaaagaatctgagtgggacatgattcagaacaggaccggcccaaggaa

SEQ ID NO: 775528 - DNA, 120 bp, Artificial Sequence
  ENSG00000242574_30 (sequence is synthesized)
gtgcaggggctgtggagtgggatggagacaagctctgaaaggacacatgggagatctagatgtaggaggtacacaagtagtaggataactcacaggatggatccactggaggttaagaca

SEQ ID NO: 775529 - DNA, 120 bp, Artificial Sequence
  ENSG00000242574_31 (sequence is synthesized)
tgtggtaagacagtgtaataggaagctgctcagttggagaaagtaaggaagcaaacattgttaccgtgggggcaatggagaggacagtgaggagccctttatcctgataagggtggcttt

SEQ ID NO: 775530 - DNA, 120 bp, Artificial Sequence
  ENSG00000242574_32 (sequence is synthesized)
ggggtaaaggaaggaaagaggatgccttgagaggccccactgtattagagaggacctggaagccaggatgctaattctggggagatgggttccccaggcttactctaggagtagaggtcc

SEQ ID NO: 775531 - DNA, 120 bp, Artificial Sequence
  ENSG00000242574_33 (sequence is synthesized)
atgggacgagggtttgatttgagaaagatcattttcttgggagtgggtggtgtgagctagacccttggagctgggataaaggaccttttaacccactgagaggtggctgcaataaatgga

SEQ ID NO: 775532 - DNA, 120 bp, Artificial Sequence
  ENSG00000242574_34 (sequence is synthesized)
tcagaaggtaacatctctgttggtctgtttccctacttgccctttggtaggggtgcgggttagaggggtcagtgttgggttcaactaatcttgattattatatgggtgagcttccatgag

SEQ ID NO: 775533 - DNA, 120 bp, Artificial Sequence
  ENSG00000242574_35 (sequence is synthesized)
gatctaggcaagggcatgatttaagctgccattgctaggattaagagcaggaaggagcatcctcctcttctaccaagtgggatgtctgtggagaggaggctgaaggtgcttcctttgtat

SEQ ID NO: 775534 - DNA, 120 bp, Artificial Sequence
  ENSG00000242574_36 (sequence is synthesized)
tagttgttggtgccctggagttttcagtatcactgtattaaggcatgggatggttacagtgacaaacgatgggggcaagttgggttgaagcctcattatctcccttttatttattctgta

SEQ ID NO: 775535 - DNA, 120 bp, Artificial Sequence
  ENSG00000242580_0 (sequence is synthesized)
gggacacctggggacactgagctggtgctgagttactgagatgaaccagccctgcagctgtgcccagcctgccttgccccctgctaatttgcatgttcccagagcacatcctcctaccct

SEQ ID NO: 775536 - DNA, 120 bp, Artificial Sequence
  ENSG00000242580_1 (sequence is synthesized)
gaagacttattaatgcgctggtcacacttcatgcaggagtcagacccagtcaggacacagcatggacatgagggtgcccgctcagcgcctggggctcctgctgctctggttcccaggtgc

SEQ ID NO: 775537 - DNA, 120 bp, Artificial Sequence
  ENSG00000242580_2 (sequence is synthesized)
ggagacagagtcaccatcacttgctgggccagtcagggcattagcagttatttagcctggtatcagcaaaaaccagcaaaagcccctaagctcttcatctattatgcatccagtttgcaa

SEQ ID NO: 775538 - DNA, 120 bp, Artificial Sequence
  ENSG00000242612_0 (sequence is synthesized)
gagttcgcagctgcgcgccgggtcctggaggccgaggccgctcccgcccgttgtccccgcagtccccgacgggagcgccatggcccagccgccgcccgacgtggagggggacgactgtct

SEQ ID NO: 775539 - DNA, 120 bp, Artificial Sequence
  ENSG00000242612_1 (sequence is synthesized)
ccccgcgtaccgccacctcttctgcccggacctgctgcgggacaaagtggccttcatcacaggaggcggctctgggattgggttccggattgctgagattttcatgcggcacggctgcca

SEQ ID NO: 775540 - DNA, 120 bp, Artificial Sequence
  ENSG00000242612_2 (sequence is synthesized)
tacggtgattgccagtaggagcctgccgcgagtgctgacggccgccaggaagctggctggggccaccggccggcgctgcctccctctctctatggacgtccgagcgcccccagctgtcat

SEQ ID NO: 775541 - DNA, 120 bp, Artificial Sequence
  ENSG00000242612_3 (sequence is synthesized)
ggccgccgtggaccaggctctgaaggagtttggcagaatcgacattctcattaactgtgcggccgggaacttcctgtgccccgctggcgccttgtccttcaacgccttcaagaccgtgat

SEQ ID NO: 775542 - DNA, 120 bp, Artificial Sequence
  ENSG00000242612_4 (sequence is synthesized)
ggacatcgataccagcggcaccttcaatgtgtctcgtgtgctctatgagaagttcttccgggaccacggaggggtgatcgtgaacatcactgccaccctggggaaccgggggcaggcgct

SEQ ID NO: 775543 - DNA, 120 bp, Artificial Sequence
  ENSG00000242612_5 (sequence is synthesized)
ccaggtgcatgcaggctccgccaaggccgctgtggacgcgatgacgcggcacttggctgtggagtggggtccccaaaacatccgcgtcaacagcctcgcccctggccccatcagtggcac

SEQ ID NO: 775544 - DNA, 120 bp, Artificial Sequence
  ENSG00000242612_6 (sequence is synthesized)
cctggccagccctctggcttcctacgtgacgggggccgtgctggtggccgatggcggggcatggttgacgttcccaaacggtgtcaaagggctgccggatttcgcatccttctctgctaa

SEQ ID NO: 775545 - DNA, 120 bp, Artificial Sequence
  ENSG00000242612_7 (sequence is synthesized)
gctctaggaatcttccggccgctgcttcctgccgcctcactcagccaggtggagagcaccaatctgaaccagcaatgcctgcagcccagcccctcctctgaacactcagctattactgcg

SEQ ID NO: 775546 - DNA, 120 bp, Artificial Sequence
  ENSG00000242612_8 (sequence is synthesized)
ctttccctccccacggccccaactccagggcaggagcaactggacagtgggcctggcccgtggagctgccacgcaggtgcctgagggccaggtgccacgcaggtgtctgaggaccaggtg

SEQ ID NO: 775547 - DNA, 120 bp, Artificial Sequence
  ENSG00000242612_9 (sequence is synthesized)
ccacgcaggtggtgggggtacagacaagatgctgggatgtcccctgccccatggtcaagggtgtcctgcctgcctgggtccagggcctgagggagccacatggatcccgagacttgtgtt

SEQ ID NO: 775548 - DNA, 120 bp, Artificial Sequence
  ENSG00000242612_10 (sequence is synthesized)
ctcttggctgaaaacactgaggtgctcccatctgtgcgtggcccatgagctgggatggtcctccagctgcccacaaggtccgcccctctgtctctgcaccacctgtttgcataaacacac

SEQ ID NO: 775549 - DNA, 120 bp, Artificial Sequence
  ENSG00000242612_11 (sequence is synthesized)
tttgctacaatcttgctagtgcgttttcttaaaagataatctatttactgtaaaaataaattggactttgcaaaagcttttagaaggaaaagaaagaggattaaagagaattgctggtga

SEQ ID NO: 775550 - DNA, 120 bp, Artificial Sequence
  ENSG00000242612_12 (sequence is synthesized)
gacattgcagctccagtgggacctgcctagcaggggtagctacctttatggttattgtgggcaagcaacccccgaaccagaagagccgagaaaccaaagaacaaggcagacagatcccgt

SEQ ID NO: 775551 - DNA, 120 bp, Artificial Sequence
  ENSG00000242612_13 (sequence is synthesized)
atgggtctcctccctgtgccacagggcacctgggctccctcctgcaccctccgctctgcccacctggccaccacccacttggcatccctctccccaggctccagcagctcctgcggtctc

SEQ ID NO: 775552 - DNA, 120 bp, Artificial Sequence
  ENSG00000242612_14 (sequence is synthesized)
ttgcccacgtgggtccccaatgggccgtctgcttccatcccaggaggccagcagtctccacttgaagctgagcccagctgcaggcagcgagacctggccttggccctgcgccctcgcaga

SEQ ID NO: 775553 - DNA, 120 bp, Artificial Sequence
  ENSG00000242612_15 (sequence is synthesized)
gggcagagcggccctttcatatccaactttcttctgtgcagacgcgatgacgcggcacttggctgtggagtggggtccccaaaacatccgcgtcaacagcctcgcccctggccccatcag

SEQ ID NO: 775554 - DNA, 120 bp, Artificial Sequence
  ENSG00000242612_16 (sequence is synthesized)
tacggtgattgccagtaggagcctgccgcgagtgctgacggtgagagggcctctcccatggtcccctgttcgggtggctgtgggggggctggggctgggcctgggccaggagagtccaga

SEQ ID NO: 775555 - DNA, 89 bp, Artificial Sequence
  ENSG00000242612_17 (sequence is synthesized)
tgggggggctggggctgggcctgggccaggagagtccagaggctatggggatgttggcaccaaaactttttttttctgagacgtggtgg

SEQ ID NO: 775556 - DNA, 66 bp, Artificial Sequence
  ENSG00000242612_18 (sequence is synthesized)
ggccggggcaccaaaacttgcacctatcctaaatatggagcttcagtgtaagtggcctcccagaga

SEQ ID NO: 775557 - DNA, 120 bp, Artificial Sequence
  ENSG00000242612_19 (sequence is synthesized)
tcctaaatatggagcttcagtgtaagtggcctcccagagacatctttgactttttaaaaaatctagttattgggttctgggagggaccttcctgtttgggggtaatgtggccccaagaaa

SEQ ID NO: 775558 - DNA, 120 bp, Artificial Sequence
  ENSG00000242612_20 (sequence is synthesized)
gacctctgggctcacctgggttatttaggtggtccgtgcgtcccacctactggagccctcgacctgggaggagagtctcacctgtgccacctctggtctgcagcaggggcaggacatggg

SEQ ID NO: 775559 - DNA, 120 bp, Artificial Sequence
  ENSG00000242612_21 (sequence is synthesized)
gcttccccagagtggggtccagcagcaaacccagggtccccgaggaacccggaagcatcgtcctctgcagattccaaaggccttttctccaggccgaggctgcagggctgctgtctgcct

SEQ ID NO: 775560 - DNA, 120 bp, Artificial Sequence
  ENSG00000242612_22 (sequence is synthesized)
aggagtttggcagaatcgacattctcattaactgctccagcagctcctgcggtctcccattctgcaggtgcggccgggaacttcctgtgccccgctggcgccttgtccttcaacgccttc

SEQ ID NO: 775561 - DNA, 120 bp, Artificial Sequence
  ENSG00000242612_23 (sequence is synthesized)
tcactctgcagaaattcccttttaaaaacatcctgtgtattagtttcctgggctaacagagtactacgacctgtgtgggtaaaacaaccgaaatataatctcccagttctggaggccaga

SEQ ID NO: 775562 - DNA, 120 bp, Artificial Sequence
  ENSG00000242612_24 (sequence is synthesized)
acgtccaaggggaaggcgtcggcagagctatgctctctgaaggccccaggggagagcctcttcctgccttctgcgtggcttcgggtactgccatagcccttggccctcccgggctcggag

SEQ ID NO: 775563 - DNA, 120 bp, Artificial Sequence
  ENSG00000242612_25 (sequence is synthesized)
accgtcgctgcactgtctgccactgtcttcccgtggcgtgtgtctgtgtgtcctcttcccttgttataaggatgctggtcattggatttagggctcaccctaattcgttgtgacttcagt

SEQ ID NO: 775564 - DNA, 120 bp, Artificial Sequence
  ENSG00000242612_26 (sequence is synthesized)
gtaattcgattatctctgcaacccaccccatttccaaacaaggccacagtcgcaggtacggagccagggcttcagcatgtcttctcttctcggggacacagtgcagccaggacgcccgtc

SEQ ID NO: 775565 - DNA, 120 bp, Artificial Sequence
  ENSG00000242612_27 (sequence is synthesized)
gagcccaggcctcccacagatcctctcctggggcacagggtgcccatgaagcttccagaaccttggcagggtgtatgttgaaaagccctgtgctggttccatggtggcaactatgttctg

SEQ ID NO: 775566 - DNA, 120 bp, Artificial Sequence
  ENSG00000242612_28 (sequence is synthesized)
tgcctggcctgatcctgctccatgctaggccttggtgacactgactgtgtccttgctgttcccagatgcctctcagggaatgagctgggggagaggggagggtgctgggtcttggggctc

SEQ ID NO: 775567 - DNA, 120 bp, Artificial Sequence
  ENSG00000242612_29 (sequence is synthesized)
acggggcctgagccttctgctgccctccaggtggccctcaggccagcctgagcaccaaggtcactgccagcccgctgcagaggctggggaacaagaccgagatcgcccacagcgtgctct

SEQ ID NO: 775568 - DNA, 120 bp, Artificial Sequence
  ENSG00000242616_0 (sequence is synthesized)
agcagcccctaggagcccagcgccgccgccatgtcctccggggctagcgcgagcgccctgcagcgcttggtagagcagctcaagttggaggctggcgtggagaggatcaaggtctctcag

SEQ ID NO: 775569 - DNA, 120 bp, Artificial Sequence
  ENSG00000242616_1 (sequence is synthesized)
gcagctgcagagcttcaacagtactgtatgcagaatgcctgcaaggatgccctgctggtgggtgttccagctggaagtaaccccttccgggagcctagatcctgtgctttactctgaaga

SEQ ID NO: 775570 - DNA, 120 bp, Artificial Sequence
  ENSG00000242616_2 (sequence is synthesized)
ctctaggagagaagtttgctgaggaatgccttcaagcacaaagtgatgaatgactgccttcaagtctcaagaaaacacttttccctaacttttagagatatttcagccctttcctgtggc

SEQ ID NO: 775571 - DNA, 120 bp, Artificial Sequence
  ENSG00000242616_3 (sequence is synthesized)
ctggtcctatagccaaaatcacagatattcatgagtttctacttgagtgagaaaactgggtgaaggaatagaattttaaatagtaataactgcttgttttttttgtgcaagtacttttat

SEQ ID NO: 775572 - DNA, 120 bp, Artificial Sequence
  ENSG00000242616_4 (sequence is synthesized)
acataagataaacaaaaaccttaccaccaaacataccaaaatgcacctctttcataagtgagttactaagatttctatacctggaatatcatgtatgtttcatttactggatgtttacat

SEQ ID NO: 775573 - DNA, 120 bp, Artificial Sequence
  ENSG00000242616_5 (sequence is synthesized)
ttaggaaggaaaatagttttgtttatttaaacaactgaatacttataaactgttgttcctggaagttatttattccataaaaaatttgttcttttgtcatgaatttataattcctaaatg

SEQ ID NO: 775574 - DNA, 120 bp, Artificial Sequence
  ENSG00000242616_6 (sequence is synthesized)
aagaccagaaagtacaaattgctgggaggaagaataggctttattaatcaactgatgtcttgatttttctaaatgggaagattgctttatttttaacactaattatgggagcagattctt

SEQ ID NO: 775575 - DNA, 120 bp, Artificial Sequence
  ENSG00000242616_7 (sequence is synthesized)
agcaaacttctttggaaaagttaatgttatgatgtgcattaggctgccccatcgtgtatataaatgaagcagatttgatttttgtattcttacgtttctctgctttgtagttgtggctgt

SEQ ID NO: 775576 - DNA, 120 bp, Artificial Sequence
  ENSG00000242616_8 (sequence is synthesized)
acttaaagaaatacagaatttcatatatttaaaaatgtttaaaatgtgacccacagaacattgtaaatgattaaaaactaacatgaaaatattacaacctaaaagaattcttaacttcac

SEQ ID NO: 775577 - DNA, 120 bp, Artificial Sequence
  ENSG00000242616_9 (sequence is synthesized)
aagtgttttacttcgacgatgtgcctttgatttaatttgggacacttttttagaaggatacattattcgtgtttgcaacggtctttgaagagcttggaaataaaatttctgcttaattaa

SEQ ID NO: 775578 - DNA, 120 bp, Artificial Sequence
  ENSG00000242689_0 (sequence is synthesized)
agtctttgagagtcacatctcttatttggaccagtatagacagaagtaaacccagctgacttgtttcctgggacagttgagttaagggatggctttcacagagcattcaccgctgacccc

SEQ ID NO: 775579 - DNA, 120 bp, Artificial Sequence
  ENSG00000242689_1 (sequence is synthesized)
tcaccgtcgggacctctgtagccgctctatctggctagcaaggaagattcgttcagacctgactgctcttacggaatcctatgtgaagcatcagggcctgaacaagaacatcaacctgga

SEQ ID NO: 775580 - DNA, 120 bp, Artificial Sequence
  ENSG00000242689_2 (sequence is synthesized)
ctctgcggatgggatgccagtggcaagcactgatcagtggagtgagctgaccgaggcagagcgactccaagagaaccttcaagcttatcgtaccttccatgttttgttggccaggctctt

SEQ ID NO: 775581 - DNA, 120 bp, Artificial Sequence
  ENSG00000242689_3 (sequence is synthesized)
agaagaccagcaggtgcattttaccccaaccgaaggtgacttccatcaagctatacatacccttcttctccaagtcgctgcctttgcataccagatagaggagttaatgatactcctgga

SEQ ID NO: 775582 - DNA, 120 bp, Artificial Sequence
  ENSG00000242689_4 (sequence is synthesized)
atacaagatcccccgcaatgaggctgatgggatgcctattaatgttggagatggtggtctctttgagaagaagctgtggggcctaaaggtgctgcaggagctttcacagtggacagtaag

SEQ ID NO: 775583 - DNA, 120 bp, Artificial Sequence
  ENSG00000242689_5 (sequence is synthesized)
gtccatccatgaccttcgtttcatttcttctcatcagactgggatcccagcacgtgggagccattatattgctaacaacaagaaaatgtagcagttagtcccttctctcttccttgcttt

SEQ ID NO: 775584 - DNA, 120 bp, Artificial Sequence
  ENSG00000242689_6 (sequence is synthesized)
ctcttctaatggaatatgcgtagttccctggggcctcgctttcccatcttaaatttctaaaaacagttaagacaacaggcattttctttcttttttctctgaccacctgcagcctgttga

SEQ ID NO: 775585 - DNA, 120 bp, Artificial Sequence
  ENSG00000242689_7 (sequence is synthesized)
caggtgtaagagagtgggagcagggacaacgtccttccacttcagggttctaacctttctaacccactaagtaacctctacaggcatttaactgccttacagacagaatatacatatgtt

SEQ ID NO: 775586 - DNA, 120 bp, Artificial Sequence
  ENSG00000242689_8 (sequence is synthesized)
aattctagtcctggatgactcggtctgagaagattcaatttaaaatcagactctttagttgatttaaactcttagagaataagaataataatggctaacttttattatcttctatattaa

SEQ ID NO: 775587 - DNA, 120 bp, Artificial Sequence
  ENSG00000242689_9 (sequence is synthesized)
ggcagtatgccaagggtctttatgtatattatgtacagcgtttacaaccttgtgagcaaggtggtgttactcccattaggtagatgagaaaacaggctcacagagatttggttaagctca

SEQ ID NO: 775588 - DNA, 120 bp, Artificial Sequence
  ENSG00000242689_10 (sequence is synthesized)
cacagctaacaagtagcacactgagtttgaacacagatcattctccttgtaaaagcctatgtgcctttcactttagaggcttgatcatgaatcactgcacctctttgtcacagggtgttg

SEQ ID NO: 775589 - DNA, 120 bp, Artificial Sequence
  ENSG00000242689_11 (sequence is synthesized)
gaagatgcatccatgtaatctattcccatcgctggaaaacagctgctgttagatgtcctcagaagtcagttgcaaattttagcgttaaagtcaggatttattgttcatacttggcggtga

SEQ ID NO: 775590 - DNA, 120 bp, Artificial Sequence
  ENSG00000242689_12 (sequence is synthesized)
ggagggcagctggagatcttaagattccattttggaaaatgattaggcccgccaaacttctgaactttggaagctggggatgtttagtaatacagcctggtttttaagtactcactaaaa

SEQ ID NO: 775591 - DNA, 120 bp, Artificial Sequence
  ENSG00000242689_13 (sequence is synthesized)
gttctcaaatattgggttgggcacggcttataccaggttacctcacttttaattagtgatgcaggcagtgtaacccaagcatttgtggacaatgagtggaatactaaagttaaaaagtca

SEQ ID NO: 775592 - DNA, 120 bp, Artificial Sequence
  ENSG00000242689_14 (sequence is synthesized)
aactttcacctcagattttctggacttagtcatgaggagagggtgaggcccactctgttcctactggagataccagagactctgaaactatagaataaagcctctgtgctgcacaacaaa

SEQ ID NO: 775593 - DNA, 120 bp, Artificial Sequence
  ENSG00000242715_0 (sequence is synthesized)
accgcctcgtgccgtactggcttctgggtggcccttaatgtcttgtgctctaaggtgctgaggggaaagacgcgggaggtctctggcctgacactatgaaggaagagagaaactacaact

SEQ ID NO: 775594 - DNA, 120 bp, Artificial Sequence
  ENSG00000242715_1 (sequence is synthesized)
tcgacggtgtgagcaccaaccgcctgaaacagcagttgctggaagaagtccgcaagaaggatgcagtgcaactctcaatatttgaactaagacacaagattacggaactggaagccaaac

SEQ ID NO: 775595 - DNA, 120 bp, Artificial Sequence
  ENSG00000242715_2 (sequence is synthesized)
tcaatactgacaatgaaggtagtgaatggaaaacccgttatgagacacaacttgaattaaatgatgaactagaaaagcaaattgtttatctcaaggagaaagtggaaaaaatccatggaa

SEQ ID NO: 775596 - DNA, 120 bp, Artificial Sequence
  ENSG00000242715_3 (sequence is synthesized)
actcttcagatagactatcttctattcgtgtctatgaacgaatgccagtggaatccttaaacacattacttaaacagctagaagaagaaaagaagactcttgaaagtcaagtgaaatact

SEQ ID NO: 775597 - DNA, 120 bp, Artificial Sequence
  ENSG00000242715_4 (sequence is synthesized)
ctcagggttctggtttacatcaagtttctaaaaggcaacaggtggatcaactgcctaggatgcaagagaatctagtgaaaactggaagatataatccagctaagcagaagacagtgagtg

SEQ ID NO: 775598 - DNA, 120 bp, Artificial Sequence
  ENSG00000242715_5 (sequence is synthesized)
ccaagagaggaccagtaaaaaagattacaagaccaaaccatcttccagaactccatccatgattccagaactggatggatttctatttcttcctttttttttccatttataatattcaag

SEQ ID NO: 775599 - DNA, 120 bp, Artificial Sequence
  ENSG00000242715_6 (sequence is synthesized)
ttataaagttaatggtcagcacatttcttcagggaataaaatagataagaactgccacatttttctttagttccttttccagacgtgtgttcctttgtctgcataaaagtaattttctcc

SEQ ID NO: 775600 - DNA, 120 bp, Artificial Sequence
  ENSG00000242715_7 (sequence is synthesized)
agtgaccctaaactatgtaatagaagtgcttgagagttttaaaatatcctagggaatctgaaggctggcatcattacacttgctttcaataatatacccatgatctgctctgatagtaac

SEQ ID NO: 775601 - DNA, 120 bp, Artificial Sequence
  ENSG00000242715_8 (sequence is synthesized)
gttgctattctatttggtttctagttgactgttagcaaaaagtgtgtattcataaaacctttttgccattttgggctggatcttgctcagttttttaaattgcaggtttaaacaaagccg

SEQ ID NO: 775602 - DNA, 120 bp, Artificial Sequence
  ENSG00000242715_9 (sequence is synthesized)
gaccctttaaaggtcagctgcttggagacattgggtttcagtgctgcaggtgtggctggaccagagaataggacatgcctcggacaaaaagcactctggcccgcctgcttacatgggtcc

SEQ ID NO: 775603 - DNA, 120 bp, Artificial Sequence
  ENSG00000242715_10 (sequence is synthesized)
tcaaccttggctgtgtgtcagactcacctgaagagctaaaagtaaaatactcagacatgtgcaccacccccaggattgtgatctcacatgtatttctttaagcctcccccaggaaattgt

SEQ ID NO: 775604 - DNA, 120 bp, Artificial Sequence
  ENSG00000242715_11 (sequence is synthesized)
tgatgaactagaaaagcaaattgtttatctcaaggagaaagtggaaaaaatccatggaaactcttcagacgtatttcaaagagaagtttgaagactagcgcaaggtccaaataaactgtt

SEQ ID NO: 775605 - DNA, 120 bp, Artificial Sequence
  ENSG00000242715_12 (sequence is synthesized)
tataggtggagcactaagttgccagctatattcacaggtgtcctgaagagcagagcatgtatagatattgctttttgaatcaccgccaaccttcagagaaagatatagacaaatactgtg

SEQ ID NO: 775606 - DNA, 120 bp, Artificial Sequence
  ENSG00000242715_13 (sequence is synthesized)
tttttgctaataatgaattgaggagaaataagtccttttgcacgcttgttactttcaacccagacatgcctttatttccatatcttggaaagtcaggaatttttctaactcgaaaaattg

SEQ ID NO: 775607 - DNA, 120 bp, Artificial Sequence
  ENSG00000242715_14 (sequence is synthesized)
ttttcccatgtgctgtcatagagttatatcgccctcttgtggcatttagaaatagttgctagggctatgttaagcttagtgccttttcttaattgcaggtagaattttattactacctac

SEQ ID NO: 775608 - DNA, 120 bp, Artificial Sequence
  ENSG00000242715_15 (sequence is synthesized)
tggatataaaatattctgtctacctgcttcttgataactgaggctcagtcctagctcaacagagtgggtatcaccacccttgtggagagtagcaacaagtgctggtatgacttagtaaaa

SEQ ID NO: 775609 - DNA, 120 bp, Artificial Sequence
  ENSG00000242715_16 (sequence is synthesized)
cagttttctagtatattaccattgatttatataatcagataaaagcagctccttgggaagatcaagaacattaagttatgaacagtccagtgaattggaagtgatggaatgagagagtct

SEQ ID NO: 775610 - DNA, 120 bp, Artificial Sequence
  ENSG00000242715_17 (sequence is synthesized)
gttcttctgttttaaagatatctagttcattttggagtcagtaaaataagagggaaccttaaagttattgtagtacaattttatacttttcaaggatctctggaatccttaaacacatta

SEQ ID NO: 775611 - DNA, 120 bp, Artificial Sequence
  ENSG00000242715_18 (sequence is synthesized)
aggaatacaaagcaaaatcaacaaaggcataaggcacatgggatgaattctcagaaaactaggctcaagcttccgaaagttttctccaagttagggtcacataagaaatacttaattcct

SEQ ID NO: 775612 - DNA, 120 bp, Artificial Sequence
  ENSG00000242715_19 (sequence is synthesized)
gattgggacccactctgctggtttagtgtggcttcatctctcaaactgaatgaaacttcttccaactctcctcgagctgacttcaccttggtctttttatttttacttttttacagtgag

SEQ ID NO: 775613 - DNA, 120 bp, Artificial Sequence
  ENSG00000242715_20 (sequence is synthesized)
agataaggattttattttttcttcgttgttatttatttcaatttttattttagattcagaggtacctgtgcaggtttgctatcgtggtatattgtataatgctgagatttggggcacaaa

SEQ ID NO: 775614 - DNA, 120 bp, Artificial Sequence
  ENSG00000242715_21 (sequence is synthesized)
taatcccatcacccagggactgagcatagtagccgaaagttatttgtcaatgtttgctctcctttcttcctccaccctctagtggtccccagtgtctattgttgctgtctttatgtccat

SEQ ID NO: 775615 - DNA, 120 bp, Artificial Sequence
  ENSG00000242715_22 (sequence is synthesized)
gagtacccagtgtttggctatcacttgtaagcgagaacatgcagtatttggtttcctgcttctgtgttaatttgcataggaaaatggcctccagctgcatccatattgttacaaaggaca

SEQ ID NO: 775616 - DNA, 120 bp, Artificial Sequence
  ENSG00000242715_23 (sequence is synthesized)
tgatttcatttcttttatgactgtgtagtattccatggtgtgtatcaggagtccccagcctctggccgtggactgttacccatccatggcctgttaggaattgggctgcccagcaggagg

SEQ ID NO: 775617 - DNA, 120 bp, Artificial Sequence
  ENSG00000242715_24 (sequence is synthesized)
tgagctgcaggtgagcaagcattaccacctgaactccacctcctgtcagatcagcagcagcattaaatcctcataggagcacgaactcttgtgaattgtgcatgtggaggatctaggttg

SEQ ID NO: 775618 - DNA, 120 bp, Artificial Sequence
  ENSG00000242715_25 (sequence is synthesized)
catactccttatgagactctaatgccagatgagaatttaactaatgattaatctgaaacagtttcatcccaaaaccatcccctccccaaaatacagtccgtggaaaaattgttttccatg

SEQ ID NO: 775619 - DNA, 120 bp, Artificial Sequence
  ENSG00000242715_26 (sequence is synthesized)
aaaccagcccttggtgtcaaaagggttgggaactgctggtgtatatgtagcacattttctttactcagtccactgttgatgggcacctaggctgattctgtatctttactattgtgaata

SEQ ID NO: 775620 - DNA, 120 bp, Artificial Sequence
  ENSG00000242715_27 (sequence is synthesized)
gtgctgcgatgaacatgcaagtgcatctgtctttttagtagaaagatttgtgtttttttggatatatacccagtaataagattgctgggtcaaatggtagttttaagttctttaagaaat

SEQ ID NO: 775621 - DNA, 120 bp, Artificial Sequence
  ENSG00000242715_28 (sequence is synthesized)
ctaattcacattcccaccaacagtgtctaagtgttcccttttctccacagtctcaccagcatctgttgcttttttacttttcaataatagccattcagactggtgttagatggcatctta

SEQ ID NO: 775622 - DNA, 82 bp, Artificial Sequence
  ENSG00000242715_29 (sequence is synthesized)
tcaccagcatctgttgcttttttacttttcaataatagccattcagactggtgttagatggcatcttatgagagcatttttt

SEQ ID NO: 775623 - DNA, 120 bp, Artificial Sequence
  ENSG00000242715_30 (sequence is synthesized)
tcttcttttgataagtgtctgttcgtgtcttttgcccattttttttaatggggttattttttgcttgctgagttgtttcagtttcttacagtttctggatattagacctttgtcagatgc

SEQ ID NO: 775624 - DNA, 120 bp, Artificial Sequence
  ENSG00000242715_31 (sequence is synthesized)
ttctcccattctgtaggttttctgtttactccatcgctagtttcttttgctgtgcataagctctttaattaggtcccatttgtcagtttttgttttggttgcaattgcttttgcgactta

SEQ ID NO: 775625 - DNA, 120 bp, Artificial Sequence
  ENSG00000242715_32 (sequence is synthesized)
ttttggttgcaattgcttttgcgacttactcataaattcttttgcaaggccgacatccagaatggtgtttccaggggccaggcctagtagttcatgcctgtaatcccaacactttggaag

SEQ ID NO: 775626 - DNA, 65 bp, Artificial Sequence
  ENSG00000242715_33 (sequence is synthesized)
acactttggaaggccaaggcatccatctctacaaaaagtaaaaaattagccaggcatggtggtgc

SEQ ID NO: 775627 - DNA, 120 bp, Artificial Sequence
  ENSG00000242715_34 (sequence is synthesized)
ggctgcagtgagctgtgatcatgccactacacttaaggctaggcaactgaatgaaaccctgtctcaaaaaaaaaaaaagtgtttcctaggtttcttctaggattcttatagtttgagggc

SEQ ID NO: 775628 - DNA, 120 bp, Artificial Sequence
  ENSG00000242715_35 (sequence is synthesized)
ctaggattcttatagtttgagggcttacatttaaatctttaattcatcttgaggtaatttttgcatatggtgaaaggtaggggtccagtttcatccttctgtatatggctagccagctat

SEQ ID NO: 775629 - DNA, 120 bp, Artificial Sequence
  ENSG00000242715_36 (sequence is synthesized)
tcagatggctgtaggtatgtggcttttttttcctgggttctttattctgttccattggtctctgtgtctgtttttgtgccagtaccatgctgttttgattactgtagctttacagtatag

SEQ ID NO: 775630 - DNA, 120 bp, Artificial Sequence
  ENSG00000242715_37 (sequence is synthesized)
tttgaagtctggtaatgtgttgccactggctttttcctttttgattaagattgctctggctattcgggctcctttttacttccacatgaattttagaatagtttttctagttctgtgaaa

SEQ ID NO: 775631 - DNA, 120 bp, Artificial Sequence
  ENSG00000242715_38 (sequence is synthesized)
gaatctgtagattgctttgggcagtatgactattttaacaatattgattcttccaccccatgaatatggaatgttttaccatttgtttatgttgtctgatttcttttggtggtgttttat

SEQ ID NO: 775632 - DNA, 120 bp, Artificial Sequence
  ENSG00000242715_39 (sequence is synthesized)
atgttgtctgatttcttttggtggtgttttatagttctccttatagagatctttcacctccttggttagatatattcctaggggtttttgtgtatgtctttgtgtatgtggctattgtag

SEQ ID NO: 775633 - DNA, 120 bp, Artificial Sequence
  ENSG00000242715_40 (sequence is synthesized)
tctttgtgtatgtggctattgtagattggattgcattctcgatttggctcttagcttgaatgttgttggtgtatagaaatgttattgattttttgtacattgattttgtatcctgaaact

SEQ ID NO: 775634 - DNA, 120 bp, Artificial Sequence
  ENSG00000242715_41 (sequence is synthesized)
aggacccttttggcagagtctgtagggttttctatgtatagggtcatattatccttgaagagagatagtttgaattcttttcatatgtagatgccttttttttttctttctcttgtctga

SEQ ID NO: 775635 - DNA, 120 bp, Artificial Sequence
  ENSG00000242715_42 (sequence is synthesized)
ttgctctggctagcacttccagtactatgttgaatagaaaatagctattttggggagaattttccaaccaagatgtcaaaacaataatgatgagagcattacatgctaattcccaatatt

SEQ ID NO: 775636 - DNA, 120 bp, Artificial Sequence
  ENSG00000242715_43 (sequence is synthesized)
ttcctttgacttatttaaatttaaataatccaatttttttacttaatgaccttgtggagatatttataaaacaccttttgatttttgactggggctggatttttaaaaaatttataaaga

SEQ ID NO: 775637 - DNA, 120 bp, Artificial Sequence
  ENSG00000242715_44 (sequence is synthesized)
gctatatagtattgatttcaaataaattattcctaccttttcttcatctgaattagttttagcatgtataggagattccaaagcagagttacctatatcaattttagtactattattttc

SEQ ID NO: 775638 - DNA, 120 bp, Artificial Sequence
  ENSG00000242715_45 (sequence is synthesized)
atattctactggataagaaattacttatttggaactaagaattattcttgcaacagaagcttatcagtaacactatttgattgctttttgctgtgtgcacaggtgaggacctgtctagac

SEQ ID NO: 775639 - DNA, 120 bp, Artificial Sequence
  ENSG00000242715_46 (sequence is synthesized)
ttgtattaattttgttcataaattaggtaattgagttatagatactaatttaatatttaaaaaatttagattgttgattttaaatatcagaataaccaaactgtaacaacagtgctggga

SEQ ID NO: 775640 - DNA, 120 bp, Artificial Sequence
  ENSG00000242715_47 (sequence is synthesized)
aacaacagtgctgggattttggtatttaaaaagggcagagtataccagaatattgaaaactggtattgaaatcactacatataattgaattatgaaaaagtacctttaagataataaagc

SEQ ID NO: 775641 - DNA, 120 bp, Artificial Sequence
  ENSG00000242715_48 (sequence is synthesized)
actacataaatatgagctcatatcatatatttgacagtagggcattatttttacaggttaacattcaattaatctgactatgaattagaaaaatcttgaatttgtagagttcatttaact

SEQ ID NO: 775642 - DNA, 120 bp, Artificial Sequence
  ENSG00000242715_49 (sequence is synthesized)
ttattaaagcaatttgccaactcagctacagaaatacagaaaatattactatctggagaactacccagtcgtaagtttatcatcgttgaaattgcttaagcagagattaggtgaccattc

SEQ ID NO: 775643 - DNA, 120 bp, Artificial Sequence
  ENSG00000242715_50 (sequence is synthesized)
ctcaggaatagtatacgaaggattcctgcagtggtggaggtgtgtatttgattgctgtcagtgtgccttctgatactaacattctgtaattccctgctcatttatcacacaacaaaacat

SEQ ID NO: 775644 - DNA, 120 bp, Artificial Sequence
  ENSG00000242715_51 (sequence is synthesized)
gagacaaaaataactccataaaatatatgttgattataccatataggttgtatacatatagactataaatatgagctttcaaaaacgttttgccattagctaataactaacaaaatcagt

SEQ ID NO: 775645 - DNA, 120 bp, Artificial Sequence
  ENSG00000242715_52 (sequence is synthesized)
tttattagggtggttttgtgtttatattgcatggtgttcaatgagcttatatctgtagttttcatcaaatgtggaaaattttgggccatttttgtattatttttctgccctttcctgtcc

SEQ ID NO: 775646 - DNA, 120 bp, Artificial Sequence
  ENSG00000242715_53 (sequence is synthesized)
tcctgggactttaattacagcctgttgtaaaccacttgatattgttccttttggttctttttttatatcttctgtcactgtatttatgttttcctttaagtaattggataggcatataat

SEQ ID NO: 775647 - DNA, 120 bp, Artificial Sequence
  ENSG00000242715_54 (sequence is synthesized)
gacttttagcatacttacacagtatctttttcatttctcagtctgtttctggtgactgatttttctcctggtttcgggtttcattttctgcttcttgtaatatctactaattttatatta

SEQ ID NO: 775648 - DNA, 120 bp, Artificial Sequence
  ENSG00000242715_55 (sequence is synthesized)
gatgccaggcattgatgatttcacattgttggttatagatttattcttataggcagttaaattaattgcagttcagtttcttcttttcaagcctttgttagggtaagtatagagtgagct

SEQ ID NO: 775649 - DNA, 120 bp, Artificial Sequence
  ENSG00000242715_56 (sequence is synthesized)
tcaccccacagagagtttaacaccatttctaaggcatagctattgtgggatcactagaaaattctgtgagtgatcagctgggacactcaacactggctagttggacctcagatgcctcac

SEQ ID NO: 775650 - DNA, 120 bp, Artificial Sequence
  ENSG00000242715_57 (sequence is synthesized)
aggcctgtgtggcactctgcttgacctcgtagagttttgctctaggcttacatgtcttaatatccagccacctctcaaggggctcctatgcagatttctggaattctgtttttacatatc

SEQ ID NO: 775651 - DNA, 120 bp, Artificial Sequence
  ENSG00000242715_58 (sequence is synthesized)
tgttagctctctggtactctgctctgcaacttcagccacttcagcctccctgaactccagcctctgtcttctcaactacatgaaaccaccatgctttgtttgggatcccctaccctgctc

SEQ ID NO: 775652 - DNA, 120 bp, Artificial Sequence
  ENSG00000242715_59 (sequence is synthesized)
tgaggtctgtgcctgcaggtagaaatctagaatgatggatgggcctcacttcattcctctcaggggtcatagtcttaaggtgcatgtcaatatctgcagttgtttcatatatttttgact

SEQ ID NO: 775653 - DNA, 120 bp, Artificial Sequence
  ENSG00000242715_60 (sequence is synthesized)
aattttctgtttcttcacagtaagaagctaaatctttcccctgttactctcaaagccagaagtaaaggataaagcattaaaataaaagcaaagaaaatattttaaaatctaatataaaaa

SEQ ID NO: 775654 - DNA, 120 bp, Artificial Sequence
  ENSG00000242715_61 (sequence is synthesized)
cttttaaagtgactaaaagccctaaaggaagaaaataactaaggagccattggtaccctggagcaaaagaacctgagggaaattgatactaggacttgcctcctcttaaaagaagaattg

SEQ ID NO: 775655 - DNA, 120 bp, Artificial Sequence
  ENSG00000242715_62 (sequence is synthesized)
aggaatccaggcttcccctaagtttctactctgccatccatttgtgagtggcttttgtcctcgtgtttaaagatggctgcttcgccttctcagctgcttcacgttatcattcaaaaaaag

SEQ ID NO: 775656 - DNA, 120 bp, Artificial Sequence
  ENSG00000242715_63 (sequence is synthesized)
acataggtgaaggagaaatggtaaaggtgaaagccggtcacgtctactccccttcaaagagctttctaagatgctgcacccagtaattccccttgacatttcattgggagttagaactgt

SEQ ID NO: 775657 - DNA, 120 bp, Artificial Sequence
  ENSG00000242715_64 (sequence is synthesized)
aagagtggattgtgagcgtacagttggctgtatctgccacacacaaagtcatttaaagtgaaggcatttcattttatgtattcattcaattcattcatacatattcgttcaacatgtatt

SEQ ID NO: 775658 - DNA, 120 bp, Artificial Sequence
  ENSG00000242715_65 (sequence is synthesized)
cagctgatattatttggaaaataaaaggtatagaaaaagaatatcataaaatcaaacatatccactgtagacagttctgtttttagtaatttttgtatgcatacatattgattaaaaaga

SEQ ID NO: 775659 - DNA, 120 bp, Artificial Sequence
  ENSG00000242715_66 (sequence is synthesized)
acaaccaaataaataagtcagccaacaaacaaagtgaaaaaggattacagctagtttttattgttgtttaaaatataattataaccttaccgcatggacagttttgaatcctatgctaat

SEQ ID NO: 775660 - DNA, 120 bp, Artificial Sequence
  ENSG00000242715_67 (sequence is synthesized)
tggggtaattaagtcaattatttcatatgttatgttctcttcatgtgcatttttcaatgatatattatgttccattgtgttggaatgtgaatgttcaattacttttccctataactgggt

SEQ ID NO: 775661 - DNA, 120 bp, Artificial Sequence
  ENSG00000242715_68 (sequence is synthesized)
attttaggttgtttctggttttaattttgagttgaaacccacagagtgtattatggcaaacaactccatattctagtatttataaatcttcagatctttgtccctttttgactttaaatg

SEQ ID NO: 775662 - DNA, 120 bp, Artificial Sequence
  ENSG00000242715_69 (sequence is synthesized)
ttttaatgaaaacaatttatagagttgagatcccttttattctcctccctgtcttctttttgtttcctttttataggcaaggactaccatgaatttggtatatattatttcagtttattt

SEQ ID NO: 775663 - DNA, 120 bp, Artificial Sequence
  ENSG00000242715_70 (sequence is synthesized)
ttcagtttatttttaatatctctctacatgttgtatgtataaaaatgcatataaaaagtatcatactgtgcatatcattcttttactcattatttaattccattcatgttaataaagatc

SEQ ID NO: 775664 - DNA, 120 bp, Artificial Sequence
  ENSG00000242715_71 (sequence is synthesized)
tggaaaaaatccatggaaactcttcagggttctggtttacatcaagtttctaaaaggcaacaggtggatcaactgcctaggatgcaagagaatctagtgaaaacgtaagtctagctatat

SEQ ID NO: 775665 - DNA, 80 bp, Artificial Sequence
  ENSG00000242732_0 (sequence is synthesized)
cgtgtcgcccgcatcctccgcctggcgcctccgggccccgtgcctccgcccgccctctccggccccggcgacgaggtaac

SEQ ID NO: 775666 - DNA, 120 bp, Artificial Sequence
  ENSG00000242732_1 (sequence is synthesized)
ctccgagctcgccccggtgggtgtggcccggcctggcccgtgccccgctgccgcacttcggtccctcccgagccccgccgccgcatttcggcctcctccggccgcccgtagttccagttc

SEQ ID NO: 775667 - DNA, 120 bp, Artificial Sequence
  ENSG00000242732_2 (sequence is synthesized)
gttcccctttccccaccacggagccccagggcccctgggcttgtcgagatgtctgaggcgtcaggaaatctcaacagcctccgcatggcgaatgtggccctgcgcgaagaattaaatgcc

SEQ ID NO: 775668 - DNA, 120 bp, Artificial Sequence
  ENSG00000242732_3 (sequence is synthesized)
cttcgcggggagaatgccaatttgggcctccagctcgggagagccctggccgaggttaattccttgcggggcaatgtctccagctacatccgctggccagtacccatagtgcccgtcctt

SEQ ID NO: 775669 - DNA, 120 bp, Artificial Sequence
  ENSG00000242732_4 (sequence is synthesized)
gcggaggagaacttggagttcgcgctcagtgagatcgaagtcattcccgggggagaactgcccttcttgtgccggcctcccccacgcgcggagcccgactgtatctcggatgatcttttg

SEQ ID NO: 775670 - DNA, 120 bp, Artificial Sequence
  ENSG00000242732_5 (sequence is synthesized)
attaacgtgatccaggatcgcagcacccccgacgggcccgctgacccccctctgctgcccatcccgcccccgccggcgctgcctccgcccgcgtcaaaggaaccgcccccgcaaccccct

SEQ ID NO: 775671 - DNA, 120 bp, Artificial Sequence
  ENSG00000242732_6 (sequence is synthesized)
ctggcaccgctggagcggcctgagatagagcccttttcaggagacccagtctacctggctgaattcctgatgcagctagagaccttcatagccgaccatgaggttcatttccccgggggc

SEQ ID NO: 775672 - DNA, 120 bp, Artificial Sequence
  ENSG00000242732_7 (sequence is synthesized)
gccgagcgggtggcctttctgatctcctttttcactggcgaagccaaggactgggccatctcggtcacccaggaaggaagccccttgcatgccaacttcccgcgcttcctggatgaaatc

SEQ ID NO: 775673 - DNA, 120 bp, Artificial Sequence
  ENSG00000242732_8 (sequence is synthesized)
cgtaaggaattctgtggccccatccccccacgtgtggctaaaaaggccattcgcaagctcaagcagggccactgtaccctcggcagctatgcagatgcttttcagttcctggcccaattc

SEQ ID NO: 775674 - DNA, 120 bp, Artificial Sequence
  ENSG00000242732_9 (sequence is synthesized)
ttgtcttgggatgactgccgcctccaaaaccaattcctcaaaggcctgtcggaattcttccgcaaagagctcttatggtcaacagaaatggccgacctggatgagctgattctcgaatgt

SEQ ID NO: 775675 - DNA, 120 bp, Artificial Sequence
  ENSG00000242732_10 (sequence is synthesized)
gtggagatagaaagaaaagtgcgcgttcccaagcctatcccgctccctggagttcgaaatatcatcttcccttttgctccgagtcccaatgaggaagaaagtgaagatgaagagtactac

SEQ ID NO: 775676 - DNA, 120 bp, Artificial Sequence
  ENSG00000242732_11 (sequence is synthesized)
agtgaagatgaagaccaagaggcacgcaggcacaggcttcactccaaggaccagaggaagcgcatgagggcttttcagcaagagatgaaggagaaggaggaggaggagatgaagaaggag

SEQ ID NO: 775677 - DNA, 120 bp, Artificial Sequence
  ENSG00000242732_12 (sequence is synthesized)
gaagaaatgaagaagaaggaagagaaggaggaggaggaggaagaggaaatgaaacagaaagaggaggaggaggagataaggaacaagaatgaggaggaaggagagagtaaggatgaagaa

SEQ ID NO: 775678 - DNA, 120 bp, Artificial Sequence
  ENSG00000242732_13 (sequence is synthesized)
gatgaagatgaggatgggggccagaaaccagaaggagagccacagcaggatccagggactgaggagacctatggtgaggtggaggaggagccactggatgaggcccaagatgatgaccta

SEQ ID NO: 775679 - DNA, 120 bp, Artificial Sequence
  ENSG00000242732_14 (sequence is synthesized)
gatgagctgatggagatggagccgacctttgttcacgcgtcatcccagacttctggccccacaagtggttaccacgccgaaaacttcctgggtgcatcacctcccataatacagcctagc

SEQ ID NO: 775680 - DNA, 120 bp, Artificial Sequence
  ENSG00000242732_15 (sequence is synthesized)
agacggaggaaccagaatcgagtcccacttctggaaggccttccaggcaccaattcaccattctacagctccccccaactgattcgccgcacaggtcgtttaggacaacgccaagttcga

SEQ ID NO: 775681 - DNA, 120 bp, Artificial Sequence
  ENSG00000242732_16 (sequence is synthesized)
agacgcccccctgtgcttttccgcctcactccgagacaggggggccaccgagctgctcgtggccgaattcgagtttgagtgctggggccagatggccacccagaacacacccttcttttg

SEQ ID NO: 775682 - DNA, 120 bp, Artificial Sequence
  ENSG00000242732_17 (sequence is synthesized)
catacctgccccatttgctgaccaggacttcagggagtttcagacctgcagaacctgaagaagacctgcagaattccagaccatcttgcaaccgtgaccagagagcgacgtgtgcccaac

SEQ ID NO: 775683 - DNA, 120 bp, Artificial Sequence
  ENSG00000242732_18 (sequence is synthesized)
cagggccacctgggaaaggagggatcagcaatagctgccctcttggcatgtactctgctcagtccggccacgagctggagagcaagtttctgggcctgttcccataaatgaactggtcac

SEQ ID NO: 775684 - DNA, 120 bp, Artificial Sequence
  ENSG00000242732_19 (sequence is synthesized)
cctcttgtatttcccctctggttgttcctaaccctcacctctcctgcgtttcttcaccctatgttctacagttttattctctgactgacccaccaggacttcacccaatgcctcactgat

SEQ ID NO: 775685 - DNA, 120 bp, Artificial Sequence
  ENSG00000242732_20 (sequence is synthesized)
ctgccccaatgagcaagaggacaggctaccctgaactcctaaagccactgaggccagttgctagatataatcgatggtgagcaggatggtatccagaaatgtccctagaatcctacactc

SEQ ID NO: 775686 - DNA, 120 bp, Artificial Sequence
  ENSG00000242732_21 (sequence is synthesized)
atttcatgccacacctccagcagagggcctggaagaggacccgacatctagcccagtgagagtgtgcaaagccacatgtcaaatggacaacttgacggagatttgcccttgactgactgt

SEQ ID NO: 775687 - DNA, 120 bp, Artificial Sequence
  ENSG00000242732_22 (sequence is synthesized)
gcaggctggttccacttacagcacttgagtttacctttgcacagattcctgtatcagggctcttggactgacttgccacacatctggagccctttcctctcaccacattgccctcctggg

SEQ ID NO: 775688 - DNA, 120 bp, Artificial Sequence
  ENSG00000242732_23 (sequence is synthesized)
cacccccggtggacagcgcccaacattgcaggctccacaactttccttgatgttgcctaaagggtagccagttagggttccggagaggagaaggaggaagaagaggaggaggagaaagaa

SEQ ID NO: 775689 - DNA, 120 bp, Artificial Sequence
  ENSG00000242732_24 (sequence is synthesized)
gcagcaacgatcattctgccattgtaaagagtgactctttccttagggatggtggtcttctccccttgccaggccttggactgcagcccccagtcaaaggtctttgcaggacactttcta

SEQ ID NO: 775690 - DNA, 120 bp, Artificial Sequence
  ENSG00000242732_25 (sequence is synthesized)
tccttggagttgcagaggaggcctgattggccattccttctgggacagacagagagagggcccatggcctgctctgagctcccttcaatttcaaggaacccttagttctgagaggagaga

SEQ ID NO: 775691 - DNA, 120 bp, Artificial Sequence
  ENSG00000242732_26 (sequence is synthesized)
ggaaggctgcacctaccgtggcctcacagctgggacccctcatgggggccaacccctggcctgctgctgtgcttcagtgacacagtaaagcttaagagggtggctgcctcctaggaactc

SEQ ID NO: 775692 - DNA, 120 bp, Artificial Sequence
  ENSG00000242732_27 (sequence is synthesized)
ctgggacttctaggtacaaactcaggtgcccttataaagagacccactgcttgccttgagtccagaaagcactgcttctgcagtgaaaaacacacacttactatgtcagttttggccata

SEQ ID NO: 775693 - DNA, 120 bp, Artificial Sequence
  ENSG00000242732_28 (sequence is synthesized)
aaatgccagccaaatccactgctggcctgaactgcccctggacactggactttctgcacagtgactggcagcagagcaagtgcagccagggtttgtggccaaagggaagaaagcatagta

SEQ ID NO: 775694 - DNA, 120 bp, Artificial Sequence
  ENSG00000242732_29 (sequence is synthesized)
aattcaacctctgttcctcatgggagtctgaccgataatctcaggcggaccttaggatcttgggcctggaggcaagagaaaaaagctggaggaagaggagtcgcagagaaacccagtcct

SEQ ID NO: 775695 - DNA, 120 bp, Artificial Sequence
  ENSG00000242732_30 (sequence is synthesized)
ctgactggtttctggtgaggtctctattcatcagtgggaggtaagatgcccttttcattagcgcttttgtttctcagcctggggatcagtggatttggattcctataacctgttgctacc

SEQ ID NO: 775696 - DNA, 120 bp, Artificial Sequence
  ENSG00000242732_31 (sequence is synthesized)
ttttaaaaagatcccctctctccaaagagaaaagtaatacataatcattaaagaaagtttggaaaatagagaaaactatgaggacaaaaaccccccagccattcagagtcccaccacaca

SEQ ID NO: 775697 - DNA, 120 bp, Artificial Sequence
  ENSG00000242732_32 (sequence is synthesized)
gaggcaagcactattaacactttgctgctttcctttctagtgtgttcttgctatgtcttgtcaaagctgagatcaccctgccagttcttgatcagcaggatttaaaatggctgccacctg

SEQ ID NO: 775698 - DNA, 120 bp, Artificial Sequence
  ENSG00000242732_33 (sequence is synthesized)
tgcagtcatgcatactgaataattcatttaagcattctcctaatttgttggacctttcaattgtctggttttccccatccccaccagggcaggagtaaacaactttgtaaagaaaatttt

SEQ ID NO: 775699 - DNA, 120 bp, Artificial Sequence
  ENSG00000242732_34 (sequence is synthesized)
tgattttatctgatttcctcaagagtgcattccagaaggggacctgctattcttcgaggggacctgctattcttcgaggcagtggaccctgtttgctgatggtcaacactctggccctgc

SEQ ID NO: 775700 - DNA, 120 bp, Artificial Sequence
  ENSG00000242732_35 (sequence is synthesized)
tgccccatgtccctgtggagaagtgtgaaggacgggtgccttaaacccacacttccagggacccttcagcacaggtcctgcctgttcccatggtgcttctcaccctgaaccctcagagct

SEQ ID NO: 775701 - DNA, 120 bp, Artificial Sequence
  ENSG00000242732_36 (sequence is synthesized)
acagccagggatagagcagatgagcagtgagctggtttccaccctctggggcaggaggggcttgggcttccctttgaccctcttccttcctttcccagatcttcaatatttgttgtgatg

SEQ ID NO: 775702 - DNA, 120 bp, Artificial Sequence
  ENSG00000242732_37 (sequence is synthesized)
taacagccataagagctgtaagaggaactgtgggctttgggagctttcttgggttgaaagaggggtggggggaggggatgcatgcaggggtatgaaggcagcccaaggtctcccagaggc

SEQ ID NO: 775703 - DNA, 120 bp, Artificial Sequence
  ENSG00000242732_38 (sequence is synthesized)
tcgggaggaaacccttttggaatacatgtgttattgttgcattactgtgttgtgaagataagaagctgctctgtatgctaaagctttctctcctcaataaaaatataaagggtgtgtaaa

SEQ ID NO: 775704 - DNA, 120 bp, Artificial Sequence
  ENSG00000242766_0 (sequence is synthesized)
gggacacctggggacactgagctgctgctgagttactgagatgagccagccctgcagctgcgcccagcctgccccatcccctgctcatttgcatgttcccagagcatagcctcctgccct

SEQ ID NO: 775705 - DNA, 90 bp, Artificial Sequence
  ENSG00000242766_1 (sequence is synthesized)
ctgctcatttgcatgttcccagagcatagcctcctgccctgaagccttattaataggctggacacacttcatggaggaatcagtcccatg

SEQ ID NO: 775706 - DNA, 120 bp, Artificial Sequence
  ENSG00000242766_2 (sequence is synthesized)
ggagacagagtcaccatcacttgtcgggcgaggcagggcattagcaattatttagcctggtttcagcagaaaccagggaaagtccctaagcacctgatctatgctgcatccagtttgcaa

SEQ ID NO: 775707 - DNA, 75 bp, Artificial Sequence
  ENSG00000242766_3 (sequence is synthesized)
cctaagcacctgatctatgctgcatccagtttggaattcactctcacaatcagcagcctgcagcctgaagatttt

SEQ ID NO: 775708 - DNA, 120 bp, Artificial Sequence
  ENSG00000242802_0 (sequence is synthesized)
gacgcggtcccggaagttgaccggggtgcggagctcctgggctgcagctcctggagtttccgaggttcgtgcgcgtctggtggcggcggcgtgatgttctcggcaggagcggagagtttg

SEQ ID NO: 775709 - DNA, 120 bp, Artificial Sequence
  ENSG00000242802_1 (sequence is synthesized)
ctccaccaggccagggagatccaggacgaggagctgaagaagttctgttcccggatctgtaaactgctgcaggcggaggacttggggccggacaccctcgactccctgcagaggctcttc

SEQ ID NO: 775710 - DNA, 120 bp, Artificial Sequence
  ENSG00000242802_2 (sequence is synthesized)
ctcatcatctcagccacgaagtacagccggaggctggagaagacatgcgtagacctgctgcaggccaccctcggcctgcctgcatgccccgagcagctccaggtgctttgcgccgccatc

SEQ ID NO: 775711 - DNA, 120 bp, Artificial Sequence
  ENSG00000242802_3 (sequence is synthesized)
ctgcgagagatgtccccctctgacagcctcagcctggcctgggaccacacgcagaacagccggcagctgagcctggtggcctccgttctcttggcccagggtgacagaaacgaggaggtc

SEQ ID NO: 775712 - DNA, 120 bp, Artificial Sequence
  ENSG00000242802_4 (sequence is synthesized)
agagccgtgggccagggcgtgctacgagcgctggagagccggcagcctgagggacccagcctcagacacctcctccccgtcatggccaaggtcgtggtcctcagcccgggcaccctccag

SEQ ID NO: 775713 - DNA, 120 bp, Artificial Sequence
  ENSG00000242802_5 (sequence is synthesized)
gaggaccaggccaccctgctcagcaagcggctggtcgactggctgcgctacgccagcctccagcaagggctcccacactccggcggcttcttctccacgcccagggcccggcagccgggc

SEQ ID NO: 775714 - DNA, 120 bp, Artificial Sequence
  ENSG00000242802_6 (sequence is synthesized)
cccgtcaccgaggtggacggggcggtagccacagacttcttcacggtgctctccagcggccaccgcttcacagacgaccagtggctgaacgtgcaggccttctctatgctgcgggcgtgg

SEQ ID NO: 775715 - DNA, 120 bp, Artificial Sequence
  ENSG00000242802_7 (sequence is synthesized)
ctgctgcacagcggccccgagggcccgggcaccctggacacagatgacaggtcagagcaggagggctccactctgtcggtgatctccgccacctcctctgccggccgcctgctgccgccc

SEQ ID NO: 775716 - DNA, 120 bp, Artificial Sequence
  ENSG00000242802_8 (sequence is synthesized)
cgggagcggcttcgggaggtggccttcgagtactgccagcgcctcattgagcaaagtaaccgacgagccctgaggaagggggactccgacctgcagaaagcttgcctggtggaggccgtg

SEQ ID NO: 775717 - DNA, 120 bp, Artificial Sequence
  ENSG00000242802_9 (sequence is synthesized)
ctggtgctggacgtgctgtgccggcaggacccgtccttcctgtaccgaagtctctcctgcctgaaggccctgcacgggcgggtgcgcggggacccggcctctgtgcgggtgctgctgccc

SEQ ID NO: 775718 - DNA, 120 bp, Artificial Sequence
  ENSG00000242802_10 (sequence is synthesized)
ctcgcccacttcttcctgagccacggggaagcggctgcagtggactcggaagccgtctaccagcacctgttcaccaggatcccggtggagcagttccacagccccatgctggcctttgaa

SEQ ID NO: 775719 - DNA, 120 bp, Artificial Sequence
  ENSG00000242802_11 (sequence is synthesized)
ttcatccagttctgcagggacaacctccacctgttcagcgggcacctcagcaccctcagattgagcttccccaacctctttaagttcctggcctggaacagcccacccctcacctccgag

SEQ ID NO: 775720 - DNA, 120 bp, Artificial Sequence
  ENSG00000242802_12 (sequence is synthesized)
tttgtggcgctcctcccggccctggtggacgctggcacagccctggagatgctgcacgcgctgctggacctgccctgcttgacggcggtgctggacctgcagctcaggtcagcaccggct

SEQ ID NO: 775721 - DNA, 120 bp, Artificial Sequence
  ENSG00000242802_13 (sequence is synthesized)
gcatccgagaggccactctgggacacctctctcagggcccccagctgcctggaggccttccgggacccgcagttccagggtcttttccaatacctgctgcgccccaaggccagtggcgcc

SEQ ID NO: 775722 - DNA, 120 bp, Artificial Sequence
  ENSG00000242802_14 (sequence is synthesized)
actgagaggttggcgccactccaccagctgctgcagcccatggccggctgtgcccgcgtggcccagtgtgcccaggccgtgcccacgctgctgcaggcattcttctcagcagtgacccag

SEQ ID NO: 775723 - DNA, 120 bp, Artificial Sequence
  ENSG00000242802_15 (sequence is synthesized)
gtggctgacgggtccctgatcaaccagctggcgctgctgctcctgggcaggagcgactcgctctacccggccccagggtacgctgccggtgtgcacagtgtgctgagttctcagttcctg

SEQ ID NO: 775724 - DNA, 120 bp, Artificial Sequence
  ENSG00000242802_16 (sequence is synthesized)
gccctgtgtacgctgaaaccctccctggtggtggagctggcaagagacctgctggagttcctgggcagcgtgaatggtctctgcagcagggcgagcctcgtcaccagcgtggtgtgggcc

SEQ ID NO: 775725 - DNA, 120 bp, Artificial Sequence
  ENSG00000242802_17 (sequence is synthesized)
atcggcgagtacctgtcggtgacctacgatcggaggtgcaccgtggagcagatcaacaagttcttcgaagccctggaggctctgctattcgaggtcacccagtgccgcccctctgctgcc

SEQ ID NO: 775726 - DNA, 120 bp, Artificial Sequence
  ENSG00000242802_18 (sequence is synthesized)
ctgcccaggtgtcccccccaggtggtcaccgtgctgatgaccacgctgacgaagctggcctcccggagccaagatctgatccccagggcctctttattgctgtcaaagatgaggaccctg

SEQ ID NO: 775727 - DNA, 120 bp, Artificial Sequence
  ENSG00000242802_19 (sequence is synthesized)
gctcacagtccagccaccagctccacgcacagcgaggagggcgcggaagccatccgtacccgggccacagagctgctgaccctgctgaagatgcctagcgtggcccagtttgtgctcaca

SEQ ID NO: 775728 - DNA, 120 bp, Artificial Sequence
  ENSG00000242802_20 (sequence is synthesized)
cccagcacggaggtgtgcagcccccgctatcaccgcgatgccaacacggccctgcccctggccctgcgcacggtcagccggctggtggagagggaggccggcctcatgccagggtgaagg

SEQ ID NO: 775729 - DNA, 120 bp, Artificial Sequence
  ENSG00000242802_21 (sequence is synthesized)
gacagtggccagggacttcggtgcagattaagagcctgggcagccagcttgctactgaggccaggctgataggagctcaggagggcgcgggagtcctgggagaggaggcaaggcccacgg

SEQ ID NO: 775730 - DNA, 120 bp, Artificial Sequence
  ENSG00000242802_22 (sequence is synthesized)
tgggcttggcaccctcacagacacgcggggctggcccccctgctcaccctctgggctttgtctccgagccttttgctcccaggcaacactgagctgagctgaggggtgccatggagcggc

SEQ ID NO: 775731 - DNA, 120 bp, Artificial Sequence
  ENSG00000242802_23 (sequence is synthesized)
aggcttgaggccctgtggctgggtcgggtggaggctgctgggtctgtttcctagtcttttgtttttggacagttgatgggcaagaagagctgcagtaaaagtaaatctcctttaataagc

SEQ ID NO: 775732 - DNA, 120 bp, Artificial Sequence
  ENSG00000242802_24 (sequence is synthesized)
gtctgtatgaagagtgcgcgatcagttccgttacctgccctgcaccctggggagaggaccagggatgggaacccctggcagctgctgccagtcctggaggctcagcccggcgtgccactg

SEQ ID NO: 775733 - DNA, 120 bp, Artificial Sequence
  ENSG00000242802_25 (sequence is synthesized)
ctgctacagaaaccaggtcatttgtgcacagcccggaaggcagcggcgcgagttcccgggtgtggtcaccgctctgggtggtgcgcttgtcaatgccccttttgatgcccttgaatagcc

SEQ ID NO: 775734 - DNA, 120 bp, Artificial Sequence
  ENSG00000242802_26 (sequence is synthesized)
tgaagatgaaggggaccgggggagggttgcaagcgccatggcctatgcaggctgcggcctctggccattcggagggaaggccccagggagccacctgagtggagctcagaacactggatt

SEQ ID NO: 775735 - DNA, 120 bp, Artificial Sequence
  ENSG00000242802_27 (sequence is synthesized)
cgcgcgaaggggaggtgtctgggcgtgcggccccagccccgccaccttcctgggccctgtggtcccaccctccggactaccaaggcacagctgtgtcgcacgttccgcccggtgcctggg

SEQ ID NO: 775736 - DNA, 120 bp, Artificial Sequence
  ENSG00000242802_28 (sequence is synthesized)
acgggctcagccgccagggggcgccgccgccccgagagcctcacgccccgcccccaggctcaaactcttccccctccccactctggctccgcccccggtctcctcttttgctctggcccc

SEQ ID NO: 775737 - DNA, 120 bp, Artificial Sequence
  ENSG00000242802_29 (sequence is synthesized)
gcccacctcccctccggcctcggccccgcccccaatcccccatagctctgcgactaagaaaccacaggctgaaggcgactgcagggtcctgccccttgcccagcctcaggactatggagg

SEQ ID NO: 775738 - DNA, 120 bp, Artificial Sequence
  ENSG00000242802_30 (sequence is synthesized)
gggcgagtgacgcgcaaggaacggagcaggggacaccgtgcgggctcaggagctccccagatgcccgagccgaaccgcggggtcctcaccgccaggttccagcccaggaagcgctcgcct

SEQ ID NO: 775739 - DNA, 120 bp, Artificial Sequence
  ENSG00000242802_31 (sequence is synthesized)
gccccacagcctgggccttgggtcgcgttccgagctccaggacggctggtgtcccccgcggcctgcgatgacagcccagggccgctgagccggggccgcaggaaaggctggcgctggcag

SEQ ID NO: 775740 - DNA, 120 bp, Artificial Sequence
  ENSG00000242802_32 (sequence is synthesized)
gcgcttccgtcggcagcactgtgtttgtgtttccacgtggaaacagcagcgcacgtgtacaactgtgcataccaaggcgtgcgtgccagtgcgcgggtctcgggatcacttcccagtgcg

SEQ ID NO: 775741 - DNA, 120 bp, Artificial Sequence
  ENSG00000242802_33 (sequence is synthesized)
gtgcacgaccccgcctgcagcagtgggtgtgggggcgctgctgggctcatcccgaagctcagagagcgtggggctgcccctaggctcggaatgagtctcccactgagtccgcagctcccc

SEQ ID NO: 775742 - DNA, 120 bp, Artificial Sequence
  ENSG00000242802_34 (sequence is synthesized)
tcctgccctggggcggggcttccctgacctgaaggcgtcgggggtgtcctggctcccagctcccaggcactcgtggggccaccgcccaggccagctggtgctaagtccgcagcctgtgca

SEQ ID NO: 775743 - DNA, 120 bp, Artificial Sequence
  ENSG00000242802_35 (sequence is synthesized)
gcagcgcccggcttaggactgggagtgtgacttgaagggccgtcccgctcatccaagggacaaggaggagctcatggccacagggcctcggagggcatgaccccagcccagggaggagca

SEQ ID NO: 775744 - DNA, 120 bp, Artificial Sequence
  ENSG00000242802_36 (sequence is synthesized)
accttcaggtggcctccaggaggcagctgggaaaagggcaaagctcaccagctctcaactttttttttaaataaactgaaattttagaatagtttttcagatttacagaaaagatgataa

SEQ ID NO: 775745 - DNA, 84 bp, Artificial Sequence
  ENSG00000242802_37 (sequence is synthesized)
attttagaatagtttttcagatttacagaaaagatgataaaccttagaaacattatatgctaagtgaaagtgagaagtgacagc

SEQ ID NO: 775746 - DNA, 120 bp, Artificial Sequence
  ENSG00000242802_38 (sequence is synthesized)
cgcgagttccgggtgggcgtgggctctgtgggccccgcactcggagccgccggctagccccgccagcctgggcagtgaggggcttagcacctggaccagcagctgctgtgctcgatttct

SEQ ID NO: 775747 - DNA, 71 bp, Artificial Sequence
  ENSG00000242802_39 (sequence is synthesized)
ccctcccctccgtgggttcctgcgcagtccgagcctccccaacgagtgttgccacctgctcagggcaccca

SEQ ID NO: 775748 - DNA, 87 bp, Artificial Sequence
  ENSG00000242802_40 (sequence is synthesized)
tttggagcagggcacgggactggcaggcagctctacctgcagcccctgtgcaggatccactgggtgaaagccagctgggctcctgag

SEQ ID NO: 775749 - DNA, 60 bp, Artificial Sequence
  ENSG00000242802_41 (sequence is synthesized)
cagggcacgggactggcaggcagctctacctgcagcccctgtgcaggatccactgggtga

SEQ ID NO: 775750 - DNA, 87 bp, Artificial Sequence
  ENSG00000242802_42 (sequence is synthesized)
atgtgggtggggccagatacaacccactcgggtccccttccacaccgggatgctttgtttgttcgctctttgcaataaatcttgctg

SEQ ID NO: 775751 - DNA, 120 bp, Artificial Sequence
  ENSG00000242802_43 (sequence is synthesized)
ccagcgctggtgccagccttctccccagtgagaacagtttctctgaggctggcagtcttctgtgttcctctatcggagggtgcagcatacacctaccactcagacgcttcccgggtttct

SEQ ID NO: 775752 - DNA, 120 bp, Artificial Sequence
  ENSG00000242802_44 (sequence is synthesized)
ccccttcagtggcttcggcaccacccctagctgggccctcagcagcctcagaccctgccacccccacccacagccccacacccagccccaggcacttctctctgcttctcaagaacattc

SEQ ID NO: 775753 - DNA, 120 bp, Artificial Sequence
  ENSG00000242802_45 (sequence is synthesized)
ccgtccttctttctgccgagcctgtcctcttcagggttagctcaggtccctcttccccgtcttgtcccctggggtccttctctccaaaggcctgatgcatgcaggcccatcctggttcca

SEQ ID NO: 775754 - DNA, 120 bp, Artificial Sequence
  ENSG00000242802_46 (sequence is synthesized)
ccccctcctcgctgctcctgacccctacaccggggaccctccttcttccccccccaacacctgaccagtcctcccctgcaaagccacctctaggacagggtgtgtctgtcacccttggcc

SEQ ID NO: 775755 - DNA, 120 bp, Artificial Sequence
  ENSG00000242802_47 (sequence is synthesized)
acttgccaagggcagcccctgcaccctggagtgcctcacccgtcttcacgcccaggcctggagcctcccatgccaagcccttcctggcacccgaggtgctgtgatattagggacacctgc

SEQ ID NO: 775756 - DNA, 120 bp, Artificial Sequence
  ENSG00000242802_48 (sequence is synthesized)
cccaacctctttaaggtatatttgggcatccctgggtgccagggcaggggcatggtaagtccctggggctcctcccctctttccagcggggttcagggcgagtcctggctgagcatagag

SEQ ID NO: 775757 - DNA, 120 bp, Artificial Sequence
  ENSG00000242802_49 (sequence is synthesized)
ccctgtgagtcccgggcctggaatgcggtgtgcagggtgaggtggggatctggggtgtccctgcagcgtcacgtgattgacggtgctgtccaagaactcccttgtgggtgttttggagag

SEQ ID NO: 775758 - DNA, 120 bp, Artificial Sequence
  ENSG00000242802_50 (sequence is synthesized)
tttttgatggattgctgtgccagatgttggtaatttttaaacttttaaatagagaaataaacagactctttttgctgtgtccctagcccaggaaacctgaaagtctaggaaccagcacct

SEQ ID NO: 775759 - DNA, 120 bp, Artificial Sequence
  ENSG00000242802_51 (sequence is synthesized)
tccaaagaatgtgccatagtgtgtgtgactcacgagctgtccgtgtccctgggcgagggagaccaagtgccgcttccccagcgtcccagcgtaggacgcctcggagcccttggtgtcctg

SEQ ID NO: 775760 - DNA, 120 bp, Artificial Sequence
  ENSG00000242802_52 (sequence is synthesized)
ccgggacccgcagttccagggtcttttccaatacctgctgcgccccaaggccagtggcgccactgagaggtacggggccctagggccagggggccaccagtggctcagagagcccggcca

SEQ ID NO: 775761 - DNA, 120 bp, Artificial Sequence
  ENSG00000242802_53 (sequence is synthesized)
cagccactggggtggggctcactgctcagccctaggctgaggccagggtgctttgtgtcccacacaaggctgcgtccccgtcatcaccattatagaggccctgcttctgcaccacgggtc

SEQ ID NO: 775762 - DNA, 120 bp, Artificial Sequence
  ENSG00000242802_54 (sequence is synthesized)
tgccgggggcggggcctggtctcagctctctctgctgcccacatcaaccctcataagcttggaggttggccctgtgggtgctccattttgcagatggacaaaccgagcctgagcccagga

SEQ ID NO: 775763 - DNA, 120 bp, Artificial Sequence
  ENSG00000242802_55 (sequence is synthesized)
agcaggaggcctgggaccggccacaggcctcctgccctcagcccacgccagcctttgtcccgatggctttactgtcccgggtgtgctgacgccaggggtctccccaaacccaggggagca

SEQ ID NO: 775764 - DNA, 120 bp, Artificial Sequence
  ENSG00000242802_56 (sequence is synthesized)
ggaggtcccgagaggcgatgagtgaggatgggagcgggctcagctgtgcgagagggagcagtggcgacgtggccccggcctgcagtcaccaggtcggggagcgggcagcactcacggcca

SEQ ID NO: 775765 - DNA, 120 bp, Artificial Sequence
  ENSG00000242802_57 (sequence is synthesized)
cggggaggcccgagggtttgggacgctgcaggattctgttttctgagaaaagtcggccagcatcccaacaacccaggcatctgtaggattcaacctcacctccccatgccaccccaccca

SEQ ID NO: 775766 - DNA, 120 bp, Artificial Sequence
  ENSG00000242852_0 (sequence is synthesized)
gcaaacggcgagggcgtggctaccagccgctgcgctccgctctggggtctcctcaccccagaaggccctcaggtggaggaagggcctcaggtggaggtaggacctgtgctggccgcggga

SEQ ID NO: 775767 - DNA, 120 bp, Artificial Sequence
  ENSG00000242852_1 (sequence is synthesized)
gaggtaaacagaacaccaggacatcccagagtctgggaaatggactcagtggtctttgaggatgtggctgtgaacttcacccaggaggagtgggctttgctgggtccctctcagaagaaa

SEQ ID NO: 775768 - DNA, 120 bp, Artificial Sequence
  ENSG00000242852_2 (sequence is synthesized)
ctctacagagatgtgatgcaagaaacctttgttaacttggcctctataggggaaaactgggaggagaagaacattgaagatcacaaaaatcaggggagaaagctaagaagtcatatggta

SEQ ID NO: 775769 - DNA, 120 bp, Artificial Sequence
  ENSG00000242852_3 (sequence is synthesized)
gagaggctctgtgaaaggaaagaaggtagtcagtttggagaaaccatcagtcagactccaaatcctaaaccaaacaagaaaacttttactagagtaaaaccatatgaatgtagtgtgtgt

SEQ ID NO: 775770 - DNA, 120 bp, Artificial Sequence
  ENSG00000242852_4 (sequence is synthesized)
ggaaaggactatatgtgtcattcatctcttaataggcacatgagatctcatactgaacatagatcatatgaatatcacaaatatggagagaaatcatatgaatgtaaggaatgtgggaaa

SEQ ID NO: 775771 - DNA, 120 bp, Artificial Sequence
  ENSG00000242852_5 (sequence is synthesized)
agattcagctttcgaagttcatttcgaatacatgaaagaactcacactggagagaaaccctataaatgtaaacagtgtggtaaggctttcagttggcccagttcctttcaaatacatgaa

SEQ ID NO: 775772 - DNA, 120 bp, Artificial Sequence
  ENSG00000242852_6 (sequence is synthesized)
agaactcatactggagagaaaccttatgaatgtaaggaatgtgggaaggccttcatttatcacacaacctttcgaggacacatgagaatgcacacaggggagaaaccctataaatgtaaa

SEQ ID NO: 775773 - DNA, 120 bp, Artificial Sequence
  ENSG00000242852_7 (sequence is synthesized)
agaatgcacacaggggagaaaccctataaatgtaaagaatgcgggaaaacgttcagtcatcccagttcttttcgaaatcatgaaagaactcactctggagagaaaccctatgaatgtaaa

SEQ ID NO: 775774 - DNA, 120 bp, Artificial Sequence
  ENSG00000242852_8 (sequence is synthesized)
caaatacatgaaaggactcacactggggaaaaaccctatcagtgtaagcaatgtggtaaagctcttagttgtcccacatcctttcgaagtcatgaaaggattcacactggagaaaaaccc

SEQ ID NO: 775775 - DNA, 120 bp, Artificial Sequence
  ENSG00000242852_9 (sequence is synthesized)
tataaatgtaaaaaatgtgggaaagccttcagttttcctagttcctttagaaaacatgaaagaattcatacaggagagaaaccctatgattgtaaggaatgtgggaaagcattcatttct

SEQ ID NO: 775776 - DNA, 120 bp, Artificial Sequence
  ENSG00000242852_10 (sequence is synthesized)
cttccaagctatcgaagacatatgataatgcacactggaaatggaccttataaatgcaaggaatgtgggaaagcctttgattgtcctagttcttttcaaatccatgaacgaactcacact

SEQ ID NO: 775777 - DNA, 120 bp, Artificial Sequence
  ENSG00000242852_11 (sequence is synthesized)
ggagagaaaccctatgaatgtaaacagtgtggtaaagccttcagttgttccagttcctttcgaatgcatgaaagaactcacactggagagaaaccccatgaatgtaaacaatgtggtaaa

SEQ ID NO: 775778 - DNA, 78 bp, Artificial Sequence
  ENSG00000242852_12 (sequence is synthesized)
gtgtggtaaagccttcagttgttccagttcctttcgaatgcatgaaagaattcacactggagagaaaccctatgaatg

SEQ ID NO: 775779 - DNA, 87 bp, Artificial Sequence
  ENSG00000242852_13 (sequence is synthesized)
ctttcgaatgcatgaaagaatgtgtggtaaagcctttagtttttctagttcctttcggatgcatgaaaggactcacactggagagaa

SEQ ID NO: 775780 - DNA, 120 bp, Artificial Sequence
  ENSG00000242852_14 (sequence is synthesized)
caatgtggtaaagccttcagttgttccagttcctttcgaatgcatgaaaggactcacactggggagaaaccctatgaatgtaaacagtgtggtaaggcgtttagttgttccagttccatt

SEQ ID NO: 775781 - DNA, 120 bp, Artificial Sequence
  ENSG00000242852_15 (sequence is synthesized)
tgaaaggactcacactggagagaaaccttatgagtgtaaacaatgtggtaaggccttcagttgttctagttctgttcgaatgcatgaaaggactcacactggagtgaaaccctatgaatg

SEQ ID NO: 775782 - DNA, 120 bp, Artificial Sequence
  ENSG00000242852_16 (sequence is synthesized)
tatgaatgtaaacaatgtgacaaagccttcagttgctcacgttcctttcgaatccatgaacgaactcacactggagagaaaccctatgcatgtcaacaatgtggtaaagccttcaagtgt

SEQ ID NO: 775783 - DNA, 120 bp, Artificial Sequence
  ENSG00000242852_17 (sequence is synthesized)
tcaagtgttcccgttcctttcgaatacatgaaagagttcatagtggagagtaaccctatgtatataagcaatatggcaaagttttcagttgtcctatttccttttttttttttttttttt

SEQ ID NO: 775784 - DNA, 120 bp, Artificial Sequence
  ENSG00000242852_18 (sequence is synthesized)
ataccttcagttatttacatgtgaatatgaggaagcattcatactggacaggaaaccctgcgaatgtaggcagtgtgggaaaaccttcaatggtcatatgaccttttaaggaccatgaga

SEQ ID NO: 775785 - DNA, 120 bp, Artificial Sequence
  ENSG00000242852_19 (sequence is synthesized)
aggcatatgaagtgtaaagaattttcatatgccctataaatgtaaagaatttataaccttaaaaatgtaaagaatgtggaaaaccctataaatgtaaaaaatgtagaaaaacctttattt

SEQ ID NO: 775786 - DNA, 120 bp, Artificial Sequence
  ENSG00000242852_20 (sequence is synthesized)
gtcttagtttacttggaaaccatgaacaaactcacactggaaagcgacttcttaaatatagacattgtgagaaagccttcagttggcccacatactaatatgtgagaatgcagactggat

SEQ ID NO: 775787 - DNA, 120 bp, Artificial Sequence
  ENSG00000242852_21 (sequence is synthesized)
agaaatcctataaaagtgagatatagcaatgttttccattttaacaaatgctcatgtgatactcccttatgtgtgaaacttcaatctcatgttgaaactcccactagggaggtactgtat

SEQ ID NO: 775788 - DNA, 120 bp, Artificial Sequence
  ENSG00000242852_22 (sequence is synthesized)
aaatgtagataatatgggaaagcctgatgcaaattaattcatgtatattgttctagaaaattcacaacatgtcagaaatgtgataaaacatattatcagttactgattcttaaaatggat

SEQ ID NO: 775789 - DNA, 120 bp, Artificial Sequence
  ENSG00000242852_23 (sequence is synthesized)
ctctgaattatggatttctattactttcacaaaagaacactgagatgagataattctgtaagctcttatacagttgtacacaagttgaattgatagtattttttcattaaatcagtttct

SEQ ID NO: 775790 - DNA, 120 bp, Artificial Sequence
  ENSG00000242852_24 (sequence is synthesized)
gaaattttgtctttccatattgaagtctgttagattcatgagtgaattgaagtgtatttataataagctagcagttttgatttttatgtattttttagttgtgctgtaatgggccatcaa

SEQ ID NO: 775791 - DNA, 120 bp, Artificial Sequence
  ENSG00000242852_25 (sequence is synthesized)
aaaatgacaatttggtaatttttaggatttcctactggccttatgtggcaggtactagatatcattatatgtatttcatctttctgaccaaaagaggcttttttagaggaagacagagta

SEQ ID NO: 775792 - DNA, 120 bp, Artificial Sequence
  ENSG00000242852_26 (sequence is synthesized)
cccttttttctattttttatgctaaaaaataatcataataaatttttgagtctgcaaagtttatcatacagtatactctctcattggaattattattttcatcttctgtttgctgtttgt

SEQ ID NO: 775793 - DNA, 120 bp, Artificial Sequence
  ENSG00000242852_27 (sequence is synthesized)
aattccttctggctgtgatttgaataatagactttgtattaataagagagatctgagatagaaccatataacctatagctggaaatggctgtcctggattgtgttaacatgggttatgtt

SEQ ID NO: 775794 - DNA, 120 bp, Artificial Sequence
  ENSG00000242852_28 (sequence is synthesized)
gtgacctatgttttctataatctaaccttttatggctccacggtataattcaccaatagcctacttgcaggagatatggaaggcagaagtgaagaaagcattagtcaggttttatagcca

SEQ ID NO: 775795 - DNA, 120 bp, Artificial Sequence
  ENSG00000242852_29 (sequence is synthesized)
ccatatgtggagacagatggatgcataggagcttcagggacacctgcttccaccacattgtcctgatcctttgctctgccaattgagagtattcttagaaccaccactaactgcttgact

SEQ ID NO: 775796 - DNA, 120 bp, Artificial Sequence
  ENSG00000242852_30 (sequence is synthesized)
tcttagaaccaccactaactgcttgactgccatattttccttccttccttccttctttctttccctttccctttcttttctttctttactttctttttccgagatggagtcttgctctgt

SEQ ID NO: 775797 - DNA, 120 bp, Artificial Sequence
  ENSG00000242852_31 (sequence is synthesized)
gctgccatattttcaaagatgtagttttccacaaattgtcttcaaaagttctactcaaagatgcactgcagtttggattttcctagaaactctaatgtgtccaccaggcaaccatttaga

SEQ ID NO: 775798 - DNA, 120 bp, Artificial Sequence
  ENSG00000242852_32 (sequence is synthesized)
ctcttaaggttgggaatattctctgatgctctgactcacctcatctctaggttgaatttatccaaggtattatttatgtaataaacaccatgttttgttaacagtaccagtgactatgtg

SEQ ID NO: 775799 - DNA, 120 bp, Artificial Sequence
  ENSG00000242852_33 (sequence is synthesized)
tttctgattccaccgtgacaactacagtggtgcagtcaaaaagaactacatgggtgtctgcttctccactgcactgtgcagggaatgcacttacccagtcctacagtgtaagaataagca

SEQ ID NO: 775800 - DNA, 120 bp, Artificial Sequence
  ENSG00000242852_34 (sequence is synthesized)
ccttcctaatatcaagcagattgtcggtgtttcctattacagttgaatgtcatctctcagtacattttcaattttgtttcattatatgtgattaaaaaccatgtgtatgtttttgttgaa

SEQ ID NO: 775801 - DNA, 120 bp, Artificial Sequence
  ENSG00000242852_35 (sequence is synthesized)
caaaagcttctgtagatgtttcttagaaatattttattaacttttcaaataacttgtatgctatcacttgtctatttaattttctgcaaggatatattaaaatattccattgcaattata

SEQ ID NO: 775802 - DNA, 120 bp, Artificial Sequence
  ENSG00000242852_36 (sequence is synthesized)
gtggcgccgctgcagtccctgtctgctgtgaccagctctgaccaaaggaggcgtagtaaggaagccaggacacctggaacccgggatacggactcagtggtctttgaggatgtggctgtg

SEQ ID NO: 775803 - DNA, 120 bp, Artificial Sequence
  ENSG00000242852_37 (sequence is synthesized)
tttctgcagaggacgccacaggtggcgccgctgcagtccctgtctgctgtgaccagctctgaccaaaggaggcgtagtaaggaagccaggacacctggaacccgggatacgtgcgggtcc

SEQ ID NO: 775804 - DNA, 120 bp, Artificial Sequence
  ENSG00000242852_38 (sequence is synthesized)
cagagcgacagaggctgcggcagagccacctagcgacgttcgaggcaggagagacacaaactggaaatcgcgccaccgtatccacgcgcctttgtacagggcggccccacccaccgctcc

SEQ ID NO: 775805 - DNA, 120 bp, Artificial Sequence
  ENSG00000242852_39 (sequence is synthesized)
ggcggcgtctccaattggacagtttgtgaggttccaccccctgttgcctgagtcacatctcagacggaggtcaggtagctgagcgatccagcttccacttttgtccctgaaactgtcctg

SEQ ID NO: 775806 - DNA, 120 bp, Artificial Sequence
  ENSG00000242852_40 (sequence is synthesized)
gaagcttctgaacggggacataggtgtgcgcgcagggaatgccagacaagagtttccagataaagcgaaccccttgatgactgactctttgaggagtaaatccacagcaaaagggccctg

SEQ ID NO: 775807 - DNA, 120 bp, Artificial Sequence
  ENSG00000242852_41 (sequence is synthesized)
gaggcaaggccatactggatcaggagagtcagatattctccagaggacagtggcttggcatcatgctgccaggacactcagaactgtgaccccgtaggttcacagagaccaggcaatgtt

SEQ ID NO: 775808 - DNA, 88 bp, Artificial Sequence
  ENSG00000242852_42 (sequence is synthesized)
tacatttttaattttaagttttgagttacatgagatattttgatgtaagcatgcaatgcctaataatcacatcatggtaaatggggaa

SEQ ID NO: 775809 - DNA, 120 bp, Artificial Sequence
  ENSG00000242866_0 (sequence is synthesized)
gccctgccctcacctggctatcccacacaggtgagaataaccagaactcacctccggtaccagtgttcacttggaaacatggctctcagcctctggcccctgctgctgctgctgctgctg

SEQ ID NO: 775810 - DNA, 120 bp, Artificial Sequence
  ENSG00000242866_1 (sequence is synthesized)
ctgctgctgctgtcctttgcagtgactctggcccctactgggcctcattccctggaccctggtctctccttcctgaagtcattgctctccactctggaccaggctccccagggctccctg

SEQ ID NO: 775811 - DNA, 120 bp, Artificial Sequence
  ENSG00000242866_2 (sequence is synthesized)
agccgctcacggttctttacattcctggccaacatttcttcttcctttgagcctgggagaatgggggaaggaccagtaggagagcccccacctctccagccgcctgctctgcggctccat

SEQ ID NO: 775812 - DNA, 120 bp, Artificial Sequence
  ENSG00000242866_3 (sequence is synthesized)
gattttctagtgacactgagaggtagccccgactgggagccaatgctagggctgctaggggatatgctggcactgctgggacaggagcagactccccgagatttcctggtgcaccaggca

SEQ ID NO: 775813 - DNA, 120 bp, Artificial Sequence
  ENSG00000242866_4 (sequence is synthesized)
ggggtgctgggtggacttgtggaggtgctgctgggagccttagttcctgggggcccccctaccccaactcggcccccatgcacccgtgatgggccgtctgactgtgtcctggctgctgac

SEQ ID NO: 775814 - DNA, 120 bp, Artificial Sequence
  ENSG00000242866_5 (sequence is synthesized)
tggttgccttctctgctgctgttgttagagggcacacgctggcaagctctggtgcaggtgcagcccagtgtggaccccaccaatgccacaggcctcgatgggagggaggcagctcctcac

SEQ ID NO: 775815 - DNA, 120 bp, Artificial Sequence
  ENSG00000242866_6 (sequence is synthesized)
tttttgcagggtctgttgggtttgcttaccccaacaggggagctaggctccaaggaggctctttggggcggtctgctacgcacagtgggggcccccctctatgctgcctttcaggagggg

SEQ ID NO: 775816 - DNA, 120 bp, Artificial Sequence
  ENSG00000242866_7 (sequence is synthesized)
ctgctccgtgtcactcactccctgcaggatgaggtcttctccattttggggcagccagagcctgataccaatgggcagtgccagggaggtaaccttcaacagctgctcttatggggcgtc

SEQ ID NO: 775817 - DNA, 120 bp, Artificial Sequence
  ENSG00000242866_8 (sequence is synthesized)
cggcacaacctttcctgggatgtccaggcgctgggctttctgtctggatcaccacccccaccccctgccctccttcactgcctgagcacgggcgtgcctctgcccagagcttctcagccg

SEQ ID NO: 775818 - DNA, 120 bp, Artificial Sequence
  ENSG00000242866_9 (sequence is synthesized)
tcagcccacatcagcccacgccaacggcgagccatcactgtggaggccctctgtgagaaccacttaggcccagcaccaccctacagcatttccaacttctccatccacttgctctgccag

SEQ ID NO: 775819 - DNA, 120 bp, Artificial Sequence
  ENSG00000242866_10 (sequence is synthesized)
cacaccaagcctgccactccacagccccatcccagcaccactgccatctgccagacagctgtgtggtatgcagtgtcctgggcaccaggtgcccaaggctggctacaggcctgccacgac

SEQ ID NO: 775820 - DNA, 120 bp, Artificial Sequence
  ENSG00000242866_11 (sequence is synthesized)
cagtttcctgatgagtttttggatgcgatctgcagtaacctctccttttcagccctgtctggctccaaccgccgcctggtgaagcggctctgtgctggcctgctcccaccccctaccagc

SEQ ID NO: 775821 - DNA, 120 bp, Artificial Sequence
  ENSG00000242866_12 (sequence is synthesized)
tgccctgaaggcctgccccctgttcccctcaccccagacatcttttggggctgcttcttggagaatgagactctgtgggctgagcgactgtgtggggaggcaagtctacaggctgtgccc

SEQ ID NO: 775822 - DNA, 120 bp, Artificial Sequence
  ENSG00000242866_13 (sequence is synthesized)
cccagcaaccaggcttgggtccagcatgtgtgccagggccccaccccagatgtcactgcctccccaccatgccacattggaccctgtggggaacgctgcccggatgggggcagcttcctg

SEQ ID NO: 775823 - DNA, 120 bp, Artificial Sequence
  ENSG00000242866_14 (sequence is synthesized)
gtgatggtctgtgccaatgacaccatgtatgaggtcctggtgcccttctggccttggctagcaggccaatgcaggataagtcgtgggggcaatgacacttgcttcctagaagggctgctg

SEQ ID NO: 775824 - DNA, 120 bp, Artificial Sequence
  ENSG00000242866_15 (sequence is synthesized)
ggcccccttctgccctctctgccaccactgggaccatccccactctgtctgacccctggccccttcctccttggcatgctatcccagttgccacgctgtcagtcctctgtcccagctctt

SEQ ID NO: 775825 - DNA, 120 bp, Artificial Sequence
  ENSG00000242866_16 (sequence is synthesized)
gctcaccccacacgcctacactatctcctccgcctgctgaccttcctcttgggtccaggggctgggggcgctgaggcccaggggatgctgggtcgggccctactgctctccagtctccca

SEQ ID NO: 775826 - DNA, 120 bp, Artificial Sequence
  ENSG00000242866_17 (sequence is synthesized)
gacaactgctccttctgggatgcctttcgcccagagggccggcgcagtgtgctacggacgattggggaatacctggaacaagatgaggagcagccaaccccatcaggctttgaacccact

SEQ ID NO: 775827 - DNA, 120 bp, Artificial Sequence
  ENSG00000242866_18 (sequence is synthesized)
gtcaaccccagctctggtataagcaagatggagctgctggcctgctttagtcctgtgctgtgggatctgctccagagggaaaagagtgtttgggccctgcagattctagtgcaggcgtac

SEQ ID NO: 775828 - DNA, 120 bp, Artificial Sequence
  ENSG00000242866_19 (sequence is synthesized)
ctgcatatgcccccagaaaacctccagcagctggtgctttcagcagagagggaggctgcacagggcttcctgacactcatgctgcaggggaagctgcaggggaagctgcaggtaccacca

SEQ ID NO: 775829 - DNA, 120 bp, Artificial Sequence
  ENSG00000242866_20 (sequence is synthesized)
tccgaggagcaggccctgggtcgcctgacagccctgctgctccagcggtacccacgcctcacctcccagctcttcattgacctgtcaccactcatccctttcttggctgtctctgacctg

SEQ ID NO: 775830 - DNA, 120 bp, Artificial Sequence
  ENSG00000242866_21 (sequence is synthesized)
atgcgcttcccaccatccctgttagccaacgacagtgtcctggctgccatccgggattacagcccaggaatgaggcctgaacagaaggaggctctggcaaagcgactgctggcccctgaa

SEQ ID NO: 775831 - DNA, 120 bp, Artificial Sequence
  ENSG00000242866_22 (sequence is synthesized)
tggaggatagctggccagcagcaggtctggggccagggcatgcccgccatgtgctgcgcagcctggtaaaccagagtgtccaggatggtgaggagcaggtacgcaggcttgggcccctcg

SEQ ID NO: 775832 - DNA, 120 bp, Artificial Sequence
  ENSG00000242866_23 (sequence is synthesized)
cctgtttcctgagccctgaggagctgcagagcctagtgcccctgagtgatccaacggggccagtagaacgggggctgctggaatgtgcagccaatgggaccctcagcccagaaggacggg

SEQ ID NO: 775833 - DNA, 120 bp, Artificial Sequence
  ENSG00000242866_24 (sequence is synthesized)
tggcatatgaacttctgggtgtgttgcgctcatctggaggagcggtgctgagcccccgggagctgcgggtctgggcccctctcttctctcagctgggcctccgcttccttcaggagctgt

SEQ ID NO: 775834 - DNA, 120 bp, Artificial Sequence
  ENSG00000242866_25 (sequence is synthesized)
cagagccccagcttagagccatgcttcctgtcctgcagggaactagtgttacacctgctcaggctgtcctgctgcttggacggctccttcctaggcacgatctatccctggaggaactct

SEQ ID NO: 775835 - DNA, 120 bp, Artificial Sequence
  ENSG00000242866_26 (sequence is synthesized)
gctccttgcaccttctgctaccaggcctcagcccccagacactccaggccatccctaggcgagtcctggtcggggcttgttcctgcctggcccctgaactgtcacgcctctcagcctgcc

SEQ ID NO: 775836 - DNA, 120 bp, Artificial Sequence
  ENSG00000242866_27 (sequence is synthesized)
agaccgcagcactgctgcagacctttcgggttaaagatggtgttaaaaatatgggtacaacaggtgctggtccagctgtgtgtatccctggtcagcctattcccaccacctggccagact

SEQ ID NO: 775837 - DNA, 120 bp, Artificial Sequence
  ENSG00000242866_28 (sequence is synthesized)
gcctgcttcccctgctcccattaaagctgctacaactggattccttggctcttctggcaaatcgaagacgctactgggagctgccctggtctgagcagcaggcacagtttctctggaaga

SEQ ID NO: 775838 - DNA, 120 bp, Artificial Sequence
  ENSG00000242866_29 (sequence is synthesized)
agatgcaagtacccaccaaccttaccctcaggaatctgcaggctctgggcaccctggcaggaggcatgtcctgtgagtttctgcagcagatcaactccatggtagacttccttgaagtgg

SEQ ID NO: 775839 - DNA, 120 bp, Artificial Sequence
  ENSG00000242866_30 (sequence is synthesized)
tgcacatgatctatcagctgcccactagagttcgagggagcctgagggcctgtatctgggcagagctacagcggaggatggcaatgccagaaccagaatggacaactgtagggccagaac

SEQ ID NO: 775840 - DNA, 120 bp, Artificial Sequence
  ENSG00000242866_31 (sequence is synthesized)
tgaacgggctggatagcaagctactcctggacttaccgatccagttgatggacagactatccaatgaatccattatgttggtggtggagctggtgcaaagagctccagagcagctgctgg

SEQ ID NO: 775841 - DNA, 120 bp, Artificial Sequence
  ENSG00000242866_32 (sequence is synthesized)
cactgacccccctccaccaggcagccctggcagagagggcactacaaaacctggctccaaaggagactccagtctcaggggaagtgctggagaccttaggccctttggttggattcctgg

SEQ ID NO: 775842 - DNA, 120 bp, Artificial Sequence
  ENSG00000242866_33 (sequence is synthesized)
ggacagagagcacacgacagatccccctacagatcctgctgtcccatctcagtcagctgcaaggcttctgcctaggagagacatttgccacagagctgggatggctgctattgcaggagt

SEQ ID NO: 775843 - DNA, 120 bp, Artificial Sequence
  ENSG00000242866_34 (sequence is synthesized)
ctgttcttgggaaaccagagttgtggagccaggatgaagtagagcaagctggacgcctagtattcactctgtctactgaggcaatttccttgatccccagggaggccttgggtccagaga

SEQ ID NO: 775844 - DNA, 120 bp, Artificial Sequence
  ENSG00000242866_35 (sequence is synthesized)
ccctggagcggcttctagaaaagcagcagagctgggagcagagcagagttggacagctgtgtagggagccacagcttgctgccaagaaagcagccctggtagcaggggtggtgcgaccag

SEQ ID NO: 775845 - DNA, 120 bp, Artificial Sequence
  ENSG00000242866_36 (sequence is synthesized)
ctgctgaggatcttccagaacctgtgccaaattgtgcagatgtacgagggacattcccagcagcctggtctgcaacccagattgcagagatggagctctcagactttgaggactgcctga

SEQ ID NO: 775846 - DNA, 120 bp, Artificial Sequence
  ENSG00000242866_37 (sequence is synthesized)
cattatttgcaggagacccaggacttgggcctgaggaactgcgggcagccatgggcaaagcaaaacagttgtggggtcccccccggggatttcgtcctgagcagatcctgcagcttggta

SEQ ID NO: 775847 - DNA, 120 bp, Artificial Sequence
  ENSG00000242866_38 (sequence is synthesized)
ggctcttaataggtctaggagatcgggaactacaggagctgatcctagtggactggggagtgctgagcaccctggggcagatagatggctggagcaccactcagctccgcattgtggtct

SEQ ID NO: 775848 - DNA, 120 bp, Artificial Sequence
  ENSG00000242866_39 (sequence is synthesized)
ccagtttcctacggcagagtggtcggcatgtgagccacctggacttcgttcatctgacagcgctgggttatactctctgtggactgcggccagaggagctccagcacatcagcagttggg

SEQ ID NO: 775849 - DNA, 120 bp, Artificial Sequence
  ENSG00000242866_40 (sequence is synthesized)
agttcagccaagcagctctcttcctcggcaccctgcatctccagtgctctgaggaacaactggaggttctggcccacctacttgtactgcctggtgggtttggcccaatcagtaactggg

SEQ ID NO: 775850 - DNA, 120 bp, Artificial Sequence
  ENSG00000242866_41 (sequence is synthesized)
ggcctgagatcttcactgaaattggcaccatagcagctgggatcccagacctggctctttcagcactgctgcggggacagatccagggcgttactcctcttgccatttctgtcatccctc

SEQ ID NO: 775851 - DNA, 120 bp, Artificial Sequence
  ENSG00000242866_42 (sequence is synthesized)
ctcctaaatttgctgtggtgtttagtcccatccaactatctagtctcaccagtgctcaggctgtggctgtcactcctgagcaaatggcctttctgagtcctgagcagcgacgagcagttg

SEQ ID NO: 775852 - DNA, 120 bp, Artificial Sequence
  ENSG00000242866_43 (sequence is synthesized)
catgggcccaacatgagggaaaggagagcccagaacagcaaggtcgaagtacagcctggggcctccaggactggtcacgaccttcctggtccctggtattgactatcagcttccttggcc

SEQ ID NO: 775853 - DNA, 120 bp, Artificial Sequence
  ENSG00000242866_44 (sequence is synthesized)
acctgctatgagcctgtctctacagtagaaggagattgtggggagagaaatcttaagtcataatgaataaagtgcaaacagaagtgcatcctgattattttcagaagctgatgaggaata

SEQ ID NO: 775854 - DNA, 120 bp, Artificial Sequence
  ENSG00000242866_45 (sequence is synthesized)
atgcgcttcccaccatccctgttagccaacgacagtgtacagcagggctacagagggtcagaggaaaacagtttggaggaagacaaagggttaagacccatgactcctcgcagcctggct

SEQ ID NO: 775855 - DNA, 120 bp, Artificial Sequence
  ENSG00000242866_46 (sequence is synthesized)
gtggcaaggaggatgagataatcagggataccggctctttctggttgggaggaaggcatcttccctgaggccagggaaggcctttcatacctccccacttacacacacacacacacacac

SEQ ID NO: 775856 - DNA, 120 bp, Artificial Sequence
  ENSG00000242866_47 (sequence is synthesized)
ttaaagatggtgttaaaaatatgggtacaacaggtgctggtccagctgtgtgtatccctggtcaggtaagtgtgagatctcccaactgagctcctctccccattctggggcagtttcata

SEQ ID NO: 775857 - DNA, 120 bp, Artificial Sequence
  ENSG00000242866_48 (sequence is synthesized)
tggctggtgctacctcccacactaccctgcagtggccctgagagttctggttagctctgtgcccattagcagccctccccagtgccagatgcaggacagcatgatccactcacattgtcc

SEQ ID NO: 775858 - DNA, 120 bp, Artificial Sequence
  ENSG00000242866_49 (sequence is synthesized)
tagactaatgtcaaagctggaagggcctgagaaatcttccaggccacccaccctgctttcagatgaaaagaccaaggctgggagaagctaagggactttgtttgcctggtgcctaactag

SEQ ID NO: 775859 - DNA, 120 bp, Artificial Sequence
  ENSG00000242866_50 (sequence is synthesized)
cagcaacacttgaccacagcagcctgcagtgtgaggctcttaggcgtttattgctacagtggcaaatgccattccacttctgtcctagctttggtccctttccacccccatggttccttt

SEQ ID NO: 775860 - DNA, 120 bp, Artificial Sequence
  ENSG00000242866_51 (sequence is synthesized)
tcctccctcaatgtagtctaccttctttacctatcccttagccctatttggccagcttatccctactatcctttatttgattgtttgagatacagtctcactctgttgcccaggctgcag

SEQ ID NO: 775861 - DNA, 120 bp, Artificial Sequence
  ENSG00000242866_52 (sequence is synthesized)
gtggcatgatcagagttcgctgtaacctcaaactcctgagctcaggcaatctttctgcctcagcctcctgaatagctaggacgacaggtggttaccaccatgcctggctaatttttaaat

SEQ ID NO: 775862 - DNA, 120 bp, Artificial Sequence
  ENSG00000242866_53 (sequence is synthesized)
cggccaatttttaaattttttgtagagacagacaatacaaaaatgtggacactatgtggagacactatgttgaggtactatgctgtccagattggtcttgaactcctggcctcaagcaat

SEQ ID NO: 775863 - DNA, 120 bp, Artificial Sequence
  ENSG00000242866_54 (sequence is synthesized)
gctgggattacagacctgagccactgcacccagccccctagtatctcttataatgtgacttgcttttctttttctttctccttcccttttctttcatttctttctcactctcgagagaag

SEQ ID NO: 775864 - DNA, 120 bp, Artificial Sequence
  ENSG00000242866_55 (sequence is synthesized)
gagagaagagtgggcatctgggagagtgggaggctggtgggtcccacagagtgaggaggcaggactgggtccaaggcagtcctgcctctccactctagggggtatccttggacagtgtct

SEQ ID NO: 775865 - DNA, 120 bp, Artificial Sequence
  ENSG00000242866_56 (sequence is synthesized)
ccctggcagagagggcactacaaaacctgattcctgtctacaaggcctggcccctgttttgcctctgggttctgttccttgataatatgcttcacgttacttgtccatacctcttggagt

SEQ ID NO: 775866 - DNA, 120 bp, Artificial Sequence
  ENSG00000242866_57 (sequence is synthesized)
ccgagaaatctcttggagtccacctctcagtctttctgcctgctcctatctgggctcattgcttaaggaagtgaacaaaggctccaaaggagactccagtctcaggggaagtgctggaga

SEQ ID NO: 775867 - DNA, 120 bp, Artificial Sequence
  ENSG00000242866_58 (sequence is synthesized)
gactggcccatcttctgctagtggggacaaagagtcaatggcatgtctctcagtggcccctccctgcaagaaccctatagtgaccccagtgcgagctaaccttccccatctcagatccag

SEQ ID NO: 775868 - DNA, 120 bp, Artificial Sequence
  ENSG00000242866_59 (sequence is synthesized)
tgttctattatctcctaagccctatacatattactctgtaatactcctttgatccctatttctcacagtgctctatcctccaaaggttggaagactcactctatctacagatatctctct

SEQ ID NO: 775869 - DNA, 120 bp, Artificial Sequence
  ENSG00000242866_60 (sequence is synthesized)
taaagaaaaggcaaatgatttacctagagttatacagctaagggcagaggcaagacttaaaacccagcagtatgactcccaatccactgcttttccactcacattgttcctgtctttctc

SEQ ID NO: 775870 - DNA, 120 bp, Artificial Sequence
  ENSG00000242866_61 (sequence is synthesized)
tactcagaggcagtagtgtggggtagtagttgaagcacacagctctagagtcagacaggcttggattcatatcttggttctgtgaccagccttgaatgagttatttaacttctctgagca

SEQ ID NO: 775871 - DNA, 120 bp, Artificial Sequence
  ENSG00000242866_62 (sequence is synthesized)
atatttttctcgtctcatttataaactagggatgataatggtatatgagataatacatgctgtgggcttagcacagtgcatgatacacaaacatgcaataaatattaccttgttattctt

SEQ ID NO: 775872 - DNA, 120 bp, Artificial Sequence; identical to SEQ ID NO: 770183
  ENSG00000242875_0 (sequence is synthesized)

SEQ ID NO: 775873 - DNA, 120 bp, Artificial Sequence; identical to SEQ ID NO: 770184
  ENSG00000242875_1 (sequence is synthesized)

SEQ ID NO: 775874 - DNA, 120 bp, Artificial Sequence; identical to SEQ ID NO: 770185
  ENSG00000242875_2 (sequence is synthesized)

SEQ ID NO: 775875 - DNA, 82 bp, Artificial Sequence; identical to SEQ ID NO: 775289
  ENSG00000242875_3 (sequence is synthesized)

SEQ ID NO: 775876 - DNA, 120 bp, Artificial Sequence; identical to SEQ ID NO: 770187
  ENSG00000242875_4 (sequence is synthesized)

SEQ ID NO: 775877 - DNA, 120 bp, Artificial Sequence; identical to SEQ ID NO: 770188
  ENSG00000242875_5 (sequence is synthesized)

SEQ ID NO: 775878 - DNA, 120 bp, Artificial Sequence; identical to SEQ ID NO: 770189
  ENSG00000242875_6 (sequence is synthesized)

SEQ ID NO: 775879 - DNA, 120 bp, Artificial Sequence; identical to SEQ ID NO: 770190
  ENSG00000242875_7 (sequence is synthesized)

SEQ ID NO: 775880 - DNA, 120 bp, Artificial Sequence; identical to SEQ ID NO: 562624
  ENSG00000242875_8 (sequence is synthesized)

SEQ ID NO: 775881 - DNA, 80 bp, Artificial Sequence; identical to SEQ ID NO: 562625
  ENSG00000242875_9 (sequence is synthesized)

SEQ ID NO: 775882 - DNA, 120 bp, Artificial Sequence; identical to SEQ ID NO: 767121
  ENSG00000242875_10 (sequence is synthesized)

SEQ ID NO: 775883 - DNA, 120 bp, Artificial Sequence; identical to SEQ ID NO: 562627
  ENSG00000242875_11 (sequence is synthesized)

SEQ ID NO: 775884 - DNA, 120 bp, Artificial Sequence
  ENSG00000242875_12 (sequence is synthesized)
atatggtagctcaagttatgtggcatctatagtagatggtggggagagtcgatctgaaaaaggagactcgagcagatattaaagcaagcattgaaagtaatagttattgcataccaatcc

SEQ ID NO: 775885 - DNA, 120 bp, Artificial Sequence; identical to SEQ ID NO: 775299
  ENSG00000242875_13 (sequence is synthesized)

SEQ ID NO: 775886 - DNA, 120 bp, Artificial Sequence; identical to SEQ ID NO: 770197
  ENSG00000242875_14 (sequence is synthesized)

SEQ ID NO: 775887 - DNA, 120 bp, Artificial Sequence
  ENSG00000242875_15 (sequence is synthesized)
gctcaagttatgtggcatctatagtagatggtggggagagtcgatctgaaaaaggagactcgagcagatattaaagcaagcattgaaaataatagttattgcataccaatccttgtttgc

SEQ ID NO: 775888 - DNA, 120 bp, Artificial Sequence
  ENSG00000242950_0 (sequence is synthesized)
caggagaacaaagaacaggccattaccctggagaagactggcaactgattttacccacaagcccaaacctcagggatttcagtatctactagtctgggtagatactttcacgggttgggc

SEQ ID NO: 775889 - DNA, 120 bp, Artificial Sequence
  ENSG00000242950_1 (sequence is synthesized)
ggtagatactttcacgggttgggcagaggccttcccctgtaggacagaaaaggcccaagaggtaataaaggcactagttcatgaaataattcccagattcggacttccccgaggcttaca

SEQ ID NO: 775890 - DNA, 120 bp, Artificial Sequence
  ENSG00000242950_2 (sequence is synthesized)
gagtgacaatagccctgctttccaggccacagtaacccagggagtatcccaggcgttaggtatacgatatcacttacactgcgcctgaaggccacagtcctcagggaaggtcgagaaaat

SEQ ID NO: 775891 - DNA, 120 bp, Artificial Sequence
  ENSG00000242950_3 (sequence is synthesized)
gaatgaaacactcaaaggacatctaaaaaagcaaacccaggaaacccacctcacatggcctgctctgttgcctatagccttaaaaagaatctgcaactttccccaaaaagcaggacttag

SEQ ID NO: 775892 - DNA, 120 bp, Artificial Sequence
  ENSG00000242950_4 (sequence is synthesized)
ctttccccaaaaagcaggacttagcccatacgaaatgctgtatggaaggcccttcataaccaatgaccttgtgcttgacccaagacagccaacttagttgcagacatcacctccttagcc

SEQ ID NO: 775893 - DNA, 120 bp, Artificial Sequence
  ENSG00000242950_5 (sequence is synthesized)
ttacaaggaacctatccctgagaagagggaaaagaactattccacccttgtgacatggtattagtcaagtcccttccctctaattccccatccctagatacatcctgggaaggaccctac

SEQ ID NO: 775894 - DNA, 120 bp, Artificial Sequence
  ENSG00000242950_6 (sequence is synthesized)
ccagtcattttatctaccccaactgcggttaaagtggctggagtggagtcttggatacatcacacttgagtcaaatcctggatactgccaaaggaacctgaaaatccaggagacaacgct

SEQ ID NO: 775895 - DNA, 120 bp, Artificial Sequence
  ENSG00000242950_7 (sequence is synthesized)
agctattcctgtgaacctctagaggatttgcgcctgctcttcaaacaacaaccaggaggaaagtaactaaaatcataaatccccatggccctcccttatcatatttttctctttactgtt

SEQ ID NO: 775896 - DNA, 120 bp, Artificial Sequence
  ENSG00000242950_8 (sequence is synthesized)
cttttaccctctttcactctcactgcaccccctccatgccgctgtatgaccagtagctccccttaccaagagtttctatggagaatgcagcgtcccggaaatattgatgccccatcgtat

SEQ ID NO: 775897 - DNA, 120 bp, Artificial Sequence
  ENSG00000242950_9 (sequence is synthesized)
tcccggaaatattgatgccccatcgtataggagtctttctaagggaacccccaccttcactgcccacacccatatgccccgcaactgctatcactctgccactctttgcatgcatgcaaa

SEQ ID NO: 775898 - DNA, 120 bp, Artificial Sequence
  ENSG00000242950_10 (sequence is synthesized)
tactcattattggacaggaaaaatgattaatcctagttgtcctggaggacttggagtcactgtctgttggacttacttcacccaaactggtatgtctgatgggggtggagttcaagatca

SEQ ID NO: 775899 - DNA, 75 bp, Artificial Sequence
  ENSG00000242950_11 (sequence is synthesized)
agttcaagatcaggcaagagaaaaacatgtaaaagaagtaatctcccaactcacccgggtacatggcacctctag

SEQ ID NO: 775900 - DNA, 120 bp, Artificial Sequence
  ENSG00000242950_12 (sequence is synthesized)
ttggatatgcctccccctgaacttcaggccatatgtttcaatccctgtacctgaacaatggaacaacttcagcacagaaataaacaccacttccgttttagtaggacctcttgtttccaa

SEQ ID NO: 775901 - DNA, 81 bp, Artificial Sequence
  ENSG00000242950_13 (sequence is synthesized)
cctcacctgtgtaaaatttagcaatactacatacacaaccaactcccaatgcatcaggtgggtaactcctcccacacaaat

SEQ ID NO: 775902 - DNA, 76 bp, Artificial Sequence
  ENSG00000242950_14 (sequence is synthesized)
cctatgaccatctacactgaacaagatttatacagttatgtcatatctaagccccgcaacaaaagagtacccattc

SEQ ID NO: 775903 - DNA, 120 bp, Artificial Sequence
  ENSG00000242950_15 (sequence is synthesized)
tatgtcatatctaagccccgcaacaaaagagtacccattcttccttttgttataggagcaggagtgctaggtgcactaggtactggcattggcggtatcacaacctctactcagttctac

SEQ ID NO: 775904 - DNA, 74 bp, Artificial Sequence
  ENSG00000242950_16 (sequence is synthesized)
tcgccgactccttcaaaatcgaagagctttagacttgctaaccgctgaaagagggggaacctgtttatttttag

SEQ ID NO: 775905 - DNA, 88 bp, Artificial Sequence
  ENSG00000242950_17 (sequence is synthesized)
ggaatcgtcactgagaaagttaaagaaattcgagatcgaatacaacgtagagcagaggagcttcgaaacactggaccctggggcctcc

SEQ ID NO: 775906 - DNA, 72 bp, Artificial Sequence
  ENSG00000242950_18 (sequence is synthesized)
cactgagaaagttaaagaaattcgagatcgaatacaacgtagagcagaggagcttcgaaacactggaccctg

SEQ ID NO: 775907 - DNA, 120 bp, Artificial Sequence
  ENSG00000242950_19 (sequence is synthesized)
cagaatcgaagctgtaaaactacaaatggagcccaagatgcagtccaagactaagatctaccgcagacccctggaccggcctgctagcccacgatctgatgttaatgacatcaaaggcac

SEQ ID NO: 775908 - DNA, 120 bp, Artificial Sequence
  ENSG00000242950_20 (sequence is synthesized)
ccacgatctgatgttaatgacatcaaaggcacccctcctgaggaaatctcagctgcacaacctctactacgccccaattcagcaggaagcagttagagcggtcgtcggccaacctcccca

SEQ ID NO: 775909 - DNA, 66 bp, Artificial Sequence
  ENSG00000242950_21 (sequence is synthesized)
agcaggaagcagttagagcggtcgtcggccaacctccccaacagcacttaggttttcctgttgaga

SEQ ID NO: 775910 - DNA, 71 bp, Artificial Sequence
  ENSG00000242950_22 (sequence is synthesized)
tgagagcacagcaggagggacaatgatcgggatataaacccaagtcttcgagccggcaatgctatttcact

SEQ ID NO: 775911 - DNA, 70 bp, Artificial Sequence
  ENSG00000242950_23 (sequence is synthesized)
gttttcatcttacggctcgagctgagcttttgctcaccgtccaccactgctgtttgccaccaccgcagac

SEQ ID NO: 775912 - DNA, 120 bp, Artificial Sequence
  ENSG00000242950_24 (sequence is synthesized)
tgctcaccgtccaccactgctgtttgccaccaccgcagacctgccgctgactcccatccctctggatcctgcagggtgtccgctgtgctcctgatccagcgaggcgcccattgccgctcc

SEQ ID NO: 775913 - DNA, 74 bp, Artificial Sequence
  ENSG00000242950_25 (sequence is synthesized)
gtgcctgggtttgtgtgacccacggcttctaatagaactataacacttaccacatggcccaagattccattcct

SEQ ID NO: 775914 - DNA, 90 bp, Artificial Sequence
  ENSG00000242950_26 (sequence is synthesized)
tggaatccgtgaggccaagaactccaggtcagagaattgctaccatcttggaagtggttcaccaccatcttgggagctctgtgagcaagg

SEQ ID NO: 775915 - DNA, 67 bp, Artificial Sequence
  ENSG00000242950_27 (sequence is synthesized)
gaccttcaggatgccttcttcaaacccaacatctcaactcacctggactattttaccccaagggttc

SEQ ID NO: 775916 - DNA, 84 bp, Artificial Sequence
  ENSG00000242950_28 (sequence is synthesized)
tcaattcttgtttgcctttgaagatacttcaaacccaacatctcaactcacctggactattttaccccaagggttcagggatag

SEQ ID NO: 775917 - DNA, 120 bp, Artificial Sequence
  ENSG00000242950_29 (sequence is synthesized)
gtgccatcaagccacccaagcgctcttcaatttcctcgctacctgtggctacatggtttccaaaccaaaggctcaactctgctcacagcaggttacttagggctaaaattatccaaaggc

SEQ ID NO: 775918 - DNA, 69 bp, Artificial Sequence
  ENSG00000242950_30 (sequence is synthesized)
acctgtggctacatggtttccaaaccaaaggctcaactctgctcacagcaggcatccagcctatactgg

SEQ ID NO: 775919 - DNA, 120 bp, Artificial Sequence
  ENSG00000242950_31 (sequence is synthesized)
ccaaaaccctaaagcaactaaggggattccttggcgtaataggtttctgccgaaaatggattcccaggtatggcgaaatagccaggtcattaaatacactaattaaggaaactcagaaag

SEQ ID NO: 775920 - DNA, 120 bp, Artificial Sequence
  ENSG00000242950_32 (sequence is synthesized)
catttagtaagatggacaactgaagtagaagtggctttccaggccctaacccaagccccagtgttaagtttgccaacagggcaagacttttcttcatatgtcacagaaaaaacaggaata

SEQ ID NO: 775921 - DNA, 120 bp, Artificial Sequence
  ENSG00000242950_33 (sequence is synthesized)
cttacacagatccgagggatgagcttgcaacctgtggcatacctgactaaggaaattgatgtagtggcaaagggttgacctcattgtttacgggtagtggtggcagtagcagtcttagta

SEQ ID NO: 775922 - DNA, 74 bp, Artificial Sequence
  ENSG00000242950_34 (sequence is synthesized)
aacataactgtcaacaagtaatttctcaaacctatgccactcgaggggaccttttagaggttcctttgactgat

SEQ ID NO: 775923 - DNA, 70 bp, Artificial Sequence
  ENSG00000242950_35 (sequence is synthesized)
agataaaacataactgtcaacaagtaatttctcaaacctatgccactcgaggggaccttttagaggttcc

SEQ ID NO: 775924 - DNA, 120 bp, Artificial Sequence
  ENSG00000242950_36 (sequence is synthesized)
cctcactccaggaactagtgctcagctagcagaactaatagccctcacttgggcactagaattaggagaagaaaaaagggcaaatatatatacagactctaaatatgcttacctagtcct

SEQ ID NO: 775925 - DNA, 78 bp, Artificial Sequence
  ENSG00000242950_37 (sequence is synthesized)
agggcaaatatatatacagactctaaagaaagggaattcctaacttctgagagaacacctatcaaacatcaggaagcc

SEQ ID NO: 775926 - DNA, 89 bp, Artificial Sequence
  ENSG00000242950_38 (sequence is synthesized)
aagagaactgccaagcagatattgaagccaaaagagctgcaaggcaggaccctccattagaaatgcttataaaacaacccctagtatag

SEQ ID NO: 775927 - DNA, 120 bp, Artificial Sequence
  ENSG00000242950_39 (sequence is synthesized)
ttttctcccctcgggacggctagccactgaagaagggaaaatacttttgcctgcaactatccaatggaaattacttaaaacccttcatcaaacctttcacttaggcatcgatagcaccca

SEQ ID NO: 775928 - DNA, 120 bp, Artificial Sequence
  ENSG00000242950_40 (sequence is synthesized)
aagtgatgggaaacgttccccgcaagacaaaaacgcccctaagacgtattctggagaattgggaccaatttgaccctcagacactaagaaagaaacgacttatattcttctgcagtgccg

SEQ ID NO: 775929 - DNA, 82 bp, Artificial Sequence
  ENSG00000242950_41 (sequence is synthesized)
tacagctagacctcttttgtagaaaaggcaaatggagtgaagtgccataagtacaaactttcttttcattaagagacaactc

SEQ ID NO: 775930 - DNA, 79 bp, Artificial Sequence
  ENSG00000242950_42 (sequence is synthesized)
agtgtgatttatgccctacaggaagccttcagagtctacctccctatcccagcatccccgggtccaaaaggagatagac

SEQ ID NO: 775931 - DNA, 120 bp, Artificial Sequence
  ENSG00000242950_43 (sequence is synthesized)
ccaaaaggagatagacaaaagggtaaacagtgaaccaaagagtgccaatattccccaattatgacccctccaagcagtgggaggaagagaattcggcccagccagagtgcatgtgccttt

SEQ ID NO: 775932 - DNA, 74 bp, Artificial Sequence
  ENSG00000242950_44 (sequence is synthesized)
gaggaagagaattcggcccagccagagtgcatgtgcctttttctctcccagacttaaagcaaataaaaacagac

SEQ ID NO: 775933 - DNA, 120 bp, Artificial Sequence
  ENSG00000243056_0 (sequence is synthesized)
gagtccgcctcagactcagagctgcgctcctcgacctcaacgccaggcggttactttgctgctcctcccgctcgctatgtcaacgtccactagctgcccgattcccgggggccgggacca

SEQ ID NO: 775934 - DNA, 120 bp, Artificial Sequence
  ENSG00000243056_1 (sequence is synthesized)
gctgcccgactgctacagcaccacgccggggggcacgctatacgccactacccccggaggcaccaggatcatctacgaccgaaagttcctgctggagtgcaagaactcacccattgcccg

SEQ ID NO: 775935 - DNA, 120 bp, Artificial Sequence
  ENSG00000243056_2 (sequence is synthesized)
agaggaagagatacccgatgacgcacaatttgaaatggacatctaatccagtgcagatgacctggcatgtggagttacagagggatccctcatgccactgctgccaccacctcttcctgg

SEQ ID NO: 775936 - DNA, 120 bp, Artificial Sequence
  ENSG00000243056_3 (sequence is synthesized)
ggcatccaaaggccagctggcctcatctaatctggaagggagtgacttgttagttccaggcctcctttagttctgaggcagctagaccagggataggagtgggcaacttgccaagccctt

SEQ ID NO: 775937 - DNA, 120 bp, Artificial Sequence
  ENSG00000243056_4 (sequence is synthesized)
aactctacttcctcttcagtctgtggtactcctcctaaccctaaaccctctatgctcaggggctggaactggggaatggagtaagtcaccttctgactgcttagtaaacattcaaagaaa

SEQ ID NO: 775938 - DNA, 120 bp, Artificial Sequence
  ENSG00000243063_0 (sequence is synthesized)
gcatgtccctcccagctgccctaccttccagagcccatatcaatgcctgggtcagagccctgggaaggaactgctcagttaggacccagacggaaccatggaagccccagctcagcttct

SEQ ID NO: 775939 - DNA, 120 bp, Artificial Sequence
  ENSG00000243063_1 (sequence is synthesized)
gaaagagtcaccctctcctgcagggccagtcagagtgttagcagcagctacttaacctggtatcagcagaaacctggccaggcgcccaggctcctcatctatggtgcatccaccagggcc

SEQ ID NO: 775940 - DNA, 86 bp, Artificial Sequence
  ENSG00000243063_2 (sequence is synthesized)
ggcgcccaggctcctcatctatggtgcatccaccagggccactagcatcccagccaggttcagtggcagtgggtctgggacagact

SEQ ID NO: 775941 - DNA, 120 bp, Artificial Sequence
  ENSG00000243073_0 (sequence is synthesized)
ttcctgcttggttcttcctgagatctgagaaccttctagactacatccagatctgttttccctgcagattcatgaagatgagcatctggactccacccagactcctggagcttgcagggc

SEQ ID NO: 775942 - DNA, 120 bp, Artificial Sequence
  ENSG00000243073_1 (sequence is synthesized)
ggagcctgctaagggaccaagctttggccatgtccaccctggaggagctgcccacagaacttttccccccactgttcatggaggccttcagcaggagacgctgtgaggccctgaagctga

SEQ ID NO: 775943 - DNA, 120 bp, Artificial Sequence
  ENSG00000243073_2 (sequence is synthesized)
tggtgcagtcctggcccttccgccgcctccctctgaggcctctgataaagatgccttgtctggaggccttccaagctgtgctcgatgggctggatgcactgcttaacctaggggttcgtc

SEQ ID NO: 775944 - DNA, 120 bp, Artificial Sequence
  ENSG00000243073_3 (sequence is synthesized)
aacttcaagtgctggatttacaggatgtctgtgagaacttctggatggtttggtctgaagctatggcccatgggtgcttcctcaatgccaagaggaacaaaaaaccagtggaggactgtc

SEQ ID NO: 775945 - DNA, 120 bp, Artificial Sequence
  ENSG00000243073_4 (sequence is synthesized)
tggaggactgtccaaggatgaaaggacggcagcccttgactgtgttcgtagaactttggctcaagaacaggactctggatgaatacctcacctgcctccttctatgggtcaagcagagga

SEQ ID NO: 775946 - DNA, 120 bp, Artificial Sequence
  ENSG00000243073_5 (sequence is synthesized)
aagatttactacacctgtgctgtaagaagctgaaaattttgggaatgcccttccgcaatatcagaagcatcctgaaaatggtgaacctagactgtatccaggaggtggaagtgaattgca

SEQ ID NO: 775947 - DNA, 120 bp, Artificial Sequence
  ENSG00000243073_6 (sequence is synthesized)
agtgggtactgcccatcctgacacagtttaccccatacctgggccacatgaggaatcttcagaaactcattctctcccacatggatgtctctcgctacgtttccccagagcagaagaagg

SEQ ID NO: 775948 - DNA, 120 bp, Artificial Sequence
  ENSG00000243073_7 (sequence is synthesized)
ctgcctccaaaagctttatatgaactctgtttctttcctcgaaggccacctggaccagctgctcagctgtctgaagacctcgttaaagttcctcacaataactaactgtgtgcttttgga

SEQ ID NO: 775949 - DNA, 120 bp, Artificial Sequence; identical to SEQ ID NO: 742375
  ENSG00000243073_8 (sequence is synthesized)

SEQ ID NO: 775950 - DNA, 120 bp, Artificial Sequence
  ENSG00000243073_9 (sequence is synthesized)
tgcagccacccttgagtacctggatttagatgactgtggcatcatagactcccaagtcaacgccatcttgcctgccctgagccgctgctttgagctcaacaccttcagcttctgtggaaa

SEQ ID NO: 775951 - DNA, 120 bp, Artificial Sequence
  ENSG00000243073_10 (sequence is synthesized)
tcccatctgcatggccaccctggagaacctgctgagccacacaatcatactcaaaaacttatgcgtggagctgtatcctgccccccgggagagttatggtgctgatggtactctctgctg

SEQ ID NO: 775952 - DNA, 120 bp, Artificial Sequence
  ENSG00000243073_11 (sequence is synthesized)
gagcagatttgctcaaattagggctgagctgatgaacagagtgagggacttaaggcaccccaagaggatcttgttctgtactgactactgccctgactgtggcaacaggtcattttatga

SEQ ID NO: 775953 - DNA, 120 bp, Artificial Sequence; identical to SEQ ID NO: 742379
  ENSG00000243073_12 (sequence is synthesized)

SEQ ID NO: 775954 - DNA, 120 bp, Artificial Sequence
  ENSG00000243073_13 (sequence is synthesized)
agaacccatcatttcacacataggctctgaaagtgggaaaggaaagctgatcaagcaggggccggacttgggggaaatgttgccatggattcgatgggactttggggacctgtgtcctgt

SEQ ID NO: 775955 - DNA, 120 bp, Artificial Sequence; identical to SEQ ID NO: 742381
  ENSG00000243073_14 (sequence is synthesized)

SEQ ID NO: 775956 - DNA, 120 bp, Artificial Sequence
  ENSG00000243130_0 (sequence is synthesized)
agaaggaggaaggacagcacagctgacagccgtgctctggaagcttctggatcctaggctcatctccacagaggagaacatgcacgcagcagagatcatggggcccctctcagcccctcc

SEQ ID NO: 775957 - DNA, 120 bp, Artificial Sequence
  ENSG00000243130_1 (sequence is synthesized)
ctgcacagagcacatcaaatggaaggggctcctgctcacagcattacttttaaacttctggaacttgcctaccactgcccaagtcatgattgaagcccagccacccaaagtgtccgaggg

SEQ ID NO: 775958 - DNA, 120 bp, Artificial Sequence; identical to SEQ ID NO: 256354
  ENSG00000243130_2 (sequence is synthesized)

SEQ ID NO: 775959 - DNA, 120 bp, Artificial Sequence
  ENSG00000243130_3 (sequence is synthesized)
aattatatatggaccggcatacagtggacgagaaacagtatattccaatgcatccctgctgatccagaatgtcacccgggaggacgcaggatcctacaccttacacatcataaagcgagg

SEQ ID NO: 775960 - DNA, 120 bp, Artificial Sequence
  ENSG00000243130_4 (sequence is synthesized)
tgatgggactagaggagtaactggatatttcaccttcaccttatacctggagactcccaagccctccatctccagcagcaacttaaaccccagggaggccatggagactgtgatcttaac

SEQ ID NO: 775961 - DNA, 120 bp, Artificial Sequence
  ENSG00000243130_5 (sequence is synthesized)
ctgtaatcctgagactccggacgcaagctacctgtggtggatgaatggtcagagcctccctatgactcataggatgcagctgtctgaaaccaacaggaccctctttctatttggtgtcac

SEQ ID NO: 775962 - DNA, 120 bp, Artificial Sequence
  ENSG00000243130_6 (sequence is synthesized)
cagacctccccagaattttcccttcagtcacctcttactattcaggagagaacctcgacttgtcctgcttcgcaaactctaacccaccagcacagtattcttggacaattaatgggaagt

SEQ ID NO: 775963 - DNA, 120 bp, Artificial Sequence
  ENSG00000243130_7 (sequence is synthesized)
ttcagctatcaggacaaaagctctttatccctcagattactccaaagcataatgggctctatgcttgctctgctcgtaactcagccactggcgaggaaagctccacatccttgacaatca

SEQ ID NO: 775964 - DNA, 120 bp, Artificial Sequence
  ENSG00000243130_8 (sequence is synthesized)
gagtcattgctcctccaggattaggaacttttgctttcaataatccaacgtagcagccgtgatgtcatttttgtatttcaggaagactggcaggagatttatggaaaagactatgaaaag

SEQ ID NO: 775965 - DNA, 120 bp, Artificial Sequence
  ENSG00000243130_9 (sequence is synthesized)
gactcttgaatacaagttcctgataacttcaagatcataccactggactaagaactttcaaaattttgatgaacaggctgataccttcatgaaattcaagacaaagaagaaaagaactcc

SEQ ID NO: 775966 - DNA, 120 bp, Artificial Sequence
  ENSG00000243130_10 (sequence is synthesized)
atttcattggactaaataacaaaaggataatgttttcataattttttattggaaaatgtgctgattttttgaatgttttatcctccagatttatgaatttttttcttcagcaattggtaa

SEQ ID NO: 775967 - DNA, 120 bp, Artificial Sequence
  ENSG00000243130_11 (sequence is synthesized)
agtatacttttgtaaacaaaaattgaaacatttgcttttgctctctgagtgccccagaattgggaatctattcatgaatattcatatgtttatggtaataaagttatttgcacaagttta

SEQ ID NO: 775968 - DNA, 120 bp, Artificial Sequence
  ENSG00000243130_12 (sequence is synthesized)
ggcaggcatgaaggtagtacaggagaacccacagaccactatgcagagctgattcctgtgaaaaagaaagagaaagaagttttaggtaccaatgcaattctaagagtttttgcaaggctg

SEQ ID NO: 775969 - DNA, 120 bp, Artificial Sequence
  ENSG00000243130_13 (sequence is synthesized)
atgaggaatcctccaaccagtcacccattagcgttaaagagagcctcagagaactaggcttgctttcacacccttcctgggagcctgtaggaaagaagctttctgtgcaaaggaggtggt

SEQ ID NO: 775970 - DNA, 120 bp, Artificial Sequence
  ENSG00000243130_14 (sequence is synthesized)
gaatttgaaatgcactgacctgggccttctgtcaatcaggtccctgccatggagatctgacagagtctcattcatgactgccacaacagagacactgagaaaaagatgcaaccatgaaaa

SEQ ID NO: 775971 - DNA, 120 bp, Artificial Sequence
  ENSG00000243130_15 (sequence is synthesized)
ggtgcaaaggtgacaagttccaatgacatagaaaatagcaatcagcctttctcacgtctgaaagccttccaaaatacctgagtgcagtagagaattgacagaggactgatcaccaactga

SEQ ID NO: 775972 - DNA, 120 bp, Artificial Sequence
  ENSG00000243130_16 (sequence is synthesized)
aacatggtgagagggaaaaaaaactgcaagaatataatcatctcccatcaattttccaacagaaataatgtagtccttgaagaaacaattatacagtatctcatgttacatgcttgttcc

SEQ ID NO: 775973 - DNA, 120 bp, Artificial Sequence
  ENSG00000243130_17 (sequence is synthesized)
tggaactcagggagtgccagccgcagtgacccagtcaccctgaatctcctccgtgagtatcttctgttcctctgtgagccaggctgccatcccaaatacacatggccagaggccaggcct

SEQ ID NO: 775974 - DNA, 120 bp, Artificial Sequence
  ENSG00000243130_18 (sequence is synthesized)
ctcagtccctctcaggtccaagtacagagacctttaccactggacatcaaagctggccatgactttctgccccagacaaaccacagtaggcctaggcttgatccacagtgggagaaaaga

SEQ ID NO: 775975 - DNA, 120 bp, Artificial Sequence
  ENSG00000243130_19 (sequence is synthesized)
ggctgctcctgtcatgggaggctcagggtccacagattgtgatgggagaaacaggtgaatgtctcaggctccagatcagtgaacacagcgaggatttggctgggacttcagtcttgcgac

SEQ ID NO: 775976 - DNA, 120 bp, Artificial Sequence
  ENSG00000243130_20 (sequence is synthesized)
ttggctcacagggtcactgtggcccttccacagaccaggattttcccttccctctgacaatgtcacctgtgactttattctctttgctccagatggcctggatgccctcaccatttcttc

SEQ ID NO: 775977 - DNA, 120 bp, Artificial Sequence
  ENSG00000243130_21 (sequence is synthesized)
aataaggatgtcttaaccttcacctgtgaacctaagagtgagaactatgcctacatttggtggctaaattgtcagagcctcccggtcagtcccagggtaaagcgacccattgaaaacagg

SEQ ID NO: 775978 - DNA, 89 bp, Artificial Sequence
  ENSG00000243130_22 (sequence is synthesized)
cctgtgttatttctgctgaagtacccagtcccaggccaggctttccagtacccaaagggtttaaggacaatgggaagttccatcatcca

SEQ ID NO: 775979 - DNA, 120 bp, Artificial Sequence
  ENSG00000243130_23 (sequence is synthesized)
acccaaagggtttaaggacaatgggaagttccatcatccatctctaggatgtccttggcaagggaagctgcagagaaaacataccttggggggaaaagtaagactgaaactaagaagatt

SEQ ID NO: 775980 - DNA, 120 bp, Artificial Sequence
  ENSG00000243130_24 (sequence is synthesized)
cacgagaaatgaaacaggaccctatcaatgtgaaatacgggaccgatatggtggcatccgcagtgactcagtcaccctgaatgtcctctattactccaaagcataatgggctctatgctt

SEQ ID NO: 775981 - DNA, 120 bp, Artificial Sequence
  ENSG00000243130_25 (sequence is synthesized)
atttttgtatttcaggaagactggcagaaagttgctttgattcttcctcaaagtatttaaaatcagctacagtccaaaattgctttttcttcaaggagatttatggaaaagactatgaaa

SEQ ID NO: 775982 - DNA, 120 bp, Artificial Sequence
  ENSG00000243130_26 (sequence is synthesized)
acatttttattcccagcctgtgtcccatgggcacaggcaaatcccaaattctcctcctgaaccctcccaatttgtctctacagactctcttctccttttttttctgttttctcatgactg

SEQ ID NO: 775983 - DNA, 120 bp, Artificial Sequence
  ENSG00000243130_27 (sequence is synthesized)
accttgtgtctggcctgagaaaggtagggagggggctttatcagccctgagccctatgtggtagaagaggcttcacagagggacaagaaggagagtgctgaacatcgagttgcttctcac

SEQ ID NO: 775984 - DNA, 120 bp, Artificial Sequence
  ENSG00000243130_28 (sequence is synthesized)
tgtcaccaactcatccccttctgtcacgtctttgttttcttgtacctcttccatgaactacaaggaacatctgaggctttgaaacaagctcacacttttcccccaaatgagaggaggaag

SEQ ID NO: 775985 - DNA, 120 bp, Artificial Sequence
  ENSG00000243130_29 (sequence is synthesized)
ccccttgggtgagggaggagcagctcagactctgcttcctgctctgctccgggctcctctggtgactggccctgcctcactcaacctggggtgggaccagcatgtgtggagaaagagtcc

SEQ ID NO: 775986 - DNA, 120 bp, Artificial Sequence
  ENSG00000243130_30 (sequence is synthesized)
tggtggcctgtcctgaatttggctaaattgagctgccagttcaagccaagcctcccccgggccaggctgcaaggaaataagaagagaagcaacctcagggcagactcctgagctgcgtcc

SEQ ID NO: 775987 - DNA, 120 bp, Artificial Sequence
  ENSG00000243130_31 (sequence is synthesized)
tggctctgaagtcactggctgtatgaggctgtgggcacagcacgtgggacacagcactgagtacagtgactgatgcagagctggagaaataggaagattcacccctggggctctgcatgg

SEQ ID NO: 775988 - DNA, 120 bp, Artificial Sequence
  ENSG00000243130_32 (sequence is synthesized)
caggaaaggggcagtgccaaaaagtgtgtaattatagagagggtaagactaccagacactatatatatctaatataaggcttaccattaactgtttctaagtgtgcaatttagtgttatg

SEQ ID NO: 775989 - DNA, 120 bp, Artificial Sequence
  ENSG00000243130_33 (sequence is synthesized)
taaccatcacactatccatttccagaactttttcctcttaccatattaaacctctgtacccaataaacagtaactctcactccttctccccctaacacttagcacccaccattctacttt

SEQ ID NO: 775990 - DNA, 120 bp, Artificial Sequence
  ENSG00000243130_34 (sequence is synthesized)
accttcaccttataccgtaagtgattccacatgatccctgggtgttgggggacaggggtcacttctacatcacacacacaggattgtcaggcctggacattgcctgtgtccctctctgca

SEQ ID NO: 775991 - DNA, 120 bp, Artificial Sequence; identical to SEQ ID NO: 256374
  ENSG00000243130_35 (sequence is synthesized)

SEQ ID NO: 775992 - DNA, 120 bp, Artificial Sequence
  ENSG00000243130_36 (sequence is synthesized)
tgactgccacaacagaaacactgtgaaaaagatgcaaccatgaaaaggtggaaagttttgatgacatagaaaatagcaatcagcctttctcacatcccaaagccttcaaatatatatgag

SEQ ID NO: 775993 - DNA, 120 bp, Artificial Sequence
  ENSG00000243130_37 (sequence is synthesized)
tgcagcatggccagtatggaattcaccgaaaactaatcaccaagctagaaatgtggtgagagaaaaaaaagggcaagaatatatttggcttatcacttcccacttttgtctactaatctg

SEQ ID NO: 775994 - DNA, 120 bp, Artificial Sequence
  ENSG00000243130_38 (sequence is synthesized)
atgctgaaaagaaattctcactgaagcattttagattttgaatctttcagatttgggatgctaaaccagtaagtatatgacaaatatttcagaatcaaaaaatgtcagaaatccaaaaca

SEQ ID NO: 775995 - DNA, 120 bp, Artificial Sequence
  ENSG00000243135_0 (sequence is synthesized)
gtccgtgtcttctgctgagatggccacaggactccaggttcccctgccgtggctggccacaggactgctgcttctcctcagtgtccagccctgggctgagagtggaaaggtgttggtggt

SEQ ID NO: 775996 - DNA, 120 bp, Artificial Sequence
  ENSG00000243135_1 (sequence is synthesized)
gcccattgatggcagccactggctcagcatgcgggaggtcttgcgggagctccatgccagaggccaccaggcagtggtcctcaccccagaggtgaatatgcacatcaaagaagagaactt

SEQ ID NO: 775997 - DNA, 120 bp, Artificial Sequence
  ENSG00000243135_2 (sequence is synthesized)
tttcaccctgacaacctatgccatttcgtggacccaggatgaatttgatcgccatgtgctgggccacactcaactgtactttgaaacagaacattttctgaagaaatttttcagaagtat

SEQ ID NO: 775998 - DNA, 120 bp, Artificial Sequence
  ENSG00000243135_3 (sequence is synthesized)
ggcaatgttgaacaatatgtctttggtctatcataggtcttgtgtggagctactacataatgaggccctgatcaggcacctgaatgctacttcctttgatgtggttttaacagaccccgt

SEQ ID NO: 775999 - DNA, 120 bp, Artificial Sequence
  ENSG00000243135_4 (sequence is synthesized)
taacctctgcgcggcagtgctggctaagtacctgtcgattcctactgtgttttttttgaggaacattccatgtgatttagactttaagggcacacagtgtccaaacccttcctcctatat

SEQ ID NO: 776000 - DNA, 120 bp, Artificial Sequence
  ENSG00000243135_5 (sequence is synthesized)
tcctagattactaacaaccaattcagaccacatgacattcatgcaaagggtcaagaacatgctctaccctctggccctgtcctacatttgccatgctttttctgctccttatgcaagcct

SEQ ID NO: 776001 - DNA, 120 bp, Artificial Sequence
  ENSG00000243135_6 (sequence is synthesized)
tgcctctgagctttttcagagagaggtgtcagtggtggatattctcagtcatgcatctgtgtggctgttccgaggggactttgtgatggactaccccaggccaatcatgcccaacatggt

SEQ ID NO: 776002 - DNA, 120 bp, Artificial Sequence
  ENSG00000243135_7 (sequence is synthesized)
cttcattgggggcatcaactgtgccaacaggaagccactatctcaggaatttgaagcctacattaatgcttctggagaacatggaattgtggttttctctttgggatcaatggtctcaga

SEQ ID NO: 776003 - DNA, 120 bp, Artificial Sequence
  ENSG00000243135_8 (sequence is synthesized)
aattccagagaagaaagctatggcaattgctgatgctttgggcaaaatccctcagacagtcctgtggcggtacactggaacccgaccatcgaatcttgcgaacaacacgatacttgttaa

SEQ ID NO: 776004 - DNA, 120 bp, Artificial Sequence; identical to SEQ ID NO: 773385
  ENSG00000243135_9 (sequence is synthesized)

SEQ ID NO: 776005 - DNA, 120 bp, Artificial Sequence; identical to SEQ ID NO: 773386
  ENSG00000243135_10 (sequence is synthesized)

SEQ ID NO: 776006 - DNA, 120 bp, Artificial Sequence; identical to SEQ ID NO: 773387
  ENSG00000243135_11 (sequence is synthesized)

SEQ ID NO: 776007 - DNA, 120 bp, Artificial Sequence; identical to SEQ ID NO: 773388
  ENSG00000243135_12 (sequence is synthesized)

SEQ ID NO: 776008 - DNA, 120 bp, Artificial Sequence; identical to SEQ ID NO: 773389
  ENSG00000243135_13 (sequence is synthesized)

SEQ ID NO: 776009 - DNA, 120 bp, Artificial Sequence; identical to SEQ ID NO: 773390
  ENSG00000243135_14 (sequence is synthesized)

SEQ ID NO: 776010 - DNA, 120 bp, Artificial Sequence; identical to SEQ ID NO: 773391
  ENSG00000243135_15 (sequence is synthesized)

SEQ ID NO: 776011 - DNA, 120 bp, Artificial Sequence; identical to SEQ ID NO: 773392
  ENSG00000243135_16 (sequence is synthesized)

SEQ ID NO: 776012 - DNA, 120 bp, Artificial Sequence; identical to SEQ ID NO: 773393
  ENSG00000243135_17 (sequence is synthesized)

SEQ ID NO: 776013 - DNA, 120 bp, Artificial Sequence; identical to SEQ ID NO: 773394
  ENSG00000243135_18 (sequence is synthesized)

SEQ ID NO: 776014 - DNA, 120 bp, Artificial Sequence
  ENSG00000243137_0 (sequence is synthesized)
agcacagaaggaggaaggacagcacagctgacagccgtactcaggaagcttctggatcctaggcttatctccacagaggagaacacacaagcagcagagaccatggggcccctctcagcc

SEQ ID NO: 776015 - DNA, 120 bp, Artificial Sequence
  ENSG00000243137_1 (sequence is synthesized)
cctccctgcacacagcgcatcacctggaagggggtcctgctcacagcatcacttttaaacttctggaatccgcccacaactgcccaagtcacgattgaagcccagccacccaaagtttct

SEQ ID NO: 776016 - DNA, 120 bp, Artificial Sequence
  ENSG00000243137_2 (sequence is synthesized)
gaggggaaggatgttcttctacttgtccacaatttgccccagaatcttgctggctacatttggtacaaagggcaaatgacatacctctaccattacattacatcatatgtagtagacggt

SEQ ID NO: 776017 - DNA, 120 bp, Artificial Sequence
  ENSG00000243137_3 (sequence is synthesized)
caaagaattatatatgggcctgcatacagtggaagagaaagagtatattccaatgcatccctgctgatccagaatgtcacgcaggaggatgcaggatcctacaccttacacatcataaag

SEQ ID NO: 776018 - DNA, 120 bp, Artificial Sequence
  ENSG00000243137_4 (sequence is synthesized)
cgacgcgatgggactggaggagtaactggacatttcaccttcaccttacacctggagactcccaagccctccatctccagcagcaacttaaatcccagggaggccatggaggctgtgatc

SEQ ID NO: 776019 - DNA, 120 bp, Artificial Sequence
  ENSG00000243137_5 (sequence is synthesized)
ttaacctgtgatcctgcgactccagccgcaagctaccagtggtggatgaatggtcagagcctccctatgactcacaggttgcagctgtccaaaaccaacaggaccctctttatatttggt

SEQ ID NO: 776020 - DNA, 120 bp, Artificial Sequence
  ENSG00000243137_6 (sequence is synthesized)
gtcacaaagtatattgcaggaccctatgaatgtgaaatacggaacccagtgagtgccagccgcagtgacccagtcaccctgaatctcctcccaaagctgtccaagccctacatcacaatc

SEQ ID NO: 776021 - DNA, 120 bp, Artificial Sequence
  ENSG00000243137_7 (sequence is synthesized)
aacaacttaaaccccagagagaataaggatgtcttaaccttcacctgtgaacctaagagtaagaactacacctacatttggtggctaaatggtcagagcctccctgtcagtcccagggta

SEQ ID NO: 776022 - DNA, 120 bp, Artificial Sequence
  ENSG00000243137_8 (sequence is synthesized)
tcaccctgaatgtcctctatggtccagacctccccagcatttacccttcattcacctattaccgttcaggagaaaacctctacttgtcctgcttcgccgagtctaacccacgggcacaat

SEQ ID NO: 776023 - DNA, 120 bp, Artificial Sequence
  ENSG00000243137_9 (sequence is synthesized)
attcttggacaattaatgggaagtttcagctatcaggacaaaagctctctatcccccaaataactacaaagcatagtgggctctatgcttgctctgttcgtaactcagccactggcaagg

SEQ ID NO: 776024 - DNA, 120 bp, Artificial Sequence
  ENSG00000243137_10 (sequence is synthesized)
aaagctccaaatccatcacagtcaaagtctctgactggatattaccctgaattctactagttcctccaattccattttctcccatggaatcacgaagagcaagacccactctgttccaga

SEQ ID NO: 776025 - DNA, 120 bp, Artificial Sequence
  ENSG00000243137_11 (sequence is synthesized)
agccctataagctggaggtggacaactcgatgtaaatttcatgggaaaacccttgtacctgacatgtgagccactcagaactcaccaaaatgttcgacaccataacaacagctactcaaa

SEQ ID NO: 776026 - DNA, 120 bp, Artificial Sequence
  ENSG00000243137_12 (sequence is synthesized)
ctgtaaaccaggataacaagttgatgacttcacactgtggacagtttttccaaagatgtcagaacaagactccccatcatgataaggctcccacccctcttaaccgtccttgctcatgcc

SEQ ID NO: 776027 - DNA, 120 bp, Artificial Sequence
  ENSG00000243137_13 (sequence is synthesized)
tgcctctttcacttggcaggataatgcagtcattagaatttcacatgtagtagcttctgagggtaacaacagagtgtcagatatgtcatctcaacctcaaacttttacgtaacatctcag

SEQ ID NO: 776028 - DNA, 120 bp, Artificial Sequence
  ENSG00000243137_14 (sequence is synthesized)
gggaaatgtggctctctccatcttgcatacagggctcccaatagaaatgaacacagagatattgcctgtgtgtttgcagagaagatggtttctataaagagtaggaaagctgaaattata

SEQ ID NO: 776029 - DNA, 120 bp, Artificial Sequence
  ENSG00000243137_15 (sequence is synthesized)
gtagagtctcctttaaatgcacattgtgtggatggctctcaccatttcctaagagatacagtgtaaaacgtgacagtaatactgattctagcagaataaaacatgtaccacatttgctaa

SEQ ID NO: 776030 - DNA, 120 bp, Artificial Sequence
  ENSG00000243137_16 (sequence is synthesized)
atgactgccacaacagaaacactgagaaaaagaggcaaccatgaaaacgtggaaagttctgacgacagaaaatagcaatcagcctttctcacatcccaaagctttaaaaaatatatgagt

SEQ ID NO: 776031 - DNA, 120 bp, Artificial Sequence
  ENSG00000243137_17 (sequence is synthesized)
gcagcatggccagtatggaattgaccaaaaactaatcatcaagctagaaacgtggtgagagaaaaaaaaagggcaagaatatctttggcttatcacctcccacttttgcctactaatctg

SEQ ID NO: 776032 - DNA, 120 bp, Artificial Sequence
  ENSG00000243137_18 (sequence is synthesized)
atgctgaaaagaaatgctcactgaagcattttagattttgaatctttcagatttgggatgctaaaccagtaagcatatgacaaatatttcagaataaaaaaatgtcagaaatccaaaaca

SEQ ID NO: 776033 - DNA, 120 bp, Artificial Sequence
  ENSG00000243137_19 (sequence is synthesized)
aatagggatttaggtggagtctatctggcattcagggaagagtgaggaaaacatttttattcccagcctgtgtcccatgggcacaagcaaatcccaaattctactcctgaacactcccaa

SEQ ID NO: 776034 - DNA, 120 bp, Artificial Sequence
  ENSG00000243137_20 (sequence is synthesized)
tttgtctaagaacttccaaaactttaacaaacaggctgatatcttcttaaaattcccagcctagaccaagcaggagaaacattgatttcattgaaataattgacaatattgaggataata

SEQ ID NO: 776035 - DNA, 120 bp, Artificial Sequence
  ENSG00000243137_21 (sequence is synthesized)
tttttatgatttttatttgaaaatttgctgattctttaaatggtttgttttctagatttatggaatttttttcttttaatctatctatagcttgtagcagttcaataaactatacttctg

SEQ ID NO: 776036 - DNA, 120 bp, Artificial Sequence
  ENSG00000243137_22 (sequence is synthesized)
ctccaaatccatcacagtcaaagtctctggacacatttcaaatcattggttatattaccaaggctttgactgggatgttatattcaagaatatagatagaatgaaccaatatgaactgca

SEQ ID NO: 776037 - DNA, 120 bp, Artificial Sequence
  ENSG00000243137_23 (sequence is synthesized)
ggcaaagtctgaagtcagccttggtttggcttcctattctcaagggttttgtaaaagtttaatctgagagtccttataaaaacttagagcaaataaaattctaaaagagcgcctacatgg

SEQ ID NO: 776038 - DNA, 120 bp, Artificial Sequence
  ENSG00000243137_24 (sequence is synthesized)
agaaagggaagacccagggtctctgaaggaggtatcaggaaagaagtctaaggatgccctgatgtgagcaggacctgagggcagtgtggagggggccgtgcggacccctggggaagagga

SEQ ID NO: 776039 - DNA, 120 bp, Artificial Sequence
  ENSG00000243137_25 (sequence is synthesized)
ggaacccacagcccagcagggtccaccctcaccagggtcacttcggcccaagtcttcagagccctccatgctcccaacacggactctgtcagctccttcctgacccgcagccgccaacct

SEQ ID NO: 776040 - DNA, 84 bp, Artificial Sequence
  ENSG00000243137_26 (sequence is synthesized)
ggcagcgatggtgcacgcgacgccacactggacgctttcccctcgtgacctccctccatcctcatcaactctttctgtcactgc

SEQ ID NO: 776041 - DNA, 120 bp, Artificial Sequence
  ENSG00000243137_27 (sequence is synthesized)
gtgacctccctccatcctcatcaactctttctgtcactgctccctaaatgcccgcccctgctccatctgtcctgttctctggggcatcccaggccaagcctagcgctgacacagaacagc

SEQ ID NO: 776042 - DNA, 120 bp, Artificial Sequence
  ENSG00000243137_28 (sequence is synthesized)
ggctgcctgagggcccacagcctccccgggaatcagccaggcaccctgtgtcctgcctgcccactgcagcccagggggcgcagagagcgtgtgatggtcacacacaggcaccatccggga

SEQ ID NO: 776043 - DNA, 120 bp, Artificial Sequence
  ENSG00000243137_29 (sequence is synthesized)
tgtggccacctgccaccagctgtcccttgggaagacagacctctcctgtgtgcttgtggggagaaggggggtgttatttttctttgctcccagaacacaactcacccccacccgccctct

SEQ ID NO: 776044 - DNA, 120 bp, Artificial Sequence
  ENSG00000243137_30 (sequence is synthesized)
caggtgtgagcaaggtccctccagacaggctctctggccactgcctgttcctcctctacagagagcagcttggccaggtcaaaaccctcaggacagacccctgggtatgtcagcacaggg

SEQ ID NO: 776045 - DNA, 120 bp, Artificial Sequence
  ENSG00000243137_31 (sequence is synthesized)
agggctgagcccatcatggccacggagtaagtcgggatgaatctctccagctctgaacccctgctctgtcccaggctccccctcctgcgtctcaacaagccatgtcccgcggggttcctg

SEQ ID NO: 776046 - DNA, 120 bp, Artificial Sequence
  ENSG00000243137_32 (sequence is synthesized)
ggtaactccccacttcctcctgcaccaccacggggaaggtgtggtgaccacaggacaatcagctgggcagagaagagaggacatcaaaggtggtcagggagaacatgagaaaccctgagc

SEQ ID NO: 776047 - DNA, 120 bp, Artificial Sequence
  ENSG00000243137_33 (sequence is synthesized)
tccagctcagccgccagaccccagggagacacagagtgaccgagaactgtccctttgactctgggattcacagcccccactgagcaatcagcacaggcctctcctcccaagaggcctgag

SEQ ID NO: 776048 - DNA, 120 bp, Artificial Sequence
  ENSG00000243137_34 (sequence is synthesized)
gggactggaggagtaactggacatttcaccttcaccttacaccgtgagtgattccacatgatccctgggtgttgggggacaggggtcacttctacttcacacacacaggattctcaggcc

SEQ ID NO: 776049 - DNA, 120 bp, Artificial Sequence
  ENSG00000243137_35 (sequence is synthesized)
tggactctgcctgtgtccctctctgcattaagtcccatgctggggtttgggcatttagtgcaggacacacagaggagacaaatttcaacagatcagaattcctttcccgcattcagaccc

SEQ ID NO: 776050 - DNA, 120 bp, Artificial Sequence
  ENSG00000243137_36 (sequence is synthesized)
gactcagcaggaggagatcagtctcagacaagcacctcatgccctcttcataaatttgacgctgacaaagaccctggagaactgagtagggctggcctgaggggccccctgagatactct

SEQ ID NO: 776051 - DNA, 120 bp, Artificial Sequence
  ENSG00000243137_37 (sequence is synthesized)
actgagtagggctggcctgaggggccccctgagatactctcagagcagctcagccctagaagcctcaaccccagacctctgtccctaaatccttgctccagataaagctgaggagcctgt

SEQ ID NO: 776052 - DNA, 120 bp, Artificial Sequence
  ENSG00000243137_38 (sequence is synthesized)
gccagtgctgggttgttccttcttgggcaggccttactgggaccaagaatttaccagctgtcagaggactgtgtctcctggagctgttcaccagccagggctcagccctcagagcctcat

SEQ ID NO: 776053 - DNA, 120 bp, Artificial Sequence
  ENSG00000243137_39 (sequence is synthesized)
ctgggcaaggacagagctttcttcacctgacactcagagtggagaggatagaaagacaagctttgtaggacatcggcttaggagagtccatagaaagtctaatgtccccagaagcagaaa

SEQ ID NO: 776054 - DNA, 120 bp, Artificial Sequence
  ENSG00000243137_40 (sequence is synthesized)
cagaaggagaagatgtacctggtagcagattgtccacagggatctgatgtaaaggtgttttctcatggaagcaaattaataataaatgctgtttgtgtgaaacctccactgtgccaagca

SEQ ID NO: 776055 - DNA, 120 bp, Artificial Sequence
  ENSG00000243137_41 (sequence is synthesized)
agggacctgaaacacagacaaaaggaaaaacaggagggacaaggaggcagaactgagagaggaggggacagagaggtgtcctgggcctgaccccgcccacgagcttgagaaatgctcctg

SEQ ID NO: 776056 - DNA, 120 bp, Artificial Sequence
  ENSG00000243137_42 (sequence is synthesized)
gaagggggtcctgctcacaggtcattccttggactctgctctatctttagaggtcactggctcaagtcagtcaccatgagacacctgggaaaactgcgccaccttgtggctccactgcct

SEQ ID NO: 776057 - DNA, 120 bp, Artificial Sequence
  ENSG00000243137_43 (sequence is synthesized)
gacctccaggcttgactctggtctcccctgtgttatttatgctgaagtacccagtcccaggtcaggctttccagtacccaaagggtttaaggacaatgggaagttccatcatccatctct

SEQ ID NO: 776058 - DNA, 120 bp, Artificial Sequence
  ENSG00000243137_44 (sequence is synthesized)
tcatccatctctaggatgtccttggaaagggaagctgcagagaaaacatacctcggggggcaaagtaagactgaaactaagaagattccagcactgcatgctccaagtgaggaccacaag

SEQ ID NO: 776059 - DNA, 120 bp, Artificial Sequence
  ENSG00000243137_45 (sequence is synthesized)
cctccctgcacacagcgcatcacctggaagggggtcctgctcacaggggccaccatattttgaaaaatgataacaataactatatcagatgacacttcaaatgaaaatataagcaggaca

SEQ ID NO: 776060 - DNA, 120 bp, Artificial Sequence
  ENSG00000243137_46 (sequence is synthesized)
tgaaacactgtcctcagcaagaaacctcaacaattggggggaaaaagaaacatccagagggtggagaccctgagaactctcacatctacaggagtctgccgcctgttccagcatcacttt

SEQ ID NO: 776061 - DNA, 120 bp, Artificial Sequence
  ENSG00000243137_47 (sequence is synthesized)
gttcctctgtgagccaggctgccatcccaaatacacatggccagaggccaggcctctcagtccctctcaggtccaagtacagagacctttacccctagacatcaaagctggccatgactt

SEQ ID NO: 776062 - DNA, 120 bp, Artificial Sequence
  ENSG00000243137_48 (sequence is synthesized)
tctgccccaggcaaaccagagtaggcctaggcttgatccacaataggagaaaagaggctgctcctgtcatgggagactcaggttccacagcttgtgatgggagaaacaggtgaaggtctc

SEQ ID NO: 776063 - DNA, 120 bp, Artificial Sequence
  ENSG00000243137_49 (sequence is synthesized)
tggacatccgaggtggccatgactccctgccctgggaaaacctaggtaggcacagccttaaccaagaatataaggggaggggacgctcttgtcatgggagacttggggcctaaaacttgt

SEQ ID NO: 776064 - DNA, 120 bp, Artificial Sequence
  ENSG00000243137_50 (sequence is synthesized)
gatgggagaaacaggtgaatacctcaggcttcggctcagtgaacatagagggagtttggctgggacttgaaggtgtgtcttggcttagagggtaactgtgtccctttaagagaccaggaa

SEQ ID NO: 776065 - DNA, 120 bp, Artificial Sequence
  ENSG00000243147_0 (sequence is synthesized)
agttgttgttggttgggggccttttggccggtgacggagactgcccaggtgtggtcaccatgttcctctccgcggtcttctttgccaagagcaagtcaaaaaacattctggtgagaatgg

SEQ ID NO: 776066 - DNA, 120 bp, Artificial Sequence
  ENSG00000243147_1 (sequence is synthesized)
tgagcgaagctgggacaggtttctgcttcaacaccaagagaaaccgactgcgggaaaaactgactcttttgcattatgatccagttgtgaaacaaagagtcctcttcgtggaaaagaaaa

SEQ ID NO: 776067 - DNA, 120 bp, Artificial Sequence
  ENSG00000243147_2 (sequence is synthesized)
aaaatgactttgatttataaagagaagactgagggcggggatactgattcagaaatcctgtagcgtgtaataaaagaagaggaaatggcatggaatcactgcctcctgtgatttgaaggc

SEQ ID NO: 776068 - DNA, 120 bp, Artificial Sequence
  ENSG00000243147_3 (sequence is synthesized)
cattgtgaaggaaaacaatgcagtgaaagaaagttcttcatattaggacagatatcattgcatcacatttatttatctttctgggtatttttatagcccttaataaaaaatattaaaata

SEQ ID NO: 776069 - DNA, 120 bp, Artificial Sequence
  ENSG00000243147_4 (sequence is synthesized)
gcagggcagttaaagaagtcctcgggctcccgagtcagtgctcttctttacccttggctgacttcccagttagatttagtatctggttttcaccacatgtgatggttgttgtaatttgca

SEQ ID NO: 776070 - DNA, 120 bp, Artificial Sequence
  ENSG00000243147_5 (sequence is synthesized)
tggatttgttagtctagctgctcccagtacatccttatatgaaattaagcattgggccttgatttcctaagagttggtttgtggattacttagttgattattttttctttatgaactctt

SEQ ID NO: 776071 - DNA, 120 bp, Artificial Sequence
  ENSG00000243147_6 (sequence is synthesized)
cttttggccggtgacggagactgcccaggtgtggtcaccatgttcctctccgcggtcttctttgccaagagcaagtcaaagctgtggttatggtttttggaagaccacagaggtgaaatg

SEQ ID NO: 776072 - DNA, 120 bp, Artificial Sequence
  ENSG00000243147_7 (sequence is synthesized)
tcattttcatcacatcatattaagggcacatatgatcaacatgacttcttactgatggtgttaaccctggtcacctggctaagtggtgatttacaagtcaagttaaaatgtccccagaag

SEQ ID NO: 776073 - DNA, 120 bp, Artificial Sequence
  ENSG00000243147_8 (sequence is synthesized)
gtggtccggaatggaaaagtgggactggatgctacaaactgtttgaggataactgacttaaaatctggctgcacatcattgactcctgggcccaactgtgaccgatttaaactgcacata

SEQ ID NO: 776074 - DNA, 120 bp, Artificial Sequence
  ENSG00000243147_9 (sequence is synthesized)
ccatatgctggagagacattaaagtgggatatcattttcaatgcccaatacccagaactgcctcccgattttatctttggagaagatgctgaattcctgccagacccctcagctttgcag

SEQ ID NO: 776075 - DNA, 120 bp, Artificial Sequence
  ENSG00000243147_10 (sequence is synthesized)
gcagttgttgttggttgggggccttttggccggtgacggagactgcccaggtgtggtcaccatgttcctctccgcggtcttctttgccaagagcaagtcaaatgaaacaaagagtcctct

SEQ ID NO: 776076 - DNA, 120 bp, Artificial Sequence
  ENSG00000243147_11 (sequence is synthesized)
gcgcggacctgtgggtgcctgagaaggggtctgcggtgtctggattcaattgccgtcctcacggaccgttgagtctggctgtggggcgtttttctccagcccgtgttaggagaatctttg

SEQ ID NO: 776077 - DNA, 120 bp, Artificial Sequence
  ENSG00000243147_12 (sequence is synthesized)
gcgcgaatacttgcaccttagaagagggaaaaaatggagcagttgccaagagcaagtcaaatgaaacaaagagtcctcttcgtggaaaagaaaaaaatacgctccctttaaacggtggat

SEQ ID NO: 776078 - DNA, 80 bp, Artificial Sequence
  ENSG00000243156_0 (sequence is synthesized)
ggagcgcccgcgtaggcaggcacccggggcagccctccgtcctcgccgcgcggcctgagaacccctgggccctgggcgag

SEQ ID NO: 776079 - DNA, 120 bp, Artificial Sequence
  ENSG00000243156_1 (sequence is synthesized)
ggggctgggctgtgcagcccccgaggctaactgggcgggatcgcagctgcaggggttgtgcgagcagccacggcggcacctgtgccctgcgggcacccaccctgcccctgccgaggcagg

SEQ ID NO: 776080 - DNA, 120 bp, Artificial Sequence
  ENSG00000243156_2 (sequence is synthesized)
cgcccaccgccggcggtgatgcggctgtgaagccctagtcgattaacgtgacagtgtcaggtggacccacagccatcccacctccccctctggggagtgctgagagtgaggcagcatgga

SEQ ID NO: 776081 - DNA, 120 bp, Artificial Sequence
  ENSG00000243156_3 (sequence is synthesized)
ggagaggaagcatgagaccatgaacccagctcatgtcctctttgaccggtttgtccaggccaccacctgcaagggaaccctcaaggctttccaggagctctgtgaccacctggaactaaa

SEQ ID NO: 776082 - DNA, 120 bp, Artificial Sequence
  ENSG00000243156_4 (sequence is synthesized)
gccaaaggactaccgctccttctatcacaagctcaagtccaagcttaactactggaaagccaaagccctctgggcaaaattggacaaacggggcagtcacaaagactacaaaaagggaaa

SEQ ID NO: 776083 - DNA, 120 bp, Artificial Sequence
  ENSG00000243156_5 (sequence is synthesized)
agcgtgcactaacaccaagtgtctcatcattggggctggcccctgtggtctccgtacagccatcgacttatccttactgggggccaaggtggttgttattgagaaacgagatgccttctc

SEQ ID NO: 776084 - DNA, 120 bp, Artificial Sequence
  ENSG00000243156_6 (sequence is synthesized)
ccgcaacaacgtcttgcatctctggccattcaccatacatgatctacgaggtctgggtgccaagaagttctatggcaagttctgtgctggagccatcgaccatatcagtatccgtcagct

SEQ ID NO: 776085 - DNA, 120 bp, Artificial Sequence
  ENSG00000243156_7 (sequence is synthesized)
ccaactaatacttttgaaagtagccttgatcctaggcattgaaatccacgtcaatgtggaattccaaggacttatacagcctcctgaggaccaagagaatgaacggataggctggcgggc

SEQ ID NO: 776086 - DNA, 120 bp, Artificial Sequence
  ENSG00000243156_8 (sequence is synthesized)
actggtgcaccccaagactcatcctgtgtcagagtatgaatttgaagtgatcatcggtggggatggtcggaggaacaccttggaagggtttcgtcggaaagaattccgtggcaaactggc

SEQ ID NO: 776087 - DNA, 120 bp, Artificial Sequence
  ENSG00000243156_9 (sequence is synthesized)
catcgccatcacggcaaattttatcaaccgaaatacaacagcagaagctaaagtggaagagatcagtggtgtggcttttatattcaaccaaaaatttttccaggaactgagggaagccac

SEQ ID NO: 776088 - DNA, 120 bp, Artificial Sequence
  ENSG00000243156_10 (sequence is synthesized)
aggtattgacttggagaacatcgtttactacaaagatgacacacactatttcgttatgacagccaaaaagcagagtttgctggacaaaggagtgatactacatgactacgccgacacaga

SEQ ID NO: 776089 - DNA, 120 bp, Artificial Sequence
  ENSG00000243156_11 (sequence is synthesized)
gctcctgctttcccgagaaaacgtggaccaggaggctctgctcagctatgccagggaggcggcagacttctctacccagcagcagctgccgtctctggattttgccatcaatcactatgg

SEQ ID NO: 776090 - DNA, 120 bp, Artificial Sequence
  ENSG00000243156_12 (sequence is synthesized)
gcagcccgatgtggccatgtttgacttcacttgtatgtatgcctccgagaacgccgccttggtgcgggagcagaacggacaccagttactagtggctctggtcggggacagcctcctaga

SEQ ID NO: 776091 - DNA, 120 bp, Artificial Sequence
  ENSG00000243156_13 (sequence is synthesized)
gcctttctggccaatgggaacaggaatagcccggggctttctagctgctatggactctgcctggatggtccgaagttggtctctaggaacgagccctttggaagtgctggcagagaggga

SEQ ID NO: 776092 - DNA, 120 bp, Artificial Sequence
  ENSG00000243156_14 (sequence is synthesized)
aagtatttacaggttgctgcctcagaccacccctgagaatgtgagtaagaacttcagccagtacagtatcgaccctgtcactcggtatcccaatatcaacgtcaacttcctccggccaag

SEQ ID NO: 776093 - DNA, 120 bp, Artificial Sequence
  ENSG00000243156_15 (sequence is synthesized)
ccaggtgcgccatttatatgatactggcgaaacaaaagatattcacctggaaatggagagcctggtgaattcccgaaccacccccaaattgactcgcaatgagtctgtagctcgttcaag

SEQ ID NO: 776094 - DNA, 120 bp, Artificial Sequence
  ENSG00000243156_16 (sequence is synthesized)
caaactgctgggttggtgccagaggcagacagatggctatgcaggggtaaacgtgacagatctcaccatgtcctggaaaagtggcttggccctttgtgcaattatccatagataccgccc

SEQ ID NO: 776095 - DNA, 120 bp, Artificial Sequence
  ENSG00000243156_17 (sequence is synthesized)
tgacctgatagattttgattctttggatgagcaaaatgtggagaagaataaccaactggcctttgacattgctgagaaggaattgggcatttctcccatcatgacaggcaaagaaatggc

SEQ ID NO: 776096 - DNA, 120 bp, Artificial Sequence
  ENSG00000243156_18 (sequence is synthesized)
ctccgtgggggagcctgataagctgtccatggtgatgtacctgactcagttctacgagatgtttaaggactccctcccctctagcgacaccttggacctaaatgccgaggagaaagcagt

SEQ ID NO: 776097 - DNA, 120 bp, Artificial Sequence
  ENSG00000243156_19 (sequence is synthesized)
cctgatagccagcaccagatcccctatctccttcctaagcaaacttggccagaccatctctcggaagcgttctcccaaggataaaaaggaaaaggacttggatggtgctgggaagaggag

SEQ ID NO: 776098 - DNA, 120 bp, Artificial Sequence
  ENSG00000243156_20 (sequence is synthesized)
aaagaccagtcaatcagaggaggaggaagctcctcggggccacagaggagaaagaccgaccctggtgagcactctgacagacaggaggatggacgttgccgttgggaaccagaacaaagt

SEQ ID NO: 776099 - DNA, 120 bp, Artificial Sequence
  ENSG00000243156_21 (sequence is synthesized)
gaagtacatggcgacccagctgctggccaaatttgaagagaatgcgcccgcacagtccatcggcatacggagacagggctccatgaagaaggagttcccgcagaacctgggaggcagcga

SEQ ID NO: 776100 - DNA, 120 bp, Artificial Sequence
  ENSG00000243156_22 (sequence is synthesized)
cacatgctacttctgccagaagcgggtctacgtgatggagaggctgagtgccgagggcaagttcttccaccggagctgcttcaagtgcgagtactgcgccaccaccctgcgcctctcggc

SEQ ID NO: 776101 - DNA, 120 bp, Artificial Sequence
  ENSG00000243156_23 (sequence is synthesized)
ctacgcctacgacatcgaggatggtaaattctactgtaagccacactactgctatcgactctctggctacgcacaaaggaagagaccggcagtggctcccctgtctggaaaggaggccaa

SEQ ID NO: 776102 - DNA, 120 bp, Artificial Sequence
  ENSG00000243156_24 (sequence is synthesized)
aggacccctgcaggatggcgccaccacagatgcaaacggacgggccaacgccgtggccagctccactgagagaaccccaggttcaggcgtgaacggcctggaggagcccagcatcgccaa

SEQ ID NO: 776103 - DNA, 120 bp, Artificial Sequence
  ENSG00000243156_25 (sequence is synthesized)
gcgactgaggggcaccccagagcggatcgagctggagaactaccgcctgtccctgaggcaggctgaggcactgcaggaggtaccggaggagactcaggccgagcacaacctgagcagcgt

SEQ ID NO: 776104 - DNA, 120 bp, Artificial Sequence
  ENSG00000243156_26 (sequence is synthesized)
gctggacacgggcgccgaggaggacgtcgccagcagtagttccgagtctgagatggaggaggagggagaggaggaggaggaggagcctcgcctgcccccatctgacctgggtggtgttcc

SEQ ID NO: 776105 - DNA, 120 bp, Artificial Sequence
  ENSG00000243156_27 (sequence is synthesized)
gtggaaggaggccgtgcggatccatgcccttctgaaagggaaaagtgaagaggagctagaggcctcaaagagctttgggcctgggaatgaagaggaggaggaggaggaggaagaatatga

SEQ ID NO: 776106 - DNA, 120 bp, Artificial Sequence
  ENSG00000243156_28 (sequence is synthesized)
agaggaggaggaggaggactatgacgaggaggaggaagagtccagtgaagccgggaaccagaggctccagcaggtcatgcacgcggcggatcctctggagatccaggctgacgtgcactg

SEQ ID NO: 776107 - DNA, 120 bp, Artificial Sequence
  ENSG00000243156_29 (sequence is synthesized)
gactcatatccgtgagagagaggaggaagagaggatggcgccggcctctgagtcctctgcttccggagccccattggatgagaatgacctagaggaagatgtggactcagaaccagccga

SEQ ID NO: 776108 - DNA, 120 bp, Artificial Sequence
  ENSG00000243156_30 (sequence is synthesized)
gatagaaggggaggcagcagaggatggggacccaggggacactggtgctgagctggatgatgatcagcactggtctgacagcccgtcggatgctgacagagagctgcgtttgccgtgccc

SEQ ID NO: 776109 - DNA, 120 bp, Artificial Sequence
  ENSG00000243156_31 (sequence is synthesized)
agctgagggggaagcagagctggagctgagggtgtcggaagatgaggagaagctgcccgcctcaccgaagcaccaagagagaggtccctcccaagccaccagccccatccggtctcccca

SEQ ID NO: 776110 - DNA, 120 bp, Artificial Sequence
  ENSG00000243156_32 (sequence is synthesized)
ggaatcagctcttctgttcattccagtccacagcccctcaacagaggggccccaactcccacctgtccctgccgccacccaggagaaatcacctgaggagcgccttttccctgagccttt

SEQ ID NO: 776111 - DNA, 120 bp, Artificial Sequence
  ENSG00000243156_33 (sequence is synthesized)
gctccccaaagagaagcccaaagctgatgccccctcggatctgaaagctgtgcactctcccatccgatcacagccagtgaccctgccagaagctaggactcctgtctcaccagggagccc

SEQ ID NO: 776112 - DNA, 120 bp, Artificial Sequence
  ENSG00000243156_34 (sequence is synthesized)
gcagccccagccacccgtggcggcctccacgcccccacccagcccactccccatctgctcccagccccagccttccaccgaggccactgtcccatcccctacccagtcccccatacgctt

SEQ ID NO: 776113 - DNA, 120 bp, Artificial Sequence
  ENSG00000243156_35 (sequence is synthesized)
ccagcctgccccggccaaaacatccaccccactggcccctctccctgtccaaagccaaagtgacaccaaggacagactgggcagcccccttgctgtggatgaggccctcagacggagcga

SEQ ID NO: 776114 - DNA, 120 bp, Artificial Sequence
  ENSG00000243156_36 (sequence is synthesized)
cctggtggaggagttctggatgaagagtgcggagatccgccgcagcctcgggctcacacctgtggaccgcagcaaggggcccgagcccagcttccccacgcctgccttcaggccagtgtc

SEQ ID NO: 776115 - DNA, 120 bp, Artificial Sequence
  ENSG00000243156_37 (sequence is synthesized)
cctcaaatcctattccgttgaaaagtccccccaggatgagggactccaccttctcaagcctctgtccatccccaaaaggctgggcctgccaaagccggaaggcgagccgttgtccctgcc

SEQ ID NO: 776116 - DNA, 120 bp, Artificial Sequence
  ENSG00000243156_38 (sequence is synthesized)
aaccccccggtccccgtccgacagagagctacgcagcgcccaggaggagcgcagggagctgtccagcagctctggcctgggcctgcacgggagctcctccaacatgaagacactgggcag

SEQ ID NO: 776117 - DNA, 120 bp, Artificial Sequence
  ENSG00000243156_39 (sequence is synthesized)
cttgcggaggaagctcagggaggccgagcccaatgcctcggtggtcccgccgcccttgcccgccacctggatgcggcccccccgggagcctgctcagccccccagagaggaggtgcggaa

SEQ ID NO: 776118 - DNA, 120 bp, Artificial Sequence
  ENSG00000243156_40 (sequence is synthesized)
gtcgtttgtggagagcgtggaggagattccctttgctgatgatgtggaggacacctatgacgacaagactgaggactcaagcctgcaggagaaattcttcacgcccccgtcctgctggcc

SEQ ID NO: 776119 - DNA, 120 bp, Artificial Sequence
  ENSG00000243156_41 (sequence is synthesized)
gcgccccgagaagcctcgccacccgcccctggccaaggagaacgggaggctgcctgctctggaggggacgctgcagccacagaagagggggctgcccttggtgtccgcggaagccaagga

SEQ ID NO: 776120 - DNA, 120 bp, Artificial Sequence
  ENSG00000243156_42 (sequence is synthesized)
gttggccgaggagcgcatgcgagccagggagaagtccgtgaagagccaggcgctgcgggacgccatggccaggcagctgagcaggatgcagcagatggagctggcctcaggcgcccccag

SEQ ID NO: 776121 - DNA, 120 bp, Artificial Sequence
  ENSG00000243156_43 (sequence is synthesized)
gccccgcaaggcgtcctcagcaccctcccagggcaaggagcgccggcctgactcccccacacgccccactctcaggggctccgaggagcccaccctgaagcatgaagccaccagcgagga

SEQ ID NO: 776122 - DNA, 120 bp, Artificial Sequence
  ENSG00000243156_44 (sequence is synthesized)
ggtcctctccccgccgtcggactcagggggcccagatggctctttcacttcatccgagggctccagtgggaagagcaagaagaggtcgtcactcttctccccccgcagaaacaagaagga

SEQ ID NO: 776123 - DNA, 120 bp, Artificial Sequence
  ENSG00000243156_45 (sequence is synthesized)
gaagaagtccaaaggcgagggccggcccccggagaagcccagctccaacctcctagaagaagccgccgccaaacccaagtccctgtggaagtccgtcttctccgggtacaagaaggacaa

SEQ ID NO: 776124 - DNA, 120 bp, Artificial Sequence
  ENSG00000243156_46 (sequence is synthesized)
gaagaagaaggccgacgacaagtcctgccccagcaccccctccagcggggccacggtggactctggaaagcacagggtgcttcccgtcgtaagggcagagctgcagctccggcgccagct

SEQ ID NO: 776125 - DNA, 120 bp, Artificial Sequence
  ENSG00000243156_47 (sequence is synthesized)
gagcttctccgaggactcagacctctccagcgacgatgtccttgagaagtcctcacagaagtcccggcgagagccaagaacctacacggaggaggaactgaatgccaagctgacccggcg

SEQ ID NO: 776126 - DNA, 120 bp, Artificial Sequence
  ENSG00000243156_48 (sequence is synthesized)
tgtgcaaaaggcagctcggagacaggccaagcaggaggagcttaagcggctgcatcgagcccagatcatccagcggcagctgcagcaggtggaggagaggcagcggcggctggaggaaag

SEQ ID NO: 776127 - DNA, 120 bp, Artificial Sequence
  ENSG00000243156_49 (sequence is synthesized)
gggcgtggctgtggagaaggcgctccggggcgaagcaggcatgggcaagaaggacgaccccaagctgatgcaggagtggttcaagctagtgcaggagaagaacgccatggtgcgctacga

SEQ ID NO: 776128 - DNA, 120 bp, Artificial Sequence
  ENSG00000243156_50 (sequence is synthesized)
gtcggagctgatgatctttgcccgggagctggagctggaagaccggcagagtcgactgcagcaggagctccgggaacgcatggcagtggaagatcaccttaagactgaggaggagctgtc

SEQ ID NO: 776129 - DNA, 120 bp, Artificial Sequence
  ENSG00000243156_51 (sequence is synthesized)
agaagagaagcagattctcaatgagatgctggaggtggtggagcagagagactcactggtggcgctgctggaggagcagcggctccgggagagagaggaggacaaggacctggaggctgc

SEQ ID NO: 776130 - DNA, 120 bp, Artificial Sequence
  ENSG00000243156_52 (sequence is synthesized)
catgctgtccaagggcttcagccttaactggtcctgagctcccacccaacgctccattttctgttggcatccgcctggccaggcagtggcatccaaaccacccggagccgcgatctgagg

SEQ ID NO: 776131 - DNA, 120 bp, Artificial Sequence
  ENSG00000243156_53 (sequence is synthesized)
aggcctggcacctccttggagtttacgctcagatgcccgtgtgctgcttggaaagtggtcgagtcccgcgtgcagtggggagccccaggtgacagtggttatctgagacggctccacctc

SEQ ID NO: 776132 - DNA, 120 bp, Artificial Sequence
  ENSG00000243156_54 (sequence is synthesized)
ctgggaggaggcccacctggacctcccactcagaggagcagcacggcgtgtatggcatgacgcaggggaccaccccgcgcgctccctgaggatgtgctggctgtgccccttttttccact

SEQ ID NO: 776133 - DNA, 120 bp, Artificial Sequence
  ENSG00000243156_55 (sequence is synthesized)
ggcacatttggtaagagagggaagctgctccccgtcagaaccacagtgcgccgtgcgaggggcactgtcttcttcatgctccctggagcaccaccaaagaaacgtaaacaataccccacg

SEQ ID NO: 776134 - DNA, 120 bp, Artificial Sequence
  ENSG00000243156_56 (sequence is synthesized)
aaagcagggtcaggggtcagggtgcgatcgagacccaggatgggggcgtccagtcatgcccaccccagcatcacaggagacatggaggtgcgggcaggctcctgaattattatgcaaatt

SEQ ID NO: 776135 - DNA, 120 bp, Artificial Sequence
  ENSG00000243156_57 (sequence is synthesized)
aggaggacgcaggaggggtctgccctccagccgaacaccacacactggaccctaagtggccaaatgcctgggccgcttgctggctgtggcctgaggcttgtgggttgctgcattttgctt

SEQ ID NO: 776136 - DNA, 120 bp, Artificial Sequence
  ENSG00000243156_58 (sequence is synthesized)
gtagttcacaaccattttgacactggaaaatgctgactttgggggacaggatgaggccctacattctaagcccccagttggcagacaggcattgtccctgttccacatttatgtcgggac

SEQ ID NO: 776137 - DNA, 120 bp, Artificial Sequence
  ENSG00000243156_59 (sequence is synthesized)
aggagatgaccttttcctccgtgtttttcctgtgtttgcacgttgaaatgaagctgacaacctggcaagacgctcagccgcttcaaaccctttttgtcaattaacttattttttaatact

SEQ ID NO: 776138 - DNA, 120 bp, Artificial Sequence
  ENSG00000243156_60 (sequence is synthesized)
tgaaaagaagtaacttcgtttgtgtatctttactagaggaactgatcacctgcgcccgggtgcgggagccacagcggcatctggtgcgtcctacgcgacctggtccggggctgcccggtg

SEQ ID NO: 776139 - DNA, 120 bp, Artificial Sequence
  ENSG00000243156_61 (sequence is synthesized)
ctcctcacgtgcatctatttattagcctttctcttcgtatcactggcctggctggcatcagggagctgcccagaacccctgtgtgggtcctcctcacagctttctgtcccctcctccacc

SEQ ID NO: 776140 - DNA, 120 bp, Artificial Sequence
  ENSG00000243156_62 (sequence is synthesized)
cggtgcctgcctcaccctggcgctagaccatctggaccactcatgtgatgagggtgcatttccgttctgttttgggccaggccaacagcagagctgccactctcaccctcccagtgagaa

SEQ ID NO: 776141 - DNA, 120 bp, Artificial Sequence
  ENSG00000243156_63 (sequence is synthesized)
ttccggctctgcagaactcgcccttgtctcagtttgggggccagggcatcaccttcctccgcacatatgttaaagaaggtttcaggatgggccctcatccacacaggccaagagggtgca

SEQ ID NO: 776142 - DNA, 120 bp, Artificial Sequence
  ENSG00000243156_64 (sequence is synthesized)
aggtgggaccctggaatcatgtggctggtgagaattccctcctcccagcctaagattcacccagacggaaacgcgagtgctgcagtggatgctgggatgcaggctggtgcctctcaagca

SEQ ID NO: 776143 - DNA, 120 bp, Artificial Sequence
  ENSG00000243156_65 (sequence is synthesized)
gatcagcgactcccgcccttccttccgaaggcgacgggcacctgccttgtgccggatcttcatggggacataaagggcgagccccgaatcactagctcctatagccaaactgttcctttc

SEQ ID NO: 776144 - DNA, 120 bp, Artificial Sequence
  ENSG00000243156_66 (sequence is synthesized)
tcacggttccgcaccagcctggctgtgtacagctcatcaagccactgagctaatcggggtggggtgcttgtccatcaaagcagtcagcacatagcccagcgaggagccatccggaccaga

SEQ ID NO: 776145 - DNA, 120 bp, Artificial Sequence
  ENSG00000243156_67 (sequence is synthesized)
cccgcctgccaggggcgctccagccgcctgccgcctccgtgggctggggccagctgggagcagaggcctggcccctccaaggcgtcccgcagtggagcaggctgagtggctgtgctgacc

SEQ ID NO: 776146 - DNA, 120 bp, Artificial Sequence
  ENSG00000243156_68 (sequence is synthesized)
ttgggctttccatgggaaccacactgtgcttcaacttgaacattcatcccagctgcaaaggagcaaagaacctgtgtcatccttgtctgtccagaagctgccatctctctcccatgcaca

SEQ ID NO: 776147 - DNA, 120 bp, Artificial Sequence
  ENSG00000243156_69 (sequence is synthesized)
tccgggagataacgccgctagtggccgccacagcgctgattctccacctgttctcacgtgaggcaaaggtctccttttcttttctctttacttaaaaaaggggagaggagggtttctaga

SEQ ID NO: 776148 - DNA, 120 bp, Artificial Sequence
  ENSG00000243156_70 (sequence is synthesized)
ttccatcttcaaaccccagtcgtcccataaaattggacgtgggaaaagaccttcactgcctgcgtggcctttcccagacctctcctcgaatgccacaaaaccggtccagccccggcagag

SEQ ID NO: 776149 - DNA, 120 bp, Artificial Sequence
  ENSG00000243156_71 (sequence is synthesized)
ccgccttcggcccttgtagctcctgctggccccacaacagggaaacagtttgcaaagtggcttggaaggagtgtggcctagggatctgctgtaagtggccagacgtagcaggagagccca

SEQ ID NO: 776150 - DNA, 120 bp, Artificial Sequence
  ENSG00000243156_72 (sequence is synthesized)
gtgtcaccttctggtcctggtcagccttaacactgtggcatcctccacagcacacacggcagcctgcagtctggaaggtggacccgagcctttgcagagaggcgccgcagagccgcaggc

SEQ ID NO: 776151 - DNA, 120 bp, Artificial Sequence
  ENSG00000243156_73 (sequence is synthesized)
ctgcgccccagccttctgctcccgactgtgaggacacccagttctagtagagcactttttttaaagctcccattttgtaaccactagtttgcggttgacttgagtactctggtgacttcc

SEQ ID NO: 776152 - DNA, 120 bp, Artificial Sequence
  ENSG00000243156_74 (sequence is synthesized)
tgcgtcaagcgttctcaagctgtgagaatgtgcgcagctccaggcaggttttctctcggagagttaagtcttcccttgaaggcagggaagcaggatggatacacatatatcacacgcata

SEQ ID NO: 776153 - DNA, 120 bp, Artificial Sequence
  ENSG00000243156_75 (sequence is synthesized)
aaacaccaggtgcgggagcagcccagactcaaggctgactaaactggaggctgaataccgtggaggtccacatgcagcttccctggagggcaggccggaggcgctcccgcccctgggctt

SEQ ID NO: 776154 - DNA, 120 bp, Artificial Sequence
  ENSG00000243156_76 (sequence is synthesized)
gaggatgctgcaccccgtgggcttccaggcctgcccagatgatgccttcaggcctctgtccctggcggccatcctcaggccgattttgaccagcaatgatagactcttcttaaccctttc

SEQ ID NO: 776155 - DNA, 120 bp, Artificial Sequence
  ENSG00000243156_77 (sequence is synthesized)
aaaataaatttttcagtgggacagaaaggagagttaaaaaacatttttttaaaggtggtaacatctgacccacaaagggaatgggtctgttttatgcaaaataaaagtttttcaaataaa

SEQ ID NO: 776156 - DNA, 120 bp, Artificial Sequence
  ENSG00000243156_78 (sequence is synthesized)
cctactccacctccctgtcgggcacatggcggccagcagacatacagggatcttgatgctgacaaccgtggcaagcagagcccccaccatgagaggccagagcctgaacctcctcgtcga

SEQ ID NO: 776157 - DNA, 120 bp, Artificial Sequence
  ENSG00000243156_79 (sequence is synthesized)
ttttttgtcgaccagtgggagctttctcttagtctccgctcctctgcccgccccgcctctccctcctccgactccctccgacagaagtatataaagatgtacacgggcggagtgagctca

SEQ ID NO: 776158 - DNA, 120 bp, Artificial Sequence
  ENSG00000243156_80 (sequence is synthesized)
ggcctctgtgacaaggccaagggcatgagccagcacctccaaagcaacatttcttcattcgggcaacaagtggcccaaaaccctctggactcctttttcatgtgccagctgcttgcgttc

SEQ ID NO: 776159 - DNA, 120 bp, Artificial Sequence
  ENSG00000243156_81 (sequence is synthesized)
ggagtcccctttctctatggcctgtcggaggtgctggtgcaaatcagaggggagttccactggcaggctgtggcccagtgatggggccgtccggtgggcggcagagccgtgaagtgctgt

SEQ ID NO: 776160 - DNA, 120 bp, Artificial Sequence
  ENSG00000243156_82 (sequence is synthesized)
cctaacctccataacctccctaacctccataaccctgcatgtgtacttgccctctctgccccacctctacccagtcctacccagtcccccactcctccccttggctctgactgctctgcc

SEQ ID NO: 776161 - DNA, 120 bp, Artificial Sequence
  ENSG00000243156_83 (sequence is synthesized)
gctctgccccccagggggctactgagtctccctcttgcttccttctgaggggcggtgcttacagccatcctctccagctccctctggggcctgtgttgctgagcccagggccaaggagct

SEQ ID NO: 776162 - DNA, 120 bp, Artificial Sequence
  ENSG00000243156_84 (sequence is synthesized)
caccccacggagctatgaagtgcacgtggctgagggagccagctgcatgtgttgctgtttgcctgtgtcggtctcgtgtgtgaggtctgtggcacactcctcagctaaagtggctgctgg

SEQ ID NO: 776163 - DNA, 120 bp, Artificial Sequence
  ENSG00000243156_85 (sequence is synthesized)
ctttcatccaactgtatctgacacatccagggctccatgaagaaggagttcccgcagaacctgggaggcagcgacacatgctacttctgccagaagcgggtctacgtgatggagaggctg

SEQ ID NO: 776164 - DNA, 120 bp, Artificial Sequence
  ENSG00000243156_86 (sequence is synthesized)
ggtttcttctcagtgaagggaggcctcctgtctttcctgctgcccgcagtccattctccccagtcccttttaggttcttagcctcatcttctagtcagtgaggactcctccatcagactc

SEQ ID NO: 776165 - DNA, 120 bp, Artificial Sequence
  ENSG00000243156_87 (sequence is synthesized)
aattcagagattcaggaagtatttattccttgaggacctgacatgtccccagctccaagtctgtcattgggaaggaaagtggcaggctctgcccccgggttattcacagattcagcagag

SEQ ID NO: 776166 - DNA, 120 bp, Artificial Sequence
  ENSG00000243156_88 (sequence is synthesized)
ggaaggacgggcacacggggagggactctgggtgattcagccaccagtgcaccgggccgtcttgagggaggcctagtccgtcccccaggcatctttttttctcctgtaggtaaagaaagg

SEQ ID NO: 776167 - DNA, 120 bp, Artificial Sequence
  ENSG00000243156_89 (sequence is synthesized)
gactgaaaatgtgtgccccaggggccgcatgcagcaccagtggatgcatgcttaggcagttccagagctgtaatcacatccagctgggtgacacctttggggatgtgcatgctataaccc

SEQ ID NO: 776168 - DNA, 120 bp, Artificial Sequence
  ENSG00000243156_90 (sequence is synthesized)
taggactccctatatccactgccctgcaccccagggcttccagtatcagcgaaggcttcaaagtgttcagccgattacagatgatcaagagagccaagaatcaaaagggggtccggtgtc

SEQ ID NO: 776169 - DNA, 120 bp, Artificial Sequence
  ENSG00000243156_91 (sequence is synthesized)
ctgtggggcttcaggacagaaacacaggctgcaaacccgaggggcagaggcctcaagtggccttggagagcatttgaatcacacaccttgatttagccatgatgaagggaacatgtgggg

SEQ ID NO: 776170 - DNA, 120 bp, Artificial Sequence
  ENSG00000243156_92 (sequence is synthesized)
ataaggagagcagagcagtttttttaaggtccaagaacgctttccagaaggtgtttgctgggccgagctgctttcagctgcacccgccacctcagccctcatgtcagacaccctctgcct

SEQ ID NO: 776171 - DNA, 120 bp, Artificial Sequence
  ENSG00000243156_93 (sequence is synthesized)
agattcattcttgggctgcctcacagaccgctcctccgtgcatgccgggggcagcctctgccttggtgtctgcagttccaaagctgtcactgatggtgcatcctcatccagaactctgct

SEQ ID NO: 776172 - DNA, 120 bp, Artificial Sequence
  ENSG00000243156_94 (sequence is synthesized)
tccctatccagagcacccatggaggccccactctccccactgtgcccagatgagggggagcccactctctctctccactgaccctgcagtgagggtgagagatgctgtgtgtcaaaacac

SEQ ID NO: 776173 - DNA, 120 bp, Artificial Sequence
  ENSG00000243156_95 (sequence is synthesized)
atttataaacccttgagcagagctactggcttgaccttgggctgagtgtgggtcagcaccattttctccactgtaatttataaattgtgagaggcagtggggcagcaagttcatgtaatg

SEQ ID NO: 776174 - DNA, 120 bp, Artificial Sequence
  ENSG00000243156_96 (sequence is synthesized)
tagcaaggacattccaggaaggctaacccctggcatttatggcaggtatgacaggagggcagcacagaaaacatgaaatcagtcagcatctatgcaatgcaatacatgcctcatcttact

SEQ ID NO: 776175 - DNA, 78 bp, Artificial Sequence
  ENSG00000243156_97 (sequence is synthesized)
agtcagcatctatgcaatgcaatacatgcctcatcttactcagattgaagttaaaaaaagattttaaaactagcattc

SEQ ID NO: 776176 - DNA, 66 bp, Artificial Sequence
  ENSG00000243156_98 (sequence is synthesized)
cacttaaaattaaaatcaaaaaataaaataaaggccaggcacggtggctcacacaggagaatcact

SEQ ID NO: 776177 - DNA, 74 bp, Artificial Sequence
  ENSG00000243156_99 (sequence is synthesized)
ctccatctcaaaaaaaattaaaattaaaatcaaaaaataaaataaaggccaggcacggtggctcagagatcaca

SEQ ID NO: 776178 - DNA, 120 bp, Artificial Sequence
  ENSG00000243156_100 (sequence is synthesized)
tgtgctgacactaaccccgctgacgccctttctccacccacgcttcccagtccctgctcacaaaaacaaggagaaatcaacccaataaccaaatggcaaaagcacagacccttttccagc

SEQ ID NO: 776179 - DNA, 120 bp, Artificial Sequence
  ENSG00000243156_101 (sequence is synthesized)
tcaaaacagagcagcgtgctgatctccccgctgcccacatgtgctccagaggaagatctgagcttgcttttgctgcctggggtcgtttttaattttttataataaaactttgcccacccg

SEQ ID NO: 776180 - DNA, 120 bp, Artificial Sequence
  ENSG00000243156_102 (sequence is synthesized)
aaggagacctagtacatagcaagtgccaaataaacattgagtggcaaaaaagagggaaagcaatgtaagtcatcctaagagagcacacagagcaggaggggtagaaaccagccccgggga

SEQ ID NO: 776181 - DNA, 120 bp, Artificial Sequence
  ENSG00000243156_103 (sequence is synthesized)
gggcaaggtccctgctggcgaggtcgctgacggggtgaacagggatggcaggacacgggaaagcgcaggccccaggaagggggacgccagggccccatggctgcaggcaaaccttgggcc

SEQ ID NO: 776182 - DNA, 120 bp, Artificial Sequence
  ENSG00000243156_104 (sequence is synthesized)
tggcttgggagtggaagttccggcagcatcttgctcggccctctttgcacatttgccccgtgtgattcctgcgggccagggtgggcgcggcactccctgcacccgacacaagcgttctct

SEQ ID NO: 776183 - DNA, 120 bp, Artificial Sequence
  ENSG00000243156_105 (sequence is synthesized)
gcttctccggctgctacctaccgcgccggacgctcgggctgcggaacagggcggcactggcccgccacagcgacgccggcgccgagggacaccgcagtatgaggcagagattaacgtgac

SEQ ID NO: 776184 - DNA, 120 bp, Artificial Sequence
  ENSG00000243156_106 (sequence is synthesized)
ggaggaggaggaggaagaatatgaagaggaggaggaggaggactatgacgaggaggaggaagagtccagtgaagtgcccgaccttccctccatacgccacgcggcggtgcaggcctggct

SEQ ID NO: 776185 - DNA, 120 bp, Artificial Sequence
  ENSG00000243156_107 (sequence is synthesized)
tctcctcctgctccaccctctacagagccaggcttcctggtgccccagccaggccagcaactgagttagggttgggatctgcgccttctcagggacagggagagtgtgccttcatcaagg

SEQ ID NO: 776186 - DNA, 120 bp, Artificial Sequence
  ENSG00000243156_108 (sequence is synthesized)
cttccagtcgagctttcccagttgcactggggctgagctgagaattcccctgggtttctatgtgggtccctaaacacatcccaatactggtgatgggtgctgctttagggggtcagcaaa

SEQ ID NO: 776187 - DNA, 120 bp, Artificial Sequence
  ENSG00000243156_109 (sequence is synthesized)
gaatggagaatgtggtcccaagctcactgcctcagtggtgacagtgtggacattcaacctattgtgtcagcttggccacccacctccctcacgttgctgtggtgggtagtatgcccactg

SEQ ID NO: 776188 - DNA, 120 bp, Artificial Sequence
  ENSG00000243156_110 (sequence is synthesized)
cttctccatccatgaagcacctactgcctgggttggctgtgccaaggctggtacttggtgagcctccccagggcccagcagatacaaggagcaagggagaaacaggaacaggaccccagg

SEQ ID NO: 776189 - DNA, 120 bp, Artificial Sequence
  ENSG00000243156_111 (sequence is synthesized)
aacaagccatggacaccagtcatggaaccctagagccagagggcggcctctaaggcctcacgctctaggggcacccacagaggcaaagccgtttgctagacgtcacatacggaatactaa

SEQ ID NO: 776190 - DNA, 120 bp, Artificial Sequence
  ENSG00000243156_112 (sequence is synthesized)
agccaaagccaagcctgggggacagacaggctagcggatggccgacctagaggacggctgaggatcgaggagacggtcgagctaggggatggatgacctacgggacggccaggctagggg

SEQ ID NO: 776191 - DNA, 120 bp, Artificial Sequence
  ENSG00000243156_113 (sequence is synthesized)
atggatgacctaggggacagtcgagctaggggatggatgacctacgggacggccaagctaggggatggatgacctaggggacagtcgagctaggggatggatgacctacgggacggcccg

SEQ ID NO: 776192 - DNA, 120 bp, Artificial Sequence
  ENSG00000243156_114 (sequence is synthesized)
gctaggggatggatgacctacgggacagtcgagctaggggatggatgacctatgggatggccaagctaggggatggatgacctacgggacggccaggctaggggatgaatgacctagggg

SEQ ID NO: 776193 - DNA, 120 bp, Artificial Sequence
  ENSG00000243156_115 (sequence is synthesized)
aaggccaacctaggagacagatgacatgggagacaaccgagccacgggcagctgacctgacttccgcatggtatggagtcagcctgagcgagggctgggtgctgtgcctattcaagacat

SEQ ID NO: 776194 - DNA, 120 bp, Artificial Sequence
  ENSG00000243156_116 (sequence is synthesized)
ggatgctaaagaggaaaacaaaccaaacaaaaacagccataaaggacattttgggaacaattaaattcaactgaggactggatgatagtataaatgtgtaatattatcaaattgttaagt

SEQ ID NO: 776195 - DNA, 120 bp, Artificial Sequence
  ENSG00000243156_117 (sequence is synthesized)
tccttgcaagtgataaaggcactgttaatgtacttttatgtaggaaagttatataggaaaatgtctgagttgttagaaagtccatcctaaaacgtttagggacgaagggtcgtggtatct

SEQ ID NO: 776196 - DNA, 120 bp, Artificial Sequence
  ENSG00000243156_118 (sequence is synthesized)
accaatgattcattacaaaaggtcatataaaagatgacatatagatgaagcgtgtggcaaaatggtaacctttggcagacacaggtgagaggcatgtgggtgttcattgtcttcctcttt

SEQ ID NO: 776197 - DNA, 120 bp, Artificial Sequence
  ENSG00000243156_119 (sequence is synthesized)
caactttcctgtgggtttaaatctttcaaagtaagtgtggggaacaggggctctaaagtgaggatggggtttgacctgcctcggaagaaggaagccccttctgccaggccaggatcctgg

SEQ ID NO: 776198 - DNA, 120 bp, Artificial Sequence
  ENSG00000243156_120 (sequence is synthesized)
ggccactccagcagcagacgcctcctcccgcctcacagcatctgtgaaacaagagcctgggttttgttttgttataaacttttaaaccagtcaaaatacttattttttatttaaaatgtt

SEQ ID NO: 776199 - DNA, 120 bp, Artificial Sequence
  ENSG00000243156_121 (sequence is synthesized)
tattatagaaaatttaggataattcagacttttaaaaagtcacctgtagcccgacctacaagagagaacttgcgtttacctcttttctaattgctcccatttgactttaaatacaagcaa

SEQ ID NO: 776200 - DNA, 120 bp, Artificial Sequence
  ENSG00000243156_122 (sequence is synthesized)
cagcccaccagggtgtggcctgggtaccctgccaccccgcatccagattcacagcagaatgtcagctcctgtggctgaccaccacctcaggcacacagggacgggtggtgacttcacccc

SEQ ID NO: 776201 - DNA, 120 bp, Artificial Sequence
  ENSG00000243156_123 (sequence is synthesized)
tcccagcccagaaaatgggtagattgtgggaaggcagccactgccccccattgctattgacatcagccataggtgaagatgttagtgctgttccttagggtgtggtccatagttcctgtg

SEQ ID NO: 776202 - DNA, 120 bp, Artificial Sequence
  ENSG00000243156_124 (sequence is synthesized)
ggctttttgcagccgcttcgggaaatcatctgtctctttttctgaaccggcttgttctcataacaacattctcttgctctgatttgtgggagaggtgggtccacctgaggcaggcgggac

SEQ ID NO: 776203 - DNA, 120 bp, Artificial Sequence
  ENSG00000243156_125 (sequence is synthesized)
acaagtgctcaaagttgaaggaggcaaatttattcttccctcgcctgtaggcttgggaagcacagctccgcacaaggccgccccacagatgggatggatggagcaacagggagcgcggct

SEQ ID NO: 776204 - DNA, 120 bp, Artificial Sequence
  ENSG00000243156_126 (sequence is synthesized)
gtggttgcagcctgcctggaattctcaggacttccctgtcttgtgcgccaccacacaccctggtttccctaatgcctttcagccgtttaatatggctggtgagaccacaagagcagatgt

SEQ ID NO: 776205 - DNA, 120 bp, Artificial Sequence
  ENSG00000243156_127 (sequence is synthesized)
gactcaccttgaccctcagagcggctctgcacaaggtgtgatggaatgagaagaggctcctgctgctgcctgacgtgcttttggtgaacagcacttactgatggtagttcaattcccttt

SEQ ID NO: 776206 - DNA, 120 bp, Artificial Sequence
  ENSG00000243156_128 (sequence is synthesized)
actgggcacaatcaagaaatggcagctgggtggcacacaggaacactgccagcggagggccttttgggagagatgggtggtttccctcccagttttgctgcgtctgtctctgagagcagg

SEQ ID NO: 776207 - DNA, 120 bp, Artificial Sequence
  ENSG00000243156_129 (sequence is synthesized)
accccctttcctcccgcaccccacttctactcccccggagcattcagcaggaagaagtgggctgaatttccacaagcacatggtcactcaaggagaaaagcatctagaatcacatatttt

SEQ ID NO: 776208 - DNA, 120 bp, Artificial Sequence
  ENSG00000243156_130 (sequence is synthesized)
aacggctttaactttacacaagggacagtgagatgaggcgagttttgggggtggtgaggaagaagctgtttcttcccaataaaagagtgaaccccggccgtattcaaaaccaggtccact

SEQ ID NO: 776209 - DNA, 120 bp, Artificial Sequence
  ENSG00000243156_131 (sequence is synthesized)
cagacgccgccgctaggatcttcacacccagattcctacctaggcagtcctgtgtgacttcgtgaaaaataatctcgtgttttaagtcttgtgtgtttgttttcaacttctaacttattt

SEQ ID NO: 776210 - DNA, 120 bp, Artificial Sequence
  ENSG00000243156_132 (sequence is synthesized)
tgctccatttctgtgttcttaatttttaatttgttaatcattattattattactattctgttttgttttctgatgccatccgcttaaaagtcaatttatgtaccacacgccttggcattc

SEQ ID NO: 776211 - DNA, 79 bp, Artificial Sequence
  ENSG00000243156_133 (sequence is synthesized)
ccgagcacaacctgagcagcgtgctggacacgggcgccgaggaggacgtcgccagcagagactgggtctccccatgacc

SEQ ID NO: 776212 - DNA, 120 bp, Artificial Sequence
  ENSG00000243156_134 (sequence is synthesized)
tactgggcccagctgagcataagagtcttttctgtgtcacctttgtgttccctacagtgtctagcaagtgcgttgtgaggggaagataattgaataaattttatccaggtaaatgaacaa

SEQ ID NO: 776213 - DNA, 120 bp, Artificial Sequence
  ENSG00000243156_135 (sequence is synthesized)
agggcggcccaggtcctgtgtaggtagacaggagctcgcaggcgctcagacactgctcccatcacccgccctggtgaggccaaggccactcggccttcatgcagtttgcttccaagctcc

SEQ ID NO: 776214 - DNA, 120 bp, Artificial Sequence
  ENSG00000243156_136 (sequence is synthesized)
tctgacggcctggagctgtgttgattaagccccgtggtcttgttttgggttcaccttcacttaagattctgcgtcctgttccctgtcactgtgtgtggatgagctgtggctgctctcctg

SEQ ID NO: 776215 - DNA, 120 bp, Artificial Sequence
  ENSG00000243156_137 (sequence is synthesized)
tctgccctgcaccgtgatgggacatgccctgtcctgaccccttggccactgggcttgtcatgaggtccaagccctcacctgtcccactttcatgaccacttccttgtgttgggaggtgaa

SEQ ID NO: 776216 - DNA, 120 bp, Artificial Sequence
  ENSG00000243156_138 (sequence is synthesized)
cagtaccatctctacctctacaaacacatttattcttgtcatagcatgacaggactcgcagggtttgtgggtaccaggcctgttgggaagaattatgtagattttccttaaaatggcctc

SEQ ID NO: 776217 - DNA, 120 bp, Artificial Sequence
  ENSG00000243156_139 (sequence is synthesized)
tctcagcaacttgtaaaacttgcctgtgagatgcgtccagagctccacaaactgctgggtgttctgaatgtcccacatacagctccaggtggttcacggcccagggtcactgtggcaaga

SEQ ID NO: 776218 - DNA, 120 bp, Artificial Sequence
  ENSG00000243156_140 (sequence is synthesized)
gggggccagcagggctgtgtttctgtctgtcacactttcctcttgttcaaaacacatgtatctcaagcagctatatacaaaactcataaaaattaaagatggtcagccagtgccaggaaa

SEQ ID NO: 776219 - DNA, 120 bp, Artificial Sequence
  ENSG00000243156_141 (sequence is synthesized)
tgtggaggaggagttggtcatagaatttccatggtgggacaagagaattacccatttggccttcaacgagaggttcccagagttgcatcctttcccttccctaacagctggttcatgtag

SEQ ID NO: 776220 - DNA, 120 bp, Artificial Sequence
  ENSG00000243156_142 (sequence is synthesized)
gccttgtggtgctcattctgggagagggaagatgcgcccagaggctaggcggtgtgccctgggagccatgagaacccagccaagccaggtgaacgcagcttctgctactgcacgtgccct

SEQ ID NO: 776221 - DNA, 120 bp, Artificial Sequence
  ENSG00000243156_143 (sequence is synthesized)
tattatcatctgagcaagttttttaagtaccctgcaggtgggaccaacattttatagccatgtttcaaccattaatgacttttaaaccttctacaatcttgaagatctttataatccatc

SEQ ID NO: 776222 - DNA, 120 bp, Artificial Sequence
  ENSG00000243156_144 (sequence is synthesized)
tttctcgtgaagtacccacaggcctttgcagctgacactctcagagcatgggcagaatcactggtagagaaaaataaccaaaggggtctagacagagactttggctttatgctatagaat

SEQ ID NO: 776223 - DNA, 120 bp, Artificial Sequence
  ENSG00000243156_145 (sequence is synthesized)
gtacattcagttggagagagcaccaccttattagtctgggccctatttcatcagagatggattttctgaggaacctgactactcagtagaacaactcaaaagaaactaaactttccattt

SEQ ID NO: 776224 - DNA, 120 bp, Artificial Sequence
  ENSG00000243156_146 (sequence is synthesized)
gttgccattcttgccatctaattgaaagtataatgggtttcaggtttttaggagttctaaagaattacgctttccatagagaataagaggaagaatgttctacatagtggggagagagga

SEQ ID NO: 776225 - DNA, 120 bp, Artificial Sequence
  ENSG00000243156_147 (sequence is synthesized)
tgagggttggcagtgtggttaaagagcaaaaccaccaagaaagagtcagagccctgaggacgtctctgtccgcgtggttcttgattctgagccagaaggtgacttggtatagcacgggag

SEQ ID NO: 776226 - DNA, 120 bp, Artificial Sequence
  ENSG00000243156_148 (sequence is synthesized)
ttcaaaatgtggtgtcccaaaggaatcacagtgtggacctttacagttaatgacaggcactgtcccccagcttgggtggcaaaggccagtgagctcagggctgaggggcttaccctccgg

SEQ ID NO: 776227 - DNA, 120 bp, Artificial Sequence
  ENSG00000243156_149 (sequence is synthesized)
cagctcagagtccagaacatcttagtccggcagctcagaatcagggcaccttgcctcccggtgagctcactctgctgctagccttggtagaaaaggaacaggattatgggcagtatttta

SEQ ID NO: 776228 - DNA, 120 bp, Artificial Sequence
  ENSG00000243156_150 (sequence is synthesized)
tggctggcatgaaatagatacccttttctcctttgatagagatttccttctttaaatatgaaactgaagctttgaggacttaactagacttccttttgaaaagtttcagaaaagctcagg

SEQ ID NO: 776229 - DNA, 120 bp, Artificial Sequence
  ENSG00000243156_151 (sequence is synthesized)
gagcaagactccatctaaaaaaaaaaaagaagaaaagggaaagctcaggtgtttcagggtcccagaatgtatgttgtagagaacagtcattagctcaggcccatggtaaccgcctctact

SEQ ID NO: 776230 - DNA, 120 bp, Artificial Sequence
  ENSG00000243156_152 (sequence is synthesized)
attagctcaggcccatggtaaccgcctctactgtgcactcgaccagtagaggcgatgatgacggcacttgattctcttgtgtgtaactcagccatcctccctagacccacgtcccaggag

SEQ ID NO: 776231 - DNA, 120 bp, Artificial Sequence
  ENSG00000243156_153 (sequence is synthesized)
gcagggctggtaaagctatgactgggcagtgtttgacccagctgtgcttttactctgtgcctcctctttatattgtggcatttctctcttctcctttatgttctttttctttttatgcca

SEQ ID NO: 776232 - DNA, 120 bp, Artificial Sequence
  ENSG00000243156_154 (sequence is synthesized)
aaattcttgctgttgccaaaacaaaaacaaaaaaacacacccacacccaattacaacctgcagttcaaagaaccactctaggtcggctttaaagtattgtctttctctggtaaccaaatc

SEQ ID NO: 776233 - DNA, 120 bp, Artificial Sequence
  ENSG00000243156_155 (sequence is synthesized)
tgtacctgctgcctaatttagtgtttgggggcattgtttacagtatttctgtttgtaatgtgcttttaatatagaaatcctcttttttgttcttaaatctatgaatgctgtgtttccaag

SEQ ID NO: 776234 - DNA, 120 bp, Artificial Sequence
  ENSG00000243156_156 (sequence is synthesized)
cttatacttactactgcgtgttagtggtcctggcacagattttcttaccctggccttgtactgtccaccatgactttagaaaaagcttgaacaataggcagagaaaggaaatccccaaaa

SEQ ID NO: 776235 - DNA, 120 bp, Artificial Sequence
  ENSG00000243156_157 (sequence is synthesized)
gggattattttccccttggacatgagaagtttagttacaggtttcttgaattcgtttttgtccagaggaatcctctttttatctgatacggttgatgaccaaaaatgaagtagggaagcc

SEQ ID NO: 776236 - DNA, 120 bp, Artificial Sequence
  ENSG00000243156_158 (sequence is synthesized)
gaaggcatagccggaaaggaacagaagagctttttccccgagtgctcatcaccgggttcattaccggccagagatggacggggagaagcacgttagtttcctgtcatcttatggaaaaga

SEQ ID NO: 776237 - DNA, 120 bp, Artificial Sequence
  ENSG00000243156_159 (sequence is synthesized)
tgatctgaagttaaaaaatgaaggtcacaagtggcagttgcctgacccctgtccccagacattccttgcccgataaccatgaggttccatagttcggatcctgaatgggcctttaggaaa

SEQ ID NO: 776238 - DNA, 120 bp, Artificial Sequence
  ENSG00000243156_160 (sequence is synthesized)
tgcaggcctttcccacaccagctagaagggtagccaggcagtagaatttcattcaaccctagggttcccacctgacagagggaagttcggaagtcttactgcttcccacgtccccttccc

SEQ ID NO: 776239 - DNA, 120 bp, Artificial Sequence
  ENSG00000243156_161 (sequence is synthesized)
ttctaggcatttatggaaagctttttagtggagcaagagaattctacaatccagcttacctcccaccttaccccaagagccatagctgacggtgatgtgtgaatgtttatatataggtac

SEQ ID NO: 776240 - DNA, 120 bp, Artificial Sequence
  ENSG00000243156_162 (sequence is synthesized)
acgtttgtatgtatatagatctaattgcacatatatgggtagatatttatttatatgttgcaccctaaattatagtaattataataattgtgaagctgtttctaaagctgcttgttcctg

SEQ ID NO: 776241 - DNA, 120 bp, Artificial Sequence
  ENSG00000243156_163 (sequence is synthesized)
gttctgagaaccacgggagcctcacactggggagccgtactccaggtcagggctttggggatgcacagcagcgtacgggcagcacgcctgtaaggaggtgagtgggtgggtgtctcagaa

SEQ ID NO: 776242 - DNA, 120 bp, Artificial Sequence
  ENSG00000243156_164 (sequence is synthesized)
aatgggcagcacacccccaagaaagggccccaagagcagactaggaacgcagggggctgctgctgccaggacaccacggagagccgggcacccgcctcacatgtctcctgtctggctcca

SEQ ID NO: 776243 - DNA, 120 bp, Artificial Sequence
  ENSG00000243156_165 (sequence is synthesized)
ctgagttagccgtttgagcccactcctatcttttggtggttagtgcatcttcagctcttttctgcaagacactggaacattcctaggctgtcccaaaaggagttccaccatagcctttaa

SEQ ID NO: 776244 - DNA, 120 bp, Artificial Sequence
  ENSG00000243156_166 (sequence is synthesized)
ggtccgagcagggcaccaaggggttcacttttctcccgagccattcagcttggggtgcctgcgggaggggcggacagccagccggcttcccggcggcggtacgagagcccaacaggagag

SEQ ID NO: 776245 - DNA, 120 bp, Artificial Sequence
  ENSG00000243156_167 (sequence is synthesized)
gattagctgtgccaaggaacacgccactgctgcctgtctactgcccgccttctctccacttccatttttgcctttgtttttaacttgtgctcttgtgagttcttggtgtgtttctttgtg

SEQ ID NO: 776246 - DNA, 120 bp, Artificial Sequence
  ENSG00000243156_168 (sequence is synthesized)
agtttttatttaattgtgtaactttgtttttgccgttgactgtgaaaccaagttgtcgtgcttttaattttttttttaacaaatgttacattcttatttaagagaataaattccaaacaa

SEQ ID NO: 776247 - DNA, 120 bp, Artificial Sequence
  ENSG00000243156_169 (sequence is synthesized)
agaggaggaggaggaggactatgacgaggaggaggaagagtccagtgaagaaggggagtactgcccctgggacacagaactgcaaggccagtggcgccaggtacctcccacaggaagaag

SEQ ID NO: 776248 - DNA, 120 bp, Artificial Sequence
  ENSG00000243156_170 (sequence is synthesized)
ggcacgtgcctggtggggacttggatcccggggcaggcattgggggaggcacctggtgggggcctggatccctggggcagactgcaccggggatgcccttctcaggcaaggctgcttcag

SEQ ID NO: 776249 - DNA, 120 bp, Artificial Sequence
  ENSG00000243156_171 (sequence is synthesized)
gggcacctggctcctggctgcctgcggtctggcccacacccctcaccaccagtcactcttgtggggagactgcgtctcccctctgggggccgggttcagggtgatgaaggagagagaacg

SEQ ID NO: 776250 - DNA, 120 bp, Artificial Sequence
  ENSG00000243156_172 (sequence is synthesized)
ctctgacctggagggcagacagggccaccttcctttctcctgcagagtgaaattccctctcacatgccagggtccttctctggcctctggcaactctgcaaatgctctgacctttgtcct

SEQ ID NO: 776251 - DNA, 120 bp, Artificial Sequence
  ENSG00000243156_173 (sequence is synthesized)
gccccacattctggcaggagggcctgcagcctgggtgtcagcccccacccccacgccccgtctgtggttggacctcagtgcagtgcttctgtgcttgtcccgcaggttcaggcgtgaacg

SEQ ID NO: 776252 - DNA, 120 bp, Artificial Sequence
  ENSG00000243156_174 (sequence is synthesized)
ctccggggcgaagcagttgagcccagtggcgggactccacgacgtagacctctctccttctgcccttgctgtgtccaggaaggcatgggcaagaaggacgaccccaagctgatgcaggag

SEQ ID NO: 776253 - DNA, 120 bp, Artificial Sequence
  ENSG00000243156_175 (sequence is synthesized)
gcttataaccctgcgtccggccggcggggcgcgaggaagcccccgcctcgcgttcccgtgtggtcacctcccgccggaggatgcgtggccagattaacgtgacagtgtcaggtggaccca

SEQ ID NO: 776254 - DNA, 120 bp, Artificial Sequence
  ENSG00000243156_176 (sequence is synthesized)
ccttgagaagtcctcacagaagtcccggcgagagtcaatttatgtaccacacgccttggcattcaggagatcatgtgcatcaaagccaagaacctacacggaggaggaactgaatgccaa

SEQ ID NO: 776255 - DNA, 120 bp, Artificial Sequence
  ENSG00000243232_0 (sequence is synthesized)
cttttccctccccctggagctgtagcggcagcagcagcaggaagccgagccgggttgagcgactcggaggcgagcggaggagctggaatatggggagtcagcgaggacggtggggccagg

SEQ ID NO: 776256 - DNA, 120 bp, Artificial Sequence
  ENSG00000243232_1 (sequence is synthesized)
agcccttgggagggcctacggagggagcggccccaggcgctttctagagcgtgagcggtgggggagcaggcgcagggtggcacgagcggaggcggggcccgggcgtggggcacggctggg

SEQ ID NO: 776257 - DNA, 120 bp, Artificial Sequence
  ENSG00000243232_2 (sequence is synthesized)
gaagctgccgcctccggccctgcccggctgcctccgccgcggccagtggctatggagcaggcgggcaccagacctgcggcgacagagcatccacggctccggcggcccatgccctggctg

SEQ ID NO: 776258 - DNA, 120 bp, Artificial Sequence
  ENSG00000243232_3 (sequence is synthesized)
ctgctactgcctctcctgctgctgttgctgctgctgctacctggccctgcggcctcccagctgcgatactctgtgccagaggagcaggcacccggcgcgctcgtgggcaacgtggctcgc

SEQ ID NO: 776259 - DNA, 120 bp, Artificial Sequence
  ENSG00000243232_4 (sequence is synthesized)
gcgctggggcttgagctgcggcgcttggggccgggttgcttgcgcatcaaccatctgggtgcgcccagtccgcgctacctggagctggacctgacgagtggagcgctcttcgtcaacgag

SEQ ID NO: 776260 - DNA, 120 bp, Artificial Sequence
  ENSG00000243232_5 (sequence is synthesized)
cgcattgatcgggaggcgctgtgtgagcagcggcctcgctgcctgctcagcttggaagtgctggcgcacaaccccgtggcggtgagcgccgttgaggtggaaatattggacatcaacgac

SEQ ID NO: 776261 - DNA, 120 bp, Artificial Sequence
  ENSG00000243232_6 (sequence is synthesized)
aactcaccgcgtttcccgcggcccaactaccagcttcaggtaagcgaatcggtggcgcctggagcgcgctttcacatagagagtgcgcaggaccccgacgtgggcgccaactcagtacag

SEQ ID NO: 776262 - DNA, 120 bp, Artificial Sequence
  ENSG00000243232_7 (sequence is synthesized)
acctacgagctcagccccagcgagcacttcgagctggaccttaagcccctgcaggagaacagtaaagtgcttgagctggtgctgcgtaagggcctagaccgggagcaggcagccttgcac

SEQ ID NO: 776263 - DNA, 120 bp, Artificial Sequence
  ENSG00000243232_8 (sequence is synthesized)
cacctggttctcacagccgtggatgggggcatcccagcccgctcgggtacggcacagatctctgtgcgtgtcctggacactaacgacaactctcctgcctttgaccagtccacttatcgc

SEQ ID NO: 776264 - DNA, 120 bp, Artificial Sequence
  ENSG00000243232_9 (sequence is synthesized)
gtccagctacgggaggactcacccccaggcacattggtggtgaagctgaatgcctcagacccggatgagggctccaatggtgagctcaggtactccttgagcagctacacgtcggaccgg

SEQ ID NO: 776265 - DNA, 120 bp, Artificial Sequence
  ENSG00000243232_10 (sequence is synthesized)
gagaggcagctcttcagcatagatgccagtaccggggaagtgcgagtaattggggggctggattatgaggaagcctcctcctaccagatctatgtgcaggcgactgaccggggtccagtg

SEQ ID NO: 776266 - DNA, 120 bp, Artificial Sequence
  ENSG00000243232_11 (sequence is synthesized)
cccatggcaggtcactgcaaggtgctggtggacatcgtggacgtgaatgacaatgccccagaggtggtgctcacggacctgtatagcccagtgcctgagaatgctacacccaacaccatt

SEQ ID NO: 776267 - DNA, 120 bp, Artificial Sequence
  ENSG00000243232_12 (sequence is synthesized)
gtggccgttctcagtgtcaatgaccaagactcaggccccaaccggaaagtgagcctgggtctggaggccacactgcctttccgactgaatggctttggaaactcctatacactggtggtg

SEQ ID NO: 776268 - DNA, 120 bp, Artificial Sequence
  ENSG00000243232_13 (sequence is synthesized)
agcggcccactggaccgagagcgggtggctgtctacaacatcacggtgacagccacagatgggggaataccgcagctcacatccctgcgtacactgaaggttgagatctctgacatcaat

SEQ ID NO: 776269 - DNA, 120 bp, Artificial Sequence
  ENSG00000243232_14 (sequence is synthesized)
gacaatccaccaagcttcctggaggactcctattccatctacatacaggagaacaatttgccaggtgtgttgctctgtactgtgcaagccacagacccagatgaaaaggagaatgcagag

SEQ ID NO: 776270 - DNA, 120 bp, Artificial Sequence
  ENSG00000243232_15 (sequence is synthesized)
gtgacctactcccttctggagagggagattcaagggctgccagtcacctcctatgtctccattaacagtgccagtggcagcctttatgctgtcaactcctttgactatgagaagtttcgg

SEQ ID NO: 776271 - DNA, 120 bp, Artificial Sequence
  ENSG00000243232_16 (sequence is synthesized)
gagttctttgtgactgtggaggctcaggacaaggggagcccaccactgagcagcactgtgactgccaacgtatatgtggtggacatgaatgaccatgcccctcacattctgtaccctacc

SEQ ID NO: 776272 - DNA, 120 bp, Artificial Sequence
  ENSG00000243232_17 (sequence is synthesized)
tcaaccaactcgtcagcagccttcgagatggtgcctcgaactgcccctgctggctacctggtcaccaaagtcatagctatggactcagactctgggcaaaatgcttggcttttttaccat

SEQ ID NO: 776273 - DNA, 120 bp, Artificial Sequence
  ENSG00000243232_18 (sequence is synthesized)
ctagcccagacttctgacctggacctctttaaggtagagctgcacacaggagaaattaggactaccaggaagatgggagatgagagtggtagcactttcaacctgaccgtggtggtccga

SEQ ID NO: 776274 - DNA, 120 bp, Artificial Sequence
  ENSG00000243232_19 (sequence is synthesized)
gataatggagagccatcactatcagcctctgtggccattacagtagctgtggtggatagggtttccaaaatcctccctgacactcagaggcatgttaagagccctcggacatactctgaa

SEQ ID NO: 776275 - DNA, 120 bp, Artificial Sequence
  ENSG00000243232_20 (sequence is synthesized)
attaccctttatctaataatagcattaagcacagtgtcttttatatttcttttgacaatcatcattttgagcatcatcaagtgctaccgctacactgcgtatggcactgcatgctgtgga

SEQ ID NO: 776276 - DNA, 120 bp, Artificial Sequence
  ENSG00000243232_21 (sequence is synthesized)
ggcttctgtggagtaagggaaaggtcccctgcagaactgtacaaacaagccaacaacaatattgatgccaggataccgcatggcctcaaagtgcagcctcacttcattgaagttcgaggg

SEQ ID NO: 776277 - DNA, 120 bp, Artificial Sequence
  ENSG00000243232_22 (sequence is synthesized)
aatggctccctcaccaagacctactgctacaaggcctgtctgacagcaggctcagggagtgacactttcatgttttacaatacaggggcccagacaggaccagggccttcgggagcccaa

SEQ ID NO: 776278 - DNA, 120 bp, Artificial Sequence
  ENSG00000243232_23 (sequence is synthesized)
ctcaaaatgagccacgacagcccaaccctgactggcgttactctgcctccctgagagcaggcatgcacagctctgtgcacctagaggaggctggcattctacgggctggtccaggagggc

SEQ ID NO: 776279 - DNA, 120 bp, Artificial Sequence; identical to SEQ ID NO: 772619
  ENSG00000243232_24 (sequence is synthesized)

SEQ ID NO: 776280 - DNA, 120 bp, Artificial Sequence; identical to SEQ ID NO: 80633
  ENSG00000243232_25 (sequence is synthesized)

SEQ ID NO: 776281 - DNA, 120 bp, Artificial Sequence; identical to SEQ ID NO: 80634
  ENSG00000243232_26 (sequence is synthesized)

SEQ ID NO: 776282 - DNA, 120 bp, Artificial Sequence; identical to SEQ ID NO: 80635
  ENSG00000243232_27 (sequence is synthesized)

SEQ ID NO: 776283 - DNA, 120 bp, Artificial Sequence; identical to SEQ ID NO: 80636
  ENSG00000243232_28 (sequence is synthesized)

SEQ ID NO: 776284 - DNA, 120 bp, Artificial Sequence; identical to SEQ ID NO: 80637
  ENSG00000243232_29 (sequence is synthesized)

SEQ ID NO: 776285 - DNA, 120 bp, Artificial Sequence; identical to SEQ ID NO: 80638
  ENSG00000243232_30 (sequence is synthesized)

SEQ ID NO: 776286 - DNA, 120 bp, Artificial Sequence; identical to SEQ ID NO: 80639
  ENSG00000243232_31 (sequence is synthesized)

SEQ ID NO: 776287 - DNA, 120 bp, Artificial Sequence; identical to SEQ ID NO: 80640
  ENSG00000243232_32 (sequence is synthesized)

SEQ ID NO: 776288 - DNA, 120 bp, Artificial Sequence; identical to SEQ ID NO: 80641
  ENSG00000243232_33 (sequence is synthesized)

SEQ ID NO: 776289 - DNA, 120 bp, Artificial Sequence; identical to SEQ ID NO: 80642
  ENSG00000243232_34 (sequence is synthesized)

SEQ ID NO: 776290 - DNA, 120 bp, Artificial Sequence; identical to SEQ ID NO: 80643
  ENSG00000243232_35 (sequence is synthesized)

SEQ ID NO: 776291 - DNA, 120 bp, Artificial Sequence; identical to SEQ ID NO: 80644
  ENSG00000243232_36 (sequence is synthesized)

SEQ ID NO: 776292 - DNA, 120 bp, Artificial Sequence; identical to SEQ ID NO: 80645
  ENSG00000243232_37 (sequence is synthesized)

SEQ ID NO: 776293 - DNA, 120 bp, Artificial Sequence; identical to SEQ ID NO: 80646
  ENSG00000243232_38 (sequence is synthesized)

SEQ ID NO: 776294 - DNA, 120 bp, Artificial Sequence; identical to SEQ ID NO: 80647
  ENSG00000243232_39 (sequence is synthesized)

SEQ ID NO: 776295 - DNA, 120 bp, Artificial Sequence; identical to SEQ ID NO: 80648
  ENSG00000243232_40 (sequence is synthesized)

SEQ ID NO: 776296 - DNA, 120 bp, Artificial Sequence; identical to SEQ ID NO: 80649
  ENSG00000243232_41 (sequence is synthesized)

SEQ ID NO: 776297 - DNA, 120 bp, Artificial Sequence; identical to SEQ ID NO: 80650
  ENSG00000243232_42 (sequence is synthesized)

SEQ ID NO: 776298 - DNA, 120 bp, Artificial Sequence; identical to SEQ ID NO: 80651
  ENSG00000243232_43 (sequence is synthesized)

SEQ ID NO: 776299 - DNA, 120 bp, Artificial Sequence; identical to SEQ ID NO: 80652
  ENSG00000243232_44 (sequence is synthesized)

SEQ ID NO: 776300 - DNA, 120 bp, Artificial Sequence; identical to SEQ ID NO: 80653
  ENSG00000243232_45 (sequence is synthesized)

SEQ ID NO: 776301 - DNA, 120 bp, Artificial Sequence; identical to SEQ ID NO: 80654
  ENSG00000243232_46 (sequence is synthesized)

SEQ ID NO: 776302 - DNA, 120 bp, Artificial Sequence
  ENSG00000243232_47 (sequence is synthesized)
gagtatccttcgctgtcacctgccatctgacagcccaggagtgccagcttggcttggctttctctacccgaggaaaaaccagaggcaggagaagtgtcccctccagtcggtgcgggtgtc

SEQ ID NO: 776303 - DNA, 120 bp, Artificial Sequence
  ENSG00000243232_48 (sequence is synthesized)
agtgactgacagcaggaatctcacaggccaaagtggtcagaatgctgggaacctgattattctcaaaaatgaggctgtttctcaaaatgaggtgagacagtggtcagggggtcttctaca

SEQ ID NO: 776304 - DNA, 120 bp, Artificial Sequence
  ENSG00000243232_49 (sequence is synthesized)
aactcatgcatttgttacacatcccccaatatcctgtgatttggctttattgagtcattaacagtgacaagagttatctggtaaactgagtatatatagtatccacaatttgatcataat

SEQ ID NO: 776305 - DNA, 120 bp, Artificial Sequence
  ENSG00000243232_50 (sequence is synthesized)
agttcaagcatgagcagaatgtgttagctgcagccctggcttcatagttgtaagcaatttctgagggtggaagaagagatgggaaagaatttatgatctaaccgttatctgggtctgtgt

SEQ ID NO: 776306 - DNA, 87 bp, Artificial Sequence
  ENSG00000243238_0 (sequence is synthesized)
tcccaggatccagtggggatgttgtgatgactcagtctccactctccctgcccgtcacccttggacagccggcctccatctcctgca

SEQ ID NO: 776307 - DNA, 120 bp, Artificial Sequence
  ENSG00000243238_1 (sequence is synthesized)
atctcctgcaggtctagtcaaagcctcgtatacagtgatggaaacacctacttgaattggtttcagcagaggccaggccaatctccaaggcgcctaatttataaggtttctaaccgggac

SEQ ID NO: 776308 - DNA, 120 bp, Artificial Sequence; identical to SEQ ID NO: 772705
  ENSG00000243238_2 (sequence is synthesized)

SEQ ID NO: 776309 - DNA, 120 bp, Artificial Sequence
  ENSG00000243244_0 (sequence is synthesized)
ggtgtggctggctgcggccagaatcggagccccaaccgcgctgccgagtcaacctatttgatttcttgacaagaccacaatctgatcccaaagatgtgctccacaaatccaggcaaatgg

SEQ ID NO: 776310 - DNA, 120 bp, Artificial Sequence
  ENSG00000243244_1 (sequence is synthesized)
gtcacctttgatgatgatcctgctgttcaatcttctcaaaagtcaaagaattttcctctggagaatcaaggtgtctgtagaccaaatggactgaagctgaaccttcctggcctcagggaa

SEQ ID NO: 776311 - DNA, 120 bp, Artificial Sequence
  ENSG00000243244_2 (sequence is synthesized)
tttcccagtggatcttcctccaccagcagcactcctctctcctcccccattgtagatttttatttcagtccaggacctccaagtaactctcctctttctacacctaccaaagacttccca

SEQ ID NO: 776312 - DNA, 120 bp, Artificial Sequence
  ENSG00000243244_3 (sequence is synthesized)
ggttttcctggcatccccaaagcagggactcatgtgctttatcctattccagaatcatcttcagacagcccactcgcaatatcaggaggagaatcttccttactgcctaccagaccaaca

SEQ ID NO: 776313 - DNA, 120 bp, Artificial Sequence
  ENSG00000243244_4 (sequence is synthesized)
tgtttatcccatgccttgttacccagtgaccactcatgtacacatccaactcccaaagtaggtcttccagatgaagttaatcctcaacaggctgaaagcctaggattccaaagtgatgat

SEQ ID NO: 776314 - DNA, 120 bp, Artificial Sequence
  ENSG00000243244_5 (sequence is synthesized)
ctcccccagtttcagtattttcgagaggactgtgctttttcaagtccattttggaaagatgaaggcagtgattcccatttcacccttgacccaccaggaagcaaaaagatgttctcatca

SEQ ID NO: 776315 - DNA, 120 bp, Artificial Sequence
  ENSG00000243244_6 (sequence is synthesized)
agaaacaaggagatgcctattgaccaaaaaagcctaaataagtgttcactcaactatatctgtgagaagcttgaacatctccagtcagctgagaaccaagactcacttagaagtttgtct

SEQ ID NO: 776316 - DNA, 120 bp, Artificial Sequence
  ENSG00000243244_7 (sequence is synthesized)
atgcactgtctatgtgctgaagaaaatgcctcttcctttgtcccccacacactcttcaggagtcagccaaaatccggatggtctttcatgctgagaattcctgagaagaagaatatgatg

SEQ ID NO: 776317 - DNA, 120 bp, Artificial Sequence
  ENSG00000243244_8 (sequence is synthesized)
tcttcccggcaatggggaccaatttttctgaaagttttgcctggaggaattttgcagatgtattatgaacagggattagaaaaaccatttaaagagatacagcttgatccatattgtagg

SEQ ID NO: 776318 - DNA, 120 bp, Artificial Sequence
  ENSG00000243244_9 (sequence is synthesized)
ctttctgaacccaaggttgagaacttcagtgtagcaggaaaaatccacactgtgaagattgaacatgtgtcttacacagaaaaaaggaaataccattctaagacagaagtagttcatgaa

SEQ ID NO: 776319 - DNA, 120 bp, Artificial Sequence
  ENSG00000243244_10 (sequence is synthesized)
cctgacatagagcagatgctgaagttggggtccacatcgtaccatgacttccttgactttctgactactgtggaggaggagctgatgaagttgccagctgtttcaaaaccaaaaaagaac

SEQ ID NO: 776320 - DNA, 120 bp, Artificial Sequence
  ENSG00000243244_11 (sequence is synthesized)
tacgaggagcaagaaatttccttggaaattgtggacaacttttggggtaaagtcacaaaagaaggaaaatttgttgaaagtgctgtgataactcaaatttattgcctctgctttgtgaat

SEQ ID NO: 776321 - DNA, 120 bp, Artificial Sequence
  ENSG00000243244_12 (sequence is synthesized)
gggaacctggaatgctttttaaccttgaatgaccttgagttgccgaagcgagatgaatcctattatgagaaggactcagaaaaaaaggggattgatattcttgactaccattttcataag

SEQ ID NO: 776322 - DNA, 120 bp, Artificial Sequence
  ENSG00000243244_13 (sequence is synthesized)
tgtgtgaatgtacaagaatttgagcaatcaagaatcattaagtttgtacctctggatgcctgccggtttgagctgatgcgtttcaagactttgtataatggggataatcttcccttttcc

SEQ ID NO: 776323 - DNA, 120 bp, Artificial Sequence
  ENSG00000243244_14 (sequence is synthesized)
ttgaagtctgtagtggttgtccagggagcatacgtggaacttcaggcttttgtcaacatggcctcattggcgcagaggtcatcctatgctggttccttaaggtcctgtgacaatataagg

SEQ ID NO: 776324 - DNA, 120 bp, Artificial Sequence
  ENSG00000243244_15 (sequence is synthesized)
atacactttcctgtcccatcgcagtggatcaaggccctttggaccatgaacctccagaggcagaagtctctgaaagctaaaatgaaccgccgagcatgtctggggagtttacaggaactt

SEQ ID NO: 776325 - DNA, 120 bp, Artificial Sequence
  ENSG00000243244_16 (sequence is synthesized)
gaatctgaacctgtcattcaagtcactgtggggtcagcaaaatatgagagtgcctaccaggcagtggtatggaagatagatcggcttccagacaaaaattcaagtctagatcatccccat

SEQ ID NO: 776326 - DNA, 120 bp, Artificial Sequence
  ENSG00000243244_17 (sequence is synthesized)
tgtctgtcatacaaattagagcttggatcagaccaagaaattccctctgattggtatccatttgctactgttcagttttccgtgcctgacacctgtgcctcaaggacagaggtcaggtct

SEQ ID NO: 776327 - DNA, 120 bp, Artificial Sequence
  ENSG00000243244_18 (sequence is synthesized)
ctgggagtggagagtgatgtccagccacagaaacatgttcagcagcgagcttgctacaacatccaggttgaaatagaaaagaagtggattaaaatcgatggagaagacccagataaaatt

SEQ ID NO: 776328 - DNA, 120 bp, Artificial Sequence
  ENSG00000243244_19 (sequence is synthesized)
ggtgactgcataactcagtaggagtagcaagagtttatgatgacagcccacttgtcaaatatgtaattcaccgaaaccacaccaagtcctgctactgtagagtggaaatgacttctgaat

SEQ ID NO: 776329 - DNA, 120 bp, Artificial Sequence
  ENSG00000243244_20 (sequence is synthesized)
agcggttttaggacaggtctgatggctgtgtttagagaagtttagacctaaaaccgaacaatctgtattttttgcttttcatgtgtttttgtcctaggggttcgatctaaaatgtttcta

SEQ ID NO: 776330 - DNA, 120 bp, Artificial Sequence
  ENSG00000243244_21 (sequence is synthesized)
taattcgtgtgatgttttgcttcctattgaaactcaaaggcactgttactcgttgtgtgaccccgcagccagtatgatttttgattactcagtggctgactgttttgctctctggattac

SEQ ID NO: 776331 - DNA, 120 bp, Artificial Sequence
  ENSG00000243244_22 (sequence is synthesized)
tgcctctgaaatgtggctaggtgtagaatgatgttgaaaccacaggctaaaatgtagatctggaagtatctgtgcttttgaattacttatttacctgtcctcttaccgttggtaaataat

SEQ ID NO: 776332 - DNA, 120 bp, Artificial Sequence
  ENSG00000243244_23 (sequence is synthesized)
aattggctatatttggtacctgtctctctcctactgtattgtcattttcaaaatgtgtttgttttctggcgcgtgctgcaaagaagctatttctgttgtcctacatattttagtataaat

SEQ ID NO: 776333 - DNA, 120 bp, Artificial Sequence
  ENSG00000243244_24 (sequence is synthesized)
cactaagacatatttcctttcacttggcaggattcctttcaaaatggaatctgagtattagacactagttaacatatttgtgtatattaaatatgaatttttaaaatttataaatactat

SEQ ID NO: 776334 - DNA, 120 bp, Artificial Sequence
  ENSG00000243244_25 (sequence is synthesized)
tttccaaaagtacagactctaaggacatattttgataaagtattatttgtaatgaacacaagcctctcttgagtagaagtctaaatcacattatgattattttatactagttctgctatc

SEQ ID NO: 776335 - DNA, 120 bp, Artificial Sequence
  ENSG00000243244_26 (sequence is synthesized)
atgctgttttatgctaattctgcttattttagagtatttttcattaaaaggtgagcaaagtgaaagatacttggtattttacccagatttctaagtggcaacatttttattcttcagagt

SEQ ID NO: 776336 - DNA, 120 bp, Artificial Sequence
  ENSG00000243244_27 (sequence is synthesized)
caggtaaatgactataatagtttggtttctaatgaaaagtcaatagcattagcagttataattctgtttataatttcctttcagcatttacagtgaaaagtgagaattttaaaatttatg

SEQ ID NO: 776337 - DNA, 120 bp, Artificial Sequence
  ENSG00000243244_28 (sequence is synthesized)
aaatctatattccaggtattgtttttagtctgaaaaacaaactcccccatgtggtattaatataccttcaatttatgttgagtcttaaacataattaggagatatttttctctatttgct

SEQ ID NO: 776338 - DNA, 120 bp, Artificial Sequence
  ENSG00000243244_29 (sequence is synthesized)
agatttgttttgagtcaaaactgatttagtgttcttccaaacaacatttatgtgttggcctacagagtttatttcatgtgttttttttaatatttaatattatattacattcattgaaat

SEQ ID NO: 776339 - DNA, 120 bp, Artificial Sequence
  ENSG00000243244_30 (sequence is synthesized)
ctgttcaaaaacagattaagacaaacatttatgatggtctgtatcaatcagcagattttattgcttttcattattttactgtaaaggcaaagaatgcaataggtgatggttggttgaaag

SEQ ID NO: 776340 - DNA, 71 bp, Artificial Sequence
  ENSG00000243244_31 (sequence is synthesized)
gtaaaggcaaagaatgcaataggtgatggttggttgaaaggaattgttattgctgtttttattttttatgt

SEQ ID NO: 776341 - DNA, 88 bp, Artificial Sequence
  ENSG00000243244_32 (sequence is synthesized)
ctcctgcctcagcctccaactggctaaaattcttttgtatttttactacagacggagtttccccatgttggccgggctagtctcgaac

SEQ ID NO: 776342 - DNA, 120 bp, Artificial Sequence
  ENSG00000243244_33 (sequence is synthesized)
gtgatccaccagcctcggcctcccaaagttctgggattaaatgcgtgagccaccatgcccggccgctattgctctttttaacttcatttgatgccttgcttataatatcatatgcttgag

SEQ ID NO: 776343 - DNA, 120 bp, Artificial Sequence
  ENSG00000243244_34 (sequence is synthesized)
atatcatatgcttgaggctcactgttgatgtagagtagggcaaatctgtgtgtgtatgtcattaaaaaaattctaccatctttctttatcatctggtgtgggcgcactctacagtgactt

SEQ ID NO: 776344 - DNA, 120 bp, Artificial Sequence
  ENSG00000243244_35 (sequence is synthesized)
cagtctgctcagaacgaatgtggaggccggccgaaactgatgctgcccacagtcccagtgaagttaggtgggttaattactgccattcctttctaagtgtgttttatggcatcctgccca

SEQ ID NO: 776345 - DNA, 120 bp, Artificial Sequence
  ENSG00000243244_36 (sequence is synthesized)
caaagaactcacagtctgattaggatgaacttaatgactatttacacctcaaaatatattcagcaaagggttcacttagttgcccctcatgcttcacaggttgactagtatctgtgggta

SEQ ID NO: 776346 - DNA, 120 bp, Artificial Sequence
  ENSG00000243244_37 (sequence is synthesized)
cctccctgcccaggttattcactcacaagccaccgggccttcaggacatctcaagattcagtcttgacaatataatagcaaaagctggactaaagcccaaatggattgtctgtggcaatg

SEQ ID NO: 776347 - DNA, 120 bp, Artificial Sequence
  ENSG00000243244_38 (sequence is synthesized)
cagaagctgatagcattaacagcagggtgttacagcataattgttaattcgcacatctattaggatccttaaatattcattacttaatgttaaattaacattctgtgtagggaggggagg

SEQ ID NO: 776348 - DNA, 120 bp, Artificial Sequence
  ENSG00000243244_39 (sequence is synthesized)
cttattcaattcttctgacctcagaactggcagaaggtcagatgtgactacagaactctaggtgaaaaatcaggtagggttcaaattaagtagaactgcccttgccggaatagtgatctt

SEQ ID NO: 776349 - DNA, 120 bp, Artificial Sequence
  ENSG00000243244_40 (sequence is synthesized)
caaaaaacccttgcttttaggggagggaagcggggaaggaaaggaatgagggaggaaatattcctttctagcattcattttgcttagatcactccattgtgagtttgaccattttggagt

SEQ ID NO: 776350 - DNA, 120 bp, Artificial Sequence
  ENSG00000243244_41 (sequence is synthesized)
caaatgagcagacttccaaggagttgaccagtttgtgactagtctggtcacctttccagttacaggatcatattaactgtgtaaatgaattcatgggtagatgatttgtgcagatctgaa

SEQ ID NO: 776351 - DNA, 120 bp, Artificial Sequence
  ENSG00000243244_42 (sequence is synthesized)
tttaagaacatttcctttttctgtgggaatcacaagagtttatccactaaaaaaagatatgtaaaaaagatactttccagcacataaataaaggctggaattttacaacctgatgtatat

SEQ ID NO: 776352 - DNA, 120 bp, Artificial Sequence
  ENSG00000243244_43 (sequence is synthesized)
attagacagttctaggatgttagttcccttcattccagagctatgcttgtgatacagccccttttcttataaagtcagttagaaggacttccttaacaatgactattataatgtcttact

SEQ ID NO: 776353 - DNA, 120 bp, Artificial Sequence
  ENSG00000243244_44 (sequence is synthesized)
taaaatacagttttgtattctgtcaatgcaaatataagacaggttgagccttaatcatgtaacaaaatattttgtagattacatattgatttttcaaaaattaaaaatgtatttcaaact

SEQ ID NO: 776354 - DNA, 120 bp, Artificial Sequence
  ENSG00000243244_45 (sequence is synthesized)
ggccagaatcggagccccaaccgcgctgccgctcggaccttagcctgtgcctgcagcccggagtcccctcctgccctggaaggcaaggagccaggccacggggccacagccgcgggggcc

SEQ ID NO: 776355 - DNA, 120 bp, Artificial Sequence
  ENSG00000243244_46 (sequence is synthesized)
tcttgtgtccttcctcctgctatgattgattcgcccaggaaggagggagcgctctcccctcctctgggaggctggagactcggggacagaagatgcgctggagggaagagaacggagcgt

SEQ ID NO: 776356 - DNA, 120 bp, Artificial Sequence
  ENSG00000243244_47 (sequence is synthesized)
tttgccagcaggcgatggaatagggactacgagacaccctgcagcctctcctgggaggacaacgccccttctccctctccatgcactcttgaggcagcaaagaggaggcatctggacgcg

SEQ ID NO: 776357 - DNA, 120 bp, Artificial Sequence
  ENSG00000243244_48 (sequence is synthesized)
gcgggagcgggaggagtcactgcgccgcggccgcccctccccgccctccactcggcggccccgggtcttcctccccctcctcctccccctcctcctccccctcctcttcctccgcctcct

SEQ ID NO: 776358 - DNA, 120 bp, Artificial Sequence
  ENSG00000243244_49 (sequence is synthesized)
tcttcctccgcctcctggtgtggctggctgcggccagaatcggagccccaaccgcgctgccggtgagtgaccagccccaggggacagagacgggaggcctgggaccccccctctccaggg

SEQ ID NO: 776359 - DNA, 120 bp, Artificial Sequence
  ENSG00000243244_50 (sequence is synthesized)
ggaggcctgggaccccccctctccagggtggggcctcccgccgtgtctgggaaagtttgcgggcgccccgggacgcgggcatctccagggccgctcggcgcctccccatctccccgcgcc

SEQ ID NO: 776360 - DNA, 120 bp, Artificial Sequence
  ENSG00000243244_51 (sequence is synthesized)
gggcccgcagagggatggcctcccggcagggactcctcggctcccctctgttctgagactgctgctgggaccggggtccgactctaaagagaaaactcaaacagcaaaaaaaggaatatc

SEQ ID NO: 776361 - DNA, 120 bp, Artificial Sequence
  ENSG00000243244_52 (sequence is synthesized)
gactcagttccgagggcgggggccggggctcgttctcacccgcgcgcggcccctcgacctctcggacccgggccaccagctctgcgcccctcacgcctccctcggggtctctgtgtctct

SEQ ID NO: 776362 - DNA, 120 bp, Artificial Sequence
  ENSG00000243244_53 (sequence is synthesized)
ctcccgctcccggactccctcctccttctgactgctgttatttgggctgttgtccctccccgctccctggtacctcagctcggaccttagcctgtgcctgcagcccggagtcccctcctg

SEQ ID NO: 776363 - DNA, 120 bp, Artificial Sequence
  ENSG00000243244_54 (sequence is synthesized)
attcactgggtattggggttgggtcccttggacccacaaactgaacctcgtgggtacagggaaaaattaaaatatattcctccttaggattgtactgcttctgttggtttggcatctttt

SEQ ID NO: 776364 - DNA, 120 bp, Artificial Sequence
  ENSG00000243244_55 (sequence is synthesized)
tatttttaacccttctaactgtgctttcttcgaataataatgatacttcatgtaattagcgtttctaatatctaaagacagaagaaggaagaaaataaacggaagagagagaatgcttgc

SEQ ID NO: 776365 - DNA, 120 bp, Artificial Sequence
  ENSG00000243244_56 (sequence is synthesized)
taaaaatactcatttttgacttcagtccacactcgactgttttcctgggagatagaagttcagtgtagcttgttttcagactaaccgcaaacacgattacagcctcctccaggctagaag

SEQ ID NO: 776366 - DNA, 120 bp, Artificial Sequence
  ENSG00000243244_57 (sequence is synthesized)
ttttaatttgcctgacatgcagcacactgtttgttggtattcccagcctggcattcccgtctgcatagctctagtctccctcccaactcccccacccccactttctttctcataaaaggg

SEQ ID NO: 776367 - DNA, 120 bp, Artificial Sequence
  ENSG00000243244_58 (sequence is synthesized)
agctgtgaaaacaaggcaatgggagaggctcaaacgagctggaccacataataaaaacagccctacttattttaatcctgaggctatggactcccctggactctgattgggtggaagaat

SEQ ID NO: 776368 - DNA, 120 bp, Artificial Sequence
  ENSG00000243244_59 (sequence is synthesized)
tgtttagttcatttgtgtggtttttctgtcagtagttattatggttgaatcagtgtttccatgacagtcttgcttctgtgggcacgatggggagcctgttaattctcggatgggtctgga

SEQ ID NO: 776369 - DNA, 120 bp, Artificial Sequence
  ENSG00000243244_60 (sequence is synthesized)
cagatcaagtctggagtctggagagatttttcagggcttgacctgggctgatattgcaaacctctgcacactcactcagaaccagagcagccgggagcagcctgagctggggttttcttc

SEQ ID NO: 776370 - DNA, 120 bp, Artificial Sequence
  ENSG00000243244_61 (sequence is synthesized)
cacatgatctgggaagaaaaagctctaccaaggagcgaactgtgtgagcatggttgctgggggatgttgaatgttttacgtttttaggaagaacacacttctcaaaactttagccattcc

SEQ ID NO: 776371 - DNA, 120 bp, Artificial Sequence
  ENSG00000243244_62 (sequence is synthesized)
tgtttccatacaaacaataaatgtggttgtaacaaatgtagtagatcagattctgaacaaccccttaaaaaacaggtccaagtattgaaccatttggaaataaagattttattttatttg

SEQ ID NO: 776372 - DNA, 120 bp, Artificial Sequence
  ENSG00000243264_0 (sequence is synthesized)
gatattgtgatgacccagactccactctctctgtccgtcacccctggacagccggcctccatctcctgcaagtctagtcagagcctcctgcatagtgatggaaagacctatttgtattgg

SEQ ID NO: 776373 - DNA, 120 bp, Artificial Sequence
  ENSG00000243264_1 (sequence is synthesized)
cagataggttcagtggcagcgggtcagggacagatttcacactgaaaatcagccgggtggaggctgaggatgttggggtttattactgcatgcaaagtatacagcttcctcccacagtgg

SEQ ID NO: 776374 - DNA, 120 bp, Artificial Sequence
  ENSG00000243279_0 (sequence is synthesized)
acattaaccggcaggatgtcggaggtgcggctgccaccgctacgcgccctggacgactttgttctggggtcggcgcgtctggcggctccggatccatgcgacccgcagcgatggtgccac

SEQ ID NO: 776375 - DNA, 120 bp, Artificial Sequence
  ENSG00000243279_1 (sequence is synthesized)
cgcgtcatcaacaacctcctctactaccaaaccaactaccttctctgcttcggcatcggcctcgctctcgccgggtacgtgcggccacttcatacgctcctgagcgcgctggtagtggcg

SEQ ID NO: 776376 - DNA, 120 bp, Artificial Sequence
  ENSG00000243279_2 (sequence is synthesized)
gtggccctcggcgtgctggtgtgggcagctgagacccgcgcagctgtgcgccgctgccgccgcagccaccctgcagcctgcctggccgcagtgcttgccgtcggcctcctggtgctctgg

SEQ ID NO: 776377 - DNA, 120 bp, Artificial Sequence
  ENSG00000243279_3 (sequence is synthesized)
gtcgcgggcggcgcttgcaccttcctgttcagcatcgccgggccggtgcttctgatcctggtgcacgcctcgttgcgcctgcgcaaccttaagaacaagattgagaacaagatcgagagc

SEQ ID NO: 776378 - DNA, 120 bp, Artificial Sequence
  ENSG00000243279_4 (sequence is synthesized)
attggtctcaagcggacgccaatgggcctgctactagaggcactgggacaagagcaggaggctggatcctaggcccctgggatctgtacccaggacctggagaataccaccccaccccca

SEQ ID NO: 776379 - DNA, 120 bp, Artificial Sequence
  ENSG00000243279_5 (sequence is synthesized)
gcccaaacaaaacaggacatctgtgaccgccctacccccacgccagccccaaactaagatatccctcacacccagcccccattacctagggacaagagtcttccccagccttgaacccag

SEQ ID NO: 776380 - DNA, 120 bp, Artificial Sequence
  ENSG00000243279_6 (sequence is synthesized)
gaccaagagccacctacatccagccccaaaactggcttcaggccagagcatccatggccaatttcaaattgtgaacccagagacactcccatccacccttctccatgctcatccccaaac

SEQ ID NO: 776381 - DNA, 120 bp, Artificial Sequence
  ENSG00000243279_7 (sequence is synthesized)
tggggcctggggcaaggcactctcaaatcttgaaccctggaccaaagcttttccagaccccaccctaccttccaacccaggtcaagacattgccaaatcttgaactcagaacccaagtgt

SEQ ID NO: 776382 - DNA, 120 bp, Artificial Sequence
  ENSG00000243279_8 (sequence is synthesized)
tccatgcccctgtgtggatggagtcgggtatcctgactgttggacccctggtccaggtgatcccgaccctcaccagtcccatttgcctccctccagctctgcttaggcattttgcccctc

SEQ ID NO: 776383 - DNA, 120 bp, Artificial Sequence
  ENSG00000243279_9 (sequence is synthesized)
accccaatgttccacaccatcgacaaccaaggggtgaggtggggacaggcctcagcagggaatggggcgtatatgttagtgttgctgcaacaataaagcctgttgcatctctcatgccaa

SEQ ID NO: 776384 - DNA, 120 bp, Artificial Sequence
  ENSG00000243279_10 (sequence is synthesized)
gcatgcttaaggcaccaggccagccctgccggtccccgggttgagagggggctgggaaacccgagggcctcgccacgcccccgctaaaagcgccttcccgggcttcgttcccccttctgg

SEQ ID NO: 776385 - DNA, 120 bp, Artificial Sequence
  ENSG00000243279_11 (sequence is synthesized)
gaacaccccttttattatcgcctttcctatctcactcttggtgttaagtgccttccactggccacgtccccgttaccgggcgtcttccctggccatgcccacgttgccaagccaattact

SEQ ID NO: 776386 - DNA, 120 bp, Artificial Sequence
  ENSG00000243279_12 (sequence is synthesized)
cggccacgctttcagtatctgaggcgtcctggctgctcaccactccattggcctgcctgcgcgccaattcccttcggtgggccccggttggctgcaggctgaggtctattccactgacca

SEQ ID NO: 776387 - DNA, 120 bp, Artificial Sequence
  ENSG00000243284_0 (sequence is synthesized)
actcattgcaccttcctgccaccccaggcagtgtctgggccctcagctccccctccctccacctaccccctcacacccaccactacgaccccacgggatacccagcccagacggaggaaa

SEQ ID NO: 776388 - DNA, 120 bp, Artificial Sequence
  ENSG00000243284_1 (sequence is synthesized)
caccgagcctagagacatgagagttggaggagcattccaccttctactcgtgtgcctgagcccagcactgctgtctgctgtgcggatcaacggggatggacaggaggtcctgtacctggc

SEQ ID NO: 776389 - DNA, 120 bp, Artificial Sequence
  ENSG00000243284_2 (sequence is synthesized)
agaaggtgataatgtgaggctgggctgcccctacgtcctggaccctgaggactatggtcccaatgggctggacatcgagtggatgcaggtcaactcagaccccgcccaccaccgagagaa

SEQ ID NO: 776390 - DNA, 120 bp, Artificial Sequence
  ENSG00000243284_3 (sequence is synthesized)
cgtgttccttagttaccaggacaagaggatcaaccatggcagccttccccatctgcagcagagggtccgctttgcagcctcagacccaagccagtacgatgcctccatcaacctcatgaa

SEQ ID NO: 776391 - DNA, 120 bp, Artificial Sequence
  ENSG00000243284_4 (sequence is synthesized)
cctgcaggtatctgatacagccacttatgagtgccgggtgaagaagaccaccatggccacccggaaggtcattgtcactgtccaagcacgacctgcagtgcccatgtgctggacagaggg

SEQ ID NO: 776392 - DNA, 120 bp, Artificial Sequence
  ENSG00000243284_5 (sequence is synthesized)
ccacatgacatatggcaacgatgtggtgctgaagtgctatgccagtgggggctcccagcccctctcctacaagtgggccaagatcagtgggcaccattacccctatcgagctgggtctta

SEQ ID NO: 776393 - DNA, 120 bp, Artificial Sequence
  ENSG00000243284_6 (sequence is synthesized)
cacctcccagcacagctaccactcagagctgtcctaccaggagtccttccacagctccataaaccaaggcctgaacaatggggacctggtgttgaaggatatctccagagcagatgatgg

SEQ ID NO: 776394 - DNA, 120 bp, Artificial Sequence
  ENSG00000243284_7 (sequence is synthesized)
ggccaacaacgtgggctacagtgtttgtgtggtggaggtgaaggtctcagactcccggcgtataggcgtgatcatcggcatcgtcctgggctctctgctcgcgctgggctgcctggccgt

SEQ ID NO: 776395 - DNA, 120 bp, Artificial Sequence
  ENSG00000243284_8 (sequence is synthesized)
atctgggggctcgtctgctgctgctgcgggggctccggggctggcggcgcccgcggtgccttcggctacggcaacggcggcggggtcggcggaggggcctgcggcgacttggctagtgag

SEQ ID NO: 776396 - DNA, 120 bp, Artificial Sequence
  ENSG00000243284_9 (sequence is synthesized)
tgagatcagagaggacgccgtggcgcccgggtgcaaggccagcgggcgcggcagccgcgtcacccacctcctggggtacccgacgcagaacgtcagccgctccctgcgccgcaagtacgc

SEQ ID NO: 776397 - DNA, 120 bp, Artificial Sequence
  ENSG00000243284_10 (sequence is synthesized)
aagtacgcgcctcccccctgcggcggccccgaggacgtggccctggcgccctgcaccgccgccgccgcctgcgaagcgggcccctccccggtctacgtcaaggtcaagagcgcggagccg

SEQ ID NO: 776398 - DNA, 120 bp, Artificial Sequence
  ENSG00000243284_11 (sequence is synthesized)
cgccgaggggccggtgcagtgcaagaacggcctcttggtgtgagcgcgcgcgccgggccgggctgcgccccagccaggaggagggcgcggggctctctgtctgcagctggggacacgtcg

SEQ ID NO: 776399 - DNA, 120 bp, Artificial Sequence
  ENSG00000243284_12 (sequence is synthesized)
gggctggggacgacctcgctcgccccaggctgccaggcggctgggggtgaaggcatttccctaaggaaatgcgtagggaggcagagcctcctccccaaaagtgggaaggggcgggcgagg

SEQ ID NO: 776400 - DNA, 120 bp, Artificial Sequence
  ENSG00000243284_13 (sequence is synthesized)
gcggaggaaggcgatcctgagccttctccgcacccccgggaccgaaggcttgggggagagggagggaggaggaggctgagtgtcctagagcggctgaggccggaggcctggtgtccccag

SEQ ID NO: 776401 - DNA, 120 bp, Artificial Sequence
  ENSG00000243284_14 (sequence is synthesized)
cctaagcagagggccccgggggccgggtgggtgggggtctgtctggacgaattgttctgtgtgtgaggtctgagctctgaggcagcagtgttagcacaataaagaaacattgagacgtga

SEQ ID NO: 776402 - DNA, 71 bp, Artificial Sequence
  ENSG00000243290_0 (sequence is synthesized)
ctctggttcccaggttccagatgcgacatccagatgacccagtctccatcttccgtgtctgcatctgtagg

SEQ ID NO: 776403 - DNA, 89 bp, Artificial Sequence
  ENSG00000243290_1 (sequence is synthesized)
tcgggcgagtcagggtattagcagctggttagcctggtatcagcagaaaccagggaaagcccctaagctcctgatctatgctgcatcca

SEQ ID NO: 776404 - DNA, 120 bp, Artificial Sequence
  ENSG00000243317_0 (sequence is synthesized)
aggctcggaccggcccgcggagctgctgcagtccttcgcgccctcctcgccctccccaccgacatcatgctccagttcctgcttggatttacactgggcaacgtggttggaatgtatctg

SEQ ID NO: 776405 - DNA, 120 bp, Artificial Sequence
  ENSG00000243317_1 (sequence is synthesized)
gctcagaactatgatataccaaacctggctaaaaaacttgaagaaattaaaaaggacttggatgccaagaagaaaccccctagtgcatgagactgcctccagcactgccttcaggatata

SEQ ID NO: 776406 - DNA, 120 bp, Artificial Sequence
  ENSG00000243317_2 (sequence is synthesized)
ctgattctactgctcttgagggcctcgtttactatctgaaccaaaagcttttgttttcgtctccagcctcagcacttctcttctttgctagaccctgtgttttttgctttaaagcaagca

SEQ ID NO: 776407 - DNA, 120 bp, Artificial Sequence
  ENSG00000243317_3 (sequence is synthesized)
aaatggggccccaatttgagaactacccgacatttccaacatactcacctcttcccataatccctttccaactgcatgggaggttctaagactggaattatggtgctagattagtaaaca

SEQ ID NO: 776408 - DNA, 120 bp, Artificial Sequence
  ENSG00000243317_4 (sequence is synthesized)
tgacttttaatgagtagtgtcttctttatcgtttgcgatttttactaccttttttcaaaagaaaaattgatgagttttgtatagctggtcagatacaaataatagtgacttcacagttta

SEQ ID NO: 776409 - DNA, 120 bp, Artificial Sequence
  ENSG00000243317_5 (sequence is synthesized)
gtaattataatgggtacttgttaaacatttggtactaaattatgttgctgcaaagtaattaaaattagtatctagagctagtttctggtgaattattcatttattttgtactgttgttag

SEQ ID NO: 776410 - DNA, 120 bp, Artificial Sequence
  ENSG00000243317_6 (sequence is synthesized)
gcagctctgtagttgctaatttaaccaataagtcaatttgctattcatgaagaaacgattctgagaatcctgtcaggaattggggaatgaaaaaatacacaaaataatggtctttgtccc

SEQ ID NO: 776411 - DNA, 120 bp, Artificial Sequence
  ENSG00000243317_7 (sequence is synthesized)
agtagagttcatagtctatttagtgtgcatgtttttccttaatgatgtatttgatctgacttttttccttctcaaaagaatcatacttgggattacaggtacatttgatgttatatgatg

SEQ ID NO: 776412 - DNA, 120 bp, Artificial Sequence
  ENSG00000243317_8 (sequence is synthesized)
gataagtgaaaagtttttaaaggagattttataccttttcacattaaaaaaggtatttatattattactttgtagtgattgtcttaagaaaaaatatagcccaaatgtatagtaaaatca

SEQ ID NO: 776413 - DNA, 120 bp, Artificial Sequence
  ENSG00000243317_9 (sequence is synthesized)
gcagctcaagaagaatttctgcttctctttgtagttgatgctttgttttttcctgcagtcagaaattccttgtatttgtcaaatgtataatcagcttgtattgtttttaaattaaaaaaa

SEQ ID NO: 776414 - DNA, 120 bp, Artificial Sequence
  ENSG00000243317_10 (sequence is synthesized)
tctcccacccctgttctctggctcctggctcctgtttgacaagttactgttaccacttcgccttatacttttgagaaagagtctgtgcctaaacaaacacgtgtaacacaaatagtaact

SEQ ID NO: 776415 - DNA, 120 bp, Artificial Sequence
  ENSG00000243317_11 (sequence is synthesized)
atacatggaggtctagccctcgccttttttttttctttttttcttttttaatggagatcattctataccagcatgtaagtagcaaggaacctcattctttttttggctgcctaaaatttt

SEQ ID NO: 776416 - DNA, 120 bp, Artificial Sequence
  ENSG00000243317_12 (sequence is synthesized)
tttgaatagatataacataattgatttaatctgctactggtgaatgcttaggttgttcttttgctattacagtgataacttcaatcctaatgttattaagcatatcgattcagggtatag

SEQ ID NO: 776417 - DNA, 120 bp, Artificial Sequence
  ENSG00000243317_13 (sequence is synthesized)
ctataagatgaagtcctaaaagtataatttagactaaatacaaatacccatttcgctagctgttttgtttcagaggacttgttgagcagcttcactaataatgccatttttgaagacatg

SEQ ID NO: 776418 - DNA, 120 bp, Artificial Sequence
  ENSG00000243317_14 (sequence is synthesized)
gcaggttcagaatcaataaactggaagaattgttcagagcatcttttttcagacagtgatgacattgattctgtatatgataaagtgattctgcttctctttgacaacttgcatctctcc

SEQ ID NO: 776419 - DNA, 120 bp, Artificial Sequence
  ENSG00000243317_15 (sequence is synthesized)
tacatggaagtaagttttattcctgtcaatgttgtctttgtgtgtgacagattaggattaaattatggtttgacttttcctagcagcgtgatcatgggcaagtggctttttttttttttt

SEQ ID NO: 776420 - DNA, 81 bp, Artificial Sequence
  ENSG00000243317_16 (sequence is synthesized)
cctgcctcccggtccaagtgattctcgtgctgcagcttctcaagtagctggcatcaccaccacacctggctaatttttgta

SEQ ID NO: 776421 - DNA, 82 bp, Artificial Sequence
  ENSG00000243317_17 (sequence is synthesized)
cgtgctgcagcttctcaagtagctggcacgacgaggtttcaccatgttggcaaagctggtctcaaattcctggcctcaagtg

SEQ ID NO: 776422 - DNA, 120 bp, Artificial Sequence
  ENSG00000243317_18 (sequence is synthesized)
caggcgtgagccactgcgcccagcttttttaaacttttagattcatttaataggtaaattgcatgtcacgggtttgtagcttattctttcagaaactcttgcattatctgtagacgtgga

SEQ ID NO: 776423 - DNA, 120 bp, Artificial Sequence
  ENSG00000243317_19 (sequence is synthesized)
tgtagacgtggacgtaaatatccacctcatagggttttcataaaaaataattgagataatgtatgtaatgtttcacagtgctttgcagactatctaataaatagtagctattagtacaaa

SEQ ID NO: 776424 - DNA, 120 bp, Artificial Sequence
  ENSG00000243317_20 (sequence is synthesized)
gctcagaactatgatgtaagtggccatatccatgacttccttgattccatgtaactgttttagagtgacttttctttgtttgaggtaaggtgtgacttccagcataaatgtagtccatat

SEQ ID NO: 776425 - DNA, 120 bp, Artificial Sequence
  ENSG00000243317_21 (sequence is synthesized)
tgaatattgtagaatggtttgccattgtttgaaaaagtaatccaactcatgaaacagctgtcctccatatcaccacaagagggcaaaatcccttcagtttagctgggctcatgatcatcc

SEQ ID NO: 776426 - DNA, 120 bp, Artificial Sequence
  ENSG00000243317_22 (sequence is synthesized)
tcagctgtggcttgttagccgagagtaatattaagttgggctcttaaaattctttgggaaatcatgtgataagtgagaatttaaaaattaattggataatattttcagccccactatcca

SEQ ID NO: 776427 - DNA, 120 bp, Artificial Sequence
  ENSG00000243317_23 (sequence is synthesized)
gtagtagagatgacttagaattttggagatgcatctgggtagggggactgaaaaatatagatctatattccatctccaaaattctaagtgtagcacatttggggacagagttttgtgaag

SEQ ID NO: 776428 - DNA, 120 bp, Artificial Sequence
  ENSG00000243317_24 (sequence is synthesized)
ctctcacttcaacctcctgagtagctgggactacagggcttcttcgctggaatgaggaagaggaggaagccaaggaagacagagactgtggcatcagtacggtagcctttcctagtaaag

SEQ ID NO: 776429 - DNA, 120 bp, Artificial Sequence
  ENSG00000243317_25 (sequence is synthesized)
agacaagcatagctgaggagaagggtcaggaattttcaggagtaacatgatgtctcggagcagtctgtccgaacacagtgcctctttttaggacttatctagaggtaacattaagcttag

SEQ ID NO: 776430 - DNA, 120 bp, Artificial Sequence
  ENSG00000243317_26 (sequence is synthesized)
ttcttgccagttgctgccacgctatccactttggatttaatgggcaatggcgaatgtctggaggcagggcctggctagagtagatgtcttaatgtgaatttgtgagcccgttaattgggg

SEQ ID NO: 776431 - DNA, 120 bp, Artificial Sequence
  ENSG00000243317_27 (sequence is synthesized)
caagtcctagatggagtgatcaggagtggagttggttagataaaggagaatagaagaggatgagacctctttcctatgaaggccacacctccatgtgcctcccttctcaagtgagaagtt

SEQ ID NO: 776432 - DNA, 120 bp, Artificial Sequence
  ENSG00000243317_28 (sequence is synthesized)
gatttcttctttacagttggtactttatagatgtttcctcctttaactttcataaccacctatgaggtaaccaagcttccaagagcttatgtaatgagactacatgcagcactggattcc

SEQ ID NO: 776433 - DNA, 120 bp, Artificial Sequence
  ENSG00000243317_29 (sequence is synthesized)
aaccccagaccgggactccaaagagtgtttttccttcctgatttcacactgcagcctccctaaaaagagtggatttcctggggaatgaaatcttcctggcttcatatctgcccctgagag

SEQ ID NO: 776434 - DNA, 120 bp, Artificial Sequence
  ENSG00000243317_30 (sequence is synthesized)
tctatgaagtcttgcctgaagaattggggtgagggggttgttcttaaggaggaaatgatatcacttacttttcaaagaaagaatcccagccagggacaaagccaggctcccgggtaaacc

SEQ ID NO: 776435 - DNA, 120 bp, Artificial Sequence
  ENSG00000243317_31 (sequence is synthesized)
tgagaaatttctcctagctttttcactttgcttctggaagcttctgtatttagagtttcaataccctagacataaaacacactcactgcctaaccactatgaatggctgacagtgagatg

SEQ ID NO: 776436 - DNA, 120 bp, Artificial Sequence
  ENSG00000243317_32 (sequence is synthesized)
aggagaagactgagtggccccagaaaacatgacattaaccatgttcctggagaaacttcagtagaaagggcaagagaacacagcactgtacatttgtaaaataatttcaaatacagccta

SEQ ID NO: 776437 - DNA, 120 bp, Artificial Sequence
  ENSG00000243317_33 (sequence is synthesized)
caaggagagtgcagtgaaataggcagccccaaacactgtgctggtgggaggaggaattgctacaacctttttgaggccatttgatgatacacattagaagccttaaagttggtcattccc

SEQ ID NO: 776438 - DNA, 87 bp, Artificial Sequence
  ENSG00000243317_34 (sequence is synthesized)
gtcattcccatcatctaaccagaaatgcatactgagacattaattacctattaaaaaatggaagcatcctctatatccaatggtatt

SEQ ID NO: 776439 - DNA, 120 bp, Artificial Sequence
  ENSG00000243317_35 (sequence is synthesized)
ctattaaaaaatggaagcatcctctatatccaatggtatttcatgacactgaatacattttgatacaactctgtgttaaaatgagatgcatccattgataatcccatttccacagcagag

SEQ ID NO: 776440 - DNA, 120 bp, Artificial Sequence
  ENSG00000243317_36 (sequence is synthesized)
ttaaggatgtggaacatactgtactgagagtacaaagttgagttgagaaaggcaaggtatacaacagtttcagtgtggactgaattttaccaaaaatacataagagttttgcacaaaaaa

SEQ ID NO: 776441 - DNA, 120 bp, Artificial Sequence
  ENSG00000243335_0 (sequence is synthesized)
actcaggcgccggccgctggcgctgcctgctcttcgactgggcgagcttcctgccaatcagggcggaaccagcgcggcgtcggccagtagcgggaggcggtcgggtcaggccccagctgg

SEQ ID NO: 776442 - DNA, 80 bp, Artificial Sequence
  ENSG00000243335_1 (sequence is synthesized)
gcgcgagcgggtcggcgttgagggagccaccgccctcccgcctgcgcactgcctctcgcccccctccggccagcccgcag

SEQ ID NO: 776443 - DNA, 120 bp, Artificial Sequence
  ENSG00000243335_2 (sequence is synthesized)
gcccggggccgccgcctccgcccgcccgaagccgcgcccactgcccagagccagagggatggtggtagtcacggggcgggagccagacagccgtcgtcaggacggtgccatgtccagctc

SEQ ID NO: 776444 - DNA, 120 bp, Artificial Sequence
  ENSG00000243335_3 (sequence is synthesized)
tgacgccgaagacgactttctggagccggccacgccgacggccacgcaggcggggcacgcgctgcccctgctgccacaggagtttcctgaggttgttccccttaacatcggaggggctca

SEQ ID NO: 776445 - DNA, 120 bp, Artificial Sequence
  ENSG00000243335_4 (sequence is synthesized)
cttcactacacgcctgtccacactgcggtgctacgaagacaccatgttggcagccatgttcagtgggcggcactacatccccacggactccgagggccggtacttcatcgaccgagatgg

SEQ ID NO: 776446 - DNA, 120 bp, Artificial Sequence
  ENSG00000243335_5 (sequence is synthesized)
cacacactttggagatgtgctgaatttcctgcgctcaggggacctcccacccagggagcgtgttcgagctgtgtacaaagaggcccagtactatgccatcgggcccctcctggagcagct

SEQ ID NO: 776447 - DNA, 120 bp, Artificial Sequence
  ENSG00000243335_6 (sequence is synthesized)
ggagaacatgcagccactgaagggcgagaaggtgcgccaagcgtttctgggactcatgccctattacaaagaccacttggagcggattgtggagatcgcccggctgcgtgcggtccagcg

SEQ ID NO: 776448 - DNA, 120 bp, Artificial Sequence
  ENSG00000243335_7 (sequence is synthesized)
gaaggcccgctttgccaagctcaaggtctgtgtcttcaaggaggagatgcccatcaccccctatgagtgtccgctcctcaactccctgcgatttgagcggagtgagagtgacgggcagct

SEQ ID NO: 776449 - DNA, 120 bp, Artificial Sequence
  ENSG00000243335_8 (sequence is synthesized)
ttttgagcaccactgtgaagtggatgtgtcttttgggccctgggaggctgtggctgatgtttatgacctgctgcactgcctggtcacggacctctcggcccagggtctcaccgtggacca

SEQ ID NO: 776450 - DNA, 120 bp, Artificial Sequence
  ENSG00000243335_9 (sequence is synthesized)
ccagtgcatcggggtgtgtgacaagcacctcgtgaaccactactactgcaagcgccccatctatgagttcaagatcacatggtggtgagtagccccggtaggcgagagtcccatcaggga

SEQ ID NO: 776451 - DNA, 120 bp, Artificial Sequence
  ENSG00000243335_10 (sequence is synthesized)
ggatgtccaccttgcttggtggctctgggagtaagatccctgaaggggctgctgactgccccagaatctgccgaggtgagaacagcatcctgaggcacagctcccaggggacagaggtgt

SEQ ID NO: 776452 - DNA, 120 bp, Artificial Sequence
  ENSG00000243335_11 (sequence is synthesized)
agctccaatctccctgactgcacctcagggttgggctcagggcttgcggcctgcaggcactccagccagcgctcacctggcctttcctcaaggcatggtagtctttccttgaggctgata

SEQ ID NO: 776453 - DNA, 120 bp, Artificial Sequence
  ENSG00000243335_12 (sequence is synthesized)
gctagggcttgaccaggaagtcccgagaagttttgtcaccttcttgaccttgcaagagagtttctgcccattttagagccacgttaccaaatcgatgtaggcctaatcacttcctcaacc

SEQ ID NO: 776454 - DNA, 120 bp, Artificial Sequence
  ENSG00000243335_13 (sequence is synthesized)
ctgttcaagcgtccctcccttgtgctcagtatattggtgtgaacacggaacatgatgggggatttacctgaccagccaccccatagcccctggctgaagaagaaagagcatcttctctcc

SEQ ID NO: 776455 - DNA, 120 bp, Artificial Sequence
  ENSG00000243335_14 (sequence is synthesized)
cactgcaccccttctcctccaagaatagttgcccacattcccaaaatgtggaaagacttttcttttccttccggaacatgttcttcaccaccttttggagatttaaccatagctgccaaa

SEQ ID NO: 776456 - DNA, 120 bp, Artificial Sequence
  ENSG00000243335_15 (sequence is synthesized)
gctatgcacccagttggccttagaaaaccacaatgtttacagccctgtcttagggccgcggcttctcttatcttccaccaccttccttgcttgcagggttatcttctcacagggctggaa

SEQ ID NO: 776457 - DNA, 120 bp, Artificial Sequence
  ENSG00000243335_16 (sequence is synthesized)
tgcaaatttcagaggcttcttttgaagattccccaagtcaagcaggcaagatgcctagatcttctgttatctttgacatgtaacatcctttttagaggctcagaacacctccttggctgc

SEQ ID NO: 776458 - DNA, 120 bp, Artificial Sequence
  ENSG00000243335_17 (sequence is synthesized)
tatctcatgtgttagaatccagtttgtggtgaacctctttggaaggggaccccctctctttaaaccctgttcctctgtcctggtaacattctccttctaggagagcctctcttctgagaa

SEQ ID NO: 776459 - DNA, 120 bp, Artificial Sequence
  ENSG00000243335_18 (sequence is synthesized)
ggtaaaggaagggctgggtgagacacacagctatcctaggagccgtaggaagacaaaacttcccttttgttttactcctcactcctctatttttgttttactcacttctttatattttgt

SEQ ID NO: 776460 - DNA, 120 bp, Artificial Sequence
  ENSG00000243335_19 (sequence is synthesized)
tttactcctcactcctgtatattttggtttacttactcctctatttcagaaattgaaaaagatccccaaggatctgttactactgcatttccttcttgctctgtctacagcctaggccaa

SEQ ID NO: 776461 - DNA, 120 bp, Artificial Sequence
  ENSG00000243335_20 (sequence is synthesized)
ctagtcagggtctggacatgcatctcctaaaggaagaactgtgtagcaccattgatcacaatgtaacatttccatgctgcattaagggtgtctctctctaatcatgattgtacctgtctc

SEQ ID NO: 776462 - DNA, 120 bp, Artificial Sequence
  ENSG00000243335_21 (sequence is synthesized)
ttcctgggtaaagggagatttttttttttaatgtgtaaagaattgatgcgagccaggaacatgtctgtagtcccagctacttgggcacacgcctgtagtccaggccactcgagcacacac

SEQ ID NO: 776463 - DNA, 120 bp, Artificial Sequence
  ENSG00000243335_22 (sequence is synthesized)
ggaggatcacttgagcccaggagattaagactgtagtatactatgatcgtgcctgtggctagccactgtgctccagcctgggcaacaccatcgtaaaaataaataaataaataaataaat

SEQ ID NO: 776464 - DNA, 120 bp, Artificial Sequence
  ENSG00000243335_23 (sequence is synthesized)
catcgtaaaaataaataaataaataaataaattggggaggacagcctcactggtatcagacttacaggaccagatagacaagatgggtataaggggagctgaagtctgtgttcatatgag

SEQ ID NO: 776465 - DNA, 120 bp, Artificial Sequence
  ENSG00000243335_24 (sequence is synthesized)
cctatgtgtaaacaaagattccagggcgtggttttgcactcctgttgtactcttttagaggtggaaaagaggtggatactgagatctaagaggaaaggatagtcattcacgttctgagat

SEQ ID NO: 776466 - DNA, 120 bp, Artificial Sequence
  ENSG00000243335_25 (sequence is synthesized)
atgcgctctctctattgttctcgtacacaaagggatagtctcttttctggagctgatgtccctgcttggaggttagccccaaaacatggctcttgtattgttctaagagaaaaggctttc

SEQ ID NO: 776467 - DNA, 120 bp, Artificial Sequence
  ENSG00000243335_26 (sequence is synthesized)
attttggttcttctgattggtgttacctactgcctaatatgtgttcattttttgacagagaggcagactattgaaaaagtctgtgtgaacagagagcagttcattaagcccattgctttc

SEQ ID NO: 776468 - DNA, 120 bp, Artificial Sequence
  ENSG00000243335_27 (sequence is synthesized)
agtaatgtggccttgaccccttctgcttcccccttctcccatggagcatggcagggcttggttatttagagtccatacatgcaagccattgagagacttgtttgctcaaatgcaagtttg

SEQ ID NO: 776469 - DNA, 120 bp, Artificial Sequence
  ENSG00000243335_28 (sequence is synthesized)
ctcaaaaacaggtcctgaaggcttgcttaggattacagggatgctgggtaagaacaccgttcctctctctcgctggagaaatccctgtttctctgactccctttgtgatcctcacagtaa

SEQ ID NO: 776470 - DNA, 120 bp, Artificial Sequence
  ENSG00000243335_29 (sequence is synthesized)
tgtattctgtgccactgtaggacacaaggctctgggccagtagaacaggcagagaggtgacactgggcagcaagctgagagctctttctaaatggagtgaaggaattcagtggcctagtt

SEQ ID NO: 776471 - DNA, 120 bp, Artificial Sequence
  ENSG00000243335_30 (sequence is synthesized)
tcgccattctctaatgagaaaccaaggccaggctgaaaagtgcaattagatgtggtggattgtggtaacggcctccagataaaggggttatccctgtggaagtgacttttccccatttga

SEQ ID NO: 776472 - DNA, 120 bp, Artificial Sequence
  ENSG00000243335_31 (sequence is synthesized)
tcccttttcaactctaaatggccaggcccagaacagaagaagggttgggtctggaaggaaggctccaaaggatgaaagcttctccctgatcataaggaagtgcatctttatagaattgtt

SEQ ID NO: 776473 - DNA, 120 bp, Artificial Sequence
  ENSG00000243335_32 (sequence is synthesized)
gtgcataatgtcagtaaatccctctcacttgacaagggactggattcatcttgccttgagacgggccagtagttatcagtgagtcaaagcaaagtgaaagtttcaggagatgggaccaat

SEQ ID NO: 776474 - DNA, 120 bp, Artificial Sequence
  ENSG00000243335_33 (sequence is synthesized)
ggtgcaatgctcgccataacaaaattccttaaaaataaaaaagctaatgttatagcaacaaaaaaagactgaagcaaaaccacactgaaatgcatcccactccaggagaggaattcttag

SEQ ID NO: 776475 - DNA, 120 bp, Artificial Sequence
  ENSG00000243335_34 (sequence is synthesized)
cgtaacactctaaataaatggaaggaatcatcaccttccttattttacctctgccttgttcaccaggctgcccagtgcttaccatgcagaaagcagtcagctgtactctggaagtttctg

SEQ ID NO: 776476 - DNA, 120 bp, Artificial Sequence
  ENSG00000243335_35 (sequence is synthesized)
ttcttctttcctggggcttaggatattctgggagctgtctgagccttgtgcctaaggcttatcaggtgatataatcttcctgttctgggctgcttgctggaggaataggaagtgacattt

SEQ ID NO: 776477 - DNA, 120 bp, Artificial Sequence
  ENSG00000243335_36 (sequence is synthesized)
ataagacacaggcggtgtgagcatccatgtgtggtcttggtctaaaccagctcttgaacaggttaaagcaaacagcaataacaaaacaaaaactactgatgctgagcgttttgatcctag

SEQ ID NO: 776478 - DNA, 120 bp, Artificial Sequence
  ENSG00000243335_37 (sequence is synthesized)
taatatttcaaatattgtccttctgcatatgttctatccatatttgattccaatatacattattaagctttcttgggtactattttgctggggctcttgcgtgaaggtggtacctgtctc

SEQ ID NO: 776479 - DNA, 120 bp, Artificial Sequence
  ENSG00000243335_38 (sequence is synthesized)
atgatccttaaaagagagaggcttttttcatccaaagctgtagtgttgggaactggggtgggagaggcactttttggaattctgaaagaatcatatctgtgtatatacatactgagtggg

SEQ ID NO: 776480 - DNA, 120 bp, Artificial Sequence
  ENSG00000243335_39 (sequence is synthesized)
gaaggatgggggttggcaggggttgagggaggtgggaacaaacagtgagtatgggaacaggcagtcacctcgagtgtgggaggtcacctgggtccgtcgtcttccttctgtatggtgttg

SEQ ID NO: 776481 - DNA, 120 bp, Artificial Sequence
  ENSG00000243335_40 (sequence is synthesized)
ggtttatgtacacactataacacttcctgtgtgagttcatgtacctgtctgtgagtgctttggtgtattgagcctcagtacactccaagggcattaaagtcaagaactagaacctgggtg

SEQ ID NO: 776482 - DNA, 120 bp, Artificial Sequence
  ENSG00000243335_41 (sequence is synthesized)
ctgtgcctttcttttttagagatgtgctctcatctcttctctgacccccactttgccagcaaatattttttatttctgcttaaaatgtggtgtgtttggggatgccccacacaacaagac

SEQ ID NO: 776483 - DNA, 120 bp, Artificial Sequence
  ENSG00000243335_42 (sequence is synthesized)
aggcttttccctgagaccagcagctgaatttctgccctgaaagggaggtgggcctcttgaggacccttctagagttactctagacttgtccctgtttcatgtaggcatgtgcccacccca

SEQ ID NO: 776484 - DNA, 120 bp, Artificial Sequence
  ENSG00000243335_43 (sequence is synthesized)
gcctaggcaaaatctctgtcctcttcttttgggagttctccaaggaaagaagagactgcaggtgcagtcacgtgtgtggctcacaaccatgtcaggtagttctaaaataaattcctcctg

SEQ ID NO: 776485 - DNA, 120 bp, Artificial Sequence
  ENSG00000243335_44 (sequence is synthesized)
tcatattaccacttccttttcaatgggggaaataagtagctctaaatttatgtaagcctcagtggttaagacccttccttaagaaaaatggacgtaagttgcccttcctttgaaagcaga

SEQ ID NO: 776486 - DNA, 120 bp, Artificial Sequence
  ENSG00000243335_45 (sequence is synthesized)
gcttgacaccttcctggctaatgagtgtcctcatcaagatgccccctggagtcacatcatggattaacgcagaaaggtgagttctgaggctctgagtagcttcataccctccaactgctt

SEQ ID NO: 776487 - DNA, 120 bp, Artificial Sequence
  ENSG00000243335_46 (sequence is synthesized)
cccttaaacctctgattattctggcttttaaacaaaagcactgtatcatctgtgccaaatgtattccctgactaattactgagtacagtcacatagttatagtacactaataatacaggc

SEQ ID NO: 776488 - DNA, 120 bp, Artificial Sequence
  ENSG00000243335_47 (sequence is synthesized)
tggaaactgaagctcatagaagtatgtagtttccccaagagtgcagagctagtaagtggaagagtcaggattcaaacccagagcccctttctgaaatcctcagaggtgttcaacagcatg

SEQ ID NO: 776489 - DNA, 120 bp, Artificial Sequence
  ENSG00000243335_48 (sequence is synthesized)
atcctcccttcctcttgacagctcgtatcctcctcctgaggtttagggcttcactctacctgacctgtgaagatttgaaagcacatatctaggacaagtattagaaagtcttcatacttc

SEQ ID NO: 776490 - DNA, 120 bp, Artificial Sequence
  ENSG00000243335_49 (sequence is synthesized)
cccctggagtcacatcatggattaacgcagaaaggcggctgtatttggaaactcccattggtccagagagacagaacaatgagaagaaatcccctgtccagttgcctgcaggagtattcc

SEQ ID NO: 776491 - DNA, 120 bp, Artificial Sequence
  ENSG00000243335_50 (sequence is synthesized)
aacacttcatgggctagaggattccattgagatggggtttacgtcttgattttgaacacctgtcagcactgttctctgtttgcatggcaattctgacccttttatggcaacaacacccct

SEQ ID NO: 776492 - DNA, 120 bp, Artificial Sequence
  ENSG00000243335_51 (sequence is synthesized)
gggacaacccagatttgtagattgagatccaaaggtagaatttccagacagtccaaccaaggtatcaagtgatgtttccagagtggaaggctctcaccgtgtcccaggatttctggggtt

SEQ ID NO: 776493 - DNA, 120 bp, Artificial Sequence
  ENSG00000243335_52 (sequence is synthesized)
accctgttttttacctaatcattctgtctttttaggacatggttttacccgatccctggcaaaggatccagaattccaatagctgaaaaccctgttatagcttttctcctattctgcctt

SEQ ID NO: 776494 - DNA, 120 bp, Artificial Sequence
  ENSG00000243335_53 (sequence is synthesized)
acccaagacacacttgaacccctcagtaaggctatagagagggccatgagcaggggcagcctctcccttgtttctacagctccatgatgaggggttgactgaggccagcaatccttgtag

SEQ ID NO: 776495 - DNA, 120 bp, Artificial Sequence
  ENSG00000243335_54 (sequence is synthesized)
gtgtgacagttgcaatataattaacagtttcaagatctagaggtaccttttgaaagaaccccttcagggatatctatccacagtagcctggagcagccaaggtgaacctgagattttgac

SEQ ID NO: 776496 - DNA, 120 bp, Artificial Sequence
  ENSG00000243335_55 (sequence is synthesized)
ccacacaataagggggggccattctttttcaaatattttggcttcagaatacacttcattacacatgcaaatattgagagattaacagaaattccagctcttatgcctaactgagaagag

SEQ ID NO: 776497 - DNA, 120 bp, Artificial Sequence
  ENSG00000243335_56 (sequence is synthesized)
ccactgcaagttgcagttaggtacccatgtgcagcagaggccagctgaatcccagagcttcccaaagtggacaccagcggggactattcctgatgtcccacccaagagaggaagatgagc

SEQ ID NO: 776498 - DNA, 120 bp, Artificial Sequence
  ENSG00000243335_57 (sequence is synthesized)
tgaggcgctgttgctctgcccaaatgcatcccatgtgcattcacgtgtcacccattcaaaataacatggcattcttggaaccttgtatctgacatgtaagaccagcctacacattggggt

SEQ ID NO: 776499 - DNA, 87 bp, Artificial Sequence
  ENSG00000243335_58 (sequence is synthesized)
gggtgcaggggctcacactcagattgcttgagcacaggagttccagaccagcctgagcaacatggcgaaatcctgtctcttcaagaa

SEQ ID NO: 776500 - DNA, 120 bp, Artificial Sequence
  ENSG00000243335_59 (sequence is synthesized)
ctgggactcatgccctattacaaaggtgagggtcagctgcccaggatggtgggtatgtgggaggaggtctgcaaggcatctgtgagtgtttaggtctccatcagaacaccgggggcagca

SEQ ID NO: 776501 - DNA, 120 bp, Artificial Sequence
  ENSG00000243335_60 (sequence is synthesized)
ttcatccagattactcaagatgcgatggagtgtcatcccttcccagtcacgctggggagattcaggttaaggtgggcctacctggcctatgacagttagcaaattgtatttcagaaggac

SEQ ID NO: 776502 - DNA, 120 bp, Artificial Sequence
  ENSG00000243335_61 (sequence is synthesized)
agccctcgtcccattggcttccctttgctgtggagaaccgtgacccttgtttaagtttgtgcccttcattggccccctgagtcccttccccgggaaatctgtctttcccctcctgcatcc

SEQ ID NO: 776503 - DNA, 120 bp, Artificial Sequence
  ENSG00000243335_62 (sequence is synthesized)
tgccatcttcaggactgtttctctgtgcatctctgctgccctgtcctgcctcttcaccctagtgataggtgttgtgttcatccttatagaccacttggagcggattgtggagatcgcccg

SEQ ID NO: 776504 - DNA, 120 bp, Artificial Sequence
  ENSG00000243335_63 (sequence is synthesized)
gaagggcgagaagaccacttggagcggattgtggagatcgcccggctgcgtgcggtccagcggaaggcccgctttgccaagctcaagggttatcttctcacagggctggaatgcaaattt

SEQ ID NO: 776505 - DNA, 120 bp, Artificial Sequence
  ENSG00000243364_0 (sequence is synthesized)
ccctcttcactttgtacctttctctcctcgactgtgaagcgggccgggacctgccaggccagaccaaaccggacctcgggggcgatgcggctgctgcccctgctgcggactgtcctctgg

SEQ ID NO: 776506 - DNA, 120 bp, Artificial Sequence
  ENSG00000243364_1 (sequence is synthesized)
gccgcgttcctcggctcccctctgcgcgggggctccagcctccgccacgtagtctactggaactccagtaaccccaggttgcttcgaggagacgccgtggtggagctgggcctcaacgat

SEQ ID NO: 776507 - DNA, 120 bp, Artificial Sequence
  ENSG00000243364_2 (sequence is synthesized)
tacctagacattgtctgcccccactacgaaggcccagggccccctgagggccccgagacgtttgctttgtacatggtggactggccaggctatgagtcctgccaggcagagggcccccgg

SEQ ID NO: 776508 - DNA, 120 bp, Artificial Sequence
  ENSG00000243364_3 (sequence is synthesized)
gcctacaagcgctgggtgtgctccctgccctttggccatgttcaattctcagagaagattcagcgcttcacacccttctccctcggctttgagttcttacctggagagacttactactac

SEQ ID NO: 776509 - DNA, 120 bp, Artificial Sequence
  ENSG00000243364_4 (sequence is synthesized)
atctcggtgcccactccagagagttctggccagtgcttgaggctccaggtgtctgtctgctgcaaggagaggaagtctgagtcagcccatcctgttgggagccctggagagagtggcaca

SEQ ID NO: 776510 - DNA, 120 bp, Artificial Sequence
  ENSG00000243364_5 (sequence is synthesized)
ctgcttctgattcttcgtcttctgcgaattctgtgagccaagcagaccttccctctcatcccaaggagccagagtcctcccaagatcccctggaggaggagggatccctgctgcctgcac

SEQ ID NO: 776511 - DNA, 120 bp, Artificial Sequence
  ENSG00000243364_6 (sequence is synthesized)
tgggggtgccaattcagaccgacaagatggagcattgatgggggagatcagagggtctgaggtgactcttgcaggagcctgtcccctcatcacaggctaaagaagagcagtagacagccc

SEQ ID NO: 776512 - DNA, 120 bp, Artificial Sequence
  ENSG00000243364_7 (sequence is synthesized)
tggacactctgaagcagaggcaagacaaacacaggcgctttgcaggctgctctgagggtctcagcccatcccccaggaggactgggatttggtatgatcaaatcctcaagccagctgggg

SEQ ID NO: 776513 - DNA, 120 bp, Artificial Sequence
  ENSG00000243364_8 (sequence is synthesized)
gcccaggctgaagacctggggacaggtcgattgctggaccagggcaaagaagaagccctgccatctgtgccctgtgggccttttccctggggcagcaccttgccctccccaggggatcac

SEQ ID NO: 776514 - DNA, 120 bp, Artificial Sequence
  ENSG00000243364_9 (sequence is synthesized)
tcacttgtcttctatgaagacggactcttcatgaggttgaatttcatgccagtttgtatttttataagtatctagaccaaaccttcaataaaccactcatctttttgttgccctccccaa

SEQ ID NO: 776515 - DNA, 120 bp, Artificial Sequence
  ENSG00000243414_0 (sequence is synthesized)
acattaacccctgactcacagctggaccgccccggcccgcagcgccacgtcccgggtggggcctgccacggcaaagcagcagtccggcctcgagcggcccctcgggggcggcggggtggg

SEQ ID NO: 776516 - DNA, 120 bp, Artificial Sequence
  ENSG00000243414_1 (sequence is synthesized)
cgccaacagcagtcaggcctgacaagcggcgacctccaagggtgaggcctctgcgggcccccgactcacgcgcgtccgggctctgcaagcgcggtggggagcaggctgctgtggtcgcgg

SEQ ID NO: 776517 - DNA, 120 bp, Artificial Sequence
  ENSG00000243414_2 (sequence is synthesized)
ggactgggttgcggcgcgccgcgtacgggacggccccaaactctcgacgcccggggcaagacgcccaccccctgggcgctctcgctgggccagaaaggaagacagaaaagccgcgggctg

SEQ ID NO: 776518 - DNA, 120 bp, Artificial Sequence
  ENSG00000243414_3 (sequence is synthesized)
actgtggtggcgctcgcctgcagattgaaaagaaatgctgagaaatacataaagttttcctcttctgccttggatatttataatgggtatcgggaagtctaaaataaattcctgccctct

SEQ ID NO: 776519 - DNA, 120 bp, Artificial Sequence
  ENSG00000243414_4 (sequence is synthesized)
ttctctctcttggggtaaaaggcacagtgtggatacaagtccaggatatcatgagtcagattccaagaagtctgaagatctatccttgtgtaatgttgctgagcacagcaatacaacaga

SEQ ID NO: 776520 - DNA, 120 bp, Artificial Sequence
  ENSG00000243414_5 (sequence is synthesized)
ggggccaacaggaaagcaggagggagctcagagcgtggaagagatgtttgaagaagaagctgaagaagaggtgttcctcaaatttgtgatattgcatgcagaagatgacacagatgaagc

SEQ ID NO: 776521 - DNA, 120 bp, Artificial Sequence
  ENSG00000243414_6 (sequence is synthesized)
cctcagagtccagaatctgctacaagatgactttggtatcaaacccggaataatctttgctgagatgccatgtggcagacagcatttacagaatttagatgatgctgtaaatgggtctgc

SEQ ID NO: 776522 - DNA, 120 bp, Artificial Sequence
  ENSG00000243414_7 (sequence is synthesized)
atggacaatcttattactgactgaaaactttttaagagatacttggtgtaatttccagttctatacgtccctaatgaactccgttaacaggcagcataaatacaactctgttatacccat

SEQ ID NO: 776523 - DNA, 120 bp, Artificial Sequence
  ENSG00000243414_8 (sequence is synthesized)
gcggcccctgaacaatccccttccccgagaaaggactccctttgccctccaaaccatcaatgccttagaggaagaaagtcgtggatttcctacacaagtagaaagaatttttcaggagtc

SEQ ID NO: 776524 - DNA, 120 bp, Artificial Sequence
  ENSG00000243414_9 (sequence is synthesized)
tgtgtataagacacaacaaactatatggaaagagacaagaaatatggtacaaagacaatttattgcctgagatgaaacatataacatgtggctggctcttgttttgtaaaccaaatgatt

SEQ ID NO: 776525 - DNA, 120 bp, Artificial Sequence
  ENSG00000243414_10 (sequence is synthesized)
aatcttcacttgagaaagcagtttctaggaaatgtttaaataaaagagagtcttcaccttaaagaaacctatggagcacaagaaagataaatttctgcaggacagcctataaaattgtgg

SEQ ID NO: 776526 - DNA, 120 bp, Artificial Sequence
  ENSG00000243414_11 (sequence is synthesized)
tactttttgatgtttcagtaaacttgacattgtcagagtttcaaggacttttctttcacaattttcctagttcatggatatgaaaaaggaattctcaatccatattccttgtattgaacc

SEQ ID NO: 776527 - DNA, 120 bp, Artificial Sequence
  ENSG00000243414_12 (sequence is synthesized)
ttattctctgaattttgatctcaaaggacacagaaaaaaaatggccccaggagatctgatcacacttcctcctgaggcacctctcatggatgttgcaataagcattcgggtactatcacc

SEQ ID NO: 776528 - DNA, 120 bp, Artificial Sequence
  ENSG00000243414_13 (sequence is synthesized)
cagaaatatgaattgccagaatagaacatttagcatgttaagcgttgatgcatataaaatcagaaatagatgtgagaatggtggaactttttaaaagaacccagtcaaatgtattttctg

SEQ ID NO: 776529 - DNA, 120 bp, Artificial Sequence
  ENSG00000243414_14 (sequence is synthesized)
ctgaaatctgcatatttggaggcatttcccaccaccgattcacagcccatttgatagtgtggtagttagggacttcgtggagtggtgttcagacgtcccctggggcttaaatctcttcat

SEQ ID NO: 776530 - DNA, 120 bp, Artificial Sequence
  ENSG00000243414_15 (sequence is synthesized)
attagtcatcatttgtaactatggctttatttgcagagcttctaaaaggcgtataactgtgtgagtggccagatattcactttttaaatcaaaaacctctcttatggaagctttaaaagt

SEQ ID NO: 776531 - DNA, 120 bp, Artificial Sequence
  ENSG00000243414_16 (sequence is synthesized)
ttccgtcacacacaattctcttctcaggaagtatttctcatttaggtcttcaaagtagcctgactgtgtgcatgtgtgtgtgtgataggttatttataaagactttggatagaaggagat

SEQ ID NO: 776532 - DNA, 120 bp, Artificial Sequence
  ENSG00000243414_17 (sequence is synthesized)
gtattttattacctcctattctagagccccatgctcctaacaagccagagaggccccaaacaggattgtttctttcctccacagcccttctgcccatctgagattgagggagcatcgtcc

SEQ ID NO: 776533 - DNA, 120 bp, Artificial Sequence
  ENSG00000243414_18 (sequence is synthesized)
acttgagatcagggatggggtggagaatgggtcatgtcatgtaatgagaaaagccctcttcgggatcatgagacttggttctagtccaatttctgccactgaggatgaatgtaactgtgg

SEQ ID NO: 776534 - DNA, 120 bp, Artificial Sequence
  ENSG00000243414_19 (sequence is synthesized)
gcaaactatttaccctcctttatctgtgaaatgaaagggttgaattgatggatctctaaaggcttttgtcctctatgaggatgtgaaaaactagggaccacaaaagggaacaagcaaaaa

SEQ ID NO: 776535 - DNA, 120 bp, Artificial Sequence
  ENSG00000243414_20 (sequence is synthesized)
agtttggattcgataaagtgatatgtaatagttgcagaaggctttatatatgcttataatgaaaagatattttttgtatattgacagcataatttatttttaatgctgtcattacactta

SEQ ID NO: 776536 - DNA, 120 bp, Artificial Sequence
  ENSG00000243414_21 (sequence is synthesized)
aagtcacaggaaaaaaatatacatgcttactcaggctttcttaaaaataaatttttatagagatccttgagtaaagacattttgcttaatttcttttttcttattccccacttgtatatc

SEQ ID NO: 776537 - DNA, 120 bp, Artificial Sequence
  ENSG00000243414_22 (sequence is synthesized)
ccctaccagtaccgggatctgcacacatctttttgcagttacctcttcatagccatgaaccaaaacgttctatgaggagcatgcaagtaagtcaagcctcctattctgttagtacttatt

SEQ ID NO: 776538 - DNA, 120 bp, Artificial Sequence
  ENSG00000243414_23 (sequence is synthesized)
agaggaggagatggttttcattgcatagtgacattttcttagccttaacgttctgatagtagcttactactcacttctctttttcagttttcataataagtattcatttttttgccataa

SEQ ID NO: 776539 - DNA, 120 bp, Artificial Sequence
  ENSG00000243414_24 (sequence is synthesized)
tgcttcctgtaaagccaattttatatactaataaaacatgaactgcccactcttcatgcctgccaaacttggggcaattgatgctaaatggtatttttaaaataaatgtttttattcttt

SEQ ID NO: 776540 - DNA, 120 bp, Artificial Sequence
  ENSG00000243414_25 (sequence is synthesized)
ccggggcaagacgcccaccccctgggcgctctcgctgggccagaaaggaagacagaaaagccgcgggctgactgtggtggcgctcgcctgcagattcaccatcaccacaatgcctgactc

SEQ ID NO: 776541 - DNA, 120 bp, Artificial Sequence
  ENSG00000243414_26 (sequence is synthesized)
cacttgacatttcagatcttctgtttatgctgtcagtagagatgctgccagtcattgttaggatatttgtgttctattttgtttgtgcttgatacagaaatatatttatgcttaattgaa

SEQ ID NO: 776542 - DNA, 120 bp, Artificial Sequence
  ENSG00000243449_0 (sequence is synthesized)
ccggggtccctgaaccgcggtaagggcggtggtgcgggcgtccgaatgggcgttttctagatacggggcgcggactagaggctcgctgggcccggagaccggcggactggagtcggggaa

SEQ ID NO: 776543 - DNA, 120 bp, Artificial Sequence
  ENSG00000243449_1 (sequence is synthesized)
cgcccgggcccgcgccgagcccgccgggagtgccgtccccgcgcagagccgcccatgcgtggactgccacgccttcgagttcatgcagcgcgccctgcaggacctgcggaagacagcctg

SEQ ID NO: 776544 - DNA, 120 bp, Artificial Sequence
  ENSG00000243449_2 (sequence is synthesized)
cagcctggacgcgcggacggagaccctactgctgcaggcagagcgccgtgccctgtgtgcctgctggccagcggggcactgaggaccacgctgctccgtgtgaataaatgcccagtggca

SEQ ID NO: 776545 - DNA, 80 bp, Artificial Sequence
  ENSG00000243449_3 (sequence is synthesized)
gcatgcgcgttgcgcgccggacgcggaacgtctgccggtgtccccgcgctgctggtcccggggtccctgaaccgcgggcg

SEQ ID NO: 776546 - DNA, 120 bp, Artificial Sequence
  ENSG00000243466_0 (sequence is synthesized)
gggacacctggggacactgagctggtgctgagttactgagatgagccagctctgcagctgtgcccagcctgccccatcccctgctcatttgcatgttcccagagcacaacctcctgccct

SEQ ID NO: 776547 - DNA, 88 bp, Artificial Sequence
  ENSG00000243466_1 (sequence is synthesized)
ctgctcatttgcatgttcccagagcacaacctcctgccctgaagccttattaataggctggtcacactttgtgcaggagtcagaccca

SEQ ID NO: 776548 - DNA, 120 bp, Artificial Sequence
  ENSG00000243466_2 (sequence is synthesized)
acagagtcaccatcacttgccgggccagtcagagtattagtagctggttggcctggtatcagcagaaaccagggaaagcccctaagctcctgatctataaggcgtctagtttagaaagtg

SEQ ID NO: 776549 - DNA, 120 bp, Artificial Sequence
  ENSG00000243477_0 (sequence is synthesized)
aggggcgggttctaagcggcgacgcgcgggtgctgggaggccttagaacgccgtggcgtgccgcaggacgcgacggctgcagaacatccgccgcaccgctgggggccaacgttgtcggac

SEQ ID NO: 776550 - DNA, 120 bp, Artificial Sequence
  ENSG00000243477_1 (sequence is synthesized)
cgaggagtccgaggtggcgactgagtgagatacccagctgtgcggagctaggacgcggaacatcccagaggccagcatcaacatgcaagagctgactctgagccctggcccagccaagct

SEQ ID NO: 776551 - DNA, 120 bp, Artificial Sequence
  ENSG00000243477_2 (sequence is synthesized)
gacccctacactagaccctacacaccggatggagctgatcctgagtaccagcccagctgagctgactctggatcctgcgtgccagccaaagctgcccctggattccacatgccaaccaga

SEQ ID NO: 776552 - DNA, 120 bp, Artificial Sequence
  ENSG00000243477_3 (sequence is synthesized)
gatgaccttcaatcctggtccaactgagcttaccctggatcctgaacaccagccagaggagaccccagctcctagcctggctgagttgaccctggagcctgtgcaccgccgacccgagct

SEQ ID NO: 776553 - DNA, 120 bp, Artificial Sequence
  ENSG00000243477_4 (sequence is synthesized)
cctggatgcttgtgctgacctcatcaatgatcagtggccccgcagccgcacctcccgcctgcactccctgggccagtcctcagatgccttccccctctgcctgatgctgctaagccccca

SEQ ID NO: 776554 - DNA, 120 bp, Artificial Sequence
  ENSG00000243477_5 (sequence is synthesized)
gaagcagcacccgttgtggtgggccatgcccgcctgtcacgggtgctgaaccagccccagagcctcttagtggagacagtggtggtggcccgggccctgaggggccgtggctttggccgc

SEQ ID NO: 776555 - DNA, 120 bp, Artificial Sequence
  ENSG00000243477_6 (sequence is synthesized)
cgcctcatggagggcctggaggtctttgctcgggcccggggcttccgcaagctgcatctcaccacccatgaccaggtgcacttctatacccacctgggctaccagctgggtgagcctgtg

SEQ ID NO: 776556 - DNA, 120 bp, Artificial Sequence
  ENSG00000243477_7 (sequence is synthesized)
cagggcctggtcttcaccagcagacggctgcctgccaccctgcttaatgccttccccacagccccctctccccggccacccaggaaggccccaaacctgactgcccaagctgccccaagg

SEQ ID NO: 776557 - DNA, 120 bp, Artificial Sequence
  ENSG00000243477_8 (sequence is synthesized)
ggtcccaagggacctccattgccaccaccccctcccctacctgagtgcctgaccatctcacccccagttccatcagggcccccttcaaaaagcctgctggagacacaatatcaaaatgtg

SEQ ID NO: 776558 - DNA, 120 bp, Artificial Sequence
  ENSG00000243477_9 (sequence is synthesized)
agggggcgccccatattctggatggaaaaagacatctgaggccatccagggcaaggaactgtctttctggttcaatagactgccccgacagtctacaagcctcagcccactgaccatacc

SEQ ID NO: 776559 - DNA, 120 bp, Artificial Sequence
  ENSG00000243477_10 (sequence is synthesized)
tcagcccctagcccctggggggcagctttaacctgggcatgtttcctgggtaccagtggggccaggaggtggctctggctcagagccgtcagtgtggctgaataaaggctctcttgggta

SEQ ID NO: 776560 - DNA, 120 bp, Artificial Sequence
  ENSG00000243477_11 (sequence is synthesized)
actgcctggagactggggtcttaacctccagcctggcactgagccacctgcaacctagcagcaggtgaccttggctcccagcctgactcagctgaacctggatcctgtgcataggcaaga

SEQ ID NO: 776561 - DNA, 120 bp, Artificial Sequence
  ENSG00000243477_12 (sequence is synthesized)
cggctgttttatagacctggtggttacagaccccctgtgaggggaggtcctgaggaggacaaatttgtagccagagcaggctggggccaggactcctaggttctgccccagccttaagca

SEQ ID NO: 776562 - DNA, 120 bp, Artificial Sequence
  ENSG00000243477_13 (sequence is synthesized)
gctcatccatcactcccagcctccctccaatgtggggtagacacctggatctatctgccctgctctataggggatgggtctcttccaggtcacctgtgctatcaggtgagtgtgggacaa

SEQ ID NO: 776563 - DNA, 120 bp, Artificial Sequence
  ENSG00000243477_14 (sequence is synthesized)
agtgcagcccaccactccccagttccagtatgcatggtcccccctgcactctgtcagcccttccctgctccaaccccaccctccctcctggcacagcccagcatggctgttatctacagg

SEQ ID NO: 776564 - DNA, 120 bp, Artificial Sequence
  ENSG00000243477_15 (sequence is synthesized)
aggggcggatcctggggcttcctccctctagaccaaagggtgcggctgctgcagaggtggctgatgcagtggtggactaggaggactactggaagacagaaggccagcaagtagattggg

SEQ ID NO: 776565 - DNA, 120 bp, Artificial Sequence
  ENSG00000243477_16 (sequence is synthesized)
agtcgttcgtttccagaccatgccgagccacacctgcccacagagtcgagctctcgaagtcctcattcccaaaagctccacagcctgtgacccactaggagggagggggaaaccgaggcc

SEQ ID NO: 776566 - DNA, 120 bp, Artificial Sequence
  ENSG00000243477_17 (sequence is synthesized)
cgggagagacggagaagccactctctgaggaccccggagccccgcccacagtgggtggggtcggcactgaaggggttaaggccgcggggaagccccgggctcagccctaggggcggatcc

SEQ ID NO: 776567 - DNA, 120 bp, Artificial Sequence
  ENSG00000243480_0 (sequence is synthesized)
aaaatgtgcttcttacaggaatataaatagtttctggaaaggacactgacaacttcaaagcaaaatgaagttctttctgttgcttttcaccattgggttctgctgggctcagtattcccc

SEQ ID NO: 776568 - DNA, 120 bp, Artificial Sequence
  ENSG00000243480_1 (sequence is synthesized)
aaatacacaacaaggacggacatctattgttcatctgtttgaatggcgatgggttgatattgctcttgaatgtgagcgatatttagctccgaagggatttggaggggttcaggtctctcc

SEQ ID NO: 776569 - DNA, 120 bp, Artificial Sequence
  ENSG00000243480_2 (sequence is synthesized)
accaaatgaaaatgttgcaatttacaaccctttcagaccttggtgggaaagataccaaccagttagctataaattatgcacaagatctggaaatgaagatgaatttagaaacatggtgac

SEQ ID NO: 776570 - DNA, 120 bp, Artificial Sequence
  ENSG00000243480_3 (sequence is synthesized)
tagatgtaacaatgttggggttcgtatttatgtggatgctgtaattaatcatatgtgtggtaacgctgtgagtgcaggaacaagcagtacctgtggaagttacttcaaccctggaagtag

SEQ ID NO: 776571 - DNA, 120 bp, Artificial Sequence
  ENSG00000243480_4 (sequence is synthesized)
ggactttccagcagtcccatattctggatgggatttcaatgatggtaaatgtaaaactggaagtggagatatcgagaactacaatgatgctactcaggtcagagattgtcgtctgactgg

SEQ ID NO: 776572 - DNA, 120 bp, Artificial Sequence
  ENSG00000243480_5 (sequence is synthesized)
tcttcttgatcttgcactggagaaggattacgtgcgttctaagattgccgaatatatgaaccatctcattgacattggtgttgcagggttcagacttgatgcttccaagcacatgtggcc

SEQ ID NO: 776573 - DNA, 120 bp, Artificial Sequence; identical to SEQ ID NO: 772189
  ENSG00000243480_6 (sequence is synthesized)

SEQ ID NO: 776574 - DNA, 120 bp, Artificial Sequence
  ENSG00000243480_7 (sequence is synthesized)
ggaatggagagaagatgtcttacttaaagaactggggagaaggttggggtttcgtaccttctgacagagcgcttgtctttgtggataaccatgacaatcaacgaggacatggggctggag

SEQ ID NO: 776575 - DNA, 120 bp, Artificial Sequence
  ENSG00000243480_8 (sequence is synthesized)
gagcctctattcttaccttctgggatgctaggctgtacaaaatggcagttggatttatgcttgctcatccttacggatttacacgagtaatgtcaagctaccgttggccaagacagtttc

SEQ ID NO: 776576 - DNA, 120 bp, Artificial Sequence
  ENSG00000243480_9 (sequence is synthesized)
aaaatggaaacgatgttaatgattgggttgggccaccaaataataatggagtaattaaagaagttactattaatccagacactacttgtggcaatgactgggtctgtgaacatcgatggc

SEQ ID NO: 776577 - DNA, 120 bp, Artificial Sequence
  ENSG00000243480_10 (sequence is synthesized)
gccaaataaggaacatggttattttccgcaatgtagtggatggccagccttttacaaattggtatgataatgggagcaaccaagtggcttttgggagaggaaacagaggattcattgttt

SEQ ID NO: 776578 - DNA, 120 bp, Artificial Sequence
  ENSG00000243480_11 (sequence is synthesized)
tcaacaatgatgactggtcattttctttaactttgcaaactggtcttcctgctggcacatactgtgatgtcatttctggagataaaattaatggcaattgcacaggcattaaaatttacg

SEQ ID NO: 776579 - DNA, 120 bp, Artificial Sequence
  ENSG00000243480_12 (sequence is synthesized)
tttctgatgatggcaaagctcatttttctattagtaactctgctgaagatccatttattgcaattcatgctgaatctaaattgtaaaatttaaaattaaatgcatgtcctcaaaacaata

SEQ ID NO: 776580 - DNA, 120 bp, Artificial Sequence
  ENSG00000243480_13 (sequence is synthesized)
tggctcggtgagtctgtgcggccagcagtctctgatctgtacagggtattaatgtgtcagggctgagtgttctgggatttgtctagaggctggtaagggcttctggaccacttgtttctg

SEQ ID NO: 776581 - DNA, 120 bp, Artificial Sequence
  ENSG00000243480_14 (sequence is synthesized)
tcctgtcagtctgtcagggttggaaagtccaagccataggacccagtttcctttcttagcttacgttatctaccagagcaccgtgggctgttacttaccttgagttggaaggggttcgca

SEQ ID NO: 776582 - DNA, 120 bp, Artificial Sequence
  ENSG00000243489_0 (sequence is synthesized)
acactcacttacacctcccccagctcacctcctccccaccccagcatggccgcgtccaccatgtctgtctgctccagcgcttactccgactcctggcaggtggacgactgcccagagagc

SEQ ID NO: 776583 - DNA, 120 bp, Artificial Sequence
  ENSG00000243489_1 (sequence is synthesized)
tgctgtgagcccccctgcagcgcccccagctgctgcgccccggccccctccctgagcctggtctgcaccccagtgagctgtgtgtccagcccctgctgccaggcggcctgtgagcccagc

SEQ ID NO: 776584 - DNA, 81 bp, Artificial Sequence
  ENSG00000243489_2 (sequence is synthesized)
cctccccctgccagcaggcctgctgtgtgcctgtctgctgcaagactgtctgctgcaagcctgtgtgctgtgtgcctgtct

SEQ ID NO: 776585 - DNA, 120 bp, Artificial Sequence
  ENSG00000243489_3 (sequence is synthesized)
aagactgtctgctgcaagcctgtgtgctgtgtgcctgtctgctgtggggctgcttcttcgtgctgccggcagtctagctgccagccagcttgctgtgcctcttcctcctgccagccggcc

SEQ ID NO: 776586 - DNA, 120 bp, Artificial Sequence
  ENSG00000243489_4 (sequence is synthesized)
tgctgtgtgcccgtctgctgcaagcctgtgtgctgtgtgtccacctgctctgaggattcctcttcatgctgccagcagtctagctgccagccagcttgctgcacctcctcctcctaccag

SEQ ID NO: 776587 - DNA, 120 bp, Artificial Sequence
  ENSG00000243489_5 (sequence is synthesized)
actgcaagcccatctgctgtgtgcctgtctgctctagggcttcctcttcacgctgccagcagcctagctgccagccagcttgctgcaccacctcctgctgcagaccctcctcctctgtgt

SEQ ID NO: 776588 - DNA, 120 bp, Artificial Sequence
  ENSG00000243489_6 (sequence is synthesized)
ccctcctctgccaccccgtgtgcaggtccacctgctgtgtgcccgtctcctcctgctgtgcccccacctcctcctgccagtccagctgctgccgcccggcctcctgcgtgtccctcctct

SEQ ID NO: 776589 - DNA, 120 bp, Artificial Sequence
  ENSG00000243489_7 (sequence is synthesized)
gccgccccgcaagctcccgcctggcctgctacagcctctgctcaggcaagaagtccagctgctgagtgctcaatccttgtctcctgctgactgtgtctttgctgccaagcaggattctcc

SEQ ID NO: 776590 - DNA, 120 bp, Artificial Sequence
  ENSG00000243489_8 (sequence is synthesized)
agtctcaggagcccctggagtcctcagaatccaccagctccatcagtagccacagagctgctgcctgaaggggattttgagcgcgtcacactttcctccccactgtctgggaagagacaa

SEQ ID NO: 776591 - DNA, 120 bp, Artificial Sequence
  ENSG00000243489_9 (sequence is synthesized)
cccacaaatccctcagcaggtggactgtggctttctggagcccccttctccaaatgtgttgcttatacccaatgtgacaaagaagaactgctctaatcaataaattcttgagtcaggaaa

SEQ ID NO: 776592 - DNA, 120 bp, Artificial Sequence
  ENSG00000243509_0 (sequence is synthesized)
ggacttgggcggcccctccgcaggcggaccgggggcaaaggaggtggcatgtcggtcaggcacagcagggtcctgtgtccgcgctgagccgcgctctccctgctccagcaaggaccatga

SEQ ID NO: 776593 - DNA, 120 bp, Artificial Sequence
  ENSG00000243509_1 (sequence is synthesized)
gggcgctggaggggccaggcctgtcgctgctgtgcctggtgttggcgctgcctgccctgctgccggtgccggctgtacgcggagtggcagaaacacccacctacccctggcgggacgcag

SEQ ID NO: 776594 - DNA, 120 bp, Artificial Sequence
  ENSG00000243509_2 (sequence is synthesized)
agacaggggagcggctggtgtgcgcccagtgccccccaggcacctttgtgcagcggccgtgccgccgagacagccccacgacgtgtggcccgtgtccaccgcgccactacacgcagttct

SEQ ID NO: 776595 - DNA, 120 bp, Artificial Sequence
  ENSG00000243509_3 (sequence is synthesized)
ggaactacctagagcgctgccgctactgcaacgtcctctgcggggagcgtgaggaggaggcacgggcttgccacgccacccacaaccgtgcctgccgctgccgcaccggcttcttcgcgc

SEQ ID NO: 776596 - DNA, 120 bp, Artificial Sequence
  ENSG00000243509_4 (sequence is synthesized)
gcacccccagccagaacacgcagtgccagccgtgccccccaggcaccttctcagccagcagctccagctcagagcagtgccagccccaccgcaactgcacggccctgggcctggccctca

SEQ ID NO: 776597 - DNA, 120 bp, Artificial Sequence
  ENSG00000243509_5 (sequence is synthesized)
atgtgccaggctcttcctcccatgacaccctgtgcaccagctgcactggcttccccctcagcaccagggtaccaggagctgaggagtgtgagcgtgccgtcatcgactttgtggctttcc

SEQ ID NO: 776598 - DNA, 120 bp, Artificial Sequence
  ENSG00000243509_6 (sequence is synthesized)
aggacatctccatcaagaggctgcagcggctgctgcaggccctcgaggccccggagggctggggtccgacaccaagggcgggccgcgcggccttgcagctgaagctgcgtcggcggctca

SEQ ID NO: 776599 - DNA, 120 bp, Artificial Sequence
  ENSG00000243509_7 (sequence is synthesized)
cggagctcctgggggcgcaggacggggcgctgctggtgcggctgctgcaggcgctgcgcgtggccaggatgcccgggctggagcggagcgtccgtgagcgcttcctccctgtgcactgat

SEQ ID NO: 776600 - DNA, 120 bp, Artificial Sequence
  ENSG00000243509_8 (sequence is synthesized)
cctggccccctcttatttattctacatccttggcaccccacttgcactgaaagaggcttttttttaaatagaagaaatgaggtttcttaaagcttatttttataaagctttttcataaaa

SEQ ID NO: 776601 - DNA, 120 bp, Artificial Sequence
  ENSG00000243543_0 (sequence is synthesized)
acaccggggcaggcaaagtgcagatgtaggagctgctgaggagcagttcttagttttggtgccatcaaccaggccagtacttcctaaaatgggactctcaggacttctgccaatcctggt

SEQ ID NO: 776602 - DNA, 120 bp, Artificial Sequence
  ENSG00000243543_1 (sequence is synthesized)
accattcatccttttgggggacatccaggaacctgggcacgctgaaggcatccttggcaagccgtgtcccaaaatcaaagtggaatgcgaagtggaagaaatagaccagtgtaccaaacc

SEQ ID NO: 776603 - DNA, 120 bp, Artificial Sequence
  ENSG00000243543_2 (sequence is synthesized)
tgaagtgttgcccgttcagccgtggaaagaaatgtttagacttcagaaaggtcagccttactttataccataaggaggagcttgaataacctccaggatttggctcataatccaggcctc

SEQ ID NO: 776604 - DNA, 120 bp, Artificial Sequence
  ENSG00000243543_3 (sequence is synthesized)
tctccacgtgtgcctgattgatgctccaaattggcttccacgggccaaaccttggctgttccagaaactgaaccccaggaattgcttacacactttcttccagcgtagcatctcttcaaa

SEQ ID NO: 776605 - DNA, 120 bp, Artificial Sequence
  ENSG00000243543_4 (sequence is synthesized)
cacaatgctcttccccttgaccacttctcagtatgaaactctatgtcttcaactttcagaccccccatttatttgtatgaaggcttcagttgccttaataaagtgctctgtggggtccga

SEQ ID NO: 776606 - DNA, 120 bp, Artificial Sequence
  ENSG00000243543_5 (sequence is synthesized)
gagattgcccagaaaacatgaagtgttgcccgttcagccgtggaaagaaatgtttagacttcagaaagatatatgcagtatgccacaggaggctggcccctgcctggcctccataccaca

SEQ ID NO: 776607 - DNA, 120 bp, Artificial Sequence
  ENSG00000243543_6 (sequence is synthesized)
ctggtggtacaataaaaaaaactaagatctgctccgaattcatctatggcggtagccaggggaacaataacaacttccaaactgaagctatctgtctggtcacctgcaaaaaataccata

SEQ ID NO: 776608 - DNA, 120 bp, Artificial Sequence
  ENSG00000243566_0 (sequence is synthesized)
cagtggggctggatactggcctgcctcccaccagagtccccccagctcctccctgctgtgggctggcctgggaggaagggggtggggtgcacttacatttgcaggtctttccagcccctg

SEQ ID NO: 776609 - DNA, 120 bp, Artificial Sequence
  ENSG00000243566_1 (sequence is synthesized)
gggcagcctgattaaccagcttctccagggccaagctgttgggggtgaggtgcagcccgaagcagccagaccagcccctgagcctcccgggtgctggcagctgtcatggggctaccctgg

SEQ ID NO: 776610 - DNA, 120 bp, Artificial Sequence
  ENSG00000243566_2 (sequence is synthesized)
gggcagcctcacctagggctgcagatgctcctcctggcgttgaactgtctccggcccagcctgagcctggagctggtgccctacacaccacagataacagcttgggacctggaagggaag

SEQ ID NO: 776611 - DNA, 120 bp, Artificial Sequence
  ENSG00000243566_3 (sequence is synthesized)
gtcacagccaccaccttctccctggagcagccgcgctgtgtcttcgatgggcttgccagcgccagcgataccgtctggctcgtggtggccttcagcaatgcctccaggggcttccagaac

SEQ ID NO: 776612 - DNA, 120 bp, Artificial Sequence
  ENSG00000243566_4 (sequence is synthesized)
ccggagacactggctgacattccggcctccccacagctgctgaccgatggccactacatgacgctgcccctgtctccggaccagctgccctgtggcgaccccatggcgggcagcggaggc

SEQ ID NO: 776613 - DNA, 120 bp, Artificial Sequence
  ENSG00000243566_5 (sequence is synthesized)
gcccccgtgctgcgggtgggccatgaccacggctgccaccagcagcccttctgcaacgcgcccctccctggccctggaccctatcgggtgaagttcctcctgatggacaccaggggctca

SEQ ID NO: 776614 - DNA, 120 bp, Artificial Sequence
  ENSG00000243566_6 (sequence is synthesized)
cccagggctgagaccaagtggtcagaccccatcactctccaccaagggaagacccccggatccatcgacacctggccagggcggcgaagtggcagcatgatcgtcattacctccatcctc

SEQ ID NO: 776615 - DNA, 120 bp, Artificial Sequence
  ENSG00000243566_7 (sequence is synthesized)
tcttctctggccggcctcctactcttggccttcttggcagcctctaccatgcgcttctccagcctgtggtggccggaggaggccccggagcagctgcggatcggctccttcatgggcaag

SEQ ID NO: 776616 - DNA, 120 bp, Artificial Sequence
  ENSG00000243566_8 (sequence is synthesized)
cgctacatgacccaccacatcccacccagagaggccgccacactgccggtgggctgcaagcctggcctggaccccctccccagcctcagcccctagcctggcctctttgcatggggctgg

SEQ ID NO: 776617 - DNA, 120 bp, Artificial Sequence
  ENSG00000243566_9 (sequence is synthesized)
agcacaccccgtaccctgcctggaatcccagcaccagcccccctgcctctcctctgcctttctggtttctctccctctccaagcatctgtaagttgcactcaggagggtttaggggaggg

SEQ ID NO: 776618 - DNA, 120 bp, Artificial Sequence
  ENSG00000243566_10 (sequence is synthesized)
ccatgggcaggctggatacccagtccccacctccatccccacctctgtctcacctgacctcctgcgagggaggctggagactgtgtggacaggccgccctgaccgcaagcttccagaccc

SEQ ID NO: 776619 - DNA, 120 bp, Artificial Sequence
  ENSG00000243566_11 (sequence is synthesized)
tgggaggaggcctgcagaggactgtgctttgcctgatgcagggagctgggcccatcctggggcctatgagacctgagccaccctccgtcccccatcccacacatcagtggctgggcgggg

SEQ ID NO: 776620 - DNA, 120 bp, Artificial Sequence
  ENSG00000243566_12 (sequence is synthesized)
tgaggattcagaggcatctctactgcccctgggcacagcacctttctgagagtgggactctccatggtcatctgactaccaattctggccaccacctccaaccctcttgtgcatatggat

SEQ ID NO: 776621 - DNA, 120 bp, Artificial Sequence
  ENSG00000243566_13 (sequence is synthesized)
ggctctagcccttatccaccccctcaagcatttattaagcatctgctgtatgctacatacagtgttagacttggggcttcaggcatagccggtcctgaccttggggagatgccttctcta

SEQ ID NO: 776622 - DNA, 120 bp, Artificial Sequence
  ENSG00000243566_14 (sequence is synthesized)
gacctgagacgaccacgtgtccagatgtgacctgttgctgtcgggggtctatcaggcccttagaccgtcaccccagtaggctctccaggacccaggagcctccatcacctggaaggaccc

SEQ ID NO: 776623 - DNA, 120 bp, Artificial Sequence
  ENSG00000243566_15 (sequence is synthesized)
tctgtgcaaaacctcaagcgtccatctgtgcacaaggccggtggttcccgtcgtcgccactcggggtcgccggtgagccgcagccaggccgcctcacggccagtgtgcatgctcgctgct

SEQ ID NO: 776624 - DNA, 120 bp, Artificial Sequence
  ENSG00000243566_16 (sequence is synthesized)
attcgctgccccttctgcctccgaggcggtagcagatgccacgttggcggggtcggtgaaggtcaggactctaggcctccctccgccaagccagagggatgagcaatcacgcctgagagc

SEQ ID NO: 776625 - DNA, 120 bp, Artificial Sequence
  ENSG00000243566_17 (sequence is synthesized)
ccactgcgtgccatgcagtccgcacagccgcagcggttttctagatggagaaactgaggctcagtgacttgcccgctgcactctgtccacggccgctgcacacgcccccttgggctgcgc

SEQ ID NO: 776626 - DNA, 120 bp, Artificial Sequence
  ENSG00000243566_18 (sequence is synthesized)
tcccggaccttctaatgtgaccacggctcccggcatgcaggccctgccagcggagggagcccggtggtgacccttggtctgcagccctctttggaggtgaataaatgcggtctggagccc

SEQ ID NO: 776627 - DNA, 120 bp, Artificial Sequence
  ENSG00000243566_19 (sequence is synthesized)
ccagccagacccaaggggctgggggccctgctggagtgattggaccctgggcgcccgcccccctccgattgggagaggcagccccagggacccccacgcccgtctccgtggctcaccttt

SEQ ID NO: 776628 - DNA, 120 bp, Artificial Sequence
  ENSG00000243566_20 (sequence is synthesized)
gccctgagggaggaggtggcatggggggtcagggctggagactgggcgaacacagaacccccactcataaggacaaagctgctttctcccctcccacctccatctgttctctcctcctgc

SEQ ID NO: 776629 - DNA, 120 bp, Artificial Sequence
  ENSG00000243627_0 (sequence is synthesized)
gtgcagctcaactgcagtaggactgattcttccctaggagacggagttctcctttcatcatcttccccttctgtgcatggtagccgcttgaacttgcccctccaagagtcaaggacaaga

SEQ ID NO: 776630 - DNA, 120 bp, Artificial Sequence
  ENSG00000243627_1 (sequence is synthesized)
ccaccccatggaatgggccaagtggactccccatgaagcctccaaccagacccaggccagcaccctcctggggctcctgctgggtgaccacacagaggggaggaatgacaccaactccac

SEQ ID NO: 776631 - DNA, 120 bp, Artificial Sequence
  ENSG00000243627_2 (sequence is synthesized)
cagggctctgaaggtgccagacggaaccagcgctgcctggtatatactcaccatcatcggcatctacgcggtgattttcgtcttccggctggccagcaacatcctcagaaagaatgacaa

SEQ ID NO: 776632 - DNA, 120 bp, Artificial Sequence
  ENSG00000243627_3 (sequence is synthesized)
gtccttagaagatgtttattactcaaatctgacctctgaactcaaaatgacagggctgcagggcaaggtcgccaagtgctccaccctgtctatcagcaacagagctgtgctgcagccctg

SEQ ID NO: 776633 - DNA, 120 bp, Artificial Sequence
  ENSG00000243627_4 (sequence is synthesized)
ctagggtggccccagacttcttggaggggagcagctttgggtttacttggagcccttgagggggactgggggtgcatcactgacaaggggtgcttctggctgctagtttgtgaccagagc

SEQ ID NO: 776634 - DNA, 120 bp, Artificial Sequence
  ENSG00000243627_5 (sequence is synthesized)
cagccacccagttccttctcagacttccaggtgcttcgagaagagagagcagggcagcggtttctagccaaattcaatcttcactggcaaaacctgtgctctggggaggagcactattcc

SEQ ID NO: 776635 - DNA, 120 bp, Artificial Sequence
  ENSG00000243627_6 (sequence is synthesized)
actgttctcggaggaatccgggagactcctgggggcatacaaggaggtgactccttgtcgtggaaagaagaatgaacttggagtcagttctgggttaaaattcaacttctggggagtcac

SEQ ID NO: 776636 - DNA, 120 bp, Artificial Sequence
  ENSG00000243627_7 (sequence is synthesized)
ataaactgagcagcttagttgctcacctgagacatttagggtttggagacagatggttttaaaagtctattttatttgaaagactctagcttgaatataggaccaaagttgttaatatca

SEQ ID NO: 776637 - DNA, 120 bp, Artificial Sequence
  ENSG00000243646_0 (sequence is synthesized)
atctccgctggttcccggaagccgccgcggacaagctctcccgggcgcgggcgggggtcgtgtgcttggaggaagccgcggaacccccagcgtccgtccatggcgtggagccttgggagc

SEQ ID NO: 776638 - DNA, 120 bp, Artificial Sequence
  ENSG00000243646_1 (sequence is synthesized)
tggctgggtggctgcctgctggtgtcagcattgggaatggtaccacctcccgaaaatgtcagaatgaattctgttaatttcaagaacattctacagtgggagtcacctgcttttgccaaa

SEQ ID NO: 776639 - DNA, 120 bp, Artificial Sequence
  ENSG00000243646_2 (sequence is synthesized)
gggaacctgactttcacagctcagtacctaagttataggatattccaagataaatgcatgaatactaccttgacggaatgtgatttctcaagtctttccaagtatggtgaccacaccttg

SEQ ID NO: 776640 - DNA, 120 bp, Artificial Sequence
  ENSG00000243646_3 (sequence is synthesized)
agagtcagggctgaatttgcagatgagcattcagactgggtaaacatcaccttctgtcctgtggatgacaccattattggaccccctggaatgcaagtagaagtacttgctgattcttta

SEQ ID NO: 776641 - DNA, 120 bp, Artificial Sequence
  ENSG00000243646_4 (sequence is synthesized)
catatgcgtttcttagcccctaaaattgagaatgaatacgaaacttggactatgaagaatgtgtataactcatggacttataatgtgcaatactggaaaaacggtactgatgaaaagttt

SEQ ID NO: 776642 - DNA, 120 bp, Artificial Sequence
  ENSG00000243646_5 (sequence is synthesized)
caaattactccccagtatgactttgaggtcctcagaaacctggagccatggacaacttattgtgttcaagttcgagggtttcttcctgatcggaacaaagctggggaatggagtgagcct

SEQ ID NO: 776643 - DNA, 120 bp, Artificial Sequence
  ENSG00000243646_6 (sequence is synthesized)
gtctgtgagcaaacaacccatgacgaaacggtcccctcctggatggtggccgtcatcctcatggcctcggtcttcatggtctgcctggcactcctcggctgcttcgccttgctgtggtgc

SEQ ID NO: 776644 - DNA, 120 bp, Artificial Sequence
  ENSG00000243646_7 (sequence is synthesized)
gtttacaagaagacaaagtacgccttctcccctaggaattctcttccacagcacctgaaagagtttttgggccatcctcatcataacacacttctgtttttctcctttccattgtcggat

SEQ ID NO: 776645 - DNA, 120 bp, Artificial Sequence
  ENSG00000243646_8 (sequence is synthesized)
ctaagtgtcattgcagaagactctgagagcggcaagcagaatcctggtgacagctgcagcctcgggaccccgcctgggcaggggccccaaagctaggctctgagaaggaaacacactcgg

SEQ ID NO: 776646 - DNA, 120 bp, Artificial Sequence
  ENSG00000243646_9 (sequence is synthesized)
ctgggcacagtgacgtactccatctcacatctgcctcagtgagggatcagggcagcaaacaagggccaagaccatctgagccagccccacatctagaactcccagaccctggacttagcc

SEQ ID NO: 776647 - DNA, 120 bp, Artificial Sequence
  ENSG00000243646_10 (sequence is synthesized)
accagagagctacattttaaaggctgtcttggcaaaaatactccatttgggaactcactgccttataaaggctttcatgatgttttcagaagttggccactgagagtgtaattttcagcc

SEQ ID NO: 776648 - DNA, 120 bp, Artificial Sequence
  ENSG00000243646_11 (sequence is synthesized)
tgttttcagaagttggccactgagagtgtaattttcagccttttatatcactaaaataagatcatgttttaattgtgagaaacagggccgagcacagtggctcacgcctgtaataccagc

SEQ ID NO: 776649 - DNA, 62 bp, Artificial Sequence
  ENSG00000243646_12 (sequence is synthesized)
aggcaggagaattgcatgaacccgggaggaggaggaggaggttgcagtgagccgagatagcg

SEQ ID NO: 776650 - DNA, 120 bp, Artificial Sequence
  ENSG00000243646_13 (sequence is synthesized)
aacagaaatacttaaaatgaggaataagaatggagatgttacatctggtagatgtaacattctaccagattatggatggactgatctgaaaatcgacctcaactcaagggtggtcagctc

SEQ ID NO: 776651 - DNA, 120 bp, Artificial Sequence
  ENSG00000243646_14 (sequence is synthesized)
aatgctacacagagcacggacttttggattctttgcagtactttgaatttatttttctacctatatatgttttatatgctgctggtgctccattaaagttttactctgtgttgcactata

SEQ ID NO: 776652 - DNA, 120 bp, Artificial Sequence
  ENSG00000243646_15 (sequence is synthesized)
ctgaaagagctctctggcatcaatttttccacttctcagaaacactttggcccacaaattcccaaaggaaccttgttcttcattctggaaaacacgatgccaacatatcagaataaagga

SEQ ID NO: 776653 - DNA, 120 bp, Artificial Sequence
  ENSG00000243646_16 (sequence is synthesized)
cagataggagcttttgcttcaaagtgaatcacttcatggatgttaaagtgtcctgaaagattctaaacttcacaacttttgatagtaactgtactatatttgcaacatatttgcatatat

SEQ ID NO: 776654 - DNA, 120 bp, Artificial Sequence
  ENSG00000243646_17 (sequence is synthesized)
taattgttatatctgaaaagcatgagattgctgttttataaaattaaatgaagtaagttaatattttattgctaggtataagaactgctgatgaggacatctatagaagtagaaaattct

SEQ ID NO: 776655 - DNA, 120 bp, Artificial Sequence
  ENSG00000243646_18 (sequence is synthesized)
aaatgtcctaccatcaccaataagaaacttttgacagtcccgtagatacaatataatcacatggaaaactgtatacagtatattgtatgtgaagatcccacaaaaagaatagggactgta

SEQ ID NO: 776656 - DNA, 120 bp, Artificial Sequence
  ENSG00000243646_19 (sequence is synthesized)
ggaaatataatcatctaagctacgggtaagaagaacatcaagattctttaaagcaatggctctcaaagtgtgtttcctagaccagcagcatcagcaccacatgaaagcttaggaatgcaa

SEQ ID NO: 776657 - DNA, 120 bp, Artificial Sequence
  ENSG00000243646_20 (sequence is synthesized)
actctccagccccgcctcgggcctactggctcagcgactgtgagggagaggtctgtattttcatctatgttataacaggtccttgggtgactccaataaacactaaagttggcaaaccat

SEQ ID NO: 776658 - DNA, 120 bp, Artificial Sequence
  ENSG00000243646_21 (sequence is synthesized)
tgcctttaagggtgcataaggtgttaatttagtacaaaatttgcagttttctgtgttgttgtgactttctatttttgcaggagtagaaaagtaccccattgcagtagagataagtggatc

SEQ ID NO: 776659 - DNA, 120 bp, Artificial Sequence
  ENSG00000243646_22 (sequence is synthesized)
gacaaatctgccacttctggcttgcatccaacaaaagtgcagctgttcatcattaggagatgttggctgatgtacatagacatgtaagaaagattcaaagcgtcatggatggatcaccaa

SEQ ID NO: 776660 - DNA, 120 bp, Artificial Sequence
  ENSG00000243646_23 (sequence is synthesized)
taacaccagcatatgcaagaccagaggagagtgtgtgatccaggtcctaggattgacaaatgaggactcagtccctacttgggttggtgttttattttgacttttttctgaaacagcaga

SEQ ID NO: 776661 - DNA, 120 bp, Artificial Sequence
  ENSG00000243646_24 (sequence is synthesized)
gaagcttaccaaataatcacaaggagataagaaagtgtttacatttgtttcagttgctcttcactgcctccttatgaccaacactcacaattctatggtcttagcagttgcactaagaag

SEQ ID NO: 776662 - DNA, 120 bp, Artificial Sequence
  ENSG00000243646_25 (sequence is synthesized)
tcagaagaacctgctattgtgggttcataatcttttattacctttcactgagaaacaatttatactactaaacaagatatcagttatgatgctcaagattttaagtgccttttgaactaa

SEQ ID NO: 776663 - DNA, 120 bp, Artificial Sequence
  ENSG00000243646_26 (sequence is synthesized)
aaacaaacaaaaaaattgtgacctgcatataatgtaaatggtttatcttcaagtcaaaagccacaggtttacctctgcagctttactctttcctaaacattgctttcgtgtattgcttat

SEQ ID NO: 776664 - DNA, 120 bp, Artificial Sequence
  ENSG00000243646_27 (sequence is synthesized)
gcatgctttctgcgtcccaaaaagtatgtagagaataacagtttaagtcctccagaggagttactacctctactacatgtttcattctcattacatgttgcattgcttattaatatctgt

SEQ ID NO: 776665 - DNA, 120 bp, Artificial Sequence
  ENSG00000243646_28 (sequence is synthesized)
gttttgtagtggacttcatgaggacaggtaatgttaccaactgaattgtgtacccccaaaattcacatgttgaaaccctaatccccaatgtgactgtatttgaagtagggcctacagcag

SEQ ID NO: 776666 - DNA, 120 bp, Artificial Sequence
  ENSG00000243646_29 (sequence is synthesized)
gtaattaaggttaaatgaggtcataagtgtggggccctgaatcgatgagattagtgtccttataagaagaaacagcagagaccttgttctctccaccatatgaggacacagtgagaatgt

SEQ ID NO: 776667 - DNA, 120 bp, Artificial Sequence
  ENSG00000243646_30 (sequence is synthesized)
gacacagtgagaatgtagccatctgtgagcaggaagggaggcctcaccaggatccaaatgagccagaaccttaatcttggacttctcaccctgcagaactgtgagaaaataaatttctgt

SEQ ID NO: 776668 - DNA, 120 bp, Artificial Sequence
  ENSG00000243646_31 (sequence is synthesized)
ggcctttgaagacatggagccatagaggagaaccaagtgctggatgtgggctttttcatgggcatctgttttgaggagaaaagttgtaaatgtttttgtcttattttcatagcattggga

SEQ ID NO: 776669 - DNA, 120 bp, Artificial Sequence
  ENSG00000243646_32 (sequence is synthesized)
aggggcctgctggcataagctctcacctccgaggctagaagactttgcagacttgaccgtggagccagccccttttttgggccatcctcatcataacacacttctgtttttctcctttcc

SEQ ID NO: 776670 - DNA, 120 bp, Artificial Sequence
  ENSG00000243646_33 (sequence is synthesized)
cttcagcctctctccagcatctccaacctaatgcagctcaaatgggactcgtgagttccccagctgagctccaatcggggcaccagctgcttaagcccaaaatggacattgacctcagct

SEQ ID NO: 776671 - DNA, 120 bp, Artificial Sequence
  ENSG00000243646_34 (sequence is synthesized)
tttatgcatcaaatgtatcaggaagtctccagtttgtttttacgtctggaaatatatctgaaatccatgtgcccaccctaccccctcatagctttctgccaccagacaaatccaaggctc

SEQ ID NO: 776672 - DNA, 120 bp, Artificial Sequence
  ENSG00000243649_0 (sequence is synthesized)
ggccttgggggagggggaggccagaatgactccaagagctacaggaaggcaggtcagagaccccactggacaaacagtggctggactctgcaccataacacacaatcaacaggggagtga

SEQ ID NO: 776673 - DNA, 120 bp, Artificial Sequence
  ENSG00000243649_1 (sequence is synthesized)
gctggatccttatttctggtccctaagtgggtggtttgggcttactggggaggagctaaggccggagaggaggtactgaaggggagagtcctggacctttggcagcaaagggtgggactt

SEQ ID NO: 776674 - DNA, 120 bp, Artificial Sequence
  ENSG00000243649_2 (sequence is synthesized)
ctgcagtttctgtttccttgactggcagctcagcggggccctcccgcttggatgttccgggaaagtgatgtgggtaggacaggcggggcgagccgcaggtgccagaacacagattgtata

SEQ ID NO: 776675 - DNA, 120 bp, Artificial Sequence
  ENSG00000243649_3 (sequence is synthesized)
aaaggctgggggctggtggggagcaggggaagggaatgtgaccaggtctaggtctggagtttcagcttggacactgagccaagcagacaagcaaagcaagccaggacacaccatcctgcc

SEQ ID NO: 776676 - DNA, 120 bp, Artificial Sequence
  ENSG00000243649_4 (sequence is synthesized)
ccaggcccagcttctctcctgccttccaacgccatggggagcaatctcagcccccaactctgcctgatgccctttatcttgggcctcttgtctggaggtgtgaccaccactccatggtct

SEQ ID NO: 776677 - DNA, 120 bp, Artificial Sequence
  ENSG00000243649_5 (sequence is synthesized)
ttggcccggccccagggatcctgctctctggagggggtagagatcaaaggcggctccttccgacttctccaagagggccaggcactggagtacgtgtgtccttctggcttctacccgtac

SEQ ID NO: 776678 - DNA, 120 bp, Artificial Sequence
  ENSG00000243649_6 (sequence is synthesized)
cctgtgcagacacgtacctgcagatctacggggtcctggagcaccctgaagactcaagaccaaaagactgtcaggaaggcagagtgcagagcaatccactgtccaagaccacacgacttc

SEQ ID NO: 776679 - DNA, 120 bp, Artificial Sequence
  ENSG00000243649_7 (sequence is synthesized)
gagaacggggaatactggccccggtctccctactacaatgtgagtgatgagatctctttccactgctatgacggttacactctccggggctctgccaatcgcacctgccaagtgaatggc

SEQ ID NO: 776680 - DNA, 120 bp, Artificial Sequence
  ENSG00000243649_8 (sequence is synthesized)
cgatggagtgggcagacagcgatctgtgacaacggagcggggtactgctccaacccgggcatccccattggcacaaggaaggtgggcagccagtaccgccttgaagacagcgtcacctac

SEQ ID NO: 776681 - DNA, 120 bp, Artificial Sequence
  ENSG00000243649_9 (sequence is synthesized)
cactgcagccgggggcttaccctgcgtggctcccagcggcgaacgtgtcaggaaggtggctcttggagcgggacggagccttcctgccaagactccttcatgtacgacacccctcaagag

SEQ ID NO: 776682 - DNA, 120 bp, Artificial Sequence
  ENSG00000243649_10 (sequence is synthesized)
gtggccgaagctttcctgtcttccctgacagagaccatagaaggagtcgatgctgaggatgggcacggcccaggggaacaacagaagcggaagatcgtcctggacccttcaggctccatg

SEQ ID NO: 776683 - DNA, 120 bp, Artificial Sequence
  ENSG00000243649_11 (sequence is synthesized)
ggtgtgaagccaagatatggtctagtgacatatgccacataccccaaaatttgggtcaaagtgtctgaagcagacagcagtaatgcagactgggtcacgaagcagctcaatgaaatcaat

SEQ ID NO: 776684 - DNA, 120 bp, Artificial Sequence
  ENSG00000243649_12 (sequence is synthesized)
tatgaagaccacaagttgaagtcagggactaacaccaagaaggccctccaggcagtgtacagcatgatgagctggccagatgacgtccctcctgaaggctggaaccgcacccgccatgtc

SEQ ID NO: 776685 - DNA, 120 bp, Artificial Sequence
  ENSG00000243649_13 (sequence is synthesized)
atcatcctcatgactgatggattgcacaacatgggcggggacccaattactgtcattgatgagatccgggacttgctatacattggcaaggatcgcaaaaacccaagggaggattatctg

SEQ ID NO: 776686 - DNA, 120 bp, Artificial Sequence
  ENSG00000243649_14 (sequence is synthesized)
gatgtctatgtgtttggggtcgggcctttggtgaaccaagtgaacatcaatgctttggcttccaagaaagacaatgagcaacatgtgttcaaagtcaaggatatggaaaacctggaagat

SEQ ID NO: 776687 - DNA, 120 bp, Artificial Sequence
  ENSG00000243649_15 (sequence is synthesized)
gttttctaccaaatgatcgatgaaagccagtctctgagtctctgtggcatggtttgggaacacaggaagggtaccgattaccacaagcaaccatggcaggccaagatctcagtcattcgc

SEQ ID NO: 776688 - DNA, 120 bp, Artificial Sequence
  ENSG00000243649_16 (sequence is synthesized)
ccttcaaagggacacgagagctgtatgggggctgtggtgtctgagtactttgtgctgacagcagcacattgtttcactgtggatgacaaggaacactcaatcaaggtcagcgtaggaggg

SEQ ID NO: 776689 - DNA, 120 bp, Artificial Sequence
  ENSG00000243649_17 (sequence is synthesized)
gagaagcgggacctggagatagaagtagtcctatttcaccccaactacaacattaatgggaaaaaagaagcaggaattcctgaattttatgactatgacgttgccctgatcaagctcaag

SEQ ID NO: 776690 - DNA, 120 bp, Artificial Sequence
  ENSG00000243649_18 (sequence is synthesized)
aataagctgaaatatggccagactatcaggcccatttgtctcccctgcaccgagggaacaactcgagctttgaggcttcctccaactaccacttgccagcaacaaaaggaagagctgctc

SEQ ID NO: 776691 - DNA, 120 bp, Artificial Sequence
  ENSG00000243649_19 (sequence is synthesized)
cctgcacaggatatcaaagctctgtttgtgtctgaggaggagaaaaagctgactcggaaggaggtctacatcaagaatggggataagaaaggcagctgtgagagagatgctcaatatgcc

SEQ ID NO: 776692 - DNA, 120 bp, Artificial Sequence
  ENSG00000243649_20 (sequence is synthesized)
ccaggctatgacaaagtcaaggacatctcagaggtggtcacccctcggttcctttgtactggaggagtgagtccctatgctgaccccaatacttgcagaggtgattctggcggccccttg

SEQ ID NO: 776693 - DNA, 120 bp, Artificial Sequence
  ENSG00000243649_21 (sequence is synthesized)
atagttcacaagagaagtcgtttcattcaagttggtgtaatcagctggggagtagtggatgtctgcaaaaaccagaagcggcaaaagcaggtacctgctcacgcccgagactttcacatc

SEQ ID NO: 776694 - DNA, 120 bp, Artificial Sequence
  ENSG00000243649_22 (sequence is synthesized)
aacctctttcaagtgctgccctggctgaaggagaaactccaagatgaggatttgggttttctataaggggtttcctgctggacaggggcgtgggattgaattaaaacagctgcgacaaca

SEQ ID NO: 776695 - DNA, 120 bp, Artificial Sequence
  ENSG00000243649_23 (sequence is synthesized)
gtggaatcctcctatccctgaactcgggggaatggaatctcgctgatcttccaggactagctccctgatcattccagcccctctgaacaacagggccccaggaaaatctccaggtcctat

SEQ ID NO: 776696 - DNA, 120 bp, Artificial Sequence
  ENSG00000243649_24 (sequence is synthesized)
ccttctcagaccagcatgtggcccttaagtccacttgtaacactatacccatggttggggccctgaatgtgactcatagctggctgttcatctctcctgtgacccttcataaggaattct

SEQ ID NO: 776697 - DNA, 120 bp, Artificial Sequence
  ENSG00000243649_25 (sequence is synthesized)
tcctaagccctgtgatcaactatctctaacccttcctcaacttgctcaccctgccatgtgtatccctgcctttagccagtttatcttccttatctcctaccctcatggtcctgtctcttc

SEQ ID NO: 776698 - DNA, 120 bp, Artificial Sequence
  ENSG00000243649_26 (sequence is synthesized)
gcagaaacagggcaggcggcagcaaggtcaggactaggatgagactaggcagggtgacaaggtgggctgaccgggagtaggagcagttttagggtggcaggcggaaagggggcaagaaaa

SEQ ID NO: 776699 - DNA, 120 bp, Artificial Sequence
  ENSG00000243649_27 (sequence is synthesized)
agcggagttaacccttactaagcatttaccctgggcttccaggcagccctggaagtcaagagaacactcagaaatggggagggagaagcagtggaaatccatatgggttgaggagtaggt

SEQ ID NO: 776700 - DNA, 120 bp, Artificial Sequence
  ENSG00000243649_28 (sequence is synthesized)
aagatgctgcttctgcgggactgggaatgcgctgtttctcagtgacatggtctccgagaccaggagggatacacctaaggcagcctttccctcttgatgacttctacttgtccccccttc

SEQ ID NO: 776701 - DNA, 120 bp, Artificial Sequence
  ENSG00000243649_29 (sequence is synthesized)
tcaaagcaatccactgtccaagaccacacgacttcgagaacggggaatactggccccggtctccctactacaatgtgagtgatgagatctctttccactgctatgacggttacactctcc

SEQ ID NO: 776702 - DNA, 120 bp, Artificial Sequence
  ENSG00000243649_30 (sequence is synthesized)
acagagctctgagcacttcagagatctttctatagtcctacatttgacacgtggaaacagaagccaaaggaggtcaagggacagcaagttagcaacaagggtgggcttgaaaacagccag

SEQ ID NO: 776703 - DNA, 120 bp, Artificial Sequence
  ENSG00000243649_31 (sequence is synthesized)
gcctctgacagcttgatcccaagttctttcccttttcagtccaccatagcagttttctcctaacacgaggaaacaaatacccgtggtctttccctttctccttttgggcctttgctcccc

SEQ ID NO: 776704 - DNA, 120 bp, Artificial Sequence
  ENSG00000243649_32 (sequence is synthesized)
gatcctacactccacccatcctcaatgcagccccattccttgcaccccagaccagtcagggatgggggaagacgtgaagttaggaatgacacggggccagaggcaggaagctgcccacaa

SEQ ID NO: 776705 - DNA, 120 bp, Artificial Sequence
  ENSG00000243649_33 (sequence is synthesized)
ttgtctcccctgcaccgagggaacaactcgagctttgaggcttcctccaactaccacttgccagcaacaaagtaagacatacttggcaagaggataaggatgagatcccaagagacaagt

SEQ ID NO: 776706 - DNA, 120 bp, Artificial Sequence
  ENSG00000243649_34 (sequence is synthesized)
ggggcatgagagggaggtgcaataggaagagatgatgcctggcccagaacctagctctagaagggcttaggggacatctactgagtgacaaaggcaatggggagatgacagtggtgggag

SEQ ID NO: 776707 - DNA, 120 bp, Artificial Sequence
  ENSG00000243649_35 (sequence is synthesized)
ccctcggttcctttgtactggaggagtgagtccctatgctgaccccaatacttgcagaggtgattctggcggccccttgatagttcacaagagaagtcgtttcattcaagtgagtcctcc

SEQ ID NO: 776708 - DNA, 120 bp, Artificial Sequence
  ENSG00000243649_36 (sequence is synthesized)
ctttcctatctggggagatgccaagtggtcagcatgggccccaaagcaggaaagctcaatgcatgtggctagtaattcgaggtaggcagagcctgcctcaccttaggaccgcatgtcttg

SEQ ID NO: 776709 - DNA, 120 bp, Artificial Sequence
  ENSG00000243660_0 (sequence is synthesized)
atgatgctggagaactacagcctcctcctctcagtgggatattgcattaccaaaccagaggtggtttgcaagttggagcatggacaggtgctgtggatattagaggaagagtccccaagt

SEQ ID NO: 776710 - DNA, 120 bp, Artificial Sequence
  ENSG00000243660_1 (sequence is synthesized)
cagagccacctagactgctgcatagatgatgacctgatggagaagagacaggaaaatcaagaccagcatttgcagaaagttgattttgtcaacaataaaacactgactatggacagaaat

SEQ ID NO: 776711 - DNA, 120 bp, Artificial Sequence
  ENSG00000243660_2 (sequence is synthesized)
gacacaaaccccattctatcaagaaaaatacgtggcaactgtgactcatctggaatgaatttgaataatatttcagaattaattattagtaatagaagctcctttgtaaggaaccctgct

SEQ ID NO: 776712 - DNA, 120 bp, Artificial Sequence
  ENSG00000243660_3 (sequence is synthesized)
gagtgtaatgtacgtgggaaatttctcctctgtatgaagcgtgagaatccttatgccagagggaaacctttggaatatgatggaaatgggaaagccgtctctcagaatgaggacttattt

SEQ ID NO: 776713 - DNA, 120 bp, Artificial Sequence
  ENSG00000243660_4 (sequence is synthesized)
aggcatcagtatattcaaactcttaagcagtgttttgaatacaatcagtgtgggaaggcttttcatgaagaggcagcctgcagtacccataagagagtgtgctcatgggagaccctgtga

SEQ ID NO: 776714 - DNA, 120 bp, Artificial Sequence
  ENSG00000243660_5 (sequence is synthesized)
agtttccatggtgagatggtcaacaagcctgtaagttcctcagctacgactaccaggtacctcgggttcctccctcctccgagagaccgccgaggtgcgggctgtgagagggggagcgtg

SEQ ID NO: 776715 - DNA, 120 bp, Artificial Sequence
  ENSG00000243660_6 (sequence is synthesized)
tgagaatagttttggcaagaaatcactcctcattctacaaagttacagaggagagaaaacttgactgtagtagacatttggaagtattctgcaagaagccaaatttcactcaacatcaag

SEQ ID NO: 776716 - DNA, 120 bp, Artificial Sequence
  ENSG00000243660_7 (sequence is synthesized)
aaacacatataggaaagaatgcctataaaattaatcagtatgctagtacattttgctgtaagccaaagcattctgtatatcagaaaacagatacagaagaaaaactctatgaatgtagtg

SEQ ID NO: 776717 - DNA, 120 bp, Artificial Sequence
  ENSG00000243660_8 (sequence is synthesized)
aatgtgggaaaaccttcagccataaatcctcttttatcctacagcagaggatacacagaggagagaaaccctatgaatgcactgaatgtgggaaaacttttggatataggtcatgccttg

SEQ ID NO: 776718 - DNA, 120 bp, Artificial Sequence
  ENSG00000243660_9 (sequence is synthesized)
cagtacatcaaagaacacacacgggacaaaacctatgaatgtaatgaatgtggaaaaaacttctgtgagaagtcaaatcttcatgtacatcagagaacacacacaggagagaaaccctat

SEQ ID NO: 776719 - DNA, 120 bp, Artificial Sequence
  ENSG00000243660_10 (sequence is synthesized)
ggatgtaatgaatgtcagaaagcctttggtgataggtcagctctaaaagtacatcagagaatacatactggcgagaaaccctatgagtgtaaggaatgtgggaaaactttctcccagaag

SEQ ID NO: 776720 - DNA, 120 bp, Artificial Sequence
  ENSG00000243660_11 (sequence is synthesized)
ccaaacttcattaatcatcagtgaactcacacaggagagagaccctttgaatgcaatgaatgtcaaaaatccttctctgtgaagtcaaaacttagagaacatcagagaattcacacaggg

SEQ ID NO: 776721 - DNA, 120 bp, Artificial Sequence
  ENSG00000243660_12 (sequence is synthesized)
gagaaaccctatgaatgtaatgaatgtgagaaaatgttctaccacaagtcatccctcacagtacatcagagaacccacacaggagagaaaccctatgcatgtagtgaatgtgggaaaacc

SEQ ID NO: 776722 - DNA, 120 bp, Artificial Sequence
  ENSG00000243660_13 (sequence is synthesized)
ttctaccagaagtcatccctcacaacacatcagagaacacacacaagggagcaaccctatgaatataatgaaagcttttaccagaatcccaacttcactaaatgtcagagagacaacata

SEQ ID NO: 776723 - DNA, 120 bp, Artificial Sequence
  ENSG00000243660_14 (sequence is synthesized)
gaggaaacccttgtcaacatcctgaaggctcagaaaccttcaccttcttggactcgttccatagcagaaacaacccaggttggggtgagaacacccaataaagatgagaaatcttttgcc

SEQ ID NO: 776724 - DNA, 120 bp, Artificial Sequence
  ENSG00000243660_15 (sequence is synthesized)
ccgcccccggacgcccagccgcggtcccagcgaccttcgctttcgtggggaagccggactgcgccgtgtcttcctgaagaaggctggggtaagagtccggccagcggacaagagggcagc

SEQ ID NO: 776725 - DNA, 120 bp, Artificial Sequence
  ENSG00000243660_16 (sequence is synthesized)
tggtagcagggtgggatgcccgtggcatagggccgagcccccgctaggcacgcgggagcagcaaggcttccggaagcgcagggagcgctggactggcgggcgcccgggattcgcgcaggc

SEQ ID NO: 776726 - DNA, 120 bp, Artificial Sequence
  ENSG00000243660_17 (sequence is synthesized)
cccgcccctcggcggccccgcccagggagcgctgcggcagtttccatggtgagatggtcaacaagcctggatcagtgtccttcagtgatgtggctgtgggcttcacccaggaggagtggc

SEQ ID NO: 776727 - DNA, 120 bp, Artificial Sequence
  ENSG00000243660_18 (sequence is synthesized)
aagttcctcagctacgactaccaggtacctcgggttcctccctcctccgagagaccgccgaggtgcgggctgtgagagggggagcgtggagcctccgaggccgagaatgaaaacaaatgt

SEQ ID NO: 776728 - DNA, 120 bp, Artificial Sequence
  ENSG00000243660_19 (sequence is synthesized)
actgttctagggatcagtgtccttcagtgatgtggctgtgggcttcacccaggaggagtggcagcatctggactctgctcagaggaccccgtacagagacatgatgctggagaactacag

SEQ ID NO: 776729 - DNA, 120 bp, Artificial Sequence
  ENSG00000243660_20 (sequence is synthesized)
ggaaaagaagaggacaactagaagagagttcctacaccgcaaagtaaactttgctggctctgcgaggagcaggaaacctgcatgatgagaacaaggactgggtggcactgcaggaaatgc

SEQ ID NO: 776730 - DNA, 120 bp, Artificial Sequence
  ENSG00000243660_21 (sequence is synthesized)
tcaattcgagtttcacttcctgtgttatcactttttctttgctgcaatttcatctttgttggtcaattctcttttaattttccatttttttacattctatgtaaatgtagtttttatgaa

SEQ ID NO: 776731 - DNA, 120 bp, Artificial Sequence
  ENSG00000243660_22 (sequence is synthesized)
ctagagagtctgactccatattttatctttgactactgtcagctctcaagccccacctcttccctccccttctgtcccacacctggatggctgattcaaaagcccaggtgcttcctcttt

SEQ ID NO: 776732 - DNA, 120 bp, Artificial Sequence
  ENSG00000243660_23 (sequence is synthesized)
tggctctaaaggcaagttcaagccatgcaggccccagcatgtgcattggagccttcatttcccccccactccttaaccttaataacacccaaagccagtctctcttccctgctctcaagc

SEQ ID NO: 776733 - DNA, 120 bp, Artificial Sequence
  ENSG00000243660_24 (sequence is synthesized)
catttttttttcttctttttctggagacagggtcttgtgtcacccaggctggcgtgcagggccctgatcacagctgccagtagctggaaccacgggggtgtgccaccacgcctggctaat

SEQ ID NO: 776734 - DNA, 120 bp, Artificial Sequence
  ENSG00000243660_25 (sequence is synthesized)
tttttaattttttttttgtagagatgaggagtgccactgtgttgcccaggctggtctcaaaactcctgagctcaagtgatcctctcttggcttggcctcccaaaatgctggggttacagg

SEQ ID NO: 776735 - DNA, 120 bp, Artificial Sequence
  ENSG00000243660_26 (sequence is synthesized)
catgagccattgcacccagccttaagctatttttgaacccatttgggattcatccctgttctccccagaaagcctcatgtgagtcataagcctttacatattctctctgtgcatgtgggg

SEQ ID NO: 776736 - DNA, 120 bp, Artificial Sequence
  ENSG00000243660_27 (sequence is synthesized)
ctgtcaccagttttgaaaaaccaggttttgggtggggaatctatctcgtatctttgggtaatatcacagataaatacagcagacattaacattttattcagtaaccactgacagtagggg

SEQ ID NO: 776737 - DNA, 120 bp, Artificial Sequence
  ENSG00000243660_28 (sequence is synthesized)
aaagagctgagctccattctgatttgtgcagtgatgatcgggctttttttctttttttggtggttggatattttatacctttttttccccaaatactctccactgaatgtagtcgactgg

SEQ ID NO: 776738 - DNA, 120 bp, Artificial Sequence
  ENSG00000243660_29 (sequence is synthesized)
tgattttaaagggggaatgagggagtatggaggggtatgagttggggctcagtagagttggggatgtgaaaaattacaagggaccagtgtaaatgtgatgaggccagcggtgtctgcctg

SEQ ID NO: 776739 - DNA, 120 bp, Artificial Sequence
  ENSG00000243660_30 (sequence is synthesized)
ctggcaatggtcaaagttagattccatcctcccacagagactgggagacagaggccttatctttcccaatcactacatttcaaagcaatggctccttgagaaagcaatgttccttgagaa

SEQ ID NO: 776740 - DNA, 120 bp, Artificial Sequence
  ENSG00000243660_31 (sequence is synthesized)
ctttttagtaaatgctcttaagagagggcggtcaggagcctatggtcagatattggcaagaatagtaagttatcctggcagcactgagatttctcaggcaggcattttaatggtggggac

SEQ ID NO: 776741 - DNA, 120 bp, Artificial Sequence
  ENSG00000243660_32 (sequence is synthesized)
aggggtcatcctgggaacacaggctatgctactagaagccatgccaatttgtctctcagtgcagagtttcagatggagttatggggggagagttctgcagttctcagtaaccacaacagt

SEQ ID NO: 776742 - DNA, 120 bp, Artificial Sequence
  ENSG00000243660_33 (sequence is synthesized)
atatatcactggaagatgaagcccacacaactacagatgttactgtttctgagtgagccgaataacaaacttacagtgagcagtcaccaacagacagaagtgatgtgattggttactgat

SEQ ID NO: 776743 - DNA, 120 bp, Artificial Sequence
  ENSG00000243660_34 (sequence is synthesized)
catgacatgcatttgttattaatgtgatgatgtgtagactgaagagctagcagcctgcactttatgcgaaaactcacagttaatatactgtgtacctgaaatttgagttgtgtcgttggg

SEQ ID NO: 776744 - DNA, 120 bp, Artificial Sequence
  ENSG00000243660_35 (sequence is synthesized)
ggactggtgttattaaatcatggtgactgaaattcgtgcatatcagaactgtaccaagcaagggctgcctgatgagtataatgctctcatgttttatgggaatttatataaatttaaaat

SEQ ID NO: 776745 - DNA, 120 bp, Artificial Sequence
  ENSG00000243660_36 (sequence is synthesized)
tgaataaatatttgaaagttgtatgttatgcacaaggtttgaaataatgcaattcttttaatattttaaaaaattgttaggactcagattttcttttatcttttcttttttttaaggtac

SEQ ID NO: 776746 - DNA, 73 bp, Artificial Sequence
  ENSG00000243660_37 (sequence is synthesized)
cagcctccggagtagctgggaatacaggtgcaggctgccacgcccggctcatttttgtctcctgagctcaggc

SEQ ID NO: 776747 - DNA, 120 bp, Artificial Sequence
  ENSG00000243660_38 (sequence is synthesized)
acaggcgtgagccactgcacctggccctcgactcacagattttcaaaatacttttgaacagtaagctgaggacagtgtttattatgactatactggtctcctttcactagctcacaaaat

SEQ ID NO: 776748 - DNA, 120 bp, Artificial Sequence
  ENSG00000243660_39 (sequence is synthesized)
ctttcactagctcacaaaatttaactacatcacttgtcagtctcctaaaaatgcagtgtatgtgctttgaaacttgtgaatgatctgctgatttgtgctattttatattcaatgttgttg

SEQ ID NO: 776749 - DNA, 120 bp, Artificial Sequence
  ENSG00000243660_40 (sequence is synthesized)
aaagaatagtttttaaaccaagtaatgcaaaaatttagtgtaacatgaatgcttgtgctgtaaaacatactggaaaatcaatagctctggaataaactttggatttttaattaaaattga

SEQ ID NO: 776750 - DNA, 120 bp, Artificial Sequence
  ENSG00000243660_41 (sequence is synthesized)
cgcggccccgcccccggacgcccagccgcggtcccagcgaccttcgctttcgtggggaagccggactgcgccgtgtcttcctgaagaaggctgggggatcagtgtccttcagtgatgtgg

SEQ ID NO: 776751 - DNA, 120 bp, Artificial Sequence
  ENSG00000243660_42 (sequence is synthesized)
acaagcctgtaagttcctcagctacgactaccaggtacctcgggttcctccctcctccgagagaccgccgaggtgcgggctgtgagagggggagcgtggagcctccgaggccgaggtacg

SEQ ID NO: 776752 - DNA, 120 bp, Artificial Sequence
  ENSG00000243667_0 (sequence is synthesized)
gccaatgtttggagtctggtttccaggttgccgtttttgggggctctgggtgtggcggttgccgtagctgaaattggctgcaccatgtcggccttcgagaagcctcagatcatcgcccat

SEQ ID NO: 776753 - DNA, 120 bp, Artificial Sequence
  ENSG00000243667_1 (sequence is synthesized)
atccagaagggcttcaactacacggtgtttgactgtaagtgggtgccctgcagcgccaaatttgtgaccatgggcaacttcgcacggggcaccggcgtcattcagctgtacgagatccag

SEQ ID NO: 776754 - DNA, 120 bp, Artificial Sequence
  ENSG00000243667_2 (sequence is synthesized)
cacggggacctgaagctgcttcgggagattgaaaaggccaaacctattaaatgtggaacatttggtgcaacatctttacagcagagatatttagctactggagattttggtggaaacctt

SEQ ID NO: 776755 - DNA, 120 bp, Artificial Sequence
  ENSG00000243667_3 (sequence is synthesized)
catatatggaatttagaagctccagagatgccagtatattctgtaaagggccataaagaaattataaatgccatagatggcataggtggactaggaattggagaaggagcacctgaaatt

SEQ ID NO: 776756 - DNA, 120 bp, Artificial Sequence
  ENSG00000243667_4 (sequence is synthesized)
gtgactggcagccgagatggaactgtgaaggtgtgggacccaaggcaaaaagatgatcctgttgctaatatggaacctgtacaaggagaaaacaagagagactgttggactgtggcattt

SEQ ID NO: 776757 - DNA, 120 bp, Artificial Sequence
  ENSG00000243667_5 (sequence is synthesized)
ggcaatgcttataatcaagaagaacgtgttgtttgtgctggctatgacaatggggatatcaaactatttgatctcagaaatatggcattacggtgggagacaaacatcaaaaatggggtg

SEQ ID NO: 776758 - DNA, 120 bp, Artificial Sequence
  ENSG00000243667_6 (sequence is synthesized)
tgtagcttggagtttgacagaaaagacataagtatgaataagttagtagccacatctctggaaggaaagttccatgtttttgacatgagaacacagcatccaaccaaaggttttgcctct

SEQ ID NO: 776759 - DNA, 120 bp, Artificial Sequence
  ENSG00000243667_7 (sequence is synthesized)
gtttcagaaaaggctcataaatctactgtgtggcaggtccgacacctgccgcagaacagggagctctttctgacagctggaggcgccggcggccttcacctctggaagtatgaataccct

SEQ ID NO: 776760 - DNA, 120 bp, Artificial Sequence
  ENSG00000243667_8 (sequence is synthesized)
attcagcggtcaaagaaagattctgagggaatagaaatgggagtcgcaggttctgtaagccttctgcagaatgttacgttgtccacccagcccatttcaagtttggattggagtccagat

SEQ ID NO: 776761 - DNA, 120 bp, Artificial Sequence
  ENSG00000243667_9 (sequence is synthesized)
aaaaggggtctctgcgtctgtagttcatttgaccaaacggtgagagtactgatcgttacaaagctcaataaaatttgacttcaagactttggacttgaggctgggcacggtggctcactc

SEQ ID NO: 776762 - DNA, 81 bp, Artificial Sequence
  ENSG00000243667_10 (sequence is synthesized)
cagcctgggcaacttttggacttgaaaccttccagaggaacactcacacaatttaagataggttctggagtcctctgaccc

SEQ ID NO: 776763 - DNA, 120 bp, Artificial Sequence
  ENSG00000243667_11 (sequence is synthesized)
actcacacaatttaagataggttctggagtcctctgaccctcattgaacaaagctggatttggctgatgataaaagaccccagccacaagcctctgggccagcctccagcctctctcggg

SEQ ID NO: 776764 - DNA, 120 bp, Artificial Sequence
  ENSG00000243667_12 (sequence is synthesized)
gcttgtttgctgacttgctgctgcacgtgggtatcagaagcaccaagtaaactatctccagggccagttcttttctctcccttccatttctaagtcaatagttgtctataattaaacata

SEQ ID NO: 776765 - DNA, 120 bp, Artificial Sequence
  ENSG00000243667_13 (sequence is synthesized)
tttcagatttgttctgtgtccctgaagttccatattttatctttatgcttgtgttatgttttagtgtctataatgttgtggtgggaatcatttcatttggtttaaaagagtttgccttgg

SEQ ID NO: 776766 - DNA, 120 bp, Artificial Sequence
  ENSG00000243667_14 (sequence is synthesized)
aaaaactgaattaaccttcataaatacattttgagagatttcagtgtgagtaattttctggacataatattattgtataaaatatcaaaatggtgggccaggcgtggtagctcacgcctg

SEQ ID NO: 776767 - DNA, 120 bp, Artificial Sequence
  ENSG00000243667_15 (sequence is synthesized)
tccgtctcaaaaaaaaaaaaaacaaatatatatatatatatctctctctctcaaaacggcacggttggtctagatttgggtagctattttctgcaatttaattcataaaacaaaatgctt

SEQ ID NO: 776768 - DNA, 120 bp, Artificial Sequence
  ENSG00000243667_16 (sequence is synthesized)
aaatgctttgattttaaagagctcttttttacttaaaatacaggaactgaattggtgagacttttggtttttgactgtggtaagtgatggtgaaatgtacaagattgtaggggttttgta

SEQ ID NO: 776769 - DNA, 120 bp, Artificial Sequence
  ENSG00000243667_17 (sequence is synthesized)
gtcttatttttggtcatactttaaaaatgcattttatgaataaacttctgtttttgagatctacagaagctttgattctgttaccttaacagtagtaataaagttaacattgtcacatca

SEQ ID NO: 776770 - DNA, 120 bp, Artificial Sequence
  ENSG00000243667_18 (sequence is synthesized)
gtgcacactgctccttttaaagttacctgtgggtgtaaagtaggattagattgaacttttttttcttttttttcctgctttgacttagttcattttgatatgatttaaaatttcatggtg

SEQ ID NO: 776771 - DNA, 120 bp, Artificial Sequence
  ENSG00000243667_19 (sequence is synthesized)
ttacataacttgttttctaagcattttgtatgaatatactttacacttagtagagtgtacactaatcttcttttgatacattttagtatatcattttagttgtgtcttctaagtatgaaa

SEQ ID NO: 776772 - DNA, 120 bp, Artificial Sequence
  ENSG00000243667_20 (sequence is synthesized)
aagttggcccaagacttttatcagatactatcttgaagtgattagaacactcactgcctctaaaagatggggaaagggttccttgcctaaatttagataacatcattgtgatagacccca

SEQ ID NO: 776773 - DNA, 120 bp, Artificial Sequence
  ENSG00000243667_21 (sequence is synthesized)
acagagcctgaggctgctgattggtctccaggaaagatcttatcactgaatttgctttctgcatatctaggcagggtgagttacaatgaaagcttttactatgcacaccactttctgaat

SEQ ID NO: 776774 - DNA, 120 bp, Artificial Sequence
  ENSG00000243667_22 (sequence is synthesized)
cccaagggcgctaacatcacagatactagatcatttaaaaggtctgatatcattgctcagggttggcctgtgaaaaggaaacaaaacaaaacaaaacaaaaattaaaggtctgataaaaa

SEQ ID NO: 776775 - DNA, 120 bp, Artificial Sequence
  ENSG00000243667_23 (sequence is synthesized)
catctccaccctgtgacgccttcccatagaaatggtacacaaaaggtccttaggcttgggtccgtgtaatggagctcgagggttagaagctggcatcagtttttcattctggaagtgttt

SEQ ID NO: 776776 - DNA, 120 bp, Artificial Sequence
  ENSG00000243667_24 (sequence is synthesized)
agatgaagttctgcaaatgttacttacagccattgcctttgcacattgtttgcctgtgatatccagcaatctatatctggagaaaaattacaataaataaaagattgccaaaagcaccaa

SEQ ID NO: 776777 - DNA, 120 bp, Artificial Sequence
  ENSG00000243667_25 (sequence is synthesized)
gagccttcgcccagcgtcccccaaagcatggcttgagccgcgcgagaccagagaagctgaccgccgactgaggaatgtttcctatttaaaacctttcttctcatccgcggggtagttcct

SEQ ID NO: 776778 - DNA, 120 bp, Artificial Sequence
  ENSG00000243667_26 (sequence is synthesized)
ccgcgcccaaccgtcctgccacccccagtgcagtccagccaaagcgggcaccaggatgcctgcagtgtggttggaagaggcaacctaacacattcgacaggcatcagctgagtgcctggt

SEQ ID NO: 776779 - DNA, 120 bp, Artificial Sequence
  ENSG00000243667_27 (sequence is synthesized)
attcccagggatgtgaatgattgaaaaggccaaacctattaaatgtggaacatttggtgcaacatctttacagcagagatatttagctactggagattttggtggaaaccttcatatatg

SEQ ID NO: 776780 - DNA, 120 bp, Artificial Sequence
  ENSG00000243667_28 (sequence is synthesized)
agttttctgctgtctttggaatcttgtctgcaaacagcttgatggagatgcggcccaagggctcactgtcgatggcaatttctaagaacacggtggagttgaccacgctggtagtacagg

SEQ ID NO: 776781 - DNA, 120 bp, Artificial Sequence
  ENSG00000243667_29 (sequence is synthesized)
gcttccggtggcgttggcatctgctagctatgtttttttaaaaggggcagtacaaagtcacgcgcagtagaacatgaacggcgcagcttacctcatgcgtgtccataaactcaccaaagg

SEQ ID NO: 776782 - DNA, 120 bp, Artificial Sequence
  ENSG00000243678_0 (sequence is synthesized)
gtgggcccggtctgtgggcgccccccgatttcccgcaggtcccgcgcggcgtcggagcgggagattcccttgcagcttgcgccccgcgggccttcgggctccgcagagggacgccggccc

SEQ ID NO: 776783 - DNA, 80 bp, Artificial Sequence
  ENSG00000243678_1 (sequence is synthesized)
gcggaagcggccgggaagccacgtgtccccgcggccgcgcgtggtgggggaggagggaccggcggcgcccacgtggcctc

SEQ ID NO: 776784 - DNA, 120 bp, Artificial Sequence
  ENSG00000243678_2 (sequence is synthesized)
tgaccgcacctctcgccccgcaggaccatggccaacctggagcgcaccttcatcgccatcaagccggacggcgtgcagcgcggcctggtgggcgagatcatcaagcgcttcgagcagaag

SEQ ID NO: 776785 - DNA, 120 bp, Artificial Sequence
  ENSG00000243678_3 (sequence is synthesized)
cctccgggcctctgaagaacacctgaagcagcactacattgacctgaaagaccgaccattcttccctgggctggtgaagtacatgaactcagggccggttgtggccatggtctgggaggg

SEQ ID NO: 776786 - DNA, 120 bp, Artificial Sequence
  ENSG00000243678_4 (sequence is synthesized)
gctgaacgtggtgaagacaggccgagtgatgcttggggagaccaatccagcagattcaaagccaggcaccattcgtggggacttctgcattcaggttggcaggaacatcattcatggcag

SEQ ID NO: 776787 - DNA, 120 bp, Artificial Sequence
  ENSG00000243678_5 (sequence is synthesized)
tgattcagtaaaaagtgctgaaaaagaaatcagcctatggtttaagcctgaagaactggttgactacaagtcttgtgctcatgactgggtctatgaataagaggtggacacaacagcagt

SEQ ID NO: 776788 - DNA, 120 bp, Artificial Sequence
  ENSG00000243678_6 (sequence is synthesized)
ctccttcagcacggcgtggtgtgtccctggacacagctcttcattccattgacttagaggcaacaggattgatcattcttttatagagcatatttgccaataaagcttttggaagccgga

SEQ ID NO: 776789 - DNA, 120 bp, Artificial Sequence
  ENSG00000243678_7 (sequence is synthesized)
gccggctcccgggtgtggtggtcgcaccagctctctgctctcccagcgcagcgccgccgcccggcccctccagcttcccggtaaggcggtgggggcgcatcccctggcgactcctcccgt

SEQ ID NO: 776790 - DNA, 80 bp, Artificial Sequence
  ENSG00000243678_8 (sequence is synthesized)
gcgagggcgcgccccggctgggcgtggacactgttctccggccgcgtcgggccgggcgggtggggcgttcctgcgggttg

SEQ ID NO: 776791 - DNA, 120 bp, Artificial Sequence
  ENSG00000243678_9 (sequence is synthesized)
ccctgcgcccctcctccgccgccggctcccgggtgtggtggtcgcaccagctctctgctctcccagcgcagcgccgccgcccggcccctccagcttcccggaccatggccaacctggagc

SEQ ID NO: 776792 - DNA, 120 bp, Artificial Sequence
  ENSG00000243678_10 (sequence is synthesized)
atctcagggcagtaccactgctgtgcggctgtcagtcagtgctgcaggcgccgagaggaggggcttgtgaccgccccagggaagctgggcatcaccaaagggagcttgtttgccagggac

SEQ ID NO: 776793 - DNA, 120 bp, Artificial Sequence
  ENSG00000243678_11 (sequence is synthesized)
actgcaagtaggaagtgtctacaggtcgatgacaggcctaatctctatgacagggtctagactttcctcagggtccaggggcgcacctcagggtgaactggaaaactcgaccgcacttta

SEQ ID NO: 776794 - DNA, 120 bp, Artificial Sequence
  ENSG00000243678_12 (sequence is synthesized)
aaaagaacagtctttctgttaaaatggcattagtttcatggtttggatgggatttaaaaaatatttatgtgtgtgtatatgtgtgtatatatatatatatttccacacaccacttaggaa

SEQ ID NO: 776795 - DNA, 80 bp, Artificial Sequence
  ENSG00000243678_13 (sequence is synthesized)
gagagagtaaaatagggaggcagtgaaattgttgagaaagtagatctatttcctgttcacctttttcttccttctgctgt

SEQ ID NO: 776796 - DNA, 120 bp, Artificial Sequence
  ENSG00000243678_14 (sequence is synthesized)
tagatctatttcctgttcacctttttcttccttctgctgttccctggaatccttaccctagcatgttagtctttcttttccctcttctagcagtcttctgggatgcccttcccactgatc

SEQ ID NO: 776797 - DNA, 120 bp, Artificial Sequence
  ENSG00000243678_15 (sequence is synthesized)
ctattccagactggccactttctcctttcttcaccagttcttctgtgttgatggctgcataaggattctgcaacattgtttatctctgtctcagctaaactgggaagtccccaagttgga

SEQ ID NO: 776798 - DNA, 120 bp, Artificial Sequence
  ENSG00000243678_16 (sequence is synthesized)
gggttagctgataatcatgtcactgatcggtctcattgatgtgtcgtgtcaggtaggagtaaatgttagaccctacctgtcctgagtggcaggtctgattataaatccattttcacactt

SEQ ID NO: 776799 - DNA, 120 bp, Artificial Sequence
  ENSG00000243678_17 (sequence is synthesized)
ctgcccccgcccacggcggcttgggcccgccgaccctttcccggggtggtggggacagacgcccttgggaaggtgaagcgctggtagcgtgactcgccctccgggtttgggttccttccc

SEQ ID NO: 776800 - DNA, 120 bp, Artificial Sequence
  ENSG00000243678_18 (sequence is synthesized)
gcgggccgctacctgcccacccgccgcaggggggcagcagggagcggaaaaaccccgggccccagaccccctgcgcctgcccactcgggtccacctaggcacagaatggaggcttggaat

SEQ ID NO: 776801 - DNA, 120 bp, Artificial Sequence
  ENSG00000243708_0 (sequence is synthesized)
tcgtatgttctgatcctccctcttgaagttgccttctgtggtctaaggagggcctgaaggttcaggtggctggttcaggagtgggtgtggagcttaggtggagcagaggcggcgggtagg

SEQ ID NO: 776802 - DNA, 120 bp, Artificial Sequence
  ENSG00000243708_1 (sequence is synthesized)
agggacttgggaccaattgggacatcacatccctggctctgggttagaaagctgacagtccttgatcctgtggccactgccccatcattcctgctcctgaggactcagtctcatggctgt

SEQ ID NO: 776803 - DNA, 120 bp, Artificial Sequence
  ENSG00000243708_2 (sequence is synthesized)
ggcagaggtgtccaggacctgcctgctcacggttcgtgtcctgcaggcccatcgcctaccctctaaggacctagtgaccccctctgactgctacgtgactctctggctgcccacggcctg

SEQ ID NO: 776804 - DNA, 120 bp, Artificial Sequence
  ENSG00000243708_3 (sequence is synthesized)
cagccacaggctccagacacgcacggtcaagaacagcagtagccctgtctggaaccagagctttcacttcaggatccacaggcagctcaagaatgtcatggaactgaaagtctttgacca

SEQ ID NO: 776805 - DNA, 120 bp, Artificial Sequence
  ENSG00000243708_4 (sequence is synthesized)
ggacctggtgaccggagatgaccctgtgttgtcagtactgtttgatgcggggactctgcgggctggggagttccggcgcgagagcttctcactgagccctcagggtgaggggcgcctgga

SEQ ID NO: 776806 - DNA, 120 bp, Artificial Sequence
  ENSG00000243708_5 (sequence is synthesized)
agttgaatttcgcctgcagagtctggctgaccgtggcgagtggctcgtcagcaatggcgttctggtggcccgggagctctcctgcttgcacgttcaactggaggagacaggagaccagaa

SEQ ID NO: 776807 - DNA, 120 bp, Artificial Sequence
  ENSG00000243708_6 (sequence is synthesized)
gtcctcagagcacagagttcagcttgtggttcctgggtcctgtgagggtccgcaggaggcctctgtgggcactggcaccttccgcttccactgcccagcctgctgggagcaggagctgag

SEQ ID NO: 776808 - DNA, 120 bp, Artificial Sequence
  ENSG00000243708_7 (sequence is synthesized)
tattcgcctgcaggatgcccccgaggagcaactaaaggcgccactgagtgccctgccctctggtcaagtggtgaggcttgtcttccccacgtcccaggagcccctgatgagagtggagct

SEQ ID NO: 776809 - DNA, 120 bp, Artificial Sequence
  ENSG00000243708_8 (sequence is synthesized)
gaaaaaagaagcaggactgagggagctggccgtgcgactgggcttcgggccctgtgcagaggagcaggccttcctgagcaggaggaagcaggtggtggccgcggccttgaggcaggccct

SEQ ID NO: 776810 - DNA, 120 bp, Artificial Sequence
  ENSG00000243708_9 (sequence is synthesized)
gcagctggacggagacctgcaggaggatgagatcccagtggtagctattatggccactggtggtgggatccgggcaatgacttccctgtatgggcagctggctggcctgaaggagctggg

SEQ ID NO: 776811 - DNA, 120 bp, Artificial Sequence
  ENSG00000243708_10 (sequence is synthesized)
cctcttggattgcgtctcctacatcaccggggcctcgggctccacctgggccttggccaacctttatgaggacccagagtggtctcagaaggacctggcagggcccactgagttgctgaa

SEQ ID NO: 776812 - DNA, 120 bp, Artificial Sequence
  ENSG00000243708_11 (sequence is synthesized)
caccaacctgtgggccctcatcaacgaggcgctgctgcatgatgagccccatgatcacaagctctcagatcaacgggaggccctgagtcatggccagaaccctctgcccatctactgtgc

SEQ ID NO: 776813 - DNA, 120 bp, Artificial Sequence
  ENSG00000243708_12 (sequence is synthesized)
cctcaacaccaaagggcagagcctgaccacttttgaatttggggagtggtgcgagttctctccctacgaggtcggcttccccaagtacggggccttcatcccctctgagctctttggctc

SEQ ID NO: 776814 - DNA, 120 bp, Artificial Sequence
  ENSG00000243708_13 (sequence is synthesized)
cgagttctttatggggcagctgatgaagaggcttcctgagtcccgcatctgcttcttagaaggtatctggagcaacctgtatgcagccaacctccaggacagcttatactgggcctcaga

SEQ ID NO: 776815 - DNA, 120 bp, Artificial Sequence
  ENSG00000243708_14 (sequence is synthesized)
gcccagccagttctgggaccgctgggtcaggaaccaggccaacctggacaaggagcaggtcccccttctgaagatagaagaaccaccctcaacagccggcaggatagctgagtttttcac

SEQ ID NO: 776816 - DNA, 120 bp, Artificial Sequence
  ENSG00000243708_15 (sequence is synthesized)
cgatcttctgacgtggcgtccactggcccaggccacacataatttcctgcgtggcctccatttccacaaagactactttcagcatcctcacttctccacatggaaagctaccactctgga

SEQ ID NO: 776817 - DNA, 120 bp, Artificial Sequence
  ENSG00000243708_16 (sequence is synthesized)
tgggctccccaaccagctgacaccctcggagccccacctgtgcctgctggatgttggctacctcatcaataccagctgcctgcccctcctgcagcccactcgggacgtggacctcatcct

SEQ ID NO: 776818 - DNA, 120 bp, Artificial Sequence
  ENSG00000243708_17 (sequence is synthesized)
gtcattggactacaacctccacggagccttccagcagttgcagctcctgggccggttctgccaggagcaggggatcccgttcccacccatctcgcccagccccgaagagcagctccagcc

SEQ ID NO: 776819 - DNA, 120 bp, Artificial Sequence
  ENSG00000243708_18 (sequence is synthesized)
tcgggagtgccacaccttctccgaccccacctgccccggagcccctgcggtgctgcactttcctctggtcagcgactccttccgggagtactcggcccctggggtccggcggacacccga

SEQ ID NO: 776820 - DNA, 120 bp, Artificial Sequence
  ENSG00000243708_19 (sequence is synthesized)
ggaggcggcagctggggaggtgaacctgtcttcatcggactctccctaccactacacgaaggtgacctacagccaggaggacgtggacaagctgctgcacctgacacattacaatgtctg

SEQ ID NO: 776821 - DNA, 120 bp, Artificial Sequence
  ENSG00000243708_20 (sequence is synthesized)
caacaaccaggagcagctgctggaggctctgcgccaggcagtgcagcggaggcggcagcgcaggccccactgatggccggggcccctgccacccctaactctcattcattccctggctgc

SEQ ID NO: 776822 - DNA, 120 bp, Artificial Sequence
  ENSG00000243708_21 (sequence is synthesized)
tgagttgcaggtgggaactgtcatcacgcagtgcttcagagcctcgggctcaggtggcacggtcccagggtccaggctgagggctgggagctcccttgcgcctcagcagtttgcagtggg

SEQ ID NO: 776823 - DNA, 120 bp, Artificial Sequence
  ENSG00000243708_22 (sequence is synthesized)
gtaaggaggccaagcccatttgtgtaatcacccaaaaccccccggcctgtgcctgttttcccttctgcgctaccttgagtagttggagcacttgatacatcacagactcatacaaatgtg

SEQ ID NO: 776824 - DNA, 120 bp, Artificial Sequence
  ENSG00000243708_23 (sequence is synthesized)
gatggggctgggacccaggccacaaagggaggggcctgcttcccgcttctccgtgggtcacaccctgagcaggtgctggggccaggctctttggggagtgtcctctgagcatccctgctt

SEQ ID NO: 776825 - DNA, 120 bp, Artificial Sequence
  ENSG00000243708_24 (sequence is synthesized)
caggcctggcgcctgtggagacggtggcggggcgggggtggtgcgccggggatcagggtaagaggaccagagctgggtggaggtggccgaccttttgtgactggggccttcacggttttc

SEQ ID NO: 776826 - DNA, 120 bp, Artificial Sequence
  ENSG00000243708_25 (sequence is synthesized)
aggagcccctgatgagagtggagctgaaaaaagaagcagggtgagaggcctggctggggactgggcaaggccctggaaaacaaccagggtgcggggctggaggaggcctggaggagtgag

SEQ ID NO: 776827 - DNA, 120 bp, Artificial Sequence
  ENSG00000243708_26 (sequence is synthesized)
ggggagaaacagccgcccctcatcctcatgctctctgaaggggctcaggcttgcgctcgagggggcacgaagtactgggaggagtactgggaggagtcttagcacctatggtcagagggg

SEQ ID NO: 776828 - DNA, 120 bp, Artificial Sequence
  ENSG00000243708_27 (sequence is synthesized)
cgagtgaccggcccagtgccaggcacccggggagcacttgataaatgtttggctggaaaacgcagggaggcaaggatggaaaatggtaacatggtttggggcgcagagagggcaggaaaa

SEQ ID NO: 776829 - DNA, 120 bp, Artificial Sequence
  ENSG00000243708_28 (sequence is synthesized)
ccaagggagagaagaggggaaattgcgcccttttgggtggaagctgttatggctggaccttaaatgatcttcgtagagttgtcgcccaccctggccctctgtcttgagagagtggcttct

SEQ ID NO: 776830 - DNA, 88 bp, Artificial Sequence
  ENSG00000243708_29 (sequence is synthesized)
gtcgcccaccctggccctctgtcttgagagagtggcttctcacctcacagacacaggattattggtccttttctgccccgccccctgc

SEQ ID NO: 776831 - DNA, 120 bp, Artificial Sequence
  ENSG00000243708_30 (sequence is synthesized)
gaggtacaggcccaccgctgcctcagcctggggaccctgggatttcagtttgttaagggaatacaatctcaagggcccaggtaatgaagtgcagaccagcagcagccagggtgctgcgag

SEQ ID NO: 776832 - DNA, 120 bp, Artificial Sequence
  ENSG00000243708_31 (sequence is synthesized)
tggaggagacaggagaccagaagtgtgagtccccaacccactgggacagcccctggctctcagctcttgtcttccccctttaagcattggacaattctccttggggcctgagctttcccc

SEQ ID NO: 776833 - DNA, 120 bp, Artificial Sequence
  ENSG00000243708_32 (sequence is synthesized)
ttaggccttctcgggggactgtggtgggggatccatctccaccagaccatttcagcggggagagggaggtgccctccaggccacgcagcaagatgggttctgtgggcagagataccgtcc

SEQ ID NO: 776834 - DNA, 120 bp, Artificial Sequence
  ENSG00000243708_33 (sequence is synthesized)
tggggaagggtaggattgggacaagagtcgggggccctcttccctcacggccgctctttcaggtatctggagcaacctgtatgcagccaacctccaggacagcttatactgggcctcaga

SEQ ID NO: 776835 - DNA, 120 bp, Artificial Sequence
  ENSG00000243709_0 (sequence is synthesized)
acatccagctgcctgagaccctcctgcagccttctcaagggacagccccactctgcctcttgctcctccagggcagcaccatgcagcccctgtggctctgctgggcactctgggtgttgc

SEQ ID NO: 776836 - DNA, 120 bp, Artificial Sequence
  ENSG00000243709_1 (sequence is synthesized)
ccctggccagccccggggccgccctgaccggggagcagctcctgggcagcctgctgcggcagctgcagctcaaagaggtgcccaccctggacagggccgacatggaggagctggtcatcc

SEQ ID NO: 776837 - DNA, 120 bp, Artificial Sequence
  ENSG00000243709_2 (sequence is synthesized)
ccacccacgtgagggcccagtacgtggccctgctgcagcgcagccacggggaccgctcccgcggaaagaggttcagccagagcttccgagaggtggccggcaggttcctggcgttggagg

SEQ ID NO: 776838 - DNA, 120 bp, Artificial Sequence; identical to SEQ ID NO: 382489
  ENSG00000243709_3 (sequence is synthesized)

SEQ ID NO: 776839 - DNA, 120 bp, Artificial Sequence
  ENSG00000243709_4 (sequence is synthesized)
ggcggctgtccccgcgcagcgcccgggcccgggtgaccgtcgagtggctgcgcgtccgcgacgacggctccaaccgcacctccctcatcgactccaggctggtgtccgtccacgagagcg

SEQ ID NO: 776840 - DNA, 120 bp, Artificial Sequence; identical to SEQ ID NO: 382491
  ENSG00000243709_5 (sequence is synthesized)

SEQ ID NO: 776841 - DNA, 120 bp, Artificial Sequence
  ENSG00000243709_6 (sequence is synthesized)
agctgcacaccctggaccttggggactatggagctcagggcgactgtgaccctgaagcaccaatgaccgagggcacccgctgctgccgccaggagatgtacattgacctgcaggggatga

SEQ ID NO: 776842 - DNA, 120 bp, Artificial Sequence
  ENSG00000243709_7 (sequence is synthesized)
agtgggccgagaactgggtgctggagcccccgggcttcctggcttatgagtgtgtgggcacctgccggcagcccccggaggccctggccttcaagtggccgtttctggggcctcgacagt

SEQ ID NO: 776843 - DNA, 120 bp, Artificial Sequence
  ENSG00000243709_8 (sequence is synthesized)
gcatcgcctcggagactgactcgctgcccatgatcgtcagcatcaaggagggaggcaggaccaggccccaggtggtcagcctgcccaacatgagggtgcagaagtgcagctgtgcctcgg

SEQ ID NO: 776844 - DNA, 120 bp, Artificial Sequence
  ENSG00000243709_9 (sequence is synthesized)
atggtgcgctcgtgccaaggaggctccagccataggcgcctagtgtagccatcgagggacttgacttgtgtgtgtttctgaagtgttcgagggtaccaggagagctggcgatgactgaac

SEQ ID NO: 776845 - DNA, 120 bp, Artificial Sequence
  ENSG00000243709_10 (sequence is synthesized)
tgctgatggacaaatgctctgtgctctctagtgagccctgaatttgcttcctctgacaagttacctcacctaatttttgcttctcaggaatgagaatctttggccactggagagcccttg

SEQ ID NO: 776846 - DNA, 120 bp, Artificial Sequence
  ENSG00000243709_11 (sequence is synthesized)
ctcagttttctctattcttattattcactgcactatattctaagcacttacatgtggagatactgtaacctgagggcagaaagcccaatgtgtcattgtttacttgtcctgtcactggat

SEQ ID NO: 776847 - DNA, 120 bp, Artificial Sequence
  ENSG00000243709_12 (sequence is synthesized)
ctgggctaaagtcctccaccaccactctggacctaagacctggggttaagtgtgggttgtgcatccccaatccagataataaagactttgtaaaacatgaataaaacacattttattcta

SEQ ID NO: 776848 - DNA, 120 bp, Artificial Sequence
  ENSG00000243709_13 (sequence is synthesized)
acatagcaaagcagctcagagttggatctaggggaaagcgctggaatccacgctccgcttccccacgcagcctcgcctgtggccccagcagcgccctctgcacatgggaggtcgggcagc

SEQ ID NO: 776849 - DNA, 120 bp, Artificial Sequence
  ENSG00000243709_14 (sequence is synthesized)
ttagcggagctccccggccagggactcaggcctcaccaggggcccgcgtgtccagcctgacgtgggccatctgaatcgaaatacacccatcttgctcaagacgaggcctagagagtcagt

SEQ ID NO: 776850 - DNA, 120 bp, Artificial Sequence
  ENSG00000243710_0 (sequence is synthesized)
acttccggtttgtcgttgctataggaaccgctacggcgtttgaaagtgtccgggttgcttaggatccctacaggtagcgcctctggatacatgcgtggtctgctgacccagagagaaacg

SEQ ID NO: 776851 - DNA, 120 bp, Artificial Sequence
  ENSG00000243710_1 (sequence is synthesized)
aaagcagaactgtttggcgggagatcatgtcagccgtggtagctcagacgctgcatgtttttggtcttcgatcccacgtggccaacaatatcttctacttcgatgaacagatcattatat

SEQ ID NO: 776852 - DNA, 120 bp, Artificial Sequence
  ENSG00000243710_2 (sequence is synthesized)
ttccttcaggaaatcactgtgtgaagtacaatgtggatcagaaatggcaaaaattcattccaggctcagagaagagtcagggcatgttggccttgtccatcagtcccaatcggcggtacc

SEQ ID NO: 776853 - DNA, 120 bp, Artificial Sequence
  ENSG00000243710_3 (sequence is synthesized)
tcgctatctctgagactgtgcaagaaaaacctgccatcaccatttatgaattgtcatccatcccttgccggaagcgcaaagttcttaataattttgacttccaagttcagaaatttatta

SEQ ID NO: 776854 - DNA, 120 bp, Artificial Sequence
  ENSG00000243710_4 (sequence is synthesized)
gcatggctttttctccagactccaaatacctattggctcagacgtcacctccagagtcaaatcttgtctactggctgtgggaaaaacagaaagtaatggccattgttagaatcgacactc

SEQ ID NO: 776855 - DNA, 120 bp, Artificial Sequence
  ENSG00000243710_5 (sequence is synthesized)
agaacaaccctgtctaccaggtgagcttcagtccacaggataacactcaggtgtgtgtcactggaaatgggatgtttaagcttctccgttttgctgagggaaccctgaagcaaaccagct

SEQ ID NO: 776856 - DNA, 120 bp, Artificial Sequence
  ENSG00000243710_6 (sequence is synthesized)
ttcagaggggagaaccccaaaactatctagctcacacctgggtggctgatgacaagattgtcgttggcactgacacaggcaaactcttcctctttgaatctggagatcagcgttgggaga

SEQ ID NO: 776857 - DNA, 120 bp, Artificial Sequence
  ENSG00000243710_7 (sequence is synthesized)
ccagcataatggtcaaggaacctaccaatggctcaaagagcctggatgtcattcaggaatcagagagcctgattgaatttccaccagtcagttctccactcccttcctatgaacagatgg

SEQ ID NO: 776858 - DNA, 120 bp, Artificial Sequence
  ENSG00000243710_8 (sequence is synthesized)
tggcggccagtagccatagccagatgtccatgccccaggtgtttgccattgcagcctattcaaagggatttgcctgttctgctgggccagggagagttctgctgtttgagaagatggaag

SEQ ID NO: 776859 - DNA, 120 bp, Artificial Sequence
  ENSG00000243710_9 (sequence is synthesized)
aaaaggatttttaccgtgagagcagagaaatcaggattcctgtggacccgcagagcaatgatccaagtcagtctgacaaacaggacgttctctgcctgtgcttcagcccctcagaggaaa

SEQ ID NO: 776860 - DNA, 120 bp, Artificial Sequence
  ENSG00000243710_10 (sequence is synthesized)
ctctggttgccagcaccagtaagaaccaactctacagcatcaccatgtccctgacagagatcagcaagggggagcctgctcactttgagtatttgatgtatccattgcactcagcaccca

SEQ ID NO: 776861 - DNA, 120 bp, Artificial Sequence
  ENSG00000243710_11 (sequence is synthesized)
tcaccggtctagctacctgcatccgcaaaccccttatagccacctgttctctggatcgatccatccgcctttggaattatgaaacaaacaccctggaactatttaaggaataccaagaag

SEQ ID NO: 776862 - DNA, 120 bp, Artificial Sequence
  ENSG00000243710_12 (sequence is synthesized)
aggcatattccatcagccttcatccatctggacacttcattgtagtagggtttgctgacaaactacgcctcatgaatctactcattgatgatatacgttctttcaaagaatactctgtta

SEQ ID NO: 776863 - DNA, 120 bp, Artificial Sequence
  ENSG00000243710_13 (sequence is synthesized)
gaggatgcggagagtgttcctttagcaatggaggtcacctgtttgctgcagtcaatggaaatgtgattcacgtttacaccaccacgagcctagagaacatctcaagcctgaaaggacaca

SEQ ID NO: 776864 - DNA, 120 bp, Artificial Sequence
  ENSG00000243710_14 (sequence is synthesized)
cagggaagattcgctcaattgtgtggaatgcagatgatagcaaactgatttctggtggcacagatggtgctgtgtatgaatggaatctgtccacaggaaagagagagacagaatgcgtgc

SEQ ID NO: 776865 - DNA, 120 bp, Artificial Sequence
  ENSG00000243710_15 (sequence is synthesized)
tcaagtcttgcagctacaactgtgttactgtctcccccgatgccaaaattatctttgctgttggatcagaccacaccctcaaggagattgcagattccttgatccttcgagagatatcgg

SEQ ID NO: 776866 - DNA, 120 bp, Artificial Sequence
  ENSG00000243710_16 (sequence is synthesized)
cgtttgatgtcacctacaccgccattgtcatctcgcattctggacgcatgatgtttgtgggcacctcggtgggaaccattcgtgccatgaagtaccctctgcctctgcagaaggaattca

SEQ ID NO: 776867 - DNA, 120 bp, Artificial Sequence
  ENSG00000243710_17 (sequence is synthesized)
tggctgcctgttcacctggaaggtctttgataaggatggccggggaatcaagcgagagagggaggtgggctttgccgaagaggtgcttgtgactaaaacagacatggaagaaaaggctca

SEQ ID NO: 776868 - DNA, 120 bp, Artificial Sequence
  ENSG00000243710_18 (sequence is synthesized)
ggttatgttggagctaaagactcgtgtggaggaattaaaaatggagaatgagtatcaactccgactaaaggacatgaactattctgagaagattaaggagctaacagacaagttcatcca

SEQ ID NO: 776869 - DNA, 120 bp, Artificial Sequence
  ENSG00000243710_19 (sequence is synthesized)
ggaaatggagtccttgaaaacaaaaaaccaggtcttaagaacagaaaaagagaagcaggatgtttatcaccatgagcacatagaagacctcctagacaagcaaagccgggaactgcagga

SEQ ID NO: 776870 - DNA, 120 bp, Artificial Sequence
  ENSG00000243710_20 (sequence is synthesized)
catggaatgttgcaacaaccaaaagttgcttctagaatatgagaagtaccaggagctgcagctcaagtcccagaggatgcaggaagagtatgaaaaacagctccgggataacgatgagac

SEQ ID NO: 776871 - DNA, 120 bp, Artificial Sequence
  ENSG00000243710_21 (sequence is synthesized)
caagagccaggccctggaggagctgactgagttttacgaggcaaaactgcaggagaaaaccacccttctggaagaggcacaggaagacgtcaggcagcagctgcgggagtttgaagagac

SEQ ID NO: 776872 - DNA, 120 bp, Artificial Sequence
  ENSG00000243710_22 (sequence is synthesized)
caagaagcagattgaggaagatgaagaccgagaaatccaagatatcaaaaccaagtatgagaaaaagcttcgggatgaaaaggaatcaaacctgcggctcaagggagaaacaggcatcat

SEQ ID NO: 776873 - DNA, 120 bp, Artificial Sequence
  ENSG00000243710_23 (sequence is synthesized)
gaggaagaagttcagcagcctacagaaggagattgaagaacgaaccaatgacatcgagaccctaaaaggagagcagatgaagctgcaaggagtcattaagtctctggagaaggacatcca

SEQ ID NO: 776874 - DNA, 120 bp, Artificial Sequence
  ENSG00000243710_24 (sequence is synthesized)
aggcctcaagcgagagatccaggaaagagacgagactattcaagacaaggagaagcgaatttatgatctgaaaaagaaaaatcaagaactagggaaattcaagtttgtgcttgactacaa

SEQ ID NO: 776875 - DNA, 120 bp, Artificial Sequence
  ENSG00000243710_25 (sequence is synthesized)
aataaaggagctgaagaagcaaatagaacctcgagagaatgagatcagggtgatgaaggaacagattcaggagaatgaccccattctaaagtggccccagagggtcgagattcacttata

SEQ ID NO: 776876 - DNA, 120 bp, Artificial Sequence
  ENSG00000243710_26 (sequence is synthesized)
caacttcagaaagcaggtgaggaaggtgcttctctggggaaccctgcctcagatggaagctgaactggagaatttccataagcagaacactcaactggagctgaacatcacagaattgtg

SEQ ID NO: 776877 - DNA, 120 bp, Artificial Sequence
  ENSG00000243710_27 (sequence is synthesized)
gcagaaactgagagccaccgatcaggagatgcgcagagagagacagaaggagcgagacttggaagcgctggtcaaaaggtttaaaacagacctccacaactgcgtagcctatattcagga

SEQ ID NO: 776878 - DNA, 120 bp, Artificial Sequence
  ENSG00000243710_28 (sequence is synthesized)
accgcggctgctgaaggagaaggttcgaggtctctttgagaagtacgtgcagcgagcagacatggtggagatcgcagggctgaacacagacctgcagcaggagtacacccggcagcggga

SEQ ID NO: 776879 - DNA, 120 bp, Artificial Sequence
  ENSG00000243710_29 (sequence is synthesized)
gcacctggagaggaacctggccactctcaagaagaaggtggtcaaggagggcgagctgcaccgcacagactacgtccgcatcatgcaggaaaatgtctctctgatcaaggaaattaatga

SEQ ID NO: 776880 - DNA, 120 bp, Artificial Sequence
  ENSG00000243710_30 (sequence is synthesized)
gctccgcagggagctgaagttcactcggtcccaagtctatgaccttgaagcagctctgaaactgaccaagaaagtccgaccacaagaagtttcagagacagaacccagcagggacatgct

SEQ ID NO: 776881 - DNA, 120 bp, Artificial Sequence
  ENSG00000243710_31 (sequence is synthesized)
cagcacagctcccaccgcaaggttgaatgagcaagaagaaactgggaggatcattgaaatgcagcgcctagaaatccagcgcctcagagaccagatccaagagcaagagcaggtcacagg

SEQ ID NO: 776882 - DNA, 120 bp, Artificial Sequence
  ENSG00000243710_32 (sequence is synthesized)
gttccacaccctcgctggagttcggcttccttccctctccaactccgaggtagacttagaggtgaagaccaactgaccccctctggtgagccatctccagccacagccagaagaaacaca

SEQ ID NO: 776883 - DNA, 120 bp, Artificial Sequence
  ENSG00000243710_33 (sequence is synthesized)
gcatgtctgtccccaagccagacttgcggttggagtctgtatggtccctgcagcactgaccccagcaacctctttctcttgccctggggaatttgggacacagaataaaggtgtttgccc

SEQ ID NO: 776884 - DNA, 120 bp, Artificial Sequence
  ENSG00000243710_34 (sequence is synthesized)
aagaaacggggtatcccgagacccaagcggctagcagagggcggccctggccgctgctgcctgccttcagccccctactcccacgccgtggctccacgtgccaccgaatcgctccagcgc

SEQ ID NO: 776885 - DNA, 120 bp, Artificial Sequence
  ENSG00000243710_35 (sequence is synthesized)
ttggtttggcccaagcatacctgcgactgttttcctctacaactctcgcctctgtctactccacacgccccaagcactctcttgcttctaggcttggccatgtgcagtttgtgtacggtt

SEQ ID NO: 776886 - DNA, 120 bp, Artificial Sequence
  ENSG00000243710_36 (sequence is synthesized)
cccaagccaaagggtagtatttgactgtggaaaaggggatcattgggtggtttctgtcacacccagtgacagtcttctttctcctccccagcagaattcatctcctcaagattgtctcta

SEQ ID NO: 776887 - DNA, 120 bp, Artificial Sequence
  ENSG00000243710_37 (sequence is synthesized)
caggttcattctggctgctgtacagaggacagatttaaggaggagaaagaaaggaagcagggagaacagctgagggatgattgctgtaattcaggctcagagaagagtcagggcatgttg

SEQ ID NO: 776888 - DNA, 120 bp, Artificial Sequence
  ENSG00000243710_38 (sequence is synthesized)
gagcagggccctctccccaggaacccagtcccacacctgcctgctacgtgccttgttcatcccttcaacctcccaatgtcttttctctctccttcttctctcttatttattcatccatca

SEQ ID NO: 776889 - DNA, 120 bp, Artificial Sequence
  ENSG00000243710_39 (sequence is synthesized)
ttcattgaatcaccatctattgactatgaatatactctttgtttaaactacttccaggaatttagcctaggaaatcatcagagatacacctaaaaatgtatgtacaacgttttcaccata

SEQ ID NO: 776890 - DNA, 120 bp, Artificial Sequence
  ENSG00000243710_40 (sequence is synthesized)
atattatgcataataaggggccgtttggtggatgccgtagctgccgtgagtgtgggctgcacttgaccacagctgcctcctcctccagagaatgccccagactgaaaggagccatagccc

SEQ ID NO: 776891 - DNA, 120 bp, Artificial Sequence
  ENSG00000243710_41 (sequence is synthesized)
tgaagattggcccctacctctccctgagggtacaaaaggccaccccaggggcaataccatgagtacacatttgtaaattgtccttccattcacccttctcataaagtagtatctatgttc

SEQ ID NO: 776892 - DNA, 120 bp, Artificial Sequence
  ENSG00000243710_42 (sequence is synthesized)
aacagtcaaaatgtggaagcaaccaagcatccatcgacagacgaatgcataagcaaaagatggtatatctatacaatggaacaataccctgcctaaaaaggaagggaattctgcaatgtg

SEQ ID NO: 776893 - DNA, 120 bp, Artificial Sequence
  ENSG00000243710_43 (sequence is synthesized)
ctaccacatggatgaaccttgaggatgttatgctaaattaaataaggccaaccacaaaaagataagtacagtgtgattccacttttaggagatacttggagcagtcagaatcacaaagac

SEQ ID NO: 776894 - DNA, 120 bp, Artificial Sequence
  ENSG00000243710_44 (sequence is synthesized)
agagtggtggttggcaggggctgcaggaagggggaatgaggaatgattgtttcataggtatagagttttggttttacaagacaaaaggattatgggggtagttggtggcaatggctgcac

SEQ ID NO: 776895 - DNA, 120 bp, Artificial Sequence
  ENSG00000243710_45 (sequence is synthesized)
aacattacaaatgtatttaataacatgaactgtacacttgaaaatggttaagatagcaaattttacagaatatgtattttacgacaattttaaaaatgaaataaaaaagaattatcttgc

SEQ ID NO: 776896 - DNA, 84 bp, Artificial Sequence
  ENSG00000243716_0 (sequence is synthesized)
ctgactttggtggaagtccttggttacatgtcattattgcgtttccgacaagttataaagttgtcattaccctctggatagttt

SEQ ID NO: 776897 - DNA, 79 bp, Artificial Sequence
  ENSG00000243716_1 (sequence is synthesized)
ctttggtggaagtccttggttacatgtcattattgcgtttccgacaagttactctcctgaagactatcttctggtctcg

SEQ ID NO: 776898 - DNA, 120 bp, Artificial Sequence; identical to SEQ ID NO: 724186
  ENSG00000243716_2 (sequence is synthesized)

SEQ ID NO: 776899 - DNA, 71 bp, Artificial Sequence
  ENSG00000243716_3 (sequence is synthesized)
acccgaacccaagaggcggaggttgagctgagaagaggccagtgcactcaagcctgagcaataagaataaa

SEQ ID NO: 776900 - DNA, 120 bp, Artificial Sequence
  ENSG00000243716_4 (sequence is synthesized)
gaagaggccagtgcactcaagcctgagcaataagaataaaaccgagtagaacaaaataaaaaattcaaaaaacaaaacaaaacccacactccaaaaactaacaaagaataaataaataat

SEQ ID NO: 776901 - DNA, 60 bp, Artificial Sequence
  ENSG00000243716_5 (sequence is synthesized)
accctcagcagatgataatatcaagatacctgctgagcgtctgcggattccgcttccacc

SEQ ID NO: 776902 - DNA, 78 bp, Artificial Sequence; identical to SEQ ID NO: 558523
  ENSG00000243716_6 (sequence is synthesized)

SEQ ID NO: 776903 - DNA, 120 bp, Artificial Sequence; identical to SEQ ID NO: 558520
  ENSG00000243716_7 (sequence is synthesized)

SEQ ID NO: 776904 - DNA, 120 bp, Artificial Sequence; identical to SEQ ID NO: 558521
  ENSG00000243716_8 (sequence is synthesized)

SEQ ID NO: 776905 - DNA, 120 bp, Artificial Sequence
  ENSG00000243716_9 (sequence is synthesized)
cagtttctaacagactttcaacagaggactgtcttattccactcttcggcgaagctttacgttcatgtaaacagcatgacgtgaggccgtggatgcaggcattaaggtttcaggcacaga

SEQ ID NO: 776906 - DNA, 89 bp, Artificial Sequence; identical to SEQ ID NO: 558026
  ENSG00000243716_10 (sequence is synthesized)

SEQ ID NO: 776907 - DNA, 71 bp, Artificial Sequence
  ENSG00000243716_11 (sequence is synthesized)
atgaattttaaaggatgactgatggtccttggaagagaaacagtaaacaaataaggtatgatctcgtgaaa

SEQ ID NO: 776908 - DNA, 120 bp, Artificial Sequence
  ENSG00000243716_12 (sequence is synthesized)
ctaatactcacagggaatatatagagtctagaagaaaatatacaggtccttaaaggctgccctgccaacaaaaccataacgcaggaacaaacatcacaactatgccaaataatcaatcct

SEQ ID NO: 776909 - DNA, 120 bp, Artificial Sequence
  ENSG00000243716_13 (sequence is synthesized)
acaatgtccaaaattttactttaaaactggaattaccagacttcctttctgcattaaccagtttaactagacagtaacgaaatattcctactttatgctgtgatagtttgtttgtttgtt

SEQ ID NO: 776910 - DNA, 73 bp, Artificial Sequence
  ENSG00000243716_14 (sequence is synthesized)
aaggtgacaacgaaaatcaaccctaagcgtgaaagaatgtgagcatgcagaaaaggagaggcaggtatcagag

SEQ ID NO: 776911 - DNA, 120 bp, Artificial Sequence
  ENSG00000243716_15 (sequence is synthesized)
actctcagaaggtgaacctaatttcaaatgaaagctgcctccagaatatattgttaagcgtattctagatataattcattttggcaaacatactgtagaaattcacataacattttactg

SEQ ID NO: 776912 - DNA, 120 bp, Artificial Sequence
  ENSG00000243716_16 (sequence is synthesized)
tactaaaagtaaattgcccatgtaacaaaaaatatcttttcagagcttgaaatgaattttaaaggatgactgatggtccttggaagagaaacagtaaacaaataaggtttcaggcacaga

SEQ ID NO: 776913 - DNA, 120 bp, Artificial Sequence
  ENSG00000243716_17 (sequence is synthesized)
atgctaaaaatatggtggacctggcattacagctattacaaatctcctaagatgtctcgggtagtgtattagttacttttcatactgctatgaagaaatactggaaactgggtaatttat

SEQ ID NO: 776914 - DNA, 120 bp, Artificial Sequence
  ENSG00000243716_18 (sequence is synthesized)
caggacacgaggaaactgttaatgacttgggctttggaagtagctgttgtaatgaagaagtccgaaacatatgcacctttattctgtcttccgtctttccataaattttgcaaaggcctt

SEQ ID NO: 776915 - DNA, 120 bp, Artificial Sequence
  ENSG00000243716_19 (sequence is synthesized)
ttagccgacactctcgttgaagatgtgaatatctgtctgcaggcatgcagcagtctacatgctctatcctcttccttgccagatgatcttttacagagatgtgttgatgtttgccgtgtc

SEQ ID NO: 776916 - DNA, 120 bp, Artificial Sequence
  ENSG00000243716_20 (sequence is synthesized)
caactagtgcaccgtggaacttgtattcgacaagcatttggaaaactgttgaaatcaattcctttaggtgttttcctaagcgataacaatcacacagaaattcaagaaatttctttagca

SEQ ID NO: 776917 - DNA, 120 bp, Artificial Sequence
  ENSG00000243716_21 (sequence is synthesized)
ttaagaagtcacatgagtaaagcaccaagtaatacattccacccccaagatttctctgatgttattagttttattttgtatgggaactctcatagaacagggaaggacaattggttggaa

SEQ ID NO: 776918 - DNA, 120 bp, Artificial Sequence
  ENSG00000243716_22 (sequence is synthesized)
agactgttctatagctgccagagactggataagcgtgaccagtcaacaattccacgcaatctcctgaagacagatgctatcctttggcagtgggccatatgggaagctgcacaattcact

SEQ ID NO: 776919 - DNA, 120 bp, Artificial Sequence
  ENSG00000243716_23 (sequence is synthesized)
gttctttctaagctgagaaccccactgggcagagctcaagacaccttccagacaattgaaggtatcattcgaagtctcgcaggtcacacattaaaccctgatcaggatgttagtcagtgg

SEQ ID NO: 776920 - DNA, 120 bp, Artificial Sequence
  ENSG00000243716_24 (sequence is synthesized)
acaactgcagacagtgatgaaggccatggtaacaaccaacttagacttgttcttcttctgcagtatctggaaaatctggagaaattaatgtataatgcatacgagggatgtgctaatgcc

SEQ ID NO: 776921 - DNA, 120 bp, Artificial Sequence
  ENSG00000243716_25 (sequence is synthesized)
ttaacttcacctcccaaggtcattagaacttttttgtataccaatcgccaaacttgtcaggactggctaacgcggattcgactctccatcatgagggtaggattgttggcaggccagcct

SEQ ID NO: 776922 - DNA, 120 bp, Artificial Sequence
  ENSG00000243716_26 (sequence is synthesized)
gcagtgacagtgagacatggctttgacttgcttacagagatgaaaacaaccagcctatctcaggggaatgaattggaagtaagcattatgatggtggtagaagcactatgtgaacttcat

SEQ ID NO: 776923 - DNA, 120 bp, Artificial Sequence
  ENSG00000243716_27 (sequence is synthesized)
tgtcctgaagctatacagggaattgctgtctggtcatcatctattgttggaaaacatcttctgtggattaactcagtggctcaacaggctgaagggaggtttgaaaaggcctctgtggag

SEQ ID NO: 776924 - DNA, 120 bp, Artificial Sequence
  ENSG00000243716_28 (sequence is synthesized)
taccaggaacacctgtgtgccatgacaggtgttgattgctgcatctccagctttgacaaatcggtgctcaccttagccagtgctgggtgtaagagtgccagcctgaaacattgtctgaat

SEQ ID NO: 776925 - DNA, 120 bp, Artificial Sequence
  ENSG00000243716_29 (sequence is synthesized)
ggtgaatccagaaaaagtgtgctgtccaaaccgactgactcttcccctgaggttataaattatttaggaaacaaagcatgtgagtgctacatctcaactgccgattgggctgctgtgcag

SEQ ID NO: 776926 - DNA, 120 bp, Artificial Sequence
  ENSG00000243716_30 (sequence is synthesized)
gaatggcagaacgctatccatgacttgaaaaagagtaccagtagcacttccctcaacctgaaagctgacttcaactatataaaatcattaagcagctttgagtctggaaaatttgtcgaa

SEQ ID NO: 776927 - DNA, 120 bp, Artificial Sequence
  ENSG00000243725_0 (sequence is synthesized)
gctcgcttcacggcgctgggacccgggctggaaggcagggcatcagctatggaacaacctgggcaggatcccacctcagacgacgtcatggactcgttcctggaaaagttccagagccag

SEQ ID NO: 776928 - DNA, 120 bp, Artificial Sequence
  ENSG00000243725_1 (sequence is synthesized)
ccttaccgtggcggctttcatgaggaccagtgggagaaggaatttgaaaaggtccccctatttatgtcgagagcgccatcagaaattgatcccagggagaatcctgacttggcttgtctc

SEQ ID NO: 776929 - DNA, 120 bp, Artificial Sequence
  ENSG00000243725_2 (sequence is synthesized)
cagtcaattatttttgatgaggagcgttctccagaagaacaggccaagacctataaagatgagggcaatgattactttaaagaaaaagactacaagaaagctgtaatttcatacactgaa

SEQ ID NO: 776930 - DNA, 120 bp, Artificial Sequence
  ENSG00000243725_3 (sequence is synthesized)
ggcttaaagaagaaatgtgcagatcctgatttgaatgctgtcctttataccaaccgggcagcagcacagtactatctgggcaattttcgttctgctctcaatgatgtgacagctgccaga

SEQ ID NO: 776931 - DNA, 120 bp, Artificial Sequence
  ENSG00000243725_4 (sequence is synthesized)
aagctaaaaccctgccacctcaaagcaataataagaggtgccttatgccatctggaactgaaacactttgccgaggccgtgaactggtgtgatgagggactgcaaatagatgccaaagag

SEQ ID NO: 776932 - DNA, 120 bp, Artificial Sequence
  ENSG00000243725_5 (sequence is synthesized)
aagaagcttctggaaatgagggctaaagcagacaagctgaagcgaattgaacagagggatgtgaggaaagccaacttgaaagaaaagaaggagaggaatcagaatgaggctttactccag

SEQ ID NO: 776933 - DNA, 120 bp, Artificial Sequence
  ENSG00000243725_6 (sequence is synthesized)
gccatcaaggctaggaatatcaggctctcagaagctgcctgtgaggatgaagattcagcctcagaaggtctaggtgagcttttcctggatggactcagcactgagaacccccatggagcc

SEQ ID NO: 776934 - DNA, 120 bp, Artificial Sequence
  ENSG00000243725_7 (sequence is synthesized)
aggctgagtctagatggccagggcaggctgagctggcctgtgctctttctgtacccagagtatgcccagtcggacttcatctctgcttttcatgaggactccaggtttattgatcatcta

SEQ ID NO: 776935 - DNA, 120 bp, Artificial Sequence
  ENSG00000243725_8 (sequence is synthesized)
atggtgatgtttggtgaaacaccctcttgggacctagagcaaaaatattgccctgataatttggaggtctactttgaggatgaggacagggcagaactataccgggtgcctgccaagagc

SEQ ID NO: 776936 - DNA, 120 bp, Artificial Sequence
  ENSG00000243725_9 (sequence is synthesized)
cctctcctttttgcaagaattttctccgggggagaaaggtgtaccagatacgatgactaagccagggcccctggatctcctcccttaccctcctctgctgggaacctagcacacctgaat

SEQ ID NO: 776937 - DNA, 120 bp, Artificial Sequence
  ENSG00000243725_10 (sequence is synthesized)
cagctggacatactgctggagtccagtgctttctttccgtcaccctggggatagtccttcctggcatcgtggtgggggaggagcctctggcttccctaaactgcagcctctctggctggt

SEQ ID NO: 776938 - DNA, 120 bp, Artificial Sequence
  ENSG00000243725_11 (sequence is synthesized)
cttcactttcctcagttgatataaaactctgggtcttggccatgatgtccttggactccatcgctaaagggaccatctgctgcagttaccacagcaactgacctgagcggcaccctggtc

SEQ ID NO: 776939 - DNA, 120 bp, Artificial Sequence
  ENSG00000243725_12 (sequence is synthesized)
tgtggagatggactcaggatccagtgacatgattctgaacttttgtggagtttgacaccttagagaagctacccctcaaactgcacatctacacacaaacaaacaatgcataggattcca

SEQ ID NO: 776940 - DNA, 120 bp, Artificial Sequence
  ENSG00000243725_13 (sequence is synthesized)
aggctttaaagctgagagaccctggcctcaagttatttcatgcgcacagagggaagccatgtggggttgctgaagatgccttgaggtgaaatgggggcaggaaagccacatcttgctctg

SEQ ID NO: 776941 - DNA, 120 bp, Artificial Sequence
  ENSG00000243725_14 (sequence is synthesized)
catttataaagaccgtacaaactcagatccttggtacccctaaaaagattgccaattttcttcatctttgccatatggaggactgtgacagactttggacagtggcctcttgagttcctc

SEQ ID NO: 776942 - DNA, 120 bp, Artificial Sequence
  ENSG00000243725_15 (sequence is synthesized)
tgcagttttgacatttaggattttgtgtcttttaaactggaaaatcttctagcatgttgggttgttacagagtatatttttgtctgcagctgtttgttgccccattcctaagaggagttt

SEQ ID NO: 776943 - DNA, 120 bp, Artificial Sequence
  ENSG00000243725_16 (sequence is synthesized)
atccatcctgacttgtagctgtgtgacttcttgcagtgcccccaccccatccccccgggagagtgtacttccctgctcccaatgcagagggatatgcacaggcatgagctgtcctgcgtc

SEQ ID NO: 776944 - DNA, 120 bp, Artificial Sequence
  ENSG00000243725_17 (sequence is synthesized)
tgacagaagcctgaagagtcatgtgtggttggcctgtgctcttccctctgctgtgagaacacatttcccacagaggagccgttccatggagccgagctacagcagctggcctgcagccac

SEQ ID NO: 776945 - DNA, 120 bp, Artificial Sequence
  ENSG00000243725_18 (sequence is synthesized)
tgagtgtcacagcaatgagagagcaatgtttgctgtagtaagcagtgagatttaggggttggttgttactatagcagagctaatacatgagtaaactgaagccagctgctgtccttaaaa

SEQ ID NO: 776946 - DNA, 120 bp, Artificial Sequence
  ENSG00000243725_19 (sequence is synthesized)
atctgggtaatttataagtgctttctgaagaataaacttatgatacaagccattatgatggttagtggaggtttgagaacatcagaggatgaggggctgttatcccagaaacccagacta

SEQ ID NO: 776947 - DNA, 120 bp, Artificial Sequence
  ENSG00000243725_20 (sequence is synthesized)
atagttatttgtttgatcagttcccctcctgtcatcaccactggcccctctcctatgtggagccttcctcaccctacttggactcttgactccacatgttacgctgctgccccagcgtgg

SEQ ID NO: 776948 - DNA, 120 bp, Artificial Sequence
  ENSG00000243725_21 (sequence is synthesized)
gcgtctttctcaccccgcacagactctgacatcccacactgctcaacgaccctacatggacatcctcctcatcctgcttgggctctgacaccctacagcaggccaccccctgccatgagt

SEQ ID NO: 776949 - DNA, 120 bp, Artificial Sequence
  ENSG00000243725_22 (sequence is synthesized)
ggtcaccctcctcaccctagttgggcctgtaaactccatattacttgtccccatgcatggatacccttttcaccccacatggcctctgacaccccaccttggacagccatcttacaaggg

SEQ ID NO: 776950 - DNA, 120 bp, Artificial Sequence
  ENSG00000243725_23 (sequence is synthesized)
agcacttcttcccctgctcaggcctgctggcccccagcatggatgctcttcttcactggtcctgctctgacacccccgggagcttcctgtgcaggcgtcttcctcaccctgcttgggctt

SEQ ID NO: 776951 - DNA, 120 bp, Artificial Sequence
  ENSG00000243725_24 (sequence is synthesized)
tgacaccctgcacagacatccttctctccttcttcaggctctttccttctctgagccaccatagctttctcctccacatacctgatggctttagtctgatttgttagggaaaggagggct

SEQ ID NO: 776952 - DNA, 120 bp, Artificial Sequence
  ENSG00000243725_25 (sequence is synthesized)
acataggcctggccttgagtcttgattcttctgtttaccagcagggtaatgttggcaagttgttgttcttctctgagccttgattctgtctttggaagatggaactgataatagcctctt

SEQ ID NO: 776953 - DNA, 120 bp, Artificial Sequence
  ENSG00000243725_26 (sequence is synthesized)
ttacagtggcatggcgggggggtactaaatgcaaagcacccagctacacaaccatataaaggaggcattcaactactaaccgttgccatctttttaattttccctgggcttagcctcaac

SEQ ID NO: 776954 - DNA, 120 bp, Artificial Sequence
  ENSG00000243725_27 (sequence is synthesized)
gtggcggctttcatgaggaccagtgggagaaggtgggcggtcctggggtctccccacgtgtgtaggggcgtcgtccggactcgtggggcacccgggctctggggcacctccttcaatccc

SEQ ID NO: 776955 - DNA, 120 bp, Artificial Sequence
  ENSG00000243729_0 (sequence is synthesized)
gagctgaaggtaggaaattccaacattctgaagtcttcagcaaatcttagcagatcatctcctcctcacagtcctgtctttagagaacagggtcgatatttcggcttctgcgaactcaga

SEQ ID NO: 776956 - DNA, 120 bp, Artificial Sequence
  ENSG00000243729_1 (sequence is synthesized)
tgtcatcttttcttccctaaagtttttaaagttcctattgatatattcccctgcctagagggtttggtggtcgttttcttcctcttaactttattaaggtcatgctattgcagcatatga

SEQ ID NO: 776957 - DNA, 120 bp, Artificial Sequence
  ENSG00000243729_2 (sequence is synthesized)
ttcatttttataatctggtcttctctttgcccaattcctgaaaggaaaccaggcgacatcatggaaagaaagaatcaaacagctataactgaattcatcatcttgggattctccaaccta

SEQ ID NO: 776958 - DNA, 120 bp, Artificial Sequence
  ENSG00000243729_3 (sequence is synthesized)
aatgaattgcagtttttactattcaccatcttctttctgacttatttctgtactttgggaggaaatatattaattatcttgacgactgtgactgatccacacctgcatacacctatgtat

SEQ ID NO: 776959 - DNA, 120 bp, Artificial Sequence
  ENSG00000243729_4 (sequence is synthesized)
tattttctagggaacttggcctttattgacatctgctacaccaccagcaatgtcccccagatgatggtgcacctcctctcaaagaaaaaaagcatttcttatgtggggtgtgtggttcaa

SEQ ID NO: 776960 - DNA, 120 bp, Artificial Sequence
  ENSG00000243729_5 (sequence is synthesized)
tacattgcaatctgcaatcctttaaggtattcagttattctgagcaaggttctatgcaatcaattagcagcctcatgctgggctgctggtttccttaactcagtggtgcatacagtgttg

SEQ ID NO: 776961 - DNA, 120 bp, Artificial Sequence
  ENSG00000243729_6 (sequence is synthesized)
acattctgcctgcccttctgtggcaacaatcagattaattacttcttctgtgacatcccccctttgctgatcttgtcttgtggaaacacttctgtcaatgagttggcactgctatccact

SEQ ID NO: 776962 - DNA, 120 bp, Artificial Sequence
  ENSG00000243729_7 (sequence is synthesized)
ggggtcttcattggttggactcctttcctttgtatcgtactttcctacatttgcataatctccaccatcttgaggatccagtcctcagagggaagacgaaaagccttctctacatgtgcc

SEQ ID NO: 776963 - DNA, 120 bp, Artificial Sequence
  ENSG00000243729_8 (sequence is synthesized)
tcccacctggccattgtctttctcttttatggcagcgccatctttacatatgtacggcccatctcaacttactcattaaagaaagataggttggtttcagtgttgtacagtgttgttacc

SEQ ID NO: 776964 - DNA, 120 bp, Artificial Sequence
  ENSG00000243729_9 (sequence is synthesized)
cccatgctaaaccctataatttacacattgaggaataaggacatcaaagaagctgtcaaaactatagggagcaagtggcagccaccaatttcctctttggatagtaaactcacttattga

SEQ ID NO: 776965 - DNA, 120 bp, Artificial Sequence
  ENSG00000243729_10 (sequence is synthesized)
ggatcttcttaatccaaagggcattttccttactcactccagtcccatgcactggccttcagggactgagtagagtcttggcactcacctagaaaacccatcactcagaagtttatcagc

SEQ ID NO: 776966 - DNA, 120 bp, Artificial Sequence
  ENSG00000243729_11 (sequence is synthesized)
acagactctgtagggaacattattttgtgttacttcgttgtattcttaaaaacagccccatatcagtctctcagagtctgaatggtaatctctgctcaatatctccaatcacaggtcatg

SEQ ID NO: 776967 - DNA, 120 bp, Artificial Sequence
  ENSG00000243729_12 (sequence is synthesized)
ttcaccagtcagctgtttttattgaaagtttaaaagataattgcaatgttgggacagatattgaagagttgatacactccagtctaagtgtacttattcttgagctttagttagttctat

SEQ ID NO: 776968 - DNA, 120 bp, Artificial Sequence
  ENSG00000243729_13 (sequence is synthesized)
gagagatatcaatgttgctctctttagatattatcttcttatttatttttccattcctgaattttgcattcaaagactgtttccctctttcatgagatatttgtttaatggacttcatca

SEQ ID NO: 776969 - DNA, 120 bp, Artificial Sequence
  ENSG00000243729_14 (sequence is synthesized)
cttgaaaatttccctgctttttcatattgctttctgtatattaaataatgtgaaatatttttcttcacattcctcatatgtgtgtcatatttttctgttcttactacttaagccatgctt

SEQ ID NO: 776970 - DNA, 120 bp, Artificial Sequence
  ENSG00000243729_15 (sequence is synthesized)
ttgacctttctttctttagtaggcccttcttaataaaacatcatcaccaatagattaagaaatgtaaacacagtaaagtgatgttttacctccagatctgttggtagctaattttaattt

SEQ ID NO: 776971 - DNA, 120 bp, Artificial Sequence
  ENSG00000243729_16 (sequence is synthesized)
tatcacctgctgcatgggccaaggccaatttatcttcacattggaatgaagacagtcataattttcaatcccatttgacatgcattctttattctattcaaaaggcagaatttcctgagg

SEQ ID NO: 776972 - DNA, 120 bp, Artificial Sequence
  ENSG00000243729_17 (sequence is synthesized)
gatttttctaaaactaagtccccaaaacatattactattttatagagtatcttaaatttgggaaacttttttcgctaaaaatttagaaaacagaatcagataaaacatacagaaaaaaca

SEQ ID NO: 776973 - DNA, 120 bp, Artificial Sequence
  ENSG00000243729_18 (sequence is synthesized)
aacaagggttttttgatggggaataaaaagtcttagttatataatgactaaatttagaaaaaaaagtagaaattactaatgttaaaagtaaaagtacttaattactattttctatgtgtt

SEQ ID NO: 776974 - DNA, 120 bp, Artificial Sequence
  ENSG00000243729_19 (sequence is synthesized)
ccatgtaaagtacagttatgaagtcaagacaaatgggaaggaagactaagtggtggaagagagaaataaatacagacactggagagaaaatttaaaagataaagagacttagagatacca

SEQ ID NO: 776975 - DNA, 120 bp, Artificial Sequence
  ENSG00000243729_20 (sequence is synthesized)
agaagggaaaataaataacatacaatgtaagagcctaagagattgaaagagagatagaaaaaggcttatagatcaggtagatacaagttgtctagtgtctttcttcactattctctcagg

SEQ ID NO: 776976 - DNA, 120 bp, Artificial Sequence
  ENSG00000243729_21 (sequence is synthesized)
accgtcttctttttcttcccatacctactgatgcctcccttgattaagtcttgacttcccagcccctcttttgtgtaatgttgtcatagtgttctagtggagtgccttgtctccattcct

SEQ ID NO: 776977 - DNA, 120 bp, Artificial Sequence
  ENSG00000243729_22 (sequence is synthesized)
attctgtttaatgtaccctgcacatcatttctgagttaactttcttaacatggtgttatgtacagtctcctatactgtttttgttttaataaactctactggcttactggcacactcttc

SEQ ID NO: 776978 - DNA, 120 bp, Artificial Sequence
  ENSG00000243729_23 (sequence is synthesized)
atttaactaaatatatttgtaaccactgtctataaaatctaagtactacctactttgtaactcatctcctgcaggaaccctaaataattcttctccaggtatggcttgatctttcctgac

SEQ ID NO: 776979 - DNA, 120 bp, Artificial Sequence
  ENSG00000243749_0 (sequence is synthesized)
aggggcgggttttcggcggggccaacccacggtggggggagcgcggccatggcgctcctgctttcggtgctgcgtgtactgctgggcggcttcttcgcgctcgtggggttggccaagctc

SEQ ID NO: 776980 - DNA, 120 bp, Artificial Sequence
  ENSG00000243749_1 (sequence is synthesized)
tcggaggagatctcggctccagtttcggagcggatgaatgccctgttcgtgcagtttgctgaggtgttcccgctgaaggtatttggctaccagccagatcccctgaactaccaaatagct

SEQ ID NO: 776981 - DNA, 120 bp, Artificial Sequence
  ENSG00000243749_2 (sequence is synthesized)
gtgggctttctggaactgctggctgggttgctgctggtcatgggcccaccgatgctgcaagagatcagtaacttgttcttgattctgctcatgatgggggctatcttcaccttggcagct

SEQ ID NO: 776982 - DNA, 120 bp, Artificial Sequence
  ENSG00000243749_3 (sequence is synthesized)
cccagactaagaaggtggtcagacccactaggaagaagactctaagtacattcaaggaatcctggaagtagagcatctctgtctctttatgccatgcagctgtcacagcaggaacatggt

SEQ ID NO: 776983 - DNA, 120 bp, Artificial Sequence
  ENSG00000243749_4 (sequence is synthesized)
agaacacagagtctatcatcttgttaccagtataatatccagggtcagccagtgttgaaagagacattttgtctacctggcactgctttctctttttagctttactactcttttgtgagg

SEQ ID NO: 776984 - DNA, 120 bp, Artificial Sequence
  ENSG00000243749_5 (sequence is synthesized)
agtacatgttatgcatattaacattcctcatgtcatatgaaaatacaaaataagcagaaaagaaatttaaatcaaccaaaattctgatgccccaaataaccacttttaatgccttggtgt

SEQ ID NO: 776985 - DNA, 120 bp, Artificial Sequence
  ENSG00000243749_6 (sequence is synthesized)
aagtatacctctgaacttttttctgtgcctttaaacagatatatattttttttaaatgaaaataaaaccatatatcctattttatttcctccttttaaaaccttataaactataacactg

SEQ ID NO: 776986 - DNA, 120 bp, Artificial Sequence
  ENSG00000243772_0 (sequence is synthesized)
ggggcgcggccgcctgtctgcacagacagcaccatgtcgctcatggtcgtcagcatggtgtgtgttgggttcttcttgctgcagggggcctggccacatgagggagtccacagaaaacct

SEQ ID NO: 776987 - DNA, 120 bp, Artificial Sequence
  ENSG00000243772_1 (sequence is synthesized)
tccctcctggcccacccaggtcccctggtgaaatcagaagagacagtcatcctgcaatgttggtcagatgtcaggtttcagcacttccttctgcacagagaagggaagtttaaggacact

SEQ ID NO: 776988 - DNA, 120 bp, Artificial Sequence
  ENSG00000243772_2 (sequence is synthesized)
ttgcacctcattggagagcaccatgatggggtctccaaggccaacttctccatcggtcccatgatgcaagaccttgcagggacctacagatgctacggttctgttactcactccccctat

SEQ ID NO: 776989 - DNA, 120 bp, Artificial Sequence
  ENSG00000243772_3 (sequence is synthesized)
cagttgtcagctcccagtgaccctctggacatcgtcatcacaggtctatatgagaaaccttctctctcagcccagccgggccccacggttctggcaggagagagcgtgaccttgtcctgc

SEQ ID NO: 776990 - DNA, 120 bp, Artificial Sequence
  ENSG00000243772_4 (sequence is synthesized)
agctcccggagctcctatgacatgtaccatctatccagggagggggaggcccatgaacgtaggttctctgcagggcccaaggtcaacggaacattccaggccgactttcctctgggccct

SEQ ID NO: 776991 - DNA, 120 bp, Artificial Sequence
  ENSG00000243772_5 (sequence is synthesized)
gccacccacggaggaacctacagatgcttcggctctttccgtgactctccatacgagtggtcaaactcgagtgacccactgcttgtttctgtcacaggaaacccttcaaatagttggcct

SEQ ID NO: 776992 - DNA, 120 bp, Artificial Sequence
  ENSG00000243772_6 (sequence is synthesized)
ccccagacacctgcatgttctgattgggacctcagtggtcatcatcctcttcatcctcctcctcttctttctccttcatcgctggtgctgcaacaaaaaaaatgctgttgtaatggacca

SEQ ID NO: 776993 - DNA, 120 bp, Artificial Sequence
  ENSG00000243772_7 (sequence is synthesized)
agagcctgcagggaacagaacagtgaacagggaggactctgatgaacaagaccctcaggaggtgacatatgcacagttgaatcactgcgttttcacacagagaaaaatcactcgcccttc

SEQ ID NO: 776994 - DNA, 120 bp, Artificial Sequence
  ENSG00000243772_8 (sequence is synthesized)
tcagaggcccaagacacccccaacagatatcatcgtgtacacggaacttccaaatgctgagccctgatccaaagttgtctcctgcccatgagcaccacagtcaggccttgaggggatctt

SEQ ID NO: 776995 - DNA, 120 bp, Artificial Sequence
  ENSG00000243772_9 (sequence is synthesized)
ctagggagacaacagccctgtctcaaaactgggttgccagctccaatgtaccagcagctggaatctgaaggcgtgagtctgcatcttagggcatcgctcttcctcacaccacaaatctga

SEQ ID NO: 776996 - DNA, 120 bp, Artificial Sequence
  ENSG00000243772_10 (sequence is synthesized)
acgtgcctctcccttgcttacaaatgtctaaggtccccactgcctgctggagagaaaacacactcctttgcttagcccacaattctccatttcacttgacccctgcccacctctccaacc

SEQ ID NO: 776997 - DNA, 120 bp, Artificial Sequence
  ENSG00000243772_11 (sequence is synthesized)
taactggcttacttcctagtctacttgaggctgcaatcacactgaggaactcacaattccaaacatacaagaggctccctcttaacacggcacttagacacgtgctgttccaccttccct

SEQ ID NO: 776998 - DNA, 120 bp, Artificial Sequence
  ENSG00000243772_12 (sequence is synthesized)
catgctgttccacctcccctcagactagctttcagccttctgtcagcagtaaaacttatatattttttaaaataatttcaatgtagttttccctccttcaaataaacatgtctgccctca

SEQ ID NO: 776999 - DNA, 120 bp, Artificial Sequence
  ENSG00000243789_0 (sequence is synthesized)
aaaggcggggtctcggccggcgctgacgcagccatggcggaggcggctttggaagccgtgcggagcgagttacgagaattcccggccgctgcaagggagctctgcgtgcctcttgctgtg

SEQ ID NO: 777000 - DNA, 120 bp, Artificial Sequence
  ENSG00000243789_1 (sequence is synthesized)
ccctacctggacaaacccccaactccgctccacttctaccgggactgggtctgccccaacaggccgtgcattatccgcaacgctctgcagcactggccggccctccagaagtggtccctc

SEQ ID NO: 777001 - DNA, 120 bp, Artificial Sequence
  ENSG00000243789_2 (sequence is synthesized)
ccctatttcagagccacagtgggctccacagaggtgagtgtggccgtgaccccagatggttacgcggatgccgtgagaggggatcgcttcatgatgccagctgagcgccgcctgcccctg

SEQ ID NO: 777002 - DNA, 120 bp, Artificial Sequence
  ENSG00000243789_3 (sequence is synthesized)
agcttcgtgctggatgtgctggagggccgggcccagcaccctggagtcctctatgtgcagaagcagtgctccaacctgcccagcgagctgccccagctgctgcctgatctggaatcccat

SEQ ID NO: 777003 - DNA, 120 bp, Artificial Sequence
  ENSG00000243789_4 (sequence is synthesized)
gtgccctgggcctccgaagccctgggaaagatgcccgatgctgtgaacttctggctgggggaggcggctgcagtgacttctttgcacaaggaccactatgagaacctctactgcgtggtc

SEQ ID NO: 777004 - DNA, 120 bp, Artificial Sequence
  ENSG00000243789_5 (sequence is synthesized)
tgaagagggcacctttaaggtggtggatgaagaggccatggagaaggtgccctggatcccactggaccccttggcgccagacctagcacggtaccctagttacagtcaggcccaggccct

SEQ ID NO: 777005 - DNA, 120 bp, Artificial Sequence
  ENSG00000243789_6 (sequence is synthesized)
tcgctgcacggtgcgggccggtgagatgctctatctgccggctctgtggttccaccacgtccagcagtcccagggctgcatcgcagtgaatttctggtatgacatggaatacgacctcaa

SEQ ID NO: 777006 - DNA, 120 bp, Artificial Sequence
  ENSG00000243789_7 (sequence is synthesized)
gtatagttacttccagctgctcgactccctcaccaaggcttcaggccttgactgatggagcactggtgaacaccaccaagcacgcctcgggggacggagccagcccctccctggccaggt

SEQ ID NO: 777007 - DNA, 120 bp, Artificial Sequence
  ENSG00000243789_8 (sequence is synthesized)
caattctcgagagagcctggagtgtgcatgctggctgctggccccgggtccagcatggcttgagatcagctttggaggatcttggaatgtggtcataaggactcaaggtgccaggcaggt

SEQ ID NO: 777008 - DNA, 120 bp, Artificial Sequence
  ENSG00000243789_9 (sequence is synthesized)
ctgggtgagggttctcaggaagttgccacacaggtgagcagagtggggatcaggtgcagcggcacctctccccagcgctgtgatgttgggcgagtcactgcgtctcgggcattggtgtcc

SEQ ID NO: 777009 - DNA, 120 bp, Artificial Sequence
  ENSG00000243789_10 (sequence is synthesized)
tgtcagtaaagagataataatggctgtacctcgcggggctgttgtgggcttggagatgatgtctatgaggaccagcatggagctggcacacaggacatgttgaataaaaggtagctgtga

SEQ ID NO: 777010 - DNA, 120 bp, Artificial Sequence
  ENSG00000243789_11 (sequence is synthesized)
gctgacgcagccatggcggaggcggctttggaagccgtgcggagcgagttacgagaattcccggccgctgcaagggtctatgtcctgttacattctaagtgagaacgtggacaatcaacc

SEQ ID NO: 777011 - DNA, 120 bp, Artificial Sequence
  ENSG00000243789_12 (sequence is synthesized)
tgtttaggaaacagtgaagaagccagtctgcaggagcagcgtcttctgcgcatgtagctctgcgtgcctcttgctgtgccctacctggacaaacccccaactccgctccacttctaccgg

SEQ ID NO: 777012 - DNA, 120 bp, Artificial Sequence
  ENSG00000243789_13 (sequence is synthesized)
gccggcgctgacgcagccatggcggaggcggctttggaagccgtgcggagcgagttacgagaattcccggccgctgcaaggggcccggtgccgtcttgaccgtggtcgcggcgaagccct

SEQ ID NO: 777013 - DNA, 120 bp, Artificial Sequence
  ENSG00000243789_14 (sequence is synthesized)
aggacgtcttggggtgcagggctctcagcatgatggtttgcctcctcccgtgcccctgccctccataccctgcccccgggccttctttctgttggcagtgcacaaggaccactatgagaa

SEQ ID NO: 777014 - DNA, 120 bp, Artificial Sequence
  ENSG00000243789_15 (sequence is synthesized)
tctcggccggcgctgacgcagccatggcggaggcggctttggaagccgtgcggagcgagttacgagaattcccggccgctgcaaggggtgggagctgccctggggtcaggtgtgagcagt

SEQ ID NO: 777015 - DNA, 120 bp, Artificial Sequence
  ENSG00000243811_0 (sequence is synthesized)
ggcgtgagccaccgtgcccggccgggaggtcactttaaggagggctgtccaactgcaaggagccgcaagcaggaagtgaaaccacagcacttcaaaaaaagagggagactgggacaagcg

SEQ ID NO: 777016 - DNA, 120 bp, Artificial Sequence
  ENSG00000243811_1 (sequence is synthesized)
gagactgggacaagcgtatctaagaggctgaacatgaatccacagatcagaaatccgatggagcggatgtatcgagacacattctacgacaactttgaaaacgaacccatcctctatggt

SEQ ID NO: 777017 - DNA, 120 bp, Artificial Sequence
  ENSG00000243811_2 (sequence is synthesized)
cggagctacacttggctgtgctatgaagtgaaaataaagaggggccgctcaaatctcctttgggacacaggggtctttcgaggcccggtactacccaaacgtcagtcgaatcacaggcag

SEQ ID NO: 777018 - DNA, 120 bp, Artificial Sequence
  ENSG00000243811_3 (sequence is synthesized)
gaggtgtatttccggtttgagaaccacgcagaaatgtgcttcttatcttggttctgtggcaaccgactgcctgctaacaggcgcttccagatcacctggtttgtatcatggaacccctgc

SEQ ID NO: 777019 - DNA, 120 bp, Artificial Sequence
  ENSG00000243811_4 (sequence is synthesized)
ctgccctgtgtggtgaaggtgaccaaattcttggctgagcaccccaatgtcaccctgaccatctctgccgcccgcctctactactaccgggatagagattggcggtgggtgctcctcagg

SEQ ID NO: 777020 - DNA, 120 bp, Artificial Sequence
  ENSG00000243811_5 (sequence is synthesized)
ctgcataaggcaggggcccgtgtgaagatcatggactatgaagactttgcatactgctgggaaaactttgtgtgcaatgaaggtcagccattcatgccttggtacaaattcgatgacaat

SEQ ID NO: 777021 - DNA, 120 bp, Artificial Sequence
  ENSG00000243811_6 (sequence is synthesized)
tatgcatccctgcaccgcacgctaaaggagattctcagaaacccgatggaggcaatgtacccacacatattctacttccactttaaaaacctactgaaagcctgtggtcggaacgaaagc

SEQ ID NO: 777022 - DNA, 120 bp, Artificial Sequence
  ENSG00000243811_7 (sequence is synthesized)
tggctgtgcttcaccatggaagttacaaagcaccactcagctgtcttccggaagaggggcgtcttccgaaaccaggtggatcctgagacccattgtcatgcagaaaggtgcttcctctct

SEQ ID NO: 777023 - DNA, 120 bp, Artificial Sequence
  ENSG00000243811_8 (sequence is synthesized)
gcaacgtgaatctcaccatcttcaccgcccgcctctgctacttctgggatacagattaccaggaggggctctgcagcctgagtcaggaaggggcctccgtgaagatcatgggctacaaag

SEQ ID NO: 777024 - DNA, 120 bp, Artificial Sequence
  ENSG00000243811_9 (sequence is synthesized)
attttgtatcttgttggaaaaactttgtgtacagtgatgatgagccattcaagccttggaagggactacaaaccaactttcgacttctgaaaagaaggctacgggagattctccagtgag

SEQ ID NO: 777025 - DNA, 120 bp, Artificial Sequence
  ENSG00000243811_10 (sequence is synthesized)
gggtctccctgggcctcatggtctgtctcttctagcctcctgctcatgctgcacgggcctcccctccatcctgcaccagctgtgcttttgcctggtcatcctgagcccctcctggcctca

SEQ ID NO: 777026 - DNA, 120 bp, Artificial Sequence
  ENSG00000243811_11 (sequence is synthesized)
gggccattccatagtgcccccctgcctcaccacctcctccccgctctcccaggctcttcttgtagaggctctccatccacctccccagtcctgttcccccagcctgggtgcccctaactt

SEQ ID NO: 777027 - DNA, 75 bp, Artificial Sequence
  ENSG00000243811_12 (sequence is synthesized)
actagagtgcaatggctggatctcagctcactgcaaactctgcttactgggttcaagtgattctcctgtctcagc

SEQ ID NO: 777028 - DNA, 85 bp, Artificial Sequence
  ENSG00000243811_13 (sequence is synthesized)
ctcctgacctcaggtgatctgcccatctctgtcggctcggccgcacaaccaaatcttattaaactcaatctagtctggccctggt

SEQ ID NO: 777029 - DNA, 120 bp, Artificial Sequence
  ENSG00000243811_14 (sequence is synthesized)
agccacccggctcggccgcacaaccaaatcttattaaactcaatctagtctggccctggtgactcacgcctttcggaggcagaggtgggagaatcgcttgagcccagaagtttgagacca

SEQ ID NO: 777030 - DNA, 120 bp, Artificial Sequence
  ENSG00000243811_15 (sequence is synthesized)
ccccatttctacaaaaaaaaataccaaaaaaaagccagatgtggtggcatgcacctgtagtttaagctacttgggaggatgaagtgggaggactgcttgagccggggaggtggaggctgg

SEQ ID NO: 777031 - DNA, 120 bp, Artificial Sequence
  ENSG00000243811_16 (sequence is synthesized)
agtaaactgagatcgcgccacagaactccagtttgagcaacagatcaagaccctgcctgaaaataaatcaataaatacactcaacctaaatggatatgaatatatgtaagttgaaaacca

SEQ ID NO: 777032 - DNA, 120 bp, Artificial Sequence
  ENSG00000243896_0 (sequence is synthesized)
tcaccaaagagtgccgaacaagttaaaatgaatctgtttttaaacacttctcctaaaccatgagcattaacttgatttcctctgtcatagggatatgggggacaatataacatccatcac

SEQ ID NO: 777033 - DNA, 120 bp, Artificial Sequence
  ENSG00000243896_1 (sequence is synthesized)
agagttcctcctactgggatttcccgttggcccaaggattcagatgctcctctttgggctcttctccctgttctacgtcttcaccctgctggggaacgggaccatactggggctcatctc

SEQ ID NO: 777034 - DNA, 120 bp, Artificial Sequence
  ENSG00000243896_2 (sequence is synthesized)
actggactccagactgcacgcccccatgtacttcttcctctcacacctggcggtcgtcgacatcgcctacgcctgcaacacggtgccccggatgctggtgaacctcctgcatccagccaa

SEQ ID NO: 777035 - DNA, 120 bp, Artificial Sequence
  ENSG00000243896_3 (sequence is synthesized)
gcccatctcctttgcgggccgcatgatgcagacctttctgttttccacttttgctgtcacagaatgtctcctcctggtggtgatgtcctatgatctgtacgtggccatctgccaccccct

SEQ ID NO: 777036 - DNA, 120 bp, Artificial Sequence
  ENSG00000243896_4 (sequence is synthesized)
caccctcgcggtgacttcctggaccactggagtccttttatccttgattcatcttgtgttacttctacctttacccttctgtaggccccagaaaatttatcactttttttgtgaaatctt

SEQ ID NO: 777037 - DNA, 120 bp, Artificial Sequence
  ENSG00000243896_5 (sequence is synthesized)
ggctgttctcaaacttgcctgtgcagatacccacatcaatgagaacatggtcttggccggagcaatttctgggctggtgggacccttgtccacaattgtagtttcatatatgtgcatcct

SEQ ID NO: 777038 - DNA, 120 bp, Artificial Sequence
  ENSG00000243896_6 (sequence is synthesized)
ctgtgctatccttcagatccaatcaagggaagttcagaggaaagccttctgcacctgcttctcccacctctgtgtgattggactcttttatggcacagccattatcatgtatgttggacc

SEQ ID NO: 777039 - DNA, 120 bp, Artificial Sequence
  ENSG00000243896_7 (sequence is synthesized)
cagatatgggaaccccaaggagcagaagaaatatctcctgctgtttcacagcctctttaatcccatgctcaatccccttatctgtagtcttaggaactcagaagtgaagaatactttgaa

SEQ ID NO: 777040 - DNA, 120 bp, Artificial Sequence
  ENSG00000243896_8 (sequence is synthesized)
gagagtgctgggagtagaaagggctttatgaaaaggattatggcattgtgactgacagtgacctaggaagttacatcattgagcggttcttaacccatctctgcactggtgggacctctg

SEQ ID NO: 777041 - DNA, 120 bp, Artificial Sequence
  ENSG00000243896_9 (sequence is synthesized)
atcacgtgttgtttaatgatgcggatacgttctgagaaatgtgcggtcaagtgattctgacattgtgtgaacatccagaaaggacttcacggggatatgggggacaatataacatccatc

SEQ ID NO: 777042 - DNA, 120 bp, Artificial Sequence
  ENSG00000243896_10 (sequence is synthesized)
gaaattgatctcttcaagttgtgctgcagccactccacaccaggacaataccccttacaatatcctcattagcttttgatccagtcccatacctcccataatgttttcctcaaaacactg

SEQ ID NO: 777043 - DNA, 120 bp, Artificial Sequence
  ENSG00000243896_11 (sequence is synthesized)
gtcccttcagaggactttaaaaataagttctatagtcaaataagtttgagacttacttcacatcagatgcctctgtctagggatcacaattcatattagcatagtgaatgctgtaaatat

SEQ ID NO: 777044 - DNA, 120 bp, Artificial Sequence
  ENSG00000243896_12 (sequence is synthesized)
ttctctaggaaagaataattctataccagctttaagccagtgttttctaaacttatgtgagcacataaaatttcctttgtaatacttagtaacagtttcctggaacaggagatcttgata

SEQ ID NO: 777045 - DNA, 120 bp, Artificial Sequence
  ENSG00000243896_13 (sequence is synthesized)
ttaattgactcattgtgaatacttcctacagcccccttctagggcagaatgatttcttttttccttgcaaagtgagcctctaaagagatgtagttctgagcattatgcctcgatcagtct

SEQ ID NO: 777046 - DNA, 120 bp, Artificial Sequence
  ENSG00000243896_14 (sequence is synthesized)
gtaaaaatccgggttctgtttggatacagaccgtgagggaccctgtctctactgttcaatggtagatcatctaaagaaaataaatgcaatcctgtccttcatcatggatcggcattcctg

SEQ ID NO: 777047 - DNA, 120 bp, Artificial Sequence
  ENSG00000243896_15 (sequence is synthesized)
ctatagaagcttcaggagatgacctcattcaacctcacaatcttctaaatttgagatttttaagaaatatgattcagtatacatctgcctgtgtttgccgctgaatgaaatcaatctaat

SEQ ID NO: 777048 - DNA, 120 bp, Artificial Sequence
  ENSG00000243896_16 (sequence is synthesized)
ttttctaattcagggttttcaagataaacccagatttctcaagaaagaaaaatctagaaagatttcaaaatccaccacctacacacttaaaagttgtagcagcttcttatgccatgggaa

SEQ ID NO: 777049 - DNA, 120 bp, Artificial Sequence
  ENSG00000243910_0 (sequence is synthesized)
gtctctgcccatccgcgcacccgggcttcggctggagagggccagctcgcttcaggaggccgaaccccgttcccaccaaccctctcagctcagacgcggggtgctgagtcacgggggggg

SEQ ID NO: 777050 - DNA, 120 bp, Artificial Sequence
  ENSG00000243910_1 (sequence is synthesized)
ggtggttctgtggatagttggaatgcatacacagaggaaagggggatgcggcaccagcagacagagagacaagaccccagccagcccctgtccaggcagcatggcacataccgccagatc

SEQ ID NO: 777051 - DNA, 120 bp, Artificial Sequence
  ENSG00000243910_2 (sequence is synthesized)
ttccatccagagcagctcatcacaggcaaggaagatgctgccaataactatgcctggggccactacaccattgggaaggagttcatcgacctgctactggaccggattcggaagctggct

SEQ ID NO: 777052 - DNA, 120 bp, Artificial Sequence
  ENSG00000243910_3 (sequence is synthesized)
gaccagtgcacaggacttcagggcttcctggtgttccacagccttggtcggggcactggctctgacgtcacctcattcctgatggagtggctttctgttaactatggcaagaaatccaag

SEQ ID NO: 777053 - DNA, 120 bp, Artificial Sequence
  ENSG00000243910_4 (sequence is synthesized)
ctgggattctccatctacccagccccccaggtgtctacagccatggtccagccctacaactctatcctgaccacccacaccaccctggagcactcagactgtgccttcatggtggacaac

SEQ ID NO: 777054 - DNA, 120 bp, Artificial Sequence
  ENSG00000243910_5 (sequence is synthesized)
ctcattagccaaattgtctcctccatcacagcttctctgcgctttgacggggccctcaatgtggacctgacagagttccagaccaacctggtgtcctacctcacatccacttccccctgg

SEQ ID NO: 777055 - DNA, 120 bp, Artificial Sequence
  ENSG00000243910_6 (sequence is synthesized)
ccacctatgcaccagtcatctctgcagaaaaggtataccacgagcagctgttggtggcagagattaccaatgcctgctttgagcctgccaaccagatggtgaagtgtgatccccggcacg

SEQ ID NO: 777056 - DNA, 120 bp, Artificial Sequence
  ENSG00000243910_7 (sequence is synthesized)
gcaagtacatggcctgctgcctgctataccatggagatgtggtgcccaaggatgtcaacgctgccattgctgccatcaagaccaagtgcagcattcagtttgtggactggtgccccacag

SEQ ID NO: 777057 - DNA, 120 bp, Artificial Sequence
  ENSG00000243910_8 (sequence is synthesized)
gctttaaggttgatatcaatcaccagcctcccactgtggtgcctgggagtgacctggtaaagtgcaacgtgccatgtgcatgctgagcaacatgacagccatcactatggcctgggcccg

SEQ ID NO: 777058 - DNA, 120 bp, Artificial Sequence
  ENSG00000243910_9 (sequence is synthesized)
cctggaccacaagtttgacctgatgtatgccaagagggcgtttgggcactgatatgtgggtgagggcatggaggagggtgagttctccaaggcccatgaggatatgactgccctggagaa

SEQ ID NO: 777059 - DNA, 120 bp, Artificial Sequence
  ENSG00000243910_10 (sequence is synthesized)
ggattacaaggaggtgggcatggatagtgtggagtggggggaagaaaagataggggggatgaatactaggggaatactgtgtgtctgtcctacataaagtgctgtggccttattgtctca

SEQ ID NO: 777060 - DNA, 120 bp, Artificial Sequence
  ENSG00000243910_11 (sequence is synthesized)
ggtggttctgtggatagttggaatgcatacacagaggaaagggggatgcggcaccaggctgtgccaccaggaaatgggattgcgtgactgacaacagataccatgtacccagaggcctgg

SEQ ID NO: 777061 - DNA, 120 bp, Artificial Sequence
  ENSG00000243910_12 (sequence is synthesized)
atacctgtgtggagttactagccctggcccctcctctgcccacctcagctggctcccctgtttgggtgcaggcccagagcttgcctcgtactctgtgaccaagtcaacaggccctgccct

SEQ ID NO: 777062 - DNA, 120 bp, Artificial Sequence
  ENSG00000243910_13 (sequence is synthesized)
cccaggccgtttctaacaacatccacctgctgagagccacccagcgagtataaggaggaggctggctggccgctgcaggcctctcacagatctatccctgctcactatcctgcagcagac

SEQ ID NO: 777063 - DNA, 120 bp, Artificial Sequence
  ENSG00000243910_14 (sequence is synthesized)
cacaggcaaggaagatgctgccaataactatgcctggggccactacaccattgggaaggagttcatcgacctgctactggaccggattcggaagctgcttctctgcgctttgacggggcc

SEQ ID NO: 777064 - DNA, 120 bp, Artificial Sequence; identical to SEQ ID NO: 731853
  ENSG00000243927_0 (sequence is synthesized)

SEQ ID NO: 777065 - DNA, 120 bp, Artificial Sequence
  ENSG00000243927_1 (sequence is synthesized)
ggcatgccccgctacgagctggctttaatcctgaaagccatgcagcggccagagactgctgctactttgaaacgtacgatagaggccctgatggacagaggagcaatagtgagggacttg

SEQ ID NO: 777066 - DNA, 120 bp, Artificial Sequence
  ENSG00000243927_2 (sequence is synthesized)
gaaaacctgggtgaacgagcgcttccttataggatctctgcccacagtcagcagcacaacagaggcgggtatttcttggtggatttttatgcacccaccgcagctgttgaaagcatggtg

SEQ ID NO: 777067 - DNA, 120 bp, Artificial Sequence
  ENSG00000243927_3 (sequence is synthesized)
cagtcccactcgcagaaaaattatattccacaaagaagaggaagaagtgagaagattcgccagattttagccttatatgtaattccttcacatttgggcagcatggacgagaaggaagaa

SEQ ID NO: 777068 - DNA, 120 bp, Artificial Sequence
  ENSG00000243927_4 (sequence is synthesized)
tttgcaagtttggcctttatataagcatgtgttgcaggtgctgtttgatttttctaaggtatttttagcccttgatcccctttgcttgcgagaggtggggaactgctcactgacagcttc

SEQ ID NO: 777069 - DNA, 120 bp, Artificial Sequence
  ENSG00000243927_5 (sequence is synthesized)
tctgtaacctgcagtaccagtggatcgttcttgattttgttttcattagtgtcatttctttgtcattgaggacttttccccttacaacagtaacaccattttttgaagagcaaaacttat

SEQ ID NO: 777070 - DNA, 120 bp, Artificial Sequence
  ENSG00000243927_6 (sequence is synthesized)
aatacctcctgggattgtgagctagtcattcagcctgtgtaaccatgtggaaataaaaattgacgaccaatgtattatatggacaacttttgctttgagtaataaacttgattgtaggaa

SEQ ID NO: 777071 - DNA, 120 bp, Artificial Sequence
  ENSG00000243927_7 (sequence is synthesized)
tttgcttctctgactttgagtcctcttgttagcccctaaatgtttgtactccccaaggttctgctggtgatctcctttcctctccccctccaccctttctattgatctcacctccttctc

SEQ ID NO: 777072 - DNA, 120 bp, Artificial Sequence
  ENSG00000243927_8 (sequence is synthesized)
aggcttcagagagccgtctgtgcaggtgactatgaaatgtgtatttctcatccacctgctttgagcttaagatttacatctggagaggtcaacctaggggagccatggcatctgagactc

SEQ ID NO: 777073 - DNA, 120 bp, Artificial Sequence
  ENSG00000243927_9 (sequence is synthesized)
agcgtgtcttaaaccagattcatctcttactgtcctcaccagcttctccagctctccttttagctgtagtgacagttgcactctctcagccaccagattgtggtgcccttcttcgccaca

SEQ ID NO: 777074 - DNA, 120 bp, Artificial Sequence
  ENSG00000243927_10 (sequence is synthesized)
tcttgccttcattctccacattgcattcgttgcagttttcaggcttatccttataaagtatcttttcttccaaaaattgcttgtgtatacatatgcatagagagatatctggaaagaaat

SEQ ID NO: 777075 - DNA, 120 bp, Artificial Sequence
  ENSG00000243927_11 (sequence is synthesized)
tcaccagaaagtttaattcaccatccagtctatctctgggtaatgggattctatattgttcaagcttttttttttttttttttaaataacaggccttgattactcatggacttgtgccca

SEQ ID NO: 777076 - DNA, 120 bp, Artificial Sequence
  ENSG00000243927_12 (sequence is synthesized)
gtgtatacccgtctatctcctcagcactcccttgccctgaaccccatcactggggctcagttgctggttcattcattctttgtacctccggtcatcattttccgggtgcctttcaagtaa

SEQ ID NO: 777077 - DNA, 120 bp, Artificial Sequence
  ENSG00000243927_13 (sequence is synthesized)
actttccttagtgaaacccttcttccagctgaatgtttcttcctttcgtgagccctctggtctctatgctatttcctgtattctgccctctgctctccatacatgtgtattttgtgttct

SEQ ID NO: 777078 - DNA, 120 bp, Artificial Sequence
  ENSG00000243927_14 (sequence is synthesized)
gtcctttattagattgtaagctccatgagggcagagtttgggtctgattacccatcctttcccccttttggttacagtctcccagtttttctttgggagacaacaccttttccccctggc

SEQ ID NO: 777079 - DNA, 120 bp, Artificial Sequence
  ENSG00000243927_15 (sequence is synthesized)
ccaacgagatactcttctcctggaatttgaattttgagtcatgggatacaaggactgacagtgattggcactgattcagcctggccgaggtgctctgaagaagccactcattagttcctg

SEQ ID NO: 777080 - DNA, 120 bp, Artificial Sequence
  ENSG00000243927_16 (sequence is synthesized)
cctcccagatccctggagctgccctggtccctgaactctccgaagcctggttcttcagatattcctcgtatctccagagactgctgctactttgaaacgtacgatagaggccctgatgga

SEQ ID NO: 777081 - DNA, 120 bp, Artificial Sequence
  ENSG00000243927_17 (sequence is synthesized)
taattacagatctacctttagcacagaagtagccatagacactatgcagatgtgtgagttggctgtgttccagttcaactttatttgcaaatacaggtagcaagccagatttggcccaag

SEQ ID NO: 777082 - DNA, 120 bp, Artificial Sequence
  ENSG00000243927_18 (sequence is synthesized)
agccctggtttgccaaccctgctttatggtgaggtaaggtctatggggcgttatttttgctcctccttccacctttcgttttatacttctgggtgttttgaaattaaagtgagatgaatg

SEQ ID NO: 777083 - DNA, 120 bp, Artificial Sequence
  ENSG00000243927_19 (sequence is synthesized)
tggccattccagtagtctacagtttgaccttgacatactgaagtcaaacaatttttttttttatattttcctaagttacattcttgttaggtagcctttcccctttttgagacagatgta

SEQ ID NO: 777084 - DNA, 120 bp, Artificial Sequence
  ENSG00000243927_20 (sequence is synthesized)
agaagaaaatgttttttactttataagctcttacttcagaagagggtaatgagttttatactgtaaacacttcagttggaacttaaaagatattgagatatattcctttttaatcaggca

SEQ ID NO: 777085 - DNA, 120 bp, Artificial Sequence
  ENSG00000243927_21 (sequence is synthesized)
aaactggaattgaaatttatttgggtagctaatcagaaaactaatcaatcaaatgtttttttcctttttttttttgagtgcaaagctgagacccgactctttatttggatgggctgttcc

SEQ ID NO: 777086 - DNA, 120 bp, Artificial Sequence
  ENSG00000243927_22 (sequence is synthesized)
tttaccttatcatacgttaattgatgtaatgccaggtcaagaaacagcattttcagttaaatgaaatactgtgctgctgttaataatgagtcctctgcagatgtatggcgatgtctttgt

SEQ ID NO: 777087 - DNA, 120 bp, Artificial Sequence
  ENSG00000243927_23 (sequence is synthesized)
gaactataatgaaatgtgagaagaatgtagtcttcatatgattagaactgtctaggaatgtgtttgatacaatcataaggataaattgccttagactttttacctactgttaatgggaag

SEQ ID NO: 777088 - DNA, 120 bp, Artificial Sequence
  ENSG00000243927_24 (sequence is synthesized)
agattttggcctgaatttttattgtcttcaggaaatttctgttttatcttaaggttggttaaatatataaacaacgattcagtaggaatttttaaaatccctaatggacttcaatatgaa

SEQ ID NO: 777089 - DNA, 120 bp, Artificial Sequence
  ENSG00000243927_25 (sequence is synthesized)
aagaaagtaaagaatgtttttttctaagccttaagccaatacttagcacatttcataccattttagcagcacttgtcagaaagaaaattttaaaaatatagtggattttgtttggttgcc

SEQ ID NO: 777090 - DNA, 120 bp, Artificial Sequence
  ENSG00000243927_26 (sequence is synthesized)
agaatgcacacttaaacttgttctgcaattttctcttcatttgatccccaaatgaacctctggaaggtagcctattcttaagtttcctcctgcactttaaaatcaccctgcttgcacctc

SEQ ID NO: 777091 - DNA, 120 bp, Artificial Sequence
  ENSG00000243927_27 (sequence is synthesized)
ttcacgtaggtctttgaggagatgtgcaccttgtctttgccaaggtgtgcctctggcttcctccccgatggtttccacagctttccttctccttgcagcaggcgtttccacttaatagct

SEQ ID NO: 777092 - DNA, 120 bp, Artificial Sequence
  ENSG00000243927_28 (sequence is synthesized)
gccctgtcagcatctctctagagatcccatcccaaatctgtaaaccttcttggctttttttttttatgaagataaaatatgtaacaataagacactagaccatatagtagttatccagta

SEQ ID NO: 777093 - DNA, 120 bp, Artificial Sequence
  ENSG00000243927_29 (sequence is synthesized)
aatcatagctgtcatcgttgttgctattttagaaatcctacattttatcgtcttgcatggtccgctcctttttgactaccaacttgcccatgtgttttctcctaaaacacgttgctcaag

SEQ ID NO: 777094 - DNA, 120 bp, Artificial Sequence
  ENSG00000243927_30 (sequence is synthesized)
ttgcttgtccctggagccctggcattttctcctcctcaccattgttctcatacctctaccatgggaaccttggcagcctgctttctggccccatcttgccaaatgcccatgtagctacca

SEQ ID NO: 777095 - DNA, 120 bp, Artificial Sequence
  ENSG00000243927_31 (sequence is synthesized)
tatctcatatccttacaataaattctctctctcttttattttaagttaaccaaaaccagcttctgttgcttttacccagcgattcctaccagtagagctgttatgattggaactgagcag

SEQ ID NO: 777096 - DNA, 120 bp, Artificial Sequence
  ENSG00000243927_32 (sequence is synthesized)
gaggagaaggaaggcatggaaagttccagccggttcgagagctaggttgtttacattcagagctctatcaataagaggaatacatattacagtgaattcgacaaccgcacaagttggcag

SEQ ID NO: 777097 - DNA, 120 bp, Artificial Sequence
  ENSG00000243943_0 (sequence is synthesized)
agaggagagcggaagtggcgttggtctggccggagcccttgggtgaaattgttaggcgtggagagggagtgatgtcttccagactcggtgctgtacccgccacttcgggacccacaacct

SEQ ID NO: 777098 - DNA, 120 bp, Artificial Sequence
  ENSG00000243943_1 (sequence is synthesized)
ttaagcagcagaggagcacgaggatcgtgggagctaagaatagcaggacccagtgctccataaaggataatagtttccagtacactatccctcatgatgactccttaagtggttcatcgt

SEQ ID NO: 777099 - DNA, 120 bp, Artificial Sequence
  ENSG00000243943_2 (sequence is synthesized)
ctgcatcttcgtgtgaaccagtgagtgattttccagcatctttccgaaaatctacctactggatgaagatgagaagaatcaagccagctgctacttctcatgtcgaagggtcaggtggag

SEQ ID NO: 777100 - DNA, 120 bp, Artificial Sequence
  ENSG00000243943_3 (sequence is synthesized)
tatcagccaaggggaaaaggaaacccaggcaggaagaagatgaagactatcgagaatttcctcagaagaagcataagctttatgggaggaagcaacggcctaaaactcagcccaatccca

SEQ ID NO: 777101 - DNA, 120 bp, Artificial Sequence
  ENSG00000243943_4 (sequence is synthesized)
aatcccaggcccgtcgtattcggaaggaaccaccagtttatgcagcaggcagtttggaggagcaatggtacttagaaatcgttgataaaggcagtgtctcctgccctacctgccaggcag

SEQ ID NO: 777102 - DNA, 120 bp, Artificial Sequence
  ENSG00000243943_5 (sequence is synthesized)
tggggaggaagaccatagagggtttaaagaaacacatggaaaactgcaagcaggaaatgtttacttgtcatcattgtgggaaacaacttcgttcactggcagggatgaagtatcatgtca

SEQ ID NO: 777103 - DNA, 120 bp, Artificial Sequence
  ENSG00000243943_6 (sequence is synthesized)
tggcaaatcataatagtttgcccattttgaaagccggagatgaaatagatgagccaagtgagagggaaaggctccgaacagttctaaagagactgggaaagctcaggtgcatgcgtgaga

SEQ ID NO: 777104 - DNA, 120 bp, Artificial Sequence
  ENSG00000243943_7 (sequence is synthesized)
gttgctccagtagcttcaccagcatcatgggatatctctaccatgtcagaaaatgtggcaaaggggctgcagagctggaaaagatgaccctgaaatgtcaccactgtggaaaaccatata

SEQ ID NO: 777105 - DNA, 120 bp, Artificial Sequence
  ENSG00000243943_8 (sequence is synthesized)
ggtcgaaggctggacttgcatatcacctgaggtcagagcatgggcctatatccttctttccagagtcaggacagccagagtgcttaaaggagatgaacctagagtcaaagagtgggggcc

SEQ ID NO: 777106 - DNA, 120 bp, Artificial Sequence
  ENSG00000243943_9 (sequence is synthesized)
gagttcagagacgttctgccaagatagctgtataccacctacaggagctggcctctgctgaactggccaaggaatggcccaagaggaaggtgcttcaggacctggtacctgatgatcgaa

SEQ ID NO: 777107 - DNA, 120 bp, Artificial Sequence
  ENSG00000243943_10 (sequence is synthesized)
agttaaaatatactcgtccagggctccctaccttcagccaggaagtactacataaatggaagacagatatcaagaaatatcatcgtattcagtgtcctaaccagggctgtgaggctgtct

SEQ ID NO: 777108 - DNA, 120 bp, Artificial Sequence
  ENSG00000243943_11 (sequence is synthesized)
acagcagtgtatctggccttaaagctcacctgggctcttgtacattgggaaactttgtggctggaaaatacaaatgtcttctatgtcagaaagaatttgtgtcagagagtggtgtcaagt

SEQ ID NO: 777109 - DNA, 120 bp, Artificial Sequence
  ENSG00000243943_12 (sequence is synthesized)
atcacatcaactccgtccatgctgaggactggttcgttgtaaacccaacaacaaccaaaagctttgaaaagctgatgaagataaagcagcggcagcaagaagaagaaaagcggaggcagc

SEQ ID NO: 777110 - DNA, 120 bp, Artificial Sequence
  ENSG00000243943_13 (sequence is synthesized)
agcacaggagcagaaggtctctaagaaggcggcagcagcctggcattgagcttcccgagacagagctgagtcttagagtagggaaggatcagaggaggaataatgaggaactggtagtgt

SEQ ID NO: 777111 - DNA, 120 bp, Artificial Sequence
  ENSG00000243943_14 (sequence is synthesized)
aagtaaagcccccaaagactaatcataaacgaggaaggaaataggcagtcagtgtaaaagtgctcctaggaaagcagatgtgatgctgttgtcacggggacctgtgctgggaggactgag

SEQ ID NO: 777112 - DNA, 120 bp, Artificial Sequence
  ENSG00000243943_15 (sequence is synthesized)
tgaagattctttcagctgtttgtgtaaggctgtgactttctcagctccttcctcctgtgtaaatttcactgtcttcccttcttacattttgattcccccctccccttttagtaggttttc

SEQ ID NO: 777113 - DNA, 120 bp, Artificial Sequence
  ENSG00000243943_16 (sequence is synthesized)
ctgctattcctcgtcaagtcctcttgtttttttatcttgcccaaagagctccctctcaaggccaactataggctcctcttgccctgtacaaaactaagaaacctctttggttgtcctttc

SEQ ID NO: 777114 - DNA, 120 bp, Artificial Sequence
  ENSG00000243943_17 (sequence is synthesized)
cttcctggggtatagaatgttcttggaagctccattgatttagtagctgctccatcatctagcttgtgaaaccattccaaactaattttttaaaaccataactgatttgtcattttgtat

SEQ ID NO: 777115 - DNA, 120 bp, Artificial Sequence
  ENSG00000243943_18 (sequence is synthesized)
ttgtgatataacaagtctagaagttagaactgttgtcattcacataataagattactctgtctccttgggaaaaaaactttatggaggctgtttgtcctctcaatatggttttaagattg

SEQ ID NO: 777116 - DNA, 120 bp, Artificial Sequence
  ENSG00000243943_19 (sequence is synthesized)
aaagtaagaaaacggatttaggatgaaaactctagaactaccctatgctgtttatactgggaaatgctttgtaccaagtagcagtgactagacccacagacatgaaaagcaaccttagga

SEQ ID NO: 777117 - DNA, 120 bp, Artificial Sequence
  ENSG00000243943_20 (sequence is synthesized)
gtaaagtgacccaaacattaaaatgacaggaaagagaaagtagaagcagcaataaatactgccccaactttcctggagcccgaggcctcatccatagctatgatcacttgccctctgaag

SEQ ID NO: 777118 - DNA, 120 bp, Artificial Sequence
  ENSG00000243943_21 (sequence is synthesized)
cttatttttgcttctttggttttaagaattgagaaatatcacattgcccctgatgttttgacagtctcctagtgctcctggtagtgccactaagggaaaaccaaggtgcgcattccttct

SEQ ID NO: 777119 - DNA, 120 bp, Artificial Sequence
  ENSG00000243943_22 (sequence is synthesized)
ccctggactttaccttacttgttagtctacgccccactgtttccacccatccccttagccaacctctgtctttttgaattttctgagaatattgtcctatcctcttttatatatggagtt

SEQ ID NO: 777120 - DNA, 120 bp, Artificial Sequence
  ENSG00000243943_23 (sequence is synthesized)
ctctcctctttatatcctgagactttgacaccagatgtagatatttatctggagctggaaagaaaaattctttttctgtacctcatgcctatctggtaatgtttaatgggttatttctct

SEQ ID NO: 777121 - DNA, 120 bp, Artificial Sequence
  ENSG00000243943_24 (sequence is synthesized)
ttgagggtggctttctctggaacattggttagagcagctttgttgtcgtgtttctggattctcttccccattttgcgtaaatattggtcttatatattcttgcctattttgtggcatatg

SEQ ID NO: 777122 - DNA, 120 bp, Artificial Sequence
  ENSG00000243943_25 (sequence is synthesized)
ccacataaaaaatgaacctgatatagacaagtactaccttttcaaattctgaaaggctattaccactttaactctttgtgctcctccaaatagctttaaaatgtgggcttttgtgaagac

SEQ ID NO: 777123 - DNA, 120 bp, Artificial Sequence
  ENSG00000243943_26 (sequence is synthesized)
cactttcaaacaagggagcactgaaacctgaattggatactgccagaataggtagttttgaaacaagttaaggacatggtatatgcactctgcattttcattggcagtgtgcccttaaag

SEQ ID NO: 777124 - DNA, 120 bp, Artificial Sequence
  ENSG00000243943_27 (sequence is synthesized)
ccctttcagtagatgagggttgtcagggaggagaaatgaagaagctatgttaatttctggtgagtaagacctggggaatgtttggcaatgacaaaagaaataaatgactctcagaaagat

SEQ ID NO: 777125 - DNA, 120 bp, Artificial Sequence
  ENSG00000243943_28 (sequence is synthesized)
gtttccagtgttctttgacgccgacctgctgcatgactccttgacactgtatgggggtaagaagatggctagagatgggggtgagtttgaaataaattccacatgcagttgtctcagtaa

SEQ ID NO: 777126 - DNA, 120 bp, Artificial Sequence
  ENSG00000243943_29 (sequence is synthesized)
ctggattttgaaggcactttttgcgacagtagatcatagtgggaagaattgtacattggtgcctctggtgaattttgggcatttgatcattttgggggaggaaccaagacaacctggaag

SEQ ID NO: 777127 - DNA, 120 bp, Artificial Sequence
  ENSG00000243943_30 (sequence is synthesized)
tgaagtgaaaggaacataggaaggtagaaagatgtggcatattacctgagaaaaagtaggagactttcaggttgtgttgaagtagggtgggtgattggaacagaattgcactaggatgga

SEQ ID NO: 777128 - DNA, 120 bp, Artificial Sequence
  ENSG00000243943_31 (sequence is synthesized)
tttatgttgataatcatccatccaagctggttttcctaaatctattactatattggatctttttccttcttatctttgctgaagtagaattccctcttttcatctctaacaatccctaca

SEQ ID NO: 777129 - DNA, 120 bp, Artificial Sequence
  ENSG00000243943_32 (sequence is synthesized)
ccctttttctttacccacgttctgctgcctgttccccacctccttggatttaattcctcgccacattaccattagtttctattccttttacatccccaatgtctctcatatccgttgtct

SEQ ID NO: 777130 - DNA, 120 bp, Artificial Sequence
  ENSG00000243943_33 (sequence is synthesized)
tttcttttggcctcccttttagagcctgggacagggctttgagaatgggggaagacgaaggctctggtattgttacccgcctttgcactgctggaagataggacagcatatttttcctaa

SEQ ID NO: 777131 - DNA, 120 bp, Artificial Sequence
  ENSG00000243955_0 (sequence is synthesized)
gtcgagccaggacggtgacagcgtttaacaaagcttagagaaacctccaggagactgctatcatggcagagaagcccaagctccactacttcaatgcacggggcagaatggagtccaccc

SEQ ID NO: 777132 - DNA, 120 bp, Artificial Sequence
  ENSG00000243955_1 (sequence is synthesized)
ggtggctcctggctgcagctggagtagagtttgaagagaaatttataaaatctgcagaagatttggacaagttaagaaatgatggatatttgatgttccagcaagtgccaatggttgaga

SEQ ID NO: 777133 - DNA, 120 bp, Artificial Sequence
  ENSG00000243955_2 (sequence is synthesized)
ttgatgggatgaagctggtgcagaccagagccattctcaactacattgccagcaaatacaacctctatgggaaagacataaaggagagagccctgattgatatgtatatagaaggtatag

SEQ ID NO: 777134 - DNA, 120 bp, Artificial Sequence
  ENSG00000243955_3 (sequence is synthesized)
cagatttgggtgaaatgatcctccttctgcccgtatgtccacctgaggaaaaagatgccaagcttgccttgatcaaagagaaaataaaaaatcgctacttccctgcctttgaaaaagtct

SEQ ID NO: 777135 - DNA, 120 bp, Artificial Sequence
  ENSG00000243955_4 (sequence is synthesized)
taaagagccatggacaagactaccttgttggcaacaagctgagccgggctgacattcatctggtggaacttctctactacgtcgaggagcttgactccagtcttatctccagcttccctc

SEQ ID NO: 777136 - DNA, 120 bp, Artificial Sequence
  ENSG00000243955_5 (sequence is synthesized)
ccagaatcagcaacctgcccacagtgaagaagtttctacagcctggcagcccaaggaagcctcccatggatgagaaatctttagaagaagcaaggaagattttcaggttttaataacgca

SEQ ID NO: 777137 - DNA, 120 bp, Artificial Sequence
  ENSG00000243955_6 (sequence is synthesized)
gtcatggaggccaagaacttgcaataccaatgttctaaagttttgcaacaataaagtactttacctaagtgttgattgtgcctgttgtgaagctaatgaactctttcaaattatatgcta

SEQ ID NO: 777138 - DNA, 120 bp, Artificial Sequence
  ENSG00000243955_7 (sequence is synthesized)
attaaataatacaactcctattcgctgacttagttaaaattgatttgttttcattaggatctgatgtgaattcagatttccaatcttctcctagccaaccattttcctggaattaaaaat

SEQ ID NO: 777139 - DNA, 120 bp, Artificial Sequence
  ENSG00000243955_8 (sequence is synthesized)
tcagtaaaaaaggaaactatagattatgtggtttgtttgacttttccaagaattgtcccgtaacatacaatttgtcatacaatctattaaaatgtcaatgtagaaatgcacttctgacat

SEQ ID NO: 777140 - DNA, 120 bp, Artificial Sequence
  ENSG00000243955_9 (sequence is synthesized)
tttcaggtatgcacaggagaagagttaccatcctggataatggcataaagacattttcttcttttcctggacagtcattttatttctgataaaagcgttctttcttatgcatttgcaaaa

SEQ ID NO: 777141 - DNA, 120 bp, Artificial Sequence
  ENSG00000243978_0 (sequence is synthesized)
ggcaaagggcctcagccccgccctactgactgtgaattctacaacatatggagcgcctaccttgtgcaaggcattgtggcccttcagagacttgaagacagtgtgtgactctcctgtgag

SEQ ID NO: 777142 - DNA, 120 bp, Artificial Sequence
  ENSG00000243978_1 (sequence is synthesized)
ttaagagcactggctgagtcagacagacccgagtgacaagcccagcttcgctccctctcagcggtgagagccaagattttcttgcctcctgggctccctccacactatcctgtggctgtg

SEQ ID NO: 777143 - DNA, 120 bp, Artificial Sequence
  ENSG00000243978_2 (sequence is synthesized)
gcagatatgtcaatacccttacattcactgcgattcaacaatacaatgagggaggaaaatgttgagccccaaaacaagcagatggccttctgtagaccaatgacagagaccagagcagac

SEQ ID NO: 777144 - DNA, 120 bp, Artificial Sequence
  ENSG00000243978_3 (sequence is synthesized)
gtacagattctgcattctcatgtacagttgcctatagtctcaacttcagcctcagaccctggagggacatccacacagttgatgacatctccagtctttgacaccatgtctgcacctcta

SEQ ID NO: 777145 - DNA, 120 bp, Artificial Sequence
  ENSG00000243978_4 (sequence is synthesized)
atgggagtaccaaactctggagcattgtccccacccctaatgccagcctcagactctggggcactttccccattgctaatgccagcctcagactctggggcactgtccccattgctaatg

SEQ ID NO: 777146 - DNA, 120 bp, Artificial Sequence
  ENSG00000243978_5 (sequence is synthesized)
ccagccttagattctggaacattgtccccattgctgtccacttcagagtatggggtaatgtccccagggatgatgacaattcctgattttggaacgatgtccgcaacgctaatggtagca

SEQ ID NO: 777147 - DNA, 120 bp, Artificial Sequence
  ENSG00000243978_6 (sequence is synthesized)
ccagattctgcagagatatcaccattggcaatgccagctccatcctctggagtggtgtgtacacctataatgagcacttcatcctctgaggcaatgtccacaccattaatgctagcccca

SEQ ID NO: 777148 - DNA, 120 bp, Artificial Sequence
  ENSG00000243978_7 (sequence is synthesized)
gattctggagagttatccccaattctaatgcaagatatgaatcctggagtgatgtctacacagccagtgccagctcccagctctgaggcaatgtccccattgcaaattacagatgaagac

SEQ ID NO: 777149 - DNA, 120 bp, Artificial Sequence
  ENSG00000243978_8 (sequence is synthesized)
accgaagcaatgtccaaagtgctaatgactgctctagcctctggagagatatcttcgctgctaatgtcaggcacggactctgaagcaatatcctcactgataatgtcagctgtagcttct

SEQ ID NO: 777150 - DNA, 120 bp, Artificial Sequence
  ENSG00000243978_9 (sequence is synthesized)
ggaggtacatcaccccagccaacaagcacccaaaactctgggggaatacctaccccgctcatgtcagatctagactctggaataatgtcatcgcttttaatgtcatctccaggctctgaa

SEQ ID NO: 777151 - DNA, 120 bp, Artificial Sequence
  ENSG00000243978_10 (sequence is synthesized)
gtaatgtccacaccgctactgtcagtcccagatgctggagaaatgtccacattaccaaagccagctccagatgctgaagcaatgtccccagcactaatgacggccctaccctctggagtg

SEQ ID NO: 777152 - DNA, 120 bp, Artificial Sequence
  ENSG00000243978_11 (sequence is synthesized)
atgcccacccaaacgatgccagccccaggctctggggcgatgtccccatggtcaacacaaaatgtagactctgaaatgatgtctaatccgccagtgagagcaacagcctctggggtgatg

SEQ ID NO: 777153 - DNA, 120 bp, Artificial Sequence
  ENSG00000243978_12 (sequence is synthesized)
tctgcaccaccagtaagagctttagattctggagcaatgtccacaccgctaatgggagccccagcctctggaaatatgtctacattgcaaaagacagttccagcctctggagccatgacc

SEQ ID NO: 777154 - DNA, 120 bp, Artificial Sequence
  ENSG00000243978_13 (sequence is synthesized)
acctcactgatgacagtcccaagctctggagtgatgtccacagagcaaatgtcagccacagcctctagagtaatgtccgcacagttaacaatggccaaaacttctggagcaatgcccaca

SEQ ID NO: 777155 - DNA, 120 bp, Artificial Sequence
  ENSG00000243978_14 (sequence is synthesized)
ggctctatgaaagccgtggcaaaacaatacaagagagccacagcctctggaaagatgtccacgccactgaggagagctccaacttctggagcaatgtccacccaaccagttacggcaaca

SEQ ID NO: 777156 - DNA, 120 bp, Artificial Sequence
  ENSG00000243978_15 (sequence is synthesized)
gcctctgaaacaatgtccatgccacaattgacagtcccagcctctggatcaatgtccatgctgcaaatgagagcccctgtctctgaagcaatgtccatgccacaaatgagaaccatggcc

SEQ ID NO: 777157 - DNA, 120 bp, Artificial Sequence
  ENSG00000243978_16 (sequence is synthesized)
tcaggattgacatctgcagcacagatgaaagccatgacttctggagcaatgtccaccccactaatgacagcccaaacctctggatcaacatccacgctgttaatgagagacacagcctca

SEQ ID NO: 777158 - DNA, 120 bp, Artificial Sequence
  ENSG00000243978_17 (sequence is synthesized)
ggagtgatgtcctgtccacaaatgagatctctggcctctggagcattgtccaagccactaatgacacccaaagcctcaggaacgatgttcacggagaaaatgacaaccacagcttctgaa

SEQ ID NO: 777159 - DNA, 120 bp, Artificial Sequence
  ENSG00000243978_18 (sequence is synthesized)
gcaatgcccacactgctaatgagagacacagtttctggagctctgtccatgccgcaaatgacagacacagcctctggagggttgtctgcatcgctaatgagagacacagcttctggagca

SEQ ID NO: 777160 - DNA, 120 bp, Artificial Sequence
  ENSG00000243978_19 (sequence is synthesized)
atgtccacatcacaaatgacagccacagtctctggagggatgtccatgccactaatgagagctcaagacccaggagtaatgcctgcctcactaatgagagccaaagtgtctggaaagatg

SEQ ID NO: 777161 - DNA, 120 bp, Artificial Sequence
  ENSG00000243978_20 (sequence is synthesized)
ctcagtcagccaatgagcacccaagatcctggagggatgtccatgtcgcccatgaagtccatgaccgctggagggatgcagatgaattccccaacctctgatgtgatgtccacaccaaca

SEQ ID NO: 777162 - DNA, 120 bp, Artificial Sequence
  ENSG00000243978_21 (sequence is synthesized)
gtgagagcctggacctctgaaacaatgtccacaccactaatgagaacctcagaccctggagagaggccctcactgctcacaagagcttcatcctctggagagatgtccctaccactaatg

SEQ ID NO: 777163 - DNA, 120 bp, Artificial Sequence
  ENSG00000243978_22 (sequence is synthesized)
cacgcctctgagatccccagcttatggagccatgtctgctccacaaatgacagccacagcctctggaatgatgtcatccatgccacaagtgaaggctcccatctctggagcaatgtccat

SEQ ID NO: 777164 - DNA, 120 bp, Artificial Sequence
  ENSG00000243978_23 (sequence is synthesized)
gccactaacaagatccacagcctctggagggatgtccatgccactgatgagagccccagactctagagtgacatccacatcacaaatgatgcccacagcttctggagacatgtgcacact

SEQ ID NO: 777165 - DNA, 120 bp, Artificial Sequence
  ENSG00000243978_24 (sequence is synthesized)
accagtgcgagccccagcctctggaggggtgtcctcaccactagtaagagctccagcctctggaactatgtccacaccactaaggagaccctcagcctgtgagactgtgtccacagagtt

SEQ ID NO: 777166 - DNA, 120 bp, Artificial Sequence
  ENSG00000243978_25 (sequence is synthesized)
aatgagagcttcagcctctggacatatgtccactgcacaaacaacagccatggtctctggagggatgtccaagccattaatgagagccccggcctctggaacaatgcccatgcctttaat

SEQ ID NO: 777167 - DNA, 120 bp, Artificial Sequence
  ENSG00000243978_26 (sequence is synthesized)
gtcagccatggcttctggagagatgtctatgccgctaatggaaaccatggcctctggagcaacgtccacattgcaaaccagtgttgcgaactctagatctatgtccttgtcacaaacaac

SEQ ID NO: 777168 - DNA, 120 bp, Artificial Sequence
  ENSG00000243978_27 (sequence is synthesized)
atataccgtgtctggaaggatggccacagcgccaattagagcctctgcttctggagcaaggtccacatcatttatgagagcctcagtttctggatcgatgcccatgccactaccaagagc

SEQ ID NO: 777169 - DNA, 120 bp, Artificial Sequence
  ENSG00000243978_28 (sequence is synthesized)
cacagcctctggatgtggcatgggtatgtccatgccacaaatgacagccacagactctagagggatgtccacaccactaatgagggcctcaggccctggaacaatgtccacaccacagac

SEQ ID NO: 777170 - DNA, 120 bp, Artificial Sequence
  ENSG00000243978_29 (sequence is synthesized)
agcctttggagtgatgtccactccggaaatcaaagccacagactctggagaggcatccacctctcacattaacatcacagcctctggatcaaagcccacatcgcacatgactgccacaac

SEQ ID NO: 777171 - DNA, 120 bp, Artificial Sequence
  ENSG00000243978_30 (sequence is synthesized)
tcctgaaactgcgaaaccaccaccaaaggaagtgccatccttcggaatgttgaccccagcactctgctacctcttagaagagcaggaagcagcccggggctcatgctctgtggaggaaga

SEQ ID NO: 777172 - DNA, 120 bp, Artificial Sequence
  ENSG00000243978_31 (sequence is synthesized)
gatggagattgatgaggagaagcaaatgaaggggtttttggacgattcagagagaatggcatttctggtatctcttcatctgggagcagcagagaggtggttcatcttgcaaatggaggt

SEQ ID NO: 777173 - DNA, 120 bp, Artificial Sequence
  ENSG00000243978_32 (sequence is synthesized)
aggagaacctctctcacatgaaaataaatctttcctgagaagatcccagggcatatatgactccctatctgagatagacatcctcagtgctgttctttgccatcccaaacagggccaaaa

SEQ ID NO: 777174 - DNA, 120 bp, Artificial Sequence
  ENSG00000243978_33 (sequence is synthesized)
gtcagtcaggcagtatgccactgacttcctgctgctggcccgacatttgtcttggtctgatgccattctacggaccaggtttctggaaggactctcagaagctgttaccaccaaaatggg

SEQ ID NO: 777175 - DNA, 120 bp, Artificial Sequence
  ENSG00000243978_34 (sequence is synthesized)
tcggatcttcctgaaggtggctggcagcctaaaggagctgatagacaggtctctgtacaccgagtgccagctggctgaagagaaggattccccaggcaactcaagccaggttctgccaac

SEQ ID NO: 777176 - DNA, 120 bp, Artificial Sequence
  ENSG00000243978_35 (sequence is synthesized)
agcctgtaagcggaataatgaggaggccatggggaatgaactgagctctcagcagcagactgaggagcaccagcatgtttccaaacgctgttactacctgaaagagcatggagaccccca

SEQ ID NO: 777177 - DNA, 120 bp, Artificial Sequence
  ENSG00000243978_36 (sequence is synthesized)
agaaggtcttcatgatcaccttggacagagcacaggccatcatcagaaggcccataccaacaagtaaaactccatggaatcttctcctgtgatatctgactcgaccgctaactggaggac

SEQ ID NO: 777178 - DNA, 120 bp, Artificial Sequence
  ENSG00000243978_37 (sequence is synthesized)
tggttcctggacccattccattaaactacattataaaccttgttgccttcacccttcagcctcccgctccaggcacatcccaccttacctctcacttggctgatttgaccttctctttca

SEQ ID NO: 777179 - DNA, 120 bp, Artificial Sequence
  ENSG00000243978_38 (sequence is synthesized)
cccacatgcctaagacctgccctgacaatcagagtagggactacaagagtgtatggtgtatgaggttctgaactcccatcaccaccgaggccagtcctagttcttggtccagggagaagt

SEQ ID NO: 777180 - DNA, 120 bp, Artificial Sequence
  ENSG00000243978_39 (sequence is synthesized)
ctaggcaggataaatcatatcttacctcaaaaaacccttagcgtatcttgccatgtgtcagcaggcaaacttgaggaagccctggttctatttcacctggcaggggagcctataaggaga

SEQ ID NO: 777181 - DNA, 120 bp, Artificial Sequence
  ENSG00000243978_40 (sequence is synthesized)
gcgatgcccactcctataccacccttgtaacccagtagacttgccccatatgccccaactcatagcacctaaaatgggtctccagggtccttgccctgtttatagtatccatcctgaacc

SEQ ID NO: 777182 - DNA, 120 bp, Artificial Sequence
  ENSG00000243978_41 (sequence is synthesized)
attcgttttgacccataataatagtgatagtataatggctaccagttattgataatgtatcatgtgacaggcattgggctaaactcttgacaagcaccatctcactacattcttacagta

SEQ ID NO: 777183 - DNA, 120 bp, Artificial Sequence
  ENSG00000243978_42 (sequence is synthesized)
acacaacttgttcttgtgttgtcagcttctgacctcttgatctgttgtttatggcctttgtcttgtccctcagtgggggttctctagctctgacctctgggtgaccccctcagttgttga

SEQ ID NO: 777184 - DNA, 120 bp, Artificial Sequence
  ENSG00000243978_43 (sequence is synthesized)
ttgctctcactccccttggctgttgtgcttcatggccagcactcttgatgagggtcttggtctataaacaggcatagatagctagaacataatgtgagcagtgtttgccttcaggtggtg

SEQ ID NO: 777185 - DNA, 120 bp, Artificial Sequence
  ENSG00000243978_44 (sequence is synthesized)
gggttatgggtagtttttattttcttccttctacttctctatacatttcagattctctacagtaagcatgtgttacatttgtaattataaaagtaagtaaacttcatttatgaaaaaaga

SEQ ID NO: 777186 - DNA, 120 bp, Artificial Sequence
  ENSG00000243978_45 (sequence is synthesized)
ggaaaggagacgtgcccactggagagcaagtcagaactttcgtgagccctgctccaggtcccaggagaaagtgccagccatgaggactggagtattgcctgcccttcagagacttgaaga

SEQ ID NO: 777187 - DNA, 120 bp, Artificial Sequence
  ENSG00000243989_0 (sequence is synthesized)
ggggcggtcctgagcctgcgacctcgcaggcgacctcgctggaccctaagtccaggccacagtcagggaagggcgctgagaggcgagcgtgagcccagcgacaggagactcaccacgcgc

SEQ ID NO: 777188 - DNA, 120 bp, Artificial Sequence
  ENSG00000243989_1 (sequence is synthesized)
agcgccatgaccagcaagggtcccgaggaggagcacccatcggtgacgctcttccgccagtacctgcgtatccgcactgtccagcccaagcctgactatggagctgctgtggctttcttt

SEQ ID NO: 777189 - DNA, 120 bp, Artificial Sequence
  ENSG00000243989_2 (sequence is synthesized)
gaggagacagcccgccagctgggcctgggctgtcagaaagtagaggtggcacctggctatgtggtgaccgtgttgacctggccaggcaccaaccctacactctcctccatcttgctcaac

SEQ ID NO: 777190 - DNA, 120 bp, Artificial Sequence
  ENSG00000243989_3 (sequence is synthesized)
tcccacacggatgtggtgcctgtcttcaaggaacattggagtcacgacccctttgaggccttcaaggattctgagggctacatctatgccaggggtgcccaggacatgaagtgcgtcagc

SEQ ID NO: 777191 - DNA, 120 bp, Artificial Sequence
  ENSG00000243989_4 (sequence is synthesized)
atccagtacctggaagctgtgaggaggctgaaggtggagggccaccggttccccagaaccatccacatgacctttgtgcctgatgaggaggttgggggtcaccaaggcatggagctgttc

SEQ ID NO: 777192 - DNA, 120 bp, Artificial Sequence
  ENSG00000243989_5 (sequence is synthesized)
gtgcagcggcctgagttccacgccctgagggcaggctttgccctggatgagggcatagccaatcccactgatgccttcactgtcttttatagtgagcggagtccctggtgggtgcgggtt

SEQ ID NO: 777193 - DNA, 120 bp, Artificial Sequence
  ENSG00000243989_6 (sequence is synthesized)
ttcatggaggacacagcagcagagaagctgcacaaggttgtaaactccatcctggcattccgggagaaggaatggcagaggctgcagtcaaacccccacctgaaagaggggtccgtgacc

SEQ ID NO: 777194 - DNA, 120 bp, Artificial Sequence
  ENSG00000243989_7 (sequence is synthesized)
tccgtgaacctgactaagctagagggtggcgtggcctataacgtgatacctgccaccatgagcgccagctttgacttccgtgtggcaccggatgtggacttcaaggcttttgaggagcag

SEQ ID NO: 777195 - DNA, 120 bp, Artificial Sequence
  ENSG00000243989_8 (sequence is synthesized)
ctgcagagctggtgccaggcagctggcgagggggtcaccctagagtttgctcagaagtggatgcacccccaagtgacacctactgatgactcaaacccttggtgggcagcttttagccgg

SEQ ID NO: 777196 - DNA, 120 bp, Artificial Sequence
  ENSG00000243989_9 (sequence is synthesized)
gtctgcaaggatatgaacctcactctggagcctgagatcatgcctgctgccactgacaaccgctatatccgcgcggtgggggtcccagctctaggcttctcacccatgaaccgcacacct

SEQ ID NO: 777197 - DNA, 120 bp, Artificial Sequence
  ENSG00000243989_10 (sequence is synthesized)
gtgctgctgcacgaccacgatgaacggctgcatgaggctgtgttcctccgtggggtggacatatatacacgcctgctgcctgcccttgccagtgtgcctgccctgcccagtgacagctga

SEQ ID NO: 777198 - DNA, 120 bp, Artificial Sequence
  ENSG00000243989_11 (sequence is synthesized)
gccctggaactcctaaacctttgcccctggggcttccatcccaaccagtgccaaggacctcctcttcccccttccaaataataaagtctatggacagggctgtctctgaagtactaacac

SEQ ID NO: 777199 - DNA, 120 bp, Artificial Sequence
  ENSG00000243989_12 (sequence is synthesized)
cgacatccggcctcggccacgtggtgggcggaccggggcggtcctgagcctgcgacctcgcaggcgacctcgctggaccctaagtccaggccacagtcagggaagggcgctgagaggcga

SEQ ID NO: 777200 - DNA, 64 bp, Artificial Sequence
  ENSG00000243989_13 (sequence is synthesized)
ccgcactgtccagcccaagcctgactatgaaaaaatacaaaaattagtcaggaatggtggcaca

SEQ ID NO: 777201 - DNA, 120 bp, Artificial Sequence
  ENSG00000243989_14 (sequence is synthesized)
ggatggacaggaggtaagtagacggagggtgggaaggtcccagacctaggacatttgaggggctgaaagaggacctgtggctggactggctacccagatgtctgggtaggtgaaggagtg

SEQ ID NO: 777202 - DNA, 120 bp, Artificial Sequence
  ENSG00000243989_15 (sequence is synthesized)
ggggtggggaggtgttatgtactaggcacagcccactctatgggaaatagggcaagatgcccaggcccatgtcctgatcctgccattcttcctgtccctcagaagtggatgcacccccaa

SEQ ID NO: 777203 - DNA, 120 bp, Artificial Sequence
  ENSG00000243989_16 (sequence is synthesized)
gtgacacctactgatgactcaaacccttggtgggcagcttttagccgggtctgcaaggatatgtgagcacgctggccagctctcctcacagcccagccccctactcctctccttcctgct

SEQ ID NO: 777204 - DNA, 120 bp, Artificial Sequence
  ENSG00000243989_17 (sequence is synthesized)
aaggtgccacctccacctgggtttggaggagggatcctgggtcctcagtcttgtcctagaggcctctggaaagcctgaaggatcagctcgtctcccttctcttaggcttttgaggagcag

SEQ ID NO: 777205 - DNA, 120 bp, Artificial Sequence
  ENSG00000243989_18 (sequence is synthesized)
tgtacatgggtccaaattcctcctctgtgattaatcagctgagagatggtgggtgaatctcttcatgtctctgtgccatagtttcccatatttaaggaagataacaccttcctccaaccc

SEQ ID NO: 777206 - DNA, 120 bp, Artificial Sequence
  ENSG00000243989_19 (sequence is synthesized)
tgtgtccagacatccccctggacttccagaaagggtcactgagtagccaaaaatatcttctttcttggggatggaaatgcaagcatctctgagggatatggagtgtgtcggggaggcagc

SEQ ID NO: 777207 - DNA, 120 bp, Artificial Sequence
  ENSG00000243989_20 (sequence is synthesized)
agacagcccgccagctgggcctgggctgtcagaaagtagaggtgagcctggggccctaagcggggaagggaggtgggcctgggcacttcctcaccctgctcagaccacctaccctcctga

SEQ ID NO: 777208 - DNA, 120 bp, Artificial Sequence
  ENSG00000243989_21 (sequence is synthesized)
gaggcagtggggtggctctgggaggcggtaccacagaggatagagtctgagccacctcttttatctgttgctgccgctaccctgcccccacaccacaggctgcagtcaaacccccacctg

SEQ ID NO: 777209 - DNA, 120 bp, Artificial Sequence
  ENSG00000243989_22 (sequence is synthesized)
ggcacggtcctatgcagggttgcacagcaaagttgaggcctgagaaggccttgaacccagggcctctacctcccagctctttcctatctgagcttctctgagggcaagccctgaatgggc

SEQ ID NO: 777210 - DNA, 120 bp, Artificial Sequence
  ENSG00000243989_23 (sequence is synthesized)
agaaaccagctgtatgctacgggccctgagtggggacaggaccctgccagaggagcctggaatgagggggagacctgggcccaccccaggctgattgtgtctccagcccctcaggctgaa

SEQ ID NO: 777211 - DNA, 120 bp, Artificial Sequence
  ENSG00000243989_24 (sequence is synthesized)
ccaggcagctggcgagggggtcaccctagagtttgctcaggtatggacttgggacatgtgatgggagagtgtgggagccgggggagacccaagtgtgcaacagtggagtgtgtgcttggt

SEQ ID NO: 777212 - DNA, 120 bp, Artificial Sequence
  ENSG00000243989_25 (sequence is synthesized)
gtgtctgcatatgtctgggcatttctttatctgtgacagacacattttattccaacaagcattcattgtagaggccactgtgggtgctggggaatgctgtggggagtaaaattaggcaca

SEQ ID NO: 777213 - DNA, 120 bp, Artificial Sequence
  ENSG00000243989_26 (sequence is synthesized)
aaattaggcacagttcatgcccttgtatggtgaaacggggagatataaatcaaacatttatgtgatattacttttttctgagagaatctcactccgtcacccaggctgcagtgcagtggc

SEQ ID NO: 777214 - DNA, 77 bp, Artificial Sequence
  ENSG00000243989_27 (sequence is synthesized)
ccaccttggcctctactttcatataacccatgtggtacaggaaagggtggccccttgcactctgaaaacctgtaact

SEQ ID NO: 777215 - DNA, 120 bp, Artificial Sequence
  ENSG00000243989_28 (sequence is synthesized)
aaaccagcctccaacccctgtcacccagctgagccccactctgctgtcccaaatggctccccaacccctccagccattccccaagtaaatagactgaggcagcccctccaggttagggag

SEQ ID NO: 777216 - DNA, 120 bp, Artificial Sequence
  ENSG00000243989_29 (sequence is synthesized)
gaaccctttccccagagactctgctgctgaccaaggttactcctggcagctggttaaagaaaaacttcacctcactctccagggcaggagtggtgggggaagcctgaggcagccacaggg

SEQ ID NO: 777217 - DNA, 120 bp, Artificial Sequence
  ENSG00000243989_30 (sequence is synthesized)
aaaggagaggccctccagaagcccactggggctggacaaaggccacagcccttagggagtcaagcttggtggctagggcctgggaggtggctcctgcctgttatcccagcacttcaggag

SEQ ID NO: 777218 - DNA, 120 bp, Artificial Sequence
  ENSG00000243989_31 (sequence is synthesized)
caatcccactgatgccttcactgtcttttatagtgagcggagtccctggtcccctcaggctgaagacactgccttccccctacacctccccaggggtgcgggttaccagcactgggaggc

SEQ ID NO: 777219 - DNA, 120 bp, Artificial Sequence
  ENSG00000243989_32 (sequence is synthesized)
cctccacaatgtccccactggtccagtggattgaagcaggacctgagggggtgattggagaaactcaaggccaaggaacaccgtgacctcttggacaggaactactgccatgaccattgc

SEQ ID NO: 777220 - DNA, 120 bp, Artificial Sequence
  ENSG00000243989_33 (sequence is synthesized)
cacgccctgagggcaggctttgccctggatgagggtgagcaggttggcaagccaatgagcagccaggcagggagtaggaggctgctagtggggactgagctgctccaccctctgaacccc

SEQ ID NO: 777221 - DNA, 120 bp, Artificial Sequence
  ENSG00000244005_0 (sequence is synthesized)
acttccgggagcctggggcccaggactgcagcggcttcggaaggtgggctctgccagcgggaccatgctgctccgagccgcttggaggcgggcggcagtggcggtgacagcggctccagg

SEQ ID NO: 777222 - DNA, 120 bp, Artificial Sequence
  ENSG00000244005_1 (sequence is synthesized)
gccgaagcccgcggcgcccactcgggggctgcgcctgcgcgttggagaccgtgctcctcagtctgcggttcccgcagatacagccgctgccccggaggtggggccagtgctgcgacctct

SEQ ID NO: 777223 - DNA, 120 bp, Artificial Sequence
  ENSG00000244005_2 (sequence is synthesized)
ctatatggatgtgcaagctacaactcctctggacccccgggtgcttgatgccatgctcccttacctaatcaactactatgggaacccacactcccggacacatgcttatggctgggagag

SEQ ID NO: 777224 - DNA, 120 bp, Artificial Sequence
  ENSG00000244005_3 (sequence is synthesized)
tgaggcagccatggaacgtgctcgtcagcaagtagcatctctgattggagctgatcctcgtgagatcatttttactagtggtgctactgaatccaacaacatagcaattaagggggtggc

SEQ ID NO: 777225 - DNA, 120 bp, Artificial Sequence
  ENSG00000244005_4 (sequence is synthesized)
ccgattctacaggtcacggaaaaagcacttgatcaccacccagacagaacacaaatgtgtcttggactcctgccgttcactggaagctgagggctttcaggtcacctacctcccagtgca

SEQ ID NO: 777226 - DNA, 120 bp, Artificial Sequence
  ENSG00000244005_5 (sequence is synthesized)
gaagagtgggatcattgacctaaaggaactagaggctgctatccagccagatactagcctggtgtcagtcatgactgtgaacaatgagattggagtgaagcagcctattgcagaaatagg

SEQ ID NO: 777227 - DNA, 120 bp, Artificial Sequence
  ENSG00000244005_6 (sequence is synthesized)
gcggatttgcagttccagaaaggtatatttccatactgatgcagcccaggctgttggaaaaatcccacttgatgtcaatgacatgaaaattgatctcatgagcattagtggtcacaaaat

SEQ ID NO: 777228 - DNA, 120 bp, Artificial Sequence
  ENSG00000244005_7 (sequence is synthesized)
ctacggtcccaaaggggttggtgccatctacatccgtcgccggccccgtgtgcgtgtggaggccctgcagagtggaggggggcaggagcggggtatgcggtctgggacagtgcccacacc

SEQ ID NO: 777229 - DNA, 120 bp, Artificial Sequence
  ENSG00000244005_8 (sequence is synthesized)
cttagtggtggggctgggggctgcgtgtgaggtggcacagcaagagatggagtatgaccacaagcgaatctcaaagttgtcagagcggctgatacagaatataatgaagagccttccaga

SEQ ID NO: 777230 - DNA, 120 bp, Artificial Sequence
  ENSG00000244005_9 (sequence is synthesized)
tgtggtgatgaatggggaccctaagcaccattatcccggctgtatcaacctctcctttgcatatgtggaaggggaaagtctgctgatggcactgaaggacgttgccttatcctcagggag

SEQ ID NO: 777231 - DNA, 120 bp, Artificial Sequence
  ENSG00000244005_10 (sequence is synthesized)
tgcctgcacctctgcatccctggagccctcttatgtgcttagagcaattggcactgatgaggatttagcgcactcttctatcaggtttggaattggccgcttcactacagaggaggaagt

SEQ ID NO: 777232 - DNA, 120 bp, Artificial Sequence
  ENSG00000244005_11 (sequence is synthesized)
ggactacacagtggagaaatgcattcagcatgtgaagcgtcttcgagaaatgagccctctctgggagatggttcaggatggcattgacctcaagagcatcaagtggacccaacactagaa

SEQ ID NO: 777233 - DNA, 120 bp, Artificial Sequence
  ENSG00000244005_12 (sequence is synthesized)
ccctgactttgtgctggtctggcccctcctgcctcaccaacccgtgcacaaccagacaccttgttacacctagtggatgctctagattggtatagaccagttgacttcagcatcagtcca

SEQ ID NO: 777234 - DNA, 120 bp, Artificial Sequence
  ENSG00000244005_13 (sequence is synthesized)
cctctatgacagaaacacaagaaaactgtctttccctagcttcagttccttgggtgtggagcactccccatttcttctcgggtcttaaagtgtgtggacattttcatcccgaagccatag

SEQ ID NO: 777235 - DNA, 120 bp, Artificial Sequence
  ENSG00000244005_14 (sequence is synthesized)
agacatttgctgtcatattgctgctgggcacatctgtgctcttggtgaggagagcaagaggaaccagaagaagtctctttggtcagggaccatgatgctctacatggacatttgagtctt

SEQ ID NO: 777236 - DNA, 120 bp, Artificial Sequence
  ENSG00000244005_15 (sequence is synthesized)
cgtcttctgctgctgctcggctggaccagcttctttaacagcaagcataatccacttcaatgtaatattttctgtagctccaaaggctatctcttcatattgactgcagacagactgaat

SEQ ID NO: 777237 - DNA, 120 bp, Artificial Sequence
  ENSG00000244005_16 (sequence is synthesized)
ggacagtttcttagagggcttgtctcctttctacccttgtcctctttcctttcctttgacctaatggagctagaaatatgtctgtgactccaccagttattctaataatttgttttcttg

SEQ ID NO: 777238 - DNA, 120 bp, Artificial Sequence
  ENSG00000244005_17 (sequence is synthesized)
aaaattgttaatttcaagactggagaaataaactcaccttctatttactctgtgactttatgagaggttgagggaaaagtggaagctgtacttgggaattgtggagaagaccgccactcc

SEQ ID NO: 777239 - DNA, 120 bp, Artificial Sequence
  ENSG00000244005_18 (sequence is synthesized)
atctgatttgcataaatgactcagtgggcttttgtatctcttcatttaagaattatttgaatgcctgccaggagccagatttgttctgggtattaggaatacactggttaacaggaccaa

SEQ ID NO: 777240 - DNA, 120 bp, Artificial Sequence
  ENSG00000244005_19 (sequence is synthesized)
aaaagaccctgccctcactgagttttaaattttagtggagagatggaaaataattaaacaaataaacaatgttatagattgtgataagtgctatgaaagaattaagtggtaagaggacat

SEQ ID NO: 777241 - DNA, 120 bp, Artificial Sequence
  ENSG00000244005_20 (sequence is synthesized)
agcagggaaaacctaccatgctgggtgtttgaggaaagtttttctgaggaggtagtgcttataaatatgaagagctcgctaatctagaaatgagaggtgagaaggaatggcaagagctaa

SEQ ID NO: 777242 - DNA, 120 bp, Artificial Sequence
  ENSG00000244005_21 (sequence is synthesized)
gggcctgaagtgtgataaagcacaaagtattatactttagaaaccaagagaaggccattgtaactagagcttttcatttgtgggtctgaacccataggtgggtagttaccagtacttaaa

SEQ ID NO: 777243 - DNA, 120 bp, Artificial Sequence
  ENSG00000244005_22 (sequence is synthesized)
aaaggagatagtatgttagagtacatttatgcatattttaagaatatattttgatgatatatttgaatttgtataccaggttataaatgtatttcttattgtggataatggtcaaaaaag

SEQ ID NO: 777244 - DNA, 120 bp, Artificial Sequence
  ENSG00000244005_23 (sequence is synthesized)
tttaattgcttttcatacttgccagtagcagggggacaggaaagtttgaaagccactgggctaaagtttggtaaatgtagatggacagtggaaggaggagatgaaattatagaatttttc

SEQ ID NO: 777245 - DNA, 120 bp, Artificial Sequence
  ENSG00000244005_24 (sequence is synthesized)
ttgttgaaaaatatcttttttacttagaataattttagatttactgaaaagttgcaaagatagtagagttgtagatctattaccagttttcctctaattaaaaagtcttacataaaacta

SEQ ID NO: 777246 - DNA, 120 bp, Artificial Sequence
  ENSG00000244005_25 (sequence is synthesized)
agcgccttttgcataccaggcactatgctcagtactggagatacagtggtccccatgagtacataggatgataggtggggctgatacatagtcacttccagttataggagaagggcttct

SEQ ID NO: 777247 - DNA, 120 bp, Artificial Sequence
  ENSG00000244005_26 (sequence is synthesized)
aaaggtcattttgtaagtgcctctctttttttggttggctgggtagctgggtacagactgaagtttaccaccctaggaagacttcctggggtagaattttgtgccttttatcgtcccagg

SEQ ID NO: 777248 - DNA, 120 bp, Artificial Sequence
  ENSG00000244005_27 (sequence is synthesized)
ggatgtatgtgtctgttgtgggttacactagcagttctgttacaggcctctagaattgaagatgctccaaaggccactaagtgtttggctgcccttcaggctggtgcagatggtgcatta

SEQ ID NO: 777249 - DNA, 120 bp, Artificial Sequence
  ENSG00000244005_28 (sequence is synthesized)
cgtcctggggaagtgagcacatggtcctctgctgcgtcttcttgtcaaacccatgtggtatcatgctctgtcacactttgccagcgtccttgcttaaggaagtcatccaccatgggggcc

SEQ ID NO: 777250 - DNA, 120 bp, Artificial Sequence
  ENSG00000244005_29 (sequence is synthesized)
agaggagctaggttcacacatcctaggatgtgcaggggagcatcaggtcctttagttctgccagattagaaggtctcttgttttctccagggtatgactccagggccctgggggatggga

SEQ ID NO: 777251 - DNA, 88 bp, Artificial Sequence
  ENSG00000244005_30 (sequence is synthesized)
ctggatggatttaagcatttctcctgcctcaacctccgaagtggctggggctacaggaactagaggctgctatccagccagatactag

SEQ ID NO: 777252 - DNA, 120 bp, Artificial Sequence
  ENSG00000244005_31 (sequence is synthesized)
acgctcgggtcccgctctccgggaggcgcggacctgtcccctccgcgcggcgacgcaactgaatattccggagccttcctgtccaccctgctgcccagaccctctgacccttctctcaaa

SEQ ID NO: 777253 - DNA, 120 bp, Artificial Sequence
  ENSG00000244005_32 (sequence is synthesized)
ggcgtgagccactgcgcccggccaatacatctttgttttttcaagctaaagtacagacttttttttggatttcaccagttttgtaacaatgtatcttggagattttatggtgtcagttca

SEQ ID NO: 777254 - DNA, 120 bp, Artificial Sequence
  ENSG00000244005_33 (sequence is synthesized)
ttgtaacaatgtatcttggagattttatggtgtcagttcagaacaagcttcttcttttttttttttttttttttgggagacagagtcttgctccatcactcaggctggagtgcagtggct

SEQ ID NO: 777255 - DNA, 80 bp, Artificial Sequence
  ENSG00000244005_34 (sequence is synthesized)
gctcactgcaacctctaccacctgggttcacctgctaccacgcttggctaatctttgtatttttagtagagagagggttt

SEQ ID NO: 777256 - DNA, 90 bp, Artificial Sequence
  ENSG00000244005_35 (sequence is synthesized)
gatcagttgggattataggcgtgaaccaccacacccggccccctcattcttttatacacctgcttggtatttcattgtatggacatgcca

SEQ ID NO: 777257 - DNA, 120 bp, Artificial Sequence
  ENSG00000244005_36 (sequence is synthesized)
tttatacacctgcttggtatttcattgtatggacatgccataatctatttgaccattaccctgatgatggacatctaagttgttcccagtatttttgctattatgaataatactgtaatg

SEQ ID NO: 777258 - DNA, 120 bp, Artificial Sequence
  ENSG00000244005_37 (sequence is synthesized)
tatgatggcatttcatatagcatagggagctactttaaaccattttgatcattactccttctggcatttatcttccagatgttaaatattttactaaatactatgcttttactgctgttt

SEQ ID NO: 777259 - DNA, 120 bp, Artificial Sequence
  ENSG00000244005_38 (sequence is synthesized)
cttcttttccttaacgttttttatttagaaaaatttcatgcttacagaaaagttgaagtaatattttgatccctttggaaagaaatattttgttttatctacttttctctctttctgttt

SEQ ID NO: 777260 - DNA, 120 bp, Artificial Sequence
  ENSG00000244005_39 (sequence is synthesized)
gaggcttctcagcatgactgaggcagatctctgcagggagagagggcttaagaaaactcttccttgtcctggtgctgctggcaccttgttctgagggagacattatgggcttcaaaaccc

SEQ ID NO: 777261 - DNA, 120 bp, Artificial Sequence
  ENSG00000244005_40 (sequence is synthesized)
tgacacatccctcaaactttcttaggcgggtccccgaacggttgaccccggcgcaccacccctcgcaccctgcgcgacaggcccccagagccgtggaggcgcgtccttcagaccgctcct

SEQ ID NO: 777262 - DNA, 120 bp, Artificial Sequence
  ENSG00000244005_41 (sequence is synthesized)
ggccaagttacagatgctgctccgggctcccgtgcagaccgttaccttcggtcagaagggactgcacctactctggctccacgttccttctaaacgtctttgccctttagagccttcctt

SEQ ID NO: 777263 - DNA, 120 bp, Artificial Sequence
  ENSG00000244005_42 (sequence is synthesized)
cctacgataccatttgaatatcaactcaacaccccctccaggaaccctctctccctctcccttacctccttttacagcgtgtcagttggagaccgtgctcctcagtctgcggttcccgca

SEQ ID NO: 777264 - DNA, 120 bp, Artificial Sequence
  ENSG00000244020_0 (sequence is synthesized)
gacgccctccacgtgttccactgcctcttctcttctcgcttgggaacgccggtctcacctcggcttgcaatggaccccaactgctcctgcgccgctggaggctcctacgcctgcgccggc

SEQ ID NO: 777265 - DNA, 120 bp, Artificial Sequence
  ENSG00000244020_1 (sequence is synthesized)
aaaggggcttcggaaaagtgcagctgctgtgcctgatgtcgggactgccctgctctcggatgaaaacagaatgacacgtaaagtccgggatttttttttctacaaccccgacccatttgc

SEQ ID NO: 777266 - DNA, 120 bp, Artificial Sequence
  ENSG00000244025_0 (sequence is synthesized)
attcacactcaggaccttgccttgagcagcaaaccaaactcactacccctgacaccatgagctactacggcagctactatggaggcctgggctatggctgtggaggctttggtggcctgg

SEQ ID NO: 777267 - DNA, 120 bp, Artificial Sequence
  ENSG00000244025_1 (sequence is synthesized)
gctatggctatggctgtggatgtggcagcttccgcagactgggttctggctgtggctatggaggctacggatatggctctggctttggaggctatggatatggctctggcttcggaggct

SEQ ID NO: 777268 - DNA, 120 bp, Artificial Sequence
  ENSG00000244025_2 (sequence is synthesized)
cagcaacacaatgtgtgaaattataagaggactttcccagagctgacttcaatcattggacaacaaagatcatgctggagctatttgcacaaaagaatttaacatctcagaatttcaggc

SEQ ID NO: 777269 - DNA, 120 bp, Artificial Sequence
  ENSG00000244025_3 (sequence is synthesized)
aattttttttctctgtatacccacatctctataataatcctagtattctctacttttgcttttaaagctgattgaattatctgtttatcttccaataaaacattctattttcaaacacaa

SEQ ID NO: 777270 - DNA, 120 bp, Artificial Sequence
  ENSG00000244038_0 (sequence is synthesized)
ccgcgccttatcgccaaagctgcggctctggacgcccagccgcggcgtatcccgatcacttccgggtagtgctccacgggcacgagccgcgattgggctaccgtagatggggtacttccg

SEQ ID NO: 777271 - DNA, 120 bp, Artificial Sequence
  ENSG00000244038_1 (sequence is synthesized)
gtgtgcacgtgctgggtccttcggcaggaggaggaagatggagcccagcaccgcggcccgggcttgggccctcttttggttgctgctgcccttgcttggcgcggtttgcgccagcggacc

SEQ ID NO: 777272 - DNA, 120 bp, Artificial Sequence
  ENSG00000244038_2 (sequence is synthesized)
ccgcaccttagtgctgctggacaacctcaacgtgcgggagactcattcgcttttcttccggagcctgaaggaccggggctttgagctcacattcaagaccgctgatgaccccagcctgtc

SEQ ID NO: 777273 - DNA, 120 bp, Artificial Sequence
  ENSG00000244038_3 (sequence is synthesized)
tctcataaagtatggggaattcctctatgacaatctcatcattttctccccttcggtagaagattttggaggcaacatcaacgtggagaccatcagtgcctttattgacggcggaggcag

SEQ ID NO: 777274 - DNA, 120 bp, Artificial Sequence
  ENSG00000244038_4 (sequence is synthesized)
tgtgctggtagctgccagctccgacattggtgaccctcttcgagagctgggcagtgagtgcgggattgagtttgacgaggagaaaacggctgtcattgaccatcacaactatgacatctc

SEQ ID NO: 777275 - DNA, 120 bp, Artificial Sequence
  ENSG00000244038_5 (sequence is synthesized)
agaccttggccagcatacgctcatcgtggctgacactgagaacctgctgaaggccccaaccatcgttgggaaatcatctctaaatcccatcctctttcgaggtgttgggatggtggccga

SEQ ID NO: 777276 - DNA, 120 bp, Artificial Sequence
  ENSG00000244038_6 (sequence is synthesized)
tcctgataaccctttggtgctggacatcctgacgggctcttccacctcttactccttcttcccggacaagcctatcacccagtatccacatgcggtggggaagaacaccctcctcattgc

SEQ ID NO: 777277 - DNA, 120 bp, Artificial Sequence
  ENSG00000244038_7 (sequence is synthesized)
tgggctccaggccaggaacaatgcccgcgtcatcttcagcggctccctcgacttcttcagcgactccttcttcaactcagcagtgcagaaggcggcgcccggctcccagaggtattccca

SEQ ID NO: 777278 - DNA, 120 bp, Artificial Sequence
  ENSG00000244038_8 (sequence is synthesized)
ggtgttcaaggaggagggtgtcctccgtgtggggcctgtgtcccatcatcgggtgggcgagacagccccacccaatgcctacactgtcactgacctagtggagtatagcatcgtgatcca

SEQ ID NO: 777279 - DNA, 120 bp, Artificial Sequence
  ENSG00000244038_9 (sequence is synthesized)
gcagctctcaaatggcaaatgggtcccctttgatggcgatgacattcagctggagtttgtccgcattgatccttttgtgaggaccttcctgaagaagaaaggtggcaaatacagtgttca

SEQ ID NO: 777280 - DNA, 120 bp, Artificial Sequence
  ENSG00000244038_10 (sequence is synthesized)
gttcaagttgcccgacgtgtatggtgtattccagtttaaagtggattacaaccggctaggctacacacacctgtactcttccactcaggtatccgtgcggccactccagcacacgcagta

SEQ ID NO: 777281 - DNA, 120 bp, Artificial Sequence
  ENSG00000244038_11 (sequence is synthesized)
tgagcgcttcatcccctcggcctacccctactacgccagcgccttctccatgatgctggggctcttcatcttcagcatcgtcttcttgcacatgaaggagaaggagaagtccgactgagg

SEQ ID NO: 777282 - DNA, 120 bp, Artificial Sequence
  ENSG00000244038_12 (sequence is synthesized)
ggctagagccctctccgcacagcgtggagacggggcaaggaggggggttattaggattggtggttttgttttgctttgtttaaagccgtgggaaaatggcacaactttacctctgtggga

SEQ ID NO: 777283 - DNA, 120 bp, Artificial Sequence
  ENSG00000244038_13 (sequence is synthesized)
gatgcaacactgagagccaaggggtgggagttgggataatttttatataaaagaagtttttccactttgaattgctaaaagtggcatttttcctatgtgcagtcactcctctcatttcta

SEQ ID NO: 777284 - DNA, 70 bp, Artificial Sequence
  ENSG00000244038_14 (sequence is synthesized)
gccattgcactccagcctgggcaacagtgttaagactctgtctgagatgttgccctcaaacttcacctgg

SEQ ID NO: 777285 - DNA, 120 bp, Artificial Sequence
  ENSG00000244038_15 (sequence is synthesized)
attcctctatgacaatctcatcattttctccccttcggtagaaggtaagggttccgcgtcgcccctagcactggaattcgagacccgggacttgatggattgctttcttctggttcttgg

SEQ ID NO: 777286 - DNA, 120 bp, Artificial Sequence
  ENSG00000244038_16 (sequence is synthesized)
ccacggagataaggaaaatgctcatttctgacctgaccctaggagggtacatctttctaaaagaaacagctaaggattgtggagtcaagtgttgctgcagaccgtggaacccagggccct

SEQ ID NO: 777287 - DNA, 120 bp, Artificial Sequence
  ENSG00000244038_17 (sequence is synthesized)
gctgctctgctgagaagggagtttactctgtaaagggcctgataaaaagatggaaagctcctgggttgggtttgcctgggtggaaagaggaaatggcctgttattaatatggattgctat

SEQ ID NO: 777288 - DNA, 120 bp, Artificial Sequence
  ENSG00000244038_18 (sequence is synthesized)
aaagaggcattgtgcattgtggcagttgatcttaagaattcagatagattcatagtctcgggctgaaaaaagagccttagcaattatctaccaccccacccctcctcccatttgaggctg

SEQ ID NO: 777289 - DNA, 120 bp, Artificial Sequence
  ENSG00000244038_19 (sequence is synthesized)
tcctgggcattcctgccatgttcgtcgggtgggaattaagtgcagctctgcctgcaggtggtggaaggcctccagtcatggccagccctggctaacctggccttttatctcaggagtata

SEQ ID NO: 777290 - DNA, 120 bp, Artificial Sequence
  ENSG00000244045_0 (sequence is synthesized)
acctgaccggagagccggctagatatggcgtcctctttgcttgcgggcgagcgattggtgcgtgctttgggccccggcggggagctggagccagagcggctaccccgaaagctgcgggcc

SEQ ID NO: 777291 - DNA, 120 bp, Artificial Sequence
  ENSG00000244045_1 (sequence is synthesized)
gagcttgaggccgcgctggggaagaagcacaagggcggtgatagctccagtggcccccaacgcttggtttctttccgtctcatccgggatctgcaccagcatctgagagaaagggattcc

SEQ ID NO: 777292 - DNA, 120 bp, Artificial Sequence
  ENSG00000244045_2 (sequence is synthesized)
aaactatacctccatgagctcctagaaggcagtgaaatctatctcccagaggttgtgaagcctccacggaacccagaactagttgcccggctggagaagattaagatacagctggccaat

SEQ ID NO: 777293 - DNA, 120 bp, Artificial Sequence
  ENSG00000244045_3 (sequence is synthesized)
gaggaatataaacggatcacccgcaacgtcacttgtcaggatacaagacatggtgggactctcagcgacctgggaaagcaagtgagatcattgaaggctctggtcatcaccatcttcaat

SEQ ID NO: 777294 - DNA, 120 bp, Artificial Sequence
  ENSG00000244045_4 (sequence is synthesized)
ttcattgtcacggtggttgctgccttcgtctgcacttaccttggaagccaatatatcttcacagaaatggcctcgcgggtgctagctgcattgatcgtcgcctctgtggtgggtctggcc

SEQ ID NO: 777295 - DNA, 120 bp, Artificial Sequence
  ENSG00000244045_5 (sequence is synthesized)
gagctgtatgtcatggtgcgggcaatggaaggcgagctgggagaactgtaactggtgcttcatcatcaagtctagagaagactttgggggcttcaggctccaattggcagtcaccgactc

SEQ ID NO: 777296 - DNA, 120 bp, Artificial Sequence
  ENSG00000244045_6 (sequence is synthesized)
agtcaacccatcagactttttgtattcagctccagttagtcagaagaccagcccaggccagctgctgtttctgtggggagccctaatcttctgtgaatttccaaagggagcattggagga

SEQ ID NO: 777297 - DNA, 120 bp, Artificial Sequence
  ENSG00000244045_7 (sequence is synthesized)
gattgagataacacatctttaaaacagaaagaactggtcttggtctatcagtacctcttcctgaatctggtacccatctgccttctccagttcattctaaacactgctgggactagggtt

SEQ ID NO: 777298 - DNA, 120 bp, Artificial Sequence
  ENSG00000244045_8 (sequence is synthesized)
tttccatcaggagcaaatggaatccaggccttcccagaagtagaccatactgccttgaacttgtccatatgtacaaactgatcaccagctttctccatacatttttaatgcagacctgta

SEQ ID NO: 777299 - DNA, 120 bp, Artificial Sequence
  ENSG00000244045_9 (sequence is synthesized)
attgagttcagaagcctccaagaaaacagaaaggatcccctttctccagtttgtgctggaagaggagctgatcagagacatcaaataagagaaagatgggttgctagaggatggtagaac

SEQ ID NO: 777300 - DNA, 120 bp, Artificial Sequence
  ENSG00000244045_10 (sequence is synthesized)
tggaagcaaggcagctacctttttgcaaaaggaaatggtgttaggccccttttccagaagataagacagactcatagagattaaatgatcactatggtccttcttctgttaaatggagcc

SEQ ID NO: 777301 - DNA, 120 bp, Artificial Sequence
  ENSG00000244045_11 (sequence is synthesized)
aaagacgcctatgttgttctgaagtcttgtaatgtttaacttctgagaacttagattagtggtgtgatgatagagtctgtataacgcattgaaaagggtatcaggcttagttatttatcc

SEQ ID NO: 777302 - DNA, 120 bp, Artificial Sequence
  ENSG00000244045_12 (sequence is synthesized)
gttcagggtctgctcctcctggtacactctttttggttcactgtatgtactcctgttgtctttttttttttttccaaagcacttttctgttttcataaattatatactcattcactcagt

SEQ ID NO: 777303 - DNA, 120 bp, Artificial Sequence
  ENSG00000244045_13 (sequence is synthesized)
ggacacttcctctacaatgtttgccagtttctgttagttgggagaagtgtcagctgtgaaaagaaaaagtaggtggcattttacagtgtttccagtaacctgagctatataaaatttgtg

SEQ ID NO: 777304 - DNA, 87 bp, Artificial Sequence
  ENSG00000244045_14 (sequence is synthesized)
ttacagtgtttccagtaacctgagctatataaaatttgtgttaaaaagctacactgggccaggtgaggtggctcacacctgtaatcg

SEQ ID NO: 777305 - DNA, 72 bp, Artificial Sequence
  ENSG00000244045_15 (sequence is synthesized)
gaggcccatctctacaaaaaaacgcagaaattagctgacatggtagcgcacgcctgtagtcccagctactca

SEQ ID NO: 777306 - DNA, 80 bp, Artificial Sequence
  ENSG00000244045_16 (sequence is synthesized)
gctattgaaaaagcagggggcactgggaggggagaaccaaatgccctatcctccagttctcagcatatagaagggagctc

SEQ ID NO: 777307 - DNA, 120 bp, Artificial Sequence
  ENSG00000244045_17 (sequence is synthesized)
atgccctatcctccagttctcagcatatagaagggagctctctcatctgctagccactcctgcctcactgtgccatgctttctgtaatgcactctgggtccagggactgcttggcaggag

SEQ ID NO: 777308 - DNA, 120 bp, Artificial Sequence
  ENSG00000244045_18 (sequence is synthesized)
gtgggaagaacaagaagtttagggccttcccagtttcttagggcctgtctggagagggaactagcgtttactgagtttttacgatgtgttacacaccatgtaaagccctttacctacatt

SEQ ID NO: 777309 - DNA, 120 bp, Artificial Sequence
  ENSG00000244045_19 (sequence is synthesized)
atttcttataccccaaacagagagcaaataagtatccccattttttagtcacatagagttccagagttgccacagttacatcgcaaagtcaggatttgaatccagtgcagaccgcaaaca

SEQ ID NO: 777310 - DNA, 120 bp, Artificial Sequence
  ENSG00000244045_20 (sequence is synthesized)
ccatggttttctctccaaagcagagcagctccagaggtggaggtgactggaatgtcctagattcagtgggaccaggagctgggggtgctagcagaggctctcatctccccagggtcttgt

SEQ ID NO: 777311 - DNA, 120 bp, Artificial Sequence
  ENSG00000244045_21 (sequence is synthesized)
cagtcagagtcctaaacccttcaattaactatccctctaatcccagctgaagcctgggtaatacctcccaccaagaggtatctgtgtggaacctggccctatttagggattaggtgatgg

SEQ ID NO: 777312 - DNA, 120 bp, Artificial Sequence
  ENSG00000244045_22 (sequence is synthesized)
agataaatttccatggcaaacggccctcgtccccgttcgtttgcagagcacaacaatccagattaaggtacagagtttgggttttatttggagattagttggtattacaggtgatggtga

SEQ ID NO: 777313 - DNA, 120 bp, Artificial Sequence
  ENSG00000244045_23 (sequence is synthesized)
taccaaaacccaatgctgctatacctgcctccatcccagatctgtcaggttgtctccacagccccacatcagagggcatccaatctgatctttgtgaaaattaaatcaacataagcccca

SEQ ID NO: 777314 - DNA, 120 bp, Artificial Sequence
  ENSG00000244045_24 (sequence is synthesized)
tggagttacgactagtatgtgggtctcctgatacctttagcagtgctttacccctggaaccaatgattgtgatgtgctttctaacaagctgggaatatcattcttctcatttgatttttc

SEQ ID NO: 777315 - DNA, 120 bp, Artificial Sequence
  ENSG00000244045_25 (sequence is synthesized)
cagggtgcccctggtgggggtgttagtgggtaagggaggacgtatgtgaaagtgccttgcacaggttaggtattgaacagatatttatgccattaataaggggagcattagagctttcca

SEQ ID NO: 777316 - DNA, 120 bp, Artificial Sequence
  ENSG00000244045_26 (sequence is synthesized)
gcagtcacgggaggttaggtaataaccccaggagaagccacattctcttttcttcccctcccccaacttagagggtggttggggggctctccatcctcattaaagttgctggggtacaga

SEQ ID NO: 777317 - DNA, 120 bp, Artificial Sequence
  ENSG00000244045_27 (sequence is synthesized)
agtagcatgtgagttccagtcctagctctgtcactaatcctttgaaggagtcatttctcctcgctgggcctcagttcccttatgtgtaaagggaaggaacaggacaaactagcacataag

SEQ ID NO: 777318 - DNA, 120 bp, Artificial Sequence
  ENSG00000244045_28 (sequence is synthesized)
ggtgagccactgtgcccagccattcgagcatttcttctgacagggctccctactactctatggcatgctcctaccctggaacaggagagtagatgggtactggcagcctatgtcctctct

SEQ ID NO: 777319 - DNA, 120 bp, Artificial Sequence
  ENSG00000244045_29 (sequence is synthesized)
ccgaaatgcctgctctgtagtccagaaaagagtcaaaatggttccagacaaaagaatccatggggagggcagagttaatatgttggggaatagagagggctgagccagactgtcaatgga

SEQ ID NO: 777320 - DNA, 120 bp, Artificial Sequence
  ENSG00000244045_30 (sequence is synthesized)
gcctcccaaagtgctgggattacaaggatacaagacatggtgggactctcagcgacctgggaaagcaaggtgagtgagatcattgaaggctctggtcatcaccatcttcaatttcattgt

SEQ ID NO: 777321 - DNA, 120 bp, Artificial Sequence
  ENSG00000244045_31 (sequence is synthesized)
agcaaggtgaggtactaggagatcaggcttctaaaaccttttcctgagatgggtcatgacactcaggcttgttgtttgactgaaacccagttggtgggggagccatgagataagagcacc

SEQ ID NO: 777322 - DNA, 120 bp, Artificial Sequence
  ENSG00000244045_32 (sequence is synthesized)
gaatttctcgtggatgacaaatttgcttgtgcagtttctgctcttttgagagccccctcttcacttccaggcacacctaggcccaattcacccttgagaaagtctaggtttttaccaaat

SEQ ID NO: 777323 - DNA, 120 bp, Artificial Sequence
  ENSG00000244045_33 (sequence is synthesized)
acaaatatcacaggttttgtctcttctttttctccactttaggaatcagcttagcatagtgagcttgtaggaatccggatttctttccacctcaaaagcaagagtggtgaaatctgatac

SEQ ID NO: 777324 - DNA, 120 bp, Artificial Sequence
  ENSG00000244045_34 (sequence is synthesized)
acggatcacccgcaacgtcacttgtcagggaccataggaagtctgcatacaaacaacacagttcccatctcattcactgagactctgggctgagatggtgaccaagttttaaacgtcata

SEQ ID NO: 777325 - DNA, 120 bp, Artificial Sequence
  ENSG00000244057_0 (sequence is synthesized)
ggtctgagggttctgtgctcaaatgtttctattattctgttcaaggtaaaattcctgcattcctgcaaagatgtcctgccagcaaaaccagcagcagtgccagccccctcccagttgtcc

SEQ ID NO: 777326 - DNA, 120 bp, Artificial Sequence
  ENSG00000244057_1 (sequence is synthesized)
taagctccgggggctgtggccccagttctgaaagtggctgctgcctgagccaccacaggcacttcaggtcccatcaatgccggcgccagagatccaactcctgtgacaggggcagtggtc

SEQ ID NO: 777327 - DNA, 120 bp, Artificial Sequence
  ENSG00000244057_2 (sequence is synthesized)
agcaaggcgggggctcctgccgtggccatggctctgggggctgctgctgacctggatcctgatgatgagacaagtgatctttggaggaaacaaggatcccaaaggcccaggaaaagctcc

SEQ ID NO: 777328 - DNA, 120 bp, Artificial Sequence
  ENSG00000244067_0 (sequence is synthesized)
gtccagccacaaaggtgacagcatttaacaaagcttagagaaacctccaggagactgctaccatggcagagaagcccaagctccactactccaatatacggggcagaatggagtccatcc

SEQ ID NO: 777329 - DNA, 120 bp, Artificial Sequence; identical to SEQ ID NO: 777132
  ENSG00000244067_1 (sequence is synthesized)

SEQ ID NO: 777330 - DNA, 120 bp, Artificial Sequence
  ENSG00000244067_2 (sequence is synthesized)
ttgatgggatgaagctggtgcagaccagagccattctcaactacattgccagcaaatacaacctctatgggaaagacataaaggagaaagccctgattgatatgtatatagaaggtatag

SEQ ID NO: 777331 - DNA, 120 bp, Artificial Sequence
  ENSG00000244067_3 (sequence is synthesized)
cagatttgggtgaaatgatccttcttctgccctttagtcaacctgaggaacaagatgccaagcttgccttgatccaagagaaaacaaaaaatcgctacttccctgcctttgaaaaagtct

SEQ ID NO: 777332 - DNA, 120 bp, Artificial Sequence
  ENSG00000244067_4 (sequence is synthesized)
taaagagccacggacaagactaccttgttggcaacaagctgagccgggctgacattcacctggtggaacttctctactacgtggaagagcttgactctagccttatttccagcttccctc

SEQ ID NO: 777333 - DNA, 120 bp, Artificial Sequence
  ENSG00000244067_5 (sequence is synthesized)
gaatcagtaacctgcccacagtgaagaagtttctacagcctggcagcccaaggaagcctcccatggatgagaaatctttagaagaatcaaggaagattttcaggttttaataaaccagcc

SEQ ID NO: 777334 - DNA, 120 bp, Artificial Sequence
  ENSG00000244067_6 (sequence is synthesized)
atagaggtcaagaacatgcaagaccagtattctaaagttttgcaacaattaagtgctttacctaagtgttgattgtgcctgttgtgaagctaatgaactctttcaaattatatgctaatt

SEQ ID NO: 777335 - DNA, 120 bp, Artificial Sequence
  ENSG00000244067_7 (sequence is synthesized)
aaataatacaactcctattcacccacttagttaaaattgatttcttctcattaggatctgatgtgaattcagttttccaatctcctcctagccaacaattttcttggaattacaaattca

SEQ ID NO: 777336 - DNA, 120 bp, Artificial Sequence
  ENSG00000244067_8 (sequence is synthesized)
gtaaaaatggaaactataaattatgtggtttgtttgacttttccaagaattgccctgtaacatacaatttgtcatacaatctattaaaatgccaatgtaaaaatgcacctctgacatttt

SEQ ID NO: 777337 - DNA, 120 bp, Artificial Sequence
  ENSG00000244067_9 (sequence is synthesized)
caggtatgcacaggagaagagttaccatcctggataatggcataaagacattttcttcttttcctgaacagtcattttatttctgataaaagcattctttctaatgcatttgcaaaacaa

SEQ ID NO: 777338 - DNA, 120 bp, Artificial Sequence
  ENSG00000244094_0 (sequence is synthesized)
taaactcctggtacctaagcaccgatctgccttggagaacctgattctgagactccagcaggatgtcttatcaacagcagcagtgcaagcagccctgccagccacctcctgtgtgccccg

SEQ ID NO: 777339 - DNA, 120 bp, Artificial Sequence
  ENSG00000244094_1 (sequence is synthesized)
cgccaaagtgcccagagccatgtccacccccgaagtgccctgagccctgcccaccatcaaagtgtccacagtcctgcccacctcagcagtgccagcagaaatgtcctcctgtgacacctt

SEQ ID NO: 777340 - DNA, 120 bp, Artificial Sequence
  ENSG00000244094_2 (sequence is synthesized)
aggataattggctcacctcgttccacagctccacctgcatcttctcatcaaagccatccagggatacacagggagcttctttcctcttagcctgtgatcggcctgtgatgatctctgata

SEQ ID NO: 777341 - DNA, 120 bp, Artificial Sequence
  ENSG00000244094_3 (sequence is synthesized)
gcaaaaggttttctttttgaggctgccatactgccactgtccaggtggagactgagcaaaggaagtcctgggctgtgccagctcccagagcttcagaagaaagagcagctctctccctgg

SEQ ID NO: 777342 - DNA, 120 bp, Artificial Sequence
  ENSG00000244094_4 (sequence is synthesized)
gaaccattagagaattctgttgatgttttctgtgtctgtctgtcccctgggcatgagcttccaccacctgtgcagttgtcactttcctttcactccctgaataaagaatctatgcatata

SEQ ID NO: 777343 - DNA, 87 bp, Artificial Sequence
  ENSG00000244116_0 (sequence is synthesized)
tctctggatccagtggggatattgtgatgactcagtctccactctccctgcccgtcacccctggagagccggcctccatctcctgca

SEQ ID NO: 777344 - DNA, 120 bp, Artificial Sequence
  ENSG00000244116_1 (sequence is synthesized)
atctcctgcaggtctagtcagagcctcctgcatagtaatggatacaactatttggattggtacctgcagaagccagggcagtctccacagctcctgatctatttgggttctaatcgggcc

SEQ ID NO: 777345 - DNA, 120 bp, Artificial Sequence
  ENSG00000244116_2 (sequence is synthesized)
tccggggtccctgacaggttcagtggcagtggatcaggcacagattttacactgaaaatcagcagagtggaggctgaggatgttggggtttattactgcatgcaagctctacaaactcct

SEQ ID NO: 777346 - DNA, 120 bp, Artificial Sequence
  ENSG00000244122_0 (sequence is synthesized)
atggctcgtgcagggtggactggcctccttcccctatatgtgtgtctactgctgacctgtggctttgccaaggcagggaagctgctggtagtgcccatggatgggagccactggttcacc

SEQ ID NO: 777347 - DNA, 120 bp, Artificial Sequence
  ENSG00000244122_1 (sequence is synthesized)
atgcagtcggtggtggagaaactcatcctcagggggcatgaggtggtcgtagtcatgccagaggtgagttggcaactgggaagatcactgaattgcacagtgaagacttactcaacctca

SEQ ID NO: 777348 - DNA, 120 bp, Artificial Sequence
  ENSG00000244122_2 (sequence is synthesized)
tacactctggaggatcaggaccgggagttcatggtttttgccgatgctcgctggacggcaccattgcgaagtgcattttctctattaacaagttcatccaatggtatttttgacttattt

SEQ ID NO: 777349 - DNA, 120 bp, Artificial Sequence
  ENSG00000244122_3 (sequence is synthesized)
ttttcaaattgcaggagtttgtttaatgaccgaaaattagtagaatacttaaaggagagttgttttgatgcagtgtttctcgatccttttgatgcctgtggcttaattgttgccaaatat

SEQ ID NO: 777350 - DNA, 120 bp, Artificial Sequence
  ENSG00000244122_4 (sequence is synthesized)
ttctccctcccctctgtggtcttcgccaggggaatattttgccactatcttgaagaaggtgcacagtgccctgctcctctttcctatgtccccagacttctcttagggttctcagacgcc

SEQ ID NO: 777351 - DNA, 120 bp, Artificial Sequence
  ENSG00000244122_5 (sequence is synthesized)
atgactttcaaggagagagtatggaaccacatcatgcacttggaggaacatttattttgcccctattttttcaaaaatgtcttagaaatagcctctgaaattctccaaacccctgtcacg

SEQ ID NO: 777352 - DNA, 120 bp, Artificial Sequence
  ENSG00000244122_6 (sequence is synthesized)
gcatatgatctctacagccacacatcaatttggttgttgcgaactgactttgttttggagtatcccaaacccgtgatgcccaatatgatcttcattggtggtatcaactgtcatcaggga

SEQ ID NO: 777353 - DNA, 120 bp, Artificial Sequence
  ENSG00000244122_7 (sequence is synthesized)
aagccagtgcctatggaatttgaagcctacattaatgcttctggagaacatggaattgtggttttctctttgggatcaatggtctcagaaattccagagaagaaagctatggcaattgct

SEQ ID NO: 777354 - DNA, 120 bp, Artificial Sequence
  ENSG00000244122_8 (sequence is synthesized)
gatgctttgggcaaaatccctcagacagtcctgtggcggtacactggaacccgaccatcgaatcttgcgaacaacacgatacttgttaagtggctaccccaaaacgatctgcttggtcac

SEQ ID NO: 777355 - DNA, 120 bp, Artificial Sequence; identical to SEQ ID NO: 773385
  ENSG00000244122_9 (sequence is synthesized)

SEQ ID NO: 777356 - DNA, 120 bp, Artificial Sequence; identical to SEQ ID NO: 773386
  ENSG00000244122_10 (sequence is synthesized)

SEQ ID NO: 777357 - DNA, 120 bp, Artificial Sequence; identical to SEQ ID NO: 773387
  ENSG00000244122_11 (sequence is synthesized)

SEQ ID NO: 777358 - DNA, 120 bp, Artificial Sequence; identical to SEQ ID NO: 773388
  ENSG00000244122_12 (sequence is synthesized)

SEQ ID NO: 777359 - DNA, 120 bp, Artificial Sequence; identical to SEQ ID NO: 773389
  ENSG00000244122_13 (sequence is synthesized)

SEQ ID NO: 777360 - DNA, 120 bp, Artificial Sequence; identical to SEQ ID NO: 773390
  ENSG00000244122_14 (sequence is synthesized)

SEQ ID NO: 777361 - DNA, 120 bp, Artificial Sequence; identical to SEQ ID NO: 773391
  ENSG00000244122_15 (sequence is synthesized)

SEQ ID NO: 777362 - DNA, 120 bp, Artificial Sequence; identical to SEQ ID NO: 773392
  ENSG00000244122_16 (sequence is synthesized)

SEQ ID NO: 777363 - DNA, 120 bp, Artificial Sequence; identical to SEQ ID NO: 773393
  ENSG00000244122_17 (sequence is synthesized)

SEQ ID NO: 777364 - DNA, 120 bp, Artificial Sequence; identical to SEQ ID NO: 773394
  ENSG00000244122_18 (sequence is synthesized)

SEQ ID NO: 777365 - DNA, 120 bp, Artificial Sequence
  ENSG00000244122_19 (sequence is synthesized)
agcctgcagcaatccctgagaaaaaaaaaaaatcggcctttgcctggacactcaagtgatacctgaggacaccttgactcctacagcaccaaccagggcaggcctgggtctccagcggag

SEQ ID NO: 777366 - DNA, 120 bp, Artificial Sequence
  ENSG00000244122_20 (sequence is synthesized)
ggcaggcctgggtctccagcggagctactctttagggatcgtcattatgacgaacagacatgccagattcctctggctagtgtccagtgcagacatacacacacacacacatacacacac

SEQ ID NO: 777367 - DNA, 120 bp, Artificial Sequence
  ENSG00000244122_21 (sequence is synthesized)
gtacagtcaaagctcacaggagaaagaaaaatgttttctaataccttcttaatttgcaagaaggtgttaggaattcaagggatggtatgcatagtgatgttagtttcatttcttcagctc

SEQ ID NO: 777368 - DNA, 120 bp, Artificial Sequence
  ENSG00000244122_22 (sequence is synthesized)
cttcctccaactcatgttctgtagggacttctgggactaagaacaggacccacatatgagcaacaggattttcagagcaaggctgtggttggaagggctcagaccaacgtccacagcaga

SEQ ID NO: 777369 - DNA, 120 bp, Artificial Sequence
  ENSG00000244122_23 (sequence is synthesized)
gtggaggtctagtataaagaatgtgaagtttgtagcatctcttgatcccgctattcctacatgcttgcttaagccattcttcctctagatgaactgttctttgaaggaaacctgcctaat

SEQ ID NO: 777370 - DNA, 120 bp, Artificial Sequence
  ENSG00000244122_24 (sequence is synthesized)
ccccatgactttgatcattgtaagctgccaatcctcttgggaggctgctcccagcttggactgagctgagtcttcgcatgccttgaacaatgaatttgcatcctggttatgttccccatg

SEQ ID NO: 777371 - DNA, 120 bp, Artificial Sequence
  ENSG00000244122_25 (sequence is synthesized)
ggggccagccctgtccttggagtggcccctctaatcatgttgctcaggcttcttctcccttcctgggccccagaacacctccggtgccaaacttgtgggtgggaacaggaactcgcgtgc

SEQ ID NO: 777372 - DNA, 120 bp, Artificial Sequence
  ENSG00000244122_26 (sequence is synthesized)
cagccaggtgtgcatgactagctctgggcaagtctgttctagtaattcaaggtaccacctctcactgggacagcctagtttctacacaggtcttgctctgggaccgccctcagcagtgtg

SEQ ID NO: 777373 - DNA, 120 bp, Artificial Sequence
  ENSG00000244122_27 (sequence is synthesized)
gttagcaggcagggccagtgtgaccctccctttctgggcctcagttgagaaacctgaagctcaggagaggagtcactcccctggcagatgggtggctgggccagaagcagataccaggct

SEQ ID NO: 777374 - DNA, 120 bp, Artificial Sequence
  ENSG00000244122_28 (sequence is synthesized)
ttctgactcctgctctaggattctcaccacgtactggctagacttatacttctcaaatcttaatttcctaaaggcaagtaacagtttgaatgttgttatattgtgatgtataataagaaa

SEQ ID NO: 777375 - DNA, 120 bp, Artificial Sequence
  ENSG00000244122_29 (sequence is synthesized)
tatatgtttgtctttgtttcctggacacagctcctgaaaccataagtggtgggagcgataaacgtgaacaaagaatcttttgttattcaaaacagatccctttcgatcacacctaagttt

SEQ ID NO: 777376 - DNA, 120 bp, Artificial Sequence
  ENSG00000244122_30 (sequence is synthesized)
atgtaaaggagatgtaaagtctctaaggatgagggctagttgccagggaacaaaacccttgcgattagagggaagaaaggagagagagattgaagattgatttgatcaccgatgggcaac

SEQ ID NO: 777377 - DNA, 120 bp, Artificial Sequence
  ENSG00000244122_31 (sequence is synthesized)
aatctaatcaatcatgcctactatgtatggaagcctacataaaaactcagaagggcagggttcagagagctttcaggttgctgaaggtgtggagggtggggcacccagagatggcagatg

SEQ ID NO: 777378 - DNA, 120 bp, Artificial Sequence
  ENSG00000244122_32 (sequence is synthesized)
gggctccatggccatacccccatatcttgttctttgtactttttcctctggctattcatccgtattgtttgcaatatcctttgtaataaaccaaacctagtaaataaactgttttcttca

SEQ ID NO: 777379 - DNA, 120 bp, Artificial Sequence
  ENSG00000244165_0 (sequence is synthesized)
agacacaggctgaggatcggcacgggagcatggcagccaacgtctcgggtgccaagtcctgccctgccaacttcttggcagctgccgacgacaaactcagtgggttccagggggacttcc

SEQ ID NO: 777380 - DNA, 120 bp, Artificial Sequence
  ENSG00000244165_1 (sequence is synthesized)
tgtggcccatactggtggttgagttcctggtggccgtggccagcaatggcctggccctgtaccgcttcagcatccggaagcagcgcccatggcaccccgccgtggtcttctctgtccagc

SEQ ID NO: 777381 - DNA, 120 bp, Artificial Sequence
  ENSG00000244165_2 (sequence is synthesized)
tggcagtcagcgacctgctctgcgccctgacgctgcccccgctggccgcctacctctatccccccaagcactggcgctatggggaggccgcgtgccgcctggagcgcttcctcttcacct

SEQ ID NO: 777382 - DNA, 120 bp, Artificial Sequence
  ENSG00000244165_3 (sequence is synthesized)
gcaacctgctgggcagcgtcatcttcatcacctgcatcagcctcaaccgctacctgggcatcgtgcaccccttcttcgcccgaagccacctgcgacccaagcacgcctgggccgtgagcg

SEQ ID NO: 777383 - DNA, 120 bp, Artificial Sequence
  ENSG00000244165_4 (sequence is synthesized)
ctgccggctgggtcctggccgccctgctggccatgcccacactcagcttctcccacctgaagaggccgcagcagggggcgggcaactgcagcgtggccaggcccgaggcctgcatcaagt

SEQ ID NO: 777384 - DNA, 120 bp, Artificial Sequence
  ENSG00000244165_5 (sequence is synthesized)
gtctggggacagcagaccacgggctggcggcctacagagcgtatagcctggtgctggcggggttgggctgcggcctgccgctgctgctcacgctggcagcctacggcgccctcgggcggg

SEQ ID NO: 777385 - DNA, 120 bp, Artificial Sequence
  ENSG00000244165_6 (sequence is synthesized)
ccgtgctacgcagcccaggcatgactgtggccgagaagctgcgtgtggcagcgttggtggccagtggtgtggccctctacgccagctcctatgtgccctaccacatcatgcgggtgctca

SEQ ID NO: 777386 - DNA, 120 bp, Artificial Sequence
  ENSG00000244165_7 (sequence is synthesized)
ggggcctcatgcccctggccttctgtgtccaccctctactctacatggccgcagtgcccagcctgggctgctgctgccgacactgccccggctacagggacagctggaacccagaggacg

SEQ ID NO: 777387 - DNA, 120 bp, Artificial Sequence
  ENSG00000244165_8 (sequence is synthesized)
ccaagagcactggccaagccctgcccctcaatgccacagccgcccctaaaccgtcagagccccagtcccgtgagctgagccaatgatgtggcctagcggaagctgcctcctcaccctagg

SEQ ID NO: 777388 - DNA, 120 bp, Artificial Sequence
  ENSG00000244165_9 (sequence is synthesized)
tgttgctggagaaccctgagggcagggcccgagccccgacacatcccttcccccaaaaagcaacacctgtgcttgcagccaggtcaggcccagctgcagcccaggcaggagcagtcgcct

SEQ ID NO: 777389 - DNA, 120 bp, Artificial Sequence
  ENSG00000244165_10 (sequence is synthesized)
ttcccacccacagcgctggccacagggctccctgcagggtcagggaccagaccacgcccagaggaggggaggcactggcccccgccacaggactggagacgcaagaacaaaaagaaccaa

SEQ ID NO: 777390 - DNA, 120 bp, Artificial Sequence
  ENSG00000244165_11 (sequence is synthesized)
gtagagagagtggagctgctttattgcccttggagcccgcgctctcggaggctgtcttctgtcgccaagggtcccggaccgagtacacagtggcagctggcttagttggtggacggcctg

SEQ ID NO: 777391 - DNA, 120 bp, Artificial Sequence
  ENSG00000244165_12 (sequence is synthesized)
gggtaggggagggtggcaggtataagacttctgggggcaccccaagaccccagacacccaagtggcatcttgggggtgggtgggcagaggacggggtaatgtgaggacgaagcgggcacg

SEQ ID NO: 777392 - DNA, 120 bp, Artificial Sequence
  ENSG00000244165_13 (sequence is synthesized)
gagccagatggccagtctccaggcctggtccacggactggcagggaccccaggcacaagagctgccacccctctgcccggttttggaaaaaaacaataaaggactgtcccctcaaaacca

SEQ ID NO: 777393 - DNA, 90 bp, Artificial Sequence
  ENSG00000244165_14 (sequence is synthesized)
gatgcgagcctgtgagatcacttgaccccaggaggtcgagactgcactgagctgtgattgcaccactgcacctcagcctcggtgacagtg

SEQ ID NO: 777394 - DNA, 120 bp, Artificial Sequence
  ENSG00000244165_15 (sequence is synthesized)
gctgtgattgcaccactgcacctcagcctcggtgacagtgaaatcctgtctccaaaaaaaagccacgtctagacgacacttcctccttaagcaggctggcgttgggagcagggaggcgcc

SEQ ID NO: 777395 - DNA, 120 bp, Artificial Sequence
  ENSG00000244187_0 (sequence is synthesized)
aggcccgctccccgagccctgccaaccatggtgaacttgggtctgtcccgggtggacgacgccgtggctgccaagcacccgggactcggggagtatgccgcatgccagtcacacgccttc

SEQ ID NO: 777396 - DNA, 120 bp, Artificial Sequence
  ENSG00000244187_1 (sequence is synthesized)
atgaagggcgttttcaccttcgtcacaggcaccggcatggcctttggcttgcagatgttcattcagaggaagtttccataccctttgcagtggagcctcctagtggccgtggttgcaggc

SEQ ID NO: 777397 - DNA, 120 bp, Artificial Sequence
  ENSG00000244187_2 (sequence is synthesized)
tctgtggtcagctacggggtgacgagagtggagtcggagaaatgcaacaacctctggctcttcctggagaccgggcagctccccaaagacaggagcacagatcagagaagctaggagagc

SEQ ID NO: 777398 - DNA, 120 bp, Artificial Sequence
  ENSG00000244187_3 (sequence is synthesized)
atgtgtggccaggcctgacaaacacctgcagatggctgctgccccaacctgggacctgcccaggaggttggagcagaaagggctctccctggggtggtgtttctcctctagggtattggg

SEQ ID NO: 777399 - DNA, 120 bp, Artificial Sequence
  ENSG00000244187_4 (sequence is synthesized)
atgcatgttctgcactgccagcagagagggtgtgtctgggggccaccacctatgggacacggggtcgaaggggcctgtacactctgtcatttcctttctagcccctgcatctccaacaag

SEQ ID NO: 777400 - DNA, 120 bp, Artificial Sequence
  ENSG00000244187_5 (sequence is synthesized)
tccaaggtgacagctggtgctaggggcgtggggttaataaatggcttatccttctctccacccaagtttccacctgaccaggtgaaaaacaaatcagaagggtaagatgatgacaggtca

SEQ ID NO: 777401 - DNA, 120 bp, Artificial Sequence
  ENSG00000244187_6 (sequence is synthesized)
ccgggtggacgacgccgtggctgccaagcacccggtgagaaggccggtctgggacgcgggcctcaaaccccagaagctgacctgagcgaggcggggggccggggcgtgggggtgccctcg

SEQ ID NO: 777402 - DNA, 120 bp, Artificial Sequence
  ENSG00000244187_7 (sequence is synthesized)
tcagggaagagtggcggaggctgggggcactctcttgctaaggggctcagggcgtccgggtgggcataggggaggtgggacgtgtccaagcgcccagggtctcactcctccacagccagg

SEQ ID NO: 777403 - DNA, 120 bp, Artificial Sequence
  ENSG00000244187_8 (sequence is synthesized)
accatggtgaacttgggtctgtcccgggtggacgacgccgtggctgccaagcacccgccagggtgtgcccagaggagggacaggagaggcggtgaaggaagagggcaggggatcgagcct

SEQ ID NO: 777404 - DNA, 120 bp, Artificial Sequence
  ENSG00000244187_9 (sequence is synthesized)
cttgggtctgtcccgggtggacgacgccgtggctgccaagcacccggtaggctgcgtccaggtgtcctgcggctgggagagaacgcaccctcccgccctgccctgactccccagcagggg

SEQ ID NO: 777405 - DNA, 120 bp, Artificial Sequence
  ENSG00000244219_0 (sequence is synthesized)
aacggaagctccaggagcgcggtggagcctggagtggagggcgagggtcccaccgtgacccgcctggagggcagcccagctctgggacgcgaaaccgcctacgacggtgccgcagcagtt

SEQ ID NO: 777406 - DNA, 120 bp, Artificial Sequence
  ENSG00000244219_1 (sequence is synthesized)
ccaagagcctctgagttcctgccttttttcatctctgaatccccaccattggcctacattgggagtggggcgacctgtgatgctgacgttagaggacaaggacatgaagggattctcctg

SEQ ID NO: 777407 - DNA, 120 bp, Artificial Sequence
  ENSG00000244219_2 (sequence is synthesized)
ggccatagtcccagccttaacctccctaggctacctgattatactggtggtctccatctttcccttctgggtgcgactgacaaacgaggagtcccacgaagtctttttcagtggcctatt

SEQ ID NO: 777408 - DNA, 120 bp, Artificial Sequence
  ENSG00000244219_3 (sequence is synthesized)
tgagaactgcttcaatgccaaatgctggaagcctcgacccttatccatttacatcatcctcggccgggttttcctgctctctgcagttttcttggctttcgtcaccaccttcatcatgat

SEQ ID NO: 777409 - DNA, 120 bp, Artificial Sequence
  ENSG00000244219_4 (sequence is synthesized)
gccctttgcatccgagttcttcccgaggacctggaagcaaaactttgtgttagcctgcatcagcttcttcacaggggcctgtgccttcctggctttggtgctgcatgccctggagatcaa

SEQ ID NO: 777410 - DNA, 120 bp, Artificial Sequence
  ENSG00000244219_5 (sequence is synthesized)
ctgcagttctccgtgctgtggccttactacgtgctgggcttcggcatctttctgttcatagtggctggtaccatctgcctcattcaagaaatggtttgcccttgctggcacttgttgtcc

SEQ ID NO: 777411 - DNA, 120 bp, Artificial Sequence
  ENSG00000244219_6 (sequence is synthesized)
acttcccagagtatggaggaggaccacgggagcctgtacctggacaatctggagagtttgggaggagaaccgagctcagtacaaaaggagacacaggtgacagcagaaacagtcatctag

SEQ ID NO: 777412 - DNA, 120 bp, Artificial Sequence
  ENSG00000244219_7 (sequence is synthesized)
cccaggacatggcttctttacccttcttcaagccatgtgagtgtacacatgtagctgtttgtagtcctccccaccctctctgccagtatctgtgcctttgaggagcttcttgcgtgtcag

SEQ ID NO: 777413 - DNA, 120 bp, Artificial Sequence
  ENSG00000244219_8 (sequence is synthesized)
atcaactctccacctccccatactcacagtgattctatcttgcttgtatgtgaaatttgctaaaagtcctttcaactcttctgagcttcctaagtgacgtttttgcaggtattttcaata

SEQ ID NO: 777414 - DNA, 120 bp, Artificial Sequence
  ENSG00000244219_9 (sequence is synthesized)
aaaagaagggctactttgttcatccatatctcaaaaaccaagtccgcagggcaggaggggagggaggaatattacaagataaccaagtgaaatgggattttgtgaaacagaaaccgtaca

SEQ ID NO: 777415 - DNA, 120 bp, Artificial Sequence
  ENSG00000244219_10 (sequence is synthesized)
gaatacagaatatactcgggggaatgacaactatttgggctggtggcacaggggtaaaagaatttaccaagacggttgtagataaagaaaggcagatttattaaaggaagtataaaagta

SEQ ID NO: 777416 - DNA, 120 bp, Artificial Sequence
  ENSG00000244219_11 (sequence is synthesized)
tgccaaatgctggaagcctcgacccttatccagatctcgctttgtcacccaggctggtgtgatcacagctcactgcagcctccaactcttgagttcaagcgatcctcccaccttagcctc

SEQ ID NO: 777417 - DNA, 120 bp, Artificial Sequence
  ENSG00000244234_0 (sequence is synthesized)
gcaacggttggggctgcgcgtgagaaggtggcggtgtaggcacctgtgctcggggaaggctggcggcggcggccgggccatggccagagaccccctcctctgggctccctgaagtcctgg

SEQ ID NO: 777418 - DNA, 120 bp, Artificial Sequence
  ENSG00000244234_1 (sequence is synthesized)
ggagccgtgacccatgggatcgtcgagcagccgggtgctgggccagccgaggcgagcccttgcccagcaggaacagggtgccagggccaggggctcggcccggaggccggacactggaga

SEQ ID NO: 777419 - DNA, 120 bp, Artificial Sequence
  ENSG00000244234_2 (sequence is synthesized)
cgatgcggcgagctacggcttctgttactgcccgggcagtcacaagcgcaagcggagcagcggggcctgccgctactgtgacccggactcgcacagggaggagcatgaggaggaggggga

SEQ ID NO: 777420 - DNA, 120 bp, Artificial Sequence
  ENSG00000244234_3 (sequence is synthesized)
caagcagcagccgctcctcaacacccctgcaaggaaaaaattaaggagtacatccaaatatatttatcaaacattatttttgaatggtgaaaacagtgacattaagatttgtgctctagg

SEQ ID NO: 777421 - DNA, 120 bp, Artificial Sequence
  ENSG00000244234_4 (sequence is synthesized)
agaagaatggcgattacacaaaatatatttatgtcaatctggctacttttctagtatgttcagtggttcttggaaagaatccagcatgaatattattgaactggagattcctgaccagaa

SEQ ID NO: 777422 - DNA, 120 bp, Artificial Sequence
  ENSG00000244234_5 (sequence is synthesized)
cattgatgtagacgcactgcaggttgcgtttggttcactgtatcgagatgatgtcttgataaaacccagtcgagttgttgccattttggcagcagcttgtatgctgcagctggatggttt

SEQ ID NO: 777423 - DNA, 120 bp, Artificial Sequence
  ENSG00000244234_6 (sequence is synthesized)
aatacagcagtgtggtgagacaatgaaggaaacaattaatgtgaaaactgtatgcggttattacacatcagtagagatctatggattagattctgtaaagaaaaagtgccttgaatggct

SEQ ID NO: 777424 - DNA, 120 bp, Artificial Sequence
  ENSG00000244234_7 (sequence is synthesized)
tctaaacaatttgatgactcaccagaatgttaaactttttaaagaactcggtataaatgtcatgaaacagctcattggttcctctaacttatttgtgatgcaagtggagatggatgtata

SEQ ID NO: 777425 - DNA, 120 bp, Artificial Sequence
  ENSG00000244234_8 (sequence is synthesized)
caccactctaaaaaagtggatgttccttcaacttgtgccttcttggaatggatctttaaaacagcttttgacagaaacagatgtctggttttctaaacagagaaaagattttgaaggtat

SEQ ID NO: 777426 - DNA, 120 bp, Artificial Sequence
  ENSG00000244234_9 (sequence is synthesized)
ggcctttcttgaaactgaaccaggaaaaccatttgtgtcagtattcagacatttaaggttacaatatattatcagtgacctagcttctgcaagaattattgaacaagatggtatagtacc

SEQ ID NO: 777427 - DNA, 120 bp, Artificial Sequence
  ENSG00000244234_10 (sequence is synthesized)
ttcagaatggctgtcttctgtgtataaacagcagtggtttgctatgctgcgggcagaacaagaccgtgaggtagggcctcaagaaatcaataaagaagacctagagggaaatagcatgag

SEQ ID NO: 777428 - DNA, 120 bp, Artificial Sequence
  ENSG00000244234_11 (sequence is synthesized)
gtgtggtagaaagcttgccaaagatggtgaatactactggtgttggacgggttttaacttcggctttgacctacttgtaatttacaccaatggatacatcattttcaaacgcaatacact

SEQ ID NO: 777429 - DNA, 120 bp, Artificial Sequence
  ENSG00000244234_12 (sequence is synthesized)
catttagattacgcttggcttcttttgatagtagtggaaaactagtatgtagtagaacaactggctatcaaatacttatacttaaaaaggatcaggaacaagtggtgatgaacttggaca

SEQ ID NO: 777430 - DNA, 120 bp, Artificial Sequence
  ENSG00000244234_13 (sequence is synthesized)
gcaggtttctgaccttccctttatatatctgctgtaacttcttgtatatatcaccagaaaaaggaattgaaaataatcgtcacccagaaaatccagaaaactgaagatctcatcagttgg

SEQ ID NO: 777431 - DNA, 120 bp, Artificial Sequence
  ENSG00000244234_14 (sequence is synthesized)
aaacagtagcactttgaaaactttcaggccagctttaatttaatggccctactgatattcacatctaagttgactaacaatgacaaaggccttatgaactgtacggacaatacagaagac

SEQ ID NO: 777432 - DNA, 120 bp, Artificial Sequence
  ENSG00000244234_15 (sequence is synthesized)
tattcttatcctcattgcatttctatgcatatacaaaaaaaatcattttaaagccaagaaaatatctgtcaaaccatttctgtcagtacgatgtcaactcatgcttttaattcagcatca

SEQ ID NO: 777433 - DNA, 120 bp, Artificial Sequence
  ENSG00000244234_16 (sequence is synthesized)
gcagaaaatgactgtaggtaaatctcacatttatctgcaacaaaatatagatttaatttttagcttaaactttgtttctaccttatgttagtggacctcagttatccatctgtaaattta

SEQ ID NO: 777434 - DNA, 120 bp, Artificial Sequence
  ENSG00000244234_17 (sequence is synthesized)
tttttatttggctaaaataatctaaaagaataatttggatggccaattagaaatgctcttttgagctggggcatttaaagctttcctttaatatttttacctgctcattatgattcctcc

SEQ ID NO: 777435 - DNA, 120 bp, Artificial Sequence
  ENSG00000244234_18 (sequence is synthesized)
ttttagtctaatatctttccagttcatacttgtttttaatcattaaatactttcttcctggtttggagactaagctgagaaactttttttaaacttaagcattgtcatatgctatttttt

SEQ ID NO: 777436 - DNA, 120 bp, Artificial Sequence
  ENSG00000244234_19 (sequence is synthesized)
aaaatttggctttcctaggattttaagaacaatgaaagttagcttcacaccttcaaatgatcttgaatgcgtgaaaaatcagtttgattccagggatatttcttgtcttacatggtcttt

SEQ ID NO: 777437 - DNA, 120 bp, Artificial Sequence
  ENSG00000244234_20 (sequence is synthesized)
tgacagtctgtacacctttattattagtttttgagttatttatgtaccagatattatacttttaaatattttaatattctctgatctttacaattatttatgttcaaattttagttggga

SEQ ID NO: 777438 - DNA, 120 bp, Artificial Sequence
  ENSG00000244234_21 (sequence is synthesized)
gggagttttgtttcctacttaagctcaggacttgataccctctgagatgagtggctttgagtgacatgctaacagcaatttcatagtaaatgtaaataaggtcagaggatctaacataga

SEQ ID NO: 777439 - DNA, 120 bp, Artificial Sequence
  ENSG00000244234_22 (sequence is synthesized)
agctgatgacgcattaatgtaaaaatggaacttatttttgtcaaaaataagatgtacacttgtcatgatttatatatgttgaccttttgtgtttactgctgttttgaatagagccatgtt

SEQ ID NO: 777440 - DNA, 120 bp, Artificial Sequence
  ENSG00000244234_23 (sequence is synthesized)
cattttctttccagttagagtaagtacttctgtggttaatgtatatttttattctggcttttaaaatgggaataatttgtatgtatctgtgcaaataataaatgcgcatttggaaaaaga

SEQ ID NO: 777441 - DNA, 120 bp, Artificial Sequence
  ENSG00000244242_0 (sequence is synthesized)
gagaaagggttcagagtcaggcacaggcaggcagacaggaccccaagcaggactggccttccagacaggaaagagggttgcggagacacaggaggccagttgagagtggcagaggagaaa

SEQ ID NO: 777442 - DNA, 120 bp, Artificial Sequence
  ENSG00000244242_1 (sequence is synthesized)
ggagtttcatgggaggatggggcttggagagagatgagggagggaaaacgggggccgccatgcatcctcagcttccgggggactttggagagggtcgaggctcagtgggagctggaggcc

SEQ ID NO: 777443 - DNA, 120 bp, Artificial Sequence
  ENSG00000244242_2 (sequence is synthesized)
cagggccccggccagtgcccagccccgctgggagacccggccagcaccacggacggcgcccaggaagcccgagtccccctggacggggccttctggattccgaggcccccggcaggttcg

SEQ ID NO: 777444 - DNA, 120 bp, Artificial Sequence
  ENSG00000244242_3 (sequence is synthesized)
cccaagggctgcttcgcttgcgtgtccaagccccctgccctgcaggctccggcggcccctgcccctgagccctcggcctctcccccgatggcgcccacactgttccccatggagtccaag

SEQ ID NO: 777445 - DNA, 120 bp, Artificial Sequence
  ENSG00000244242_4 (sequence is synthesized)
agcagcaagaccgacagcgtgcgggctgccggcgcgccccctgcctgcaagcacctagccgagaagaagacgatgaccaaccccacgaccgtcatcgaggtctacccggacaccaccgag

SEQ ID NO: 777446 - DNA, 120 bp, Artificial Sequence
  ENSG00000244242_5 (sequence is synthesized)
gtgaacgactattacctgtggtccatcttcaacttcgtctacctcaacttctgctgcctgggcttcatcgccttggcctactccctcaaagtgcgagacaagaagcttctcaatgacctg

SEQ ID NO: 777447 - DNA, 120 bp, Artificial Sequence
  ENSG00000244242_6 (sequence is synthesized)
aatggagccgtggaggatgcaaagacggcccggctgttcaacatcaccagttctgccctggcagcctcctgcatcatcctcgtcttcatcttcctgcggtaccccctcaccgactactaa

SEQ ID NO: 777448 - DNA, 120 bp, Artificial Sequence
  ENSG00000244242_7 (sequence is synthesized)
ggcccgccaggcacggctgctggcggagacaagcactgagacatgtttattctcatggtccctgaaacgcaggatcccatgaggttggggcagggcagggcttcttgtcctggggccccc

SEQ ID NO: 777449 - DNA, 120 bp, Artificial Sequence
  ENSG00000244242_8 (sequence is synthesized)
ttgagctgtgaactgggcagcaaggccatcagaagctgagtacagcaagggggcagtgagcttggccctcagtccaccccctccgcctcctggcctccaccctgcctgtgtctggggcct

SEQ ID NO: 777450 - DNA, 120 bp, Artificial Sequence
  ENSG00000244242_9 (sequence is synthesized)
gggggcttctcccctcgctgctgcaccctggcttccagcgtctgtgtccctgccctcacgtgccccttcccaggctcctggggccccttggacctgacacctagcaggaagggcttatgc

SEQ ID NO: 777451 - DNA, 120 bp, Artificial Sequence
  ENSG00000244242_10 (sequence is synthesized)
aaaattgtcccaggttgggaggactcactctgtgctccccgaccctgcctcctccacgatgtgaccccgctcagagcccttgtgtctgtgaactttcaatgaaatacccatgcagctcca

SEQ ID NO: 777452 - DNA, 120 bp, Artificial Sequence
  ENSG00000244242_11 (sequence is synthesized)
gcccagccttctactttgtgtccctggcagggcctggagaagtctggaggctttgcaatcctccctcaggaactgcctggcggtcagggccccgggtgctgtgtcccaacagactgcagg

SEQ ID NO: 777453 - DNA, 120 bp, Artificial Sequence
  ENSG00000244242_12 (sequence is synthesized)
ggacggtctgctccatcacagctgtgccagacagtgaatgggaagggggggcatttggtggaggtaccccaaactcgagtcacttagagggtcaggcagcctcctggggggacggaaggg

SEQ ID NO: 777454 - DNA, 120 bp, Artificial Sequence
  ENSG00000244242_13 (sequence is synthesized)
ggtggggcacagcctcagctgcctgcattggccaaatcagagcaaaggaaaccacaaattcactcggaaggaagcagcaggcagagacgatagacgcctggctaacccctgtccctcctg

SEQ ID NO: 777455 - DNA, 120 bp, Artificial Sequence
  ENSG00000244242_14 (sequence is synthesized)
gagggctctgggacctggacaggcccctttacctctctcgtgcccatctccttagctgtaaaataggaaaatggcctttcacttctataatcactgtgaaaatgaacggaagatgccttt

SEQ ID NO: 777456 - DNA, 120 bp, Artificial Sequence
  ENSG00000244242_15 (sequence is synthesized)
ccggtcagccctgaagacaagctgatgagggtgcactaggaaaagtgcagggcatcggcgaggcacacgaaggaggtggggaggtgaagatggagaagaagccgaggcagtggccatggg

SEQ ID NO: 777457 - DNA, 120 bp, Artificial Sequence
  ENSG00000244242_16 (sequence is synthesized)
tgtggagcttcgcgctgtgggtgcccagctggtctgggaaaccgcaggaaatcccgcagctcaggtgcgcagtgggaaggacttgctattccgtgggaaggcaggcaaaccttcccaggg

SEQ ID NO: 777458 - DNA, 120 bp, Artificial Sequence
  ENSG00000244242_17 (sequence is synthesized)
aaggggcatggccgtgcgcctcatgttttgggaagctcgtgccctctggggtagcgaggccagcttggaggggagtccagtggacagaggtggatgcaagtggagggagctgagcctggg

SEQ ID NO: 777459 - DNA, 120 bp, Artificial Sequence
  ENSG00000244242_18 (sequence is synthesized)
ctggggctggcagcagagggctggacagcagggcgcctgcgtggcagctgtgcagtcagtggggttgactggtttggaaggtaaggtgggggagaagcccggaggattcctgtcccttga

SEQ ID NO: 777460 - DNA, 120 bp, Artificial Sequence
  ENSG00000244242_19 (sequence is synthesized)
cttggacagcccagtggagagggctgtgtaccaagggcaggaaaccagggagaagaagatgttgactttaagataccaagcagagaagggaagagccttctgggctggagacgtggggtg

SEQ ID NO: 777461 - DNA, 120 bp, Artificial Sequence
  ENSG00000244242_20 (sequence is synthesized)
cctcagaagggaggaccttgagctagcagcagatgggacaaacgcaggggacagggcacagccgtggcaggagtgcagcgagcaagattctggtcacagtcctgacccagaaacctgcag

SEQ ID NO: 777462 - DNA, 120 bp, Artificial Sequence
  ENSG00000244242_21 (sequence is synthesized)
aggaagggagggtggccagcacctgcccgtgggcctggggtgcagcccaggcagaggtggatggagggggtgctcagggaagaggggaggggagtgtgtgacctcaaaatgggagggctt

SEQ ID NO: 777463 - DNA, 120 bp, Artificial Sequence
  ENSG00000244242_22 (sequence is synthesized)
gggggtcagagtcgagagaggggacagggtggggaccatgtgggactcttgagcactgacccttgaacccaggcagtggtgggatgggagggcaggaggcggcgggctgcgaggctgatg

SEQ ID NO: 777464 - DNA, 120 bp, Artificial Sequence
  ENSG00000244242_23 (sequence is synthesized)
cggggctgcacggagctgtcattgagcctcttggaggatggtgggagaagtgccaggggcggctgaaagccttgccgagactgtgggcagcctggttgtgggcacttcggatgcttgcac

SEQ ID NO: 777465 - DNA, 120 bp, Artificial Sequence
  ENSG00000244242_24 (sequence is synthesized)
cattagacccagaggcttcctggacaagcctgggctggaagaggatggcagaggctgctgggccttggaagagagagggtcctggcttctagttcctggggcagctaaggccaaccccag

SEQ ID NO: 777466 - DNA, 120 bp, Artificial Sequence
  ENSG00000244242_25 (sequence is synthesized)
tgtccaggtgtcttccatgttatgcctgggagggaagaaagtagaggggcaaatgctttctttgcctattttccttaaacatttggtggcagtgctggtggctgcctgggacaggggcca

SEQ ID NO: 777467 - DNA, 120 bp, Artificial Sequence
  ENSG00000244242_26 (sequence is synthesized)
ggaggaaacacccctgcattagggaagccctcagccagcttttccctgggatgttcctgcgcctggctgaagctttctgagttcatgttggggaaatggaacggtcaccttccagccagt

SEQ ID NO: 777468 - DNA, 120 bp, Artificial Sequence
  ENSG00000244242_27 (sequence is synthesized)
aaaggcacccctagctcttgggatgtttgtatccaactccgggcaatgtggggctacaaaggcccctggcttccataccctggggaccgggggagggctggtgctcccgcggtgggtgtc

SEQ ID NO: 777469 - DNA, 120 bp, Artificial Sequence
  ENSG00000244242_28 (sequence is synthesized)
cacggtgaggtcaggcccccacagcaggtgcattctcgccctcagcaggcaggcaagcaggcatcagctccggcgctggtctctggcttcgaagtctgtgtctttgcctgtctgtactca

SEQ ID NO: 777470 - DNA, 120 bp, Artificial Sequence
  ENSG00000244242_29 (sequence is synthesized)
tgcctgacctgctggcgctccctgtccactgcactcctcccacctcatttttatgtgattttgcacagtgcctggcagacatttgacattcaataaacattgtacgaacgaaagaatcaa

SEQ ID NO: 777471 - DNA, 120 bp, Artificial Sequence
  ENSG00000244242_30 (sequence is synthesized)
cgccgccgccgagccccgcgcgctccccaccccctcaaggttgggccgctgggaggcggatcagtggacagacagcggcccgcgggacggcggaaggacgcgcgcaccgaggctcagggg

SEQ ID NO: 777472 - DNA, 120 bp, Artificial Sequence
  ENSG00000244242_31 (sequence is synthesized)
gtggacagacagcggcccgcgggacggcggaaggacgcgcgcaccgaggctcagggggtccggccgcgcgccgaggagtcgcttgtaggtgaggaggcgccgtccggggggctgcggcag

SEQ ID NO: 777473 - DNA, 120 bp, Artificial Sequence
  ENSG00000244242_32 (sequence is synthesized)
acccggatggggctgggggctgcagagcctcggccgcagaccccccggcgagcgccgcacgggagctgggaacgcggggtggcgcagagcgcgagcgacttggtgcctcgttggagaagt

SEQ ID NO: 777474 - DNA, 120 bp, Artificial Sequence
  ENSG00000244242_33 (sequence is synthesized)
gttcatttcacagcctgttattgtgcgtctatgtatggcccgggggtgcgtggctccgggcaagtgtgcgcgcttggggtccccaggttggaggtggggggcggtgcgcacgagttggag

SEQ ID NO: 777475 - DNA, 120 bp, Artificial Sequence
  ENSG00000244242_34 (sequence is synthesized)
accccgcacctgtgccggttcttggtgctcgtggctgagcctgcatcgccttgtgtggggagttgtttactcgtcaatggctctgagcgcgcccgcgggtgcgccccggggtctggagag

SEQ ID NO: 777476 - DNA, 120 bp, Artificial Sequence
  ENSG00000244242_35 (sequence is synthesized)
cccgcggtgcagcccgcggtggagcccgtggcggtgcccgtggcggtatcgggtgtccgcgggcgccgtgggcaggtgctttggccgctctgctagctctgccggttggcggctgaggca

SEQ ID NO: 777477 - DNA, 120 bp, Artificial Sequence
  ENSG00000244242_36 (sequence is synthesized)
gcgtcgctgtgggtccggcgccccgtgtgtgcggggttgtttggggtgctggggcactctgtgttttgcaacagtgtcagtctcagcgttggtgtgcttcggggcggggggtgctgttgt

SEQ ID NO: 777478 - DNA, 120 bp, Artificial Sequence
  ENSG00000244242_37 (sequence is synthesized)
tgtcagtgggtgagtgtttatgcgcagatggcgaagtgatgaaagccccaggtccctgccaaggctgctgcgaagggctttggcatcgtccgtggccgccgaggcccggggcgggtgggg

SEQ ID NO: 777479 - DNA, 120 bp, Artificial Sequence
  ENSG00000244242_38 (sequence is synthesized)
gaggcaggtggcaggctggcagctggcggcccccgcagggatttccgtctccactggggctgttctcggagctgctgggcgtgagggtgggtgctggccggtaggccgggcccagcttgc

SEQ ID NO: 777480 - DNA, 120 bp, Artificial Sequence
  ENSG00000244274_0 (sequence is synthesized)
gtgcgtcctctggagaagtgcgcgcgtgtaagtgtggcgagtgtggccaagggtgccggaggcagggttcgggagctgacatggacccaaatcctcgggccgccctggagcgccagcagc

SEQ ID NO: 777481 - DNA, 120 bp, Artificial Sequence
  ENSG00000244274_1 (sequence is synthesized)
tccgccttcgggagcggcaaaaattcttcgaggacattttacagccagagacagagtttgtctttcctctgtcccatctgcatctcgagtcgcagagaccccccataggtagtatctcat

SEQ ID NO: 777482 - DNA, 120 bp, Artificial Sequence
  ENSG00000244274_2 (sequence is synthesized)
ccatggaagtgaatgtggacacactggagcaagtagaacttattgaccttggggacccggatgcagcagatgtgttcttgccttgcgaagatcctccaccaaccccccagtcgtctggga

SEQ ID NO: 777483 - DNA, 120 bp, Artificial Sequence
  ENSG00000244274_3 (sequence is synthesized)
tggacaaccatttggaggagctgagcctgccggtgcctacatcagacaggaccacatctaggacctcctcctcctcctcctccgactcctccaccaacctgcatagcccaaatccaagtg

SEQ ID NO: 777484 - DNA, 120 bp, Artificial Sequence
  ENSG00000244274_4 (sequence is synthesized)
ctgcagctagcagtgggcccctgcctacagactgaccacgctggctattctccacatgagaccacaggcccagccagagcctgtcgggagaagaccagactctttacttgcagtaggcac

SEQ ID NO: 777485 - DNA, 120 bp, Artificial Sequence
  ENSG00000244274_5 (sequence is synthesized)
cagaggtgggaaggatggtgggattgtgtacctttctaagaattaaccctctcctgctttactgctaattttttcctgctgcaaccctcccaccagtttttggcttactcctgagatatg

SEQ ID NO: 777486 - DNA, 120 bp, Artificial Sequence
  ENSG00000244274_6 (sequence is synthesized)
atttgcaaatgaggagagagaagatgaggttggacaagatgccactgcttttcttagcactcttccctcccctaaaccatcccgtagtcttctaatacagtctctcagacaagtgtctct

SEQ ID NO: 777487 - DNA, 120 bp, Artificial Sequence
  ENSG00000244274_7 (sequence is synthesized)
agatggatgtgaactccttaactcatcaagtaaggtggtactcaagccatgctgcctccttacatcctttttggaacagagcacggtataaataataaactaataataatatgccaacca

SEQ ID NO: 777488 - DNA, 120 bp, Artificial Sequence
  ENSG00000244274_8 (sequence is synthesized)
ccctggaggcgcagccccaccccggccggcgcggctcgctcccacgcccccgccgcggcctcgctggagcggacggactgagtcagagggggcgccagcgctgcaggagctgacatggac

SEQ ID NO: 777489 - DNA, 120 bp, Artificial Sequence
  ENSG00000244274_9 (sequence is synthesized)
tagcgttgtgacctgggcggcagctctaagagcctttcccgggaatcggcgtcagcgcctcgctcctccgccgccagcccgcggccgcacggtctccccagacttccgtggccctgcctt

SEQ ID NO: 777490 - DNA, 120 bp, Artificial Sequence
  ENSG00000244274_10 (sequence is synthesized)
ggccagtcggggttgggtccctctccacctctgtggcgcccgtggagctggccagggtctgggatacgctgggtgcagatgaggtggggaaggcagtctgcggaggatgacgtctgatcc

SEQ ID NO: 777491 - DNA, 120 bp, Artificial Sequence
  ENSG00000244274_11 (sequence is synthesized)
tcaagctagaaactcccttgcctctggtgatgggctcagagcagaacgccgggaaggagatgagcgaatgggaatgaatgcaccgacctgggctggcccatagcctcagtgctctggcag

SEQ ID NO: 777492 - DNA, 120 bp, Artificial Sequence
  ENSG00000244274_12 (sequence is synthesized)
ggtctcagcttctcagccctaggggtcaggaggcctgctctgaactggacccagaacccgcctttccaattgctcctcactgactaatggggagataagtcagtgagatgtgtcccagga

SEQ ID NO: 777493 - DNA, 120 bp, Artificial Sequence
  ENSG00000244274_13 (sequence is synthesized)
gggggacgcataaagagctgttggagttcaaaggaaagatggtagtctcctaaatagctcaccttcacaagcagggtcttgtatttgaggcaggagctgacatggacccaaatcctcggg

SEQ ID NO: 777494 - DNA, 120 bp, Artificial Sequence
  ENSG00000244274_14 (sequence is synthesized)
caggaatcaggggcagccgggcgagtcccagggcaggggtcctccgccgccttgcacctgccctgctgggcggcaccgggtcagtgccctgccccctcctgcgggtcccaactctctctt

SEQ ID NO: 777495 - DNA, 120 bp, Artificial Sequence
  ENSG00000244274_15 (sequence is synthesized)
cgagtgtggccaagggtgccggaggcagggttcgggtgcgtagtcgttgcgtgggcgctgcccaaaaggcgcagagcatcaagtgtgcgtgggcagaaccggcgcgggcgcccgccgcgg

SEQ ID NO: 777496 - DNA, 120 bp, Artificial Sequence
  ENSG00000244274_16 (sequence is synthesized)
gtctgcgcggggcgggggcgcagcaagtgcatccgagcgagcggagactagcgcaccggcgtcggtggcgagggtggtgcagaggagtccggctgggcggagggaggaaggatgggtgcg

SEQ ID NO: 777497 - DNA, 120 bp, Artificial Sequence
  ENSG00000244274_17 (sequence is synthesized)
ggtaactttttgaccgccttggaagtaccagtagccgcgctcgcaggggctgcctccgaccgccgggcgagctgcgagcgagtgagcccgccaccgcccctcccccacttccgcctcccg

SEQ ID NO: 777498 - DNA, 120 bp, Artificial Sequence
  ENSG00000244274_18 (sequence is synthesized)
cctcttcctcgttcccggctcccagggcccgtgtccaggccggagccaggggccccactgttgggatgctggctgcagtggggcgccccaagcccaggtcccctctgtcttctctttcga

SEQ ID NO: 777499 - DNA, 120 bp, Artificial Sequence
  ENSG00000244274_19 (sequence is synthesized)
agcactggaggaagggaaccctccaccctgagatctctgtctctatcctatcctgtccctggccttctgaggcaagcggggccaattaaggggaaaacgtacctcctccatttgtgctga

SEQ ID NO: 777500 - DNA, 120 bp, Artificial Sequence
  ENSG00000244274_20 (sequence is synthesized)
accaatccctccaacccctctcaggagggcatgatatggagagttgggcattggctgtgttccctgaatacagagtatctctcttgtggtgcctggaactggcatcccctttgtggagct

SEQ ID NO: 777501 - DNA, 120 bp, Artificial Sequence
  ENSG00000244355_0 (sequence is synthesized)
atgaaaccccagtttgttgggatcttgctcagctccctgctaggggctgccttgggaaaccgaatgcggtgctacaactgtggtggaagccccagcagttcttgcaaagaggccgtgacc

SEQ ID NO: 777502 - DNA, 120 bp, Artificial Sequence
  ENSG00000244355_1 (sequence is synthesized)
aagctacctggaaaccccccagtgaccttgattcaccaacatccagcctgcgtcgcagcccatcattgcaatcaagtggagacagagtcggtgggagacgtgacttatccagcccacagg

SEQ ID NO: 777503 - DNA, 120 bp, Artificial Sequence
  ENSG00000244355_2 (sequence is synthesized)
gactgctacctgggagacctgtgcaacagcgccgtggcaagccatgtggcccctgcaggcattttggctgcagcagctaccgccctgacctgtctcttgccaggactgtggagcggatag

SEQ ID NO: 777504 - DNA, 120 bp, Artificial Sequence
  ENSG00000244355_3 (sequence is synthesized)
acctgtggcgagggcagaccccagccaggcctggaacagatcaagctacctggaaaccggaggtgttttttgagggggctgaaaatccctttgggctccttgaaatcacatctgctctgc

SEQ ID NO: 777505 - DNA, 120 bp, Artificial Sequence
  ENSG00000244355_4 (sequence is synthesized)
atgaaaccccagtttgttgggatcttgctcagctccctgctaggggctgccttgggtaaggaggcggccagctagcttctcacacaggccttctgccagccggctccaccgagggcccag

SEQ ID NO: 777506 - DNA, 120 bp, Artificial Sequence
  ENSG00000244362_0 (sequence is synthesized)
acaacagctaaccacttctgacaacatgagctactccggcagctactatggaggcctaggctacggctgtggaggattcggtggcctgggctatggctatagctgtggatgtggcagctt

SEQ ID NO: 777507 - DNA, 120 bp, Artificial Sequence
  ENSG00000244362_1 (sequence is synthesized)
cttctggattctattgaataaatacttgaaatatagtcttctgtgagattcccaattcttccaagaaactttattccataaccatatggaattccatattccataacaaaacagctgctt

SEQ ID NO: 777508 - DNA, 120 bp, Artificial Sequence
  ENSG00000244362_2 (sequence is synthesized)
ggatcacctgccttttgacaatagtgtgaagaaaacttgatcaactagatattggcatttgattagtgatgttctccagatattcacttttttattggctggagagccattatactctaa

SEQ ID NO: 777509 - DNA, 120 bp, Artificial Sequence; identical to SEQ ID NO: 770183
  ENSG00000244395_0 (sequence is synthesized)

SEQ ID NO: 777510 - DNA, 120 bp, Artificial Sequence; identical to SEQ ID NO: 770184
  ENSG00000244395_1 (sequence is synthesized)

SEQ ID NO: 777511 - DNA, 120 bp, Artificial Sequence; identical to SEQ ID NO: 770185
  ENSG00000244395_2 (sequence is synthesized)

SEQ ID NO: 777512 - DNA, 82 bp, Artificial Sequence; identical to SEQ ID NO: 775289
  ENSG00000244395_3 (sequence is synthesized)

SEQ ID NO: 777513 - DNA, 120 bp, Artificial Sequence; identical to SEQ ID NO: 770187
  ENSG00000244395_4 (sequence is synthesized)

SEQ ID NO: 777514 - DNA, 120 bp, Artificial Sequence; identical to SEQ ID NO: 770188
  ENSG00000244395_5 (sequence is synthesized)

SEQ ID NO: 777515 - DNA, 120 bp, Artificial Sequence; identical to SEQ ID NO: 770189
  ENSG00000244395_6 (sequence is synthesized)

SEQ ID NO: 777516 - DNA, 120 bp, Artificial Sequence; identical to SEQ ID NO: 770190
  ENSG00000244395_7 (sequence is synthesized)

SEQ ID NO: 777517 - DNA, 120 bp, Artificial Sequence; identical to SEQ ID NO: 562624
  ENSG00000244395_8 (sequence is synthesized)

SEQ ID NO: 777518 - DNA, 80 bp, Artificial Sequence; identical to SEQ ID NO: 562625
  ENSG00000244395_9 (sequence is synthesized)

SEQ ID NO: 777519 - DNA, 120 bp, Artificial Sequence
  ENSG00000244395_10 (sequence is synthesized)
tagagatgcacttcagagatacgggacctctcatggtgcaccacctgcaagagggcctcggatgtcctatggtggaagcacctgccacgcatatagtaatacacgagatagatatggcag

SEQ ID NO: 777520 - DNA, 120 bp, Artificial Sequence; identical to SEQ ID NO: 562627
  ENSG00000244395_11 (sequence is synthesized)

SEQ ID NO: 777521 - DNA, 120 bp, Artificial Sequence; identical to SEQ ID NO: 770195
  ENSG00000244395_12 (sequence is synthesized)

SEQ ID NO: 777522 - DNA, 120 bp, Artificial Sequence; identical to SEQ ID NO: 562629
  ENSG00000244395_13 (sequence is synthesized)

SEQ ID NO: 777523 - DNA, 120 bp, Artificial Sequence; identical to SEQ ID NO: 770197
  ENSG00000244395_14 (sequence is synthesized)

SEQ ID NO: 777524 - DNA, 120 bp, Artificial Sequence
  ENSG00000244405_0 (sequence is synthesized)
cggagcggttcaccgtcttcggagcggttcggcccagcctttcgcccaggcgcccaggcccgctgcgcgcgtgcgtgagcgcgcctgcgccgccggggccgctgcaaggggaggagagag

SEQ ID NO: 777525 - DNA, 120 bp, Artificial Sequence
  ENSG00000244405_1 (sequence is synthesized)
gctgcaaggggaggagagaggccgcctcaggaggatcccttttcccccagaaattactcaatgctgaaacctctcaaagtggtattagagacgctgaaagcaccatggacgggttttatg

SEQ ID NO: 777526 - DNA, 120 bp, Artificial Sequence
  ENSG00000244405_2 (sequence is synthesized)
atcagcaagtcccttttatggtcccagggaaatctcgatctgaggaatgcagagggcggcctgtgattgacagaaagaggaagtttttggacacagatctggctcacgattctgaagagc

SEQ ID NO: 777527 - DNA, 120 bp, Artificial Sequence
  ENSG00000244405_3 (sequence is synthesized)
tatttcaggatctcagtcaacttcaagaggcttggttagctgaagcacaagttcctgatgatgaacagtttgtcccagattttcagtctgataacctggtgcttcatgccccacctccaa

SEQ ID NO: 777528 - DNA, 120 bp, Artificial Sequence
  ENSG00000244405_4 (sequence is synthesized)
ccaagatcaaacgggagctgcacagcccctcctctgagctgtcgtcttgtagccatgagcaggctcttggtgctaactatggagaaaagtgcctctacaactattgtgcctatgatagga

SEQ ID NO: 777529 - DNA, 120 bp, Artificial Sequence
  ENSG00000244405_5 (sequence is synthesized)
agcctccctctgggttcaagccattaacccctcctacaacccccctctcacccacccatcagaatcccctatttcccccacctcaggcaactctgcccacctcagggcatgcccctgcag

SEQ ID NO: 777530 - DNA, 120 bp, Artificial Sequence
  ENSG00000244405_6 (sequence is synthesized)
ctggcccagttcaaggtgtgggccccgcccccgccccccattcgcttccagagcctggaccacagcagcaaacatttgcggtcccccgaccaccacatcagcccctgcagatgccaaaga

SEQ ID NO: 777531 - DNA, 120 bp, Artificial Sequence
  ENSG00000244405_7 (sequence is synthesized)
tgatgcctgaaaaccagtatccatcagaacagagatttcagagacaactgtctgaaccctgccaccccttccctcctcagccaggagttcctggagataatcgccccagttaccatcggc

SEQ ID NO: 777532 - DNA, 120 bp, Artificial Sequence
  ENSG00000244405_8 (sequence is synthesized)
aaatgtcagaacctattgtccctgcagctcccccgccccctcagggattcaaacaagaataccatgacccactctatgaacatggggtcccgggcatgccagggcccccagcacacgggt

SEQ ID NO: 777533 - DNA, 120 bp, Artificial Sequence
  ENSG00000244405_9 (sequence is synthesized)
tccagtcaccaatgggaatcaagcaggagcctcgggattactgcgtcgattcagaagtgcctaactgccagtcatcctacatgagagggggttatttctccagcagccatgaaggttttt

SEQ ID NO: 777534 - DNA, 120 bp, Artificial Sequence
  ENSG00000244405_10 (sequence is synthesized)
catatgaaaaagatccccgattatactttgacgacacttgtgttgtgcctgagagactggaaggcaaagtcaaacaggagcctaccatgtatcgagaggggcccccttaccagaggcgag

SEQ ID NO: 777535 - DNA, 120 bp, Artificial Sequence
  ENSG00000244405_11 (sequence is synthesized)
gttcccttcagctgtggcagttcctggtcacccttcttgatgacccagccaatgcccacttcattgcctggacaggtcgaggcatggagttcaagctgatagaaccggaagaggttgctc

SEQ ID NO: 777536 - DNA, 120 bp, Artificial Sequence
  ENSG00000244405_12 (sequence is synthesized)
ggcgctggggcatccagaagaaccggccagccatgaactatgacaagctgagccgctctctccgctattactatgaaaagggcatcatgcagaaggtggctggagagcgatacgtctaca

SEQ ID NO: 777537 - DNA, 120 bp, Artificial Sequence
  ENSG00000244405_13 (sequence is synthesized)
aatttgtctgtgacccagatgccctcttctccatggctttcccggataaccagcgtccgttcctgaaggcagagtccgagtgccacctcagcgaggaggacaccctgccgctgacccact

SEQ ID NO: 777538 - DNA, 120 bp, Artificial Sequence
  ENSG00000244405_14 (sequence is synthesized)
ttgaagacagccccgcttacctcctggacatggaccgctgcagcagcctcccctatgccgaaggctttgcttactaagtttctgagtggcggagtggccaaaccctagagctagcagttc

SEQ ID NO: 777539 - DNA, 120 bp, Artificial Sequence
  ENSG00000244405_15 (sequence is synthesized)
ccattcaggcaaacaagggcagtggttttgtttgtgtttttggttgttcctaaagcttgccctttgagtattatctggagaacccaagctgtctctggattggcacccttaaagacagat

SEQ ID NO: 777540 - DNA, 120 bp, Artificial Sequence
  ENSG00000244405_16 (sequence is synthesized)
acattggctggggagtgggaacagggaggggcagaaaaccaccaaaaggccagtgcctcaactcttgattctgatgaggtttctgggaagagatcaaaatggagtctccttaccatggac

SEQ ID NO: 777541 - DNA, 120 bp, Artificial Sequence
  ENSG00000244405_17 (sequence is synthesized)
tacatgcaaagcaatatcttgttcaggttagtacccgcaaaacgggacatagtatgtgacaatctgcatcgatcatggactactaaatgcctttacatagaagggctctgatttgcacaa

SEQ ID NO: 777542 - DNA, 120 bp, Artificial Sequence
  ENSG00000244405_18 (sequence is synthesized)
tttgttgaaaaatcacaaacccatagaaaagtaagtaggctaagttggggaggctcaaaccattaagggttaaaaatacatcttaaacattggaaagctcttctagctgaatctgaaata

SEQ ID NO: 777543 - DNA, 120 bp, Artificial Sequence
  ENSG00000244405_19 (sequence is synthesized)
ttaccccttgtctagaaaaaggggggcagtcagaacagctgttccccactccgtggttctcaaaatcataaaccatggctactcttgggaaccacccggccatgtggtcgccaagtagag

SEQ ID NO: 777544 - DNA, 120 bp, Artificial Sequence
  ENSG00000244405_20 (sequence is synthesized)
caagccccctttctcttcccaatcacgtggctgagtgtggatgacttttattttaggagaagggcgattaacacttttgacagtattttgttttgccctgatttgggggattgttttgtt

SEQ ID NO: 777545 - DNA, 120 bp, Artificial Sequence
  ENSG00000244405_21 (sequence is synthesized)
tgttttgccctgatttgggggattgttttgttttggtggttgttttggaaaaacagtttataaactgatttttgtagttttggtatttaaagcaaaaaaacgaaaaacaaaaaacaaaaa

SEQ ID NO: 777546 - DNA, 120 bp, Artificial Sequence
  ENSG00000244405_22 (sequence is synthesized)
tagccagggccgtgccaacttatgaagacactgcagcttgagaggggctttgctgaggcttccccttggccatgtgaaagcccgccttgttgcctgctttgtgctttctgcaccagacaa

SEQ ID NO: 777547 - DNA, 120 bp, Artificial Sequence
  ENSG00000244405_23 (sequence is synthesized)
cctgatggaacatttgcacctgagttgtacatttttgaagtgtgcagggcagcctggacacaagcttagattctctatgtatagttccccgtgttcactaacatgccctctctggaaagc

SEQ ID NO: 777548 - DNA, 120 bp, Artificial Sequence
  ENSG00000244405_24 (sequence is synthesized)
atatgtatataacatgtgtcatgtcctttggaaacctggtcacctggtgaaaacccttgggattcttccctgggcatgactgatgacaatttccatttcatcagtttgttttgttttcct

SEQ ID NO: 777549 - DNA, 120 bp, Artificial Sequence
  ENSG00000244405_25 (sequence is synthesized)
ttttctttaaatcttggactttaaaccctacctgtgtgattcagtagggtttgagacttacgtgtgatactgacaggtaagcaacagtgctagcattctagattcctgcctttttttaaa

SEQ ID NO: 777550 - DNA, 120 bp, Artificial Sequence
  ENSG00000244405_26 (sequence is synthesized)
aagaaattattctcattgctgtattatattggaaaagttttaaacaaccaagctaaagctatgtgaaagttgagctcaaagtagaggaaaagttactggtggtaccttgctgcctgctct

SEQ ID NO: 777551 - DNA, 120 bp, Artificial Sequence
  ENSG00000244405_27 (sequence is synthesized)
gctggtagaattctgtgctccccgtgacacttagtacattaagaatgactacactgttcctcgtatgtgaaggaggcagtgctgactccgtgagtgtgagacacgtgctttgaactgctt

SEQ ID NO: 777552 - DNA, 120 bp, Artificial Sequence
  ENSG00000244405_28 (sequence is synthesized)
ttctattcatggagcactccatagtctcaaactgtcccccttatgaccaacagcacatttgtgaagaggttcgcagggataaggggtgcactttatagctatggaaacatgagattctcc

SEQ ID NO: 777553 - DNA, 120 bp, Artificial Sequence
  ENSG00000244405_29 (sequence is synthesized)
tctattggaagctaattagcccacaaaggtggtaaacctgtagattgggccttaattagcattgtactctaatcaaaggactctttctaaaccatatttatagctttcttaacctacaca

SEQ ID NO: 777554 - DNA, 120 bp, Artificial Sequence
  ENSG00000244405_30 (sequence is synthesized)
tagtctatacatagatgcatattttacccccagctggctagagatttatttgttgtaaatgctgtatagatttggttttcctttctttacttaccctggtttggattttttttttttttc

SEQ ID NO: 777555 - DNA, 120 bp, Artificial Sequence
  ENSG00000244405_31 (sequence is synthesized)
ttttgaatggatttatgctgtcttagcaatatgacaataatcctctgtagcttgagctacccctcccctgctgtaacttacgtgacctgtgctgtcactgggcataggacagcggcatca

SEQ ID NO: 777556 - DNA, 120 bp, Artificial Sequence
  ENSG00000244405_32 (sequence is synthesized)
cggttgcattcccattggactcatgcacctcccggatggtttttgtttttttcgggggttctttggggtttgtttgtttgcttcttttccagagtgtggaaagtctacagtgcagaaagg

SEQ ID NO: 777557 - DNA, 120 bp, Artificial Sequence
  ENSG00000244405_33 (sequence is synthesized)
cttgaacctgccagctgatttgaaatactttcccctgcgcagggccgtatgcatcctgccaagctgcgttatattctgtactgtgtacaataaagaagtttgcttttcgtttaccaagca

SEQ ID NO: 777558 - DNA, 120 bp, Artificial Sequence
  ENSG00000244405_34 (sequence is synthesized)
ggagcgcgagtgcgggggctcccgagtggatgggggatcgcggagttgcgaggctttcacagtctctggagattcgagagccccgaggggacttggaggctcgcgagaagagacgcttgg

SEQ ID NO: 777559 - DNA, 120 bp, Artificial Sequence
  ENSG00000244405_35 (sequence is synthesized)
cggagctccgcagttgggaggagggggcgggaagcagtttgaggggaatgtctgagaggcgctgccccccagagcaccgggagggggtaaatgacacaggaggatcccttttcccccaga

SEQ ID NO: 777560 - DNA, 120 bp, Artificial Sequence
  ENSG00000244405_36 (sequence is synthesized)
ttccaatttgttgccatcctttatagtcctgggtctctgtcatcatttagcaagtcagctgtgcaaagtggtgcttcatgccccacctccaaccaagatcaaacgggagctgcacagccc

SEQ ID NO: 777561 - DNA, 120 bp, Artificial Sequence
  ENSG00000244405_37 (sequence is synthesized)
tttgcgggggcaggggggagatcggaaggggcgtccggccactggtccgacaggcccagccggctagagttcacgggctgattcagaatcttcaaagtcggggaggatcccttttccccc

SEQ ID NO: 777562 - DNA, 120 bp, Artificial Sequence
  ENSG00000244405_38 (sequence is synthesized)
ttcaggatctcagtcaacttcaagaggcttggttagctgaagcacaagttcctgatgatgaacagtttgtcccagattttcagtctgataaccgtaagtacctttctggtgatggcacat

SEQ ID NO: 777563 - DNA, 120 bp, Artificial Sequence
  ENSG00000244405_39 (sequence is synthesized)
aaccctgaaaacttttatttcataataaaattatttctaaagtatttctactgtattgcaggtaagatttactgaacataattttatcctaaatttctttttaccttaagaatattgtaa

SEQ ID NO: 777564 - DNA, 120 bp, Artificial Sequence
  ENSG00000244405_40 (sequence is synthesized)
ttccttccttcctctttctttgcttgactaatacccaagcttaaaattgctcagtttccaggctaagatttgagatcatagtttaaaccttgcttagctcatgaatatgagagctgattg

SEQ ID NO: 777565 - DNA, 120 bp, Artificial Sequence
  ENSG00000244405_41 (sequence is synthesized)
ggttgatgtaaggtcacagtagaggaagccgccctgtcatctctaatgagttgggagaacaagggtttccttagacctctttctcaatcttgaaaataaaaccaatagttgtctatcata

SEQ ID NO: 777566 - DNA, 120 bp, Artificial Sequence
  ENSG00000244405_42 (sequence is synthesized)
gcacaagttcctgatgatgaacagtttgtcccagattttcagtctgataaccatttcagagacaactgtctgaaccctgccaccccttccctcctcagccaggagttcctggagataatc

SEQ ID NO: 777567 - DNA, 120 bp, Artificial Sequence
  ENSG00000244405_43 (sequence is synthesized)
tttatttcaagtttctctgggataggggggtagttgtcaacaatattaccaaaggatgcaagatggtggccatggggcttatgtaacatactgtattaacagttaactgagttgggagac

SEQ ID NO: 777568 - DNA, 120 bp, Artificial Sequence
  ENSG00000244405_44 (sequence is synthesized)
aaatatcctagttctcctggagaattgggagatgggtagccccagtctcagctgtgaaataagcctgtctccagtccacccagccccctgagaaggaaggagttttggattcctgggatt

SEQ ID NO: 777569 - DNA, 120 bp, Artificial Sequence
  ENSG00000244405_45 (sequence is synthesized)
accacagagctgcagttgaccgatgtgctgtttctgctgcagaaactattgacaggattgtgtccacctttgctttcctttcagaagtgcctaactgccagtcatcctacatgagagggg

SEQ ID NO: 777570 - DNA, 120 bp, Artificial Sequence
  ENSG00000244411_0 (sequence is synthesized)
cctctacctgctccaccctcaatccaccagaaccatgggctgctgtggctgttccgaaggctgtggctccggctgtgggggctgtggctccggctgtgggggctgtggctctggctgtgg

SEQ ID NO: 777571 - DNA, 120 bp, Artificial Sequence
  ENSG00000244411_1 (sequence is synthesized)
gggatgtggctccagctgctgtgtgcccgtctgctgctgcaagcccgtgtgctgctgtgtgccagcctgttcctgctccagctgtggctcctgtgggggctccaagggaggctgtggctc

SEQ ID NO: 777572 - DNA, 120 bp, Artificial Sequence
  ENSG00000244411_2 (sequence is synthesized)
ctgtgggggctccaaggggggctgtggctcttgtgggggttctaaggggggctgtggttcttgtggctgctcccagtgcagctgctataagccctgctgctgctcctcaggctgtgggtc

SEQ ID NO: 777573 - DNA, 120 bp, Artificial Sequence
  ENSG00000244411_3 (sequence is synthesized)
atcctgctgccagtccagctgctgtaagccctgctgctgccagtccagctgctgtaagccctgctgctgttcctcaggctgtgggtcatcctgctgccagtccagttgctgcaatccctg

SEQ ID NO: 777574 - DNA, 120 bp, Artificial Sequence
  ENSG00000244411_4 (sequence is synthesized)
ctgctcccagtctagctgctgtgtccccgtgtgctgccagtgtaagatctgaggctctggactcaggtctcatgtgagtcctgctaaccccattttccgaagctgtgacctgtccttcat

SEQ ID NO: 777575 - DNA, 120 bp, Artificial Sequence
  ENSG00000244411_5 (sequence is synthesized)
caccctaattaatgtccattccctcctaacaaattctcttcccaagtcaactgcaactgcggctgaatcacccctcacccgctagccttgcctttgcttgtgtattcagaggcctgagct

SEQ ID NO: 777576 - DNA, 120 bp, Artificial Sequence
  ENSG00000244411_6 (sequence is synthesized)
cctgaacccacttgaagtcctgtcttttccagctggagcagctgggcatgagtgtcccacctgcaacaaggtgggcgtttaagaggcttccttggagtggctttgcctgtccaacactct

SEQ ID NO: 777577 - DNA, 120 bp, Artificial Sequence
  ENSG00000244411_7 (sequence is synthesized)
gctttatcttaaatgaaaagttgcaaactaataaaaataccatgccgacaaactgaaacacatatcttgctgatttctctgttgttcggggtcattactatggctatggctattgttttc

SEQ ID NO: 777578 - DNA, 120 bp, Artificial Sequence
  ENSG00000244411_8 (sequence is synthesized)
ttgttcttgttgtgtttcggactgcgtgggtctgatgctgatgttgctggaaggtgctaggatggggctggctgtctcctctgcctctcatctccttcctggctgacccctcttttctca

SEQ ID NO: 777579 - DNA, 120 bp, Artificial Sequence
  ENSG00000244411_9 (sequence is synthesized)
gaacccctctcttcctaggtctttccagctattgatctgatggagacaggactgttcctcaggccagggccacagaagcagaagaggctgctgaaaactctggggagttcagacttgcct

SEQ ID NO: 777580 - DNA, 120 bp, Artificial Sequence
  ENSG00000244411_10 (sequence is synthesized)
cctttccctggtccaggcctctgccatcttcctttgggaagtttttgtaaccaacttactctgattgtctttgttgttacacagcctgttgcctctgtaaataaacactcctagcaccaa

SEQ ID NO: 777581 - DNA, 120 bp, Artificial Sequence
  ENSG00000244414_0 (sequence is synthesized)
atgctcataactgttaatgaaagcagattcaaagcaacaccaccaccactgaagtatttttagttatataagattggaactaccaagcatgtggctcctggtcagtgtaattctaatctc

SEQ ID NO: 777582 - DNA, 120 bp, Artificial Sequence
  ENSG00000244414_1 (sequence is synthesized)
acggatatcctctgttgggggagaagcaacattttgtgattttccaaaaataaaccatggaattctatatgatgaagaaaaatataagccattttcccaggttcctacaggggaagtttt

SEQ ID NO: 777583 - DNA, 120 bp, Artificial Sequence
  ENSG00000244414_2 (sequence is synthesized)
ctattactcctgtgaatataattttgtgtctccttcaaaatcattttggactcgcataacatgcacagaagaaggatggtcaccaacaccaaagtgtctcagactgtgtttctttccttt

SEQ ID NO: 777584 - DNA, 120 bp, Artificial Sequence
  ENSG00000244414_3 (sequence is synthesized)
tgtggaaaatggtcattctgaatcttcaggacaaacacatctggaaggtgatactgtgcaaattatttgcaacacaggatacagacttcaaaacaatgagaacaacatttcatgtgtaga

SEQ ID NO: 777585 - DNA, 120 bp, Artificial Sequence
  ENSG00000244414_4 (sequence is synthesized)
acggggctggtccacccctcccaaatgcaggtccactgacacttcctgtgtgaatccgcccacagtacaaaatgctcatatactgtcgagacagatgagtaaatatccatctggtgagag

SEQ ID NO: 777586 - DNA, 120 bp, Artificial Sequence
  ENSG00000244414_5 (sequence is synthesized)
ggacagaaccacctcaatgcaaagattctacgggaaaatgtgggccccctccacctattgacaatggggacattacttcattcccgttgtcagtatatgctccagcttcatcagttgagt

SEQ ID NO: 777587 - DNA, 120 bp, Artificial Sequence
  ENSG00000244414_6 (sequence is synthesized)
accaatgccagaacttgtatcaacttgagggtaacaagcgaataacatgtagaaatggacaatggtcagaaccaccaaaatgcttacatccgtgtgtaatatcccgagaaattatggaaa

SEQ ID NO: 777588 - DNA, 120 bp, Artificial Sequence
  ENSG00000244414_7 (sequence is synthesized)
attataacatagcattaaggtggacagccaaacagaagctttatttgagaacaggtgaatcagctgaatttgtgtgtaaacggggatatcgtctttcatcacgttctcacacattgcgaa

SEQ ID NO: 777589 - DNA, 120 bp, Artificial Sequence
  ENSG00000244414_8 (sequence is synthesized)
caacatgttgggatgggaaactggagtatccaacttgtgcaaaaagatagaatcaatcataaaatgcacacctttattcagaactttagtattaaatcagttcttaatttcatttttaag

SEQ ID NO: 777590 - DNA, 120 bp, Artificial Sequence
  ENSG00000244414_9 (sequence is synthesized)
tattgttttactcctttttattcatacgtaaaattttggattaatttgtgaaaatgtaattataagctgagaccggtggctctcttcttaaaagcaccatattaaaacttggaaaactaa

SEQ ID NO: 777591 - DNA, 120 bp, Artificial Sequence
  ENSG00000244414_10 (sequence is synthesized)
atataagattggaactaccaagcatgtggctcctggtcagtgtaattctaatctcacggatatcctctgttgggggagaaggctggagtgcaatggtgtgatttcggctcaccacaactt

SEQ ID NO: 777592 - DNA, 120 bp, Artificial Sequence
  ENSG00000244414_11 (sequence is synthesized)
cccgcctcggcctcccacagtgttgggattgcaggcataagccaccacgcctggcccttgaaattcgttttattttgttttcacttttagtgctgagttgtaatcacaggagtgtgattg

SEQ ID NO: 777593 - DNA, 120 bp, Artificial Sequence
  ENSG00000244414_12 (sequence is synthesized)
gatgggagatgtagtccccctattttgagatgcctcctataagaatcaatgaagaataaatatgtcaactgtcttgtgttacctggaaatgctctacgtgttgaaatatattaatttttt

SEQ ID NO: 777594 - DNA, 120 bp, Artificial Sequence
  ENSG00000244414_13 (sequence is synthesized)
taaactgatctttaatatatttgactgctaatatttctttactaatattcatttcgcagcagcctgatcaaagttttccttttaaatgtcatttttatacatattctgttttgaatttac

SEQ ID NO: 777595 - DNA, 120 bp, Artificial Sequence
  ENSG00000244414_14 (sequence is synthesized)
gcaggagagttcatatttcatatcactccaaaatataaattttatattcattaacaattacctcctcaaatagtcatgtactcctagttagtgatgcttttcattcctaatttgtacact

SEQ ID NO: 777596 - DNA, 120 bp, Artificial Sequence
  ENSG00000244414_15 (sequence is synthesized)
ggaaagcatttaagctaaaggcatttaagctaaatgaaagaaaaacactataagtgagatgattaaaatataatctagtgatttatttatgtaacttattatgtaattcttcagttttat

SEQ ID NO: 777597 - DNA, 120 bp, Artificial Sequence; identical to SEQ ID NO: 752552
  ENSG00000244437_0 (sequence is synthesized)

SEQ ID NO: 777598 - DNA, 120 bp, Artificial Sequence
  ENSG00000244437_1 (sequence is synthesized)
ggggaaagagccaccctctcctgcagggccagtcagagtgttagcagcaacttagcctggtaccagcagaaacctggccaggctcccaggctcctcatctatggtgcatccaccagggcc

SEQ ID NO: 777599 - DNA, 120 bp, Artificial Sequence
  ENSG00000244437_2 (sequence is synthesized)
actggtatcccagccaggttcagtggcagtgggtctgggacagagttcactctcaccatcagcagcctgcagtctgaagattttgcagtttattactgtcagcagtataataactggcct

SEQ ID NO: 777600 - DNA, 120 bp, Artificial Sequence
  ENSG00000244462_0 (sequence is synthesized)
ggcgaaggaggtggtggctgcgttgggctccgggaagccgttcgggctggggctgtcggccgcggggcggaggcactcgcgcggggggtaattcggggtctgggttctggtgccgcgcag

SEQ ID NO: 777601 - DNA, 120 bp, Artificial Sequence
  ENSG00000244462_1 (sequence is synthesized)
ctttccccggtgtgtgtggtttcagcgcagcatggctgtggtcatccgtttgcaaggtctcccaattgtggcggggaccatggacattcgccacttcttctctggattgaccattcctga

SEQ ID NO: 777602 - DNA, 120 bp, Artificial Sequence
  ENSG00000244462_2 (sequence is synthesized)
tgggggcgtgcatattgtagggggtgaactgggtgaggctttcatcgtttttgccactgatgaagatgcaaggcttggtatgatgcgcacaggtggtacaattaaagggtcaaaagtaac

SEQ ID NO: 777603 - DNA, 120 bp, Artificial Sequence
  ENSG00000244462_3 (sequence is synthesized)
actattgttgagtagtaagacggaaatgcagaatatgattgaactgagtcgtaggcgttttgaaactgccaacttagatataccaccagcaaatgccagtagatcaggaccaccacctag

SEQ ID NO: 777604 - DNA, 120 bp, Artificial Sequence
  ENSG00000244462_4 (sequence is synthesized)
ctcaggaatgagtagcagggtaaacttgcccacaacagtatccaactttaataatccatcacccagtgtagttactgccaccacttctgttcatgaaagcaacaaaaacatacagacatt

SEQ ID NO: 777605 - DNA, 120 bp, Artificial Sequence
  ENSG00000244462_5 (sequence is synthesized)
ttccacagccagcgtaggaacagctcctccaaatatgggggcttcctttgggagcccaacgtttagctcaactgttccaagcacagcctctccaatgaacacagtcccgccgccaccaat

SEQ ID NO: 777606 - DNA, 120 bp, Artificial Sequence
  ENSG00000244462_6 (sequence is synthesized)
tcctccaattccagcgatgccatctctgccaccaatgccatccattcccccaattccagttcctcctccagtacctacattgcctcctgtgcctcctgtgcccccgattcccccagttcc

SEQ ID NO: 777607 - DNA, 120 bp, Artificial Sequence
  ENSG00000244462_7 (sequence is synthesized)
ttctgtgccacccatgaccccactgccacccatgtcgggcatgccgcccttgaatccgccacctgtggcacctctacctgctggaatgaatggctctggagcacctatgaatttgaacaa

SEQ ID NO: 777608 - DNA, 120 bp, Artificial Sequence
  ENSG00000244462_8 (sequence is synthesized)
taatctgaatcctatgtttcttggtccgttgaatcctgttaaccctatccagatgaactctcagagcagtgtgaagccactccccatcaaccctgatgatctgtatgtcagtgtgcatgg

SEQ ID NO: 777609 - DNA, 120 bp, Artificial Sequence
  ENSG00000244462_9 (sequence is synthesized)
aatgcccttttctgcaatggaaaatgatgtcagagatttttttcatgggctccgtgttgatgcagtgcatttgttgaaagatcatgtaggtcgaaataatgggaatggattggttaagtt

SEQ ID NO: 777610 - DNA, 120 bp, Artificial Sequence
  ENSG00000244462_10 (sequence is synthesized)
tctctcccctcaagatacatttgaagctttgaaacgaaacagaatgctgatgattcaacgctatgtggaagttagccctgccacagaaagacagtgggtagctgctggaggccatatcac

SEQ ID NO: 777611 - DNA, 120 bp, Artificial Sequence
  ENSG00000244462_11 (sequence is synthesized)
ttttaagcaaaatatgggaccttctggacaaactcatccccctcctcagacacttcccaggtcaaaatcgcccagtgggcagaaaagatcaaggtcaagatcaccacatgaggctggttt

SEQ ID NO: 777612 - DNA, 120 bp, Artificial Sequence
  ENSG00000244462_12 (sequence is synthesized)
ttgtgtttacttgaaagggctaccatttgaagcagaaaacaaacatgtcattgatttttttaaaaagctggatattgtggaagatagtatttatatagcttatggacccaatgggaaagc

SEQ ID NO: 777613 - DNA, 120 bp, Artificial Sequence
  ENSG00000244462_13 (sequence is synthesized)
aactggcgaaggctttgtagagttcagaaatgaggctgactataaggctgctctgtgtcgtcataaacagtacatgggcaatcgctttattcaagttcatccaattactaagaaaggtat

SEQ ID NO: 777614 - DNA, 120 bp, Artificial Sequence
  ENSG00000244462_14 (sequence is synthesized)
gctagaaaagatagatatgattcgaaaaagactgcagaacttcagctatgaccagagggaaatgatactaaatccagagggggatgtcaactctgccaaagtctgtgcccacataacaaa

SEQ ID NO: 777615 - DNA, 120 bp, Artificial Sequence
  ENSG00000244462_15 (sequence is synthesized)
tattccattcagcattacaaagatggatgttcttcagttcctagaaggaatcccagtggatgaaaatgctgtacatgttcttgttgataacaatgggcaaggtctaggacaggcattggt

SEQ ID NO: 777616 - DNA, 120 bp, Artificial Sequence
  ENSG00000244462_16 (sequence is synthesized)
tcagtttaaaaatgaagatgatgcacgtaagtctgaacgcttacaccgtaaaaaacttaatgggagagaagcttttgttcatgtagttaccctagaagatatgagagagattgagaaaaa

SEQ ID NO: 777617 - DNA, 120 bp, Artificial Sequence
  ENSG00000244462_17 (sequence is synthesized)
tccccctgcccaaggaaaaaagggattaaagatgcctgtgccaggtaatcctgcagttccaggaatgcccaatgcgggactgcccggtgtgggactgcccagtgcaggacttcccggtgc

SEQ ID NO: 777618 - DNA, 120 bp, Artificial Sequence
  ENSG00000244462_18 (sequence is synthesized)
aggcctgcccagcacaggactgcctggttcagcaataaccagtgcaggactgcctggtgcgggaatgcccagtgcaggaatacctagtgcaggaggtgaagagcatgccttcctgactgt

SEQ ID NO: 777619 - DNA, 120 bp, Artificial Sequence
  ENSG00000244462_19 (sequence is synthesized)
aggatcaaaggaagccaataatgggcctccatttaactttcctggtaattttggtggatcaaatgcctttgggccaccaatccctcctccaggattaggaggcggggcctttggtgatgc

SEQ ID NO: 777620 - DNA, 120 bp, Artificial Sequence
  ENSG00000244462_20 (sequence is synthesized)
taggcctggtatgccttcagttggaaacagtggtttgcctggtctaggactggatgttccgggttttggaggtggaccaaacaatttaagtgggccatcgggatttggagggggccctca

SEQ ID NO: 777621 - DNA, 120 bp, Artificial Sequence
  ENSG00000244462_21 (sequence is synthesized)
gaattttggaaatggccctggtagcttaggcggtcccccggggtttggaagtggccctcctggtcttggaagtgcccctgggcatttgggtgggccaccagcttttgggcctggccccgg

SEQ ID NO: 777622 - DNA, 120 bp, Artificial Sequence
  ENSG00000244462_22 (sequence is synthesized)
tctagttctggaaaaccaggaccgacagtaattaaagtgcaaaacatgccctttactgtgtctattgatgagattttagatttcttttatggctatcaagtaatcccaggctcagtgtgt

SEQ ID NO: 777623 - DNA, 120 bp, Artificial Sequence
  ENSG00000244462_23 (sequence is synthesized)
ttaaaatacaatgaaaaaggtatgcccacaggtgaagccatggtggcctttgagtctcgggatgaagccacagctgctgtcattgacttaaatgacaggcctataggttcaagaaaagta

SEQ ID NO: 777624 - DNA, 120 bp, Artificial Sequence
  ENSG00000244462_24 (sequence is synthesized)
aaacttgtattagggtagccattcacatcattttttatagggtagatcttcatattgctgtgattaatgcatccagattgttttcctagtatttccaggttagaacctgtggattgtttc

SEQ ID NO: 777625 - DNA, 120 bp, Artificial Sequence
  ENSG00000244462_25 (sequence is synthesized)
aattgcatatagcttggtttccataacatagagcattggttgactgtttacagaagactcactcaccaggataaacattgctgtatgttacagtaaagctatctggagagaacacataaa

SEQ ID NO: 777626 - DNA, 120 bp, Artificial Sequence
  ENSG00000244462_26 (sequence is synthesized)
tgattttggcataccattagagaaaccatttgtaaaactcaaatgaccacataaagcttatcaaggagtctagattggttttgttttataccatatgggatgaagaaaatagaaatgtca

SEQ ID NO: 777627 - DNA, 120 bp, Artificial Sequence
  ENSG00000244462_27 (sequence is synthesized)
gtagaactcattgagggtgctcttgccagctgctgaaaatagaagttggctactctcagaatttggtttaaagctggacagatttgctttgttatagggtaaagctttgtctaaagtcct

SEQ ID NO: 777628 - DNA, 120 bp, Artificial Sequence
  ENSG00000244462_28 (sequence is synthesized)
cattttcttttaaaattgaataaaatttctgtatacagattcattgtatgtacctttattgcttcttaagggtccttgctgtatagacagtcctgcttcagaagttgctgctttgtttgt

SEQ ID NO: 777629 - DNA, 120 bp, Artificial Sequence
  ENSG00000244462_29 (sequence is synthesized)
ctaattgactcatttgtaaatgagcagaactgttttgttggtttttttccctaaatataaaagtccacacttcgtttgtgctataacctcaaactttgatttctaatgtcacacttaaaa

SEQ ID NO: 777630 - DNA, 120 bp, Artificial Sequence
  ENSG00000244462_30 (sequence is synthesized)
ctgtgtggaataagacttttgccataaaaataaactatggagtcctttatctaccagagcctttttggtttgaccgccacgatttaggttagtcagtttaaaaattgttcatgttgtttg

SEQ ID NO: 777631 - DNA, 120 bp, Artificial Sequence
  ENSG00000244462_31 (sequence is synthesized)
gatggtatcgaaaaccagaaaccacttttaataatgtgtttaagatacttgatttgaagtccttttcatatggactaattgtagtatcaatttcctcctgtcccgattatgtgaaatttt

SEQ ID NO: 777632 - DNA, 120 bp, Artificial Sequence
  ENSG00000244462_32 (sequence is synthesized)
ggcctttaaacaaagaggggcccattcataagaaagtgttatatctaggtttttaaaactgaagttgaaattatctttgttagcagtagtagtatagaataaaagatccgtatgctggtt

SEQ ID NO: 777633 - DNA, 120 bp, Artificial Sequence
  ENSG00000244462_33 (sequence is synthesized)
cgtagattgatacgtgttagtcctgttatttggaggctttttggcatagttgttcgatcaggagcctgtttactaaaagtcttcatacagagtacaagtgcagccgccagaggagaaaat

SEQ ID NO: 777634 - DNA, 120 bp, Artificial Sequence
  ENSG00000244462_34 (sequence is synthesized)
tgagattcttgaccctttcatactcttttctttggtattcaggacactaaggcaggaggaccacatgagttctggttggtaagtgtccttgtcatgaaaacacttgccttacaaggctct

SEQ ID NO: 777635 - DNA, 120 bp, Artificial Sequence
  ENSG00000244462_35 (sequence is synthesized)
aattatgatttccctagtcagtgctctgaagatgtgtcacattatattataaacaatacggaaggggagataggtgagatgatatgaaaaacaaattttctcactgtcataaaaggctct

SEQ ID NO: 777636 - DNA, 120 bp, Artificial Sequence
  ENSG00000244462_36 (sequence is synthesized)
aattatggttactttccttgtgatgaaaaacttggccttacagggctctagttatggttactttccctagtcaatgctctgaaaatgtgtcacattataaacaatacagaaggagagata

SEQ ID NO: 777637 - DNA, 120 bp, Artificial Sequence
  ENSG00000244462_37 (sequence is synthesized)
gatgagagatcatgaaaaccaaattttatcttttacatggcccctttgtcttcgtttgaaacatccccaacatttcctacaaatcagcgtagttacaaaggggtcagtcttttaaaataa

SEQ ID NO: 777638 - DNA, 120 bp, Artificial Sequence
  ENSG00000244462_38 (sequence is synthesized)
gtatttcctattaaactatatatatatacagtgcctttttggtgttgtgagtcagtggaacactgaaatacagcggttgtgtaatttaagagtggcaacagtttcatttgataagatttg

SEQ ID NO: 777639 - DNA, 120 bp, Artificial Sequence
  ENSG00000244462_39 (sequence is synthesized)
aaaaggctttttatcactacaatcttagaggattgacagtacaggatttttgtttaagagaaggattgtttagactcaagaggtgactatgttgtgggtcttttgataattcatgaatac

SEQ ID NO: 777640 - DNA, 120 bp, Artificial Sequence
  ENSG00000244462_40 (sequence is synthesized)
agatttgctttgaccgatcactagatactgcctcctcaatttcaaaagcaatataacgtttgtatatgctgtttaatttaagttaatgttaagtaatcatttctcattccaaagacaatg

SEQ ID NO: 777641 - DNA, 120 bp, Artificial Sequence
  ENSG00000244462_41 (sequence is synthesized)
caaaaaacttcagcactgcttgagagttgtatttcagccacagatattttctccattggaaagctattttcattttagaaaaatgggttgtttgaagatgaaagtcttttatcttttttc

SEQ ID NO: 777642 - DNA, 120 bp, Artificial Sequence
  ENSG00000244462_42 (sequence is synthesized)
acaatttattttggttatatgttcgtacattcttattaaatatttcatacactttattgcaactactttgttatttctacatcttagataaatgctgaaaaggaaaacgatttcattgtt

SEQ ID NO: 777643 - DNA, 120 bp, Artificial Sequence
  ENSG00000244462_43 (sequence is synthesized)
catctaattaaataaattaaaagagcggtttgtgtagaaattggagagaactatgttttatatgaatcacaacagtgctcgttgtggactgtaattaaatgctttgccctctggaacttg

SEQ ID NO: 777644 - DNA, 120 bp, Artificial Sequence
  ENSG00000244462_44 (sequence is synthesized)
atttattaacagtgctaactgctaaggatactgtttatcttgttctgggcattggagtttcagtttttaaaaaattcttgaaaatgtattctgtgaaactactcatacctctcttcctgc

SEQ ID NO: 777645 - DNA, 120 bp, Artificial Sequence
  ENSG00000244462_45 (sequence is synthesized)
gaattttctcctaagaactaggtttggggtagaaatgaattgacattattttctcatttgctttgtatggtatgaaggatttgtaaagctttgctcaaagttgtgtgcatttgtaaacac

SEQ ID NO: 777646 - DNA, 120 bp, Artificial Sequence
  ENSG00000244462_46 (sequence is synthesized)
tatcatgatattttcaattttatgtgtaaattttattgtctgtttttggtgactctgacattaatggaagagaatattttccattagatttaattttttttcctctcccttctgattttt

SEQ ID NO: 777647 - DNA, 120 bp, Artificial Sequence
  ENSG00000244462_47 (sequence is synthesized)
tttttattggtgttcatttttcttttgatttaaaggattagagaaatctacaaatgtatgtcataaataagcaaatttgtaaacttttctgaactttagtgaaacatttagttcacaagc

SEQ ID NO: 777648 - DNA, 120 bp, Artificial Sequence
  ENSG00000244462_48 (sequence is synthesized)
ataatttggaggtgtgttctgtgtttacacagtagtttggatgtacaattattattagtggctttttaaaaaatgaaacagtgttaagtgaaatgtagttcctagctttgtactccaagt

SEQ ID NO: 777649 - DNA, 120 bp, Artificial Sequence
  ENSG00000244462_49 (sequence is synthesized)
tgtcaaagcatcaacaatgaaaattcgattaggaaactttatttaaaatttcaggtagtaatattcagtgtagttaaggccagtcttaacccactggatgaaaatctaggactgtatgga

SEQ ID NO: 777650 - DNA, 120 bp, Artificial Sequence
  ENSG00000244462_50 (sequence is synthesized)
agtaagcaaacattacatttttaggtggaaatagtcagccttgcataaaaacaaggatgcgtgaaagccttaaattccagctcccttttactggagtctgtggttgtgtacaggtatggg

SEQ ID NO: 777651 - DNA, 120 bp, Artificial Sequence
  ENSG00000244462_51 (sequence is synthesized)
ccaagtgtaaaatctcatcaattttaagaacactcgggaaatgagtaaagaaaatgtaaaattgctgctagtcaaatcttttggaaagaatttctggaagtggtcactttaaaaattatt

SEQ ID NO: 777652 - DNA, 120 bp, Artificial Sequence
  ENSG00000244462_52 (sequence is synthesized)
ttccacccttgcaaaattgccacatttaaattgttttactggcagttctatagtagtccagactttagaaaccaaacacaacaaaatggcttgttgccaatatggccacaacattgccag

SEQ ID NO: 777653 - DNA, 120 bp, Artificial Sequence
  ENSG00000244462_53 (sequence is synthesized)
caaatactgccttggcatcactcagcagaggtttttgtttataaagatgaagtcttgaatactgttcaataaacttgtcaaaaaataaaacaggctgatgcttttaatgctttaactgca

SEQ ID NO: 777654 - DNA, 120 bp, Artificial Sequence
  ENSG00000244462_54 (sequence is synthesized)
ctggaacgcggagccgctgagcgggccgacggccattttgtgaagcggcgaaggagtctaaaagttggttttaattggttgcccacaggattgacttggcctctacttcttgttaaggaa

SEQ ID NO: 777655 - DNA, 120 bp, Artificial Sequence
  ENSG00000244462_55 (sequence is synthesized)
aaccacgccgttcctcccccttctggaacgcggagccgctgagcgggccgacggccattttgtgaagcggcgaaggaggattgacttggcctctacttcttgttaaggaaattcatctct

SEQ ID NO: 777656 - DNA, 120 bp, Artificial Sequence
  ENSG00000244462_56 (sequence is synthesized)
cggcgaaggaggtggtggctgcgttgggctccgggaagccgttcgggctggggctgtcggccgcggggcggaggcactcgcgcgggggtctaaaagttggttttaattggttgcccacag

SEQ ID NO: 777657 - DNA, 120 bp, Artificial Sequence
  ENSG00000244474_0 (sequence is synthesized)
acagcgtggggtggacagtcagctgtcggtggcttctgctgagatggccagaggactccaggttcccctgccgcggctggccacaggactgctgctcctcctcagtgtccagccctgggc

SEQ ID NO: 777658 - DNA, 120 bp, Artificial Sequence
  ENSG00000244474_1 (sequence is synthesized)
tgagagtggaaaggtgttggtggtgcccactgatggcagcccctggctcagcatgcgggaggccttgcgggagctccatgccagaggccaccaggcggtggtcctcaccccagaggtgaa

SEQ ID NO: 777659 - DNA, 120 bp, Artificial Sequence
  ENSG00000244474_2 (sequence is synthesized)
tatgcacatcaaagaagagaaatttttcaccctgacagcctatgctgttccatggacccagaaggaatttgatcgcgttacgctgggctacactcaagggttctttgaaacagaacatct

SEQ ID NO: 777660 - DNA, 120 bp, Artificial Sequence
  ENSG00000244474_3 (sequence is synthesized)
tctgaagagatattctagaagtatggcaattatgaacaatgtatctttggcccttcataggtgttgtgtggagctactgcataatgaggccctgatcaggcacctgaatgctacttcctt

SEQ ID NO: 777661 - DNA, 120 bp, Artificial Sequence
  ENSG00000244474_4 (sequence is synthesized)
tgatgtggttttaacagaccccgttaacctctgtggggcggtgctggctaagtacctgtcgattcctgctgtgtttttttggaggtacattccatgtgacttagactttaagggcacaca

SEQ ID NO: 777662 - DNA, 120 bp, Artificial Sequence
  ENSG00000244474_5 (sequence is synthesized)
gtgtccaaatccttcctcctatattcctaagttactaacgaccaattcagaccacatgacattcctgcaaagggtcaagaacatgctctaccctctggccctgtcctacatttgccatac

SEQ ID NO: 777663 - DNA, 120 bp, Artificial Sequence
  ENSG00000244474_6 (sequence is synthesized)
tttttctgccccttatgcaagtcttgcctctgagctttttcagagagaggtgtcagtggtggatcttgtcagctatgcatccgtgtggctgttccgaggggactttgtgatggactaccc

SEQ ID NO: 777664 - DNA, 120 bp, Artificial Sequence
  ENSG00000244474_7 (sequence is synthesized)
caggccgatcatgcccaacatggtcttcattgggggcatcaactgtgccaacgggaagccactatctcaggaatttgaagcctacattaatgcttctggagaacatggaattgtggtttt

SEQ ID NO: 777665 - DNA, 120 bp, Artificial Sequence
  ENSG00000244474_8 (sequence is synthesized)
ctctttgggatcaatggtctcagaaattccagagaagaaagctatggcaattgctgatgctttgggcaaaatccctcagacagtcctgtggcggtacactggaacccgaccatcgaatct

SEQ ID NO: 777666 - DNA, 120 bp, Artificial Sequence; identical to SEQ ID NO: 773385
  ENSG00000244474_9 (sequence is synthesized)

SEQ ID NO: 777667 - DNA, 120 bp, Artificial Sequence; identical to SEQ ID NO: 773386
  ENSG00000244474_10 (sequence is synthesized)

SEQ ID NO: 777668 - DNA, 120 bp, Artificial Sequence; identical to SEQ ID NO: 773387
  ENSG00000244474_11 (sequence is synthesized)

SEQ ID NO: 777669 - DNA, 120 bp, Artificial Sequence; identical to SEQ ID NO: 773388
  ENSG00000244474_12 (sequence is synthesized)

SEQ ID NO: 777670 - DNA, 120 bp, Artificial Sequence; identical to SEQ ID NO: 773389
  ENSG00000244474_13 (sequence is synthesized)

SEQ ID NO: 777671 - DNA, 120 bp, Artificial Sequence; identical to SEQ ID NO: 773390
  ENSG00000244474_14 (sequence is synthesized)

SEQ ID NO: 777672 - DNA, 120 bp, Artificial Sequence; identical to SEQ ID NO: 773391
  ENSG00000244474_15 (sequence is synthesized)

SEQ ID NO: 777673 - DNA, 120 bp, Artificial Sequence; identical to SEQ ID NO: 773392
  ENSG00000244474_16 (sequence is synthesized)

SEQ ID NO: 777674 - DNA, 120 bp, Artificial Sequence; identical to SEQ ID NO: 773393
  ENSG00000244474_17 (sequence is synthesized)

SEQ ID NO: 777675 - DNA, 120 bp, Artificial Sequence; identical to SEQ ID NO: 773394
  ENSG00000244474_18 (sequence is synthesized)

SEQ ID NO: 777676 - DNA, 120 bp, Artificial Sequence
  ENSG00000244474_19 (sequence is synthesized)
agcatgttcagatgagaggagacggaacacggggacacaccagcttgagcaagggacaacaggggaggactgatgactgacttcccacctttgagttacaaggagaacatcatgcgcctc

SEQ ID NO: 777677 - DNA, 120 bp, Artificial Sequence
  ENSG00000244476_0 (sequence is synthesized)
gcacttggatctctcaaatggtgcagtgactcggataccttccctagtgccattacagtactggagactgccagctagatccatcacacccaagtgaagctgtggaaaagcccttaaact

SEQ ID NO: 777678 - DNA, 120 bp, Artificial Sequence
  ENSG00000244476_1 (sequence is synthesized)
ccagagccagaaccagcaacctcagctccggaatacacttgcaaggcactggaagatctaaaattcctctttaaacaaaaagataagtaatgccccaccaacatcctttcacctcaaagt

SEQ ID NO: 777679 - DNA, 120 bp, Artificial Sequence
  ENSG00000244476_2 (sequence is synthesized)
aaggtgatcccaatactagaaattttactggcaattgctctgattgttatcactattttaaccctaacttgtacaccaccaggagttccattggcagctcgttttgtgaccagtttctct

SEQ ID NO: 777680 - DNA, 120 bp, Artificial Sequence
  ENSG00000244476_3 (sequence is synthesized)
taggtcaccatgggcctgctcctgctggttctcattctcacgccttcactagcagcctaccgccatcctgatttcccgttattggaaaaagctcagcaactgctccaaagtacaggatcc

SEQ ID NO: 777681 - DNA, 120 bp, Artificial Sequence
  ENSG00000244476_4 (sequence is synthesized)
ccttactccaccaattgctggttatgtactagctcttccactgaaacaccagggacagcttatccagcctcgcccagagaatggacaagcatagaggcggaattacatatttcctatcga

SEQ ID NO: 777682 - DNA, 120 bp, Artificial Sequence
  ENSG00000244476_5 (sequence is synthesized)
tgggaccctaatctgaaaggactgatgaggcctgcaaatagtcttctttcaacagtaaagcaagatttccctgatatccgccagaaacctcccattttcggacccatctttactaatatc

SEQ ID NO: 777683 - DNA, 120 bp, Artificial Sequence
  ENSG00000244476_6 (sequence is synthesized)
aacctaatgggaatagcccctatttgtgttatggccaaaaggaaaaatggaacaaatgtaggcactcttccaagtacagtctgtaatgttactttcactgtagattctaaccaacagact

SEQ ID NO: 777684 - DNA, 120 bp, Artificial Sequence
  ENSG00000244476_7 (sequence is synthesized)
taccaaacatacacccacaaccaattccgccatcaaccaagattccccaaacctccaaatattacttttcctcagggaactttgctagataaatccagccggttttgccagggacgccca

SEQ ID NO: 777685 - DNA, 120 bp, Artificial Sequence
  ENSG00000244476_8 (sequence is synthesized)
agctcatgcagtactcgaaacttctggttccggcctgctgattataaccaatgtctgcaaatttccaacctcagctctacagcggaatgggttctattggaccaaactcgaaattctctt

SEQ ID NO: 777686 - DNA, 120 bp, Artificial Sequence
  ENSG00000244476_9 (sequence is synthesized)
ttttgggaaaataaaaccaagggagctaaccagagccaaacaccctgcgtccaagtcttagcaggcatgactatagccaccagctacctgggcatatcagcagtctcagaattttttgga

SEQ ID NO: 777687 - DNA, 120 bp, Artificial Sequence
  ENSG00000244476_10 (sequence is synthesized)
acctccctcacccccttatttcatttccatatctctacatgccttaaaactcaaggagccttttatatttgtggccagtcgattcaccaatgcctccccagtaactggactggaacttgt

SEQ ID NO: 777688 - DNA, 120 bp, Artificial Sequence
  ENSG00000244476_11 (sequence is synthesized)
accataggctatgtaaccccagacatcttcatagcccctggcaatctctctcttccaataccaatctatgggaattccccgttgcccagggtgaggagggcaatccatttcattcccctt

SEQ ID NO: 777689 - DNA, 120 bp, Artificial Sequence
  ENSG00000244476_12 (sequence is synthesized)
ctcgcgggactcggcattctagctggtacgggaaccggaattgctggaatcacaaaagcttccctcacctatagccagctctcaaaggaaatagccaacaacattgacaccatggctaaa

SEQ ID NO: 777690 - DNA, 120 bp, Artificial Sequence
  ENSG00000244476_13 (sequence is synthesized)
catgttaacggcagcacagggaggaatttgtttggccttagatgaaaaatgttgcttttgggtaaatcaatcaggaaaagtacaagacaacatcagacaactcctaaatcaagcctccag

SEQ ID NO: 777691 - DNA, 120 bp, Artificial Sequence
  ENSG00000244476_14 (sequence is synthesized)
tttacgggaacgagccactcagggttggttaaattgggaaggaacttggaaatggttctcttgggttcttccccttacaggcccacttgttagtctcctacttttgctcctttttggtcc

SEQ ID NO: 777692 - DNA, 120 bp, Artificial Sequence
  ENSG00000244476_15 (sequence is synthesized)
atgtctcctaaatctaataacccaatttgtctcctctcgccttcaggccataaagctccagacgaatctcagtgcaggacgccatcctcgcaatattcaagagtcacccttctaaggagg

SEQ ID NO: 777693 - DNA, 120 bp, Artificial Sequence
  ENSG00000244476_16 (sequence is synthesized)
acccctagactgctcgctagtggaacacgacagaggcgaaatcctgccccgtctcccgtggacctggctggatatggtttttgccaatccacagagccatcctgccctgacagctagcaa

SEQ ID NO: 777694 - DNA, 120 bp, Artificial Sequence
  ENSG00000244476_17 (sequence is synthesized)
gaggccaagacccacagaacaaccactacagcccctctgtcagcaggaagcagttaaagaagactgaccttcgtccattttcccagataattgggtcttggactcttgagggggggaaat

SEQ ID NO: 777695 - DNA, 120 bp, Artificial Sequence
  ENSG00000244476_18 (sequence is synthesized)
gttggagcaggtagctagtcagacatgagcagggcaggggagggccccctcaccaggaatgtcaggcaaccatcaggtgatggtgaggcagttgttaagctgtgtctctaacataataat

SEQ ID NO: 777696 - DNA, 120 bp, Artificial Sequence
  ENSG00000244476_19 (sequence is synthesized)
gagtggcagctggcgccagggaacgatggcctcccaatagataggaaacacctgaagctggtgatcagccacttcctgataagatctcaggagttgggtgcgcaggctcaagcatgcacc

SEQ ID NO: 777697 - DNA, 120 bp, Artificial Sequence
  ENSG00000244476_20 (sequence is synthesized)
ctaagaggcaaaatagtggcatttaactcatatatgaccttcctttaggaaggcttgactggtaagggaaaaactcctccagtgaacacgtgcacaacttcagtaaaaacactgcacatg

SEQ ID NO: 777698 - DNA, 120 bp, Artificial Sequence
  ENSG00000244476_21 (sequence is synthesized)
cgtcccctcccaagtgctggcaggccactgtgcatgcagacagcccgccccaaagaaaaatcagaggaggagaaatggaaaccccggaacaatgccaatgtataaaaccccaagtcaagg

SEQ ID NO: 777699 - DNA, 120 bp, Artificial Sequence
  ENSG00000244476_22 (sequence is synthesized)
gcctaccaaggcaattggatctctcaagtcacccgcttggctctcttcaagtgcactttgcttccttttgttcttgctctaaaacttttactcctgctataaaacttgccttggactatc

SEQ ID NO: 777700 - DNA, 120 bp, Artificial Sequence
  ENSG00000244476_23 (sequence is synthesized)
atgctaccttacgcctccccggccaaattccctcctctcctccggggggcaaggatggagtctgctgcagacccattggatttgctgctggtaacagttccaccatttaggttccagcac

SEQ ID NO: 777701 - DNA, 120 bp, Artificial Sequence
  ENSG00000244476_24 (sequence is synthesized)
caagcaaactaacacccgactcagtgtaaacagccaaacaagcttaaccaattagaaaccaccatctaacctctaactaggtcctttcaactttaaccaagtattttctttgtcttgctt

SEQ ID NO: 777702 - DNA, 120 bp, Artificial Sequence
  ENSG00000244476_25 (sequence is synthesized)
ctgtgggaaccttataaaattttcccccttgtacctctgtagtagagacccagttgcttgcagtttggccctgcctgttcatgaatcacccttgctcaaataaactctctaaaatgctaa

SEQ ID NO: 777703 - DNA, 120 bp, Artificial Sequence
  ENSG00000244482_0 (sequence is synthesized)
catccctctgcagagcccggggtcaccaggaggagacgccatgacccccaccctcgcagccctgctctgcctagggctgagtctgggccccaggacccacgtgcaggcagggcccttccc

SEQ ID NO: 777704 - DNA, 120 bp, Artificial Sequence
  ENSG00000244482_1 (sequence is synthesized)
caaacccaccctctgggctgagccaggctctgtgatcagctgggggagccccgtgaccatctggtgtcaggggagcctggaggcccaggagtaccgactggataaagagggaagcccaga

SEQ ID NO: 777705 - DNA, 120 bp, Artificial Sequence
  ENSG00000244482_2 (sequence is synthesized)
gccctgggacagaaataacccactggaacccaagaacaaggccagattctccatcccatccataacagagcaccatgcggggagataccgctgccactattacagctctgcaggctggtc

SEQ ID NO: 777706 - DNA, 120 bp, Artificial Sequence
  ENSG00000244482_3 (sequence is synthesized)
agagcccagcgaccccctggagctggtgatgacaggagcctatagcaaacccaccctctcagccctgcccagccctgtggtggcctcaggggggaatatgaccctccaatgtggctcaca

SEQ ID NO: 777707 - DNA, 120 bp, Artificial Sequence
  ENSG00000244482_4 (sequence is synthesized)
gaagggatatcaccattttgttctgatgaaggaaggagaacaccagctcccccggaccctggactcacagcagctccacagtggggggttccaggccctgttccctgtgggccccgtgaa

SEQ ID NO: 777708 - DNA, 120 bp, Artificial Sequence
  ENSG00000244482_5 (sequence is synthesized)
ccccagccacaggtggaggttcacatgctattactattatatgaacaccccccgggtgtggtcccaccccagtgaccccctggagattctgccctcaggcgtgtctaggaagccctccct

SEQ ID NO: 777709 - DNA, 120 bp, Artificial Sequence
  ENSG00000244482_6 (sequence is synthesized)
cctgaccctgcagggccctgtcctggcccctgggcagagcctgaccctccagtgtggctctgatgtcggctacgacagatttgttctgtataaggagggggaacgtgacttcctccagcg

SEQ ID NO: 777710 - DNA, 120 bp, Artificial Sequence
  ENSG00000244482_7 (sequence is synthesized)
tggtgcacacaacctctcctccgagtggtcggcccccagcgaccccctgaacatcctgatggcaggacagatctatgacaccgtctccctgtcagcacagccgggccccacagtggcctc

SEQ ID NO: 777711 - DNA, 120 bp, Artificial Sequence
  ENSG00000244482_8 (sequence is synthesized)
aggagagaacgtgaccctgctgtgtcagtcatggtggcagtttgacactttccttctgaccaaagaaggggcagcccatcccccactgcgtctgagatcaatgtacggagctcataagta

SEQ ID NO: 777712 - DNA, 120 bp, Artificial Sequence
  ENSG00000244482_9 (sequence is synthesized)
ccaggctgaattccccatgagtcctgtgacctcagcccacgcggggacctacaggtgctacggctcatacagctccaacccccacctgctgtctttccccagtgagcccctggaactcat

SEQ ID NO: 777713 - DNA, 120 bp, Artificial Sequence
  ENSG00000244482_10 (sequence is synthesized)
ggtctcaggacactctggaggctccagcctcccacccacagggccgccctccacacctgcctcacacgccaaggattacacagtggagaatctcatccgcatgggcatggcaggcttggt

SEQ ID NO: 777714 - DNA, 120 bp, Artificial Sequence
  ENSG00000244482_11 (sequence is synthesized)
cctggtgttcctcgggattctgttatttgaggctcagcacagccagagaaacccccaagatgcagccgggaggtgaacagcggagaggacaatgcacccttcagcgtggtggagcctcag

SEQ ID NO: 777715 - DNA, 120 bp, Artificial Sequence
  ENSG00000244482_12 (sequence is synthesized)
ggacagatctgatgatcccagaaggctctggaggacaatctaggacctccagaggggggtgagatttcaggccacacactgtggaaggtaatcatgtctgatcacaaattttgggtctcc

SEQ ID NO: 777716 - DNA, 120 bp, Artificial Sequence
  ENSG00000244482_13 (sequence is synthesized)
accttacttccaatctatgttgtgaatgcccagttgagacccacggaaaagagctcatgggtgagtgtgaagtgcttctctgtcttaagttcccagagatccttgcctcttggaggccag

SEQ ID NO: 777717 - DNA, 120 bp, Artificial Sequence
  ENSG00000244482_14 (sequence is synthesized)
caaacactaactcttgaggaattcatgacaatatcatctgattcctccttcccagcttgtatggcagtctcccaccctcatgtgttcaatctgatgatcccaggaggttctggaacaaaa

SEQ ID NO: 777718 - DNA, 120 bp, Artificial Sequence
  ENSG00000244482_15 (sequence is synthesized)
agtctcccaccctcatgtgttcaatctgatgatcccaggaggttctggaacaaaatctacagcctatgctttctggactatctgtcgatcattcctgaagagagggatcaatgttgagac

SEQ ID NO: 777719 - DNA, 84 bp, Artificial Sequence
  ENSG00000244482_16 (sequence is synthesized)
tctgtcgatcattcctgaagagagggatcaatgttgagacggggtttcaccatgttgctctagcgtcggctttccatagtgctg

SEQ ID NO: 777720 - DNA, 120 bp, Artificial Sequence
  ENSG00000244482_17 (sequence is synthesized)
aatttctgtgctgggaacattccaaatcttcatttctcactcatgtggaaaatacaataatctgttgctaactatggtcaccctactgagctctcaggccctggaacttactccttctct

SEQ ID NO: 777721 - DNA, 120 bp, Artificial Sequence
  ENSG00000244482_18 (sequence is synthesized)
ccacctgtatttctgcacccgtccaccaacctctctccatccctgtcctccacactcccttgccagcctctgttgacaaccattctactctctgccatcacaaggcccacttttgtagct

SEQ ID NO: 777722 - DNA, 120 bp, Artificial Sequence
  ENSG00000244482_19 (sequence is synthesized)
tccgcgtgagtgagaacatgctcctctttctgggcctggcttatttcactgaacataatgtcttccagattcatctgtgttgctgaacatggtacaatttccttctttttatgcctgaat

SEQ ID NO: 777723 - DNA, 120 bp, Artificial Sequence
  ENSG00000244482_20 (sequence is synthesized)
gaacatggtacaatttccttctttttatgcctgaatattatttcattgtgtatatagaccacatgttccttatccattcatccattgatggacataggttgattccatatcttggctatt

SEQ ID NO: 777724 - DNA, 120 bp, Artificial Sequence
  ENSG00000244482_21 (sequence is synthesized)
gggtcaccaggaggagacgccatgacccccaccctcgcagccctgctctgcctaggtgagatttcaagatggggagggggagatctgagtcttggaggaaccccaccccacacacaagcc

SEQ ID NO: 777725 - DNA, 120 bp, Artificial Sequence
  ENSG00000244482_22 (sequence is synthesized)
ctggtccatcaggagacctcaaaagctcaggaggcaccagggcggggaggacctgctcaggcttcagggcaaatgcctcacagggaattctcttccagggctgagtctgggccccaggac

SEQ ID NO: 777726 - DNA, 120 bp, Artificial Sequence
  ENSG00000244486_0 (sequence is synthesized)
gccggggggccgccgtcaccgctgctgccgtcgctgctgctgctgctgctgctctggatgctgccggacaccgtggcgcctcaggaactgaaccctcgcggccgcaacgtgtgccgtgct

SEQ ID NO: 777727 - DNA, 120 bp, Artificial Sequence
  ENSG00000244486_1 (sequence is synthesized)
cccggctcccaggtgcccacgtgctgcgctggctggaggcagcaaggggacgagtgtgggattgcggtgtgcgaaggcaactccacgtgctcagagaacgaggtgtgcgtgaggcctggc

SEQ ID NO: 777728 - DNA, 120 bp, Artificial Sequence
  ENSG00000244486_2 (sequence is synthesized)
gagtgccgctgccgccacggctacttcggtgccaactgcgacaccaagtgcccgcgccagttctggggccccgactgcaaggagctgtgtagctgccacccacacgggcagtgcgaggac

SEQ ID NO: 777729 - DNA, 120 bp, Artificial Sequence
  ENSG00000244486_3 (sequence is synthesized)
gtgacaggccagtgtacttgtcacgcgcggcgctggggcgcgcgctgcgagcatgcgtgccagtgccagcacggcacgtgccacccgcggagcggcgcgtgccgctgtgagcccggctgg

SEQ ID NO: 777730 - DNA, 120 bp, Artificial Sequence
  ENSG00000244486_4 (sequence is synthesized)
tggggcgcgcagtgcgccagcgcgtgctactgcagcgccacgtcgcgctgcgacccacagaccggcgcctgcctgtgccacgcaggctggtggggccgcagctgcaacaaccagtgcgcc

SEQ ID NO: 777731 - DNA, 120 bp, Artificial Sequence
  ENSG00000244486_5 (sequence is synthesized)
tgcaactcgtctccctgcgagcagcagagcggccgctgtcagtgccgcgagcgtacgttcggcgcgcgctgcgatcgctactgccagtgcttccgcggccgctgccaccctgtggacggc

SEQ ID NO: 777732 - DNA, 120 bp, Artificial Sequence
  ENSG00000244486_6 (sequence is synthesized)
acgtgtgcctgcgagccgggctaccgcggcaagtactgtcgcgagccgtgccccgccggcttctacggcttgggctgtcgccgccggtgtggccagtgcaagggccagcagccgtgcacg

SEQ ID NO: 777733 - DNA, 120 bp, Artificial Sequence
  ENSG00000244486_7 (sequence is synthesized)
gtggccgagggccgctgcttgacgtgcgagcccggctggaacggaaccaagtgcgaccagccttgcgccaccggtttctatggcgagggctgcagccaccgctgtccgccatgccgcgac

SEQ ID NO: 777734 - DNA, 120 bp, Artificial Sequence
  ENSG00000244486_8 (sequence is synthesized)
gggcatgcctgtaaccatgtcaccggcaagtgtacgcgctgcaacgcgggctggatcggcgaccggtgcgagaccaagtgtagcaatggcacttacggcgaggactgcgccttcgtgtgc

SEQ ID NO: 777735 - DNA, 120 bp, Artificial Sequence
  ENSG00000244486_9 (sequence is synthesized)
gccgactgcggcagcggacactgcgacttccagtcggggcgctgcctgtgcagccctggcgtccacgggccccactgtaacgtgacgtgcccgcccggactccacggcgcggactgtgct

SEQ ID NO: 777736 - DNA, 120 bp, Artificial Sequence
  ENSG00000244486_10 (sequence is synthesized)
caggcctgcagctgccacgaggacacgtgcgacccggtcactggtgcctgccacctagaaaccaaccagcgcaagggcgtgatgggcgcgggcgcgctgctcgtcctgctcgtctgcctg

SEQ ID NO: 777737 - DNA, 120 bp, Artificial Sequence
  ENSG00000244486_11 (sequence is synthesized)
ctgctctcgctgctcggctgctgctgcgcttgccgcggcaaggaccctacgcgccgaccccgcccccgcagggagctttcgcttgggaggaagaaggcgccgcaccgactatgcgggcgc

SEQ ID NO: 777738 - DNA, 120 bp, Artificial Sequence
  ENSG00000244486_12 (sequence is synthesized)
catcagcatgaagctgccccggatcccgctccggaggcagaaactacccaaagtcgtagtggcccaccacgacctggataacacactcaactgcagcttcctggagccaccctcagggct

SEQ ID NO: 777739 - DNA, 120 bp, Artificial Sequence
  ENSG00000244486_13 (sequence is synthesized)
ggagcagccctcaccatcctggtcctctcgggcctccttctcctcgtttgacaccactgatgaaggccctgtgtactgtgtaccccatgaggaggcaccagcggagagccgggaccccga

SEQ ID NO: 777740 - DNA, 120 bp, Artificial Sequence
  ENSG00000244486_14 (sequence is synthesized)
agtccccactgtccctgccgaggcgccggcgccgtcccctgtgcccttgaccacgccagcctccgccgaggaggcgatacccctccccgcgtcctccgacagcgagcggtcggcgtccag

SEQ ID NO: 777741 - DNA, 120 bp, Artificial Sequence
  ENSG00000244486_15 (sequence is synthesized)
gcgtggcccgacgcgaggcccggccggcccgggcccggggcgagattgggggcctgtcgctgtcgccatcgcccgagcgcaggaaaccgccgccacctgaccccgccaccaagcctaagg

SEQ ID NO: 777742 - DNA, 120 bp, Artificial Sequence
  ENSG00000244486_16 (sequence is synthesized)
gccgccacctgaccccgccaccaagcctaaggtgtcctggatccacggcaagcacagcgccgctgcagctggccgtgcgccctcaccaccgccgccaggctccgaggccgcgcccagccc

SEQ ID NO: 777743 - DNA, 120 bp, Artificial Sequence
  ENSG00000244486_17 (sequence is synthesized)
cagcaagaggaaacggacgcccagcgacaaatcggcgcatacggtcgaacacggcagcccccggacccgcgacccaacgccgcggccccccgggctgcccgaggaggcgacagccctcgc

SEQ ID NO: 777744 - DNA, 120 bp, Artificial Sequence
  ENSG00000244486_18 (sequence is synthesized)
cccggcctcttggagcccacggacgccggcggtcccccgcgaagcgcgcccgaggctgcctccatgttggccgctgagctgcgcggcaagactcgcagcctgggccgcgccgaggtggcc

SEQ ID NO: 777745 - DNA, 120 bp, Artificial Sequence
  ENSG00000244486_19 (sequence is synthesized)
gctgagctgcgcggcaagactcgcagcctgggccgcgccgaggtggccctgggcgcgcagggccccagggaaaagccggcgcccccacagaaagccaagcgctccgtgccgccagcctcg

SEQ ID NO: 777746 - DNA, 120 bp, Artificial Sequence
  ENSG00000244486_20 (sequence is synthesized)
cgcgcccccagcgaccgaaaccccggggcctgagaaggcggcgaccgacttgcccgcgcctgagaccccccggaagaagacccccatccagaagccgccgcgcaagaagagccgggaggc

SEQ ID NO: 777747 - DNA, 120 bp, Artificial Sequence
  ENSG00000244486_21 (sequence is synthesized)
ggcgggcgagctgggcagggcgggcgcacccaccctgtagcaggctgtggctcgtccgcgcgcagctccctcagcttcgcagcgccgcccgccaccccacacctcccacgctaccgggca

SEQ ID NO: 777748 - DNA, 120 bp, Artificial Sequence
  ENSG00000244486_22 (sequence is synthesized)
cgggcggcctcctattggccgggcaccgcgcggctagcggaggttgcgtctcattggctcaggtcctgcagccgctcctggattggagcagtgtgctctggcgggaagggcccatcccgt

SEQ ID NO: 777749 - DNA, 120 bp, Artificial Sequence
  ENSG00000244486_23 (sequence is synthesized)
tggtcgaggcctgacaggcgcttagcgggcgactccctccccattggccgagttatggagcgctccgaccagacagcgtctcattggccaaagatgggagggttccgcttaaagaccgcc

SEQ ID NO: 777750 - DNA, 120 bp, Artificial Sequence
  ENSG00000244486_24 (sequence is synthesized)
tcttactggccaggagtggacttggttagggctaccttctcattggttgcagccagaggcacttctgcccgggctgcctctcccccgctagggcctggtgcctctggctggaggctccct

SEQ ID NO: 777751 - DNA, 120 bp, Artificial Sequence
  ENSG00000244486_25 (sequence is synthesized)
cccttggccgtcccaatagagcccggggctacttccactggccaggctcccgggcatctggttgaccccagcctggggaggagggctggtctccgctcctcaggggcttagtccgtccca

SEQ ID NO: 777752 - DNA, 120 bp, Artificial Sequence
  ENSG00000244486_26 (sequence is synthesized)
ctggaccctgggccctggccgcgggtgaggggtgagggtagggggcatcctaggggggcggctgtggcatgccttgaccctatgtcccggcagctgtaacgtgacgtgcccgcccggact

SEQ ID NO: 777753 - DNA, 120 bp, Artificial Sequence
  ENSG00000244509_0 (sequence is synthesized)
actttaaagagggctgctcaactgcaaggacgctgtaagcaggaagagaagccacagcgcttcagaaaagagtgggacagggacaagcatatctaagaggctgaacatgaatccacagat

SEQ ID NO: 777754 - DNA, 120 bp, Artificial Sequence
  ENSG00000244509_1 (sequence is synthesized)
cagaaacccgatgaaggcaatgtatccaggcacattctacttccaatttaaaaacctatgggaagccaacgatcggaacgaaacttggctgtgcttcaccgtggaaggtataaagcgccg

SEQ ID NO: 777755 - DNA, 120 bp, Artificial Sequence
  ENSG00000244509_2 (sequence is synthesized)
ctcagttgtctcctggaagacgggcgtcttccgaaaccaggtggattctgagacccattgtcatgcagaaaggtgcttcctctcttggttctgcgacgacatactgtctcctaacacaaa

SEQ ID NO: 777756 - DNA, 120 bp, Artificial Sequence
  ENSG00000244509_3 (sequence is synthesized)
gtaccaggtcacctggtacacatcttggagcccttgcccagactgtgcaggggaggtggccgagttcctggccaggcacagcaacgtgaatctcaccatcttcaccgcccgcctctacta

SEQ ID NO: 777757 - DNA, 120 bp, Artificial Sequence
  ENSG00000244509_4 (sequence is synthesized)
cttccagtatccatgttaccaggaggggctccgcagcctgagtcaggaaggggtcgctgtggagatcatggactatgaagattttaaatattgttgggaaaactttgtgtacaatgataa

SEQ ID NO: 777758 - DNA, 120 bp, Artificial Sequence
  ENSG00000244509_5 (sequence is synthesized)
tgagccattcaagccttggaagggattaaaaaccaactttcgacttctgaaaagaaggctacgggagagtctccagtgaggggtctccctgggcctcatggtctgtctcctctagcctcc

SEQ ID NO: 777759 - DNA, 120 bp, Artificial Sequence
  ENSG00000244509_6 (sequence is synthesized)
tgctcatgctgcacgggcctcccctccaccctggacccgctctgtttctgcctggtcatcctgagcccctcctggcctcagggccattccacagtgctcccctgcctcaccgcttcctcc

SEQ ID NO: 777760 - DNA, 120 bp, Artificial Sequence
  ENSG00000244509_7 (sequence is synthesized)
tcgctcttccagactcttcctgcagaggctcctttctgcctccatggctatccatccacccccacagaccccgttcctccagcctgcgtgcccctaacctggcttttcccatctccccag

SEQ ID NO: 777761 - DNA, 120 bp, Artificial Sequence
  ENSG00000244509_8 (sequence is synthesized)
tgggcatggtgactcacgcctgtaatcccccagcaatttgggaggcaaaggtgggagaatcgcgtgagcccaggagttccagaccaggctgggtcacatgacaaagccccatctctacaa

SEQ ID NO: 777762 - DNA, 90 bp, Artificial Sequence
  ENSG00000244509_9 (sequence is synthesized)
aaaaaaaaaaaaaaaaaaaaagccagatgtggtggcatgcatctgtagtccaacttgagcccgagaggtggaggctggagtgaacagaga

SEQ ID NO: 777763 - DNA, 120 bp, Artificial Sequence
  ENSG00000244509_10 (sequence is synthesized)
ttgagcccgagaggtggaggctggagtgaacagagatcgcgccactgaactcgggtctgggcaacagatagagaccctgcctgaaaataaatcgataaataaactcaacctaaacaggtg

SEQ ID NO: 777764 - DNA, 120 bp, Artificial Sequence
  ENSG00000244509_11 (sequence is synthesized)
tatatgtaagttgaaaacccgaagttttgagaaacatcctttgtaaatttcatcctatgaattgggtcattcatgtcctacccagctaaaacagaggccaggagccagggaggaaaagca

SEQ ID NO: 777765 - DNA, 120 bp, Artificial Sequence
  ENSG00000244509_12 (sequence is synthesized)
gtcaggccacacaacattgtttccgaaatggacttctctgcaagcctgactcctgagactgtgcattgtaccctgaaaccagctttatccatagcttctgcgataaatggctgtaagtct

SEQ ID NO: 777766 - DNA, 120 bp, Artificial Sequence
  ENSG00000244509_13 (sequence is synthesized)
tggactccttgctccaaacgcagcgactcagcaatagaacctcccagctcccagcccttcctagtgcccatgggctttacatagggcaagagaacatttctccttctataattgccatct

SEQ ID NO: 777767 - DNA, 120 bp, Artificial Sequence
  ENSG00000244509_14 (sequence is synthesized)
ctttgctctctcaacatggtgaacaccatccggactccgtgtatgtctcaaattacaattctttctttgcaaatgaaatatgaaatttagaggctcttctaaacactttaaatttgattt

SEQ ID NO: 777768 - DNA, 120 bp, Artificial Sequence
  ENSG00000244509_15 (sequence is synthesized)
gacattttcaaagcagatgtaagttttagagaatgagattctccataaaaatgaccctttcatgctgtggcctccatagaagatgtcccaggccaggtgcccacatggcaggcatttatt

SEQ ID NO: 777769 - DNA, 120 bp, Artificial Sequence
  ENSG00000244509_16 (sequence is synthesized)
ttctcacagatctggaagctgcaggtccaacttcgaggggtgggtggggttgtttcctctgaggccgctccttctggctggcagggagtctcttccagccgtgtcctctgtggcctttcc

SEQ ID NO: 777770 - DNA, 78 bp, Artificial Sequence
  ENSG00000244509_17 (sequence is synthesized)
gcagggagtctcttccagccgtgtcctctgtggcctttcctctatgcacacgcacctctgggatctctctgcctccaa

SEQ ID NO: 777771 - DNA, 89 bp, Artificial Sequence
  ENSG00000244509_18 (sequence is synthesized)
gttgctcctcttgtccaggctggaatgcaatggcacaatctggactcactgcaacctccgcctcccgagtttaaaggcatgcatcacca

SEQ ID NO: 777772 - DNA, 120 bp, Artificial Sequence
  ENSG00000244509_19 (sequence is synthesized)
acctcaggtgatccgcctgtctcagcctctccaagtgctgggattacaggcatcagccactatgcccggctgggatcatatgttccacacatgtttgttcaataagcatggactgcaacc

SEQ ID NO: 777773 - DNA, 120 bp, Artificial Sequence
  ENSG00000244509_20 (sequence is synthesized)
acatgtttgttcaataagcatggactgcaaccacctacatgaatattcatagctcctcctgtagcctgttgaatatgtatgtttagccaacctcttcagcataaagctcctgcccaaacc

SEQ ID NO: 777774 - DNA, 120 bp, Artificial Sequence
  ENSG00000244509_21 (sequence is synthesized)
cctcctgctcctaaatgtctgtctctggtgttaaccagaggctgctcttcccaggctgctggatggctaccttgcaggctgtcacccttaacaagaaataaagtgtcctttgcaaatgca

SEQ ID NO: 777775 - DNA, 120 bp, Artificial Sequence
  ENSG00000244509_22 (sequence is synthesized)
aaagagggctgctcaactgcaaggacgctgtaagcaggaagagaagccacagcgcttcagaaaagagtgggacagggacaagcatatctaagaggctgaacatgaatccacagatcaggt

SEQ ID NO: 777776 - DNA, 120 bp, Artificial Sequence
  ENSG00000244537_0 (sequence is synthesized)
aaaccttccaaacccaccttcctggaaatccacccagaacctccaccctctgacaccatggtcaactcctgttgtggctctgtgtgctctgaccagggctgtggcctagagaactgctgc

SEQ ID NO: 777777 - DNA, 120 bp, Artificial Sequence
  ENSG00000244537_1 (sequence is synthesized)
gagaactgctgccgtcccagctgctgccagaccacctgctgcaggaccacctgctgccgccccagctgctgtgtgtccagctgctgcagaccgcagtgctgccagtctgtgtgctgccag

SEQ ID NO: 777778 - DNA, 120 bp, Artificial Sequence
  ENSG00000244537_2 (sequence is synthesized)
agccccagctgctgccagaccacttgctgcaggaccacctgctgccgtcccagctgctgtgtgtccagctgcttcagaccccagtgctgccagtctgtgtactgccagcccacctgctgc

SEQ ID NO: 777779 - DNA, 120 bp, Artificial Sequence
  ENSG00000244537_3 (sequence is synthesized)
ctgtgtgtccacctgctgccgcccaacctgctctagtggctcttgctgctgatgccctcacctatactcacctgcctttattaaccagcattcttgatatgatccacctgtgaactgaat

SEQ ID NO: 777780 - DNA, 120 bp, Artificial Sequence
  ENSG00000244537_4 (sequence is synthesized)
catgcaaggccaattggacaacctcagttccaaccaattcttggattgagtttggcctccaaatatgctcaccaaacactatgttgctaccctctaccaaatgaatacaagtttgaattt

SEQ ID NO: 777781 - DNA, 120 bp, Artificial Sequence
  ENSG00000244537_5 (sequence is synthesized)
tctctgaaatatgtcaaccccatgttccctgaattgaaatatttgctctctaccataatttatcacatggagctattcctctatcttaaataaattttaatttttgaggcatacaaataa

SEQ ID NO: 777782 - DNA, 68 bp, Artificial Sequence
  ENSG00000244575_0 (sequence is synthesized)
caggacacagcatggacatgagggtccctgctcagctcctgggactcctgctgctctggctcccagat

SEQ ID NO: 777783 - DNA, 120 bp, Artificial Sequence
  ENSG00000244575_1 (sequence is synthesized)
ttgccgggcgagtcagggcattagcaattatttagcctggtatcagcagaaaccagggaaagttcctaagctcctgatctatgctgcatccactttgcaatcaggggtcccatctcggtt

SEQ ID NO: 777784 - DNA, 63 bp, Artificial Sequence
  ENSG00000244575_2 (sequence is synthesized)
agttcctaagctcctgatctatgctgcatccactttgcaatcaggggtcccatctcggttcag

SEQ ID NO: 777785 - DNA, 120 bp, Artificial Sequence
  ENSG00000244588_0 (sequence is synthesized)
acctcagacgaggctttgaaagtagggcgcagcctgagaggccggccggaccccgagtgcttttgttaaatacaagtaaggaacacaggcaacatgttctacacacatgtgcttatgagt

SEQ ID NO: 777786 - DNA, 120 bp, Artificial Sequence
  ENSG00000244588_1 (sequence is synthesized)
aaacgagggccattggccaaaatatggcttgcagctcactgggagaagaaactcacaaaggcccatgtatttgaatgtaatctagagataaccattgaaaaaattctttcacccaaggtg

SEQ ID NO: 777787 - DNA, 120 bp, Artificial Sequence
  ENSG00000244588_2 (sequence is synthesized)
aaaatagcacttcgaacttcaggacaccttcttttgggagttgttcgaatctataacaggaaggcaaaatatcttttggcagattgcagtgaagcatttcttaaaatgaagatgacattt

SEQ ID NO: 777788 - DNA, 120 bp, Artificial Sequence
  ENSG00000244588_3 (sequence is synthesized)
tgcccaggactggttgaccttccaaaagagaattttgaagcatcttacaatgctatcacattgccagaagaatttcatgattttgacacccaaaatatgaatgctattgatgtttcagaa

SEQ ID NO: 777789 - DNA, 120 bp, Artificial Sequence
  ENSG00000244588_4 (sequence is synthesized)
cactttactcagaaccaaagcagaccagaagaaatcactcttagagaaaattttgacaatgatctaattttccaagctgagagctttggggaggaatctgaaattctcagaagacatagc

SEQ ID NO: 777790 - DNA, 120 bp, Artificial Sequence
  ENSG00000244588_5 (sequence is synthesized)
ttctttgatgacaacatattactgaattccagtggtcctttaattgaacatagttctggaagcctcactggagaacgatctctattctatgacagtggagatgggtttggagatgaagga

SEQ ID NO: 777791 - DNA, 120 bp, Artificial Sequence
  ENSG00000244588_6 (sequence is synthesized)
gctgcaggagaaatgattgacaatctattgcaagatgatcagaatatcctgttagaagacatgcatttgaacagagaaatttccctgccttctgagcctcccaatagtttagcagttgaa

SEQ ID NO: 777792 - DNA, 120 bp, Artificial Sequence
  ENSG00000244588_7 (sequence is synthesized)
ctcagagtgtatatgtgtacctgaaaatgaaaaaatgaatgaaacaatattattatcaactgaagaggaaggatttacccttgatccaattgatatttcagacattgctgagaaaaggaa

SEQ ID NO: 777793 - DNA, 120 bp, Artificial Sequence
  ENSG00000244588_8 (sequence is synthesized)
aggcaaaaagaggagattgctcatagatcctatcaaggagctcagtagcaaagttatacataaacagcttacttcctttgcggacacactcatggttttggaacttgcacctcctaccca

SEQ ID NO: 777794 - DNA, 120 bp, Artificial Sequence
  ENSG00000244588_9 (sequence is synthesized)
aagattgatgatgtggaagaagaggggaggagtgcatacacttctgtcaactgctgcccaggatttgattcatgctgaactgaaaatgttgtttacaaaatgctttctgtcctctggctt

SEQ ID NO: 777795 - DNA, 120 bp, Artificial Sequence
  ENSG00000244588_10 (sequence is synthesized)
taaacttggaagaaaaatgatacagaaggagtcagtaagggaagaagtgggaaaccaaaatatagtagagacatccatgatgcaagagccaaattaccagcaagagttaagtaaacccca

SEQ ID NO: 777796 - DNA, 120 bp, Artificial Sequence
  ENSG00000244588_11 (sequence is synthesized)
aacttggaaggatgtgattggtggatctcagcatagctctcatgaggataccaataaaaatattaactctgagcaggatattgttgaaatggtgtctttagctgctgaggaatcatcttt

SEQ ID NO: 777797 - DNA, 120 bp, Artificial Sequence
  ENSG00000244588_12 (sequence is synthesized)
aatgaatgacttatttgcacaagaaattgaatatagtccagttgaattggagtcattgagcaatgaagaaaatattgagacagagagatggaatggaagaatacttcagatgttaaatcg

SEQ ID NO: 777798 - DNA, 120 bp, Artificial Sequence
  ENSG00000244588_13 (sequence is synthesized)
tttacgggaatctaacaagatgggaatgcagtcctttagtctgatgaagctctgtagaaatagtgaccgaaaacaagcagctgccaaattttatagctttcttgtcctaaagaaacagct

SEQ ID NO: 777799 - DNA, 120 bp, Artificial Sequence
  ENSG00000244588_14 (sequence is synthesized)
ggctattgagctgagccagagtgctccctatgcagatattatagctacgatgggaccaatgttttataacatatgaaggaaacccagacatacagatttatggcatcactggaatttctg

SEQ ID NO: 777800 - DNA, 120 bp, Artificial Sequence
  ENSG00000244588_15 (sequence is synthesized)
ataaatataataccttcaaaatttatataccatctgtttcactttgaagacattttttattttctaccttgtattatggctacttaggtatggatcttgcctctgtcactagtcttcaag

SEQ ID NO: 777801 - DNA, 120 bp, Artificial Sequence
  ENSG00000244588_16 (sequence is synthesized)
cttcttgaaggcaaggtctttgtcataattattttctgaatctcttataatatctgtctcagtgccttgcacataccatttcctcaatcaacatttgttgaatcaggattgacagatttt

SEQ ID NO: 777802 - DNA, 120 bp, Artificial Sequence
  ENSG00000244588_17 (sequence is synthesized)
ttgaaagtagggcgcagcctgagaggccggccggaccccgagtgctgtaggcgggctgggagatgggggccgccgccacccacattcccacacgcacccggcgccggcgcctcacgccgt

SEQ ID NO: 777803 - DNA, 120 bp, Artificial Sequence
  ENSG00000244588_18 (sequence is synthesized)
gttagctcgcggcgccaagcccggagggtcccgcctgaggaagaaaggtcgtcgcccgcagcccagctggggctggaggcgcgacccggggtctcctcgcccgcacgcggaagaaaatgg

SEQ ID NO: 777804 - DNA, 120 bp, Artificial Sequence
  ENSG00000244588_19 (sequence is synthesized)
cggcgccaagaacccggccaagctgacttggcgactcctcgcagcccctgctctggcacgccacacctcagacgaggctttgaaatttgttaaatacaagtaaggaacacaggcaacatg

SEQ ID NO: 777805 - DNA, 120 bp, Artificial Sequence
  ENSG00000244588_20 (sequence is synthesized)
aatggaagaatacttcagatgttaaatcgtttacgggtcgctgatcagggccaggcggctgcagcagcgactgcagaggcgctgcgccaagccgggccggagtggtgcgagccggcgggg

SEQ ID NO: 777806 - DNA, 120 bp, Artificial Sequence
  ENSG00000244588_21 (sequence is synthesized)
ctgcggagggccagtggactcagcccccgggataccgcccatcccaccccttactcggacccacagcctcatggccatgtccctgccaggaagtagacggacctctgctggatcacgcag

SEQ ID NO: 777807 - DNA, 120 bp, Artificial Sequence
  ENSG00000244607_0 (sequence is synthesized)
agggcagcgcgtgtcggcgtccggaggaggtgacctagccgccgcggtcctagaagggagaagtggagagagaccgctggcaggatggcagcagatgaaagctcacagaacactttgcgg

SEQ ID NO: 777808 - DNA, 120 bp, Artificial Sequence
  ENSG00000244607_1 (sequence is synthesized)
ctccagttcaaggcaatgcaggagatgcagcacaaacggttacagaagcagatggagaaaaagagggaaaaagaactgagcctcaaaagcagagctgacgaccaagaggagcccttggag

SEQ ID NO: 777809 - DNA, 120 bp, Artificial Sequence
  ENSG00000244607_2 (sequence is synthesized)
gtttcagatggcctcagccttctccacgcaggggagccaaactcgaaaaatagctttgagaagagggtgcttgaagatgagattgaacaccttcgaaatgagctcagggaaacggtggac

SEQ ID NO: 777810 - DNA, 120 bp, Artificial Sequence
  ENSG00000244607_3 (sequence is synthesized)
gagaacgggcgattgtataagctgctgaaggaaagggactttgaaatcaaacacctcaaaaagaaaatagaagaggacagatttgccttcacagggacagccggtgtagccggagacgtg

SEQ ID NO: 777811 - DNA, 120 bp, Artificial Sequence
  ENSG00000244607_4 (sequence is synthesized)
gtcgccaccaaaattgtggagctatcaaaaaagaaccggctgttgatggcagaatcagagggtgcaaaaaccagggtgaagcagctgaccaatcgcatccaggagctggagcgggaactg

SEQ ID NO: 777812 - DNA, 120 bp, Artificial Sequence
  ENSG00000244607_5 (sequence is synthesized)
cagacagccctgaccaggctgtcagccaagggggccaccgacgcaggagccaagccaccgagggcccagatgggagacagagcattgctggagaccccagaggtgaaggccctgcaggac

SEQ ID NO: 777813 - DNA, 120 bp, Artificial Sequence
  ENSG00000244607_6 (sequence is synthesized)
aggctggtggccaccaacttgaagatgagtgacctccgaaaccagatccagtctgtgaagcaggagctgcggatggcacagaaggttttggccagagaggttggggaagacatcaacgtt

SEQ ID NO: 777814 - DNA, 120 bp, Artificial Sequence
  ENSG00000244607_7 (sequence is synthesized)
cagcagctcctatcttcgccagggacctggaggggtcgggctcaacaaattcttgttttgcagagcaaggttcaagagcttgagaagcaattgggccaggcccggagccagtctgcggga

SEQ ID NO: 777815 - DNA, 120 bp, Artificial Sequence
  ENSG00000244607_8 (sequence is synthesized)
acagccagtgatgagttgtctgtctatccagacccaaggaagctgtcggcacaggagaaaaacctgctgaggatccgcagcctggaaagggaaaaacaggaaggcttggagaaacttgcc

SEQ ID NO: 777816 - DNA, 120 bp, Artificial Sequence
  ENSG00000244607_9 (sequence is synthesized)
agtgaacgggatgtcctccagagagagcttgaagagctaaaaaagaagttcgagggcatgaggtctcggaacaagctgctgtcaagtgagatgaagaccctcaagagtcagatgggaacc

SEQ ID NO: 777817 - DNA, 120 bp, Artificial Sequence
  ENSG00000244607_10 (sequence is synthesized)
ctggtggagaagggccggcatgatgacgagctcatcgacgccctcatggaccagctgaagcagctacaggagatcctaggcagcctgagtctgcaggaggagaaaacgcgagtgtcccag

SEQ ID NO: 777818 - DNA, 120 bp, Artificial Sequence
  ENSG00000244607_11 (sequence is synthesized)
caccacctggaccagcaactgaacagcgaggctcagcggagcaacagcctagtcgcccagctgcaggccatggtagctgagcgggaggccaaagtgcgacagctggagatggagatcgga

SEQ ID NO: 777819 - DNA, 120 bp, Artificial Sequence
  ENSG00000244607_12 (sequence is synthesized)
caactcaatgtgcactatcttcggaataaaggagtgggtgaggggtccagtggccgcgaggtcagccctgcctatacccagttcctggaggacccaggcctgaccaagtccccggcctca

SEQ ID NO: 777820 - DNA, 120 bp, Artificial Sequence
  ENSG00000244607_13 (sequence is synthesized)
gcaggcgatcatgttggcaggcttggatcttctcgctctgtgaccagcctgggccacacactggtggaatctgctctcacgaggccttccctgcccagtccccacaggacctcacctagg

SEQ ID NO: 777821 - DNA, 120 bp, Artificial Sequence
  ENSG00000244607_14 (sequence is synthesized)
ttctcggactccccagaacaaaaaggctggcaggcacaagtgtcagagatcaaggccctctggcaggctgccgaggtggagcgtgaccggctcaccgagtttgtcactgtcctgcagaaa

SEQ ID NO: 777822 - DNA, 120 bp, Artificial Sequence
  ENSG00000244607_15 (sequence is synthesized)
cgggtggaggagagcaacagcaagctcctggagtcagagaggaagctgcaggaggagcgacaccgcaccgtggtgctggagcaacatctggagaagatacgcctggagccagggaaggca

SEQ ID NO: 777823 - DNA, 120 bp, Artificial Sequence
  ENSG00000244607_16 (sequence is synthesized)
tcagcctcccagagagcagctcccaggaccaaaacaggtctgcccacctctaacaacaggcacaacccaaccgggagcgagaagaaggacccatcctttgcccagctctccgatgtgccc

SEQ ID NO: 777824 - DNA, 120 bp, Artificial Sequence
  ENSG00000244607_17 (sequence is synthesized)
gtggaatcccaaatggaagagctgacaaccaggctggccatccaggtggaggagaatgaaatgctaaaggctgccctgggcagtgccctgcggggaaaggaggaggacttccggatgtac

SEQ ID NO: 777825 - DNA, 120 bp, Artificial Sequence
  ENSG00000244607_18 (sequence is synthesized)
catgagatcctgggccaggtgaaaagtgtcttcctgcaggccctgcggcagcagaagacaggcaagcaataggatgacagcccagtgtcggcctggccgggtgggcagcctcaggtcttg

SEQ ID NO: 777826 - DNA, 120 bp, Artificial Sequence
  ENSG00000244607_19 (sequence is synthesized)
agaggataagactctgtctgaggactccatctgctccgggaagccagcccagggcagccagctcaaccacttctaccagaagaggctccttaaggatgaccaaaaccaatgtctcaggcc

SEQ ID NO: 777827 - DNA, 120 bp, Artificial Sequence
  ENSG00000244607_20 (sequence is synthesized)
aggaaggcagaagagaagccctggtgggacactgcaggagaccctgggctggctgggttacagcagcagggaggcccagcagcccactggcagaggcgagagctctgggatggcaaggcg

SEQ ID NO: 777828 - DNA, 120 bp, Artificial Sequence
  ENSG00000244607_21 (sequence is synthesized)
gctgtgaatggacagatgcagtccctcgggcaggtgttcatcgccctcatcctaggtactagccctggatgtccccatggcttcacacacagaagagcccttggttaccctaagtgggca

SEQ ID NO: 777829 - DNA, 120 bp, Artificial Sequence
  ENSG00000244607_22 (sequence is synthesized)
tgtagccgtccacaccctacacagacttggggcactatgctctcaaccagtttgtcagcccactcctcaggacacttcctcaggtgcagacccttggacttgtaataataataagtattt

SEQ ID NO: 777830 - DNA, 120 bp, Artificial Sequence
  ENSG00000244607_23 (sequence is synthesized)
tcataatcactgcagctcccagtgagtgagcatctactgtggcaacctgaccccattcagtcctctaatgacccaggggtttgttgtcttatttgacagatgaagaaactgaggttcaca

SEQ ID NO: 777831 - DNA, 120 bp, Artificial Sequence
  ENSG00000244607_24 (sequence is synthesized)
gaaagaagctgagctaatatttaactgcagtctgcctgaccccaaaaccagggtcttgccgttcagagattacccagggtaggcgcacccacccaccactgaacaaccccacccctaggc

SEQ ID NO: 777832 - DNA, 120 bp, Artificial Sequence
  ENSG00000244607_25 (sequence is synthesized)
agcagctccaagaggcatctttgtttgctcaccaagactgctgatggatgctggtggcagagggccgaggtggggctcagctggagcttcaggcagaagggttttgaggtagtggctcca

SEQ ID NO: 777833 - DNA, 120 bp, Artificial Sequence
  ENSG00000244607_26 (sequence is synthesized)
gtcaaaggtacagtgcacctccctcgccatggtgaacttggagggatgctgcaggggcaccctaagatccgcaggcctctatgactgtcagtgttgccctttctcagctgtaactatgca

SEQ ID NO: 777834 - DNA, 120 bp, Artificial Sequence
  ENSG00000244607_27 (sequence is synthesized)
cttatagctacaggaaggagtggccccaaggagggtcactcatagccacacaccccaactccgacaccctggccacacaggtgcacccacagccccacacaaagatgcagatgcacacac

SEQ ID NO: 777835 - DNA, 120 bp, Artificial Sequence
  ENSG00000244607_28 (sequence is synthesized)
atacctcaattcaggagcatgcaactgtacgtgcacacaggcacctccatgtgtgcacactcatggacacacaggtgcagatgagcacacacatgtggatgtggacacacattcccacac

SEQ ID NO: 777836 - DNA, 120 bp, Artificial Sequence
  ENSG00000244607_29 (sequence is synthesized)
gtgaagacatagccacttgtgtgttgcttgtgcagtgatgcacaaatgcaggtgcacatactgtgaaaacacccccttccccaggaaaagccactggggctcctgcgagcatcttgtcag

SEQ ID NO: 777837 - DNA, 120 bp, Artificial Sequence
  ENSG00000244607_30 (sequence is synthesized)
ctccttccttggaaaagccactgcggctcctgggaccctgtcttctcagccccttccttggggatggggctatggagggaccctagctggcccccactcctcagggagcccctgaccctg

SEQ ID NO: 777838 - DNA, 120 bp, Artificial Sequence
  ENSG00000244607_31 (sequence is synthesized)
catggggtcacacggatctagagatcccacagcaagttagagcaaaggccaccgggatgaactgatgattctggtggggtcctaagggtctctgggaaggaagagtttttctctggttcc

SEQ ID NO: 777839 - DNA, 120 bp, Artificial Sequence
  ENSG00000244607_32 (sequence is synthesized)
ttgtgaaggaaaacggccaggcagagagccaggagagagagggtctgtgcttggaggggacagtgtgtgacagcgaggggtgggctggatgtagagtctgaacacagaggagtcagcacc

SEQ ID NO: 777840 - DNA, 120 bp, Artificial Sequence
  ENSG00000244607_33 (sequence is synthesized)
ttctcctgcaggccctgaggagctccagagggtgatctgagtatgaggggtacaggctctggcctcagtgcagtcccagggagtgagaagcaggcataggatcagccatccttcctcaag

SEQ ID NO: 777841 - DNA, 120 bp, Artificial Sequence
  ENSG00000244607_34 (sequence is synthesized)
atcacctcagggaagtgcagagatggtgtgacccacactccagccacttcagggtggttctgctgcccttcctgggctatgcctgagaaaggaaggagcattaggtcatggagtctggac

SEQ ID NO: 777842 - DNA, 120 bp, Artificial Sequence
  ENSG00000244607_35 (sequence is synthesized)
aggtggggctgcctggggcatacttctctccccacttaccagctgtgtggccttgggcaagttatttaacctctctgatcctccacattctcatctataaaatgcagacaataatagaat

SEQ ID NO: 777843 - DNA, 120 bp, Artificial Sequence
  ENSG00000244607_36 (sequence is synthesized)
cctccctcagggggctgttattaatatgtatgtcaaagaataacccaaagacgtttcactaattattagctctctgtttatttctgtacaaggaacatgtatctatagactgatttcaac

SEQ ID NO: 777844 - DNA, 120 bp, Artificial Sequence
  ENSG00000244607_37 (sequence is synthesized)
aagagttatataagagagaggggaaagaaaaactgcagacaggcaggcacaggaaatcttgtttgcacatttttgggtaaactgatttgctggtgtcttgctttggccaactctgtatat

SEQ ID NO: 777845 - DNA, 120 bp, Artificial Sequence
  ENSG00000244607_38 (sequence is synthesized)
aaagatgagtgtttcagctttcagattccacgggcaaccttgacagcattgctgtggtgccatgtgcgggagtgcctgtcatgtctgctggcacctaccaccgggcacctccccacccct

SEQ ID NO: 777846 - DNA, 120 bp, Artificial Sequence
  ENSG00000244607_39 (sequence is synthesized)
agcttggttagatcaggtctgctccattccctcattggaaccctctgcagggttcactgagataaagtgtccattgcttacagcagctgctcgcacacagtaagcgcttaataattattc

SEQ ID NO: 777847 - DNA, 120 bp, Artificial Sequence
  ENSG00000244607_40 (sequence is synthesized)
gctcttagtgttccctccatttgttcaaccagaacttgttgagcagttcctctgccccaggcacagaggtgccgaggtgaggcaaacacagtccctggcctccaggaactctcagatcag

SEQ ID NO: 777848 - DNA, 120 bp, Artificial Sequence
  ENSG00000244607_41 (sequence is synthesized)
ctgaggagagagacagactggtcacaggtcaccattccatccagccagtcggccaccaggcagtcagtgagtgccaacagcatgccagcctctccaggcctgggagggacctagaggtga

SEQ ID NO: 777849 - DNA, 120 bp, Artificial Sequence
  ENSG00000244607_42 (sequence is synthesized)
atctgacttgcttcctcctttcagggagtttccagtccaatcagaggtgtgggaaacgccatgatggagctgggtggggaaggatgcaggaccgggctgcagcaccacagggcttccccc

SEQ ID NO: 777850 - DNA, 120 bp, Artificial Sequence
  ENSG00000244607_43 (sequence is synthesized)
accatccccaccccatccctgtggcagttcccaagttcccaacctccttgatcagatctgggtagagagggggcttcacatctccctgaggcaaaggagcaaggaggagtaaagggaagg

SEQ ID NO: 777851 - DNA, 120 bp, Artificial Sequence
  ENSG00000244607_44 (sequence is synthesized)
tggggagagcctgggagaaggattttcaagggaaggaggtcatcaaaggggtcaaagatagggaccctgagaaacctaacttaggtgggccaggtgcacagccaggcagctggtctgtcc

SEQ ID NO: 777852 - DNA, 120 bp, Artificial Sequence
  ENSG00000244607_45 (sequence is synthesized)
tgcggatggcacagaaggtctttcagagccagggcttggggcttcttgtgtggctggggctggacttgggaagagcacggctggcacagtggattcctttctggagccatgagtgctcag

SEQ ID NO: 777853 - DNA, 120 bp, Artificial Sequence
  ENSG00000244607_46 (sequence is synthesized)
tcccttgagcacactgcttgctctgggtcaggctccagttccagtccttcctcccaccagcccttggtccataaccatttggtgggcagagtcgctggctacctgagcctgccaccccca

SEQ ID NO: 777854 - DNA, 120 bp, Artificial Sequence
  ENSG00000244607_47 (sequence is synthesized)
cccccgcagcatacctgcccttgtggtgcctgcccagctctagactgaggaggacagcactgtccacccagggagagtccattaagccttccctgcactacttgtgccccagtagatcct

SEQ ID NO: 777855 - DNA, 120 bp, Artificial Sequence
  ENSG00000244607_48 (sequence is synthesized)
gggtctccccttaatgtcacccttacttaacttgaaagcctgccaacacctgccttcttctctgctatctgtaacagaaaatgaataggttacttgtgtattaaaggaccctttcaaagg

SEQ ID NO: 777856 - DNA, 120 bp, Artificial Sequence
  ENSG00000244607_49 (sequence is synthesized)
gacccccttagagacctaagcacacagtacccaaaaaaggcctttaggtctcacagtgcactcgtgcggggttgttgttttaccttctcgccaaccagcctgattttaatttgttattta

SEQ ID NO: 777857 - DNA, 120 bp, Artificial Sequence
  ENSG00000244607_50 (sequence is synthesized)
acaccagattcgctgcagcttaagactagcctcacaaatcctttttctaattaattaaaactttacaggagataaacaatgatttttaccagtctgcacagagagagagagagagagaga

SEQ ID NO: 777858 - DNA, 120 bp, Artificial Sequence
  ENSG00000244607_51 (sequence is synthesized)
gagagagagagagagagagagaggaaagcactgcctgaggcagagtggggaaggtgaggtgctcagagaggccagagaaagacccacccattgcagcgacactgaaaagttcaggcggct

SEQ ID NO: 777859 - DNA, 120 bp, Artificial Sequence
  ENSG00000244607_52 (sequence is synthesized)
tgagaggaccactaactccctacatcttagaagggactctaaccctcctaagttgggcctctaacccaagaatgccttaaccatctgggaatgcagcagttggtttcagccttatttcac

SEQ ID NO: 777860 - DNA, 120 bp, Artificial Sequence
  ENSG00000244607_53 (sequence is synthesized)
ccagctcctatttaagatggagttgctcttgttcaaacgcctctgacaaaaccactgtgctttggagagaacaacatggcggtggatggttgtggtattatgcaataacaacacaaaatg

SEQ ID NO: 777861 - DNA, 120 bp, Artificial Sequence
  ENSG00000244607_54 (sequence is synthesized)
tgtggaggaagtcagagagggtagtgagattcaaagtgtgttaagggtatctagctggctttaaagatggagggggcaaggtggctcctagaaggtgaaattgaccagcagcctgcaggg

SEQ ID NO: 777862 - DNA, 120 bp, Artificial Sequence
  ENSG00000244607_55 (sequence is synthesized)
agccacactccagaggcctgcaggctcaatccacattccaaccctaggcctccaaagcacattccagagtggagctgaacacccttccctctgcttggggcttcaggaggccgtgatgtg

SEQ ID NO: 777863 - DNA, 120 bp, Artificial Sequence
  ENSG00000244617_0 (sequence is synthesized)
gtgtgtgtgtgtgtgtgtgtgtgtgtcctcactcacttaaaaaagaccatttctgtgcattctttatgctggaaccctcctctgcctccctctccaggaaatcccataggatcccatacc

SEQ ID NO: 777864 - DNA, 120 bp, Artificial Sequence
  ENSG00000244617_1 (sequence is synthesized)
tctgcctccctctccaggaaatcccataggatcccatacctgctttagaatgtgtgtgagacacttcccagtgcctggcatgtggtaggagctcagtacatgtaaactgttttcctttga

SEQ ID NO: 777865 - DNA, 120 bp, Artificial Sequence
  ENSG00000244617_2 (sequence is synthesized)
ccactcaaagtagtcacttgttggggaggccaatggcggcttccccggtctctgagctgatgggcgtctggtccctgcctccccttccttcactggctgatgacaaatacctgaatgtca

SEQ ID NO: 777866 - DNA, 120 bp, Artificial Sequence
  ENSG00000244617_3 (sequence is synthesized)
tcacatcctccgtgtcctcatctgttattctggaacacaggccagggagggtacagggtagtcccccttcaacagaggctggcctttcttgggatgtgggctggctggtgttggtccaag

SEQ ID NO: 777867 - DNA, 120 bp, Artificial Sequence
  ENSG00000244617_4 (sequence is synthesized)
gatggatgcagagggtgaggcacccatcctgctagtccggccggatgctggcaggagggcggggtgaggaggggcggagcttccagaacaaaggagaatggggagcccaggggccagcct

SEQ ID NO: 777868 - DNA, 120 bp, Artificial Sequence
  ENSG00000244617_5 (sequence is synthesized)
aggcatcaaaaaggctctgcagagtgaacaggccacagcactgcctgcctctgccccagcagtcagccagccgaccgcgcctgctccctcctgcttgcccaaggccgggcaagtcatccc

SEQ ID NO: 777869 - DNA, 120 bp, Artificial Sequence
  ENSG00000244617_6 (sequence is synthesized)
cactctgcttcgagaggccccgttttccagcgtgattgcgccgacactgctctgtgggtttctcttcttggcgtgggttgctgctgaggttccagaggagagcagcaggatggccgggag

SEQ ID NO: 777870 - DNA, 120 bp, Artificial Sequence
  ENSG00000244617_7 (sequence is synthesized)
cggagccaggagtgaggaaggccgccggcagcatgccttcgtcccggaaccttttgatggggccaatgtcgtcccaaacctctggctgcacagctttgaagtcatcaatgacctcaacca

SEQ ID NO: 777871 - DNA, 120 bp, Artificial Sequence
  ENSG00000244617_8 (sequence is synthesized)
ttgggaccatatcaccaagctaaggttcctgaaagagtccctcagaggagaggccctgggtgtctacaataggctcagtccccaggaccagggagactatgggactgtgaaagaggccct

SEQ ID NO: 777872 - DNA, 120 bp, Artificial Sequence
  ENSG00000244617_9 (sequence is synthesized)
tccctggggctgcccccagccacctgcccaaagagatcgtctttgccaacagcatgggtaagggctactatctcaaggggaagattggcaaagtgcccgtgaggttcctggtggactctg

SEQ ID NO: 777873 - DNA, 120 bp, Artificial Sequence
  ENSG00000244617_10 (sequence is synthesized)
gggcccaggtctctgtggtccacccaaacttgtgggaggaggtcactgatggcgatctggacaccctgcagccctttgagaatgtggtaaaggtggccaatggtgctgaaatgaagatcc

SEQ ID NO: 777874 - DNA, 120 bp, Artificial Sequence
  ENSG00000244617_11 (sequence is synthesized)
tgggtgtctgggatacagcggtgtccctaggcaagctgaagctgaaggcacagttcctagtggccaatgcgagtgccgaggaagccatcattggcactgatgtgctccaggaccacaatg

SEQ ID NO: 777875 - DNA, 120 bp, Artificial Sequence
  ENSG00000244617_12 (sequence is synthesized)
ctatcctggactttgagcaccgcacatgcaccctgaaagggaagaagtttcgccttctgcctgtgggagggtccctggaagatgagtttgacctggagctcatagaggaggacccctcct

SEQ ID NO: 777876 - DNA, 120 bp, Artificial Sequence
  ENSG00000244617_13 (sequence is synthesized)
cagaagaagggcggcaggagctatcccactgagaagccaccttttctttaacctcctaaatattggtgggaagacccaccgctgtggggggggttgcatatcctcatgggggtcactggg

SEQ ID NO: 777877 - DNA, 120 bp, Artificial Sequence
  ENSG00000244617_14 (sequence is synthesized)
cttggccagtctgcttatcaactcttgctcttctctcccctttgcctccctctgcaggggccttaatctgcccctggtaggggaggcttccactgaacaggcacaggtgagggagagcag

SEQ ID NO: 777878 - DNA, 120 bp, Artificial Sequence
  ENSG00000244617_15 (sequence is synthesized)
gctggcttagagggacagggtccccatggtcatcaagctgctgttgatgacaaagactcaaaggctggaagagctcccaaggaagctagaaatgcttgtctttgaaagaactgtgggacc

SEQ ID NO: 777879 - DNA, 120 bp, Artificial Sequence
  ENSG00000244617_16 (sequence is synthesized)
ccttcagattccctgaggtatggcttggtcactctcaggtcctcaaagcctgtcttagttgggctgggtcctagctgcagggtctttgtgagggtcacagttgctctgggacacctccct

SEQ ID NO: 777880 - DNA, 120 bp, Artificial Sequence
  ENSG00000244617_17 (sequence is synthesized)
gaagagcctttccacctgtacaatcgtattttctttctgtcatttgctttgaagcccattgtgccttatgccaataattcaattgctgcaaacaccaataaagattgattcatggaaaaa

SEQ ID NO: 777881 - DNA, 120 bp, Artificial Sequence
  ENSG00000244623_0 (sequence is synthesized)
cctcagggattgagaaaggggacaatgtggcagaagaatcagacctctctggcagacttcatccttgaggggctcttcgatgactcccttacccaccttttccttttctccttgaccatg

SEQ ID NO: 777882 - DNA, 120 bp, Artificial Sequence
  ENSG00000244623_1 (sequence is synthesized)
gtggtcttccttattgcggtgagtggcaacaccctcaccattctcctcatctgcattgatccccagcttcatacaccaatgtatttcctgctcagccagctctccctcatggatctgatg

SEQ ID NO: 777883 - DNA, 120 bp, Artificial Sequence
  ENSG00000244623_2 (sequence is synthesized)
catgtctccacaatcatcctgaagatggctaccaactacctatctggcaagaaatctatctcctttgtgggctgtgcaacccagcacttcctctatttgtgtctaggtggtgctgaatgt

SEQ ID NO: 777884 - DNA, 120 bp, Artificial Sequence
  ENSG00000244623_3 (sequence is synthesized)
tttctcttagctgtcatgtcctatgaccgctatgttgccatctgtcatccactgcgctatgctgtgctcatgaacaagaaggtgggactgatgatggctgtcatgtcatggttgggggca

SEQ ID NO: 777885 - DNA, 120 bp, Artificial Sequence
  ENSG00000244623_4 (sequence is synthesized)
ggcgacatcactgtgtatgagaccacagtgtacatcagcagcattctcctcctcctccccatcttcctgatttctacatcctatgtcttcatccttcaaagtgtcattcagatgcgctca

SEQ ID NO: 777886 - DNA, 120 bp, Artificial Sequence
  ENSG00000244623_5 (sequence is synthesized)
tctgggagcaagagaaatgcctttgccacttgtggctcccacctcacggtggtttctctttggtttggtgcctgcatcttctcctacatgagacccaggtcccagtgcactctattgcag

SEQ ID NO: 777887 - DNA, 120 bp, Artificial Sequence
  ENSG00000244623_6 (sequence is synthesized)
aacaaagttggttctgtgttctacagcatcattacgcccacattgaattctctgatttatactctccggaataaagatgtagctaaggctctgagaagagtgctgaggagagatgttatc

SEQ ID NO: 777888 - DNA, 120 bp, Artificial Sequence
  ENSG00000244623_7 (sequence is synthesized)
acccagtgcattcaacgactgcaattgtggttgccccgagtgtagagtggaataggataagctccttaaattaattcatataaacctctaaagtttttcagggagatagcttccttatgc

SEQ ID NO: 777889 - DNA, 120 bp, Artificial Sequence
  ENSG00000244624_0 (sequence is synthesized)
tctacacctgaaccatccatttctgacaccatgatttactacagcaactattatggtggctatgggtatggtgggcttggctgtggctatggctgtggttatcgtggctatggatgtggt

SEQ ID NO: 777890 - DNA, 120 bp, Artificial Sequence
  ENSG00000244624_1 (sequence is synthesized)
ctgcccatcttgctatggaagatattggtcatatggtttctactgaacaattctagagctcaccagatttgtctgcttgtgaaacctggattctcatgctgctcttgttcatctgatcct

SEQ ID NO: 777891 - DNA, 120 bp, Artificial Sequence
  ENSG00000244687_0 (sequence is synthesized)
gggggggtgaagaaggggccggccttcaagcaagagcgacgcaagatggcagccaccacgggctcgggagtaaaagtccctcgcaatttccgactgttggaagaactcgaagaaggccag

SEQ ID NO: 777892 - DNA, 120 bp, Artificial Sequence
  ENSG00000244687_1 (sequence is synthesized)
aaaggagtaggagatggcacagttagctggggtctagaagatgacgaagacatgacacttacaagatggacagggatgataattgggcctccaagaacaatttatgaaaaccgaatatac

SEQ ID NO: 777893 - DNA, 120 bp, Artificial Sequence
  ENSG00000244687_2 (sequence is synthesized)
agccttaaaatagaatgtggacctaaatacccagaagcacccccctttgtaagatttgtaacaaaaattaatatgaatggagtaaatagttctaatggagtggtggacccaagagccata

SEQ ID NO: 777894 - DNA, 120 bp, Artificial Sequence
  ENSG00000244687_3 (sequence is synthesized)
tcagtgctagcaaaatggcagaattcatatagcatcaaagttgtcctgcaagagcttcggcgcctaatgatgtctaaagaaaatatgaaactccctcagccgcccgaaggacagtgttac

SEQ ID NO: 777895 - DNA, 120 bp, Artificial Sequence
  ENSG00000244687_4 (sequence is synthesized)
agcaattaatcaaaaagaaaaaccacaggcccttccccttccccccaattcgatttaatcagtcttcattttccacagtagtaaattttctagatacgtcttgtagacctcaaagtaccg

SEQ ID NO: 777896 - DNA, 120 bp, Artificial Sequence
  ENSG00000244687_5 (sequence is synthesized)
gaaaggaagctcccattcaaaggaaatttatcttaagatactgtaaatgatactaattttttgtccatttgaaatatataagttgtgctataacaaatcatcctgtcaagtgtaaccact

SEQ ID NO: 777897 - DNA, 120 bp, Artificial Sequence
  ENSG00000244687_6 (sequence is synthesized)
gtccacgtagttgaacttctgggatcaagaaagtctatttaaattgattcccatcataactggtggggcacatctaactcaactgtgaaaagacacatcacacaatcaccttgctgctga

SEQ ID NO: 777898 - DNA, 120 bp, Artificial Sequence
  ENSG00000244687_7 (sequence is synthesized)
ttacacggcctggggtctctgccttctccccttaccctcccgcctcccaccctccctgcaacaacagccctctagcctggggggcttgttagagtagatgtgaaggtttcaggtcgcagc

SEQ ID NO: 777899 - DNA, 120 bp, Artificial Sequence
  ENSG00000244687_8 (sequence is synthesized)
ccccacgctcctccactcccgcccttggccgaagcatagattgtaacccctccactcccctctgagattggccttcggtgaggaattcagggctttccccatatcttctctcccccacct

SEQ ID NO: 777900 - DNA, 120 bp, Artificial Sequence
  ENSG00000244687_9 (sequence is synthesized)
ttatcgaggggtgctgctttttctccctcctcctcaagttcctttttgcaccgtcaccacccaacaccttccatgacacttccttgctttggccagaagccatcaggtaaggttggaaag

SEQ ID NO: 777901 - DNA, 120 bp, Artificial Sequence
  ENSG00000244687_10 (sequence is synthesized)
agcctctgacctcccttgtttagttttggaaccatactcactcactctccaccagcctgggaaatgaatattgggtcctcagccctgccaccctctgctgtcatcagctgatgcattgtt

SEQ ID NO: 777902 - DNA, 120 bp, Artificial Sequence
  ENSG00000244687_11 (sequence is synthesized)
tttagctcaggttttgataaggtgaaaagaatagtcaccagggttactcagacctgccagctctcggagtccttggtggttgaacttggagaaagaccgcatgaagatacttgtaagcac

SEQ ID NO: 777903 - DNA, 120 bp, Artificial Sequence
  ENSG00000244687_12 (sequence is synthesized)
acatgatccctctgaattgttttactttcctgtaactgcttttgcttttaaaaattgaagaagttttaaacagggctttcatttggtcatccttgcaatccattggggtctagtttggaa

SEQ ID NO: 777904 - DNA, 120 bp, Artificial Sequence
  ENSG00000244687_13 (sequence is synthesized)
tctgacaactggaacaaaaagaaccttgaatccggtgcatgccttggttttggtgctgctgctgcttcccaagatcctcagcagggattaagaaggaacccggtgtgcacagcagatccc

SEQ ID NO: 777905 - DNA, 120 bp, Artificial Sequence
  ENSG00000244687_14 (sequence is synthesized)
cgaaattggtgggcttgacctcctggcaaattgctgcgtctttccacttgctgttcaggaccactaaatgctgaaatgtggatgcataccgaaataaaagcaattcattgtgtactaaag

SEQ ID NO: 777906 - DNA, 120 bp, Artificial Sequence
  ENSG00000244687_15 (sequence is synthesized)
gttttttttttttttttaatttagtatttgtgtaaaaccaccttttgaagcagcaactatcaagtctgaaaagcaattgatgtttccattaatctttttctggggggaaaaccttagttc

SEQ ID NO: 777907 - DNA, 120 bp, Artificial Sequence
  ENSG00000244687_16 (sequence is synthesized)
taaggatttaacatcctgtaagtgaagtttaacataacagtattccataagcagcctttttattgtcagaccattgcctgattttaatataataaaaaaaaagtgtgcgttaatatttaa

SEQ ID NO: 777908 - DNA, 120 bp, Artificial Sequence
  ENSG00000244687_17 (sequence is synthesized)
gcctaacctcttcctgcgatgagctcggcacgggaattattattgtcaattttacttgcaagaagtttcctacaagagccaaggaatccatgcgagtaaacatttacgggcaccatagat

SEQ ID NO: 777909 - DNA, 120 bp, Artificial Sequence
  ENSG00000244687_18 (sequence is synthesized)
aaaagcaatcctatgaggttgatactactatcctcatagaaggggaaactgatgccaggagaggttcaagcgtcttacctgaagtcacaaagcaaactgagtgatgaaggaagacttgaa

SEQ ID NO: 777910 - DNA, 120 bp, Artificial Sequence
  ENSG00000244687_19 (sequence is synthesized)
gtgaagaaggggccggccttcaagcaagagcgacgcaagatggcagccaccacgggctcgggagacttaatccagtatagctgaataatccagttggctgctgtgcagatgaaaatgcca

SEQ ID NO: 777911 - DNA, 120 bp, Artificial Sequence
  ENSG00000244687_20 (sequence is synthesized)
aaaaggcttgtgttttaatcctcatcctctccacctgttagctctgagtctcagttttctcatctctaaaaatggggatattcacaggagttgctgcatcgagttgtgaggattaaaagt

SEQ ID NO: 777912 - DNA, 120 bp, Artificial Sequence
  ENSG00000244687_21 (sequence is synthesized)
tcagctggaacagtgctgagtcaattcatttaccatgacgctgccccaggcactcccagaagagagattctgagtcaggccagactgctgggtaaaacttctcaccagaataacactcct

SEQ ID NO: 777913 - DNA, 120 bp, Artificial Sequence
  ENSG00000244687_22 (sequence is synthesized)
accgggtcgtaataaacgaaggggcccagtgtgctggtggtagccagcaataaggtgctgttgcagctcagccctgcttgcagtcactcggttggctacctacaatctgggttaacagct

SEQ ID NO: 777914 - DNA, 120 bp, Artificial Sequence
  ENSG00000244687_23 (sequence is synthesized)
gacccagaggcctttgcaaagaagacgaagacaatgaggatggggaaaagtggcctctttcagaccttcctgatttgtgagagttcccagtcttcataatgccagccaaccgttttttga

SEQ ID NO: 777915 - DNA, 120 bp, Artificial Sequence
  ENSG00000244687_24 (sequence is synthesized)
tctctgaaggtccatcatatgctgacatcttcttcactgcatgtcttctcttcctaagaatgatttcggtttcttgaggatgagaactgtgcttccctccttacttcccagaatacctag

SEQ ID NO: 777916 - DNA, 120 bp, Artificial Sequence
  ENSG00000244687_25 (sequence is synthesized)
aaatgactcagaatggggtactcagtagatttgttaatcaacttactgatttacaggttctaaaatactgagaattgaaccaatgtacaacattgcgatacactaaataccactgaattg

SEQ ID NO: 777917 - DNA, 120 bp, Artificial Sequence
  ENSG00000244687_26 (sequence is synthesized)
tacactttcaaaaaaacacacaaaacaatgcatcagtaaattctgctgaaaatattctgtctgcctaaaacagcttgggctaccctgaatttcagtttatctctttccaaaagaggcttt

SEQ ID NO: 777918 - DNA, 120 bp, Artificial Sequence
  ENSG00000244687_27 (sequence is synthesized)
gcatcagggccgggggacgggtaaggggggggtgaagaaggggccggccttcaagcaagagcgacgcaagatggcagccaccacgggctcggcctggtcaccagccaggggcagtatcca

SEQ ID NO: 777919 - DNA, 120 bp, Artificial Sequence
  ENSG00000244687_28 (sequence is synthesized)
cccacattactgagggaggagccaaaagccaagggagactggtgatgctcggactagagcccaggcatttttaactcctgttccctcaccagcctgcaggaaatggaaaaggagtaaaag

SEQ ID NO: 777920 - DNA, 120 bp, Artificial Sequence
  ENSG00000244687_29 (sequence is synthesized)
tctctgtcccacttgttccttggagttgacagttgctttgtacttaacatcaggagcttttagactgggcccaattcctaggttctttggttatttgttgataaactgtatcactgtgca

SEQ ID NO: 777921 - DNA, 120 bp, Artificial Sequence
  ENSG00000244687_30 (sequence is synthesized)
taggagcacagatttgggatggggcctgtttcccaattatatctggcgatcactcatatagcacttaccctgggctagttctgtgctggtcgctttgaaatatgagctctttcctcatgc

SEQ ID NO: 777922 - DNA, 120 bp, Artificial Sequence
  ENSG00000244687_31 (sequence is synthesized)
actgaggcacagacgtggaagatctttcccagggctacacctttacccccctgggccttatttgtgaaccactggcatgtaatatttttttcctttaatggccttgcttttttattttta

SEQ ID NO: 777923 - DNA, 120 bp, Artificial Sequence
  ENSG00000244687_32 (sequence is synthesized)
tcttaactctcacaagaccccattgttaggtgcaattgcattccatttcacagatgaggagacagactcagaggagtcagatctcttgcccaaagtcacatagctggtaacccccaaacc

SEQ ID NO: 777924 - DNA, 120 bp, Artificial Sequence
  ENSG00000244687_33 (sequence is synthesized)
agatctgactccagagcctgtgctcttaaccactgtgctgtggtgtctcccttttgtttacattttgagttttcatctgttaccattatagaagatactaatcaagtagtaacttgatgt

SEQ ID NO: 777925 - DNA, 120 bp, Artificial Sequence
  ENSG00000244687_34 (sequence is synthesized)
gcatcagggccgggggacgggtaaggggggggtgaagaaggggccggccttcaagcaagagcgacgcaagatggcagccaccacgggctcggttttatgtttgctacaggagacttaatc

SEQ ID NO: 777926 - DNA, 120 bp, Artificial Sequence; identical to SEQ ID NO: 766610
  ENSG00000244693_0 (sequence is synthesized)

SEQ ID NO: 777927 - DNA, 120 bp, Artificial Sequence; identical to SEQ ID NO: 766611
  ENSG00000244693_1 (sequence is synthesized)

SEQ ID NO: 777928 - DNA, 120 bp, Artificial Sequence; identical to SEQ ID NO: 766612
  ENSG00000244693_2 (sequence is synthesized)

SEQ ID NO: 777929 - DNA, 120 bp, Artificial Sequence; identical to SEQ ID NO: 766613
  ENSG00000244693_3 (sequence is synthesized)

SEQ ID NO: 777930 - DNA, 120 bp, Artificial Sequence; identical to SEQ ID NO: 766614
  ENSG00000244693_4 (sequence is synthesized)

SEQ ID NO: 777931 - DNA, 120 bp, Artificial Sequence; identical to SEQ ID NO: 766615
  ENSG00000244693_5 (sequence is synthesized)

SEQ ID NO: 777932 - DNA, 83 bp, Artificial Sequence; identical to SEQ ID NO: 766616
  ENSG00000244693_6 (sequence is synthesized)

SEQ ID NO: 777933 - DNA, 120 bp, Artificial Sequence; identical to SEQ ID NO: 766617
  ENSG00000244693_7 (sequence is synthesized)

SEQ ID NO: 777934 - DNA, 120 bp, Artificial Sequence; identical to SEQ ID NO: 766618
  ENSG00000244693_8 (sequence is synthesized)

SEQ ID NO: 777935 - DNA, 120 bp, Artificial Sequence; identical to SEQ ID NO: 766619
  ENSG00000244693_9 (sequence is synthesized)

SEQ ID NO: 777936 - DNA, 120 bp, Artificial Sequence; identical to SEQ ID NO: 766620
  ENSG00000244693_10 (sequence is synthesized)

SEQ ID NO: 777937 - DNA, 120 bp, Artificial Sequence; identical to SEQ ID NO: 766621
  ENSG00000244693_11 (sequence is synthesized)

SEQ ID NO: 777938 - DNA, 120 bp, Artificial Sequence; identical to SEQ ID NO: 766622
  ENSG00000244693_12 (sequence is synthesized)

SEQ ID NO: 777939 - DNA, 120 bp, Artificial Sequence; identical to SEQ ID NO: 766623
  ENSG00000244693_13 (sequence is synthesized)

SEQ ID NO: 777940 - DNA, 120 bp, Artificial Sequence; identical to SEQ ID NO: 766624
  ENSG00000244693_14 (sequence is synthesized)

SEQ ID NO: 777941 - DNA, 120 bp, Artificial Sequence; identical to SEQ ID NO: 766625
  ENSG00000244693_15 (sequence is synthesized)

SEQ ID NO: 777942 - DNA, 120 bp, Artificial Sequence; identical to SEQ ID NO: 766626
  ENSG00000244693_16 (sequence is synthesized)

SEQ ID NO: 777943 - DNA, 120 bp, Artificial Sequence
  ENSG00000244693_17 (sequence is synthesized)
cctggctttattcctccacctcttgctccagtcagaggaccattgtttccagtggatacaaggggcccgttcatgagaagaggacctcctttccccccacctcctccaggaaccatgttt

SEQ ID NO: 777944 - DNA, 120 bp, Artificial Sequence; identical to SEQ ID NO: 766628
  ENSG00000244693_18 (sequence is synthesized)

SEQ ID NO: 777945 - DNA, 120 bp, Artificial Sequence; identical to SEQ ID NO: 766629
  ENSG00000244693_19 (sequence is synthesized)

SEQ ID NO: 777946 - DNA, 120 bp, Artificial Sequence; identical to SEQ ID NO: 766630
  ENSG00000244693_20 (sequence is synthesized)

SEQ ID NO: 777947 - DNA, 120 bp, Artificial Sequence
  ENSG00000244694_0 (sequence is synthesized)
gagaacggggtagcccggcgcttacacatgtcacatgtgctttttaagacggccgggagcgcctgcgagctggatctggtggaggatgctgcggcaggtgcttcgcagagggctccagtc

SEQ ID NO: 777948 - DNA, 120 bp, Artificial Sequence
  ENSG00000244694_1 (sequence is synthesized)
gttctgccacaggctgggtttgtgcgtgagccggcacccggtctttttcctcaccgtgcccgcagtcctgacaatcaccttcggcctcagcgcgctcaaccgcttccagcccgagggcga

SEQ ID NO: 777949 - DNA, 120 bp, Artificial Sequence
  ENSG00000244694_2 (sequence is synthesized)
cctggagcgcctggtcgctcccagccacagcctggccaagatcgagcgcagcctggccagcagccttttccccctggaccagtccaaaagccagctctattcggacttacacacccctgg

SEQ ID NO: 777950 - DNA, 120 bp, Artificial Sequence
  ENSG00000244694_3 (sequence is synthesized)
gaggtatggcagggtgatcctcctctccccaaccggggacaatattttgctccaggctgaggggatcctgcagacccaccgagccgtgctggaaatgaaggatgggaggaacagttttat

SEQ ID NO: 777951 - DNA, 120 bp, Artificial Sequence
  ENSG00000244694_4 (sequence is synthesized)
tggacaccaactgggcggggtagtggaagtgccaaacagcaaagatcagcgggtcaagtcagccagagccattcaaatcacctactacctccagacctatggctctgccacccaagacct

SEQ ID NO: 777952 - DNA, 120 bp, Artificial Sequence
  ENSG00000244694_5 (sequence is synthesized)
cataggggagaagtgggagaatgagttctgtaagcttataaggaagctccaggaggagcatcaagaactccagctctactctttagcatcctttagcctctggagggactttcataagac

SEQ ID NO: 777953 - DNA, 120 bp, Artificial Sequence
  ENSG00000244694_6 (sequence is synthesized)
cagcatcctggccagaagcaaggtcctggtgagcctcgtgctgatcctgaccacagccaccctctccagctccatgaaggactgcttgcgcagtaagcccttcctgggcctcctgggggt

SEQ ID NO: 777954 - DNA, 120 bp, Artificial Sequence
  ENSG00000244694_7 (sequence is synthesized)
gctcacagtatgcatctccatcatcacagcagcagggatcttcttcatcaccgatggaaagtacaactccaccctgctgggaatcccgttcttcgccatgggtcatggaactaaaggagt

SEQ ID NO: 777955 - DNA, 120 bp, Artificial Sequence
  ENSG00000244694_8 (sequence is synthesized)
gtttgagcttctgtccggatggcggagaaccaaagagaacttgcccttcaaagacaggatagcagatgcctattctgatgtgatggtcacctataccatgaccagctccctgtacttcat

SEQ ID NO: 777956 - DNA, 120 bp, Artificial Sequence
  ENSG00000244694_9 (sequence is synthesized)
cacttttggcatgggtgccagcccattcacaaacatagaggctgtgaaggtcttctgtcaaaacatgtgtgtctctattctgttgaactacttctacattttctccttctttggctcctg

SEQ ID NO: 777957 - DNA, 120 bp, Artificial Sequence
  ENSG00000244694_10 (sequence is synthesized)
tctggtctttgctggccaactagagcaaaaccgctaccacagcatcttttgctgtaagatcccttctgcagaatacctggatcgcaaacctgtgtggttccagacagtgatgagtgatgg

SEQ ID NO: 777958 - DNA, 120 bp, Artificial Sequence
  ENSG00000244694_11 (sequence is synthesized)
caatatatatgtgaagccatttgttgtcatcctctatctcatttatgcctccttctccttcatggggtgcttacagatcagtgacggagccaacatcatcaatctactagccagtgattc

SEQ ID NO: 777959 - DNA, 120 bp, Artificial Sequence
  ENSG00000244694_12 (sequence is synthesized)
gccaagtgtttcctatgccatggttcagcagaaatatttcagcaactatagccctgtgataggattctacgtctatgagcccctagagtactggaacagcagcgtccaggatgacctaag

SEQ ID NO: 777960 - DNA, 120 bp, Artificial Sequence
  ENSG00000244694_13 (sequence is synthesized)
aagactctgtagtggattcactgcagtgtcctgggtggagcagtactaccagttcctgaaagtcagcaacgtcagtgccaataacaaaagtgacttcatcagtgtcctgcaaagctcatt

SEQ ID NO: 777961 - DNA, 120 bp, Artificial Sequence
  ENSG00000244694_14 (sequence is synthesized)
tttaaaaaagccagaattccagcattttcgaaatgatatcatcttctccaaggcaggggatgaaagcaatatcattgcttctcgcttgtatctggtggccaggactagcagagacaagca

SEQ ID NO: 777962 - DNA, 120 bp, Artificial Sequence
  ENSG00000244694_15 (sequence is synthesized)
gaaagaaatcacagaagtgttggaaaagctgaggcccctatccctctcaaagagcatccgattcatcgtgttcaacccctcctttgtcttcatggaccattacagcttgtctgtcacagt

SEQ ID NO: 777963 - DNA, 120 bp, Artificial Sequence
  ENSG00000244694_16 (sequence is synthesized)
gcctgttctgattgcaggctttggtgttctcctggtgttaatcctgacttttttcctagtgatccaccctctgggaaacttctggctaattcttagcgtcacctcaattgagctgggcgt

SEQ ID NO: 777964 - DNA, 120 bp, Artificial Sequence
  ENSG00000244694_17 (sequence is synthesized)
tctgggcttaatgacattatggaacgtcgacatggattgcatttctatcttgtgccttatctacaccttgaatttcgccattgaccactgtgcaccactgcttttcacatttgtattagc

SEQ ID NO: 777965 - DNA, 120 bp, Artificial Sequence
  ENSG00000244694_18 (sequence is synthesized)
aactgagcacacccgaacacaatgtataaaaagctccttgcaagaccatgggacagccattttgcaaaatgttacttcttttcttattgggttagtcccccttctatttgtgccttcgaa

SEQ ID NO: 777966 - DNA, 120 bp, Artificial Sequence
  ENSG00000244694_19 (sequence is synthesized)
cctgaccttcacactgttcaaatgcttgctgctcactgggggttgcacacttctgcactgttttgttattttacctgtgttcctaacgtttttccccccttccaaaaagcaccacaagaa

SEQ ID NO: 777967 - DNA, 120 bp, Artificial Sequence
  ENSG00000244694_20 (sequence is synthesized)
aaagaaacgtgccaagcgaaaggagagagaggaaattgaatgcatagaaattcaagagaacccggatcacgtcaccacagtatgaggggtatagaccagtggattatttttcttttccag

SEQ ID NO: 777968 - DNA, 120 bp, Artificial Sequence
  ENSG00000244694_21 (sequence is synthesized)
tattgcacaatgatgcagggcaagtaaagctcagacctcagctgcttgggctggccaggggtaacaaggcaagtcagatcaagagtgcattattcatgacacttcaaggtgcctgcttct

SEQ ID NO: 777969 - DNA, 120 bp, Artificial Sequence
  ENSG00000244694_22 (sequence is synthesized)
tggggggaagagggaataaaaaaagaggaaaaagttatttgcaaccttgttctcctctaaaaacaagtttctggatgtaatctgagagctcttccaaggaatggatgaatcaatggagtg

SEQ ID NO: 777970 - DNA, 120 bp, Artificial Sequence
  ENSG00000244694_23 (sequence is synthesized)
aggagagaaggaaggagagaaaaaactggagaggagaaaaatatcacatttggaagattatatgtgaagactcctaggatacaataaaatcatcatcatcgtcatcatcatcatcatcac

SEQ ID NO: 777971 - DNA, 120 bp, Artificial Sequence
  ENSG00000244694_24 (sequence is synthesized)
caccaataccatcagagcaatctgagagttcattctagtctaagaacccagccctctattttttggaggttaagtatcctccaggtatttctttcctccctgtgcttaacagctgtgtgt

SEQ ID NO: 777972 - DNA, 120 bp, Artificial Sequence
  ENSG00000244694_25 (sequence is synthesized)
ctgtaacccatactgtcttttctatctcccacctgactcctctcatgggaaactaaattggtttaaatcatatggaagcattataagtactgtttagtgatgaaaataaattgattccaa

SEQ ID NO: 777973 - DNA, 120 bp, Artificial Sequence
  ENSG00000244694_26 (sequence is synthesized)
tcatataggtactttcctaaatactgactgatgaagtttagatgtgctgtaatttataaataaaatgaaggaggttacctggcaatatgtgagagggaggaacaattatcgtgtttgaga

SEQ ID NO: 777974 - DNA, 120 bp, Artificial Sequence
  ENSG00000244694_27 (sequence is synthesized)
tttaaaggaaagagtaatgaacacttcccaaataattctatgagataaatattaccctgatactaaaaccagacaaaaacatcacaaggaaggaaaactacaggttaataactttatgaa

SEQ ID NO: 777975 - DNA, 120 bp, Artificial Sequence
  ENSG00000244694_28 (sequence is synthesized)
aggcgtgagccaccatgcccggcccaaatgaggtttattttataaatgcaagagtggtttaacatttgaaaatcattaacataatataccatcaatagaattaaggtcaaaaaccgcatg

SEQ ID NO: 777976 - DNA, 120 bp, Artificial Sequence
  ENSG00000244694_29 (sequence is synthesized)
ccatcaatagaattaaggtcaaaaaccgcatggtcatctcaatagacaaagaaagggcatttgacaaactctaacaacattttatgacaacaaaataactctcaacaaactagtaataga

SEQ ID NO: 777977 - DNA, 120 bp, Artificial Sequence
  ENSG00000244694_30 (sequence is synthesized)
agggaacttgcttaatctgatacagatatccataaaaacccaaagctaatatcatatttaatggagaaagaatgaacttaaaagttgtacttcaatgaataccatcaagaaagtgaaaaa

SEQ ID NO: 777978 - DNA, 120 bp, Artificial Sequence
  ENSG00000244694_31 (sequence is synthesized)
caaactcacagaatgggagaaaatattttcaaattatctatcttataagagacttgtatacagaatatttaaaggactattacagcttaataataaaaacacaacccaatttcaaagtgg

SEQ ID NO: 777979 - DNA, 120 bp, Artificial Sequence
  ENSG00000244694_32 (sequence is synthesized)
acagaagattcgaatagacatttattctaagaagataaacaagtggccaaaagtatatttaaaatgctcaaaataattagttattaaagaaatgcaaatcaaaaccacattgagcacatc

SEQ ID NO: 777980 - DNA, 120 bp, Artificial Sequence
  ENSG00000244694_33 (sequence is synthesized)
atatccattaggatgactaaaatcaagaagtaaggcaataacaagtattgatgaggtaggttaggaactctttacacattgctgatgaaaatgtaaatgatgcagctcttttggaaaata

SEQ ID NO: 777981 - DNA, 120 bp, Artificial Sequence
  ENSG00000244694_34 (sequence is synthesized)
gtctgacagttcctaaaaatgctaaacttagtattagcattttgattcagtaattccactgctaggtatatactcaagagaaatgaaaatatttatccacacaaaactgtacaaatgttc

SEQ ID NO: 777982 - DNA, 120 bp, Artificial Sequence
  ENSG00000244694_35 (sequence is synthesized)
atagcaatattattcataatggcaaaaggtagacacaatccaaatgtccatcaactgatgaatggaaacataaaaagtggtatatgcatacaatggaatattattcagccattaaaaagg

SEQ ID NO: 777983 - DNA, 120 bp, Artificial Sequence
  ENSG00000244694_36 (sequence is synthesized)
aaacaagtactgatacatgctccaatatggatgagcattgaaaatattttgataagtgaaagaagtcatgaaagtgtacataattgcatgattctatatatatgaaatgttcagagtagg

SEQ ID NO: 777984 - DNA, 120 bp, Artificial Sequence
  ENSG00000244694_37 (sequence is synthesized)
caaatatgtagagacaggaagtagatgagtagttgctgaggattggtgggttaggggatgaagccagggaatggagtcactgctaatgatacagaagttctttcaggttgatgaaatgtt

SEQ ID NO: 777985 - DNA, 120 bp, Artificial Sequence
  ENSG00000244694_38 (sequence is synthesized)
ctgaaattgattatggcaatcattgcacaactttgtagtatactagaaacttttaaattgtacacttttaatcaatgaattgcttggcattatatcacaataaagctgttaaaaacaaac

SEQ ID NO: 777986 - DNA, 120 bp, Artificial Sequence; identical to SEQ ID NO: 765709
  ENSG00000244731_0 (sequence is synthesized)

SEQ ID NO: 777987 - DNA, 120 bp, Artificial Sequence; identical to SEQ ID NO: 765710
  ENSG00000244731_1 (sequence is synthesized)

SEQ ID NO: 777988 - DNA, 120 bp, Artificial Sequence; identical to SEQ ID NO: 765711
  ENSG00000244731_2 (sequence is synthesized)

SEQ ID NO: 777989 - DNA, 120 bp, Artificial Sequence; identical to SEQ ID NO: 765712
  ENSG00000244731_3 (sequence is synthesized)

SEQ ID NO: 777990 - DNA, 120 bp, Artificial Sequence; identical to SEQ ID NO: 765713
  ENSG00000244731_4 (sequence is synthesized)

SEQ ID NO: 777991 - DNA, 120 bp, Artificial Sequence; identical to SEQ ID NO: 765714
  ENSG00000244731_5 (sequence is synthesized)

SEQ ID NO: 777992 - DNA, 120 bp, Artificial Sequence; identical to SEQ ID NO: 765715
  ENSG00000244731_6 (sequence is synthesized)

SEQ ID NO: 777993 - DNA, 120 bp, Artificial Sequence; identical to SEQ ID NO: 765716
  ENSG00000244731_7 (sequence is synthesized)

SEQ ID NO: 777994 - DNA, 120 bp, Artificial Sequence; identical to SEQ ID NO: 765717
  ENSG00000244731_8 (sequence is synthesized)

SEQ ID NO: 777995 - DNA, 120 bp, Artificial Sequence; identical to SEQ ID NO: 765718
  ENSG00000244731_9 (sequence is synthesized)

SEQ ID NO: 777996 - DNA, 120 bp, Artificial Sequence; identical to SEQ ID NO: 765719
  ENSG00000244731_10 (sequence is synthesized)

SEQ ID NO: 777997 - DNA, 120 bp, Artificial Sequence; identical to SEQ ID NO: 765720
  ENSG00000244731_11 (sequence is synthesized)

SEQ ID NO: 777998 - DNA, 120 bp, Artificial Sequence; identical to SEQ ID NO: 765721
  ENSG00000244731_12 (sequence is synthesized)

SEQ ID NO: 777999 - DNA, 120 bp, Artificial Sequence; identical to SEQ ID NO: 765722
  ENSG00000244731_13 (sequence is synthesized)

SEQ ID NO: 778000 - DNA, 120 bp, Artificial Sequence; identical to SEQ ID NO: 765723
  ENSG00000244731_14 (sequence is synthesized)

SEQ ID NO: 778001 - DNA, 120 bp, Artificial Sequence; identical to SEQ ID NO: 765724
  ENSG00000244731_15 (sequence is synthesized)

SEQ ID NO: 778002 - DNA, 120 bp, Artificial Sequence; identical to SEQ ID NO: 765725
  ENSG00000244731_16 (sequence is synthesized)

SEQ ID NO: 778003 - DNA, 120 bp, Artificial Sequence; identical to SEQ ID NO: 765726
  ENSG00000244731_17 (sequence is synthesized)

SEQ ID NO: 778004 - DNA, 120 bp, Artificial Sequence; identical to SEQ ID NO: 765727
  ENSG00000244731_18 (sequence is synthesized)

SEQ ID NO: 778005 - DNA, 120 bp, Artificial Sequence; identical to SEQ ID NO: 765728
  ENSG00000244731_19 (sequence is synthesized)

SEQ ID NO: 778006 - DNA, 120 bp, Artificial Sequence; identical to SEQ ID NO: 765729
  ENSG00000244731_20 (sequence is synthesized)

SEQ ID NO: 778007 - DNA, 120 bp, Artificial Sequence; identical to SEQ ID NO: 765730
  ENSG00000244731_21 (sequence is synthesized)

SEQ ID NO: 778008 - DNA, 120 bp, Artificial Sequence
  ENSG00000244731_22 (sequence is synthesized)
gaggggctgtgcctggctgggggcggagggctggcccagcaggtgctggtgcctgcgggctctgcccggcctgttgccttctctgtggtgcccacggcagccgccgctgtgtctctgaag

SEQ ID NO: 778009 - DNA, 120 bp, Artificial Sequence; identical to SEQ ID NO: 765732
  ENSG00000244731_23 (sequence is synthesized)

SEQ ID NO: 778010 - DNA, 120 bp, Artificial Sequence; identical to SEQ ID NO: 765733
  ENSG00000244731_24 (sequence is synthesized)

SEQ ID NO: 778011 - DNA, 120 bp, Artificial Sequence; identical to SEQ ID NO: 765734
  ENSG00000244731_25 (sequence is synthesized)

SEQ ID NO: 778012 - DNA, 120 bp, Artificial Sequence; identical to SEQ ID NO: 765735
  ENSG00000244731_26 (sequence is synthesized)

SEQ ID NO: 778013 - DNA, 120 bp, Artificial Sequence
  ENSG00000244731_27 (sequence is synthesized)
gacagcagcacctggctcacagcctttgtgttgaaggtcctgagtttggcccaggagcaggtaggaggctcgcctgagaaactgcaggagacatctaactggcttctgtcccagcagcag

SEQ ID NO: 778014 - DNA, 120 bp, Artificial Sequence
  ENSG00000244731_28 (sequence is synthesized)
gctgacggctcgttccaggacccctgtccagtgttagacaggagcatgcaggggggtttggtgggcaatgatgagactgtggcactcacagcctttgtgaccatcgcccttcatcatggg

SEQ ID NO: 778015 - DNA, 120 bp, Artificial Sequence
  ENSG00000244731_29 (sequence is synthesized)
ctggccgtcttccaggatgagggtgcagagccattgaagcagagagtggaagcctccatctcaaaggcaaactcatttttgggggagaaagcaagtgctgggctcctgggtgcccacgca

SEQ ID NO: 778016 - DNA, 120 bp, Artificial Sequence
  ENSG00000244731_30 (sequence is synthesized)
gctgccatcacggcctatgccctgacactgaccaaggcgcctgtggacctgctcggtgttgcccacaacaacctcatggcaatggcccaggagactggagataacctgtactggggctca

SEQ ID NO: 778017 - DNA, 120 bp, Artificial Sequence; identical to SEQ ID NO: 765740
  ENSG00000244731_31 (sequence is synthesized)

SEQ ID NO: 778018 - DNA, 120 bp, Artificial Sequence
  ENSG00000244731_32 (sequence is synthesized)
ctgcttcacgagggcaaagcagagatggcagaccaggcttcggcctggctcacccgtcagggcagcttccaagggggattccgcagtacccaagacacggtgattgccctggatgccctg

SEQ ID NO: 778019 - DNA, 120 bp, Artificial Sequence; identical to SEQ ID NO: 765742
  ENSG00000244731_33 (sequence is synthesized)

SEQ ID NO: 778020 - DNA, 120 bp, Artificial Sequence; identical to SEQ ID NO: 765743
  ENSG00000244731_34 (sequence is synthesized)

SEQ ID NO: 778021 - DNA, 120 bp, Artificial Sequence; identical to SEQ ID NO: 765744
  ENSG00000244731_35 (sequence is synthesized)

SEQ ID NO: 778022 - DNA, 120 bp, Artificial Sequence; identical to SEQ ID NO: 765745
  ENSG00000244731_36 (sequence is synthesized)

SEQ ID NO: 778023 - DNA, 120 bp, Artificial Sequence; identical to SEQ ID NO: 765746
  ENSG00000244731_37 (sequence is synthesized)

SEQ ID NO: 778024 - DNA, 120 bp, Artificial Sequence; identical to SEQ ID NO: 765747
  ENSG00000244731_38 (sequence is synthesized)

SEQ ID NO: 778025 - DNA, 120 bp, Artificial Sequence; identical to SEQ ID NO: 765748
  ENSG00000244731_39 (sequence is synthesized)

SEQ ID NO: 778026 - DNA, 120 bp, Artificial Sequence; identical to SEQ ID NO: 765749
  ENSG00000244731_40 (sequence is synthesized)

SEQ ID NO: 778027 - DNA, 120 bp, Artificial Sequence; identical to SEQ ID NO: 765750
  ENSG00000244731_41 (sequence is synthesized)

SEQ ID NO: 778028 - DNA, 120 bp, Artificial Sequence; identical to SEQ ID NO: 765751
  ENSG00000244731_42 (sequence is synthesized)

SEQ ID NO: 778029 - DNA, 120 bp, Artificial Sequence; identical to SEQ ID NO: 765752
  ENSG00000244731_43 (sequence is synthesized)

SEQ ID NO: 778030 - DNA, 120 bp, Artificial Sequence; identical to SEQ ID NO: 765753
  ENSG00000244731_44 (sequence is synthesized)

SEQ ID NO: 778031 - DNA, 120 bp, Artificial Sequence; identical to SEQ ID NO: 765756
  ENSG00000244731_45 (sequence is synthesized)

SEQ ID NO: 778032 - DNA, 120 bp, Artificial Sequence; identical to SEQ ID NO: 765764
  ENSG00000244731_46 (sequence is synthesized)

SEQ ID NO: 778033 - DNA, 120 bp, Artificial Sequence; identical to SEQ ID NO: 765761
  ENSG00000244731_47 (sequence is synthesized)

SEQ ID NO: 778034 - DNA, 120 bp, Artificial Sequence
  ENSG00000244731_48 (sequence is synthesized)
tctctctgggtgtagcctgctcctcttacaggtcatgcacgcagcctgtttgctctgacaccaacttcctaccctctcagcctcaaagtaactcacctttcccccttctcctcaccccct

SEQ ID NO: 778035 - DNA, 120 bp, Artificial Sequence
  ENSG00000244731_49 (sequence is synthesized)
gggagacagggaggctgaggtgtggccgaggacctgaccatctggaagtgtgaaaatccccttgggctgtcagaagccttgggcttggccataaatagggaggcagtggcacctctccat

SEQ ID NO: 778036 - DNA, 120 bp, Artificial Sequence
  ENSG00000244731_50 (sequence is synthesized)
gggggtggcgaaggtggaatgagaggatctacacagagtccccagcctgggctcaccctgcaccttctcttcccctctgaccacttttgcgcacgtcatccccgcagccaaggatgtcaa

SEQ ID NO: 778037 - DNA, 120 bp, Artificial Sequence; identical to SEQ ID NO: 765754
  ENSG00000244731_51 (sequence is synthesized)

SEQ ID NO: 778038 - DNA, 120 bp, Artificial Sequence; identical to SEQ ID NO: 765755
  ENSG00000244731_52 (sequence is synthesized)

SEQ ID NO: 778039 - DNA, 120 bp, Artificial Sequence; identical to SEQ ID NO: 765765
  ENSG00000244731_53 (sequence is synthesized)

SEQ ID NO: 778040 - DNA, 120 bp, Artificial Sequence; identical to SEQ ID NO: 765759
  ENSG00000244731_54 (sequence is synthesized)

SEQ ID NO: 778041 - DNA, 120 bp, Artificial Sequence; identical to SEQ ID NO: 765757
  ENSG00000244731_55 (sequence is synthesized)

SEQ ID NO: 778042 - DNA, 120 bp, Artificial Sequence
  ENSG00000244734_0 (sequence is synthesized)
acatttgcttctgacacaactgtgttcactagcaacctcaaacagacaccatggtgcatctgactcctgaggagaagtctgccgttactgccctgtggggcaaggtgaacgtggatgaag

SEQ ID NO: 778043 - DNA, 120 bp, Artificial Sequence
  ENSG00000244734_1 (sequence is synthesized)
ttggtggtgaggccctgggcaggctgctggtggtctacccttggacccagaggttctttgagtcctttggggatctgtccactcctgatgctgttatgggcaaccctaaggtgaaggctc

SEQ ID NO: 778044 - DNA, 120 bp, Artificial Sequence
  ENSG00000244734_2 (sequence is synthesized)
tgatggcctggctcacctggacaacctcaagggcacctttgccacactgagtgagctgcactgtgacaagctgcacgtggatcctgagaacttcaggctcctgggcaacgtgctggtctg

SEQ ID NO: 778045 - DNA, 120 bp, Artificial Sequence
  ENSG00000244734_3 (sequence is synthesized)
tgtgctggcccatcactttggcaaagaattcaccccaccagtgcaggctgcctatcagaaagtggtggctggtgtggctaatgccctggcccacaagtatcactaagctcgctttcttgc

SEQ ID NO: 778046 - DNA, 120 bp, Artificial Sequence
  ENSG00000244734_4 (sequence is synthesized)
tgtccaatttctattaaaggttcctttgttccctaagtccaactactaaactgggggatattatgaagggccttgagcatctggattctgcctaataaaaaacatttattttcattgcaa

SEQ ID NO: 778047 - DNA, 120 bp, Artificial Sequence
  ENSG00000244734_5 (sequence is synthesized)
cggctgtcatcacttagacctcaccctgtggagccacaccctagggttggccaatctactcccaggagcagggagggcaggagccagggctgggcataaaagtcagggcagagccatcta

SEQ ID NO: 778048 - DNA, 120 bp, Artificial Sequence
  ENSG00000244734_6 (sequence is synthesized)
aagtaacagggtacagtttagaatgggaaacagacgaatgattgcatcagtgtggaagtctcaggatcgttttagtttcttttatttgctgttcataacaattgttttcttttgtttaat

SEQ ID NO: 778049 - DNA, 120 bp, Artificial Sequence
  ENSG00000244734_7 (sequence is synthesized)
tcttgctttctttttttttcttctccgcaatttttactattatacttaatgccttaacattgtgtataacaaaaggaaatatctctgagatacattaagtaacttaaaaaaaaactttac

SEQ ID NO: 778050 - DNA, 120 bp, Artificial Sequence
  ENSG00000244734_8 (sequence is synthesized)
ttggaaaagcaacccctgccttgaagccaggatgatggtatctgcagcagttgccaacacaagagaaggatccatagttcatcatttaaaaaagaaaacaaaatagaaaaaggaaaacta

SEQ ID NO: 778051 - DNA, 120 bp, Artificial Sequence
  ENSG00000244734_9 (sequence is synthesized)
tttctgagcataagaagttgtaggaaggttttaatccaaataaggagaagatatgcttagaaccgaggtagagttttcatccattctgtcctcaacctcaaacagacaccatggtgcatc

SEQ ID NO: 778052 - DNA, 120 bp, Artificial Sequence
  ENSG00000244752_0 (sequence is synthesized)
acggcactcgcaggggctggtgtcactggtcattcctgcacaggacagtccaccatggcctcagatcaccagacccaggcgggcaagccacagtccctcaaccccaagatcatcatcttt

SEQ ID NO: 778053 - DNA, 120 bp, Artificial Sequence
  ENSG00000244752_1 (sequence is synthesized)
gagcaggaaaactttcaaggccactcgcatgagctcaatgggccctgccccaacctgaaggaaactggcgtggagaaggcaggttctgtcctagtgcaggctggaccctgggtgggctat

SEQ ID NO: 778054 - DNA, 120 bp, Artificial Sequence
  ENSG00000244752_2 (sequence is synthesized)
gaacaggccaactgcaagggcgagcagtttgtgtttgagaagggtgagtacccccgctgggactcatggaccagcagccgaaggacggactccctcagctccctgaggcccatcaaagtg

SEQ ID NO: 778055 - DNA, 120 bp, Artificial Sequence
  ENSG00000244752_3 (sequence is synthesized)
ggaagaagatggaaatcatagatgacgatgtacccagcttccacgcccatggctaccaggagaaggtgtcatctgtgcgggtgcagagtggcacgtgggttggctaccagtaccccggct

SEQ ID NO: 778056 - DNA, 120 bp, Artificial Sequence
  ENSG00000244752_4 (sequence is synthesized)
accgtgggctgcagtacctgctggagaagggagactacaaggacagcagcgactttggggcccctcacccccaggtgcagtccgtgcgccgtatccgcgacatgcagtggcaccaacgtg

SEQ ID NO: 778057 - DNA, 120 bp, Artificial Sequence
  ENSG00000244752_5 (sequence is synthesized)
gtgccttccacccctccaactagtgccctccccaccatgcctccttcccaggacccaggtctgctgcccaggaaccctccagacctcccagagagtgaataaagtgtgacttgcaacttg

SEQ ID NO: 778058 - DNA, 120 bp, Artificial Sequence
  ENSG00000244752_6 (sequence is synthesized)
tttcccttgcctttccgtcggacatctttgatctgctgtctggattgtaaaagatgctggctgtgcttttcctactctgtagacgttacaatgttgctgtgtgagggccacttccaccag

SEQ ID NO: 778059 - DNA, 120 bp, Artificial Sequence
  ENSG00000244752_7 (sequence is synthesized)
ccagcatccacatgcctatgtgcctggaaactctctcctgtgcctggagaggtgggaggcagctataatcttggcggaatgaatacctactaggagcaaccttcatccaatgactaacag

SEQ ID NO: 778060 - DNA, 120 bp, Artificial Sequence
  ENSG00000244754_0 (sequence is synthesized)
cggaggtgaggtttgttaccgcgattctgagaggtgggcttttagtccctccagacctcggctttagtgctgtctccgcttttctttcaccttcacagaggttcgtgtcttcctaaaaga

SEQ ID NO: 778061 - DNA, 120 bp, Artificial Sequence
  ENSG00000244754_1 (sequence is synthesized)
aggttttattgggaggtaaaggtcaatgcgtaggggtagagtaagatgtcttatggtgaaattgaaggtaaattcttgggacctagagaagaagtaacgagtgagccacgctgtaaaaaa

SEQ ID NO: 778062 - DNA, 120 bp, Artificial Sequence
  ENSG00000244754_2 (sequence is synthesized)
ttgaagtcaaccacagagtcgtatgtttttcacaatcatagtaatgctgattttcacagaatccaagagaaaactggaaatgattgggtccctgtgaccatcattgatgtcagaggacat

SEQ ID NO: 778063 - DNA, 120 bp, Artificial Sequence
  ENSG00000244754_3 (sequence is synthesized)
agttatttgcaggagaacaaaatcaaaactacagatttgcatagacctttgcatgatgagatgcctggtaatagaccagatgttattgaatccattgattcacaggttttacaggaagca

SEQ ID NO: 778064 - DNA, 120 bp, Artificial Sequence
  ENSG00000244754_4 (sequence is synthesized)
cgtcctccattagtatccgcagacgatgagatatatagcacaagtaaagcatttataggacccatttacaaaccccctgagaaaaagaaacgtaatgaagggaggaatgaggcacatgtt

SEQ ID NO: 778065 - DNA, 120 bp, Artificial Sequence
  ENSG00000244754_5 (sequence is synthesized)
ctaaatggtataaatgacagaggaggacaaaaagagaaacagaaatttaactctgaaaaatcagagattgacaatgaattattccagttttacaaagaaattgaagagcttgaaaaggaa

SEQ ID NO: 778066 - DNA, 120 bp, Artificial Sequence
  ENSG00000244754_6 (sequence is synthesized)
aaagatggttttgagaacagttgtaaagaatctgaaccttctcaggaacaatttgttccattttatgagggtcataataatggtctcttaaaacctgatgaagaaaagaaagatcttagt

SEQ ID NO: 778067 - DNA, 120 bp, Artificial Sequence
  ENSG00000244754_7 (sequence is synthesized)
aataaagctatgccatcacattgtgattatcagcagaacttggggaatgagccagacaaatatccctgtaatggacaagtaatacctacattttgtgacacttcatttacttctttcagg

SEQ ID NO: 778068 - DNA, 120 bp, Artificial Sequence
  ENSG00000244754_8 (sequence is synthesized)
cctgaatggcagtcagtatatccttttatagtgccctatggtccccctcttcccagtttgaactatcatttaaacattcagagattcagtggtccaccaaatccaccatcaaatattttc

SEQ ID NO: 778069 - DNA, 120 bp, Artificial Sequence
  ENSG00000244754_9 (sequence is synthesized)
caagcccaagatgactctcagatacaaaatggatattatgtaaataattgtcatgttaactggaattgcatgacttttgatcagaacaatgaatatactgactgtagtgagaataggagt

SEQ ID NO: 778070 - DNA, 120 bp, Artificial Sequence
  ENSG00000244754_10 (sequence is synthesized)
agtgttcatccctctggaaatggctgcagtatgcaagatcgatatgtgagtaatggtttctgtgaagtcagagaaagatgctggaaagatcattgtatggacaagcataatggaacagac

SEQ ID NO: 778071 - DNA, 120 bp, Artificial Sequence
  ENSG00000244754_11 (sequence is synthesized)
aggtttgtgaaccagcagtttcaagaggaaaagttaaataaattgcagaagttacttattcttttaagaggtctgcctggttctgggaaaacaacattgtctcgaattctgcttggtcag

SEQ ID NO: 778072 - DNA, 120 bp, Artificial Sequence
  ENSG00000244754_12 (sequence is synthesized)
aatcgtgatggcattgtgttcagcactgatgactattttcaccatcaagatgggtacaggtataatgttaatcaacttggtgatgcccatgactggaaccagaacagagcaaaacaagct

SEQ ID NO: 778073 - DNA, 120 bp, Artificial Sequence
  ENSG00000244754_13 (sequence is synthesized)
atcgatcagggaagatctccagttataatagataacactaatatacaagcttgggaaatgaagccatatgtggaagtggccataggaaaaggatacagagtagagtttcatgaacctgaa

SEQ ID NO: 778074 - DNA, 120 bp, Artificial Sequence
  ENSG00000244754_14 (sequence is synthesized)
acttggtggaaatttgatcctgaagaattagaaaagaggaataaacatggtgtgtctcgaaagaagattgctcagatgttggatcgttatgaatatcaaatgtccatttctattgtaatg

SEQ ID NO: 778075 - DNA, 120 bp, Artificial Sequence
  ENSG00000244754_15 (sequence is synthesized)
aattcagtggaaccatcacacaaaagcacacaaagacctcctcctccacaggggagacagaggtggggaggctctcttggctcacataatcgtgtctgtgtcacaaataatcattaaatt

SEQ ID NO: 778076 - DNA, 120 bp, Artificial Sequence
  ENSG00000244754_16 (sequence is synthesized)
agctattttcagctaacacatttgttgttgcacttgaaaaagagttagtgagcctgtcttggagtttaagtagtttcaaataaaaaaaggctacagtgcctcacaaaggatgttcccagc

SEQ ID NO: 778077 - DNA, 120 bp, Artificial Sequence
  ENSG00000244754_17 (sequence is synthesized)
aagttgtttaaattcccagcaagttgttaaagtgtaaataaaaatatatgaaattgtattttaaatgtttttatattctcttgttgtaatactcttggctgttatggaagcacctgagta

SEQ ID NO: 778078 - DNA, 120 bp, Artificial Sequence
  ENSG00000244754_18 (sequence is synthesized)
atagagtggtgggtaggagctaggatgtttttctacaatcgaattttaaactaatttatctattttatagacactattgaacagttttttaatagttcatatctaaatctaacttttcat

SEQ ID NO: 778079 - DNA, 120 bp, Artificial Sequence
  ENSG00000244754_19 (sequence is synthesized)
aaaactttacggtttttccttcactaccttaaatatgcaagaaatactgacttggtatagggtaccttagttttctctattcattagacaggtaaaattatatttcagctgattgatctg

SEQ ID NO: 778080 - DNA, 120 bp, Artificial Sequence
  ENSG00000244754_20 (sequence is synthesized)
tgtgacaaaattatttcttagctataatcagcacatcacttagttcaaacaaaattccccagcaaatgttagatagtaggtatatcagtcacctggggagttttcttcataatatgcata

SEQ ID NO: 778081 - DNA, 120 bp, Artificial Sequence
  ENSG00000244754_21 (sequence is synthesized)
ttcatcttgtaatgcatacatagttatcatcctccttctcaacccatctccctaaccccacatgcttgccagttcttgaagggataaagtgattctaataatgttttacttctctctgtt

SEQ ID NO: 778082 - DNA, 120 bp, Artificial Sequence
  ENSG00000244754_22 (sequence is synthesized)
caatttaatgtgatataattctagtataaaaatattttggacagttgcttaacatggtcataagaggatttgtactatagaatatcttctagtactaatttttctgtagagcaaattata

SEQ ID NO: 778083 - DNA, 120 bp, Artificial Sequence
  ENSG00000244754_23 (sequence is synthesized)
tttctctcactggatagtttttagatgtgtttcttcatataaaattaaaaactgagatggaattcatttcagaggtcttgtcattcatcccctgccttcaaaccaagctttacctagact

SEQ ID NO: 778084 - DNA, 120 bp, Artificial Sequence
  ENSG00000244754_24 (sequence is synthesized)
aacctagataattaagcatttctctttgcaacatgaggaaaaaaacactactacttctcttaataccattgttaccaatgtcttctgaagaatatttcttcaacagttttgatttacttt

SEQ ID NO: 778085 - DNA, 120 bp, Artificial Sequence
  ENSG00000244754_25 (sequence is synthesized)
tttgatttactctttttaggggaaaaaaaacccagctaattacaatgctgtcttaaaaattaagcattatgattctttatatgttttacataatattttgtggcctttaagctttctcct

SEQ ID NO: 778086 - DNA, 120 bp, Artificial Sequence
  ENSG00000244754_26 (sequence is synthesized)
aaaccagcacatcttgaatcccatagtatttctttgttttaaaaccttttgctattcctttcaactttagatattctctcacatctttatattactttttaagttgtcaggccaaaaact

SEQ ID NO: 778087 - DNA, 120 bp, Artificial Sequence
  ENSG00000244754_27 (sequence is synthesized)
agattcactgctatcaacaaggtctttgttacattgcctttagtgaaataagaatatgattttatttgtactattcagtgctgttaacatttgaatgaatattacctttatcttgtttaa

SEQ ID NO: 778088 - DNA, 120 bp, Artificial Sequence
  ENSG00000244754_28 (sequence is synthesized)
tacgtgtgtttgtatatatttgttcatcttaactacgatgtaagaatatgctaattcatgttttgtgtgtaaatgtatattgtatacatatacacatcttcatctatgttttcatatatt

SEQ ID NO: 778089 - DNA, 120 bp, Artificial Sequence
  ENSG00000244754_29 (sequence is synthesized)
cttttatttcagagtaatacttgttggtgtttggacttgtgtttctaagtattttattctgtagattagcgcagtttgaaaattgtacaaaaggatttcattttgggacaggtgaaacaa

SEQ ID NO: 778090 - DNA, 120 bp, Artificial Sequence
  ENSG00000244754_30 (sequence is synthesized)
tgaaacaactcttaggtagactatatgtccctttctttctgtctgtcttcataaacttaggagtaatagtactataaatttagctttttggccgggcacggtggctaacacctgtaatcc

SEQ ID NO: 778091 - DNA, 88 bp, Artificial Sequence
  ENSG00000244754_31 (sequence is synthesized)
ttgaacctgggaggcagagtttgcagtaagcagagattgcgccacttgcactccagcctgtgattagtttttttaaaataacttttac

SEQ ID NO: 778092 - DNA, 120 bp, Artificial Sequence
  ENSG00000244754_32 (sequence is synthesized)
tccttctcaaaaaaaaaaattagtttttttaaaataacttttacatttatttttggaaagtagagtattacctttgggagaaacagattatgaggaaatatgttcatattaagtttattt

SEQ ID NO: 778093 - DNA, 120 bp, Artificial Sequence
  ENSG00000244754_33 (sequence is synthesized)
ttccagattttattatagacttgtcttcatctcctagttctgactactaaataataatcagttagagatcattcgtcattaccaattaattttttacattataatgttagccaactactg

SEQ ID NO: 778094 - DNA, 120 bp, Artificial Sequence
  ENSG00000244754_34 (sequence is synthesized)
ttgcatcacagagtccaaataaataaataaatcttactgaggctggaaagctaacattcttactcagaattaaacaaacaaggtcttgtcctgctacgtgggctggatggagtgtggtgg

SEQ ID NO: 778095 - DNA, 120 bp, Artificial Sequence
  ENSG00000244754_35 (sequence is synthesized)
cgtgatcatagcttgctgaaaccttgaactcctaggctcaagaggtcctcctttctcagcatcccaagtagctgggacttcaagcatgcactgccacacctggcttattttgcattaaaa

SEQ ID NO: 778096 - DNA, 120 bp, Artificial Sequence
  ENSG00000244754_36 (sequence is synthesized)
cacctggcttattttgcattaaaaaaatttttttgtagagatggggtcttgccttgtttcccaaactggtcttgtactcctggcctcaagtgatcctcccaaagtgctgagattacaggc

SEQ ID NO: 778097 - DNA, 83 bp, Artificial Sequence
  ENSG00000244754_37 (sequence is synthesized)
aggcatgagccactgcaccagctttagtggatcacccaagctggagtacagtggcatgatgtcagctcactgcaacctccacc

SEQ ID NO: 778098 - DNA, 120 bp, Artificial Sequence
  ENSG00000244754_38 (sequence is synthesized)
tagttggtttttttaaagtggaaaaacagttgttttcctaaacattgtggctaattttaattaaaaacagaatggaggaatgaatatgcagtggaaatactaaaatcactgtttaaagtc

SEQ ID NO: 778099 - DNA, 120 bp, Artificial Sequence
  ENSG00000244754_39 (sequence is synthesized)
attgcttggtgtttaaaaatctataaaaatgtgaaatttacaatttttcatcaaaattctattcagacagtcttttttgggggttggggttaagagatgaggtctctttctgttgtatag

SEQ ID NO: 778100 - DNA, 120 bp, Artificial Sequence
  ENSG00000244754_40 (sequence is synthesized)
tctcaagtgatcctcctgcctcagcctacctggtagctgggattacaggcacccagccaggtataatgttagtggaatagacccctgctgctatgccctattctaaccatctccatcaca

SEQ ID NO: 778101 - DNA, 120 bp, Artificial Sequence
  ENSG00000244754_41 (sequence is synthesized)
aaccatctccatcacaaataattaaagtggatattaatcatatttacctaagatggagtacatcttagttaagtagaatacaacttctagtttggttcagtaagattaaattgtatttat

SEQ ID NO: 778102 - DNA, 120 bp, Artificial Sequence
  ENSG00000244754_42 (sequence is synthesized)
ttttttgtttgttccataggtttagtgcagaagttacttttttgtggtaaatgaatttatgattttttatgtttcataattttagtgaaaattcttgtgtggtaattaatttgaactttt

SEQ ID NO: 778103 - DNA, 120 bp, Artificial Sequence
  ENSG00000244754_43 (sequence is synthesized)
gatactgctttttaaccaggtaatctttattttcagtatttatctttgtaaaagataatgttagcttttttatatttttgtctgttttaaaagtaagattatttacaaaagactgaattt

SEQ ID NO: 778104 - DNA, 120 bp, Artificial Sequence
  ENSG00000244754_44 (sequence is synthesized)
ttttaattgttggagtgggtgatttaagtatttgaactttgcttatctcttgtctaattaatacagattctggaattttccagttttacgtatagataagttttgaaagtatgatttaag

SEQ ID NO: 778105 - DNA, 120 bp, Artificial Sequence
  ENSG00000244754_45 (sequence is synthesized)
aggatatgaaatgtttgtattggctatacttgaatttttttattgcaaaaatgtctgattttctgagactggttttctaactatttataaagaaaattggttgtggtctctttggaaaat

SEQ ID NO: 778106 - DNA, 120 bp, Artificial Sequence
  ENSG00000244754_46 (sequence is synthesized)
gtagaagaaatgtagttgtgtgttctagtgccttggccagataggcttgctagtctttattgaagtttaatgtattctgacatgaatacaataactaataagggctaaagttgtattgtt

SEQ ID NO: 778107 - DNA, 120 bp, Artificial Sequence
  ENSG00000244754_47 (sequence is synthesized)
gttgctttttttttcttaacatttgcaatccacattgaacagtgttttataacaaaatcttagcttatgattcagaataaataattcagaacattcagaataaataatttggtggcagca

SEQ ID NO: 778108 - DNA, 120 bp, Artificial Sequence
  ENSG00000244754_48 (sequence is synthesized)
gcaggagttaagttagtgattttttagagttaagttttaggagctacaatttataaattaaaaattttcctattaaagttaccagctgtgtcttcgtgaattttctgaggagagattgta

SEQ ID NO: 778109 - DNA, 120 bp, Artificial Sequence
  ENSG00000244754_49 (sequence is synthesized)
ttaagggattaatgaatgtttggtgataagactggcatacaaatctttatttttaaaaggtatcattaaaacagttggcttccctgtatgtatactgtatttccttcttacacagtcctt

SEQ ID NO: 778110 - DNA, 120 bp, Artificial Sequence
  ENSG00000244754_50 (sequence is synthesized)
aggctggtaagaagtagtagtaaatttcttgaaatagaccctaaaaatatagggattagtgattgtcttatgtgtcattttgattccttttttactttgcaaagcagtatttagattgat

SEQ ID NO: 778111 - DNA, 120 bp, Artificial Sequence
  ENSG00000244754_51 (sequence is synthesized)
tcaatttagttgatttaaattgccaaatatgttaagcctaagttttcacttttgcatggtttgtaagtttcagagcaaaccttgaaaagctaatgattatgattattggcaactaagttc

SEQ ID NO: 778112 - DNA, 120 bp, Artificial Sequence
  ENSG00000244754_52 (sequence is synthesized)
agaaaacatgtaaaagaatggctacaatttactctcaataatttagactacattgagtggtgtaatttttgtaatagaatatacatgtatgtaagcagtaatttggaagatctcctacag

SEQ ID NO: 778113 - DNA, 120 bp, Artificial Sequence
  ENSG00000244754_53 (sequence is synthesized)
ctgggattactggcatgagccactgcgcctggccagaaattcttaatgtattatcactctatgcacaagaacaagaagaaggagtagcacaaataactttggaaagagagtctcaacagt

SEQ ID NO: 778114 - DNA, 120 bp, Artificial Sequence
  ENSG00000244754_54 (sequence is synthesized)
ataactttggaaagagagtctcaacagtaaatagttattctagaagctaagctgtatgtattgaaaagttttgactttttgtatatccaatagaaatttatttaatcattcataatctct

SEQ ID NO: 778115 - DNA, 120 bp, Artificial Sequence
  ENSG00000244754_55 (sequence is synthesized)
ttttcttccttctccttctgacaaattctgttctctgaaaaataaccctgttacattccagttgtggtaattgtaataattacacattataattcacttcccagaatggaatatgttaac

SEQ ID NO: 778116 - DNA, 120 bp, Artificial Sequence
  ENSG00000244754_56 (sequence is synthesized)
ttcagtaagttctcttaaatttcagtgtggaaaaaaatagatgatttttctgtaggatggacacaggcacagtctgatccctaatctcaaaactagacacaattgcattagcaattggtg

SEQ ID NO: 778117 - DNA, 120 bp, Artificial Sequence
  ENSG00000244754_57 (sequence is synthesized)
agtaactgaagacttcacattgaagtcttggtttggtttttaatatttccatttcctttttttttgtaattgaactactttttgtaaattaatgggaagattgaaatactttgagaggag

SEQ ID NO: 778118 - DNA, 120 bp, Artificial Sequence
  ENSG00000244754_58 (sequence is synthesized)
ctattgggtttgcctctcagttttgctagtaactaagggaaaaagaataatgtggtttttcatggttgaaattgtgttttagtagagtccattgaaatatactttattatttggattatt

SEQ ID NO: 778119 - DNA, 120 bp, Artificial Sequence
  ENSG00000244754_59 (sequence is synthesized)
ttcttattttccagttttaactgttttcagatggtacatgtaaagttaaagttttattcttggtgttaattttcagttggtaattataataattatacagctttcagaatatctcttcat

SEQ ID NO: 778120 - DNA, 120 bp, Artificial Sequence
  ENSG00000244754_60 (sequence is synthesized)
tctgaaagaaattctgaagagtaattctgaactcttcagttttttagtgtaacaaaatgaaagaaaatttactcaggaagggattgtgggttctttgttttcctttttttttcttccgtt

SEQ ID NO: 778121 - DNA, 120 bp, Artificial Sequence
  ENSG00000244754_61 (sequence is synthesized)
tttcttaatcttagaaatcatatttctttttctttcatagtcttttcttgtgtacgtgttttctttcactctattcattttttgctcagctatcctcctgtaacctcataacattcttaa

SEQ ID NO: 778122 - DNA, 120 bp, Artificial Sequence
  ENSG00000244754_62 (sequence is synthesized)
tgaagatgatgggatggtaagtgtctggcaaagcgggagataatatctttttccctcctgtattctactgaactcattgttccttctcagccttacttaatcaagttaaacttatacacc

SEQ ID NO: 778123 - DNA, 120 bp, Artificial Sequence
  ENSG00000244754_63 (sequence is synthesized)
acagctctgcatttagtttcctgaccctgtgggttaggtagaatttagatacgaaaatggctggaaagatttataaaaatctattatgttaatcattggtggggaatccataacatggca

SEQ ID NO: 778124 - DNA, 120 bp, Artificial Sequence
  ENSG00000244754_64 (sequence is synthesized)
tagaacttgaatgtatggatttgagaaaaaatatttacattaacttaattatatgatgatggatgctaattgataagcagtaggttgaaattcactgttacataattcactattatgtca

SEQ ID NO: 778125 - DNA, 120 bp, Artificial Sequence
  ENSG00000244754_65 (sequence is synthesized)
tggttgctggttgcccttaactgaatgattttgaaggaaagctgataactattttgagttaaatttttacaagtggttccttatatggtgcaatgccgctgcaacaaacagtaggaattt

SEQ ID NO: 778126 - DNA, 120 bp, Artificial Sequence
  ENSG00000244754_66 (sequence is synthesized)
tgtagcaaaaagtcttaatagtatccatttaaataactgctgcttatttaatgcccatcagtgctaggcccccatctaaatgtgattgttacagtcattaattttcacaattctacaatg

SEQ ID NO: 778127 - DNA, 120 bp, Artificial Sequence
  ENSG00000244754_67 (sequence is synthesized)
gctttagaaagaggaaacaaaaatttaggttaaacgacttacctaacatgatttctctagtaagagataaaactgtgattcaaatctatgttagacatgtatctactgtaaccctgtatt

SEQ ID NO: 778128 - DNA, 120 bp, Artificial Sequence
  ENSG00000244754_68 (sequence is synthesized)
atttttttttaaccacatagttatcttttttttttttaatttggtgtttttccaaggttaaaaagaaattccagtgaagagttgattccatctttatggtatctttattttttaaggtta

SEQ ID NO: 778129 - DNA, 120 bp, Artificial Sequence
  ENSG00000244754_69 (sequence is synthesized)
gttataaggtatgttgatttatcaggaaagttaaatgaagaaatcttcaagaggccatttataattctgtttttaaaagtcaaaattgaaaagagttgggccaggtgcagtggctcacgc

SEQ ID NO: 778130 - DNA, 72 bp, Artificial Sequence
  ENSG00000244754_70 (sequence is synthesized)
gctcacgcctgtaatcccagcattttcggaggccgggtgggtagatcacctgaggtgagggatacaaaaatt

SEQ ID NO: 778131 - DNA, 80 bp, Artificial Sequence
  ENSG00000244754_71 (sequence is synthesized)
atcaatagacttgataatcatattttaggaacatttttttccattgaattatttacatatactgttgtactgtaaggctt

SEQ ID NO: 778132 - DNA, 120 bp, Artificial Sequence
  ENSG00000244754_72 (sequence is synthesized)
tgaaaagatgggaagaacctaaggaattaccagctgaggacagccaagacttaacaagcactgactaccgttcccttgagctaccattatcacaagggtttgcctttcaattagtaaagc

SEQ ID NO: 778133 - DNA, 120 bp, Artificial Sequence
  ENSG00000244754_73 (sequence is synthesized)
tttttggatctccaggcgttccaatggaatccttgttgcctgatgactatgtggttccccttgactggaagacactaaagatgatctacttgcaatggaagatgtcagtggagaaaagac

SEQ ID NO: 778134 - DNA, 120 bp, Artificial Sequence
  ENSG00000244754_74 (sequence is synthesized)
agaagaagattggttgaaaaatgaaaattccttgaactttgagttctgctgtcttcatggtactgctgaagatcatgatcacggagaaaagtcagagtgctcagtgccaacccaagggat

SEQ ID NO: 778135 - DNA, 120 bp, Artificial Sequence
  ENSG00000244754_75 (sequence is synthesized)
ggcataggctcagcaaaaccaaacagaagaggaacagaaaaagaaacaaaaagcagaacagtcagaatagaatcatggaggaaaactcattagaattcttaagtgatcttacaccgggag

SEQ ID NO: 778136 - DNA, 120 bp, Artificial Sequence
  ENSG00000244754_76 (sequence is synthesized)
atcaggacccatctcagagtgaagaggaagacattgaaaagaccagaagagaatcagaatatcccttcattgatggtctacaaaatgaagtcggagattttgtgactggatataaagaaa

SEQ ID NO: 778137 - DNA, 120 bp, Artificial Sequence
  ENSG00000244754_77 (sequence is synthesized)
aaagatggaaaaataaagatcctaaagacagtttccaaaacgttatgtctatagttgaattagacaacacaccaaagaattacctctctaaggaaggtgataacttgtttgtaagtttgt

SEQ ID NO: 778138 - DNA, 120 bp, Artificial Sequence
  ENSG00000244754_78 (sequence is synthesized)
tactgaggccaaatgaaatctccgttacttgtccaatactgactcaaaacctttcctgtgtaacaactgatgactgctctggcatgaaggtagaaaagcatattagaaataggcatacca

SEQ ID NO: 778139 - DNA, 120 bp, Artificial Sequence
  ENSG00000244754_79 (sequence is synthesized)
tagcattagacacccaggacctttctgcggaaacttcatgcttatttatgaagaagagagaaatagtagataaaaatctctcacatgaacccattctgtgccatcaacatggaatcagaa

SEQ ID NO: 778140 - DNA, 120 bp, Artificial Sequence
  ENSG00000244754_80 (sequence is synthesized)
tgtcagataaagttttaagagaggaacaagtgtatacaactaaaatcaatcactgggcttttttcacaaccaatttatctgatgaagatttacagctgggctctgacagacagccctatt

SEQ ID NO: 778141 - DNA, 120 bp, Artificial Sequence
  ENSG00000244754_81 (sequence is synthesized)
ttcacttcggtggcagcatcagaaccaggaaacaatccagaaatattgacagacaaactactgataggaaatgaagatttttcacctccacctgaaactatggattcattcatagaaaca

SEQ ID NO: 778142 - DNA, 120 bp, Artificial Sequence
  ENSG00000244754_82 (sequence is synthesized)
aacctcttcagaagctgcttacctcaaccggatataccaaagaatgccttagaatcaacaaaaaataagaaaaggaggaagaaaaggattttcaatttggtaccaaattttgacttatta

SEQ ID NO: 778143 - DNA, 120 bp, Artificial Sequence
  ENSG00000244754_83 (sequence is synthesized)
ggacagagtcgtatcggtgtaaaagaaagggagaaatgtgacctgttaacaaaaaaccatggactaaaaattactttgggagaagaaaaagatagaatttcagaaaggaacagtgaagag

SEQ ID NO: 778144 - DNA, 120 bp, Artificial Sequence
  ENSG00000244754_84 (sequence is synthesized)
gagaataaacaaaaacttatgacctttgatcatcatccattgtggttttaccttgatattatcaaagctacccctttaaatattgatggacagcgttattctcattgcctgtcatttaac

SEQ ID NO: 778145 - DNA, 120 bp, Artificial Sequence
  ENSG00000244754_85 (sequence is synthesized)
agactaaggtgctctgcatctttatacaaaaattatattccttcttttgtgctacataatttatctagtatttggaagccatcttttacaaacaagaaactgtttttgactttcgaatct

SEQ ID NO: 778146 - DNA, 120 bp, Artificial Sequence
  ENSG00000244754_86 (sequence is synthesized)
cagacaagagtaggtaataaactaaatgatgcagggtttatttctccagaaattttacatagtcatcctgatacttcgtgctctttgggagtcacttctgattttcactttttaaatgaa

SEQ ID NO: 778147 - DNA, 120 bp, Artificial Sequence
  ENSG00000244754_87 (sequence is synthesized)
gtttacggagccggtgtgaacgtcggacttcaattcccacaatgcctggcgcaaacgcctagttttggcctgggtaaccgagaggtgaccgccatcttgcgtacggagatgtcttatggt

SEQ ID NO: 778148 - DNA, 120 bp, Artificial Sequence
  ENSG00000244754_88 (sequence is synthesized)
ataatctgttcaaccattcttgataagttatctgaataataaaaaaactcaacagaggaggtaacaatttgaacattttattgtctaatttgaagatgtatgccatactttgtttgatag

SEQ ID NO: 778149 - DNA, 120 bp, Artificial Sequence
  ENSG00000244754_89 (sequence is synthesized)
aagaaagtaaggcacagaaaacttgagtaccttatttttaaaactgcattaggattaaaaggttagcccctatatccaagtattggtctgagatcccatttctagaattctgaaatccaa

SEQ ID NO: 778150 - DNA, 120 bp, Artificial Sequence
  ENSG00000244754_90 (sequence is synthesized)
aaagctctgaaaatcaatagttatttttccaaatgtattcattgtggtaaaatacaccaatataaaatttaccatcttaaccacttttaagtgtgttataaatacattcatgctaccatc

SEQ ID NO: 778151 - DNA, 120 bp, Artificial Sequence
  ENSG00000244754_91 (sequence is synthesized)
ttcagcaaaacaagctatcgatcagggaagatctccagttataatagataacactaatatacaagcttgggaaatgaagccatatgtggaagtggtaaatatgaaacatgagaaagtttt

SEQ ID NO: 778152 - DNA, 120 bp, Artificial Sequence
  ENSG00000244754_92 (sequence is synthesized)
tattttttattcttgtcaattttttcacattctaaaattttggctggttggatcttgattattaaaacatttgtcctttgttttctaaagaggtttgttggtttgcttagtttttaaaaa

SEQ ID NO: 778153 - DNA, 85 bp, Artificial Sequence
  ENSG00000244754_93 (sequence is synthesized)
ttttctaaagaggtttgttggtttgcttagtttttaaaaaaattgtgaatgatgttttttaaggaacatgttcatcttgttaatt

SEQ ID NO: 778154 - DNA, 63 bp, Artificial Sequence
  ENSG00000244754_94 (sequence is synthesized)
catctgccgattgttttgactttccttaaggatagtaatcttaaggaattactattccttgag

SEQ ID NO: 778155 - DNA, 120 bp, Artificial Sequence
  ENSG00000244754_95 (sequence is synthesized)
ccttaaggatagtaatcttaaggaattactattccttgagaatagtaatcaaaatttatccggttaaatagtcttaactgttataaaccatattattttataaagcgtcatttttcttgg

SEQ ID NO: 778156 - DNA, 120 bp, Artificial Sequence
  ENSG00000244754_96 (sequence is synthesized)
tcgagcaagtgtatagtattgtcgaaatgaaatttaactgtctgccttctttttactttaagaagtacttctctgggtttttgttttcttcctttcctttgtgtaggccataggaaaagg

SEQ ID NO: 778157 - DNA, 120 bp, Artificial Sequence
  ENSG00000244754_97 (sequence is synthesized)
attaaggagaaaaagtaggaggaggaggagaaagagtgctttgcccagggtgtgactgaagaaatatcaaatgtttcctagtaagacagcaactcagcaaccagcagactaatggggatg

SEQ ID NO: 778158 - DNA, 120 bp, Artificial Sequence
  ENSG00000244754_98 (sequence is synthesized)
aggttctggtacaagatgatgaacaccagtatgtcagacaatgacttgggagctggaatcaaggacatgaccaagagcagcaagaacaaaagggagactgacacattgatcactttctca

SEQ ID NO: 778159 - DNA, 120 bp, Artificial Sequence
  ENSG00000244754_99 (sequence is synthesized)
tcagcctcctgagtaactaggactacaggcaggtagctgggactacatacgtgtaccagcacacccagctattttttaaaaaaactttgtagaattttgaatgagccacagtgcctggct

SEQ ID NO: 778160 - DNA, 120 bp, Artificial Sequence
  ENSG00000244754_100 (sequence is synthesized)
gcctggctgaggatggtttcgagttaaaagttttcacgctgttacaatttatagtttcacaagaatgtttaaacatcagataagtttgatcataagactgtttcctagtatttattttat

SEQ ID NO: 778161 - DNA, 120 bp, Artificial Sequence
  ENSG00000244754_101 (sequence is synthesized)
aacgctctagaatttctccaaatatattagagggtggcatagcagtctaaaaaaatattaatttttttatttttttaatgccatagaacatttttgctcaaatcaaataatgatggtatt

SEQ ID NO: 778162 - DNA, 120 bp, Artificial Sequence
  ENSG00000244754_102 (sequence is synthesized)
gcaattctgcaaatgtttggagttactggcctaaaggtaaggggagcaagattagttgataagttgaatgaatagacagggcagagccagtatacctttggtgaactagtaagtttattt

SEQ ID NO: 778163 - DNA, 78 bp, Artificial Sequence
  ENSG00000244754_103 (sequence is synthesized)
gcagagccagtatacctttggtgaactagtaagtttatttgcgtgggacattttttttctctttgcagtactggcata

SEQ ID NO: 778164 - DNA, 83 bp, Artificial Sequence
  ENSG00000244754_104 (sequence is synthesized)
ctacaaaaagtagtaagctacttgggaggctgagataggaggattgcttgaggcagggaggtcaaggctgcagtgagctgaga

SEQ ID NO: 778165 - DNA, 120 bp, Artificial Sequence
  ENSG00000244754_105 (sequence is synthesized)
agctgagatcatgctactgcactccagtctgggtgacagggcaagattctgtctcaacaaacaaacaaacaaacaaactagtacagaatatttcattaaaatgtttatgtcatttgaatt

SEQ ID NO: 778166 - DNA, 120 bp, Artificial Sequence
  ENSG00000244754_106 (sequence is synthesized)
taaaatgtttatgtcatttgaattatgttaattatacttcctaaatggaataatggtatcttattattaaaccagaataataaatatgaacttgaatatatttaaatgctaggcaccatt

SEQ ID NO: 778167 - DNA, 120 bp, Artificial Sequence
  ENSG00000244754_107 (sequence is synthesized)
ctatgaaaatctgtctgcttcatgtttattattgaaataatctaaattaattttagaacacttaaaatcgaaaacatctccaaagtgtagttcttctctttctaacagtatgatagttca

SEQ ID NO: 778168 - DNA, 120 bp, Artificial Sequence
  ENSG00000244754_108 (sequence is synthesized)
tttgtttaagaaaactattcccattatttgggtattcaaacatgtttttacttaggagctctttttgcatggaatgtactagactatggtattggatgataatggaaagaagataatctc

SEQ ID NO: 778169 - DNA, 120 bp, Artificial Sequence
  ENSG00000244754_109 (sequence is synthesized)
cccattcgtaaaatcagaaatttatttgatcaataaaacttcttttctggaacacaactccttggatgtgtgagcctatcagacattaggagaataattttaataagcttttgaatggaa

SEQ ID NO: 778170 - DNA, 120 bp, Artificial Sequence
  ENSG00000244754_110 (sequence is synthesized)
gatttgatcactatgattagagacggagcagtgggagatgatagtgtcttggtgctagcaccaagctagcactaatagatgatggcacctatttatgacccaaattctaaatttcttttg

SEQ ID NO: 778171 - DNA, 120 bp, Artificial Sequence
  ENSG00000244754_111 (sequence is synthesized)
gtatttagagacatctcccaaatatgtatttccccatagtgattattctaactgacctttagcattctgtctgtcctagacatctgtataaatgttttcattctgttgaacttagtggtt

SEQ ID NO: 778172 - DNA, 120 bp, Artificial Sequence
  ENSG00000244754_112 (sequence is synthesized)
tgaattctaactcctgagaaaatttccacatctttgcattttgcttcaggcttcttttccccatagtgtaatggggaacaagaggtgtttggttacatgagtaggttctttagtggttat

SEQ ID NO: 778173 - DNA, 78 bp, Artificial Sequence
  ENSG00000244754_113 (sequence is synthesized)
tacactgcatccccctgagtctccagagttgagtcattcttatgcctttggatcctcatagcttagctcccacttatg

SEQ ID NO: 778174 - DNA, 67 bp, Artificial Sequence
  ENSG00000244754_114 (sequence is synthesized)
caccctttccccctgagtctccagagttgagtcattcttatgcctttgggcgtcagccttttaattt

SEQ ID NO: 778175 - DNA, 88 bp, Artificial Sequence
  ENSG00000244754_115 (sequence is synthesized)
caccatgcctagctaatttttgtattttgagtagagatggcttttcaccatcttggccatggtggtcttgaactgtaaggactaggat

SEQ ID NO: 778176 - DNA, 85 bp, Artificial Sequence
  ENSG00000244754_116 (sequence is synthesized)
gcgctcaggctgtagtgctgcggcgtcatcttggctcacagcaacctccacttcataaggttcaagtgattctcgtgcctcagcc

SEQ ID NO: 778177 - DNA, 80 bp, Artificial Sequence
  ENSG00000244754_117 (sequence is synthesized)
atagagatgaggttttgccattttggccagggtggtcttgaattcctgacctctggtgatccacctgctttggcctccca

SEQ ID NO: 778178 - DNA, 120 bp, Artificial Sequence
  ENSG00000244754_118 (sequence is synthesized)
ggattataggtgtgagctaccacacccagccttgtgacagtgattcttatctcatagtgcaaaagatggcatttggatgggagataatagttcagaaaagttccattctacagcaactca

SEQ ID NO: 778179 - DNA, 120 bp, Artificial Sequence
  ENSG00000244754_119 (sequence is synthesized)
gagataatagttcagaaaagttccattctacagcaactcacaatttgaggaccatagttctaagaaatatccacaaagtcagttgaactatgatttttagctacttggcatataaagttt

SEQ ID NO: 778180 - DNA, 120 bp, Artificial Sequence
  ENSG00000244754_120 (sequence is synthesized)
aaacataagccttacttcaaaagcattatttgtacattgtagaaaattagaaaatacagataatcatctgcggtaactttcccaaaaaagagaaaatacagataaaatattaaatgaaaa

SEQ ID NO: 778181 - DNA, 120 bp, Artificial Sequence
  ENSG00000244754_121 (sequence is synthesized)
tattcttaccacctacaggcgaccaattttaatatctccataagtcttccccagctctatcttttgacttaaataggatcatatttaactattgtcttgtaacttgccattttcatttaa

SEQ ID NO: 778182 - DNA, 120 bp, Artificial Sequence
  ENSG00000244754_122 (sequence is synthesized)
taacctccatccttccgtgtcaaaataatttttcacctcttctcttacttagtctatattcagatgtaaattgttcatctcttatatttcccataagtgaaagttagtcctagacttgaa

SEQ ID NO: 778183 - DNA, 120 bp, Artificial Sequence
  ENSG00000244754_123 (sequence is synthesized)
gcctttattagctgtaagttcagcaaaatgcctttcagagccagtttgtcaaagccagcatccagtctggagaatgcacctggcatatggttgtgtcctttaattccctttcaatctagt

SEQ ID NO: 778184 - DNA, 120 bp, Artificial Sequence
  ENSG00000244754_124 (sequence is synthesized)
ggagttctttttttcatgatactgactgaagagattgcacagttttggttttaagtacagagacgtagtacatttcttaataataaatgtttaacttttgtgtgttttaacctaatttgt

SEQ ID NO: 778185 - DNA, 120 bp, Artificial Sequence
  ENSG00000244754_125 (sequence is synthesized)
ggtgtgactgaagaaatatcaaatgtttcctagtaagacagcaactcaggactctaggatggaagaaggtgtctgaccgtaaattacacctgcagtgcaaccagcagactaatggggatg

SEQ ID NO: 778186 - DNA, 120 bp, Artificial Sequence
  ENSG00000244754_126 (sequence is synthesized)
acctttgatctcttgagaggatggttcacatttgagtaaagacaggggagtttgttttcagaatgacatactagtctgcaggatgaatttcataactgacattgcaccttggactgcaac

SEQ ID NO: 778187 - DNA, 120 bp, Artificial Sequence
  ENSG00000244754_127 (sequence is synthesized)
acctagattttattttcagcttaggtttttaccagctgaatgactgtaggcaagccgtttaaatagctttgagacctaatttctccatctgttagaggtggtgataattatacttgccct

SEQ ID NO: 778188 - DNA, 120 bp, Artificial Sequence
  ENSG00000244754_128 (sequence is synthesized)
acctgatcagggtttttgtgaaaagcagagaatttagataaaacgctttgtaaactgtaaatagtttatcagtataagctggtaaaataatagcagcatgggatattttaagaggcttta

SEQ ID NO: 778189 - DNA, 120 bp, Artificial Sequence
  ENSG00000244754_129 (sequence is synthesized)
ttttatacttgatgagtaaattcagagaactttgaatctgtaccattgttatgtagtcccaaagttatttccccgagaataatgctaatgttttccaaggcttaatatactggttgtgaa

SEQ ID NO: 778190 - DNA, 120 bp, Artificial Sequence
  ENSG00000244754_130 (sequence is synthesized)
tattaaaagtttttctcattgatattgctctacaagaaacctacttaatacattttttagcggacatgggtcaatttctgtttatcattaataggggttcttaacctgggctacactttt

SEQ ID NO: 778191 - DNA, 120 bp, Artificial Sequence
  ENSG00000244754_131 (sequence is synthesized)
tgaattcagtggaaccatcacacaaaagcacacaaagacctcctcctccacaggggagacagaggtgtgactgaagaaatatcaaatgtttcctagtaagacagcaactcagagaaagag

SEQ ID NO: 778192 - DNA, 120 bp, Artificial Sequence
  ENSG00000244754_132 (sequence is synthesized)
gtttacggagccggtgtgaacgtcggacttcaattcccacaatgcctggcgcaaacgcctagttttggcctgggtaaccgagaggtgaccgccatcttgcgtacggagaggttcgtgtct

SEQ ID NO: 778193 - DNA, 120 bp, Artificial Sequence
  ENSG00000245680_0 (sequence is synthesized)
ggaccggaagtggaagtggtccccgaaggctatttcgccgctggcgtcaggactattttcacgttttaatgccgagaggtctctgtgacgattttggttcttgggtgtctctggggagtc

SEQ ID NO: 778194 - DNA, 120 bp, Artificial Sequence
  ENSG00000245680_1 (sequence is synthesized)
cctgggccagaccttcctccagactccagcccacctcttcggagcagctctgctgagttcacagatgaccactaaacttcaggcaccctagacaaaaagggttgagatccagtgtggcca

SEQ ID NO: 778195 - DNA, 120 bp, Artificial Sequence
  ENSG00000245680_2 (sequence is synthesized)
tgccagctagttggacctcaccccagaaatcctcagccctggctccagaggatcatggcagctcctatgagggatcagtgtccttcagggatgtggctatcgatttcagcagagaggaat

SEQ ID NO: 778196 - DNA, 120 bp, Artificial Sequence
  ENSG00000245680_3 (sequence is synthesized)
ggcggcacctggacctttctcagagaaacctgtaccgggatgtgatgctggagacctacagccacctgctctcagtagggtatcaagttcctaaaccagaggtggtcatgttggagcaag

SEQ ID NO: 778197 - DNA, 120 bp, Artificial Sequence
  ENSG00000245680_4 (sequence is synthesized)
gaaaggaaccatgggcactgcagggtgagaggccacgtcacagctgcccaggagagaaattatgggaccataatcaacatagaaaaatcatcggttataaaccagcttcctctcaagatc

SEQ ID NO: 778198 - DNA, 120 bp, Artificial Sequence
  ENSG00000245680_5 (sequence is synthesized)
aaaaaatttattctggggaaaaatcctatgagtgtgctgaatttggaaagagcttcacctggaagtcacagttcaaggtacatctgaaagttcctacaggagaaaaactctatgtatgta

SEQ ID NO: 778199 - DNA, 120 bp, Artificial Sequence
  ENSG00000245680_6 (sequence is synthesized)
ttgaatgtgggagggcttttgtacagaagccagaattcatcacacatcagaaaacccatatgagagagaagccctataagtgcaatgaatgtggaaaatccttttttcaagtatcgtctc

SEQ ID NO: 778200 - DNA, 120 bp, Artificial Sequence
  ENSG00000245680_7 (sequence is synthesized)
ttttcaggcatcacagaattcataccggagaaaaactatatgaatgtagtgaatgtgggaaaggtttcccttataactcagatctcagtatacatgagaaaattcatactggagagagac

SEQ ID NO: 778201 - DNA, 120 bp, Artificial Sequence
  ENSG00000245680_8 (sequence is synthesized)
accatgaatgcactgactgtggcaaagcgttcacacaaaagtccacactcaagattcatcagaaaatccatacaggcgagagatcctacatctgtattgaatgcgggcaggccttcatcc

SEQ ID NO: 778202 - DNA, 120 bp, Artificial Sequence
  ENSG00000245680_9 (sequence is synthesized)
agaaaacacaattgattgcacaccgaagaattcatagtggagaaaaaccatatgaatgcaataactgtggcaaatccttcatttccaagtcacaacttcaggtacatcaacgtgttcaca

SEQ ID NO: 778203 - DNA, 120 bp, Artificial Sequence
  ENSG00000245680_10 (sequence is synthesized)
caagagtgaagccctatatatgtaccgaatatgggaaggtcttcagcaataattccaacctcattacacatgagaagattcaaagtagagagaaatcttccatatgtactgagtgtggga

SEQ ID NO: 778204 - DNA, 120 bp, Artificial Sequence
  ENSG00000245680_11 (sequence is synthesized)
aggcctttacctacaggtcagagttgattattcatcagagaattcacactggagagaaaccttatgaatgcagtgactgtgggagagccttcactcagaagtcagcactcacagtgcatc

SEQ ID NO: 778205 - DNA, 120 bp, Artificial Sequence
  ENSG00000245680_12 (sequence is synthesized)
agagaattcatacaggagaaaaatcgtatatatgcatgaaatgtggactggccttcatccggaaggcacacttgattacacatcaaataattcatactggagagaaaccttataaatgtg

SEQ ID NO: 778206 - DNA, 120 bp, Artificial Sequence
  ENSG00000245680_13 (sequence is synthesized)
gtcactgtgggaaattgtttacttccaagtcacaactccatgttcataaacgaattcacacaggagaaaagccctatgtatgcaataaatgtgggaaggcattcaccaaccggtcaaatc

SEQ ID NO: 778207 - DNA, 120 bp, Artificial Sequence
  ENSG00000245680_14 (sequence is synthesized)
tcattacacatcagaaaactcatacaggagagaaatcttatatatgttccaaatgtggaaaggccttcacccagaggtcagacttgattacacatcagagaatccatactggggagaagc

SEQ ID NO: 778208 - DNA, 120 bp, Artificial Sequence
  ENSG00000245680_15 (sequence is synthesized)
cttatgaatgcaatacttgtggaaaagcctttactcagaagtcaaatcttaatatacatcagaaaattcacactggagagagacagtatgaatgccacgaatgtgggaaagccttcaacc

SEQ ID NO: 778209 - DNA, 120 bp, Artificial Sequence
  ENSG00000245680_16 (sequence is synthesized)
agaaatcaatactcattgttcatcagaaaattcatacaggagagaaaccctatgtatgcactgagtgtggaagagctttcatccgcaagtcaaactttattactcatcaaagaattcata

SEQ ID NO: 778210 - DNA, 120 bp, Artificial Sequence
  ENSG00000245680_17 (sequence is synthesized)
ctggagagaagccttatgaatgcagtgactgtgggaagtcctttacctccaagtctcagctcctggtgcatcagccagttcacacaggagagaaaccctatgtgtgtgccgagtgtggga

SEQ ID NO: 778211 - DNA, 120 bp, Artificial Sequence
  ENSG00000245680_18 (sequence is synthesized)
aagcctttagtggcaggtcaaatctcagtaagcaccagaaaactcataccggagaaaagccctacatttgttctgaatgtgggaagacctttcgacagaagtcagagttgattacacatc

SEQ ID NO: 778212 - DNA, 120 bp, Artificial Sequence
  ENSG00000245680_19 (sequence is synthesized)
acagaattcatactggagagaaaccttatgagtgcagtgactgtgggaagtctttcactaaaaaatcacagctccaagtgcatcagcgaattcacactggagagaagccttacgtgtgtg

SEQ ID NO: 778213 - DNA, 120 bp, Artificial Sequence
  ENSG00000245680_20 (sequence is synthesized)
ctgagtgtgggaaggcctttagcaacaggtccaatttgaataaacatcagacaacacacactggagacaaaccctacaagtgtggcatctgtgggaaaggcttcgttcagaaatcagtgt

SEQ ID NO: 778214 - DNA, 120 bp, Artificial Sequence
  ENSG00000245680_21 (sequence is synthesized)
tcagtgttcatcagagcagccacgcttgagagaaacagtgtgagaaaacccccctgagggttgggtctgattgtacactgttgcacgcatgcagcagaaaaatatgtatattattgtaaa

SEQ ID NO: 778215 - DNA, 120 bp, Artificial Sequence
  ENSG00000245680_22 (sequence is synthesized)
tagaaatgaccacatcagaatgtcacacatggctgttctggagagggcctctgagaaggcactgaatgaggcgagggacccttcctacattgtcaccatccccagtaaaccttgggtcat

SEQ ID NO: 778216 - DNA, 120 bp, Artificial Sequence
  ENSG00000245680_23 (sequence is synthesized)
tattcatactgacaaggaaccgagtcaatttggtgaataggaaaagccttctcatgaaaactacaatagaatactgttaccaaattcttcataagaaagatcatattatgggaatgataa

SEQ ID NO: 778217 - DNA, 120 bp, Artificial Sequence
  ENSG00000245680_24 (sequence is synthesized)
tcctgtttactgtggattaggtatagtgccaacagtttgaatggtaagacaacataatatatatgatagtgatgaatccttctgtgagttgtttgttccagaacacactgtctagtagaa

SEQ ID NO: 778218 - DNA, 120 bp, Artificial Sequence
  ENSG00000245680_25 (sequence is synthesized)
agatactgcaataagacaaactccctgtgtattcagacacagacctcagagcgtatgttgagtccccattgtcatagaaaaagacttacagtccccttcattatctgccaggactctctc

SEQ ID NO: 778219 - DNA, 90 bp, Artificial Sequence
  ENSG00000245680_26 (sequence is synthesized)
aagacttacagtccccttcattatctgccaggactctctctgagccccacaggttctcagcacattgtgtttgacacccagcacagtgtt

SEQ ID NO: 778220 - DNA, 120 bp, Artificial Sequence
  ENSG00000245680_27 (sequence is synthesized)
gacgtgagccactgcgcccggcccagcacagtgttttgtacactcccaccaccctcaagaaagcctttgaggttaggattttcaggtcatctgggagaacttaaattcttccttctgcta

SEQ ID NO: 778221 - DNA, 120 bp, Artificial Sequence
  ENSG00000245680_28 (sequence is synthesized)
ttacaattcttctcactcagttgcctgcctcttttttttttttaatttacttgtgactgagttgaagcccagcattttactttccttaatgatctgactttcataagttgataagtcatg

SEQ ID NO: 778222 - DNA, 120 bp, Artificial Sequence
  ENSG00000245680_29 (sequence is synthesized)
aaatcattatcttacattatatgagatatgagataaatcataaatcatatgaaattgataactcatatgaaaaccaaccccaccatatgttcactgtctacttgtgtccatcttcgtccc

SEQ ID NO: 778223 - DNA, 120 bp, Artificial Sequence
  ENSG00000245680_30 (sequence is synthesized)
acgcaccccacaaggaccttccccgccatgtgcctcaaacatcagttcctgactcagggcctttgtatttgcagtgcccgttgcaaagagcacaattctttattttatctgtggcttgtc

SEQ ID NO: 778224 - DNA, 120 bp, Artificial Sequence
  ENSG00000245680_31 (sequence is synthesized)
cgtcatgtctttttttccatgacacctccacacaggccttccctgcctgcctggtttaaaattccagccccttacccttcctcctttattcttctccctagcaatttccaccatgctgcc

SEQ ID NO: 778225 - DNA, 120 bp, Artificial Sequence
  ENSG00000245680_32 (sequence is synthesized)
tggtgtattttcctcatttctctgtggcttctacactagaaaatatttcccttttgttcaccactatgagtctagacccatgactgccatacagcaggcattccataaatgcacctgtgg

SEQ ID NO: 778226 - DNA, 120 bp, Artificial Sequence
  ENSG00000245680_33 (sequence is synthesized)
agagttgacccatgcttgttgcgtgacttctgtctgatttttttctgtgttgcagcataagaagcgctaatagggagaaccaacttggctaaaacacaccaggctttttcacctctagtc

SEQ ID NO: 778227 - DNA, 120 bp, Artificial Sequence
  ENSG00000245680_34 (sequence is synthesized)
tgtacctgggctgtatcccttctcaaccctaaagctaaaaagtcattgtgaaccttttggtctgatgctaaagaagggaaaacaggtacaggaaatcccatgtggatgcttgcttccagg

SEQ ID NO: 778228 - DNA, 120 bp, Artificial Sequence
  ENSG00000245680_35 (sequence is synthesized)
atttcctgccatgattccagaatcccacagctccaacatgattgcaaaagactccctgctcatttttcctcagcatgcacagcgctgtcctgtctcagttgcaactcgacagagccgcat

SEQ ID NO: 778229 - DNA, 120 bp, Artificial Sequence
  ENSG00000245680_36 (sequence is synthesized)
ttactccagaacccaatccacacacctgctcatcctgccccgagaggagtgcctgaagccaatagcagggaactagagcagacttgggtggatcttcattggatattaggtatcttgccc

SEQ ID NO: 778230 - DNA, 120 bp, Artificial Sequence
  ENSG00000245680_37 (sequence is synthesized)
tagataggcagcagtggccttacagatgctgacagatgatctgattagatgcacagttgctgggtggcgtctggggccagtctattggcagttctgggagtgggaactatttgggctctg

SEQ ID NO: 778231 - DNA, 120 bp, Artificial Sequence
  ENSG00000245680_38 (sequence is synthesized)
caaagatggtttcacctttaagaagggcagtatggggaggtgaagatggggcccaaaggatagaacatagtcaaagaagcagggccacaatgcccctttaattcccaagccctagttggg

SEQ ID NO: 778232 - DNA, 120 bp, Artificial Sequence
  ENSG00000245680_39 (sequence is synthesized)
cagtgcttggtgacacatcccattacctcaccttagatcaatgtctactgagccatcattagctctgcttcctcacttcttcacagtatctgatggcccatcacatgctgctcaacatct

SEQ ID NO: 778233 - DNA, 120 bp, Artificial Sequence
  ENSG00000245680_40 (sequence is synthesized)
tagaccaatgtctgctcacccattacctcccttcacctcatccagcactgtatctgaagcttcactattcttccttcagttttggatattttgtgatacaacattatccccaacttagga

SEQ ID NO: 778234 - DNA, 120 bp, Artificial Sequence
  ENSG00000245680_41 (sequence is synthesized)
caatgtcagctgactctcaggagggtgcctggagatcacctcttccttcctaacataccctagaacaaggtctggtccccttcattattcccattttaccttactcctaagtgtatcact

SEQ ID NO: 778235 - DNA, 120 bp, Artificial Sequence
  ENSG00000245680_42 (sequence is synthesized)
cctcatgaattccaggaaatatggaggaaaacacatttcactgtacatgactttcaataatttctcctttatatttattgtaacgtgatattttagtgctgacatatatatgtatatgta

SEQ ID NO: 778236 - DNA, 120 bp, Artificial Sequence
  ENSG00000245680_43 (sequence is synthesized)
tgcccatttatataaaagactagtttttagagaaattttaggttcacagcaaaatggggcagaaggtacagagatttcccatatatcccctaccctcacatatacacagcctcccccatc

SEQ ID NO: 778237 - DNA, 120 bp, Artificial Sequence
  ENSG00000245680_44 (sequence is synthesized)
atcaacatcccccttcagagtggtacatttgttacaattgatgaaactacattgacactatcggccaaagtccatggtttaattagggttcagtcttgatgtgcattctgtgggttgaga

SEQ ID NO: 778238 - DNA, 120 bp, Artificial Sequence
  ENSG00000245680_45 (sequence is synthesized)
caaatgaataatgacatgtatgcattattacagaaggataaagagccgtttcactgtcccaataatcctctgtgtttcgcctactcctctaaactcctggctattttcttttgtctccat

SEQ ID NO: 778239 - DNA, 120 bp, Artificial Sequence
  ENSG00000245680_46 (sequence is synthesized)
aattttgcctctgaaccataaagtatgcagccttttcagattgatttgtttcacttagtaatgtggatttaagtttcttccatgtcttttcgtagcttgctagctctttttttttttttt

SEQ ID NO: 778240 - DNA, 120 bp, Artificial Sequence
  ENSG00000245680_47 (sequence is synthesized)
ttctcattgaataatatgctattgtctggaagtaccatgacttatttatccattcacctactgaaggacaccttaattgcttccaagttttgttgattatgaataaagatgctataaaca

SEQ ID NO: 778241 - DNA, 120 bp, Artificial Sequence
  ENSG00000245680_48 (sequence is synthesized)
tcaatcgatccccccaccttagcctgccgagtagctgggactacaggtatataggtaccattttcaaagaaatgatgttctgagccctataagcacaatcaatatgcatcacaagagaca

SEQ ID NO: 778242 - DNA, 67 bp, Artificial Sequence
  ENSG00000245680_49 (sequence is synthesized)
ggatcagtgtccttcagggatgtggctatcgatttcagcagagaggaatggcggcacctggaccttt

SEQ ID NO: 778243 - DNA, 74 bp, Artificial Sequence
  ENSG00000245680_50 (sequence is synthesized)
gtctcaaaaaaaaaatgaagtaaattaaaaacaacaaaacccatgttccgtaatcccatatatagtcactccac

SEQ ID NO: 778244 - DNA, 120 bp, Artificial Sequence
  ENSG00000245680_51 (sequence is synthesized)
caaaacccatgttccgtaatcccatatatagtcactccaccgtgcaaagctgactatgcacattgaacaggaatgtgcccttacagggatcagtgtccttcagggatgtggctatcgatt

SEQ ID NO: 778245 - DNA, 120 bp, Artificial Sequence
  ENSG00000245680_52 (sequence is synthesized)
aaatacagtccggagtaggaccgcgccgagaagatggcgcctgttttttcgggttcttgcagctgcacagctcggggacatccctgctccgcactccgaaccgctaccccgcgtctccgt

SEQ ID NO: 778246 - DNA, 120 bp, Artificial Sequence
  ENSG00000245680_53 (sequence is synthesized)
gatccagacacaggctcagagtgaaactgccgtaggacgctggccctgcacgctgaagacaatcttcctccatggtaccggccaaccccagggagttccctgagaaacaggaaaaggtcg

SEQ ID NO: 778247 - DNA, 120 bp, Artificial Sequence
  ENSG00000245680_54 (sequence is synthesized)
ccccaagccgactcagtgcagaacgcacccaggaccccggactgtactaggcgttataacgctctctgagaatgctagactgactaaatcgtcatttttgccttcatccgtggataagcc

SEQ ID NO: 778248 - DNA, 120 bp, Artificial Sequence
  ENSG00000245680_55 (sequence is synthesized)
acatactgtatgactgcatttataggaaatatttaaaatagtcaaatctacggaaaaggagttcttgggtgtctctggggagtccctgggccagaccttcctccagactccagcccacct

SEQ ID NO: 778249 - DNA, 120 bp, Artificial Sequence
  ENSG00000245680_56 (sequence is synthesized)
tgcccaggtgagtgaagtgaggtgaatgtgactcaggttagatgggagacaggaggaaatctcagctgtcttgaaaaacactggaacctgtgaagtgctattaagaccactcttcagtaa

SEQ ID NO: 778250 - DNA, 120 bp, Artificial Sequence
  ENSG00000245848_0 (sequence is synthesized)
attcgcgacccggaggtgcgcgggcgcgggcgagcagggtctccgggtgggcggcggcgacgccccgcgcaggctggaggccgccgaggctcgccatgccgggagaactctaactccccc

SEQ ID NO: 778251 - DNA, 120 bp, Artificial Sequence
  ENSG00000245848_1 (sequence is synthesized)
ccccatggagtcggccgacttctacgaggcggagccgcggcccccgatgagcagccacctgcagagccccccgcacgcgcccagcagcgccgccttcggctttccccggggcgcgggccc

SEQ ID NO: 778252 - DNA, 120 bp, Artificial Sequence
  ENSG00000245848_2 (sequence is synthesized)
cagcctcccgccccacctgccgccccggagccgctgggcggcatctgcgagcacgagacgtccatcgacatcagcgcctacatcgacccggccgccttcaacgacgagttcctggccgac

SEQ ID NO: 778253 - DNA, 120 bp, Artificial Sequence
  ENSG00000245848_3 (sequence is synthesized)
cgagttcctggccgacctgttccagcacagccggcagcaggagaaggccaaggcggccgtgggccccacgggcggcggcggcggcggcgactttgactacccgggcgcgcccgcgggccc

SEQ ID NO: 778254 - DNA, 120 bp, Artificial Sequence
  ENSG00000245848_4 (sequence is synthesized)
cccggctacggctgcgcggccgccggctacctggacggcaggctggagcccctgtacgagcgcgtcggggcgccggcgctgcggccgctggtgatcaagcaggagccccgcgaggaggat

SEQ ID NO: 778255 - DNA, 120 bp, Artificial Sequence
  ENSG00000245848_5 (sequence is synthesized)
gatcaagcaggagccccgcgaggaggatgaagccaagcagctggcgctggccggcctcttcccttaccagccgccgccgccgccgccgccctcgcacccgcacccgcacccgccgcccgc

SEQ ID NO: 778256 - DNA, 80 bp, Artificial Sequence
  ENSG00000245848_6 (sequence is synthesized)
ctggccgccccgcacctgcagttccagatcgcgcactgcggccagaccaccatgcacctgcagcccggtcaccccacgcc

SEQ ID NO: 778257 - DNA, 120 bp, Artificial Sequence
  ENSG00000245848_7 (sequence is synthesized)
cgccggcctgccgggccctggcagcgcgctcaaggggctgggcgccgcgcaccccgacctccgcgcgagtggcggcagcggcgcgggcaaggccaagaagtcggtggacaagaacagcaa

SEQ ID NO: 778258 - DNA, 120 bp, Artificial Sequence
  ENSG00000245848_8 (sequence is synthesized)
aacagcaacgagtaccgggtgcggcgcgagcgcaacaacatcgcggtgcgcaagagccgcgacaaggccaagcagcgcaacgtggagacgcagcagaaggtgctggagctgaccagtgac

SEQ ID NO: 778259 - DNA, 120 bp, Artificial Sequence
  ENSG00000245848_9 (sequence is synthesized)
aatgaccgcctgcgcaagcgggtggaacagctgagccgcgaactggacacgctgcggggcatcttccgccagctgccagagagctccttggtcaaggccatgggcaactgcgcgtgaggc

SEQ ID NO: 778260 - DNA, 120 bp, Artificial Sequence
  ENSG00000245848_10 (sequence is synthesized)
ccgagccgtgcgagccaggactaggagattccggtgcctcctgaaagcctggcctgctccgcgtgtcccctcccttcctctgcgccggacttggtgcgtctaagatgagggggccaggcg

SEQ ID NO: 778261 - DNA, 120 bp, Artificial Sequence
  ENSG00000245848_11 (sequence is synthesized)
gtggcttctccctgcgaggaggggagaattcttggggctgagctgggagcccggcaactctagtatttaggataaccttgtgccttggaaatgcaaactcaccgctccaatgcctactga

SEQ ID NO: 778262 - DNA, 120 bp, Artificial Sequence
  ENSG00000245848_12 (sequence is synthesized)
gtagggggagcaaatcgtgccttgtcattttatttggaggtttcctgcctccttcccgaggctacagcagacccccatgagagaaggaggggagcaggcccgtggcaggaggagggctca

SEQ ID NO: 778263 - DNA, 120 bp, Artificial Sequence
  ENSG00000245848_13 (sequence is synthesized)
gggagctgagatcccgacaagcccgccagccccagccgctcctccacgcctgtccttagaaaggggtggaaacatagggacttggggcttggaacctaaggttgttcccctagttctaca

SEQ ID NO: 778264 - DNA, 120 bp, Artificial Sequence
  ENSG00000245848_14 (sequence is synthesized)
tgaaggtggagggtctctagttccacgcctctcccacctccctccgcacacaccccaccccagcctgctataggctgggcttccccttggggcggaactcactgcgatgggggtcaccag

SEQ ID NO: 778265 - DNA, 120 bp, Artificial Sequence
  ENSG00000245848_15 (sequence is synthesized)
gtgaccagtgggagcccccaccccgagtcacaccagaaagctaggtcgtgggtcagctctgaggatgtatacccctggtgggagagggagacctagagatctggctgtggggcgggcatg

SEQ ID NO: 778266 - DNA, 120 bp, Artificial Sequence
  ENSG00000245848_16 (sequence is synthesized)
gggggtgaagggccactgggaccctcagccttgtttgtactgtatgccttcagcattgcctaggaacacgaagcacgatcagtccatcccagagggaccggagttatgacaagctttcca

SEQ ID NO: 778267 - DNA, 120 bp, Artificial Sequence
  ENSG00000245848_17 (sequence is synthesized)
aatattttgctttatcagccgatatcaacacttgtatctggcctctgtgccccagcagtgccttgtgcaatgtgaatgtgcgcgtctctgctaaaccaccattttatttggtttttgttt

SEQ ID NO: 778268 - DNA, 120 bp, Artificial Sequence
  ENSG00000245848_18 (sequence is synthesized)
tgttttggttttgctcggatacttgccaaaatgagactctccgtcggcagctgggggaagggtctgagactccctttccttttggttttgggattacttttgatcctgggggaccaatga

SEQ ID NO: 778269 - DNA, 120 bp, Artificial Sequence
  ENSG00000245848_19 (sequence is synthesized)
ggtgaggggggttctcctttgccctcagctttccccagcccctccggcctgggctgcccacaaggcttgtcccccagaggccctggctcctggtcgggaagggaggtggcctcccgccaa

SEQ ID NO: 778270 - DNA, 120 bp, Artificial Sequence
  ENSG00000245848_20 (sequence is synthesized)
cgcatcactggggctgggagcagggaaggacggcttggttctcttcttttggggagaacgtagagtctcactctagatgttttatgtattatatctataatataaacatatcaaagtcaa

SEQ ID NO: 778271 - DNA, 120 bp, Artificial Sequence
  ENSG00000246705_0 (sequence is synthesized)
ggcagttcgggtgcggtacgttgcattccggtaccggacgccgagagcggtttgtctccgtctctggagttgtaggcgagaggtgatcatgtccggtcgcgggaaacagggcggcaaagt

SEQ ID NO: 778272 - DNA, 120 bp, Artificial Sequence
  ENSG00000246705_1 (sequence is synthesized)
gcgagcaaaggccaaatcccgctcctcccgcgcgggcctgcagttcccggtgggccgagtgcacagactgctgcgcaaagggaactacgcggagcgagtgggcgccggggcgccggtgta

SEQ ID NO: 778273 - DNA, 120 bp, Artificial Sequence
  ENSG00000246705_2 (sequence is synthesized)
tggctggcaacgccgcgcgtgacaacaagaagaccaggataattccccgccacctgcagctcgccatccgcaacgacgaggagttaaacaagctgctgggcaaagtgaccatcgctcagg

SEQ ID NO: 778274 - DNA, 120 bp, Artificial Sequence
  ENSG00000246705_3 (sequence is synthesized)
gcggcgtcctgcccaacatccaggccgtgctgctgcccaagaagacggagagtcagaagacgaagagcaaatgaccctgacgccgccctcagggagctggctcccccagcaaaggccctt

SEQ ID NO: 778275 - DNA, 120 bp, Artificial Sequence
  ENSG00000246705_4 (sequence is synthesized)
ttcatggtcgtcccgcaatgcttttgaatgtgctggatgtcatggagggccggtgacatctagcggggaggtgggcggcgagggtcccggcgggagccaataaagttggtgaaaatcgtt

SEQ ID NO: 778276 - DNA, 120 bp, Artificial Sequence
  ENSG00000246705_5 (sequence is synthesized)
gatgtcatggagggccggtgacatctagcggggagagccttcgctctcctgccagtttgtgagcactcaggaccaagttctgggaagataccgtcggatcgagctgagctcggggcagga

SEQ ID NO: 778277 - DNA, 120 bp, Artificial Sequence
  ENSG00000246705_6 (sequence is synthesized)
agtgtctgcggccatatttttcaaaaagtggagtaactttccgtcttggaagggtggctctgatggcacgatgtcaacttgagattcttcctagcctagtagctgctgtgctttcatgct

SEQ ID NO: 778278 - DNA, 120 bp, Artificial Sequence
  ENSG00000246705_7 (sequence is synthesized)
ttggatatcagatatctttatatagcacttttatgttcatattttttttttaatgaaggaaacgttcaataagtgagtcatgaggttggaaattcgttcccctgacagtcatattgcata

SEQ ID NO: 778279 - DNA, 120 bp, Artificial Sequence
  ENSG00000246705_8 (sequence is synthesized)
acattgcagcgcctttagtcgtgggttacatatgcttgagcttttaaagtgatgttgtcaagtttctagcttcataatgatcctgtcttcatcatatcatattcactttgagaatcggtt

SEQ ID NO: 778280 - DNA, 120 bp, Artificial Sequence
  ENSG00000246705_9 (sequence is synthesized)
tgactttgctttcaaacaaaacaaaaacctcttgcttttaggggttcttacccaacaaataacctgtttgaactctcttatattctcccactagcctgaagcaatgacctcattccagta

SEQ ID NO: 778281 - DNA, 120 bp, Artificial Sequence
  ENSG00000246705_10 (sequence is synthesized)
atgtctttgggagttgcattgcctaatggcacaatattgctttaataaacatgtaaggaaagataggaccaaatatgtaagtgcagggggaaacacatttcagaccaggaatccacattg

SEQ ID NO: 778282 - DNA, 120 bp, Artificial Sequence
  ENSG00000246705_11 (sequence is synthesized)
aaaagttaacactagtaatcatcttctgcccttaattgacactcctatttatttcatcctcagcaaatttcatcctggctcacagaccccacaaaaaagatcccagtacagatttcacat

SEQ ID NO: 778283 - DNA, 120 bp, Artificial Sequence
  ENSG00000246705_12 (sequence is synthesized)
ctttggattcatctttcctgtgagtcggaattgaagtcttccccaaaaatatatgtatatattgtatgtcttcatccttggtagcggctggcccattttcccacatggactttattttgt

SEQ ID NO: 778284 - DNA, 120 bp, Artificial Sequence
  ENSG00000246705_13 (sequence is synthesized)
ccccagtatttattgaacagctgtctatgccaggctctgtacaaagtgataggagtagagctgtgaatgaggccaaccagatttccactctctcggagctcactttatttttattggttc

SEQ ID NO: 778285 - DNA, 120 bp, Artificial Sequence
  ENSG00000246705_14 (sequence is synthesized)
catgttgccatttttgaggtgtacaaaggtcaggccgtacacacctctgttaggaggcaaattattgggcaggttcgagatgttctgctatttactctgtggttttgtcatatgtaaaag

SEQ ID NO: 778286 - DNA, 120 bp, Artificial Sequence
  ENSG00000246705_15 (sequence is synthesized)
tcataacacctgttttaaggattgagattgttcatttactgtgtgccacatattagacaataaatggaaaaaagtaccatgttcaatgggggtatgggtttatccttataggttaaatta

SEQ ID NO: 778287 - DNA, 120 bp, Artificial Sequence
  ENSG00000246705_16 (sequence is synthesized)
taggtaaacattaataggactttttaaaaaatgcctcattgttagaactactactcacagttaccacttggggtcagtggaacaaaatgcatatatggttttgacatttgagtctaaatt

SEQ ID NO: 778288 - DNA, 120 bp, Artificial Sequence
  ENSG00000246705_17 (sequence is synthesized)
tcttaaagggatgaggcatctgagggattgttaccaaaatgatgaagaaataaggacaagggacatcaagacattcataagaaaaagcacctttgccttcccctgggaagattcacagga

SEQ ID NO: 778289 - DNA, 120 bp, Artificial Sequence
  ENSG00000246705_18 (sequence is synthesized)
atctgtccagctcttgttacatgatgagcaacatagacaagatacgaggcattgtaactgccctgtcgccacccgcctctcccaccactacccaaaggattcttagcatcccctcacata

SEQ ID NO: 778290 - DNA, 120 bp, Artificial Sequence
  ENSG00000246705_19 (sequence is synthesized)
ctctgcctgcctcaacgttcagtcagcccctcaccatttttgtttttgagagttttttttttaacccgaatagtttacgggctgtttaaaatgcatactcctacaaaatcagctcagccc

SEQ ID NO: 778291 - DNA, 120 bp, Artificial Sequence
  ENSG00000246705_20 (sequence is synthesized)
atgatccatgatgaacaaacagtagttcttgctgatgtgtgattatgaatttaaaaggccagtatttctttaagcataagaccatatggaaaaaggcctaagacaaaatctgatgggaac

SEQ ID NO: 778292 - DNA, 120 bp, Artificial Sequence
  ENSG00000246705_21 (sequence is synthesized)
tgaattccagtttttaatagagttataatccatagttttatttacacacaaacacacacacacacactctttcctgcagagataagcaagccgttcagtgtggctgtggcttggccagga

SEQ ID NO: 778293 - DNA, 120 bp, Artificial Sequence
  ENSG00000246705_22 (sequence is synthesized)
tttgtttgatctttgtttttcctgcagggccagtcttgtctttgtgtccccgaggactggtctgtttagttgtgcctgcctggaatcaaaaggcttagtcaggccccataattggtgatg

SEQ ID NO: 778294 - DNA, 120 bp, Artificial Sequence
  ENSG00000246705_23 (sequence is synthesized)
actggcatactatatgcaaacttcacaatgccccttccagtggttgaaaggtcgcataccatgctgtgtaagaactttagctctctgcaatgagacttaaattcagattcactctactcc

SEQ ID NO: 778295 - DNA, 120 bp, Artificial Sequence
  ENSG00000246705_24 (sequence is synthesized)
ttattagttatctgatttttggaaacttaatctctttaaacctcagtttcatctctaaaatgggcataatagtttacctcatagagtttggggagaattgagtgaattaatgtgtgtgag

SEQ ID NO: 778296 - DNA, 120 bp, Artificial Sequence
  ENSG00000246705_25 (sequence is synthesized)
gacactaagattcccatatagaaataggctcaatgaatagtagctgtttttatttctatgtaaagtgagtagcggtagttgatgggagctgttgaaacaggtaaacagcattctagcaat

SEQ ID NO: 778297 - DNA, 120 bp, Artificial Sequence
  ENSG00000246705_26 (sequence is synthesized)
ccttcgacttttgtgatagcaaaccataaaaacaattttagtggctgttttactaattaaaggacatccacaattcaatgtataacagaaaaagtaatgattaaagcttgtgaatctgaa

SEQ ID NO: 778298 - DNA, 120 bp, Artificial Sequence
  ENSG00000246922_0 (sequence is synthesized)
ctgtttggggctcagctaagtgaccacacaggagagcagtgaggccatttgaggcctgagcctggtcctcaggactcgactctctctccctgccatcaagcagcctgccccagccctgcc

SEQ ID NO: 778299 - DNA, 120 bp, Artificial Sequence
  ENSG00000246922_1 (sequence is synthesized)
agccatctccacactcctgacagaatgaatgccctcgatggtgttcctttcaagttgcccaagggctttgtgataggcacagagcctctccctgggccagaactcagcgtcccggcctgc

SEQ ID NO: 778300 - DNA, 120 bp, Artificial Sequence
  ENSG00000246922_2 (sequence is synthesized)
ggggaagttctgctgggttctatgcacgacttcagcctggagaggacggcactcttctgggtggaggccgccggccagggacccagcccgtaccagtgcggtgacccggggacagcgtca

SEQ ID NO: 778301 - DNA, 120 bp, Artificial Sequence
  ENSG00000246922_3 (sequence is synthesized)
gcccctccagcctggctcttgctagtcagccccgaacatgggctggcgcctgcgcccaccacaatcagagacccggaggccggacaccaggagaggccggaggaggagggtgaggacgag

SEQ ID NO: 778302 - DNA, 120 bp, Artificial Sequence
  ENSG00000246922_4 (sequence is synthesized)
gcagaagcctcctctggcagcgaggaagagccggcccccagcagcctccaaccgggctccccggcgagccccggccccggccgtcgcctgtgctcgctggacgtgctacgcggcgtgcgg

SEQ ID NO: 778303 - DNA, 120 bp, Artificial Sequence
  ENSG00000246922_5 (sequence is synthesized)
ctccgaggggaagctggtctcccggccccgcgccctcctgcatggcctccgcggccaccgcgcgctgagcctgtgcccgagccctgcgcagtcccccaggtctgcatcacccccggggcc

SEQ ID NO: 778304 - DNA, 120 bp, Artificial Sequence
  ENSG00000246922_6 (sequence is synthesized)
ccccgcggccctccacggcaggcgccatccccccgctgcggagccacaagcctacggtcgcgtccctcagcccgtacacctgtctgccacctcttgggggggcaccccaacctctcaacc

SEQ ID NO: 778305 - DNA, 120 bp, Artificial Sequence
  ENSG00000246922_7 (sequence is synthesized)
cccacaagtcacaccctgatactgcggctgacctgctgtccgccctgagccaggaggagcaagacctcattgggccagtggtcgccctgggatatcccctgcgaagggccatcatagctc

SEQ ID NO: 778306 - DNA, 120 bp, Artificial Sequence
  ENSG00000246922_8 (sequence is synthesized)
tgcagaagacagggaggcagagcctgagccagtttctcagctacctcagtgcctgtgaccgcctgttacgtcagggatatgaggaaggcctggtggatgaggccatggagatgttccagt

SEQ ID NO: 778307 - DNA, 120 bp, Artificial Sequence
  ENSG00000246922_9 (sequence is synthesized)
tctccgagagccaggcaggggagttcctgcgcctctgggagcagttcagtgacatgggcttccagcaggaccggatcaaggaggtgctgctggtccatggcaaccgccgagagcaagccc

SEQ ID NO: 778308 - DNA, 120 bp, Artificial Sequence
  ENSG00000246922_10 (sequence is synthesized)
tggaggagctggtggcctgtgcccagtgaccacggaggcactccacgatgcctgggcatctaggcccaatgccagacctggcaacccatcctaactgtattattaaaaccaagtaagagt

SEQ ID NO: 778309 - DNA, 120 bp, Artificial Sequence
  ENSG00000246922_11 (sequence is synthesized)
gagccggacggggagctatgttcttcatgcatgcctgtgaaaccacctgatttgactctttacactgtgtgcattagtaaccttgattttaagaaaattaaaacaaataaataatgggca

SEQ ID NO: 778310 - DNA, 120 bp, Artificial Sequence
  ENSG00000246922_12 (sequence is synthesized)
caaggaatattcaatgcacagttacttcctgccagacactgggtttgggagtgtcaaaaccacaggacatgaagagttggccaagagggttgtgggaccaggccctgaactgtacagcgg

SEQ ID NO: 778311 - DNA, 120 bp, Artificial Sequence
  ENSG00000246922_13 (sequence is synthesized)
gatcaggtgttgagggagcgtcagggctgcaataggctgagaaggcttcaggacggaggaagtgaaccctgaagagcagggagaagtgaccctacagtgaaaccacagaagcttaagcct

SEQ ID NO: 778312 - DNA, 120 bp, Artificial Sequence
  ENSG00000246922_14 (sequence is synthesized)
caggctcctccctttgtctcttccaaggccttgtgcccaattttgtattcataattgtgtgttctttttctgtgaggtgccttccaaattatgtaagtatcagactccacaaaacatggg

SEQ ID NO: 778313 - DNA, 120 bp, Artificial Sequence
  ENSG00000246922_15 (sequence is synthesized)
gtgggtcaggattggcagcagaaggtggcagcggggcacagctttctgccccccagcagccccacagtcaggccaggagatgctgcagaataaggccaaggtagaattcaatctgcaaga

SEQ ID NO: 778314 - DNA, 120 bp, Artificial Sequence
  ENSG00000246922_16 (sequence is synthesized)
cagagacctgaggtctggtttcttacatgcaccggcttgtgaccttaggcaagtcactgaaccaccccttctctacctgcactgtgagccaacaacccttcacacggttgtttagagcat

SEQ ID NO: 778315 - DNA, 120 bp, Artificial Sequence
  ENSG00000246922_17 (sequence is synthesized)
acatagtagagaagaggctctgtaagcgtgatgtgccatgcccacatccaagaccagatgttgatgccaggatggctcttccctggccaagatgaatttaactctcataacaaccctgtg

SEQ ID NO: 778316 - DNA, 120 bp, Artificial Sequence
  ENSG00000246922_18 (sequence is synthesized)
ggggtgggacagtattctgtagatgatggaaatgaggcacagagtggcaaagaatctttttcaaggacacaagagtagactcagctcctaaactttgatgttctccaccctggaggtaat

SEQ ID NO: 778317 - DNA, 120 bp, Artificial Sequence
  ENSG00000246922_19 (sequence is synthesized)
aaagggtagaccctagggtgaggtcgtggcagggagagccctgagaagatgcgtatgggtggggattcatgtgtgttacatatacactccaccccaagagccaggcggcagctgtgtttt

SEQ ID NO: 778318 - DNA, 120 bp, Artificial Sequence
  ENSG00000246922_20 (sequence is synthesized)
ccttgggaggaggggacaggatgaaacgttcagggctggcagagaggtacttcctcatgggagaaggttcggggcgatgccggccaaaccaatggaaatgccttcaagtcaccctcctta

SEQ ID NO: 778319 - DNA, 120 bp, Artificial Sequence
  ENSG00000246922_21 (sequence is synthesized)
atccagggtgtgtttcaactggtgtgcccagttcctcccctgctccatgccctgccaaaccccagcccaaccaaattcaagaaggagggcctggttgggaagacctacccctgctcatct

SEQ ID NO: 778320 - DNA, 120 bp, Artificial Sequence
  ENSG00000246922_22 (sequence is synthesized)
gtcaccaaggtgtggggcataaaacctaagtagggttgaggtaccaagcgtgtgttgcttaatcaggtcattaacgtttctgaaccttgatttcaatgtctgtaaaatgggatagtagaa

SEQ ID NO: 778321 - DNA, 120 bp, Artificial Sequence
  ENSG00000246922_23 (sequence is synthesized)
gggatagtagaatggacctcatatttctttcactagtcactttcctgacattgttttttgttttgtttttttttttgagacagagtttggctgttattgcccaggctggagtgcaatggt

SEQ ID NO: 778322 - DNA, 75 bp, Artificial Sequence
  ENSG00000246922_24 (sequence is synthesized)
ccatgagccaccgcgcccagtccctcacattgtcttatttaagtctcctgatagtcccgtgaagtagcttaggga

SEQ ID NO: 778323 - DNA, 120 bp, Artificial Sequence
  ENSG00000246922_25 (sequence is synthesized)
tatttaagtctcctgatagtcccgtgaagtagcttagggattgccctcatttttcatatgagtatactgagtaagcattagagagctggggtctgcaggactctaagccctccataatat

SEQ ID NO: 778324 - DNA, 120 bp, Artificial Sequence
  ENSG00000246922_26 (sequence is synthesized)
tagcccctacactctgtacagaaggtggtacataaaggcatttttaaaaatgtccagcccaactgagtgtcacttcctgtagtaactgacatgtccagtctgtctgtatttcagtccctc

SEQ ID NO: 778325 - DNA, 120 bp, Artificial Sequence
  ENSG00000246922_27 (sequence is synthesized)
ctggagccaggtgagtggccacatgattttcaccttttgagctgtgacataggcccaacaacagcatcagccaaccccacagctctggagcatctatggcccctcagggttgtcctaagt

SEQ ID NO: 778326 - DNA, 120 bp, Artificial Sequence
  ENSG00000246922_28 (sequence is synthesized)
ggggctgagatggtcaggcctttatacccctgcctcaatcagtcattgcatgtgggaagggggtgacctgaggtaagtggatctctgcagttaaggtaatccctgaaggggcagacaact

SEQ ID NO: 778327 - DNA, 120 bp, Artificial Sequence
  ENSG00000246922_29 (sequence is synthesized)
gaagagtgtctcccagctctcccagcatctggggcagtaagtcctgcagtgaaagggtgtgtggatggaacatcacagagtctaccacacgcaggttctactcacccacattctattctt

SEQ ID NO: 778328 - DNA, 120 bp, Artificial Sequence
  ENSG00000246922_30 (sequence is synthesized)
ctaatagagttcactctattggaagtatggcggagactcatgatgacactccaaggacagcactctgagccacgctactatttggaagcaggtcttgacccctgatacaagccaagaatg

SEQ ID NO: 778329 - DNA, 120 bp, Artificial Sequence
  ENSG00000246922_31 (sequence is synthesized)
taagagcacctgcagaggagtgagggcccccaaagtgcccaaaaagaggtgctagtggcaagatacctgggagaagaagtggtatgagtgttataggggtgtttctgtcatctctttctg

SEQ ID NO: 778330 - DNA, 120 bp, Artificial Sequence
  ENSG00000246922_32 (sequence is synthesized)
tgtaacaaactaccccgaaacttagtggcatgagacaaccatttatttgcttatgattctctggattggcagttttaaggtggactcagctagggggttcttctgctcatctcacctgca

SEQ ID NO: 778331 - DNA, 120 bp, Artificial Sequence
  ENSG00000246922_33 (sequence is synthesized)
gtctcatgtggctacagtttggtgacttacttggggctgaatgatctaagatggcctcattcactgtacagtgggtggtgatacttgtcagctgggccacatatctccagcaagccaccc

SEQ ID NO: 778332 - DNA, 120 bp, Artificial Sequence
  ENSG00000246922_34 (sequence is synthesized)
tacttggttccaagagtaaggcctcttgaggcctcttgaggccttggctgaaattgtacatagtcacttccacctcattctattggtcaaagcatgttgttgacccctccaggcttacac

SEQ ID NO: 778333 - DNA, 120 bp, Artificial Sequence
  ENSG00000246922_35 (sequence is synthesized)
aggggaaaaacagattccacctcttggtgggagagggtgcaaaaaattttatgatcattctcagtctaccacaagaaggttccagtgatcaagaaaggcttcatggagataccaagcatt

SEQ ID NO: 778334 - DNA, 120 bp, Artificial Sequence
  ENSG00000246922_36 (sequence is synthesized)
gagcaggacttcaaggatggataagatctgatgctgaaggaaggagaaggggtgatattccaggagggaaggacagtgtgaataaaggagtggaggtgggaaggaagtgtttgggaggcc

SEQ ID NO: 778335 - DNA, 120 bp, Artificial Sequence
  ENSG00000246922_37 (sequence is synthesized)
ctgatctgaccagtcttgttgaggagagggtgcatgaggcaggctggtaggagatgagaaaaagagaattgggggtagatttaggggtcttgaaggctggcctgagaatttgataaatga

SEQ ID NO: 778336 - DNA, 120 bp, Artificial Sequence
  ENSG00000246922_38 (sequence is synthesized)
cccaataggcaaaaggaggcacggaaggattgtaagtagggtcaggaggtaacattgaatgccattgcctacacccccatgtccccacctgaaagtaacatccttcgttgcgtggttttc

SEQ ID NO: 778337 - DNA, 120 bp, Artificial Sequence
  ENSG00000246922_39 (sequence is synthesized)
atttttctcccgttcctgccccaccaccatcagaaggcttggacacctccatcatcactgatgagtactgaatgttgggtccctgcggtccagagctgcctgcttctgccagagggaatg

SEQ ID NO: 778338 - DNA, 120 bp, Artificial Sequence
  ENSG00000246922_40 (sequence is synthesized)
gcagaagggaagtgactttcaaacaggagccggggtggggctgggcaaatgcacctggtccccttgcccacccactcctgcttctactctactctgggttcatcagttcatgccctgtcc

SEQ ID NO: 778339 - DNA, 120 bp, Artificial Sequence
  ENSG00000246922_41 (sequence is synthesized)
tggaggagaatttccaacatagtgacccccatgtggctaaaatggcagggaggggtgctaacatttattgaacattttcttgcatgaatctctctctctgagggtattcagttaggtctc

SEQ ID NO: 778340 - DNA, 120 bp, Artificial Sequence
  ENSG00000246922_42 (sequence is synthesized)
aattctgcaaggttgctattacattatgaccactttgcagatgaggaaactgaggccagggaagttcatacagccagtcaatggcagcactggggttgaggccagctggtctgactctgc

SEQ ID NO: 778341 - DNA, 120 bp, Artificial Sequence
  ENSG00000246922_43 (sequence is synthesized)
atcttggtcgcacgatgtcttttatctcattttctgtgtgagaacctcccaggacagcaccacaggctgatctgagatttaagagcagatctaaagtcacgcctaccttcggatgatact

SEQ ID NO: 778342 - DNA, 120 bp, Artificial Sequence
  ENSG00000246922_44 (sequence is synthesized)
gaaaagccagagtcctggccaaaaagctggtcaggagggctgtgaggggccaggtgcacagtggggctctgacatgcctccccagtcccttcaggccctgtggtaaggctgaggtctcag

SEQ ID NO: 778343 - DNA, 120 bp, Artificial Sequence
  ENSG00000246922_45 (sequence is synthesized)
gccatcactctgggggtctgaagatgagtcagagccagcctggggccctggcctcccagtgggtgagcaggaaggatttcactgcattgggaacattgtgtttccagatatagactggcc

SEQ ID NO: 778344 - DNA, 120 bp, Artificial Sequence
  ENSG00000246922_46 (sequence is synthesized)
acctgcctggccccctggatctctgggtggccttccctggtgggcagtcaggagccaggccccacggggtgggtctgaggggcctttggatgacttcatctatcctcccccaccaagtta

SEQ ID NO: 778345 - DNA, 120 bp, Artificial Sequence
  ENSG00000246922_47 (sequence is synthesized)
gtatttctgtctgttctgtgaagtcctggtaactgaacaagccctttgggttcagattccttctcccactgaaagccgcatattgcagtaaatcctttttggccaagataaatgacagat

SEQ ID NO: 778346 - DNA, 120 bp, Artificial Sequence
  ENSG00000246922_48 (sequence is synthesized)
ggcccaggaggaagggcatcaggtgatagagacagagcagctagaagagtcagggagagaagaagatacaaaagaaattgtgcagcactcctttccttccacaaggcttgatgtgcccac

SEQ ID NO: 778347 - DNA, 120 bp, Artificial Sequence
  ENSG00000246922_49 (sequence is synthesized)
actgcctccctgcaggacaggcatgggtgccatgtgtgagggtccacaggccaggccccctcttttagcctcagtttcccagttcacagggtggaggaggaatacgtgtttggaaccagt

SEQ ID NO: 778348 - DNA, 120 bp, Artificial Sequence
  ENSG00000246922_50 (sequence is synthesized)
gacttccgggggccccctccggtggccttaaggtgacatcctcacccacctgggggcctgaggcaagcctgatagcttctacagtcctgcaggcccaaaagctaaccaagcagcagaacc

SEQ ID NO: 778349 - DNA, 120 bp, Artificial Sequence
  ENSG00000246922_51 (sequence is synthesized)
tttgcaaatgcagactctcagggcttatcctgcagggccccagtcagtggatctggggtggacccaggggcctttaattttagaaaatttgcagatgggtctgatattcactgtggcata

SEQ ID NO: 778350 - DNA, 120 bp, Artificial Sequence
  ENSG00000246922_52 (sequence is synthesized)
gtatagatcaaggtcagctgtccccattcactgattcttagtcttgggtgcacattagaatcacctggagggctatagggaaaaattccaatgctcaggctacaccccagaccaattata

SEQ ID NO: 778351 - DNA, 120 bp, Artificial Sequence
  ENSG00000246922_53 (sequence is synthesized)
tcgtaacctctgaaggtgaggcccagacagcagtaatgtttaaagttcctcaggtggttgcaataagcactgagactgagaaccattgctatggatgagccaaaaggtggaggcagcgtc

SEQ ID NO: 778352 - DNA, 120 bp, Artificial Sequence
  ENSG00000246922_54 (sequence is synthesized)
caccatccatccttgcccgccctccttctgaaggtgaagctttcacctttggaaaccctgtcatccaccaagacagctaaaagcccgtcctctagcagctgatccctctgatggacaagg

SEQ ID NO: 778353 - DNA, 120 bp, Artificial Sequence
  ENSG00000246922_55 (sequence is synthesized)
cattaaatgacaggttacataatcggggacctagtcctgggaccccggacaaggcacctgccttgcctgaacctcagtttcctcaactgtggaaggagggcatgggtgcctggttttcaa

SEQ ID NO: 778354 - DNA, 120 bp, Artificial Sequence
  ENSG00000246922_56 (sequence is synthesized)
aacgtgctcagagcaggtctagctgtactgggcagtacctcggccaggagcactggactccgggcccccatgcccctggccctggttctcccagagcagctctaatcttagcctgttatt

SEQ ID NO: 778355 - DNA, 120 bp, Artificial Sequence
  ENSG00000246922_57 (sequence is synthesized)
gctgaagcctccttgtgctaagacaaacacttcaggagccaaaaacaatttgacaactgttagtctagatgatgtgcactttcatcccagctctgaaggtctacggaaaccccactctcc

SEQ ID NO: 778356 - DNA, 120 bp, Artificial Sequence
  ENSG00000246922_58 (sequence is synthesized)
cttctccacatatactcataattcctgtagtctggagccttcatttggcacctacaccccataaatcctgctttgatttgcctggcactgatgtggtcctgtatctggtttatctccccc

SEQ ID NO: 778357 - DNA, 120 bp, Artificial Sequence
  ENSG00000246922_59 (sequence is synthesized)
actaagctgtgagttccttgaaggcaggtcttcattcattttataaacacagcacacatttattgagctccttctgccaccatgctggatgatggggacactgtggtgaatgagactgac

SEQ ID NO: 778358 - DNA, 120 bp, Artificial Sequence
  ENSG00000246922_60 (sequence is synthesized)
acagcccctccctcatggagcaaaaacttcgtggatgagaaagattgagtgaagcaattacaaagttatatgtgctgtaacagggaagcatagggtgctatgggggcacaagggacggca

SEQ ID NO: 778359 - DNA, 120 bp, Artificial Sequence
  ENSG00000246922_61 (sequence is synthesized)
cccaggaagatagagggggcaggaagcttcccagggacagggaaggaggccagccttggctgagggagctgcatctgcagagacctggagggtgagggaggggccaaggccatagacagg

SEQ ID NO: 778360 - DNA, 120 bp, Artificial Sequence
  ENSG00000246922_62 (sequence is synthesized)
gagcaggcctttgagccctgcctggtaaggagccagcattttatcctgggcccctgatgacgtaaccgtggggtgacctgaacagtttttcctgcctgtggaatcctcctctttgcctac

SEQ ID NO: 778361 - DNA, 120 bp, Artificial Sequence
  ENSG00000246922_63 (sequence is synthesized)
cccacaccccttctccagcactggtgcaggagttgcatagtagtggctcaggagtcctggatgagagagatgcatctgggggcacagtaggggtgcacaggtgtggacggatgaggaggc

SEQ ID NO: 778362 - DNA, 120 bp, Artificial Sequence
  ENSG00000246922_64 (sequence is synthesized)
accttcacacgaatgggtgctcccagacaggggtgggtggtgcatgaatgttgaattgcgttgggtggtaggtgggatgtctgtgtttgaagcctgtcctgctccccacctaggttctat

SEQ ID NO: 778363 - DNA, 120 bp, Artificial Sequence
  ENSG00000246922_65 (sequence is synthesized)
gaacaccctagcccaccctgacagcccttttcctggagtccagcccccagcttggcatagttggtgaagacccattgtctgcctatcgccaggcactcagagaaagcctctatccccctt

SEQ ID NO: 778364 - DNA, 120 bp, Artificial Sequence
  ENSG00000246922_66 (sequence is synthesized)
ctgtgggttcacgggctctctggggccacgctgcaggtggtggcttgccctgttgcctggccctcagctcaggcccttggagtgcctctctgccctgtctgctgccccggctgctcctct

SEQ ID NO: 778365 - DNA, 80 bp, Artificial Sequence
  ENSG00000247077_0 (sequence is synthesized)
gttccggcaggcgctgcagctggcggcctgcgggctggccgggggctcggccgccgtgctcttctcggccgtggcggtag

SEQ ID NO: 778366 - DNA, 120 bp, Artificial Sequence
  ENSG00000247077_1 (sequence is synthesized)
caggcggggacgcggagccacgcccggctgagccgccggcctgggcggggggcgcgcggccgggccccggtgtctgggaccccaactgggacaggcgagaaccactgtctctgatcaacg

SEQ ID NO: 778367 - DNA, 120 bp, Artificial Sequence
  ENSG00000247077_2 (sequence is synthesized)
ctctgatcaacgtgcggaagaggaacgtggaatctggggaagaagagctggcgtccaagctggaccactacaaagccaaggccacgcggcacatcttcctcatcaggcattcccagtacc

SEQ ID NO: 778368 - DNA, 120 bp, Artificial Sequence
  ENSG00000247077_3 (sequence is synthesized)
acgtggatggctccctggagaaggaccgcactctgaccccgctgggtcgggagcaggctgaactcactgggctccgcctggcaagcttggggttgaagtttaataaaatcgtccattcgt

SEQ ID NO: 778369 - DNA, 120 bp, Artificial Sequence
  ENSG00000247077_4 (sequence is synthesized)
ctatgacgcgcgccatagagaccaccgatatcatcagccggcacctgccaggcgtctgcaaagtcagcacagatctgctgcgggaaggcgcccccatcgagccagacccgcccgtgtctc

SEQ ID NO: 778370 - DNA, 120 bp, Artificial Sequence
  ENSG00000247077_5 (sequence is synthesized)
attggaagccggaagctgtgcagtattacgaagacggagcccggatcgaggccgccttccggaactacatccaccgcgcagatgccaggcaggaggaggacagttacgagatcttcatct

SEQ ID NO: 778371 - DNA, 120 bp, Artificial Sequence
  ENSG00000247077_6 (sequence is synthesized)
gtcacgccaacgtcatccgctacatcgtgtgcagagcactgcagtttcctcctgaaggctggctccggctctccctcaataatggcagcatcacccacctggtgatccgacccaacggcc

SEQ ID NO: 778372 - DNA, 120 bp, Artificial Sequence
  ENSG00000247077_7 (sequence is synthesized)
gagttgcgctcaggaccctcggggacacggggttcatgcctcccgacaagatcactcgatcctgagggctccggcctctccttccctctgtcctccctgcacaggccgcacacacttaac

SEQ ID NO: 778373 - DNA, 120 bp, Artificial Sequence
  ENSG00000247077_8 (sequence is synthesized)
gttttgttcccaaggagaccggcggaaagtagaaacctgcaatgctgcatctgggaactgacttgtgaccaggctgagaaggggagagttgggatcagacagcctgacttctctgcaggg

SEQ ID NO: 778374 - DNA, 120 bp, Artificial Sequence
  ENSG00000247077_9 (sequence is synthesized)
ttttatacctgaccatgaacccccaggatggcgtggggtttaaggtgaaagcgtctcacgcacaagtcaggcctgttgtggggacttgaaagaggcctgacccagaccaccatgttcgca

SEQ ID NO: 778375 - DNA, 120 bp, Artificial Sequence
  ENSG00000247077_10 (sequence is synthesized)
cccacagctgacccgtgctgagggtccaggctccattggcaaagccggtcaggcacgagggcgactgaggcacgtggatgaggagggcacccaggttctgttcacaactcacttcacttc

SEQ ID NO: 778376 - DNA, 90 bp, Artificial Sequence
  ENSG00000247077_11 (sequence is synthesized)
taatttcttaaaaccctcttgtcccttaaatatttgtcaattaaagatttttcccagctactcaggaggccagggtgggaggatcacttg

SEQ ID NO: 778377 - DNA, 120 bp, Artificial Sequence
  ENSG00000247077_12 (sequence is synthesized)
caggagttcaagaccagcctggacaaggcaacatagcgagaccctgtctctactaaaaatacagaacttagctgggtgtgtcgtgggcatctagagtcccagctacttgggaggctgagg

SEQ ID NO: 778378 - DNA, 72 bp, Artificial Sequence
  ENSG00000247077_13 (sequence is synthesized)
tcacttgggcccgggagctggcgagggagacttaaagcaattttttcttttgaaacggagtttcactcttgt

SEQ ID NO: 778379 - DNA, 120 bp, Artificial Sequence
  ENSG00000247077_14 (sequence is synthesized)
gcctggcctaaaaaatttttttttcttcatctgggtttttgctttgaaaacaagtttctccaaatttacagatttcctgatgatgttgggtctgaactcaccaacttgattaggtcttta

SEQ ID NO: 778380 - DNA, 120 bp, Artificial Sequence
  ENSG00000247077_15 (sequence is synthesized)
ggggccgagggactagccagctgcacaggtgactggatgggggaggggcaggtgaggtgggtctacagaggtggcttcgcctttgaccttcatgctggtctcggctgaggtgacacgcta

SEQ ID NO: 778381 - DNA, 120 bp, Artificial Sequence
  ENSG00000247077_16 (sequence is synthesized)
gtgacagcccaatagggggttacccttattgagtaaaatacttcagattgacagctcaatcttagtttgcctccagttaatcttttatgcttagggattaaatgtgtggttttttttttg

SEQ ID NO: 778382 - DNA, 120 bp, Artificial Sequence
  ENSG00000247077_17 (sequence is synthesized)
ccaagtgctgggattacaggcgtgagctagcatgcctggccagggattaaaatattcaaacatgttgtgtgtacccagatatgctgttaatttaggaaaaacagtacaatttctatgaag

SEQ ID NO: 778383 - DNA, 120 bp, Artificial Sequence
  ENSG00000247077_18 (sequence is synthesized)
atttctatgaagtggttgtgactattttctgtagtcaatacagttgggatatctgatctatttctctgtctactttggaaatgattgcataataaataaaattttactgtttttttaaaa

SEQ ID NO: 778384 - DNA, 120 bp, Artificial Sequence
  ENSG00000247077_19 (sequence is synthesized)
ctgacctctttcacttgctgatctgtgggcgctcccacccgtgtgccagcgtgacggctcggggtgtccgctcccctctgggtcgaggccacagctgagtcacgttgctgctcgggctgc

SEQ ID NO: 778385 - DNA, 120 bp, Artificial Sequence
  ENSG00000247077_20 (sequence is synthesized)
tccctcggggggcccttgtccctcaacctgctctggtgccccactctcagcaccacagaatgatccgggttcaggttgcgttttccctgccaccaccctgcaatcagccacttctttaag

SEQ ID NO: 778386 - DNA, 120 bp, Artificial Sequence
  ENSG00000247077_21 (sequence is synthesized)
gagctccagggctgcagccacgttagagggccccttggggggcagggccagctctacggttacatgcctgaaacagtcagaagggttggccaaatctcactaaatgcaaatttgaaacaa

SEQ ID NO: 778387 - DNA, 120 bp, Artificial Sequence
  ENSG00000247077_22 (sequence is synthesized)
gtttggggccggggtcgggatgggggtcagggcaggtgttaccgttgggatcgagatcgggaccaggtttaaggttgcgatcgggtcgggatctggggtcgccgtctgctttccccagcg

SEQ ID NO: 778388 - DNA, 120 bp, Artificial Sequence
  ENSG00000247077_23 (sequence is synthesized)
gaggagccgctttccggggccgctctgcgcggagggttccgggggcggctgacccttcccgccggcttctgtggccgagctccgtcgcgtcctcgcccttctccccgcccctgcgagtcc

SEQ ID NO: 778389 - DNA, 120 bp, Artificial Sequence
  ENSG00000247077_24 (sequence is synthesized)
gccctgggtgccatcgccggagcgcgggccggggcgaggctgaggtggaagccgggcctccttcaggggcgtttgcaggagcgcgcccgcgagctgcgtgcggttattgagcgtttgaaa

SEQ ID NO: 778390 - DNA, 120 bp, Artificial Sequence
  ENSG00000247077_25 (sequence is synthesized)
tatggctcgtgtgattcctgaagggaatgcttagtttacgtcaatttaaacttaacgcaagcagggccgggtgcggtagctcaggcctgtaatcccagcgtttgggaggctgaggccgga

SEQ ID NO: 778391 - DNA, 84 bp, Artificial Sequence
  ENSG00000247077_26 (sequence is synthesized)
tgagacccccatctctacaaaaaatacaaaaaaaattggccgagcgaggtggcgcagaaccactgtctctgatcaacgtgcgga

SEQ ID NO: 778392 - DNA, 120 bp, Artificial Sequence
  ENSG00000247315_0 (sequence is synthesized)
gtaaaatggccaccggcggcggcgcggaggaagagaggaaacgggggcggccgcagcttctgccccccgcgcggcccgcggcccggggcgaggaggccgacggcggccgcgagaagatgg

SEQ ID NO: 778393 - DNA, 120 bp, Artificial Sequence
  ENSG00000247315_1 (sequence is synthesized)
gcgagaagatgggctgggcccaggtggtgaagaatctagccgagaagaagggcgaattccgcgagccgcggccgccgcggcgggaggaggaaagcggcggcggtggagggagcgccgggc

SEQ ID NO: 778394 - DNA, 120 bp, Artificial Sequence
  ENSG00000247315_2 (sequence is synthesized)
cggccccgcgggcctggcggcgccggacctcggcgacttcccaccggctggccgcggggatccgaagggccgtcggagagatccggccggcgaggcggtggacccccgcaaaaagaaggg

SEQ ID NO: 778395 - DNA, 120 bp, Artificial Sequence
  ENSG00000247315_3 (sequence is synthesized)
agagatccggccggcgaggcggtggacccccgcaaaaagaagggcgctgcggaggcgggcaggaggaagaaggccgaggcggcggcggccgccatggcgaccccggccaggcccggcgag

SEQ ID NO: 778396 - DNA, 120 bp, Artificial Sequence
  ENSG00000247315_4 (sequence is synthesized)
cggcggcggcaggcccgggcaagggtcgcttcctcgtccgcatctgtttccagggagacgagggcgcctgcccgacccgggacttcgtggtaggagcgcttatcctgcgctccatcggca

SEQ ID NO: 778397 - DNA, 120 bp, Artificial Sequence
  ENSG00000247315_5 (sequence is synthesized)
tggacccgagcgacatctacgcggtcatccagatcccgggcagccgcgaattcgacgtgagcttccgctcagcggagaagctggccctgttcctacgcgtctacgaggagaagcgggagc

SEQ ID NO: 778398 - DNA, 120 bp, Artificial Sequence
  ENSG00000247315_6 (sequence is synthesized)
aggaggactgctgggagaactttgtggtgctggggcggagcaagtccagcttgaagacgctcttcatcctcttccggaacgagacggtggacgtggaggacattgtgacttggctcaagc

SEQ ID NO: 778399 - DNA, 120 bp, Artificial Sequence
  ENSG00000247315_7 (sequence is synthesized)
gccactgcgacgtgctggccgtgccggtgaaagtgaccgacaggtttgggatctggaccggggagtacaaatgcgagatcgagctgcgccagggggagggcggggtcaggcacttgccag

SEQ ID NO: 778400 - DNA, 120 bp, Artificial Sequence
  ENSG00000247315_8 (sequence is synthesized)
gggccttcttcctgggggccgagaggggctacagctggtacaaggggcagcccaagacatgctttaaatgtggttcccggacccacatgagcggcagctgcacgcaggacaggtgcttca

SEQ ID NO: 778401 - DNA, 120 bp, Artificial Sequence
  ENSG00000247315_9 (sequence is synthesized)
ggtgcggggaggaggggcacctgagcccttactgccggaagggcatcgtgtgcaacctctgtggcaagcgaggacacgcctttgcccagtgtcccaaagcagtgcacaattccgtggcag

SEQ ID NO: 778402 - DNA, 120 bp, Artificial Sequence
  ENSG00000247315_10 (sequence is synthesized)
ctcagctaaccggcgtggccgggcactaaacacccgcctgcctgccagggtgaacacacagccagcttatccctcttaagtgccaaaacttttttttaaaccattttttatcgtttttga

SEQ ID NO: 778403 - DNA, 120 bp, Artificial Sequence
  ENSG00000247315_11 (sequence is synthesized)
agaactgtagcgtgcagatgtgttgcccctcccttttaaaattttattttcgtttttctattgggtatttgttttgtttcttgtactttttctctctctccttgcccccctcccgccctc

SEQ ID NO: 778404 - DNA, 120 bp, Artificial Sequence
  ENSG00000247315_12 (sequence is synthesized)
cccgccccataccttttcttcccctggattttcaccctttgggctgccttgctcatctttatgccccagcactaggtacggggcccaacacgtggtaggcactccatcagtgtttgctga

SEQ ID NO: 778405 - DNA, 120 bp, Artificial Sequence
  ENSG00000247315_13 (sequence is synthesized)
attgaaaacattgttgactgtggcttctatcagagtgtctaccttttgcagctcttcccctccctcatttaatttgctgcttttaatctacgtggtctgagaatttgtgaaaccagtgtt

SEQ ID NO: 778406 - DNA, 120 bp, Artificial Sequence
  ENSG00000247315_14 (sequence is synthesized)
gttagaagtgtatataatctgaatcaataagctctgaatggtggccaagggcctctcttatggcacaaagatgcatggacttcatgacagctcttttggtggctcagaagccatttttta

SEQ ID NO: 778407 - DNA, 120 bp, Artificial Sequence
  ENSG00000247315_15 (sequence is synthesized)
tagaatcatggaatctagaatattcctgctggaaagaacctgagagttggtttggaccaattccctggttttccagcagatgaaacaggcccaaagaggttaaatgactgggtgaaaatc

SEQ ID NO: 778408 - DNA, 120 bp, Artificial Sequence
  ENSG00000247315_16 (sequence is synthesized)
acatagctgtctggtgccagagccagcctatagtagagtcccctgaccccaagcccggtgctcattccactacctctcacacttcacaacaatttcctcaacacttgagggcccagaaag

SEQ ID NO: 778409 - DNA, 120 bp, Artificial Sequence
  ENSG00000247315_17 (sequence is synthesized)
tctgatctctccagaatgatcagcccagaggaatgctgagaaatcacctggaggagggagcagaaagagaaggtttttaaggaggggcttctgaatacttgggagatacggaacggacca

SEQ ID NO: 778410 - DNA, 120 bp, Artificial Sequence
  ENSG00000247315_18 (sequence is synthesized)
aggaccacactccagggtgcattcgttgctccctggggcaccacttctggattacagtgtgccaggtcctttggaggccctaccccttccccattcattgccaccagtgagaaatggggg

SEQ ID NO: 778411 - DNA, 120 bp, Artificial Sequence
  ENSG00000247315_19 (sequence is synthesized)
tgcccctgtgtaaagaaacctaccaaaggtttacatttgcaccttagcctcaatagctacgaaccctagagaagcagctagctggagctcatgtgcaactcctgattctcaggagaaaga

SEQ ID NO: 778412 - DNA, 120 bp, Artificial Sequence
  ENSG00000247315_20 (sequence is synthesized)
tggattttaacccaaaattatgagtgagctgttaactctaaaatgtacttgggagataggccaagcgagaggtcatgggccaactaagtgttatccagtagaaaagacagtacactgctt

SEQ ID NO: 778413 - DNA, 120 bp, Artificial Sequence
  ENSG00000247315_21 (sequence is synthesized)
ttcttttagtgtttgcttttcctttgctatatgttttgctatttccttgtggcttagaatgtaaaattgattgttaaaagttttgttctgaataaatatttatcttttgtattgctaaaa

SEQ ID NO: 778414 - DNA, 120 bp, Artificial Sequence
  ENSG00000247595_0 (sequence is synthesized)
ggatcctttggagccaaagactcgaacagacatgcgagacctctaccaactgaaggtttcgtgagcgcactcctttgccaagatcttggtgaatagtctttcactgtgcaattttatctt

SEQ ID NO: 778415 - DNA, 120 bp, Artificial Sequence
  ENSG00000247595_1 (sequence is synthesized)
gcctccaactctgaagtggcaggagaggtggcctgttcaggagagcaaaacacaactgaggaggcgggctttaggtgaagatctgctgcagaaccatgtggaagggatataaatatcccc

SEQ ID NO: 778416 - DNA, 120 bp, Artificial Sequence
  ENSG00000247595_2 (sequence is synthesized)
caggagggactccagtggaagtaagcaaggatgatcctggtgaagtaatgcagctgtgaagctcacctgaccagctgtacagttcctgttgttggtttcacataaagtaattgcacatta

SEQ ID NO: 778417 - DNA, 120 bp, Artificial Sequence
  ENSG00000247595_3 (sequence is synthesized)
gccaccatgcctggctaattttttttttatttttttagagacaaggtgtcactatgttgcccaggcaggtcttgaactccaggcctcaagtggtcccccagccttggcctcccagagtgc

SEQ ID NO: 778418 - DNA, 90 bp, Artificial Sequence
  ENSG00000247595_4 (sequence is synthesized)
agtggtcccccagccttaaaccaccgtgccttgccaggaccagcatttttaacgtcccttttggcagatactgaaactggagttaacatt

SEQ ID NO: 778419 - DNA, 120 bp, Artificial Sequence
  ENSG00000247595_5 (sequence is synthesized)
gaagctccttagtgaggagctgccatgctgggccatccaccatctggattcctacgactcagggaatagaacactgcaccttccagaagcacttgtttcttcgtgggtacaccaccagct

SEQ ID NO: 778420 - DNA, 120 bp, Artificial Sequence
  ENSG00000247595_6 (sequence is synthesized)
agcaaaacacaactgaggaggcgggctttaggaaccatgtggaagggatataaatatcccccaggagggactccagtggaagtaagcaaggatgatcctggtgaagtaatgcagctgtga

SEQ ID NO: 778421 - DNA, 120 bp, Artificial Sequence
  ENSG00000247595_7 (sequence is synthesized)
ttctactttgtacttcaaagtcacaggatgacatccatatgatagttataaattctactctacattttcaagttctcaatccatagattaggacaagtcactttattgctggcaacattc

SEQ ID NO: 778422 - DNA, 120 bp, Artificial Sequence
  ENSG00000247595_8 (sequence is synthesized)
atggaaggtccaggtttctcataaaaagactaagtttgattgggagcagggcagtgccctactcacagatcagcagaagaattacagaaatcaagagacaaccttttttttcctttcaaa

SEQ ID NO: 778423 - DNA, 120 bp, Artificial Sequence
  ENSG00000247595_9 (sequence is synthesized)
gtagcaaaggaacaataaaagattggctgactggtgagtggccccacattagagtgcatagctcatcaggatcaaggctggcatctgtgaacagttaacttcataagagcacaagtgggc

SEQ ID NO: 778424 - DNA, 120 bp, Artificial Sequence
  ENSG00000247595_10 (sequence is synthesized)
attatatcatctgcattacagatttcaccctggaaaatatctgaaaatattttatgctcaaatgacagcctgcaaatgacagtatgcattccttctccttgagtacccaagtataaatct

SEQ ID NO: 778425 - DNA, 120 bp, Artificial Sequence
  ENSG00000247595_11 (sequence is synthesized)
tggaaattccacccgcattcaacgccccgggctcagccgcggctgcgcccggaatccggggcctctccttcgtgaccccggagtgggcaagtgacgagggcacggccagaaacgcattgg

SEQ ID NO: 778426 - DNA, 120 bp, Artificial Sequence
  ENSG00000247595_12 (sequence is synthesized)
cgtcaaggaaaccacgacccatcttcctggaaggaaacttggggacacttatgaagagaagactaggaaggaccggagtagaagcactaaaggagatgattcacgttgctccaggcgaaa

SEQ ID NO: 778427 - DNA, 120 bp, Artificial Sequence
  ENSG00000247595_13 (sequence is synthesized)
aatgataagggggcttcttcagtctgaaggcaggaaatccttgcagcagagcagctctagaatttcacaaaaataaaagcagcagctaacgcctcttcagcttcttggcccttcgacgtt

SEQ ID NO: 778428 - DNA, 120 bp, Artificial Sequence
  ENSG00000247595_14 (sequence is synthesized)
gcatttcttcttcttcacgtctcatttcctctaagtcctcttgcatacccagtcttaagctgccaaagaatttttaaagggtatttgtcaatatacatgagatgaccactttccttaaaa

SEQ ID NO: 778429 - DNA, 120 bp, Artificial Sequence
  ENSG00000247595_15 (sequence is synthesized)
agaatgaaaattccaactgggagctcacatggattgtgctgatgctctcaaaatgcctcaaggctttaccactgaaaacaaactagcagggatatttttttaccaggggccacagactca

SEQ ID NO: 778430 - DNA, 120 bp, Artificial Sequence
  ENSG00000247595_16 (sequence is synthesized)
aattgtcgtgggaaaaagaactcacacaccacaaaaaccttactatttccattaaaataataaaatataggtttatctcaatagcttttaaaaataaacagcaagaagcatttattcatt

SEQ ID NO: 778431 - DNA, 120 bp, Artificial Sequence
  ENSG00000247596_0 (sequence is synthesized)
gggtcctgcggcaccgcccgggaagctgcgcgagggtcgacagcctccgccacatcctccacctctcttggtccagcgagcgttgccgggccagggtcaagcggagggctccgacggcgc

SEQ ID NO: 778432 - DNA, 120 bp, Artificial Sequence
  ENSG00000247596_1 (sequence is synthesized)
ggacggagcgaagcgccgagccatggcgcaccaaacgggcatccacgccacggaagagctgaaggaattctttgccaaggcacgggctggctctgtgcggctcatcaaggttgtgattga

SEQ ID NO: 778433 - DNA, 120 bp, Artificial Sequence
  ENSG00000247596_2 (sequence is synthesized)
ggacgagcagctcgtgctgggtgcctcgcaggagccagtaggccgctgggatcaggactatgacagggccgtgctgccactgctggacgcccagcagccctgctacctgctctaccgcct

SEQ ID NO: 778434 - DNA, 120 bp, Artificial Sequence
  ENSG00000247596_3 (sequence is synthesized)
cgactcacagaatgctcagggcttcgaatggctcttcctcgcctggtcgcctgataactcccccgtgcggctgaagatgctgtacgcggccacgcgggccacagtgaaaaaggagtttgg

SEQ ID NO: 778435 - DNA, 120 bp, Artificial Sequence
  ENSG00000247596_4 (sequence is synthesized)
aggtggccacatcaaggatgagctcttcgggactgtgaaggatgacctctcttttgctgggtaccagaaacacctgtcgtcctgtgcggcacctgccccgctgacctcggctgagagaga

SEQ ID NO: 778436 - DNA, 120 bp, Artificial Sequence
  ENSG00000247596_5 (sequence is synthesized)
gctccagcagatccgcattaacgaggtgaagacagagatcagtgtggaaagcaagcaccagaccctgcagggcctcgccttccccctgcagcctgaggcccagcgggcactccagcagct

SEQ ID NO: 778437 - DNA, 120 bp, Artificial Sequence
  ENSG00000247596_6 (sequence is synthesized)
cattgagctggtgcacacagagcccacggatgtggcccagctgccctcccgggtgccccgagatgctgcccgctaccacttcttcctctacaagcacacccatgagggcgacccccttga

SEQ ID NO: 778438 - DNA, 120 bp, Artificial Sequence
  ENSG00000247596_7 (sequence is synthesized)
gtctgtagtgttcatctactccatgccggggtacaagtgcagcatcaaggagcgaatgctctactccagctgcaagagccgcctcctcgactccgtggagcaggacttccatctggagat

SEQ ID NO: 778439 - DNA, 120 bp, Artificial Sequence
  ENSG00000247596_8 (sequence is synthesized)
cgccaagaaaattgagattggcgatggggcagagctgacggcagagttcctctacgacgaggtgcaccccaagcaacacgccttcaagcaggccttcgccaagcccaagggcccaggggg

SEQ ID NO: 778440 - DNA, 120 bp, Artificial Sequence
  ENSG00000247596_9 (sequence is synthesized)
caagcggggccataagcgcctcatccgcggcccgggtgaaaatggggatgacagctaggaggctggagcagggccggccacgtgtggactgtggggctgcccaccttccgctccctgcca

SEQ ID NO: 778441 - DNA, 120 bp, Artificial Sequence
  ENSG00000247596_10 (sequence is synthesized)
ccatcctccttcctgggctccaggaaagtgtttctgggaggtcaggagggctggcagctgaacgcacttgcagcgtccgagggccaccgggctggcattttgtgacccttccctgttgct

SEQ ID NO: 778442 - DNA, 120 bp, Artificial Sequence
  ENSG00000247596_11 (sequence is synthesized)
gtccctgcatctcgtctgtgtgcccagggtgtccggggaccctgcctggctggcttaagggggctgggtcaggggcctggcatgaacctggcctcccggggagctgagactagggtccca

SEQ ID NO: 778443 - DNA, 120 bp, Artificial Sequence
  ENSG00000247596_12 (sequence is synthesized)
gcacagcccagaaacctttggccacaagaagtggggtcagtcagggctggggcaggggtcactgcagtttgggatggttgaatgctgtattttctaaagaataaaatatttttaaatcaa

SEQ ID NO: 778444 - DNA, 120 bp, Artificial Sequence
  ENSG00000247626_0 (sequence is synthesized)
agaacgccgcctcctccgcttgcggccggtctgcaccatgctgcgaacgtccgtcctccgcctgctaggacgcacgggggctagtaggctgtctctcctggaggacttcggcccacgcta

SEQ ID NO: 778445 - DNA, 120 bp, Artificial Sequence
  ENSG00000247626_1 (sequence is synthesized)
ctacagttcgggctccctcagtgccggcgatgatgcttgtgatgtgcgcgcctacttcactacacccattttctacgtgaacgcggcgccgcacatcgggcacctgtactcggcactact

SEQ ID NO: 778446 - DNA, 120 bp, Artificial Sequence
  ENSG00000247626_2 (sequence is synthesized)
ggcggacgccctatgccgccaccgtcgcctccgaggtcccagcacggccgccacgcgattctccactggtaccgacgagcacgggctgaagattcagcaggcagcagctaccgcgggcct

SEQ ID NO: 778447 - DNA, 120 bp, Artificial Sequence
  ENSG00000247626_3 (sequence is synthesized)
ggccccgaccgagctgtgcgaccgagtctctgagcagttccagcagcttttccaggaggccggtatctcctgcacagatttcatccgcaccacggaggcccggcaccgggtggctgtgca

SEQ ID NO: 778448 - DNA, 120 bp, Artificial Sequence
  ENSG00000247626_4 (sequence is synthesized)
gcacttctggggggtgcttaagtcccgcggtctgctctacaagggcgtctatgaaggttggtattgcgcttccgacgagtgcttcctgcctgaggccaaggtcacccagcagccgggccc

SEQ ID NO: 778449 - DNA, 120 bp, Artificial Sequence
  ENSG00000247626_5 (sequence is synthesized)
atcgggggattcgtttcctgtatctctcgagagcgggcatccagtctcctggaccaaggaagaaaactacattttcaggctttcccagttccggaagccactccagcggtggctgcgggg

SEQ ID NO: 778450 - DNA, 120 bp, Artificial Sequence
  ENSG00000247626_6 (sequence is synthesized)
caaccctcaggcgatcacccccgaaccatttcatcacgtagttcttcagtggctggacgaggagctgcccgacctgtccgtgtctcgcagaagtagccacttgcactggggcattccggt

SEQ ID NO: 778451 - DNA, 120 bp, Artificial Sequence
  ENSG00000247626_7 (sequence is synthesized)
gcccggggatgattcgcagaccatctatgtatggctggatgccctggtcaactacctcactgtaattggctacccaaatgctgagttcaaatcttggtggccggccacctctcatatcat

SEQ ID NO: 778452 - DNA, 120 bp, Artificial Sequence
  ENSG00000247626_8 (sequence is synthesized)
aggtaaggacattctcaaattccatgccatctattggcctgccttcctgttaggggccggcatgagcccgccacagcgcatctgtgtccattcccactggacagtctgtggccaaaagat

SEQ ID NO: 778453 - DNA, 120 bp, Artificial Sequence
  ENSG00000247626_9 (sequence is synthesized)
gtccaagagcttgggcaacgtggtggatcctaggacttgccttaaccgctataccgtggatggcttccgctactttctccttcggcagggcgtccccaactgggactgtgactactatga

SEQ ID NO: 778454 - DNA, 120 bp, Artificial Sequence
  ENSG00000247626_10 (sequence is synthesized)
tgaaaaggtggttaagttgctgaactccgagctggcagatgccttgggaggtctcttgaaccgatgcactgccaaaagaataaatccttctgagacctacccagccttctgcactacctg

SEQ ID NO: 778455 - DNA, 120 bp, Artificial Sequence
  ENSG00000247626_11 (sequence is synthesized)
cttccctagtgagccagggttggtggggccgtcagttcgtgctcaggcagaggattatgctctggtgagcgcagtggccactttgccaaagcaggtagcagaccactatgataactttcg

SEQ ID NO: 778456 - DNA, 120 bp, Artificial Sequence
  ENSG00000247626_12 (sequence is synthesized)
cagctgtgtccggcaaactaatggttttgtccaaaggcatgcaccatggaagctgaactgggagagcccagtggatgctccctggctgggtactgtgcttcatgtggccttggaatgttt

SEQ ID NO: 778457 - DNA, 120 bp, Artificial Sequence
  ENSG00000247626_13 (sequence is synthesized)
gcgagtctttgggactttgctgcagcctgtcaccccaagcctagctgacaagctgctgtctaggctgggggtctctgcctcagagaggagtcttggagagctctatttcttgcctcgatt

SEQ ID NO: 778458 - DNA, 120 bp, Artificial Sequence
  ENSG00000247626_14 (sequence is synthesized)
ctatggacatccatgcccttttgaagggaggaggctgggacctgaaactgggcttttgtttccaagactagaccagtccaggacttggctggtgaaagcccaccggacctagaaactcag

SEQ ID NO: 778459 - DNA, 120 bp, Artificial Sequence
  ENSG00000247626_15 (sequence is synthesized)
ttcttaccggcttgtggtaaaaaagcaaatgtgttatctttttattttttattttcaggaaagttatactagtattttcttaagtgtggaatcaaatgagcacataagctgtgtccctgt

SEQ ID NO: 778460 - DNA, 120 bp, Artificial Sequence
  ENSG00000247626_16 (sequence is synthesized)
gaaaagaggtttgtagcctttcaggtgcctgctcctattcatttctctgtgaccattgatcactgtcctttgtgcattgtgtgtctaagatgtcttcaggggaaagatgggtaagagaca

SEQ ID NO: 778461 - DNA, 120 bp, Artificial Sequence
  ENSG00000247626_17 (sequence is synthesized)
gtgttgctaatgctgttccttctttgtgcctccttccaaaccacagttatttgcccaaactacctctcgtggctggtttttcattggcctggcctctgcttctcaggctaattagtgact

SEQ ID NO: 778462 - DNA, 120 bp, Artificial Sequence
  ENSG00000247626_18 (sequence is synthesized)
cctttctttgagggtcagggttggaggccccttactggtggttttacagggggatcctactttgttacacatgttgggtttcctgataaaaagagagtattttattaaacccttgaacca

SEQ ID NO: 778463 - DNA, 120 bp, Artificial Sequence
  ENSG00000247626_19 (sequence is synthesized)
gtgtcctagaccagatgatttttgcccatgtgtatccccatttaaattcctacaactaagtctccctgctttgttaatagtccaacagttgggttgtgtaacatcacacttcaaccggta

SEQ ID NO: 778464 - DNA, 120 bp, Artificial Sequence
  ENSG00000247626_20 (sequence is synthesized)
gatggctctaatctcacacatttacttactaaagattgaggattcggaatatttagaataaattagttttctgctttctaattttgcagatctttacatttttattgcttttcttaaaat

SEQ ID NO: 778465 - DNA, 120 bp, Artificial Sequence
  ENSG00000247626_21 (sequence is synthesized)
aagggatagctttgcaaccactattgttttaatggaaagcaaaaaacccccccaaacttatcagaatcctcgttctttttcagactactgaaaaatgacatttactctgttaaatgttta

SEQ ID NO: 778466 - DNA, 120 bp, Artificial Sequence
  ENSG00000247626_22 (sequence is synthesized)
ataagtgaataagtaaatgtatcaagttgtttatataataaattataaaactcttgaggcacttggtatgttaaaaattttaaactttagtaacattaggttacaggtatgatttaaaaa

SEQ ID NO: 778467 - DNA, 120 bp, Artificial Sequence
  ENSG00000247626_23 (sequence is synthesized)
tttgtaaatagttcaaaagggcaatgttttctttatatttcttatagtcttaattttgttatccatgtgcataatttacctcatgatttcttttggtcaatcaggatctttaatacaata

SEQ ID NO: 778468 - DNA, 120 bp, Artificial Sequence
  ENSG00000247626_24 (sequence is synthesized)
ttggtcaatcaggatctttaatacaatatagaaattgtgtaatagttattataaatgttaatacacaactttcaggtaattttaactgattatttcttttgctcttttaacttaagttat

SEQ ID NO: 778469 - DNA, 120 bp, Artificial Sequence
  ENSG00000247746_0 (sequence is synthesized)
gtcccctggcatgatctgatcgcctttgaagcagtcgcagctgttttccagacgccttgctcctcaggtcggggagtgatctgatggcccaggttcgagaaacttctttgccctccggct

SEQ ID NO: 778470 - DNA, 120 bp, Artificial Sequence
  ENSG00000247746_1 (sequence is synthesized)
ctggggtccgctggatctccggaggtgggggaggagcctctcctgaggaggcggttgagaaggcggggaaaatggaggaggcggcggcgggggctacgaaggcgtcttcgagacgtgaag

SEQ ID NO: 778471 - DNA, 120 bp, Artificial Sequence
  ENSG00000247746_2 (sequence is synthesized)
ccgaggagatgaagctggagccattacaagagcgtgagcccgcgccggaggagaacttgacgtggagcagcagcggcggcgacgagaaggtgctcccttcaatcccccttcgctgtcaca

SEQ ID NO: 778472 - DNA, 120 bp, Artificial Sequence
  ENSG00000247746_3 (sequence is synthesized)
cttcaatcccccttcgctgtcacagcagctcctcgcccgtttgcccgcgccgcaagccccgccctcggccccagccccgggcccgctcccgcagccagcctgggctctcggccccacccc

SEQ ID NO: 778473 - DNA, 120 bp, Artificial Sequence
  ENSG00000247746_4 (sequence is synthesized)
cgccgccacccccgcccccacccgcaccgcggcccagggcctggcgtggatcccggcgcagatcccggcctgggtccaggcctcagacacggagaagctgctctggtgacctagacgggt

SEQ ID NO: 778474 - DNA, 120 bp, Artificial Sequence
  ENSG00000247746_5 (sequence is synthesized)
cgggggatcctggcggcttaggggactggttgctggaggtcgagtttggtcagggtcccacaggctgctctcatgtggagagctttaaagtaggtaagaactggcagaagaacctgaggt

SEQ ID NO: 778475 - DNA, 120 bp, Artificial Sequence
  ENSG00000247746_6 (sequence is synthesized)
tgatctaccagcgtttcgtttggagtgggaccccagagactaggaaacgtaaagcaaagtcatgcatctgtcacgtatgtagtacccatatgaacagactccactcttgtctctcctgtg

SEQ ID NO: 778476 - DNA, 120 bp, Artificial Sequence
  ENSG00000247746_7 (sequence is synthesized)
tcttttttggctgcttcactgagaaacatattcacaaacatgcagaaacaaagcagcaccatttagctgtagacctttatcatggggtcatatattgcttcatgtgtaaggattatgtat

SEQ ID NO: 778477 - DNA, 120 bp, Artificial Sequence
  ENSG00000247746_8 (sequence is synthesized)
atgacaaagacatagaacagattgccaaagaaacaaaagaaaaaattttgagattattaacttccacctcaacagatgtttctcatcaacagtttatgacatcagggtttgaagacaagc

SEQ ID NO: 778478 - DNA, 120 bp, Artificial Sequence
  ENSG00000247746_9 (sequence is synthesized)
aatcaacctgtgagacaaaggaacaggagccaaaattggtgaaacccaagaaaaagagaagaaaaaagtcagtctatactgtaggcctgagagggctaatcaatcttgggaacacttgtt

SEQ ID NO: 778479 - DNA, 120 bp, Artificial Sequence
  ENSG00000247746_10 (sequence is synthesized)
ttatgaattgtattgtccaggcacttacccatattcctctactgaaagatttcttcctctctgacaagcacaaatgtataatgacaagccccagcttgtgtctggtctgtgaaatgtctt

SEQ ID NO: 778480 - DNA, 120 bp, Artificial Sequence
  ENSG00000247746_11 (sequence is synthesized)
cgctttttcatgctatgtactctgggagccgaactcctcacattccctataagttactgcatctgatatggatccatgcagaacatttagcagggtacaggcagcaggatgcccatgagt

SEQ ID NO: 778481 - DNA, 120 bp, Artificial Sequence
  ENSG00000247746_12 (sequence is synthesized)
tccttattgcaatattagacgtgctacatagacacagcaaagatgatagtggtgggcaggaggccaataaccccaactgctgtaactgcatcatagaccaaatctttacaggtggcctgc

SEQ ID NO: 778482 - DNA, 120 bp, Artificial Sequence
  ENSG00000247746_13 (sequence is synthesized)
aatcagatgtcacatgtcaagcctgccatagtgtttctaccaccatagacccatgctgggacatcagtttggacttgcctggctcttgtgccacattcgattcccagaacccagagaggg

SEQ ID NO: 778483 - DNA, 120 bp, Artificial Sequence
  ENSG00000247746_14 (sequence is synthesized)
ctgacagcacagtgagcagggatgaccacataccaggaatcccctcacttacagactgtctacagtggtttacaaggccagagcacctaggaagcagtgccaaaatcaaatgcaatagtt

SEQ ID NO: 778484 - DNA, 120 bp, Artificial Sequence
  ENSG00000247746_15 (sequence is synthesized)
gccaaagctaccaggagtctactaaacagctcacaatgaaaaaattacccattgtggcttgttttcatctcaagcggtttgagcatgtaggcaaacagaggcgaaagattaataccttta

SEQ ID NO: 778485 - DNA, 120 bp, Artificial Sequence
  ENSG00000247746_16 (sequence is synthesized)
tctcctttcccttggagctggacatgactccgtttttggcctctactaaagagagcagaatgaaagaaggccagccaccaacagattgtgtgcccaatgagaataagtattccttgtttg

SEQ ID NO: 778486 - DNA, 120 bp, Artificial Sequence
  ENSG00000247746_17 (sequence is synthesized)
cagtgattaatcaccatggaactttggaaagtggccactataccagcttcatccggcaacaaaaggaccagtggttcagctgtgatgatgccatcatcaccaaggctaccattgaggact

SEQ ID NO: 778487 - DNA, 120 bp, Artificial Sequence
  ENSG00000247746_18 (sequence is synthesized)
gtaaatgattaggcaaggattttgaagtgacacacagacctacttggaatggacaatgacagtaacacctatgtgacagctagtatcttgatataaagaacctattttagcatggcccat

SEQ ID NO: 778488 - DNA, 120 bp, Artificial Sequence
  ENSG00000247746_19 (sequence is synthesized)
gggtctgtcggaagaaaaaaatgaatactaaccagtgaccattcaaccttaagaaatggggagagggagaagaggttgaaaatggtcacataaagcataatgaaatgaaaagaatgcttt

SEQ ID NO: 778489 - DNA, 120 bp, Artificial Sequence
  ENSG00000247746_20 (sequence is synthesized)
aggtggggacaacgggagtagaagtgttctgatgctactctatgtcatttgtttttacagaaatatcttgtgaagtcagggagtattcctttatcagcaaaaacttcacaattggtgttc

SEQ ID NO: 778490 - DNA, 120 bp, Artificial Sequence
  ENSG00000247746_21 (sequence is synthesized)
cagctgtggctgaccagctaaatagtttgaaagaaaaataatattttaaaataaagtttaaagagctttaaaagaaaaacatttaaaaaggaaaaaatcatttttaagattttaaaagaa

SEQ ID NO: 778491 - DNA, 120 bp, Artificial Sequence
  ENSG00000247746_22 (sequence is synthesized)
aattaaattcttaaagtttaaaaatgtaaaataaattaaggaacaaggttaaaaatgaaagtttaccaaaaaaaggaagaaaatactgttaaaaattaaagttagaaacaaaggaacatc

SEQ ID NO: 778492 - DNA, 120 bp, Artificial Sequence
  ENSG00000247746_23 (sequence is synthesized)
aaaaatacagaatggaatgcaattcagattttagagaaaagttttaaaagaggcaagtttagaataattcaagacaaaaagacaaaatgtgtttaaagacaaaaattgaaaaaatacagg

SEQ ID NO: 778493 - DNA, 120 bp, Artificial Sequence
  ENSG00000247746_24 (sequence is synthesized)
agttcaagagatttaaatgaaaactttaaatatttaaataaagatttaaaaatttaagcttttaaaaagaaaaacagttacataaaaattgaccagtgaaaaaatgtgaaagattcaagt

SEQ ID NO: 778494 - DNA, 120 bp, Artificial Sequence
  ENSG00000247746_25 (sequence is synthesized)
cataaaaattgaccagtgaaaaaatgtgaaagattcaagtagaaaaaattattaaaattaaaagtttaagaagttctatttttttatttaagcatattaaaatacagacgggtatgaaag

SEQ ID NO: 778495 - DNA, 90 bp, Artificial Sequence
  ENSG00000247746_26 (sequence is synthesized)
agagctttatgttgatatatcaatatacgttggaaaaggaaatagacattttaatcattatcttaccatccaattgtgaaatggctgcaa

SEQ ID NO: 778496 - DNA, 120 bp, Artificial Sequence
  ENSG00000247746_27 (sequence is synthesized)
ttaatcattatcttaccatccaattgtgaaatggctgcaaggcctaaacactaactaacccaccttcccctcttgagattccatgccccatctcatatcctgaaggaagtcaaattactt

SEQ ID NO: 778497 - DNA, 120 bp, Artificial Sequence
  ENSG00000247746_28 (sequence is synthesized)
cctaggcagaatcaattcatctgagaaaaatgaaaacattagggactttcccatttagaactgcattattcatacaaattcttagcttctgaaaaggggctcttgataatttggtggctt

SEQ ID NO: 778498 - DNA, 120 bp, Artificial Sequence
  ENSG00000247746_29 (sequence is synthesized)
agagaagttagatcacagctgtgaagctctggctttggtatttgagccccatggcctgattgaggaagtggcagggacccatatctgaggccttcccaccttcctttttccctcttcccc

SEQ ID NO: 778499 - DNA, 120 bp, Artificial Sequence
  ENSG00000247746_30 (sequence is synthesized)
ctccaaggagaaacaagacctttaatttccacagtagagcaatgggtttgtgcttgcagtccttctgctcattctttattccctctttatttcctttttttgtcactcatgcctagttcc

SEQ ID NO: 778500 - DNA, 120 bp, Artificial Sequence
  ENSG00000247746_31 (sequence is synthesized)
ctgaaccccttacttacctggccttacctacatctctgagccccagcctgcagggctccttctttgactattcacctggtggcttttactcctccttcaagacccaactcacagatgact

SEQ ID NO: 778501 - DNA, 120 bp, Artificial Sequence
  ENSG00000247746_32 (sequence is synthesized)
tctctggagtcttccctgaatgctctaggcaggtataaatgagaaaattgttcctctcttcccctctttattcctctcactgtgcctccaaagtactttgtccatacctcggtgatagta

SEQ ID NO: 778502 - DNA, 120 bp, Artificial Sequence
  ENSG00000247746_33 (sequence is synthesized)
cttattctactgtgattttattgtagctttgtgattgtctgcccctctgcactgagcatctaagaacagggggccaagccttattcatttctgtgttaataaatatttgttaaatgtgaa

SEQ ID NO: 778503 - DNA, 120 bp, Artificial Sequence
  ENSG00000248098_0 (sequence is synthesized)
gttagccaagatggcggtagcgatcgctgcagcgagggtctggcggctaaaccgtggtttgagccaggctgccctcctgctgctgcggcagcctggggctcggggactggctagatctca

SEQ ID NO: 778504 - DNA, 120 bp, Artificial Sequence
  ENSG00000248098_1 (sequence is synthesized)
cccccccaggcagcagcagcagttttcatctctggatgacaagccccagttcccaggggcctcggcggagtttatagataagttggaattcatccagcccaacgtcatctctggaatccc

SEQ ID NO: 778505 - DNA, 120 bp, Artificial Sequence
  ENSG00000248098_2 (sequence is synthesized)
catctaccgcgtcatggaccggcaaggccagatcatcaaccccagcgaggacccccacctgccgaaggagaaggtgctgaagctctacaagagcatgacactgcttaacaccatggaccg

SEQ ID NO: 778506 - DNA, 120 bp, Artificial Sequence
  ENSG00000248098_3 (sequence is synthesized)
catcctctatgagtctcagcggcagggccggatctccttctacatgaccaactatggtgaggagggcacgcacgtggggagtgccgccgccctggacaacacggacctggtgtttggcca

SEQ ID NO: 778507 - DNA, 120 bp, Artificial Sequence
  ENSG00000248098_4 (sequence is synthesized)
gtaccgggaggcaggtgtgctgatgtatcgggactaccccctggaactattcatggcccagtgctatggcaacatcagtgacttgggcaaggggcgccagatgcctgtccactacggctg

SEQ ID NO: 778508 - DNA, 120 bp, Artificial Sequence
  ENSG00000248098_5 (sequence is synthesized)
caaggaacgccacttcgtcactatctcctctccactggccacgcagatccctcaggcggtgggggcggcgtacgcagccaagcgggccaatgccaacagggtcgtcatctgttacttcgg

SEQ ID NO: 778509 - DNA, 120 bp, Artificial Sequence
  ENSG00000248098_6 (sequence is synthesized)
cgagggggcagccagtgagggggacgcccatgccggcttcaacttcgctgccacacttgagtgccccatcatcttcttctgccggaacaatggctacgccatctccacgcccacctctga

SEQ ID NO: 778510 - DNA, 120 bp, Artificial Sequence
  ENSG00000248098_7 (sequence is synthesized)
tggatggtaatgatgtgtttgccgtatacaacgccacaaaggaggcccgacggcgggctgtggcagagaaccagcccttcctcatcgaggccatgacctacaggatcgggcaccacagca

SEQ ID NO: 778511 - DNA, 120 bp, Artificial Sequence
  ENSG00000248098_8 (sequence is synthesized)
ccagtgacgacagttcagcgtaccgctcggtggatgaggtcaattactgggataaacaggaccaccccatctcccggctgcggcactatctgctgagccaaggctggtgggatgaggagc

SEQ ID NO: 778512 - DNA, 120 bp, Artificial Sequence
  ENSG00000248098_9 (sequence is synthesized)
aggagaaggcctggaggaagcagtcccgcaggaaggtgatggaggcctttgagcaggccgagcggaagcccaaacccaaccccaacctactcttctcagacgtgtatcaggagatgcccg

SEQ ID NO: 778513 - DNA, 120 bp, Artificial Sequence
  ENSG00000248098_10 (sequence is synthesized)
cccagctccgcaagcagcaggagtctctggcccgccacctgcagacctacggggagcactacccactggatcacttcgataagtgagacctgctcagcccacccccacccatcctcagct

SEQ ID NO: 778514 - DNA, 120 bp, Artificial Sequence
  ENSG00000248098_11 (sequence is synthesized)
accccgagaggtagccccactctaaggggagcagggggacctgacagcacaccactgtcttccccagtcagctccctctaaaatactcagcggccagggcggctgccactcttcacccct

SEQ ID NO: 778515 - DNA, 120 bp, Artificial Sequence
  ENSG00000248098_12 (sequence is synthesized)
gctcctcccggctgttacattgtcaggggacagcatctgcagcagttgctgaggctccgtcagccccctcttcacctgttgttacagtgccttctcccaggggctgggtgagggcacatt

SEQ ID NO: 778516 - DNA, 120 bp, Artificial Sequence
  ENSG00000248098_13 (sequence is synthesized)
caggactagaagcccctctgggcatggggtggacatggcaggtcagcctgtggaacttgcgcaggtgcgagtggccagcagaggtcacgaataaactgcatctctgcgcctggctctcta

SEQ ID NO: 778517 - DNA, 120 bp, Artificial Sequence
  ENSG00000248098_14 (sequence is synthesized)
ctccacatgggagagctggccgcctctgcaagaatgactgtccagcactgagggtcagcagaagtgtctgggcagctgcaaatgggactcatgcagaggcagcatggtgcagggtgtgct

SEQ ID NO: 778518 - DNA, 120 bp, Artificial Sequence
  ENSG00000248098_15 (sequence is synthesized)
aaacaagcctgagctttcctgtctgcctgccagcatgctgcaggtcacccacagggctgaactgtccccctgtactgcccactcggctaaccattgcctcctcccctcctaggtgtgctg

SEQ ID NO: 778519 - DNA, 120 bp, Artificial Sequence
  ENSG00000248099_0 (sequence is synthesized)
gccacccaccaccatggacccccgtctgcccgcctgggcgctggtgctgctgggccctgccctggtgttcgcgttgggccccgcgcccaccccagagatgcgtgagaagttgtgcggcca

SEQ ID NO: 778520 - DNA, 120 bp, Artificial Sequence
  ENSG00000248099_1 (sequence is synthesized)
ccacttcgtacgcgcgctagtgcgcgtgtgcgggggcccccgctggtccaccgaagccaggaggcctgcgaccggaggcgaccgtgagttgctacagtggctggagagacgacatctgct

SEQ ID NO: 778521 - DNA, 120 bp, Artificial Sequence
  ENSG00000248099_2 (sequence is synthesized)
ccatgggctggtggccgacagtaatctcacgctgggacctggcctgcagcccctgccccagacctctcaccatcaccgccaccaccgtgcagctgccaccaaccctgcacgctactgctg

SEQ ID NO: 778522 - DNA, 120 bp, Artificial Sequence
  ENSG00000248099_3 (sequence is synthesized)
accctctgtccctactgattcctccttgggtgcagcctcagagtggcctgaggcccagagggtctggtctggtgagctcctgaggccacacagcaccataaagtctcgcatctacaggcc

SEQ ID NO: 778523 - DNA, 120 bp, Artificial Sequence
  ENSG00000248099_4 (sequence is synthesized)
tttgattacctcctgggatgggtgctcactatctaccccagaccaatgccacctgcagcctgtggagtcaactgcagaataaatcacaccctagccctggcttggaggatccccgctttc

SEQ ID NO: 778524 - DNA, 120 bp, Artificial Sequence
  ENSG00000248099_5 (sequence is synthesized)
acagatgctggacactgacagccaaatgtcctcactccaggggagccccagacgctccgctccctgcatgtgtaacaccccttcttgctgtctcttagtaaataaacgacccaaagcagc

SEQ ID NO: 778525 - DNA, 81 bp, Artificial Sequence
  ENSG00000248099_6 (sequence is synthesized)
caccttgaccttccaaagtgttgggattagcgatgtgagttgctacagtggctggagagacgacatctgctccatgggctg

SEQ ID NO: 778526 - DNA, 120 bp, Artificial Sequence
  ENSG00000248109_0 (sequence is synthesized)
atttgaagagcacctactgcagagttaggcttaactccacccaacagccaagtctgaaaccactgacggtaccatgagggctttcattttctttctcttcatgctcctggccatgttctc

SEQ ID NO: 778527 - DNA, 120 bp, Artificial Sequence
  ENSG00000248109_1 (sequence is synthesized)
agcatcttcaacccagatttcaaataccagtgttttcaaactagaagagaatccaaaacctgcacttattctggaggaaaaaaatgaagctaaccatctaggaggacaaagagattctaa

SEQ ID NO: 778528 - DNA, 120 bp, Artificial Sequence
  ENSG00000248109_2 (sequence is synthesized)
taagcaaggaggtagttatacacaaggaaatccaggaacgtttaggcttcaaggacaaccaggctattttaacaagctagagaaaccaagacattttaagcaagggagagcaggagtttt

SEQ ID NO: 778529 - DNA, 120 bp, Artificial Sequence
  ENSG00000248109_3 (sequence is synthesized)
aaaccagcctgggattttaaagaattcaggaaaatctaaccaaaaagggaatccagaatcttctaataagcaggaaaactcaggatcttctagccaactagggagaccagggatttctac

SEQ ID NO: 778530 - DNA, 120 bp, Artificial Sequence
  ENSG00000248109_4 (sequence is synthesized)
ccaacagggaaatccagggtcatctgaccaacaagagaaaccagggtcatttagccagaaagtgatggtggggtcatctagccaacaggggaagccaggatcatctagccaacacgggaa

SEQ ID NO: 778531 - DNA, 120 bp, Artificial Sequence
  ENSG00000248109_5 (sequence is synthesized)
gggtttatctagccatcaagggaagccagagtcatctggccaacaggggaagccagggtcatctagccaacaaggaaatctaggaacttctggccaacaggagaagccaggatcttctag

SEQ ID NO: 778532 - DNA, 120 bp, Artificial Sequence
  ENSG00000248109_6 (sequence is synthesized)
ccaacaggggaagccagggttgtctagccatcaagggaagccagggtcatctagccaacaaggaaatctacatttatctagccagcaagggaatcaaggaccttctagcaaacagaggaa

SEQ ID NO: 778533 - DNA, 120 bp, Artificial Sequence
  ENSG00000248109_7 (sequence is synthesized)
gccaggttcatccagccgtcaaggaaatctatgattatctagccagcaagggaatataggatctcctagccaacaggagaagccagagtcttctagccaacaagggaatctagggtcatc

SEQ ID NO: 778534 - DNA, 120 bp, Artificial Sequence
  ENSG00000248109_8 (sequence is synthesized)
tagctatcaagggaagccagtgtcatctagccaacaagggaagccagtgtcatctagccaacaagggaagccaggggcatctaaccagcaaggagatctaggatcttctaagcagcaggg

SEQ ID NO: 778535 - DNA, 120 bp, Artificial Sequence
  ENSG00000248109_9 (sequence is synthesized)
gaagccaggatcatctagccagcaaggaaatatagggtcatctggccaggaatggaagccagagccatctagccatcagagaaaattaaggtcattttacaaccaacgacaaagaaaaaa

SEQ ID NO: 778536 - DNA, 120 bp, Artificial Sequence
  ENSG00000248109_10 (sequence is synthesized)
atctttgcctttgggaggacaagtgctgggtgcctgcagctcccagcgcaccaaaagccttggtgaagctgagctgcccggccactgccactcctcctgcagacgaaggaactgagaacc

SEQ ID NO: 778537 - DNA, 120 bp, Artificial Sequence
  ENSG00000248109_11 (sequence is synthesized)
acagggacagtggaagaggatggaaccggttactgcatagtgaaagctctctgaaacaatgctctactggaggcaagtctaacatacgcaaattggaagatgatgacttgattgtaatta

SEQ ID NO: 778538 - DNA, 120 bp, Artificial Sequence
  ENSG00000248109_12 (sequence is synthesized)
actcctcctgcagacgaaggaactgagaaccacagggacagtggaagaggatggaaccgtgatgtccttgagaagatgaagccaatgacagtaacactcccaagttcgtgcttttctgag

SEQ ID NO: 778539 - DNA, 120 bp, Artificial Sequence
  ENSG00000248109_13 (sequence is synthesized)
cttacatttcctactgccataaatctacttcatgctttatggtatccagacctcacattatcaaagttatcttttggacatgctccaactgattcaagtttctcttatttagagaaacca

SEQ ID NO: 778540 - DNA, 120 bp, Artificial Sequence
  ENSG00000248109_14 (sequence is synthesized)
cgcaccaaaagccttggtgaagctgagctgcccggccactgccactcctcctgcagacgaaggaactgagaaccacagggacagtggaagaggatggaaccggtagttttcaatatacta

SEQ ID NO: 778541 - DNA, 120 bp, Artificial Sequence
  ENSG00000248144_0 (sequence is synthesized)
atgcactcaagcagagaagaaatccacaagtactcaccagcctcctggtctgcagagaagacagaatcaatatgagcacagcaggaaaagtaatcaaatgcaaagcagctgtgctatggg

SEQ ID NO: 778542 - DNA, 120 bp, Artificial Sequence
  ENSG00000248144_1 (sequence is synthesized)
agttaaagaaacccttttccattgaggaggtagaggttgcacctcctaaggctcatgaagttcgcattaagatggtggctgcaggaatctgtcgttcagatgagcatgtggttagtggca

SEQ ID NO: 778543 - DNA, 120 bp, Artificial Sequence
  ENSG00000248144_2 (sequence is synthesized)
acctggtgaccccccttcctgtgattttaggccatgaggcagccggcatcgtggaaagtgttggagaaggggtgactacagtcaaaccaggtgataaagtcatcccgctctttactcctc

SEQ ID NO: 778544 - DNA, 120 bp, Artificial Sequence
  ENSG00000248144_3 (sequence is synthesized)
agtgtggaaaatgcagaatttgtaaaaacccagaaagcaactactgcttgaaaaatgatctaggcaatcctcgggggaccctgcaggatggcaccaggaggttcacctgcagcgggaagc

SEQ ID NO: 778545 - DNA, 120 bp, Artificial Sequence
  ENSG00000248144_4 (sequence is synthesized)
ccatccaccacttcgtcggcgtcagcaccttctcccagtacacagtggtggatgagaatgcagtggccaaaattgatgcagcctcgcccctggagaaagtctgcctcattggctgtggat

SEQ ID NO: 778546 - DNA, 120 bp, Artificial Sequence
  ENSG00000248144_5 (sequence is synthesized)
tttcgactggttatgggtctgcagtcaaagttgccaaggtcaccccagggtctacctgtgctgtgtttggcctgggaggggtcggcctatctgttgttatgggctgtaaagcagctggag

SEQ ID NO: 778547 - DNA, 120 bp, Artificial Sequence
  ENSG00000248144_6 (sequence is synthesized)
gctgtggacatcaacaaggacaaatttgcaaaggctaaagagttgggtgccactgaatgcatcaaccctcaagactacaagaaacccattcaggaagtgctaaaggaaatgactgatgga

SEQ ID NO: 778548 - DNA, 120 bp, Artificial Sequence
  ENSG00000248144_7 (sequence is synthesized)
ggtgtggatttttcgtttgaagtcatcggtcggcttgacaccatgatggcttccctgttatgttgtcatgaggcatgtggcacaagtgtcattgtaggggtacctcctgattcccagaac

SEQ ID NO: 778549 - DNA, 120 bp, Artificial Sequence
  ENSG00000248144_8 (sequence is synthesized)
ctctcaataaaccctatgctgctactgactggacgcacgtggaaaggagctatttttggaggctttaagagtaaagaatctgtccccaaacttgtggctgactttatggctaagaagttt

SEQ ID NO: 778550 - DNA, 120 bp, Artificial Sequence
  ENSG00000248144_9 (sequence is synthesized)
tcactggatgcattaataacaaatattttaccttttgaaaaaataaatgaaggatttgacctgcttcgctctggaaagagtatccgtaccgtcctgacgttttgaaacaatacagatgcc

SEQ ID NO: 778551 - DNA, 120 bp, Artificial Sequence
  ENSG00000248144_10 (sequence is synthesized)
ttcccttgtagcagttttcagcctcctctaccctacatgatctggagcaacagctaggaaatatcattaattctgctcttcagagatgttaaaaataaattacacgtgggagctttccaa

SEQ ID NO: 778552 - DNA, 120 bp, Artificial Sequence
  ENSG00000248144_11 (sequence is synthesized)
agaaatggaaattgatgggaaattatttgtcaagcaaatgtttaaaatccaaatgagaactaaataaagtgttgaacatcaactggggaattgaagccaataaaccttccttcttaacca

SEQ ID NO: 778553 - DNA, 120 bp, Artificial Sequence
  ENSG00000248144_12 (sequence is synthesized)
atgcactcaagcagagaagaaatccacaagtactcaccagcctcctggtctgcagagaagacagaatcaatatgagcacagcaggaaaaatggtggctgcaggaatctgtcgttcagatg

SEQ ID NO: 778554 - DNA, 120 bp, Artificial Sequence
  ENSG00000248144_13 (sequence is synthesized)
aagaaatccacaagtactcaccagcctcctggtctgcagagaagacagaatcaatatgagcacagcaggaaaaatggagtatctttctattgcccaggttggagtgcaatggtgatctcg

SEQ ID NO: 778555 - DNA, 120 bp, Artificial Sequence
  ENSG00000248329_0 (sequence is synthesized)
aatgtgatcattaaccttcctgcaaaacacagctggcagttctctgaggtttgtcactagaatgtgaagacagccacacagatattgcacagactatttacagatcgtttggtttacatt

SEQ ID NO: 778556 - DNA, 120 bp, Artificial Sequence
  ENSG00000248329_1 (sequence is synthesized)
gagagtcattgctctacttttgtgcggtaggaaaatgagatttcagcaattcctttttgcattttttatttttattatgagtcttctccttatcagcggacagagaccagttaatttgac

SEQ ID NO: 778557 - DNA, 120 bp, Artificial Sequence
  ENSG00000248329_2 (sequence is synthesized)
catgagaagaaaactgcgcaaacacaattgccttcagaggagatgtatgcctctccattcacgagtaccctttccctgagatctctctagctaactttactggatctatcagaagaagaa

SEQ ID NO: 778558 - DNA, 120 bp, Artificial Sequence
  ENSG00000248329_3 (sequence is synthesized)
gaggagtgaaggaaagacacccagccacacaaaagaacttcatgatgccaacagcgtgattgcttagaagttcctacacaaaaaaaggatcatttgaaagcacctggaatggtttattag

SEQ ID NO: 778559 - DNA, 120 bp, Artificial Sequence
  ENSG00000248329_4 (sequence is synthesized)
cttcacaggattttattcttcttggcttctatttggagggaaaataacataaattcaaaaggattccaatctgaagcccaaatcgtttgcctacataacaaaaatatctcatcttttcct

SEQ ID NO: 778560 - DNA, 120 bp, Artificial Sequence
  ENSG00000248329_5 (sequence is synthesized)
gcacattattattcttttatgggttaaaaagaaaaataccttttagtgttttagaactctctcatggtaaaaagtgcaagaatttaaaatgttgctttcatattcctataattctccaaa

SEQ ID NO: 778561 - DNA, 120 bp, Artificial Sequence
  ENSG00000248329_6 (sequence is synthesized)
agtattaaattcgtatatgtttgagtgattttctaaaaactgctcaacctgaaatcaattgcattgaccatttggcttcgcacaatagggagaaaataattggttcattgattatataga

SEQ ID NO: 778562 - DNA, 120 bp, Artificial Sequence
  ENSG00000248329_7 (sequence is synthesized)
gagaaagactaagaaaagctattaattgctaccaattttatgataagctttaaggtttatgaaagtatgtttttttatttaatgagtaatgtccatttgaagttgaaagaaaacatgaaa

SEQ ID NO: 778563 - DNA, 120 bp, Artificial Sequence
  ENSG00000248329_8 (sequence is synthesized)
aatgagtaatgtccatttgaagttgaaagaaaacatgaaatcctaattgtagttcattttatgttcaaatgaaaccattgtttttgtttttgttttgaaacagagtctcactctgttgcc

SEQ ID NO: 778564 - DNA, 120 bp, Artificial Sequence
  ENSG00000248329_9 (sequence is synthesized)
ctccacctcccgagttcaagtgattctcgtgcctcaacctcccaattataggctgggattacaggtgtgcaccactacacccagctaattcttgtattttttgtagagatgaggttttac

SEQ ID NO: 778565 - DNA, 120 bp, Artificial Sequence
  ENSG00000248329_10 (sequence is synthesized)
ggaaccattcattttttaacctttctcatcatgtaattataggaacccaacgtttgatttcctttgaagttttgttatgtcctttattattttgtatggataatttctttaaaagtctta

SEQ ID NO: 778566 - DNA, 120 bp, Artificial Sequence
  ENSG00000248329_11 (sequence is synthesized)
cttaaagttgacatctaaaatacagttatgccaatgaagtcccactcagggtgatatctgtatctaaaagatgagtgctcatcatcctattaggctttgtcttggtggtgttcatcctga

SEQ ID NO: 778567 - DNA, 120 bp, Artificial Sequence
  ENSG00000248329_12 (sequence is synthesized)
gatgctgagacatggaaataaaaaatcagaaggaatttagggatatgattactcaaaaaagaaactatcctgtctaaatttgaattgtgttgataactaggtgttccccagatgctaaga

SEQ ID NO: 778568 - DNA, 120 bp, Artificial Sequence
  ENSG00000248329_13 (sequence is synthesized)
tgttcttaatttgtatttattgaaggattgttagcttagtgccacaaaatttttcttactttatgttaattccagataagaaatttacaagtttatatctttttttttcttttttttaag

SEQ ID NO: 778569 - DNA, 89 bp, Artificial Sequence
  ENSG00000248329_14 (sequence is synthesized)
aaatttacaagtttatatctttttttttcttttttttaagatgagatctggctctaaggctaactccctggctcaagcgatccttccac

SEQ ID NO: 778570 - DNA, 89 bp, Artificial Sequence
  ENSG00000248329_15 (sequence is synthesized)
atttttgtatttttttgtagagatggagtatcgccatgttgcccaggttggtctcaaactcaggctggtgagctcaagtgatccgcctc

SEQ ID NO: 778571 - DNA, 120 bp, Artificial Sequence
  ENSG00000248329_16 (sequence is synthesized)
gggattacaggcatgtgccaccatgctgggccacaagttcatatctggagtagaagttttactttgtaaatattataaagtagaagaaaccataaaccattttgctaaaatgaaaggttg

SEQ ID NO: 778572 - DNA, 120 bp, Artificial Sequence
  ENSG00000248329_17 (sequence is synthesized)
gggttaatataaatgtaattttaaatagaaaatctgacaacactgtcgagtttgtcttcctgtcaaagcttattaaaagtgtctttgcggatgaatggtactttccacaagtgcatttga

SEQ ID NO: 778573 - DNA, 120 bp, Artificial Sequence
  ENSG00000248329_18 (sequence is synthesized)
gtagaagcataacctattctcagttatatttatgtttaaaacatgtactggtttgtatattttgtactgaaaaagaaaacactttatagtcaagatacatctcattcaatacaagtctaa

SEQ ID NO: 778574 - DNA, 120 bp, Artificial Sequence
  ENSG00000248329_19 (sequence is synthesized)
actctttcaaatacaaattcgcatattcacagaaaaagttacaaatcagttttactattgtaaagtaatgaaatggttatacatttcttaattgttcaataaaacactcaatgatttgca

SEQ ID NO: 778575 - DNA, 120 bp, Artificial Sequence
  ENSG00000248329_20 (sequence is synthesized)
tgacagaaaatagattcgctacatttaggcagtgttccaaattagatataccaggaaatgtttcttcacagtttgtaatatgtgataatggcttatggcaatgtcaagacttaagagatg

SEQ ID NO: 778576 - DNA, 120 bp, Artificial Sequence
  ENSG00000248329_21 (sequence is synthesized)
cataccaataaatgaaagagttaaatgaatgacatgacttttgagaattgctttaatagttaaggaagaaaattagacagatgaggacaatgtaggaaaatcttgataactgttgaatct

SEQ ID NO: 778577 - DNA, 120 bp, Artificial Sequence
  ENSG00000248329_22 (sequence is synthesized)
tgtagagatggagtatcgccatgttgcccagcttcctttgaggaatgaaaatcattgtttgctgtacatttgatcagaagaaaaaagaaaaactgaaattagtgaagtcagtgaagtctt

SEQ ID NO: 778578 - DNA, 120 bp, Artificial Sequence
  ENSG00000248329_23 (sequence is synthesized)
cggtcccgtcctgaatcatttttaccctctgtttagggacaggtctagaacgagtgagcacaaaactgaagagtgtgccgaaaatctcagcaatcaagataacatttgaactccattttt

SEQ ID NO: 778579 - DNA, 120 bp, Artificial Sequence
  ENSG00000248333_0 (sequence is synthesized)
atacaggaagtgacgatacttttggcgcgcgccggttgctgtttcttctctggctccgggaccggcggcggcggcggcggcagcggcggcggcgtagggtgttttaactcaaatgggtga

SEQ ID NO: 778580 - DNA, 120 bp, Artificial Sequence
  ENSG00000248333_1 (sequence is synthesized)
tgaaaaggactcttggaaagtgaaaactttagatgaaattcttcaggaaaagaaacgaaggaaggaacaagaggagaaagcagagataaaacgcttaaaaaattctgatgaccgggattc

SEQ ID NO: 778581 - DNA, 120 bp, Artificial Sequence
  ENSG00000248333_2 (sequence is synthesized)
caagcgggattcccttgaggagggggagctgagagatcaccgcatggagatcacaataaggaactccccgtatagaagagaagactctatggaagacagaggagaagaagatgattcttt

SEQ ID NO: 778582 - DNA, 120 bp, Artificial Sequence
  ENSG00000248333_3 (sequence is synthesized)
ggccatcaaaccaccccagcaaatgtctcggaaagaaaaagctcatcacagaaaagatgaaaagagaaaagagaaacgtaggcatcgtagccattcagcagaaggggggaagcatgctag

SEQ ID NO: 778583 - DNA, 120 bp, Artificial Sequence
  ENSG00000248333_4 (sequence is synthesized)
agtgaaagaaaaagaaagagagcacgaacgtcggaaacggcatcgagaagaacaggataaagctcgccgggaatgggaaagacagaagagaagggagatggcaagggagcattccaggag

SEQ ID NO: 778584 - DNA, 120 bp, Artificial Sequence
  ENSG00000248333_5 (sequence is synthesized)
agaaagggaccgcttggagcagttagaaaggaagcgggagcgggagcgcaagatgcgggagcagcagaaggagcagcgggagcagaaggagcgcgagcggcgggcagaggagcggcgcaa

SEQ ID NO: 778585 - DNA, 120 bp, Artificial Sequence
  ENSG00000248333_6 (sequence is synthesized)
ggagcgggaggcccgcagggaagtgtctgcacatcaccgaacgatgagagaggactacagcgacaaagtgaaagccagccactggagtcgcagcccgcctcggccgccgcgggagcggtt

SEQ ID NO: 778586 - DNA, 120 bp, Artificial Sequence
  ENSG00000248333_7 (sequence is synthesized)
cgagttgggagacggccggaagccaggtgaggccaggccggcgcctgcgcagaagccagcacagttaaaagaagagaaaatggaagaaagggacctgctgtccgacttacaggacatcag

SEQ ID NO: 778587 - DNA, 120 bp, Artificial Sequence
  ENSG00000248333_8 (sequence is synthesized)
gctgtccgacttacaggacatcagcgacagcgagaggaagaccagctcggccgagtcctcgtcagcggaatcaggctcaggttctgaggaagaagaggaggaggaggaagaggaggagga

SEQ ID NO: 778588 - DNA, 120 bp, Artificial Sequence
  ENSG00000248333_9 (sequence is synthesized)
agaggaggaggaggaggaagaggaagaggaggaggaggagaccggcagcaactctgaggaggcatcagagcagtctgccgaagaagtaagtgaggaagaaatgagtgaagatgaagaacg

SEQ ID NO: 778589 - DNA, 120 bp, Artificial Sequence
  ENSG00000248333_10 (sequence is synthesized)
agaaaatgaaaaccacctcttggttgttccagagtcacggttcgaccgagattccggggagagtgaagaagcagaggaagaagtgggtgagggaacgccgcagagcagcgccctgacaga

SEQ ID NO: 778590 - DNA, 120 bp, Artificial Sequence
  ENSG00000248333_11 (sequence is synthesized)
atcgagctcaagcaggagctgcccaagtacctgccggccctgcagggctgccggagcgtcgaggagttccagtgcctgaacaggatcgaggagggcacctatggagtggtctacagagca

SEQ ID NO: 778591 - DNA, 120 bp, Artificial Sequence
  ENSG00000248333_12 (sequence is synthesized)
aaagacaagaaaacagatgaaattgtggctctaaagcggctgaagatggagaaggagaaggagggcttcccgatcacgtcgctgagggagatcaacaccatcctcaaggcccagcatccc

SEQ ID NO: 778592 - DNA, 120 bp, Artificial Sequence
  ENSG00000248333_13 (sequence is synthesized)
aacatcgtcaccgttagagagattgtggtgggcagcaacatggacaagatctacatcgtgatgaactatgtggagcacgacctcaagagcctgatggagaccatgaaacagcccttcctg

SEQ ID NO: 778593 - DNA, 120 bp, Artificial Sequence
  ENSG00000248333_14 (sequence is synthesized)
ccaggggaggtgaagaccctgatgatccagctgctgcgtggggtgaaacacctgcacgacaactggatcctgcaccgtgacctcaagacgtccaacctgctgctgagccacgccggcatc

SEQ ID NO: 778594 - DNA, 120 bp, Artificial Sequence
  ENSG00000248333_15 (sequence is synthesized)
ctcaaggtgggtgacttcgggctggcgcgggagtacggatcccctctgaaggcctacaccccggtcgtggtgaccctgtggtaccgcgccccagagctgctgcttggtgccaaggaatac

SEQ ID NO: 778595 - DNA, 120 bp, Artificial Sequence
  ENSG00000248333_16 (sequence is synthesized)
tccacggccgtggacatgtggtcagtgggttgcatcttcggggagctgctgactcagaagcctctgttccccgggaagtcagaaatcgatcagatcaacaaggtgttcaaggatctgggg

SEQ ID NO: 778596 - DNA, 120 bp, Artificial Sequence
  ENSG00000248333_17 (sequence is synthesized)
acccctagtgagaaaatctggcccggctacagcgagctcccagcagtcaagaagatgaccttcagcgagcacccctacaacaacctccgcaagcgcttcggggctctgctctcagaccag

SEQ ID NO: 778597 - DNA, 120 bp, Artificial Sequence
  ENSG00000248333_18 (sequence is synthesized)
ggcttcgacctcatgaacaagttcctgacctacttccccgggaggaggatcagcgctgaggacggcctcaagcatgagtatttccgcgagacccccctccccatcgacccctccatgttc

SEQ ID NO: 778598 - DNA, 120 bp, Artificial Sequence
  ENSG00000248333_19 (sequence is synthesized)
cccacgtggcccgccaagagcgagcagcagcgtgtgaagcggggcaccagcccgaggccccctgagggaggcctgggctacagccagctgggtgacgacgacctgaaggagacgggcttc

SEQ ID NO: 778599 - DNA, 120 bp, Artificial Sequence
  ENSG00000248333_20 (sequence is synthesized)
caccttaccaccacgaaccagggggcctctgccgcgggccccggcttcagcctcaagttctgaaggtcagagtggaccccgtcatggggagaactcagccgggaccacaggcgtggctac

SEQ ID NO: 778600 - DNA, 120 bp, Artificial Sequence
  ENSG00000248333_21 (sequence is synthesized)
tgcggctggagctgcgatgagactcggaactcctcgtcttactttgtgctccatgttttgtttttgtattttggtttgtaaatttgtagaattaaatcattttccttgttgtggaggaaa

SEQ ID NO: 778601 - DNA, 120 bp, Artificial Sequence
  ENSG00000248333_22 (sequence is synthesized)
gagctgtgttttctccgtgacttgcccagggcggagagggtggacatcttcgggtgcccacgtggggcagcacaaacctccacacaccctctcccactctcgacacgcacggggctggct

SEQ ID NO: 778602 - DNA, 120 bp, Artificial Sequence
  ENSG00000248333_23 (sequence is synthesized)
gggccgtgatttggaaaggaactggtgggagccgggtggattgtttaatcttcggagctggagacctgtttctgtgttgggatgagcgatgccctcttgccccaacccactcgtccagac

SEQ ID NO: 778603 - DNA, 120 bp, Artificial Sequence
  ENSG00000248333_24 (sequence is synthesized)
cagccctgtccacacaggcccccggcccccaacccccagccccagctgtgccagcagactcgacaggtttttatacaaggttgttgagttttaaaatgtattaaaatattcttcgaggaa

SEQ ID NO: 778604 - DNA, 120 bp, Artificial Sequence
  ENSG00000248333_25 (sequence is synthesized)
gggtgacaaaccaagaccctgtctcaaaaaaaagctagaaacaagaaggagcaaggacttcacagccagaaacaggccaatacagcaggaagatacagcaatgatacgtcactttgaaaa

SEQ ID NO: 778605 - DNA, 120 bp, Artificial Sequence
  ENSG00000248333_26 (sequence is synthesized)
gctgtctgctagagaacaggaaaagacgcagcgtacaaacatcagctctactcgggaggctcagaccctgtctcaaaaaaaagctagaaacaagaaggagcaaggacttcacagccagaa

SEQ ID NO: 778606 - DNA, 76 bp, Artificial Sequence
  ENSG00000248333_27 (sequence is synthesized)
aagctagaaacaagaaggagcaaggacttcacagccagaaacaggccaatacagcaggaagatacagcaatgatac

SEQ ID NO: 778607 - DNA, 120 bp, Artificial Sequence
  ENSG00000248383_0 (sequence is synthesized)
atggtgggctgtggggtggcagttttatgtttgtgggtttcctgcggcgctgcagcgggacagctcgagtactcagtgccggaggagacggagcggggcgtagccgtaggcaatctctcc

SEQ ID NO: 778608 - DNA, 120 bp, Artificial Sequence
  ENSG00000248383_1 (sequence is synthesized)
gcggacttgaggctgccagcggccgctatgtcctcgcggaactttcgcttcctttccagccaccgcgagctctacttcggggtggatctacccagcggcaatttggtggtcagagagccg

SEQ ID NO: 778609 - DNA, 120 bp, Artificial Sequence
  ENSG00000248383_2 (sequence is synthesized)
gcggaccgcgaacagctgtgcagggccaaagctgcctgcgtcttgacctacgacctggtgctcgaggacccgctggagctgcacaagattcggattcacgtcctggacaccaatgacaac

SEQ ID NO: 778610 - DNA, 120 bp, Artificial Sequence
  ENSG00000248383_3 (sequence is synthesized)
tcacctctctttcctgccggcgacgtgcagctgcacatccccgagttcctgacgcccggagcccgctttactctcccgaatgcccaagatgacgacgagggaagcaatgggatactaagc

SEQ ID NO: 778611 - DNA, 120 bp, Artificial Sequence
  ENSG00000248383_4 (sequence is synthesized)
tacagcctaagccccagtcagcactttcgcctggacatgggatcgcgggttgacggcagcgaatacccggagttggtgttggagaaagcactggatcgcgaacagcgcgccacccacctg

SEQ ID NO: 778612 - DNA, 120 bp, Artificial Sequence
  ENSG00000248383_5 (sequence is synthesized)
ctggtgcttacagctcgggacggcgggctacctgcccgctcaggagacgcacaagtcaccatcattgtggtggacacaaatgacaacgcgcctgtatttgagcgctccgtataccgcacc

SEQ ID NO: 778613 - DNA, 120 bp, Artificial Sequence
  ENSG00000248383_6 (sequence is synthesized)
aaggttccagagactgcacccaatgggactgtgttattccgagttcaagccttggatccagatgaagggtccaatggggaagtccagtactccctaagcaacagcacgcaagcagagctg

SEQ ID NO: 778614 - DNA, 120 bp, Artificial Sequence
  ENSG00000248383_7 (sequence is synthesized)
cgacaccgctttcacgtgcaccctaaaagtggggaggtgcaagtagctgcttcactaggtccgcctgaaacgctcttggaggcatacattgaggcgagggacgaaggtgtctttggttta

SEQ ID NO: 778615 - DNA, 120 bp, Artificial Sequence
  ENSG00000248383_8 (sequence is synthesized)
gctagcaccgctaaactgctggtggaggtgactgacgtgaacgatcatgcccccgaactggacttcctgactctttcgaacccagtacctgaggacgctgcccctggcacagtgattgct

SEQ ID NO: 778616 - DNA, 120 bp, Artificial Sequence
  ENSG00000248383_9 (sequence is synthesized)
ctctttagtgtaaaggatgaagacctcgattctaatggtagggtcatttgtggcatgtctagtgcaggcccttttcagctgacggcttcctttgacaactactacagcctgctgattgat

SEQ ID NO: 778617 - DNA, 120 bp, Artificial Sequence
  ENSG00000248383_10 (sequence is synthesized)
gggcccctggaccgggagcagatcagtgaataccaagtcctgatcacggcctcagatagtggctcacccccacttagcacccgaaggacaatcactgtgtcagttgctgatgtgaatgac

SEQ ID NO: 778618 - DNA, 120 bp, Artificial Sequence
  ENSG00000248383_11 (sequence is synthesized)
aatacaccaaactttcctcaaccccagcaggaacttttcgttgctgaaaacaatggccctggggcctctctaggccgagtgtttgcccaggaccccgacctggggaagaatggccttgtc

SEQ ID NO: 778619 - DNA, 120 bp, Artificial Sequence
  ENSG00000248383_12 (sequence is synthesized)
tcttatgagctgttggatgttatctctgaagggccatcagcctctagcttgctggcagtggaatcatccagtggggccatcactgccaaaacttcctttgactttgagcagctcaggggg

SEQ ID NO: 778620 - DNA, 120 bp, Artificial Sequence
  ENSG00000248383_13 (sequence is synthesized)
tttcatttccaagtagaaggccgggatggtggcattcctcccagaagtgcaacagtgactataaacttgtttgtggtagataggaatgacaattatccggttatcttgtttcccttgccc

SEQ ID NO: 778621 - DNA, 120 bp, Artificial Sequence
  ENSG00000248383_14 (sequence is synthesized)
agaaatggttctgtcccagtggaaattgtgccccgctctgccaggactggacacttggtcacaaaagtggtagcagaggatgctgacagtggttctaatgcctggctttcctaccacatc

SEQ ID NO: 778622 - DNA, 120 bp, Artificial Sequence
  ENSG00000248383_15 (sequence is synthesized)
tcccgggcgtctgactctagtctctttagaatttcagccaatataggtgagctccgtactgctcgcttagttcttcccactgatgcagttaagcagagggtggtggtagtggttcgggac

SEQ ID NO: 778623 - DNA, 120 bp, Artificial Sequence
  ENSG00000248383_16 (sequence is synthesized)
catggagacccaccactttcctcctctgtcactctgggtgtgctgttgagcaactctgtccctcagttacttccagactttgaagatgtctgggaaccaggagggcagctttctgcccag

SEQ ID NO: 778624 - DNA, 120 bp, Artificial Sequence
  ENSG00000248383_17 (sequence is synthesized)
aacttgtatttagtaattgccttggcttgtatttcctttttatttctggggtgcttacttttcttcgtgtgtaccaagttgcaccagagcccaggctgttgcgctcagagctgctgtcgc

SEQ ID NO: 778625 - DNA, 120 bp, Artificial Sequence
  ENSG00000248383_18 (sequence is synthesized)
tctacagaggatctgaggtatggaagtaagatggtttcaaatccttgcatgacatcagccaccatagatgtcactacagttgagagactttctcagacttatctctatcgggcctctctg

SEQ ID NO: 778626 - DNA, 120 bp, Artificial Sequence
  ENSG00000248383_19 (sequence is synthesized)
ggacttggttctgataataacagtttgctgttgcgtggggagtacaatgctgccgacctgcgaaatcttgccactggggtaggactgaatttgccaatatcctgtattcagattcggaat

SEQ ID NO: 778627 - DNA, 120 bp, Artificial Sequence
  ENSG00000248383_20 (sequence is synthesized)
aggaaaggggatcacgctaatgtcaatgccatgccacgacagcccaaccctgactggcgttactctgcctccctgagagcaggcatgcacagctctgtgcacctagaggaggctggcatt

SEQ ID NO: 778628 - DNA, 120 bp, Artificial Sequence
  ENSG00000248383_21 (sequence is synthesized)
ctacgggctggtccaggagggcctgatcagcagtggccaacagtatccagtgcaacaccagaaccagaggcaggagaagtgtcccctccagtcggtgcgggtgtcaacagcaacagctgg

SEQ ID NO: 778629 - DNA, 120 bp, Artificial Sequence; identical to SEQ ID NO: 745813
  ENSG00000248383_22 (sequence is synthesized)

SEQ ID NO: 778630 - DNA, 120 bp, Artificial Sequence; identical to SEQ ID NO: 745814
  ENSG00000248383_23 (sequence is synthesized)

SEQ ID NO: 778631 - DNA, 120 bp, Artificial Sequence; identical to SEQ ID NO: 745815
  ENSG00000248383_24 (sequence is synthesized)

SEQ ID NO: 778632 - DNA, 120 bp, Artificial Sequence; identical to SEQ ID NO: 745816
  ENSG00000248383_25 (sequence is synthesized)

SEQ ID NO: 778633 - DNA, 120 bp, Artificial Sequence; identical to SEQ ID NO: 745817
  ENSG00000248383_26 (sequence is synthesized)

SEQ ID NO: 778634 - DNA, 120 bp, Artificial Sequence; identical to SEQ ID NO: 745818
  ENSG00000248383_27 (sequence is synthesized)

SEQ ID NO: 778635 - DNA, 120 bp, Artificial Sequence; identical to SEQ ID NO: 745819
  ENSG00000248383_28 (sequence is synthesized)

SEQ ID NO: 778636 - DNA, 120 bp, Artificial Sequence; identical to SEQ ID NO: 745820
  ENSG00000248383_29 (sequence is synthesized)

SEQ ID NO: 778637 - DNA, 120 bp, Artificial Sequence; identical to SEQ ID NO: 745821
  ENSG00000248383_30 (sequence is synthesized)

SEQ ID NO: 778638 - DNA, 120 bp, Artificial Sequence; identical to SEQ ID NO: 745822
  ENSG00000248383_31 (sequence is synthesized)

SEQ ID NO: 778639 - DNA, 120 bp, Artificial Sequence; identical to SEQ ID NO: 745823
  ENSG00000248383_32 (sequence is synthesized)

SEQ ID NO: 778640 - DNA, 120 bp, Artificial Sequence; identical to SEQ ID NO: 745824
  ENSG00000248383_33 (sequence is synthesized)

SEQ ID NO: 778641 - DNA, 120 bp, Artificial Sequence; identical to SEQ ID NO: 745825
  ENSG00000248383_34 (sequence is synthesized)

SEQ ID NO: 778642 - DNA, 120 bp, Artificial Sequence; identical to SEQ ID NO: 745826
  ENSG00000248383_35 (sequence is synthesized)

SEQ ID NO: 778643 - DNA, 120 bp, Artificial Sequence; identical to SEQ ID NO: 745827
  ENSG00000248383_36 (sequence is synthesized)

SEQ ID NO: 778644 - DNA, 120 bp, Artificial Sequence; identical to SEQ ID NO: 745828
  ENSG00000248383_37 (sequence is synthesized)

SEQ ID NO: 778645 - DNA, 120 bp, Artificial Sequence; identical to SEQ ID NO: 745829
  ENSG00000248383_38 (sequence is synthesized)

SEQ ID NO: 778646 - DNA, 120 bp, Artificial Sequence; identical to SEQ ID NO: 745830
  ENSG00000248383_39 (sequence is synthesized)

SEQ ID NO: 778647 - DNA, 120 bp, Artificial Sequence; identical to SEQ ID NO: 745831
  ENSG00000248383_40 (sequence is synthesized)

SEQ ID NO: 778648 - DNA, 120 bp, Artificial Sequence; identical to SEQ ID NO: 745832
  ENSG00000248383_41 (sequence is synthesized)

SEQ ID NO: 778649 - DNA, 120 bp, Artificial Sequence; identical to SEQ ID NO: 745833
  ENSG00000248383_42 (sequence is synthesized)

SEQ ID NO: 778650 - DNA, 120 bp, Artificial Sequence; identical to SEQ ID NO: 745834
  ENSG00000248383_43 (sequence is synthesized)

SEQ ID NO: 778651 - DNA, 120 bp, Artificial Sequence
  ENSG00000248383_44 (sequence is synthesized)
aagagcccagctgggctcagccacagttatcagcaatctgcgggcagaggatgtggaggttaagatctgggcagcctcagggcgttgtcctagaaaacaccgtttaaggagagaagtgtt

SEQ ID NO: 778652 - DNA, 120 bp, Artificial Sequence
  ENSG00000248383_45 (sequence is synthesized)
agtgtctcggggcgtctcccaggctccgccctgcgcccgcagccagcgtggtggtcgagaccccagcccgctgctactggagacagcacctctcgcgcccgggcgggcggcctcgtctct

SEQ ID NO: 778653 - DNA, 120 bp, Artificial Sequence
  ENSG00000248383_46 (sequence is synthesized)
gcacccctaggcggcgctgcgctcctcaacacccggccggctccgctttcccagacggctgcccagcctccagcctagcaagcccggctcccagctggccagccccggcaatgccggcgt

SEQ ID NO: 778654 - DNA, 120 bp, Artificial Sequence
  ENSG00000248383_47 (sequence is synthesized)
tcgggaggcgcaacgtcggcggtcgctgagtatccagcccgcagcagtgacggccggcaggagcgtgctcttccccgcggctcgtgctctccaggagtccggagcatggtcctgggtcac

SEQ ID NO: 778655 - DNA, 120 bp, Artificial Sequence
  ENSG00000248383_48 (sequence is synthesized)
atggctgctagctgtgttttgaaatatttcttagacaagcctttcacaacatttcatcaattgaactaaacactccttcttagcacttcctgtgccaagaaatctggaagtatagaagta

SEQ ID NO: 778656 - DNA, 120 bp, Artificial Sequence
  ENSG00000248383_49 (sequence is synthesized)
ttagaagattgccctaggcctcaagggacttatagtttatttttgagaaacaagggcaaaaattaaaacctatttaagaacaataaaagtaatatgacataaaggtctaaaattaaaaat

SEQ ID NO: 778657 - DNA, 120 bp, Artificial Sequence
  ENSG00000248383_50 (sequence is synthesized)
aaaataccaaaatattttataagcaacagatgtgtaaggcactctaatatttaaagtgaagaatgaaaaatatgtaagagtctgctttatatgaatataatatggaaggtgaaacattta

SEQ ID NO: 778658 - DNA, 120 bp, Artificial Sequence
  ENSG00000248383_51 (sequence is synthesized)
cttaaactattgcaatgcattattaaaagatgacgataaccacaaaagatgtaaaaataaattacaatgggggttaaaagaagggagaaagggaacataagagaacatttgagtgaggag

SEQ ID NO: 778659 - DNA, 120 bp, Artificial Sequence
  ENSG00000248383_52 (sequence is synthesized)
gaaggagtcagagaaggctttgtgatagagatcacagatttagttggatctttaatacgatataccatttaataaaaaacagtgtattctctagcctatacttttaatgaataccatttt

SEQ ID NO: 778660 - DNA, 120 bp, Artificial Sequence
  ENSG00000248383_53 (sequence is synthesized)
ggtgaaggtgtcttctttgggaatgacaccctaaaacatagctgatagctccatagcagtgttttgtaactgctttggagtttttgcttacacaaaaactgtaagcctctctcataacat

SEQ ID NO: 778661 - DNA, 120 bp, Artificial Sequence
  ENSG00000248383_54 (sequence is synthesized)
ctatttatactgataggagatcatattgttggatataggacttgacaaccttttgttttgtgtttctattgataatattttacaaagaggaaagatgagtaatttttatgtcagaaatat

SEQ ID NO: 778662 - DNA, 120 bp, Artificial Sequence
  ENSG00000248383_55 (sequence is synthesized)
ttatgtgttcaaaggtgcacttaccatccaaagtccattcaacttggatttaatttcttttattttaggggacaaatacacttaacaaataagtaaatatcatatttgagagtaatgtat

SEQ ID NO: 778663 - DNA, 120 bp, Artificial Sequence
  ENSG00000248383_56 (sequence is synthesized)
agagtaatgtatctaatgaaagttaagtgattcaaatatttcaatttatctgttagtggcccttggcatttcaaaacttcttttttttttttgagacaggggtctcactatgttgcccag

SEQ ID NO: 778664 - DNA, 120 bp, Artificial Sequence
  ENSG00000248385_0 (sequence is synthesized)
actctgggagggctaaggagccatcatgatccctaagctgctttccctcctctgtttcagactgtgcgtgggccaaggagacacaaggggagatgggtcactgcccaagccgtccctcag

SEQ ID NO: 778665 - DNA, 120 bp, Artificial Sequence
  ENSG00000248385_1 (sequence is synthesized)
tgcctggcccagctcggtggtccctgccaacagcaatgtgacgctgcgatgttggactcctgccagaggtgtgagctttgttctcaggaagggaggaattattctggagtccccgaagcc

SEQ ID NO: 778666 - DNA, 120 bp, Artificial Sequence
  ENSG00000248385_2 (sequence is synthesized)
ccttgattctacagagggcgcggccgaatttcacctcaataatctaaaagtcagaaatgctggagagtacacctgtgaatactacagaaaagcatccccccacatcctttcacagcacag

SEQ ID NO: 778667 - DNA, 120 bp, Artificial Sequence
  ENSG00000248385_3 (sequence is synthesized)
cgagaccaattgtttgtgcctatcatgttcgctctactgaaggcagggacgccatcacccatccagctgcagagtccagcggggaaggagatagacttctctctggtggacgtgacagcc

SEQ ID NO: 778668 - DNA, 120 bp, Artificial Sequence
  ENSG00000248385_4 (sequence is synthesized)
ggcgatgctgggaactacagctgcatgtactaccagacaaagtctcccttctgggcctcagaacccagtgatcagcttgagatattggtgacagttcccccaggtaccacatcgagcaac

SEQ ID NO: 778669 - DNA, 120 bp, Artificial Sequence
  ENSG00000248385_5 (sequence is synthesized)
tactccctgggtaacttcgtacgactgggtctggctgccgtaattgtggttatcatgggagctttcctggtggaggcctggtacagccggaatgtgtctccaggtgaatcagaggccttc

SEQ ID NO: 778670 - DNA, 120 bp, Artificial Sequence
  ENSG00000248385_6 (sequence is synthesized)
aaaccagagtgactccatcttgaaccggggctgggtaaactgaggctgcaacctgctggactgcattcccagggggttgaggctttctaagtcacaggatgagacaggtcacaacataca

SEQ ID NO: 778671 - DNA, 120 bp, Artificial Sequence
  ENSG00000248385_7 (sequence is synthesized)
gcagtgagccgagattgcgtcactctactccagcctgggcgacagagcgcaactctgtctctggaatgaatgaaagaaagaaagaatgaatgaaagaaagaaagaaagaaagaaaaagaa

SEQ ID NO: 778672 - DNA, 120 bp, Artificial Sequence
  ENSG00000248385_8 (sequence is synthesized)
tgtctctggaatgaatgaaagaaagaatgaatgaaagaaagaaaaaagaaagaaagaaaggaaagaaaaagaaagaaagaaagaaatggactgtgcgtgggccaaggagacacaagggga

SEQ ID NO: 778673 - DNA, 120 bp, Artificial Sequence
  ENSG00000248483_0 (sequence is synthesized)
agttcctaccagagccgctgcgggtgccattccacccatggccggacacaggccctcaaaccacttctgcccccttccaggcagtggtgggggcggccccagagggccgatgcccctgcg

SEQ ID NO: 778674 - DNA, 120 bp, Artificial Sequence
  ENSG00000248483_1 (sequence is synthesized)
ggttgacactctgacctggttgagcacccaggcggcccctggcagggtgatggtctggccggcagtcaggccagggatctgcccaggccctgacgtgtggaggattcccctgggtcccct

SEQ ID NO: 778675 - DNA, 120 bp, Artificial Sequence
  ENSG00000248483_2 (sequence is synthesized)
gccacacgaattccggggctggatagcaccctgcaggccccgtcttggagctagtgaggcaggggactggttgcgacgcccctccgaaggcgccctcccggggccctacattgccctgcg

SEQ ID NO: 778676 - DNA, 120 bp, Artificial Sequence
  ENSG00000248483_3 (sequence is synthesized)
gagcattccgaagttgccgccgccagaggacatctcgggcatactgaaagagttgcagcaattggccaaggagttgaggcagaagaggttgagcctagggtactcgcaggccgatgtggg

SEQ ID NO: 778677 - DNA, 120 bp, Artificial Sequence
  ENSG00000248483_4 (sequence is synthesized)
gatcgctgtgggagctctgtttgggaaggtgcttagccagacgaccatctgccgcttcgaggcccagcagctaagcgtcgccaacatgtggaagctgcgaccactgctgaaaaagtggct

SEQ ID NO: 778678 - DNA, 120 bp, Artificial Sequence
  ENSG00000248483_5 (sequence is synthesized)
gaaggaagtggaagcagagaaccttctgggcttatgcaaaatggagatgatcctgcaacagtctgggaagtggagacgggcaagcagagagcgacgaatcggaaacagcctggagaaatt

SEQ ID NO: 778679 - DNA, 120 bp, Artificial Sequence
  ENSG00000248483_6 (sequence is synthesized)
cttccagcggtgccctaagcccacaccccagcaaatcagccacattgctgggtgcctccagctgcagaaggatgtggttcgagtttggttctataaccgcagcaagatgggcagtcgacc

SEQ ID NO: 778680 - DNA, 120 bp, Artificial Sequence
  ENSG00000248483_7 (sequence is synthesized)
aaccaatgatgcttccccacgggagattgtggggacagccgggcctccttgcccaggagcaccagtgtgctttcacctgggactggggctcccagtggatatcccccactatacacgtct

SEQ ID NO: 778681 - DNA, 120 bp, Artificial Sequence
  ENSG00000248483_8 (sequence is synthesized)
ctactctgcaggggtagcccactcctctgccccagccaccactctgggcctcctcagattttagggctgaggggcttgcccttcacggcacggttggagaggggagaagaagggaaaacc

SEQ ID NO: 778682 - DNA, 120 bp, Artificial Sequence
  ENSG00000248483_9 (sequence is synthesized)
caggaaatgtccctagggttcatttgagggcttttagtattaatttctcattcactgtctaaagaagttaaggatacatagtagggaatgggggtgggaattgttcaagaaaaacctggg

SEQ ID NO: 778683 - DNA, 120 bp, Artificial Sequence
  ENSG00000248483_10 (sequence is synthesized)
agagaagatgaagtttattgcagttttgtgttttccctttgtttttccctagcattggtttaaaggtacattacagtatatagatggtttcgatattttgttcctttttttattaaatat

SEQ ID NO: 778684 - DNA, 120 bp, Artificial Sequence
  ENSG00000248483_11 (sequence is synthesized)
tgtgtctgttattccttgtggttatcagtaaacatagggtttaaattttttcataaacacaatactaagtgaaaaactcaagtcacagaagactaccttagtatacaattttttacttaa

SEQ ID NO: 778685 - DNA, 120 bp, Artificial Sequence
  ENSG00000248483_12 (sequence is synthesized)
aatcaagcagaactctgtgtaaacacaaacacaaaatccaggataatagttatcttgagggaatgacttgagaatgtgatagggaagaaacacacagagcccacctagagcccttgctga

SEQ ID NO: 778686 - DNA, 120 bp, Artificial Sequence
  ENSG00000248483_13 (sequence is synthesized)
ttttttttttttttttttttctgatttaccttttcatttctggtgccccagcttcatgtcagggtctcagttcctctccctactttatgtagtcccatgggactatgtcttgtcctgcca

SEQ ID NO: 778687 - DNA, 120 bp, Artificial Sequence
  ENSG00000248483_14 (sequence is synthesized)
atgggactatgtcttgtcctgccacagtcactgtattctaaactcctttgttactgaggttggcaagctggacttcagagcttcggtcccagctgtagcttactcctcctgttttcacct

SEQ ID NO: 778688 - DNA, 120 bp, Artificial Sequence
  ENSG00000248483_15 (sequence is synthesized)
ctatttggttccctgggaatttcccttactttctcttgatctcttataatggttttgagaggatatttgtaatagtttatccaaacttccctggtggtttttgccattaaacgtcaaata

SEQ ID NO: 778689 - DNA, 120 bp, Artificial Sequence
  ENSG00000248483_16 (sequence is synthesized)
actcttctaatttcatctctgaaattggtcttttcagttttccacttctactttggtcaattttggtcaccatatactaaatggaaaccatttagtacctctgtgttttcaaatctgctg

SEQ ID NO: 778690 - DNA, 120 bp, Artificial Sequence
  ENSG00000248483_17 (sequence is synthesized)
tcacacacctgcatgctctatttattgtcctagaattctatcagtatgtattatatcagagtttatgtcttatttctggatagtaatcttgtcaatgtttgctttttttgtgatcagtct

SEQ ID NO: 778691 - DNA, 120 bp, Artificial Sequence
  ENSG00000248483_18 (sequence is synthesized)
tgcaaatgttttatctataggtattttcaaagtataagcttttttacttattctacttactacaatttttattccctagttaattaatttttacttcattcttcttaattttttcctagt

SEQ ID NO: 778692 - DNA, 120 bp, Artificial Sequence
  ENSG00000248483_19 (sequence is synthesized)
ttcttctggtttctttcattgttcttttttagataatttttagatgagtacttagtttctttctttctttctttttttttctggtggctgtatagagaataactcttgtgggcccaagag

SEQ ID NO: 778693 - DNA, 70 bp, Artificial Sequence
  ENSG00000248483_20 (sequence is synthesized)
ctggtggctgtatagagaataactcttgtgggcccaagagtgcaaaccaggagcccaataagagacttaa

SEQ ID NO: 778694 - DNA, 120 bp, Artificial Sequence
  ENSG00000248483_21 (sequence is synthesized)
aactctgatcttctgacctcaagtccagggataattttactgtcacacaagtcaggtgtgactaagctttttatttaatcttttcttcatgagactgtagaaactttacctttgcctatt

SEQ ID NO: 778695 - DNA, 120 bp, Artificial Sequence
  ENSG00000248483_22 (sequence is synthesized)
tttgtgtgtgtgataaaatataaaatttgccattgtaatgattttaagtgtaaattcagtgacattaattacattcacaatgttaggcaaccatcaccactatccatttccaacattttt

SEQ ID NO: 778696 - DNA, 120 bp, Artificial Sequence
  ENSG00000248483_23 (sequence is synthesized)
ccatcactccaaacataaactcttctcattaagcaataactccattcccctatcccctacccctggtaacctttctgtgaatttgccagttctaagcagttcatattcatggaaccatac

SEQ ID NO: 778697 - DNA, 120 bp, Artificial Sequence
  ENSG00000248483_24 (sequence is synthesized)
aacatttgaccttttgtatctggcttatttcacttagcacattttcaaggttcatctgtgttgtagtgtgtatcagaacttcattccttttttatgactgaataatattccattgtatgg

SEQ ID NO: 778698 - DNA, 120 bp, Artificial Sequence
  ENSG00000248483_25 (sequence is synthesized)
atatataccacattttgtttatccattcctctgatgatgggcacttagattgttttcattaatagccaatgggctattgtgaatgatactgctatgaacatttacatataataatctatt

SEQ ID NO: 778699 - DNA, 120 bp, Artificial Sequence
  ENSG00000248483_26 (sequence is synthesized)
tgtttatctgttgtttcagttctcttggatgtatacataggagtggaatttctgagtcatacagtaattctatgcttaactttttgggaaactaccaaactgttttccatagtgaaggca

SEQ ID NO: 778700 - DNA, 120 bp, Artificial Sequence
  ENSG00000248483_27 (sequence is synthesized)
ccattttacattcccaccagcaatctacaagagttctagtttttccatatccctggcaacacttgttattttttaaaaaattatagccatcttggtagctgttaagtggtgtctcattgt

SEQ ID NO: 778701 - DNA, 120 bp, Artificial Sequence
  ENSG00000248483_28 (sequence is synthesized)
ggttttgatttgtatttctctaatgactaatgatgttgagcatcttttcatatgcttattgtctattttgtatcttctttaaagaaatgtctattcaagtcctttgcctatttttaaaac

SEQ ID NO: 778702 - DNA, 120 bp, Artificial Sequence
  ENSG00000248483_29 (sequence is synthesized)
tgggttgtttgtcttttcttcatagagtctggatattaagcccttatcagatagatggtttgcaagtattttctcccattctgtgggttgtccttttactcttttgactgtatcttttga

SEQ ID NO: 778703 - DNA, 120 bp, Artificial Sequence
  ENSG00000248483_30 (sequence is synthesized)
tgcagacagactttaatttttattaagtccagcttatccattttttcttttgttgcttaggcttttcatgttgccaaatgcaaagtcatgaagatttgctcctgtgttttcttctatgaa

SEQ ID NO: 778704 - DNA, 120 bp, Artificial Sequence
  ENSG00000248483_31 (sequence is synthesized)
ttttacagttttatttattaaatttaggactttgatccatttcaagttaatttttgtatacggtatgaggtaagtgcccaacttcattcttttgcatgtggatagccagttttcccagca

SEQ ID NO: 778705 - DNA, 120 bp, Artificial Sequence
  ENSG00000248483_32 (sequence is synthesized)
ccatttgttgaggagatgttctttctgcattgaatgatcttagcacccttgtcaaaaatcagttgaccacacatgtgagggattatttctgggctctcaactctcttctgttggtctata

SEQ ID NO: 778706 - DNA, 120 bp, Artificial Sequence
  ENSG00000248483_33 (sequence is synthesized)
tgtctgtctttatgccagtaccacactgttttgactactgtagctttgcagtaagttttgaaatggggaagtgtgagtcttccaattttgttcttccatatatatatatatggcacgtat

SEQ ID NO: 778707 - DNA, 120 bp, Artificial Sequence
  ENSG00000248483_34 (sequence is synthesized)
ttctgcccaaaacaccattgagattttgttacagagtgcattgaaccctcatattgctttagggagtgttgtcatcttagcaattttaagtcttccaatccatgaacacaggctgtcttt

SEQ ID NO: 778708 - DNA, 120 bp, Artificial Sequence
  ENSG00000248483_35 (sequence is synthesized)
ccacttatgtcttctttaatttctttgagcagtgttttagttttcagtgtacaagcctttcactttcttaaagttatttgtgggcattttattcttttggatactactgtaaatggaata

SEQ ID NO: 778709 - DNA, 120 bp, Artificial Sequence
  ENSG00000248483_36 (sequence is synthesized)
gtttccttcatttccttttgaaattgttcatcgctaatggatagaaatacaactgattttcctgtgttgattttgtatcctgcgacttatgcagatttagttctaaccagttttttggtg

SEQ ID NO: 778710 - DNA, 120 bp, Artificial Sequence
  ENSG00000248483_37 (sequence is synthesized)
cattctttagggttttctacatataaatcatatcatctgtgaataaagatagttttgcttcttcctttccgatttggataccctttctttttcttactcacttgctctggcaaaaatgtg

SEQ ID NO: 778711 - DNA, 120 bp, Artificial Sequence
  ENSG00000248483_38 (sequence is synthesized)
tagtactgtgttgtataaaagtagcagaagaggacatccttgtcttgtttttgttcttaggagaaaaacttttagtcttttcaccattgagtatgacattagctctggctttttcatacg

SEQ ID NO: 778712 - DNA, 120 bp, Artificial Sequence
  ENSG00000248483_39 (sequence is synthesized)
tactctacatgttgaggaagttccttttttcttaggttattgaatgttttatatgcgagggtatgggtttttgacagtttctctggaataaatgaaaaatgcttaagggaaatatgaaat

SEQ ID NO: 778713 - DNA, 120 bp, Artificial Sequence
  ENSG00000248483_40 (sequence is synthesized)
cctatgactatttcataagattatgctaactaccagtaccactacttccttccccagtactaccatcaccattgcacccacacctaagagacctaaactttttttttcctccgactctaa

SEQ ID NO: 778714 - DNA, 120 bp, Artificial Sequence
  ENSG00000248483_41 (sequence is synthesized)
gggtggttatttttctgttttgagggatctcattctcatgacatctttgtgtaagagtaaatgactcacccggggtgatgaaaataagttttaaaccagatcttccatagtccacaacat

SEQ ID NO: 778715 - DNA, 120 bp, Artificial Sequence
  ENSG00000248483_42 (sequence is synthesized)
gaagtagcccagatgtagctcagctttcaggaatgaacttttggtgaagtactttaaaaacaaaagtcaagtaaatattaatgctgcacttacattcttctaactctttaaaaagattac

SEQ ID NO: 778716 - DNA, 120 bp, Artificial Sequence
  ENSG00000248483_43 (sequence is synthesized)
ttaattataaacaaattgtaacaactttagttttcagaacacacctataagctgtattgtttcaggtggacaatggaggtgtatcaagattacacatatacacttgtataagattagctt

SEQ ID NO: 778717 - DNA, 120 bp, Artificial Sequence
  ENSG00000248483_44 (sequence is synthesized)
gagttcccagtttatttactcaagaatatagaatcacattggaaatatgatggccacaaagcaagtgtaaatgaaccgtatatatcagcacagcttcccatggtccagcgtccttgatga

SEQ ID NO: 778718 - DNA, 120 bp, Artificial Sequence
  ENSG00000248483_45 (sequence is synthesized)
caatgcccaaaatacggcactggataaaaagtgtggaaatgaattccacactacagcttttttatccttagggctacatcagtgctcaagaaaaacttaatgtctgctcttaatgcttcc

SEQ ID NO: 778719 - DNA, 120 bp, Artificial Sequence
  ENSG00000248483_46 (sequence is synthesized)
atttaagagaatgtttggagatattaagcttcttctggttcttggaccaaactcactacagtgaatccacaacatcatcaagcagaagaatctgaattagtgcctgggtctctgatccca

SEQ ID NO: 778720 - DNA, 120 bp, Artificial Sequence
  ENSG00000248483_47 (sequence is synthesized)
gcttacaacatcacagtgagaccatttcctccacacaagctacagggacccagcttaacaaatgtatgctttttcttcttgtcagtgtctaaaggtagagcactgaggatccacataagt

SEQ ID NO: 778721 - DNA, 120 bp, Artificial Sequence
  ENSG00000248483_48 (sequence is synthesized)
tagtgaaaataaagccaaatcctaattgcttagctttagattctataggtgactaatcacttgctgttggattatcccattaaaagtcacacagcaccaactccatttcctccttttcct

SEQ ID NO: 778722 - DNA, 120 bp, Artificial Sequence
  ENSG00000248483_49 (sequence is synthesized)
agacagcccttctggaaagccttagaaaggagatgtttcagcagagtcagaccatgttgaatgccagaataaacaactctgattgtgttgtgaacataagagctgtaaagaggcactgac

SEQ ID NO: 778723 - DNA, 120 bp, Artificial Sequence
  ENSG00000248483_50 (sequence is synthesized)
ctcagctgctccttcagttcttctgcagcctctacagatgtggagaaattgtgatgagctctcaatctcagggaacagctcctagagtccatctcagcccccgcatagctgcatcattga

SEQ ID NO: 778724 - DNA, 120 bp, Artificial Sequence
  ENSG00000248483_51 (sequence is synthesized)
cacagctgccccacctctgcttaggcaaagcctctatgtgtcactaatcagcttcacataatttaaaagattttctatcactagatctcttgacttgctgtgaaaagagaaaaggctgga

SEQ ID NO: 778725 - DNA, 120 bp, Artificial Sequence
  ENSG00000248483_52 (sequence is synthesized)
ccttagggaaaacttcatactgaagtgatttcagatttttcagagatttaagatgatatgtagaaactttaatcagaagatcccttaaacagaagaataactacccttagagttgggaga

SEQ ID NO: 778726 - DNA, 120 bp, Artificial Sequence
  ENSG00000248483_53 (sequence is synthesized)
agagttgggagaaaaccaagactatattgttaagtagttaacaatgttaaatgttacagagatcaagtaacataagaaatcaaccaagatacattggccaggtgcggtggctcatgcctg

SEQ ID NO: 778727 - DNA, 78 bp, Artificial Sequence
  ENSG00000248483_54 (sequence is synthesized)
gcaaaagaaaaagaaatctactaagccatatcatttcaataactaagatgccattgatacctttagtaataatttcag

SEQ ID NO: 778728 - DNA, 120 bp, Artificial Sequence
  ENSG00000248483_55 (sequence is synthesized)
ataactaagatgccattgatacctttagtaataatttcagtggcataattagtaaaggcagatgtcaaacactccaaagtcttcatatttgcccagattttcccctgccttaattttaaa

SEQ ID NO: 778729 - DNA, 120 bp, Artificial Sequence
  ENSG00000248483_56 (sequence is synthesized)
aataaatttcaactcccgactccaatagatcttcactgtcattctgaaaatgtttcattatcaaacattttggttatcttgtatttcctatagacaaggcaagtatttttaatctgaaga

SEQ ID NO: 778730 - DNA, 120 bp, Artificial Sequence
  ENSG00000248483_57 (sequence is synthesized)
tgctgagcccctttagagtataagcagaataatgtttttgtacatatgtgcattttctttaaagatggttcatagccttcatcacatattcaaagaggaccgtggctcttctttagatct

SEQ ID NO: 778731 - DNA, 120 bp, Artificial Sequence
  ENSG00000248483_58 (sequence is synthesized)
acagtttcagaatttaagaagcaccttcccttttgccactttttcaaatgatttcttttgacagtacctatataataggtaatttctggttttctttgaatctatattttctagatatca

SEQ ID NO: 778732 - DNA, 120 bp, Artificial Sequence
  ENSG00000248483_59 (sequence is synthesized)
ccagctcagtgtcatatgaaggccctgagttgcattttacataagtcttgtaagttcagactaaataatgtattgattattgcctttcttgttcttacacttttatcaatccttggcact

SEQ ID NO: 778733 - DNA, 120 bp, Artificial Sequence
  ENSG00000248483_60 (sequence is synthesized)
ttaattaaaatcttatcataaggaacaatttctctttttcctagaagttttcttattctctaagaaatcatgaggtgtttggatacctgcccttatttcaaagcatgatctttttcttga

SEQ ID NO: 778734 - DNA, 120 bp, Artificial Sequence
  ENSG00000248483_61 (sequence is synthesized)
attagcatctgtttcgataatttaatttttttgaaagagatatactgtatatccttgtttattataccaagtctgtctcatggggatttgtttttcagaatagccacttttgtttatgcc

SEQ ID NO: 778735 - DNA, 120 bp, Artificial Sequence
  ENSG00000248483_62 (sequence is synthesized)
tttcttctagaaatagtcttgcctactaaacagtattggttttcttggcaaaatctattcaagattaattcttttcagaatgcaaaatggtgttatttatgtcaaactgtgtttttaaag

SEQ ID NO: 778736 - DNA, 120 bp, Artificial Sequence
  ENSG00000248483_63 (sequence is synthesized)
tgaaaactacaaaaccattgcaattaaacctagtggaaatgtccttgacaaagtgattctaaactgaaagaataaaacttaggaagatagttaaggaaatttcgaaggtaaagatttagg

SEQ ID NO: 778737 - DNA, 120 bp, Artificial Sequence
  ENSG00000248483_64 (sequence is synthesized)
tggccaattatttaacagtgtgacggtggtggtggttatgggcaaaataacgtaaacaaatatttatttattggaaagtgaattggtgcaaccttcatgaaaggctgttaggtaattcat

SEQ ID NO: 778738 - DNA, 120 bp, Artificial Sequence
  ENSG00000248483_65 (sequence is synthesized)
taggtaattcatatggaaatcttttaaaatgtgcatttccattggcccatcatttcaacttttaagaatttttataagaaaataattgtgtgtagccaggtgcagtggctcactcctgta

SEQ ID NO: 778739 - DNA, 88 bp, Artificial Sequence
  ENSG00000248483_66 (sequence is synthesized)
tgaggcgggcagatcacaaggtcaagatatcaagaccatcctggtctacatggtaaaaacgtgtggtgatgcatgcctgtagtcccag

SEQ ID NO: 778740 - DNA, 120 bp, Artificial Sequence
  ENSG00000248485_0 (sequence is synthesized)
gagcggctctgacaggacgggtcgcagggggtcgcctggccggagctgggctccgagaatcccgggtgccagcaccagagcagcggctctccgcactaactctcctctcctggtcagctg

SEQ ID NO: 778741 - DNA, 120 bp, Artificial Sequence
  ENSG00000248485_1 (sequence is synthesized)
taacccctgccgcagagcccggcaactttcagctgtcgcccgcggagccccgagggccactcgcctcacctgtgcgtgcagcgcctcgcgcgccctgtccggctgcggagatgagcgagc

SEQ ID NO: 778742 - DNA, 120 bp, Artificial Sequence
  ENSG00000248485_2 (sequence is synthesized)
ttaataccaaaacatccccagcaaccaaccaggcagctggccaagaggaaaaaggaaaagctggcaatgtcaagaaggcggaggaggaggaggagattgacattgatctgacagcaccag

SEQ ID NO: 778743 - DNA, 120 bp, Artificial Sequence
  ENSG00000248485_3 (sequence is synthesized)
aaacagagaaggctgcccttgctattcagggcaagttccggcgatttcagaaaaggaaaaaggatcccagctcctgaatggccaggcttgcccttcaccttcaccttcatgctggtccct

SEQ ID NO: 778744 - DNA, 120 bp, Artificial Sequence
  ENSG00000248485_4 (sequence is synthesized)
tctctccccttctccacacccatgtatctttatcccttgtccctctagcctttccttgaggcaagttcaacctttatatactcttgtatctggccccctcaagccatcacagaagtagag

SEQ ID NO: 778745 - DNA, 120 bp, Artificial Sequence
  ENSG00000248485_5 (sequence is synthesized)
tgatcagtagctatgcctgccctgtagggctaaacaagaggcttcgaggctgagagatctccccaaagaacaatgtgggaaggaggggaaggctttcagagtagggtgcctgagggtggg

SEQ ID NO: 778746 - DNA, 120 bp, Artificial Sequence
  ENSG00000248485_6 (sequence is synthesized)
acatatgcactgttctgctagttacggcattcacactttaggtaacattttttttccccttcagatccttctgcaccaactccaacttcccctcccaggatctaagccacagtggggact

SEQ ID NO: 778747 - DNA, 120 bp, Artificial Sequence
  ENSG00000248485_7 (sequence is synthesized)
ggagcctcgttttccccctaggcagacctaaatcaagcagcttaccacaatagtgcatgctgagtagattagttccaaggaagggagactggaatgctggtgtcaaggaaaagcctccct

SEQ ID NO: 778748 - DNA, 120 bp, Artificial Sequence
  ENSG00000248485_8 (sequence is synthesized)
catcatctagtctaagaccataacgggcagaagcataagaggttccagggccataggagaatgagaagtagggcacatatagggaggaaagaaaagtgaagaagggggaaatctctgaat

SEQ ID NO: 778749 - DNA, 120 bp, Artificial Sequence
  ENSG00000248485_9 (sequence is synthesized)
ttttttactgctgggaaaagtgtactacatgaaggatgcttggggctttgctaacctgctcaccgctaaccctccaagtctaaccatccccagaggccacacaaaccaagtgactcctgt

SEQ ID NO: 778750 - DNA, 120 bp, Artificial Sequence
  ENSG00000248485_10 (sequence is synthesized)
agttcccatttgccccactatggagtcagggcaaaagtggaatagccactccatgtgattttagcatgtttaatcattttaacaataaaccaccccacaaatggggtcatttaacctcta

SEQ ID NO: 778751 - DNA, 120 bp, Artificial Sequence
  ENSG00000248487_0 (sequence is synthesized)
gcctagagccggagcggcccgcggagctgcggaggcagccatggtcggggcgctgtgcggctgctggttccgcctgggcggggcccgcccgctcatcccgttgggcccgactgtggtaca

SEQ ID NO: 778752 - DNA, 120 bp, Artificial Sequence
  ENSG00000248487_1 (sequence is synthesized)
ccgctcatcccgttgggcccgactgtggtacagacctccatgagccggtcccaggtagccctgctgggcctgagtctgctgctcatgctcctactgtatgtggggctgccaggcccccct

SEQ ID NO: 778753 - DNA, 120 bp, Artificial Sequence
  ENSG00000248487_2 (sequence is synthesized)
gagcagacttcctgcctctggggagaccccaatgtcacagtcctggctggtctcacccctggcaactcgcccatcttttaccgcgaggtgctcccactcaaccaggcacacagggtggag

SEQ ID NO: 778754 - DNA, 120 bp, Artificial Sequence
  ENSG00000248487_3 (sequence is synthesized)
gtggtgctgcttcatggaaaggcctttaactctcacacgtgggagcagctgggcacactgcagctactgtcacagaggggctaccgggccgtggcccttgaccttccaggttttgggaac

SEQ ID NO: 778755 - DNA, 120 bp, Artificial Sequence
  ENSG00000248487_4 (sequence is synthesized)
tgagtggccactatgccctgcccttcctgatgcgaggccaccaccagctacatggatttgtgcccatcgcacccacctccacccagaactacacccaggagcaattctgggctgtgaaga

SEQ ID NO: 778756 - DNA, 120 bp, Artificial Sequence
  ENSG00000248487_5 (sequence is synthesized)
ctccaacccttatcctgtatggagagctggaccacatcctggctcgagagtcactgcggcagctccgccacctgcccaaccactctgtggtgaagctacgcaatgcaggccatgcctgtt

SEQ ID NO: 778757 - DNA, 120 bp, Artificial Sequence
  ENSG00000248487_6 (sequence is synthesized)
acctccacaagccgcaagacttccaccttgtcctgcttgccttccttgaccatctaccttgaactaacccactcccagctcccagcctggcatgagcttggacagtctggaccgccaccc

SEQ ID NO: 778758 - DNA, 120 bp, Artificial Sequence
  ENSG00000248487_7 (sequence is synthesized)
tccctgaaccagggagacagcctctgggattggaggccagaggccagggtcagacccagccaggactcctcatttcatctcacagacacaataaaaaagcatatttgtcctgcctgggaa

SEQ ID NO: 778759 - DNA, 120 bp, Artificial Sequence
  ENSG00000248487_8 (sequence is synthesized)
ccaaaccctgcccagaagcctgccccttaagtacctggcaggtcaatggccacagcccggtagccagcctgggccagcctgtgcagtgtacccaggttctgccaggtctcggaggagaag

SEQ ID NO: 778760 - DNA, 120 bp, Artificial Sequence
  ENSG00000248487_9 (sequence is synthesized)
cgaataccatgcagcagcagtacagagaagcgagcctgcccactgccgggcagggcctctcggaagaagagggcctggccctgcacctggatggtgccctcgcgctgctccacgcttgct

SEQ ID NO: 778761 - DNA, 120 bp, Artificial Sequence
  ENSG00000248487_10 (sequence is synthesized)
gccatgcctgctgctgctgtgctggtgaagggcctgtggttcaaaaccacgatgatgaggggccacagaacaccctgcccagggtggcagtcccagaggagcagcaaggaagcctccagg

SEQ ID NO: 778762 - DNA, 120 bp, Artificial Sequence
  ENSG00000248487_11 (sequence is synthesized)
ttttctagaggcggaaaccgaagcgcccagtgggaaaggcgacccgccggggatgcggggtgctcaacgcgctgccacctggggcccaacgcgttgacctcgcggtcaggttgcttccgc

SEQ ID NO: 778763 - DNA, 120 bp, Artificial Sequence
  ENSG00000248487_12 (sequence is synthesized)
ggactacggttctggctcgctagctctggaagggagcaccgggagggaatggtggcaactcccaaggaggggacccagggatccgagaaaggaagacttgggactgtggtacagacctcc

SEQ ID NO: 778764 - DNA, 120 bp, Artificial Sequence
  ENSG00000248487_13 (sequence is synthesized)
atgaaaactacagtgtgaattctaggtcatggagcaaataaaaactcttcacaagcagtatactttctttttttttattttatttatatatattttttgaaacagagtctcgctctgtca

SEQ ID NO: 778765 - DNA, 120 bp, Artificial Sequence
  ENSG00000248487_14 (sequence is synthesized)
ggccaagcagtgtactttctatggcaaaccatataggttttgtgtttttaagtacacaaatgatttatgctatcattcttgtcattaaaaaaatgaaaaaatgtcgagtcatagaggatt

SEQ ID NO: 778766 - DNA, 120 bp, Artificial Sequence
  ENSG00000248712_0 (sequence is synthesized)
tctaggtcagtaccctagagtccatgggtccactattcctctgcgtctcatttctctgaagtgggaaactccctggactacctattcctgcacttattaccctcattctacagtgtactg

SEQ ID NO: 778767 - DNA, 90 bp, Artificial Sequence
  ENSG00000248712_1 (sequence is synthesized)
cctattcctgcacttattaccctcattctacagtgtactgaagaggatcttcggtggtctgggagttttgtttgtttgagacagggtctc

SEQ ID NO: 778768 - DNA, 120 bp, Artificial Sequence
  ENSG00000248712_2 (sequence is synthesized)
agcctcccaagtagctgagactacagttgcctggacaacatacagcctctggaaacccaaccttccagccctcagtcctgccctcaagagaaatttgccaccaaggattggctcccagga

SEQ ID NO: 778769 - DNA, 120 bp, Artificial Sequence
  ENSG00000248712_3 (sequence is synthesized)
ggattggctcccaggacccaggccccgcctcaggctcctcgctagttgggccttctctctgccactccccacgagtgggtcactccacggggagccccaacgctggcaggagaggatcct

SEQ ID NO: 778770 - DNA, 120 bp, Artificial Sequence
  ENSG00000248712_4 (sequence is synthesized)
ggccgagtccaggcacaggctggtggtgctggagaaggagctgctccgagaccacttggctctacggagggatgaagcccgtcgagccaaggcttccgaagaccagctgaggcagaggct

SEQ ID NO: 778771 - DNA, 120 bp, Artificial Sequence
  ENSG00000248712_5 (sequence is synthesized)
gcaaggggtggaggctgagctggaaggggcccgaagtgaagggaaggccatatatgcagagatgagtcgccagtgccatgccctgcaggaggatatgcaaacccgcagcaagcagctgga

SEQ ID NO: 778772 - DNA, 120 bp, Artificial Sequence
  ENSG00000248712_6 (sequence is synthesized)
ggaagaagtcaaaggccttcgggggcagctagaggcatgccaaagggaggctgcagctgcccgggaagaggctgaacaagctctcggagagcgggaccaggccctggctcagcttcgggc

SEQ ID NO: 778773 - DNA, 120 bp, Artificial Sequence
  ENSG00000248712_7 (sequence is synthesized)
ccacatggcagacatggaggcgaagtatgaggaaatcttacacgacagtctggacaggctcttggccaagctgagagccatcaagcagcagtgggatggggcagcactgagacttcacgc

SEQ ID NO: 778774 - DNA, 120 bp, Artificial Sequence
  ENSG00000248712_8 (sequence is synthesized)
caggcacaaggagcagcaacgccagtttggactcaccccccctggatctttgaggccaccagcccctagtctctagtgttctctgaggccccagcaataaagtgtcttgatgtagaactc

SEQ ID NO: 778775 - DNA, 120 bp, Artificial Sequence
  ENSG00000248712_9 (sequence is synthesized)
ggccgtttggcagagagaagtggatcttatttttatttttatttttatttagttttcttctttttttgtttttgttgttgtttatttttaggagtggctgtcatacagacatctcagttc

SEQ ID NO: 778776 - DNA, 120 bp, Artificial Sequence
  ENSG00000248712_10 (sequence is synthesized)
tgggttgacccattatccctgagattcagtgattgataggaaataaatttgaccaggtctcaacctctctcctgcaggagccgcatcccaccccttgagcctgaggcccttttggtccct

SEQ ID NO: 778777 - DNA, 120 bp, Artificial Sequence
  ENSG00000248712_11 (sequence is synthesized)
tcacaccactgccccttacccccaccaacacaaacacaggcagtcagatttatggcgaatggccatttctataacaaatgcaacggtgaccaagcaccaccctcccgcaatgctaaggca

SEQ ID NO: 778778 - DNA, 120 bp, Artificial Sequence
  ENSG00000248712_12 (sequence is synthesized)
cccacagagggcaggcatagctggtctccaaatttttgcattacactcaagggtcctggagtcatatctagaaaaggtccagatggcttcaatcctagccagacccacagccacaccttc

SEQ ID NO: 778779 - DNA, 120 bp, Artificial Sequence
  ENSG00000248712_13 (sequence is synthesized)
atccttgggacacagctctctaaaactcccatatgacatcctctggagcctcagactccttcagggacctgtctgaggcctccaaccacaccctctgctggcaggtgggcctgcaggaag

SEQ ID NO: 778780 - DNA, 120 bp, Artificial Sequence
  ENSG00000248712_14 (sequence is synthesized)
agtcatggtgggtggaggtgccccctgcttctccatgttctgccatgaagaccacgcagagctcctccagagagaattcagccttctgcaggacaggatggagctctcttgacctacctc

SEQ ID NO: 778781 - DNA, 120 bp, Artificial Sequence
  ENSG00000248712_15 (sequence is synthesized)
tttcatgtcctcacagccagatccagggagctgaggaagtggggaaatggtcacccacgctctcctttaagccccatctagctctgtgccttcctaatatatttgtcatgtgtattttgc

SEQ ID NO: 778782 - DNA, 120 bp, Artificial Sequence
  ENSG00000248712_16 (sequence is synthesized)
ggcccgaagtgaagggaaggccatatatgcaggtgtgtggtcggttaagcaggtgggcaggagacaggggcttggaggaggacaaccaacagggtcagttgatgcaaggaagggaaacaa

SEQ ID NO: 778783 - DNA, 120 bp, Artificial Sequence
  ENSG00000248712_17 (sequence is synthesized)
cctggtcttggtctttcccaaacagtacaaatcaggaaggatcctgcaggaaccaaaggcaggtaggttcctgggatcccaggcaggggccttccaggatgcctggtgccatgtgcttga

SEQ ID NO: 778784 - DNA, 120 bp, Artificial Sequence
  ENSG00000248712_18 (sequence is synthesized)
tgctgtgtaggatacacatgcagtcatagccatcatctcaatcagcccatgggcggggagaagggctagcatccccatccaaagctggactgggggaggtaggtcgggcttcctgtccct

SEQ ID NO: 778785 - DNA, 120 bp, Artificial Sequence
  ENSG00000248712_19 (sequence is synthesized)
tcctcaggttttcatggtctgcagcttctcagaatcacaaaaagaaccaagaaggcctttgtgctcctgttccactagaccaagtagagtcttccccacccacaacttcatttcctttct

SEQ ID NO: 778786 - DNA, 120 bp, Artificial Sequence
  ENSG00000248713_0 (sequence is synthesized)
atgctttcctttcatttctggaagtcccggggtcaacctacagatgctgcttcttccgtggccgatggcattcagactcctcgctgctgccgacggtgccaggcaaacaactggacagga

SEQ ID NO: 778787 - DNA, 120 bp, Artificial Sequence
  ENSG00000248713_1 (sequence is synthesized)
cagctcagctacagaacactggccacagtctcggccggagcagcagccccccagccacagaccacctccaccgcctcatccaggagccttcccacctccctcaggcttgctgcggccccg

SEQ ID NO: 778788 - DNA, 120 bp, Artificial Sequence
  ENSG00000248713_2 (sequence is synthesized)
ccacaggggctgaagaactgggaggtggtggcagcagtggcagcagtgcctacagccttggggccagtccagatacgtgggaccctgcttcgggcaactctgcagcccctccggggccag

SEQ ID NO: 778789 - DNA, 120 bp, Artificial Sequence
  ENSG00000248713_3 (sequence is synthesized)
agacggacccaagacttccccagcgatcaccattgtctcttcctgtcgctgaaacctgggcaagggctcataatggaagctgcccctcctgagctgaattcgaaagcaagacaggcggag

SEQ ID NO: 778790 - DNA, 120 bp, Artificial Sequence
  ENSG00000248713_4 (sequence is synthesized)
gtgggggacggggtgagcagtgctcaagacagccaggagctcaagcagcagctgtggccacttcccaagccttcagcctcctcccagcgagaagcgaaatatgtggacatgtgtgcttca

SEQ ID NO: 778791 - DNA, 120 bp, Artificial Sequence
  ENSG00000248713_5 (sequence is synthesized)
gctgaagtccagagggagagtccccagaccatgaaacttaccctggggcactgccctgggggtcagagggcctctaggagcccaaaggagaaagcccaagatgaacccagcagcaagact

SEQ ID NO: 778792 - DNA, 120 bp, Artificial Sequence
  ENSG00000248713_6 (sequence is synthesized)
ccaagcccccagaacaatcctgcctcctcccaactctctagatcccagcactctgcctctgaagagggtggcaatttctcatcttcctcatcctcctccccgatgaacaaagcagaagag

SEQ ID NO: 778793 - DNA, 120 bp, Artificial Sequence
  ENSG00000248713_7 (sequence is synthesized)
gatggcctttccaaaatggaggactccaccacatccacaggggctctggccacctcctcttcatccttaggcttcgagagtgagagtggtgaaagtgaaggttgccaggccgtgggagga

SEQ ID NO: 778794 - DNA, 120 bp, Artificial Sequence
  ENSG00000248713_8 (sequence is synthesized)
gaaggagagaaaatatcaggaggagggggaggaggaaaaggaggagggggaggaggggcaggagatggaacagagtgcagggacattattgccaagtcccagggcagcagggaccccccc

SEQ ID NO: 778795 - DNA, 120 bp, Artificial Sequence
  ENSG00000248713_9 (sequence is synthesized)
aaagtcgaagaggctcactacatcaccacccatgagatccagctgagtgaggtggaacaggacatggatttcgacgtgggactggcctcccgctgggatttcgaggacaacaacgtgatc

SEQ ID NO: 778796 - DNA, 120 bp, Artificial Sequence
  ENSG00000248713_10 (sequence is synthesized)
tactcgttcgtggattatgcttcctttggtggcagcgacgagaccccaggggacatcaccagtctgaccgaagaggacgacgacaacagctgctacctcagcaccactcccagcaccaac

SEQ ID NO: 778797 - DNA, 120 bp, Artificial Sequence
  ENSG00000248713_11 (sequence is synthesized)
accacccggacgcccagccctacaagcagcgacctggcccgccccaatgcaggccgcagtggccgcgacaccagcagcaccgaagtgggcagtggcccctctgacagtggccccactccc

SEQ ID NO: 778798 - DNA, 120 bp, Artificial Sequence
  ENSG00000248713_12 (sequence is synthesized)
ccacccactgggcctggcactgcccccctgactgagcccttgcctgagaccccggaggcagcttcaggggcagcagccgccgccgcaagcagctgtgggagtgcagcaagccagatcctc

SEQ ID NO: 778799 - DNA, 120 bp, Artificial Sequence
  ENSG00000248713_13 (sequence is synthesized)
ctatcaatcaaaccggcttcccgggctataaatgagcctagcaacgtgcgtgcaaagcaaaacattatttatgctgccaagcatgaaggcgacatgagcctccgcgtctctacagctgct

SEQ ID NO: 778800 - DNA, 120 bp, Artificial Sequence
  ENSG00000248713_14 (sequence is synthesized)
gaacacaattcaagttcgctgaagcaaaacccggctgcagcagtggctcaggaccatgcaaagaaattcattgctgtacctgctcgcctgcaaaccaggtgcggggccatccgggcgaag

SEQ ID NO: 778801 - DNA, 120 bp, Artificial Sequence
  ENSG00000248713_15 (sequence is synthesized)
gagctggtggactactccagcggagcctccagtgccgtgagcgaactggacgatgcggacaaagaggtgcgtaacctgacctcccgggccttccggagcctggcttacccctactttgag

SEQ ID NO: 778802 - DNA, 120 bp, Artificial Sequence
  ENSG00000248713_16 (sequence is synthesized)
gctctgaacatcagctcccgggagtcctccaccacgctctccgaagtgggctttgggcgctggtcaactttcctggacttaaaatgtgggggtgttggggccagggtggagcagagcctc

SEQ ID NO: 778803 - DNA, 120 bp, Artificial Sequence
  ENSG00000248713_17 (sequence is synthesized)
ctcaggagcagcgcggcctctgtggctgcaggtctgaggaagggcagtggggcccgggccactgccgaccagctctacatccagtccaagaagtctcagaccaaggccttggagttcgtg

SEQ ID NO: 778804 - DNA, 120 bp, Artificial Sequence
  ENSG00000248713_18 (sequence is synthesized)
gtcagcaaagtcgagggggaaatcaaacatgtggagacgcccctgtgtttccagaagcaggtccagacgggctcccgcgtcgtcacccttttggagcccctgaatgtacgcagtgagagc

SEQ ID NO: 778805 - DNA, 120 bp, Artificial Sequence
  ENSG00000248713_19 (sequence is synthesized)
aaagccagctcggcccctgggcccggcagggccaccaaaggccccggcaagggtcccgggtcggcatacacggacgacggctccgagacctccgagggcagcaagcccacctcccgcgcc

SEQ ID NO: 778806 - DNA, 120 bp, Artificial Sequence
  ENSG00000248713_20 (sequence is synthesized)
gatggcccccagaagtccaagttcgcctccagtctgctcaaaaatgtcatttccaagaagatgcagcgggaacacgagttcaaaatggagaggggagaagtcatggatacatcccaccac

SEQ ID NO: 778807 - DNA, 120 bp, Artificial Sequence
  ENSG00000248713_21 (sequence is synthesized)
ctctcaggcacctccaaggagacggagggcgcccgcgggagcgagaggcagcgagagaggggcctgcagaggcagagctctcgtcactccgaggccggctccgagtacacagtggtcagc

SEQ ID NO: 778808 - DNA, 120 bp, Artificial Sequence
  ENSG00000248713_22 (sequence is synthesized)
atgtccgacgcgggcggggaggggtccgtggcgggctccaaatctccagtcttcaaagccagtactcctcgcgagcgcaacgcaggccctggccggaatttcaccgatggacacacagaa

SEQ ID NO: 778809 - DNA, 120 bp, Artificial Sequence
  ENSG00000248713_23 (sequence is synthesized)
gtgtgtgaaattaaaaagagtgcctcagagaccgtcaagggcatcttcctccgtagtcagaacagtgcgttccggtcatggaaggagaaagaggccgagaagagggaggaacaagcccct

SEQ ID NO: 778810 - DNA, 120 bp, Artificial Sequence
  ENSG00000248713_24 (sequence is synthesized)
atagggaagctgaagctgcccaaaggaggcgactggcgggctgatctcggggagatttctgccagcaagaacaccatcatgtctcgcctctttgtccccaacatccagcagacacccaag

SEQ ID NO: 778811 - DNA, 120 bp, Artificial Sequence
  ENSG00000248713_25 (sequence is synthesized)
gacaagcagccgaggaagcaggccaccaagtaccctgctgctcaggccacctccacagcggtgatcagacccaaggctcccgaaatcaagatccggctggggagtgtgcagcagccgagc

SEQ ID NO: 778812 - DNA, 120 bp, Artificial Sequence
  ENSG00000248713_26 (sequence is synthesized)
tcagacttcaacattgccaagttgctcacgcccaagctggccggtggcagcgcctctaacctgttcaagaccatcgaggacaacagcagggcacagcagaaactcttccgcggggacaac

SEQ ID NO: 778813 - DNA, 120 bp, Artificial Sequence
  ENSG00000248713_27 (sequence is synthesized)
ctagaaaaagtgccccatttccaggtgagagacatcagagacaagtccaaggctcaaggccccctccaccaggtgagagatgtcaggaaactaattaaagggtcaggggatagtagtgac

SEQ ID NO: 778814 - DNA, 120 bp, Artificial Sequence
  ENSG00000248713_28 (sequence is synthesized)
aagggcagtgttaccccagagcaggggctgactggacccaaacccaggcagctgtctgcagcagctggcggatctggatccctgtcccccatggtgattacatgccaggctgtagtgaac

SEQ ID NO: 778815 - DNA, 120 bp, Artificial Sequence
  ENSG00000248713_29 (sequence is synthesized)
cagagggaagacagcatggaccgagagcccagggaaagcatgggcaaagggggcggcagcagagtcttgaattcttcctccccagaagggacagtcttggttcacagggcatctggcagg

SEQ ID NO: 778816 - DNA, 120 bp, Artificial Sequence
  ENSG00000248713_30 (sequence is synthesized)
ctgcctgtggctaccattgcccccaataagcccgagcagggctcatacctgcctgtgctcaagattgtctccaaggcttccacccagaagaccccagagaagctcaaggaggaggaggtc

SEQ ID NO: 778817 - DNA, 120 bp, Artificial Sequence
  ENSG00000248713_31 (sequence is synthesized)
aaggaggaagggaaagccacgaagccagcccggaatgccctggagaagctgactgcagccgtgaggtccatggaagagctgtacagcttcaacaggaacgagtggaagcgcaaaagcgac

SEQ ID NO: 778818 - DNA, 120 bp, Artificial Sequence
  ENSG00000248713_32 (sequence is synthesized)
cccttgcctatgatgatggacagccacgtgctgtcgctcattgccagtgaggagagggaaggggtagtggttgctgatggagaccacgacaagctgtccaaacggctgggtgaggtggaa

SEQ ID NO: 778819 - DNA, 120 bp, Artificial Sequence
  ENSG00000248713_33 (sequence is synthesized)
gagcggggcacaggaaacaaagctggtgtggtcctgcgaggggcccccatagaacgtctgcagcggagaaactccaaccccagcgctgagagtgtgtctgccagggcagcggcctttgag

SEQ ID NO: 778820 - DNA, 120 bp, Artificial Sequence
  ENSG00000248713_34 (sequence is synthesized)
aacctggccagggaaagaccccgatctctctatattcccccagtccacaaggatgtagagagaacccaacccctgcagcccctcccaccactccccagcaaccggaacgtgttcacagtg

SEQ ID NO: 778821 - DNA, 120 bp, Artificial Sequence
  ENSG00000248713_35 (sequence is synthesized)
agtgccagcagcatccagaaaactgggggtgtcgctggcaagttcccacaagggccttctccggagagtccttcagcagctaagggcatcaagtcgcagggactccggtccctcaagatc

SEQ ID NO: 778822 - DNA, 120 bp, Artificial Sequence
  ENSG00000248713_36 (sequence is synthesized)
tctccagccacccgggcacctcctgatgaggtgaccaacaggaaaagtggcagcaatttggagaagagcaacagtgactgtgagaattacctgaccatccctcttaaaggaagctctgct

SEQ ID NO: 778823 - DNA, 120 bp, Artificial Sequence
  ENSG00000248713_37 (sequence is synthesized)
gcaggggagcttcttagcaggcctggggcttccagggaggggccccccaactcctcagctgccactctctgtagtttacccccgctgagtgcccgcagtcaggtccccagtagctccaaa

SEQ ID NO: 778824 - DNA, 120 bp, Artificial Sequence
  ENSG00000248713_38 (sequence is synthesized)
ggctctcaggttagtggaaccagccgaccagcttggcgtaccaaacctgacaacccccgggagacagtagctgcccccccagggccacagagccccgagcatccccccaccaccatctac

SEQ ID NO: 778825 - DNA, 120 bp, Artificial Sequence
  ENSG00000248713_39 (sequence is synthesized)
caccagccgccgctgcccttcaccctacagggggcccagcctcaggtcctctgcttctccccacccagcatgcctgccccagcacctgcagcctcagctcccgtccccacagaccccttc

SEQ ID NO: 778826 - DNA, 120 bp, Artificial Sequence
  ENSG00000248713_40 (sequence is synthesized)
cagcaggcacagcctcaacagacccagcgtaagatgctcctggatgtgacaacaggccagtactatctggtggacacaccagtacagcccatgacccggagactgtttgaccctgagaca

SEQ ID NO: 778827 - DNA, 120 bp, Artificial Sequence
  ENSG00000248713_41 (sequence is synthesized)
gggcagtatgtggatgtgcccatgacctcccagcagcaggctgtggctcccatgtccatctctgtgcctcccttggccctgagtcctggggcttatggacccacctacatgatttaccct

SEQ ID NO: 778828 - DNA, 120 bp, Artificial Sequence
  ENSG00000248713_42 (sequence is synthesized)
ctgcctaccgtgctgcccaccaatgctctgcagcccacaccaattgctcgcgctccaagaggaagtgagctctccccaatggtggcagaaccttccagcaaagaggcagctgcaacgttc

SEQ ID NO: 778829 - DNA, 120 bp, Artificial Sequence
  ENSG00000248713_43 (sequence is synthesized)
accgaggccccatacttcatggcttctggtcagtctccggcctcctcaacctcctcagccccagcagccacatcccagctcctaggggccaaggcctttgcccagctgcatggcaagcct

SEQ ID NO: 778830 - DNA, 120 bp, Artificial Sequence
  ENSG00000248713_44 (sequence is synthesized)
gtcatcagcattacttcgcagcccctggggccacggatcattgctcccccttcctttgatggcaccaccatgagctttgtggtagaacacagatgatgagcagccaccaggaagcggaat

SEQ ID NO: 778831 - DNA, 120 bp, Artificial Sequence
  ENSG00000248713_45 (sequence is synthesized)
gaaaaactgctggagcaagacaaaaagatggactattcttctttaatctggaatttgcattgtaatagcactaagaattatttcatctgaaaaacttcttccacatgtgttattcttaat

SEQ ID NO: 778832 - DNA, 120 bp, Artificial Sequence
  ENSG00000248713_46 (sequence is synthesized)
ttttgcttcttataagctaagtgtgtaagtttctatatttttctgaacaatcctcttaaggcagtttttattttaattttattaagttgattgaatggttgcattttttccctttatgac

SEQ ID NO: 778833 - DNA, 120 bp, Artificial Sequence
  ENSG00000248713_47 (sequence is synthesized)
tatttctttttatacttcaacacaggatataagctttctattcacctccttcccccctgtacttgtgactagacaaacaattcctttgttcccattgttcagtcaaaacataccacagaa

SEQ ID NO: 778834 - DNA, 120 bp, Artificial Sequence
  ENSG00000248713_48 (sequence is synthesized)
tgggattgattctgttgtaaaccaagctagtaaatgagtaatttggatcacgaatctccttatagtttcttggaatatatcaagactagctggctgagttgtaatacgtatttaagtttt

SEQ ID NO: 778835 - DNA, 120 bp, Artificial Sequence
  ENSG00000248713_49 (sequence is synthesized)
cactatgatggtctgctctttgaatcatatatcagccaaacctacccattctcttggttatgctctatatgttcttttattaggtttggcatgatttcaaatgtgattgtgaaaaatggt

SEQ ID NO: 778836 - DNA, 120 bp, Artificial Sequence
  ENSG00000248713_50 (sequence is synthesized)
ggttgtaatgtttgtgctttattttatttttcccatttgtacaatgccacgacactatttgttgccttaaaatagaatggcttgaaatactggaaagccaatgattgcatctaaaattaa

SEQ ID NO: 778837 - DNA, 120 bp, Artificial Sequence
  ENSG00000248713_51 (sequence is synthesized)
gtacttagtctcagaaaggtataaaatatctattttcctttaagaatccaattatttttgtgggtgcataacatttttcttttcttcaataattccctccatagttgcatactcgtgtct

SEQ ID NO: 778838 - DNA, 120 bp, Artificial Sequence
  ENSG00000248713_52 (sequence is synthesized)
ctcatggattgtttagagtctaaagagtgacccatttggggcagtagagtagaatatggcactaattcagtggctctgattcactccagccctagcctcgctatcccaataacagtaacc

SEQ ID NO: 778839 - DNA, 120 bp, Artificial Sequence
  ENSG00000248713_53 (sequence is synthesized)
tagagttacagcacttgctccttatgaggatgaggcaggtttgaagagatgtcaagaatccaaatcacagaatcttttattgacatttagtactgtctcagttgtaacccaattctgaag

SEQ ID NO: 778840 - DNA, 120 bp, Artificial Sequence
  ENSG00000248713_54 (sequence is synthesized)
gctatttgagtgagtgttcacagggagtcttgaagactggaagacttgattgaacagataaatatttagcttgtcataataagtgtatcgatatatacttggcaaatgttacattgaaat

SEQ ID NO: 778841 - DNA, 120 bp, Artificial Sequence
  ENSG00000248713_55 (sequence is synthesized)
attacttaattactttttaaaggaataatttgaaggttttcccaggatttttttttaagaatctccttttatttaccaatttgtttaaagataaagcattctggtaattttttaaacacc

SEQ ID NO: 778842 - DNA, 120 bp, Artificial Sequence
  ENSG00000248713_56 (sequence is synthesized)
ctaatattattttaaacctcagcaatatttgatttctgcttaaattttcttcataagccacagaattttatgctactcatgacaaaaagtgtgagtaaaaaactaggagactgagttttg

SEQ ID NO: 778843 - DNA, 120 bp, Artificial Sequence
  ENSG00000248713_57 (sequence is synthesized)
tatgatttatataatctttttactttgtagttatgcttcccatctcagactcttaaaaaagacttaatttcactttcagggccttcctttaagggatcttactctgaaaaaaagttctct

SEQ ID NO: 778844 - DNA, 120 bp, Artificial Sequence
  ENSG00000248713_58 (sequence is synthesized)
tgggtatagggaaaggtttgaggcgggaatagtcagctctgatcacgattcaattgcttgttgtgctgatgagctatgaaatgaagctatagactttatgagacatgaaatatgaaacat

SEQ ID NO: 778845 - DNA, 120 bp, Artificial Sequence
  ENSG00000248713_59 (sequence is synthesized)
agtctctgtgtataaaaaagatgcccttgtgccaaattcaagaaaaagatatttctttatcatagaggtcttcttacccaggcacatcaatcaattccccccagaacttaaagtaagttt

SEQ ID NO: 778846 - DNA, 120 bp, Artificial Sequence
  ENSG00000248713_60 (sequence is synthesized)
tatccactggggaacaaatcttatggcatcagagcttcctcgttttcaggagagattggctgggtataaggtaacttaatattgacccaagaaagtagaatccctttcagaaatcttaca

SEQ ID NO: 778847 - DNA, 120 bp, Artificial Sequence
  ENSG00000248713_61 (sequence is synthesized)
cttattttactgaaagcagcaccaagaaacctccagtatttgaatacacctggtgaaacctatataggatttgggtggatagtaccaaaattgttaagactggtttaaagccaaatgcga

SEQ ID NO: 778848 - DNA, 120 bp, Artificial Sequence
  ENSG00000248713_62 (sequence is synthesized)
ctttcaggaaaaaccagtggccatgttgagtagtgactgctcaccaactcttccaaaagagagacaactccttctctagaaaatgtggtagagttgagggcttgggacccctaatctatg

SEQ ID NO: 778849 - DNA, 120 bp, Artificial Sequence
  ENSG00000248713_63 (sequence is synthesized)
tatcagtgtttctcaccagcagatttgagttttaaattctcacactgaggtaaattaggacacaaactaaggaaagaaagaaaaagcttttcatttgtttgttctatacaagaggcttca

SEQ ID NO: 778850 - DNA, 120 bp, Artificial Sequence
  ENSG00000248713_64 (sequence is synthesized)
ccttttaggaagttgccaaggacacagtgatgtccaagtggctaaaaacgcaacttttaaataatgttctattaatatcatgtcatctatcgataattttatggttctctatttcaccaa

SEQ ID NO: 778851 - DNA, 120 bp, Artificial Sequence
  ENSG00000248713_65 (sequence is synthesized)
atcatacaaagctgctaggccattcactacctccagtgatagggaaaaaatattttcacgggcatgaggtaaatctcaatcttgatttttattgttttgtcatttcttgaggttgcatga

SEQ ID NO: 778852 - DNA, 120 bp, Artificial Sequence
  ENSG00000248713_66 (sequence is synthesized)
atatttgaatgaagtgatatacccttccttttatagctcaaggggaatcaaacaagagcctatgaagccttctgacccataaaactattaccctaataatgtccctttagttactgaact

SEQ ID NO: 778853 - DNA, 120 bp, Artificial Sequence
  ENSG00000248713_67 (sequence is synthesized)
tcccttttattttttattactataaaaccattagtaaaacatttcctaaatagtgccttgaacttgaatctaatcagaattgcagagtctggcttttataatatcctcttagggttatat

SEQ ID NO: 778854 - DNA, 120 bp, Artificial Sequence
  ENSG00000248713_68 (sequence is synthesized)
gtgtggcttagttttccagaagatccactttttacttgttgataaaatggtcatatttgaaatatgtcccatttcaatcatttctggaaaactgaacacatgtgtaaccgtataaaaatt

SEQ ID NO: 778855 - DNA, 120 bp, Artificial Sequence
  ENSG00000248713_69 (sequence is synthesized)
taattcgccagaatgtatgtttttaaaaagtactcaatgaagttgccctcaggattaagtgaaggcccagatatgtaggtaatgacatagcagagaggctctctatatgtccatttatca

SEQ ID NO: 778856 - DNA, 120 bp, Artificial Sequence
  ENSG00000248713_70 (sequence is synthesized)
gggagtaaataagctaaagcaaatcacactttatatctttataacaaatctcaactattgacatgcatttctaatacatccttatgtcactggaaatatctggtgatataaattcctttt

SEQ ID NO: 778857 - DNA, 120 bp, Artificial Sequence
  ENSG00000248713_71 (sequence is synthesized)
tcttattttcaaatttgacattatcatccttgcctcttaaaaagatagattttaattgttttcatacttcatagaaatcaaagtctgtgtttgctacaaattgaatgctcacgttacctg

SEQ ID NO: 778858 - DNA, 120 bp, Artificial Sequence
  ENSG00000248713_72 (sequence is synthesized)
aaataatactttggactgcaggacaggacagtattgattcctaagtagattgactataatctcatgataagtatgtatatgtgcatgggaaaacaacattcaataatagtctttgtgttt

SEQ ID NO: 778859 - DNA, 120 bp, Artificial Sequence
  ENSG00000248713_73 (sequence is synthesized)
aaaactatcatggtatacattttcttatgtggtgcttgaggagtttcattctacagtttacaaggtgtaggtttgcaccccaaattctcagggtatgctatttcacccaaatacttgaaa

SEQ ID NO: 778860 - DNA, 120 bp, Artificial Sequence
  ENSG00000248713_74 (sequence is synthesized)
gaaaaaggtgccctgtattttatcagtactgttgagggggaaattttttgtgtaagtttgtttgataaaactgcttataaaaatcaaattcacaaaatatgttaggctttcacataattt

SEQ ID NO: 778861 - DNA, 120 bp, Artificial Sequence
  ENSG00000248713_75 (sequence is synthesized)
ctaaggagatatatgtagaaataagatatatattatcaagagactgcttatatattcttaactagcttctgggtcctaagtagacctcacaggtgcataaaatcattaataaagcatgta

SEQ ID NO: 778862 - DNA, 120 bp, Artificial Sequence
  ENSG00000248713_76 (sequence is synthesized)
gcacttgctaattggtgccttaagcttgaatctaatcagaattgcagactcgggtcctctgggaaaaaaacatgtccgtctgtggcacgtgtgagtactaggcccaggggaagagtctga

SEQ ID NO: 778863 - DNA, 120 bp, Artificial Sequence
  ENSG00000248713_77 (sequence is synthesized)
aaattgaattcttttgtgtgtcctgtgtctcagaagagaactgaatgttcagagcagcgtttgtaagctattaacattcagtatttcgtgttgcaactagaacacattattagatttatt

SEQ ID NO: 778864 - DNA, 120 bp, Artificial Sequence
  ENSG00000248713_78 (sequence is synthesized)
cctgtttaattcataatggtgcagaataaaacacacacatctgatttgatttctttttctttttttaagtttcataattgctttttatggctagtgttaatggcaaaaagtcctttccag

SEQ ID NO: 778865 - DNA, 120 bp, Artificial Sequence
  ENSG00000248713_79 (sequence is synthesized)
ggctccctgaataatctaccatacctgtatccatagcaggtgatgcttttttttatccccactttgaagacgtgtgtttctgtatttacacataaatcatactattgtatattaaagaca

SEQ ID NO: 778866 - DNA, 120 bp, Artificial Sequence
  ENSG00000248713_80 (sequence is synthesized)
gcagtggttgaaaagaatgtgaacactgtagaagttatgttggaaaaaaggagagtaaattgtgtgattaatggggaaggatattggataatgttataccccggactatgaaaaaagctg

SEQ ID NO: 778867 - DNA, 120 bp, Artificial Sequence
  ENSG00000248713_81 (sequence is synthesized)
gtggtaaatgggaagaatgtgaaattttaaactgctctcaacgtaggaatcttggtggaaaagttcctacctgaggtctgatatgattcaattatagaatgcaatgagcttggccaaggg

SEQ ID NO: 778868 - DNA, 120 bp, Artificial Sequence
  ENSG00000248713_82 (sequence is synthesized)
gactttgaatccagccaaggaaactttgaatctcgacagctctgagaatcacattttcagtgcattgaatatggagtaaactatttagacaaggattctgtgagactaggctacttacct

SEQ ID NO: 778869 - DNA, 120 bp, Artificial Sequence
  ENSG00000248713_83 (sequence is synthesized)
ttaattgccagcatttgtaaatgattgtgcaatcttgtgtaatggtcttttattttgactgttttggaaaaaaaatgttttattgtttttttttcccagtaaaaattacttcaaagaaaa

SEQ ID NO: 778870 - DNA, 120 bp, Artificial Sequence
  ENSG00000248746_0 (sequence is synthesized)
gtgccgagcggagcgaagccaggagcccgatcgagatgatgatggttatgcagcccgagggtctgggggccggggaggggcgctttgcgggcggcggcgggggcggcgagtacatggaac

SEQ ID NO: 778871 - DNA, 120 bp, Artificial Sequence
  ENSG00000248746_1 (sequence is synthesized)
aggaggaggactgggaccgcgacctgctgctggacccggcctgggagaagcagcagcggaaaaccttcactgcctggtgcaactcacacctgcgcaaggcaggcacccagatcgagaaca

SEQ ID NO: 778872 - DNA, 120 bp, Artificial Sequence
  ENSG00000248746_2 (sequence is synthesized)
tcgaggaagatttccgcaatggcctcaaactcatgctgctcctggaggtcatttcaggtgagaggctgcctaggccagataaaggcaagatgcgcttccacaaaatcgccaacgttaaca

SEQ ID NO: 778873 - DNA, 120 bp, Artificial Sequence
  ENSG00000248746_3 (sequence is synthesized)
aggccctggacttcattgccagcaagggggttaaactggtgtccattggtgctgaagagattgttgacgggaacctgaagatgaccctgggcatgatctggaccatcatccttcgcttcg

SEQ ID NO: 778874 - DNA, 120 bp, Artificial Sequence
  ENSG00000248746_4 (sequence is synthesized)
ccatccaggacatctctgtggaagaaacctcagccaaggaaggcttgcttctgtggtgccagaggaagacagcaccgtaccgcaacgtcaacgtgcagaacttccacaccagctggaagg

SEQ ID NO: 778875 - DNA, 120 bp, Artificial Sequence
  ENSG00000248746_5 (sequence is synthesized)
atggcctggccctctgtgccctcatccaccgacaccgccctgacctcatcgactacgccaaactgcgaaaggatgaccccatcggaaacctgaacactgcctttgaggtggcagagaaat

SEQ ID NO: 778876 - DNA, 120 bp, Artificial Sequence
  ENSG00000248746_6 (sequence is synthesized)
acctggacatccccaagatgttggatgcagaagacattgtgaacaccccaaagccggatgagaaggccatcatgacctatgtgtcctgcttctaccatgcctttgccggggctgagcagg

SEQ ID NO: 778877 - DNA, 120 bp, Artificial Sequence
  ENSG00000248746_7 (sequence is synthesized)
cagagacagctgccaacaggatctgcaaggtgctggcagtgaaccaggaaaacgagaagctgatggaggagtatgagaagcttgccagtgagctgctggagtggatccgccgcactgtcc

SEQ ID NO: 778878 - DNA, 120 bp, Artificial Sequence
  ENSG00000248746_8 (sequence is synthesized)
catggctggagaaccgtgtgggtgagcccagcatgagtgccatgcagcgcaaactagaggactttcgggactaccggcgtctgcacaagccgccccgcattcaggaaaagtgccagctgg

SEQ ID NO: 778879 - DNA, 120 bp, Artificial Sequence
  ENSG00000248746_9 (sequence is synthesized)
agatcaacttcaacacactgcagaccaagttgcggctcagccaccggcctgccttcatgccctccgagggcaagctggtctcggacatcgccaacgcctggcgggggctggagcaggtgg

SEQ ID NO: 778880 - DNA, 120 bp, Artificial Sequence
  ENSG00000248746_10 (sequence is synthesized)
aaaagggctatgaggactggctgctctcggagatccggcgcctgcagcgactccagcacctggctgagaagttccggcagaaggcctccctgcacgaagcctggacccggggaaaggagg

SEQ ID NO: 778881 - DNA, 120 bp, Artificial Sequence
  ENSG00000248746_11 (sequence is synthesized)
agatgctgagccagcgcgactacgattcggctttgctacaggaggtgcgggcgttgctgcggcgccacgaggcctttgagagcgacctggcggcgcaccaggaccgcgtggagcacattg

SEQ ID NO: 778882 - DNA, 120 bp, Artificial Sequence
  ENSG00000248746_12 (sequence is synthesized)
gcgctggcccaggagctcaatgagctggactaccacgaggcagcctcagtgaatagccgctgccaggccatctgcgatcagtgggacaacctgggcaccctgacccagaagaggcgggat

SEQ ID NO: 778883 - DNA, 120 bp, Artificial Sequence
  ENSG00000248746_13 (sequence is synthesized)
gcgctagagcggatggagaagctcctggagaccattgaccggctgcaactggagtttgcccggcgggccgcgcccttcaacaactggctggatggtgccgtggaggacctgcaggacgtg

SEQ ID NO: 778884 - DNA, 120 bp, Artificial Sequence
  ENSG00000248746_14 (sequence is synthesized)
tggctggtacactctgtggaggagacccagagcctgctgacagcgcacgatcagttcaaggcaacactgcccgaggctgaccgagagcgaggtgccatcatgggcatccagggtgagatc

SEQ ID NO: 778885 - DNA, 120 bp, Artificial Sequence
  ENSG00000248746_15 (sequence is synthesized)
cagaagatctgccagacgtatgggctgcggccctgctccaccaatccctacatcaccctcagcccgcaggacatcaacaccaagtgggatatggtccgaaagctggtgcccagctgtgac

SEQ ID NO: 778886 - DNA, 120 bp, Artificial Sequence
  ENSG00000248746_16 (sequence is synthesized)
cagacactgcaggaggagctggcacggcagcaggtaaacgagaggctccggcgacagtttgcggcccaggccaatgccattggaccctggatccaggcgaaggtggaggaagtggggcgg

SEQ ID NO: 778887 - DNA, 120 bp, Artificial Sequence
  ENSG00000248746_17 (sequence is synthesized)
ctggcagcagggctagctggctctctggaggagcagatggctgggctacggcagcaggagcagaacattatcaactacaagactaacattgaccggctggagggtgaccaccagctgctg

SEQ ID NO: 778888 - DNA, 120 bp, Artificial Sequence
  ENSG00000248746_18 (sequence is synthesized)
caggagagcctggtgttcgacaataagcacaccgtctacagcatggagcacatccgcgtgggctgggagcagctgctcacctccattgcccgcaccatcaatgaagtggagaaccaggta

SEQ ID NO: 778889 - DNA, 120 bp, Artificial Sequence
  ENSG00000248746_19 (sequence is synthesized)
ctgacccgagacgccaagggactgagccaggagcagctcaacgagttccgagcatccttcaaccactttgacaggaagcagaatgggatgatggagcctgatgacttccgagcttgcctc

SEQ ID NO: 778890 - DNA, 120 bp, Artificial Sequence
  ENSG00000248746_20 (sequence is synthesized)
atctccatgggctatgacctgggggaagtggagtttgctcgcatcatgaccatggtggaccccaacgcagctggggtggtgaccttccaggccttcatagacttcatgacccgagagaca

SEQ ID NO: 778891 - DNA, 120 bp, Artificial Sequence
  ENSG00000248746_21 (sequence is synthesized)
gccgagactgacacgactgagcaagttgtagcttccttcaagatcttggcaggagacaagaactacatcacccccgaggagctgcggcgcgagctccctgccaagcaggccgagtactgc

SEQ ID NO: 778892 - DNA, 120 bp, Artificial Sequence
  ENSG00000248746_22 (sequence is synthesized)
atccgccgtatggtgccctacaagggatccggggccccggctggagccctggactacgtggccttctccagtgccctctatggggagagcgacctttgaccccaaccactgaggttctct

SEQ ID NO: 778893 - DNA, 120 bp, Artificial Sequence
  ENSG00000248746_23 (sequence is synthesized)
atgcaagatggagagaggatgcaccctgtggctgatcccatccgtccctcggagcaagggcctaagagaaaagccagccaagtgcttctgaataaagatccctctctgggtctctcccca

SEQ ID NO: 778894 - DNA, 120 bp, Artificial Sequence
  ENSG00000248746_24 (sequence is synthesized)
gggaccgcgacctgctgctggacccggcctgggagaagcagcagcggaaagaaaacgaaagctcagagagggaaagggactggcccaggatgcacagcaagtcagtggctgagctgagct

SEQ ID NO: 778895 - DNA, 120 bp, Artificial Sequence
  ENSG00000248746_25 (sequence is synthesized)
aatagccctgccgcagcccatccagctggctcagagccgttccccatgcccgggtgtctccatcaccccagaaaacatgcaaaacagctcggcgcctctgtgttcctgactgtgaaatgg

SEQ ID NO: 778896 - DNA, 120 bp, Artificial Sequence
  ENSG00000248746_26 (sequence is synthesized)
ggatagggctctgtgtcccaccagcgaggtgctggaagaggctcacgaggagctccagagggcagcctctagagcggcccgcggccactattattatcggcctttctattgtggagagga

SEQ ID NO: 778897 - DNA, 120 bp, Artificial Sequence
  ENSG00000248746_27 (sequence is synthesized)
gtaaacagactcagagaggtcccgtggatttctcaaggtcacacagcgccccagcagcggagcaggaatgcaaacccaggatctccgccgcgagatccaccccggcgcccccgagtcccg

SEQ ID NO: 778898 - DNA, 120 bp, Artificial Sequence
  ENSG00000248767_0 (sequence is synthesized)
atgtttgacagctcgcagtatccctacaactgcttcaattacgacgccgacgactaccccgccggcagctccgacgaagacaagaggctcacgcggcccgcgtacagctacatcgccttg

SEQ ID NO: 778899 - DNA, 120 bp, Artificial Sequence
  ENSG00000248767_1 (sequence is synthesized)
atcgccatggccattcagcagagccccgcggggagggtgaccctgtccggcatctacgacttcatcatgcgcaaattcccctattaccgcgccaaccagcgcgcctggcagaactccatc

SEQ ID NO: 778900 - DNA, 120 bp, Artificial Sequence
  ENSG00000248767_2 (sequence is synthesized)
ctactggacgttcgcgggcggctgcgagtcgctgctggacctcttcgagaacggcaactaccggcggcggcggcggcggcgcggccccaagcgcgaggggccgaggggtccgcgcgcggg

SEQ ID NO: 778901 - DNA, 120 bp, Artificial Sequence
  ENSG00000248767_3 (sequence is synthesized)
gctcaggggcgcctggccccggacagcgctggcgagggcgccccgggccgtgagccccccgccagccccgctcccccggggaaggagcacccccgggacctcaagttcagcatcgactac

SEQ ID NO: 778902 - DNA, 120 bp, Artificial Sequence
  ENSG00000248767_4 (sequence is synthesized)
agcatcgactacatcctgtcctccccagaccccttccctgggctcaagccgccctgcctcgcacaagagggcagatacccgcggctggagaacgtgggactccacttttggacaatgtga

SEQ ID NO: 778903 - DNA, 120 bp, Artificial Sequence
  ENSG00000248767_5 (sequence is synthesized)
ccacaccaggcctggactggggggacaggcggaggtggagctccttaaagatggaagcaggacagcggcagatttgagagcaaccaccaggtccctgagtgcaaactgaccacagatgag

SEQ ID NO: 778904 - DNA, 120 bp, Artificial Sequence
  ENSG00000248767_6 (sequence is synthesized)
cccctcctccccactgctgacttgctgggtatagcggagcagcacccctccagagagccctcctgggctgacacctgccctttgcacccagctgaaataaaactcttggaatctgctgtc

SEQ ID NO: 778905 - DNA, 120 bp, Artificial Sequence
  ENSG00000248771_0 (sequence is synthesized)
gtttccttcttgatccttcacaagggaagattttcttttttagaggtacagattcctcttagtcaagtcctgattaaaactccagctaagacattagtaagccttggttagtgaagtggc

SEQ ID NO: 778906 - DNA, 120 bp, Artificial Sequence
  ENSG00000248771_1 (sequence is synthesized)
atcaggaagtgcctacattttcatggcctggtagcgttcagtgaaaatgttcattaacagacacaggccattcagtcccgaatcccaagacactgaagactctgtttgaatcagactcac

SEQ ID NO: 778907 - DNA, 120 bp, Artificial Sequence
  ENSG00000248771_2 (sequence is synthesized)
gggttccttcctagccactctcagggacaggaatgcttctggtgaagaagttttcggtggtggttcatggagcttccctacaccaacttggaaatggcattcattttattggcttttgtt

SEQ ID NO: 778908 - DNA, 120 bp, Artificial Sequence
  ENSG00000248771_3 (sequence is synthesized)
atcttttccttatttaccctggcttccatctacactactccggatgacagtaatgaagaggaagaacatgaaaaaaagggaagggaaaagaaaaggaaaaagtctgaaaagaagaaaaat

SEQ ID NO: 778909 - DNA, 120 bp, Artificial Sequence
  ENSG00000248771_4 (sequence is synthesized)
tgctcagaggaagagcacagaattgaagctgttgagctatgatctcatagccaccgatatttctcgctaagaagacagaggaagcaatccatgggaactacttatccacagttacacaag

SEQ ID NO: 778910 - DNA, 120 bp, Artificial Sequence
  ENSG00000248771_5 (sequence is synthesized)
aggaggggataatgaagaaagttaaaatcacttactgattaaacacgatgataataaccattaatgaactcaatactcgggaaaggcttcacatttctgggactcagcattatccaaaat

SEQ ID NO: 778911 - DNA, 120 bp, Artificial Sequence
  ENSG00000248771_6 (sequence is synthesized)
atctattaagagccatacaccattctagctgcaattgattatacaaaaaaaaaaagaccaaagtggttacaataataaaatagaacacagagaaagaagaaaactacatgtgttacaatt

SEQ ID NO: 778912 - DNA, 120 bp, Artificial Sequence
  ENSG00000248771_7 (sequence is synthesized)
tggtaagataaacaaacaaacaaaaaatttaatcactttttttggtcctgcgacacacatgataatttttgtcttaattctcctaacaaatgataatgaaaagctataagtaactgtgtt

SEQ ID NO: 778913 - DNA, 120 bp, Artificial Sequence
  ENSG00000248771_8 (sequence is synthesized)
attgcttccgtatctgaaataggtgaaagagggaaaaaacactatatattttttcagctttacagaagaaattttgaaaggtttacattcaatggaaatattagcattgcctcagtaagc

SEQ ID NO: 778914 - DNA, 120 bp, Artificial Sequence
  ENSG00000248771_9 (sequence is synthesized)
tttaaaacacaaatgtctacgttttctgaagcaatatggtttacagagacatgagtgtttgtaaatctctcgtcccaatactatgtaaatccttaatgtgtaagcatccaggaaaatttg

SEQ ID NO: 778915 - DNA, 120 bp, Artificial Sequence
  ENSG00000248771_10 (sequence is synthesized)
catccaggaaaatttgtcattctgtgtcctttattcatcctaaaagttgaaagttttctgttatttatatttttttttttttaatttgagagagaggctgggtgcagtggctcacgcctg

SEQ ID NO: 778916 - DNA, 85 bp, Artificial Sequence
  ENSG00000248771_11 (sequence is synthesized)
ccgcaaccttaagttcctgggctcaggtgatcctcttgcttcagcctcccaagtaactgtgactacaagcatgtgtcatcacagc

SEQ ID NO: 778917 - DNA, 120 bp, Artificial Sequence
  ENSG00000248771_12 (sequence is synthesized)
ctcccaagtaactgtgactacaagcatgtgtcatcacagccagctaatttttgtaattgtttgtagaaccaaggcctctctatgttgcctaggctggtctccaaatcctggactcaagcg

SEQ ID NO: 778918 - DNA, 120 bp, Artificial Sequence
  ENSG00000248771_13 (sequence is synthesized)
atcctctgccttagcctcccaaagcactgggattacacgcatgagccaccatgcctggcctgttatttataactcttacaaacattaaaccatcacaatcaatgctggcagcattatcgt

SEQ ID NO: 778919 - DNA, 120 bp, Artificial Sequence
  ENSG00000248771_14 (sequence is synthesized)
ggcaggaaggaatccacaatacaaccaaagatacctacctgcatctcataagaatcatagctcaggtctccattgccacagagtttcagtcatgtgagagactccctttatctgtactta

SEQ ID NO: 778920 - DNA, 120 bp, Artificial Sequence
  ENSG00000248771_15 (sequence is synthesized)
ccccttactgctcactttcaagaaagattcaataaagatggctttctgccatacagagataggcatactagtgtaaacagaatgcttacaaagttaaccaagtagtcacccaggtcagag

SEQ ID NO: 778921 - DNA, 120 bp, Artificial Sequence
  ENSG00000248771_16 (sequence is synthesized)
tactaaacatttaaaagggctcactaagttagagaggacagagaatgggctttggagatgagcagatctgggtttgagtctgctccaacctttccttattatatgaccttgggcaaagta

SEQ ID NO: 778922 - DNA, 120 bp, Artificial Sequence
  ENSG00000248771_17 (sequence is synthesized)
cttaatttctctgagccttggtgttctctctgaaaaaatgagcattttaaaaaatctttgctgggctgacaaatggatgagagatagtataagtaaaatgtgtaactcagtgcctaggat

SEQ ID NO: 778923 - DNA, 120 bp, Artificial Sequence
  ENSG00000248771_18 (sequence is synthesized)
cgttgctgaataacgctacctattattattggaaagcattttgggacatttggacttttaagtttactgatacgttttttcagaaaagcagaaaaatcaacaacatggtttcaaatactt

SEQ ID NO: 778924 - DNA, 120 bp, Artificial Sequence
  ENSG00000248771_19 (sequence is synthesized)
ggatgaggctccattcactcccttagcccatcttacatatattactgcattgactggaaatgggaggcacttcacaattaggaatattgtcaggtcagccaggcgccgtgggcatgctta

SEQ ID NO: 778925 - DNA, 89 bp, Artificial Sequence
  ENSG00000248771_20 (sequence is synthesized)
ccagcctgggtgaaagagaagaccctatctcaaaaaataaaaaattttaaaaacctgtcaagttagatgttaaagaggacatgtaaaat

SEQ ID NO: 778926 - DNA, 120 bp, Artificial Sequence
  ENSG00000248771_21 (sequence is synthesized)
aaaacctgtcaagttagatgttaaagaggacatgtaaaataaaatctccctaacatgtttatgaaatagctgcaaaaggctgagcgtggtggctcacgtctgaaatcccagcactttgtg

SEQ ID NO: 778927 - DNA, 120 bp, Artificial Sequence
  ENSG00000248771_22 (sequence is synthesized)
agtagtggtatttacagatggttgggtgacagaaaaagtaaataactacgtttcattacagtttcctgtttccttcttgatccttcacaagggaagattttcttttttagagacacaggc

SEQ ID NO: 778928 - DNA, 120 bp, Artificial Sequence
  ENSG00000248905_0 (sequence is synthesized)
atggagaacgttgataattctctggatggcagtgatgtgtcagaaccagcaaaaccagaagccggacttgaagtggctcagtcgatcctgagtaagttctctatgaaatccctatttggg

SEQ ID NO: 778929 - DNA, 120 bp, Artificial Sequence
  ENSG00000248905_1 (sequence is synthesized)
tttacgagtaaattagaatctgtgaatccagaagaggaagatgctgtgctgaaagcattccatagtttagacgtgaatcccacatctcagcaggatgattccagcaatggcttggatcca

SEQ ID NO: 778930 - DNA, 120 bp, Artificial Sequence
  ENSG00000248905_2 (sequence is synthesized)
caggaagcagggtctcgggtttcacctgacctcggaaatgatgagaaaattgcaagcgtggagacagaatcagagggaagtcagagaaaagaagcagggacatctctccttgctcaagag

SEQ ID NO: 778931 - DNA, 120 bp, Artificial Sequence
  ENSG00000248905_3 (sequence is synthesized)
ctgcttccactgtctactttgaaagggacaaaagacgatgtcatttgtgttcgtgggaccctggtgcacaccaccagtgattctgactctgatgatggtggccaggagccagaggaggga

SEQ ID NO: 778932 - DNA, 120 bp, Artificial Sequence
  ENSG00000248905_4 (sequence is synthesized)
agcagcaccaatggcccaaagtcccctagtggtgttttatctgagccatctcaggagtccaaagaaaacccaggaggtttcagggaaaatactgtcactggggaaatgaatggtgcagag

SEQ ID NO: 778933 - DNA, 120 bp, Artificial Sequence
  ENSG00000248905_5 (sequence is synthesized)
ctctgtgcagaagatcctcaaaggattccacctgagatgagcagcaaactggaagctggcaacggtggtcttcagacagagcgtcgccccagccaggaccaggtgggagaagaagggtcc

SEQ ID NO: 778934 - DNA, 120 bp, Artificial Sequence
  ENSG00000248905_6 (sequence is synthesized)
caagacctacctgcagtaacaaaccagaattcgagtgttggtatcactgagagtgcctcttctaaaaaagaagtctctggagagaagtcattccaacttccagcttttttcagtgggctt

SEQ ID NO: 778935 - DNA, 120 bp, Artificial Sequence
  ENSG00000248905_7 (sequence is synthesized)
cgtgtgctgaagaagggggctaccgctgagggaggagagaccatcacggaaattaaaccaaaggatggggacttagctttgctcaaattgacgcagcctgtgcagaagtccttagtgcag

SEQ ID NO: 778936 - DNA, 120 bp, Artificial Sequence
  ENSG00000248905_8 (sequence is synthesized)
gcagggctgcagacagtgaagagtgagaagaaagcaactgatccgaaggccactcccactctcctggagcagctctctctgctgctcaacattgacatgcccaaaactgaaccgaaggga

SEQ ID NO: 778937 - DNA, 120 bp, Artificial Sequence
  ENSG00000248905_9 (sequence is synthesized)
gcagaccctgagtcgcccaggagagaagagatgggctgcaatgctgaccaagagagccagagcggccctggagtaccacaaacccagggtggtgaggtcaagccaaagtcgccagagaca

SEQ ID NO: 778938 - DNA, 120 bp, Artificial Sequence
  ENSG00000248905_10 (sequence is synthesized)
gccctggaggcttttaaagccctattcatccggccccccagaaaggggaccacagctgacacctctgagctggaagctctcaagcgcaagatgagacatgagaaggagtcgctaagagct

SEQ ID NO: 778939 - DNA, 120 bp, Artificial Sequence
  ENSG00000248905_11 (sequence is synthesized)
gtgtttgaacggtccaattctaagccagcggatggcccctctgattccaaaagtcctgaccacagcctgactgagcaggatgacaggactcctggcagacttcaagctgtctggccaccc

SEQ ID NO: 778940 - DNA, 120 bp, Artificial Sequence
  ENSG00000248905_12 (sequence is synthesized)
ccaaagacaaaagacacagaagaaaaagtgggactgaagtacactgaagcagaataccaagctgctattttacacttgaagagggagcacaaagaagaaattgaaaacctgcaggcacag

SEQ ID NO: 778941 - DNA, 120 bp, Artificial Sequence
  ENSG00000248905_13 (sequence is synthesized)
tttgaacttcgggcatttcatatccggggcgagcatgcaatgataacagcgagactagaagaaaccattgaaaatctgaaacacgagctagaacacagatggcgagggggttgtgaagag

SEQ ID NO: 778942 - DNA, 120 bp, Artificial Sequence
  ENSG00000248905_14 (sequence is synthesized)
aggaaagatgtgtgcatttccaccgatgatgactgccctccaaagaccttcagaaatgtgtgcgtccagacagacagagagaccttcctcaagccctgtgaaagtgaaagcaagacaacc

SEQ ID NO: 778943 - DNA, 120 bp, Artificial Sequence
  ENSG00000248905_15 (sequence is synthesized)
agaagtaatcaattagtacccaaaaagctgaatatctcctctttaagccagctctcacccccaaatgaccacaaagacatccatgcagcactccagccaatggagggcatggcatcaaat

SEQ ID NO: 778944 - DNA, 120 bp, Artificial Sequence
  ENSG00000248905_16 (sequence is synthesized)
cagcagaaggcattgcctccgcctcccgcatccatccctccccctccgcccctcccctcaggacttggatctttgtctcccgcacctccaatgccacctgtgagtgctgggccaccgcta

SEQ ID NO: 778945 - DNA, 120 bp, Artificial Sequence
  ENSG00000248905_17 (sequence is synthesized)
ccacctccgcctcctccaccgccacctctacctccaccttcaagtgctggacctccaccacccccacccccacccccacttcctaactcccctgccccacccaaccctggagggcctcct

SEQ ID NO: 778946 - DNA, 120 bp, Artificial Sequence
  ENSG00000248905_18 (sequence is synthesized)
cctgctccaccacccccaggacttgcacccccacctccccctggactcttctttggacttggctcttcttccagtcaatgtcctcgaaaaccagccatcgagcccagttgtcccatgaag

SEQ ID NO: 778947 - DNA, 120 bp, Artificial Sequence
  ENSG00000248905_19 (sequence is synthesized)
cctttatattggactaggatacaaataagtgataggagccaaaatgctacaccaaccttatgggactccttagaagaacctgacattcgggaccccagtgaatttgagtatttattctcc

SEQ ID NO: 778948 - DNA, 120 bp, Artificial Sequence
  ENSG00000248905_20 (sequence is synthesized)
aaagacacaactcaacagaagaaaaaacctctgtcagagacttatgagaagaaaaacaaggtcaaaaagatcatcaaattgttggatggaaaacgatctcaaactgtgggaatcttgata

SEQ ID NO: 778949 - DNA, 120 bp, Artificial Sequence
  ENSG00000248905_21 (sequence is synthesized)
tctagtttacatttagaaatgaaggatatccaacaggccattttcaatgtggatgactccgtggttgatctggagaccctggcagccttatatgaaaacagagcccaagaggatgagctg

SEQ ID NO: 778950 - DNA, 120 bp, Artificial Sequence
  ENSG00000248905_22 (sequence is synthesized)
gttaaaataagaaagtattacgagacatccaaagaagaagaactgaagctgctggataaacctgagcaatttttacatgagttagcccagattcctaattttgctgaacgtgcccagtgc

SEQ ID NO: 778951 - DNA, 120 bp, Artificial Sequence
  ENSG00000248905_23 (sequence is synthesized)
ataatcttcagatctgtcttttctgagggtatcacctccttgcacagaaaggtagagatcatcacgcgagcttctaaggacttgctgcacgtgaagagcgtgaaggatattttagctctc

SEQ ID NO: 778952 - DNA, 120 bp, Artificial Sequence
  ENSG00000248905_24 (sequence is synthesized)
atcttggcttttggaaattatatgaatggaggaaataggactcggggacaagccgatggatatagcttagaaattctgcccaaactcaaggatgtcaaaagtcgggataatgggattaat

SEQ ID NO: 778953 - DNA, 120 bp, Artificial Sequence
  ENSG00000248905_25 (sequence is synthesized)
ctggtggactacgttgttaagtattacctgcgttactatgatcaggaagctggaacagaaaagagtgttttccccttgccggaaccacaggatttctttctggcctcccaagtcaagttt

SEQ ID NO: 778954 - DNA, 120 bp, Artificial Sequence
  ENSG00000248905_26 (sequence is synthesized)
gaagacctcataaaagatttgagaaaactgaagaggcaactagaagcaagtgagaaacagatggtggtggtgtgcaaggagtccccaaaggagtatctccagcctttcaaggacaaacta

SEQ ID NO: 778955 - DNA, 120 bp, Artificial Sequence
  ENSG00000248905_27 (sequence is synthesized)
gaggagttcttccaaaaagccaaaaaagagcataagatggaagaaagtcacttggagaatgcacagaaaagttttgaaacaacagtacgatattttgggatgaagccaaagtctggtgag

SEQ ID NO: 778956 - DNA, 120 bp, Artificial Sequence
  ENSG00000248905_28 (sequence is synthesized)
aaggagatcacacccagctacgtgtttatggtgtggtatgagttctgcagtgacttcaagacaatttggaaacgggagagtaaaaacatatctaaagaaagattgaaaatggctcaggaa

SEQ ID NO: 778957 - DNA, 120 bp, Artificial Sequence
  ENSG00000248905_29 (sequence is synthesized)
tcagtcagcaagttgacttcagagaagaaagtggagacaaagaaaatcaatcccactgctagcctgaaagaaagactgcgtcagaaggaagccagtgtgaccactaactaagatgaagac

SEQ ID NO: 778958 - DNA, 120 bp, Artificial Sequence
  ENSG00000248905_30 (sequence is synthesized)
acatggaaatgatggcactggaggtggaggaccttgcacgcatactctttgtgaccacagggttgcaggacgttcttgaaagatgtgtcactaaatgtttgtttttgctcatctctttct

SEQ ID NO: 778959 - DNA, 120 bp, Artificial Sequence
  ENSG00000248905_31 (sequence is synthesized)
gaggtcatctgcagagagtgccccatgccttctttaagaagtccctcattaagccgcaggaacaatggaaaactatttaagggaacattgcagaaatatttgatgactgtttcttgtgga

SEQ ID NO: 778960 - DNA, 120 bp, Artificial Sequence
  ENSG00000248905_32 (sequence is synthesized)
agcccaaagtccactctaagagcagaagaaataccaaaatgtttccaaaatttttttaaaagctgagatttccagctttataaccaaagcttgatatatgtcacattgtcacagaagaga

SEQ ID NO: 778961 - DNA, 120 bp, Artificial Sequence
  ENSG00000248905_33 (sequence is synthesized)
gaaaagatcattgaggacagttgccttgggagagttcaagtctttgtcgttacacactgctgttttgattattggtcttagttttgatcctgttgcagcaaaatcctgcagcatctttct

SEQ ID NO: 778962 - DNA, 120 bp, Artificial Sequence
  ENSG00000248905_34 (sequence is synthesized)
ctccaataatgttgcaactcaccaaaactattcttgaagaggtccaagaacatgtattatccagactaaaaaaatgattttttgttgttatggtttacgtgatgaaaaggagaaaaaaca

SEQ ID NO: 778963 - DNA, 120 bp, Artificial Sequence
  ENSG00000248905_35 (sequence is synthesized)
gaatcatacctgggtggagagagggagacaaatagccataaacttcatcctggagaacaagttaccatgcaaggagttgacatcagttgttaagtgaggcccattcttgtttttacatcg

SEQ ID NO: 778964 - DNA, 120 bp, Artificial Sequence
  ENSG00000248905_36 (sequence is synthesized)
gtcctttgtggtttttctgggccagcagagattctgcaccccaactcccaggagaaaatgtaatacctgagcaagcacagccttgggtgtgcttggacaagagacccagcggcagagcac

SEQ ID NO: 778965 - DNA, 120 bp, Artificial Sequence
  ENSG00000248905_37 (sequence is synthesized)
cttttacattttggaccgttcatgaatgggcaatgttgtgttgatacgcagccgagttctacgttatgtgctgtgactgtgcagctggacgacccccatccccaggaggcagtttccaga

SEQ ID NO: 778966 - DNA, 120 bp, Artificial Sequence
  ENSG00000248905_38 (sequence is synthesized)
caggagagcaaatgcaactcacagcacctgctcatgaccttggctgataggcatgtgaagtaggatgaagcaggactctttaatgtcaaaaaaactgaagggcagaaaaaaggttcctta

SEQ ID NO: 778967 - DNA, 120 bp, Artificial Sequence
  ENSG00000248905_39 (sequence is synthesized)
catcaaaatgaaagtaattacattaatagaaaacttccaagtggaatattgttcacaggcagctctttctgaccctggctcttgagtcacataaggaaaccacctttgacctctctgaca

SEQ ID NO: 778968 - DNA, 120 bp, Artificial Sequence
  ENSG00000248905_40 (sequence is synthesized)
cttttgtctttaagccacgtctctgaaatcttgtgaggggtgaagaaagaggactggagatgaatggacaatatgatcaaagactcatttttaggccttgaagaggccgagctttctccc

SEQ ID NO: 778969 - DNA, 120 bp, Artificial Sequence
  ENSG00000248905_41 (sequence is synthesized)
cccaattggtggaggacagtccagagatgagcagaaatcttaaattccttcctgatccagcctccacatgtggcctgccccttgccccagcatctttccagaacccctggacttgccagg

SEQ ID NO: 778970 - DNA, 120 bp, Artificial Sequence
  ENSG00000248905_42 (sequence is synthesized)
tgcctgagcatcttcccaggatatgcctgccagccagcagcccctcaggaatgcttctataatagatccagtaatgaaagcagcaccatatcctaatctaatgtcagcttcgagaatgaa

SEQ ID NO: 778971 - DNA, 120 bp, Artificial Sequence
  ENSG00000248905_43 (sequence is synthesized)
gactgcagtcaggatcaaatcaagtcacagaagccatattcatgcaggtgctaaccgccttttctactggtgcaactgaaaggaatatggtaacatggttggatttttaaaattcacaat

SEQ ID NO: 778972 - DNA, 120 bp, Artificial Sequence
  ENSG00000248905_44 (sequence is synthesized)
gaaggaacgagacaagcaaaacagaaaagccgagaaggaacatgcatgactaaaaaggcttgaagttgcttgtgagcaagaagctttttatgctgctttcttacatagtttctcttcatt

SEQ ID NO: 778973 - DNA, 120 bp, Artificial Sequence
  ENSG00000248905_45 (sequence is synthesized)
ttcacttaactctgaagacaaccaaaagaacggatcaattaaaaactgattccacttataaccattgtatgctccttctagtgttatcatgcacaagaaaagtgccagttttacccatgc

SEQ ID NO: 778974 - DNA, 120 bp, Artificial Sequence
  ENSG00000248905_46 (sequence is synthesized)
catataattcagctcttttgagttatgtggggccagcagaagtctcaatccttataggcttgatggtgagagcagcgggaggtttgaggtgtactcattgcagtccactttggtctgtaa

SEQ ID NO: 778975 - DNA, 120 bp, Artificial Sequence
  ENSG00000248905_47 (sequence is synthesized)
gtaggatgcttacgagaaatcagtgaaggtaagcagggctgccactgtggccacgtaacccttcaggaaccagtgctgaagaataatgagtgagaacacttaatttgagagttagacaaa

SEQ ID NO: 778976 - DNA, 120 bp, Artificial Sequence
  ENSG00000248905_48 (sequence is synthesized)
tacagcccactttggatttcatcctagtgaacagactaaaactttgcagtaaaatacctatttctacaaagcaaggtttgcctgcctcggttggggaaacctagtggttttgtcacacta

SEQ ID NO: 778977 - DNA, 120 bp, Artificial Sequence
  ENSG00000248905_49 (sequence is synthesized)
gtcgatgtatgatgttagtgttgtaagacaccatggcagaatcttcattattctcacctattctgaaccctgcatcatgtatctgggatgccccctcccaagtccaccaatgtaccacgt

SEQ ID NO: 778978 - DNA, 120 bp, Artificial Sequence
  ENSG00000248905_50 (sequence is synthesized)
tgctgacacagccttcatttttaactcaaattgatgctcagtaaaggtcaatgacaatttgttcaaggaagttcatctaaaataatctggaggccttgaaaatgatccctctaaaatgct

SEQ ID NO: 778979 - DNA, 120 bp, Artificial Sequence
  ENSG00000248905_51 (sequence is synthesized)
taggcatagccctccctgaactagaaaggagagtaaccagtttgctatgctgcatctaaccagacacacctgacttagtagtaactctaagaacccttaacttacaaacaactttgtctc

SEQ ID NO: 778980 - DNA, 120 bp, Artificial Sequence
  ENSG00000248905_52 (sequence is synthesized)
ctcttagacaatattcattaaatctgaggacacagtttgacagtagttcagattcttgcatgagcaattgacagcatcagagcacacaatatcataagttacataaattacacaaagtac

SEQ ID NO: 778981 - DNA, 85 bp, Artificial Sequence
  ENSG00000248905_53 (sequence is synthesized)
agcacacaatatcataagttacataaattacacaaagtacatcataaattacactacagacacgttaggtaaaaagcatcaggcc

SEQ ID NO: 778982 - DNA, 76 bp, Artificial Sequence
  ENSG00000248905_54 (sequence is synthesized)
ttcaaaaaaaaaagcatcaggcccatgaagtatcaaaaaccaggttaggaggtgtgctgtatggcttttatctcaa

SEQ ID NO: 778983 - DNA, 120 bp, Artificial Sequence
  ENSG00000248905_55 (sequence is synthesized)
aaaccaggttaggaggtgtgctgtatggcttttatctcaataagtggcagcttactggggaaaaagaaataagaaaaagtgtggccaagcagaagtggatgtttatgatgacggtggggg

SEQ ID NO: 778984 - DNA, 120 bp, Artificial Sequence
  ENSG00000248905_56 (sequence is synthesized)
cccagaggtcataggtgatggtcctactgcccaacagttgccttttgaatccttatgttgatgatggtgtctttctacacactcactgcaactactcaggaattataaagattttctgaa

SEQ ID NO: 778985 - DNA, 120 bp, Artificial Sequence
  ENSG00000248905_57 (sequence is synthesized)
atctgagaagtggaataaggaaacccagtggagctattacacttttaaatgttctagccaaaacaaattgccagtatggttgaggaattgaatatcagatggcatgcagtctcccctccc

SEQ ID NO: 778986 - DNA, 120 bp, Artificial Sequence
  ENSG00000248905_58 (sequence is synthesized)
ctcccctatcaaggacagtagaagctgcaaacctcttctcagcctccttcaggcacctcctgttttcataagcaccatgaagaatggtgtttcctaaatgaaaagttcagatactgctgg

SEQ ID NO: 778987 - DNA, 120 bp, Artificial Sequence
  ENSG00000248905_59 (sequence is synthesized)
taaagaaactggaaaaactgaaggaaggaataaaatatgttggtggtattaacacctccagtaagataagtcattggtacggtttttctaagggccgcagtgagatgtagcagaagaaat

SEQ ID NO: 778988 - DNA, 120 bp, Artificial Sequence
  ENSG00000248905_60 (sequence is synthesized)
atgtttattttgggcaaagatttgcttattggcctgggattgcacattttctctatgatgtttgcaacagagaaattttcattttaatgatactcttcctttcttgaaagttacatgtcc

SEQ ID NO: 778989 - DNA, 120 bp, Artificial Sequence
  ENSG00000248905_61 (sequence is synthesized)
tcatttctgtttctgcttctcccttggccagtgtcattgatgcagatcattgcatacaacagcacagcaaattgcgccaagtcagtgtgtgaatgggaattagcaatgcacgcttgcagg

SEQ ID NO: 778990 - DNA, 120 bp, Artificial Sequence
  ENSG00000248905_62 (sequence is synthesized)
ctctttttccaggaaccaggctgtaacattgaccggggaacctcttcattccctgacatactaaattggtcaattttgtagtactcatctccatccacaaaaacaacaaagataaaatca

SEQ ID NO: 778991 - DNA, 120 bp, Artificial Sequence
  ENSG00000248905_63 (sequence is synthesized)
atttggagctttatatgacaaaaaggaagaagtccaaaaatatatagccttcccccctcccacatatctgatccaaatattaaatatctgattttataaaacagtttaaattgtcttttt

SEQ ID NO: 778992 - DNA, 120 bp, Artificial Sequence
  ENSG00000248905_64 (sequence is synthesized)
aaattgctaacaagcatcagttatatttgagcttcatttttcttttatcctgtctgtcctaataaaaacaaaaatggccaaaaagtggagaggaaagaaaaagcttccactttttaaaat

SEQ ID NO: 778993 - DNA, 120 bp, Artificial Sequence
  ENSG00000248905_65 (sequence is synthesized)
ttgttttgtattagttattttacctttagggaccctacaactgaagagagtggagagaataaagaagtgaactttcattcatgtctgctactttgacctcataaagaaatctgcaacaca

SEQ ID NO: 778994 - DNA, 120 bp, Artificial Sequence
  ENSG00000248905_66 (sequence is synthesized)
gatgaaaccagtctgtgtggccaagctgatgggatttgaaaagagtggataatttttagcctttccaaaatgcaaataacttggatatatttccattttccagctatagagagaaacaat

SEQ ID NO: 778995 - DNA, 120 bp, Artificial Sequence
  ENSG00000248905_67 (sequence is synthesized)
ccagctgcctggaaactgttattagtatagaagtggcttaaagaaaagcatcttcaaatacttgacttagcatatctttcttctttagacttacataatgatattcatctctccattagc

SEQ ID NO: 778996 - DNA, 120 bp, Artificial Sequence
  ENSG00000248905_68 (sequence is synthesized)
aattgaatccaggcataaccgggctcagttacacagcttgtctgtgactgggaagcccattttgtgtcatttctgcacacctgtccgctgttgacaccttattagaggcactgcattttg

SEQ ID NO: 778997 - DNA, 120 bp, Artificial Sequence
  ENSG00000248905_69 (sequence is synthesized)
gtttcacaattcttcatctcccttcccaaggaatgggcaatctactgaacttccagatcaatgctttgttggaaagtgatgaatttaagagagttttaacatgtcaaatttgaagccaat

SEQ ID NO: 778998 - DNA, 120 bp, Artificial Sequence
  ENSG00000248905_70 (sequence is synthesized)
tcagtatccttatttgttccaagactcttaaccaatactgtgatataaagttaggatttgggaaacgtgtagttaacaacttggaaacatgaagatattaaaatggcagctggctaactg

SEQ ID NO: 778999 - DNA, 120 bp, Artificial Sequence
  ENSG00000248905_71 (sequence is synthesized)
tctcttaagccactatgcaatttctaccaatggagagattagggaagcaaattaagcctcattcagtaggtctgctgtctggtggaacttacggaactcatttcctcctctatccccagc

SEQ ID NO: 779000 - DNA, 120 bp, Artificial Sequence
  ENSG00000248905_72 (sequence is synthesized)
ccttctcctaactatggtgataaccagggccatagaagaccttttctctcttacctttctctgataggatcgtgtccttcagtcaagagctcatgtgaactccagactttatattacatc

SEQ ID NO: 779001 - DNA, 120 bp, Artificial Sequence
  ENSG00000248905_73 (sequence is synthesized)
tctgaagttcttgatgtggggaagattgacttttattccatttttatatgaaggtgttagatatagccatcaatttatttttctacattccctctacgcttatgtaattttctattttta

SEQ ID NO: 779002 - DNA, 120 bp, Artificial Sequence
  ENSG00000248905_74 (sequence is synthesized)
aatcttctcttaaatatactgagaatctctagtctccttttctaaaggctgatccaactacacttgtgggctatttttccaagctttgtgtgaaacttgatgacattgggccagcaaaat

SEQ ID NO: 779003 - DNA, 120 bp, Artificial Sequence
  ENSG00000248905_75 (sequence is synthesized)
gcaaagaagactatagtttcaggcagaaaatcacgtccaaagaatttggcatggattaaacaacctctaccacactatagctctcacataggctgaacattttcctaaattctacctgtg

SEQ ID NO: 779004 - DNA, 120 bp, Artificial Sequence
  ENSG00000248905_76 (sequence is synthesized)
cagacactgaggggctctctacctttgaaactatgagaacgtcttaaattaatatgaatatttctctccatgtatagtgtgagctgccaatgcattatcttaatacatcaagaaggaaat

SEQ ID NO: 779005 - DNA, 120 bp, Artificial Sequence
  ENSG00000248905_77 (sequence is synthesized)
cagatttcaggcacacattagcaattgtttgttaatgtccttggcaaacgtgtacctgctttccttcattgttctcttcaggggctttcttccactttcctcttatgaaacgaatgtgtt

SEQ ID NO: 779006 - DNA, 120 bp, Artificial Sequence
  ENSG00000248905_78 (sequence is synthesized)
tttgactgttaactgggttcgctttccagatctgtctttcccaaatgaaaggttagtcccatagaccactggctattcagggaaattactctctacctccccatgacatggatgataagt

SEQ ID NO: 779007 - DNA, 120 bp, Artificial Sequence
  ENSG00000248905_79 (sequence is synthesized)
gttgagggatgaacactctggaaactcttagcatggattttgaattccagatttctttataggagatgtataaaaaggagtttatagcatacaaaaattatactgctcttcccagtaagg

SEQ ID NO: 779008 - DNA, 120 bp, Artificial Sequence
  ENSG00000248905_80 (sequence is synthesized)
gactaaaaggacatttgaaatctttacattttagatgtttttgtgaattataaatatctcctttttcctcgcttcatgctaacttgtctctagataaaatcttatttcttcatacattgg

SEQ ID NO: 779009 - DNA, 120 bp, Artificial Sequence
  ENSG00000248905_81 (sequence is synthesized)
accacaaggcataaagaaggtagctcagcgccactgagattgtgttctgcataatatttggaaggcttccatttccattgaaaacaaatccatgagtgagagggaaagtctagtatcaat

SEQ ID NO: 779010 - DNA, 120 bp, Artificial Sequence
  ENSG00000248905_82 (sequence is synthesized)
tcttctgtttgctcgcaatgacacaaataggttttggggatctacctaagggataggtctactccaaaattattaaatttataattgtgcaattctgtaatttcccaaggcataagtaat

SEQ ID NO: 779011 - DNA, 120 bp, Artificial Sequence
  ENSG00000248905_83 (sequence is synthesized)
atgaccctactgtcagctagatgtcttatcttcaaagagagtatgcattaataaaaagaacttccctttaaagaaccaatctaaaatactaaaaaggcagaaacttttaaaattagaaat

SEQ ID NO: 779012 - DNA, 120 bp, Artificial Sequence
  ENSG00000248905_84 (sequence is synthesized)
tggataatttttaagaatctttagagaaaacattggtttatcatagtctttttctttcattgagttttcatttagactagcatggcaagcagggtggccttggactttgatttaggggat

SEQ ID NO: 779013 - DNA, 120 bp, Artificial Sequence
  ENSG00000248905_85 (sequence is synthesized)
cgtgctttggcctggaaaataagcactggcctgcatgcctagaacctgagtgaaggcagtcaacatcctagtatgaatcagacctagcagaaatgtaaattatttcaagtacttcagggt

SEQ ID NO: 779014 - DNA, 120 bp, Artificial Sequence
  ENSG00000248905_86 (sequence is synthesized)
ttagttttcttagtgacaccctggaccctggatgctgctttctaaagtgcacctgatccatgcagttttatgtcttcatataactggtatcttgtgagtttgcaagcaatgggatgagca

SEQ ID NO: 779015 - DNA, 120 bp, Artificial Sequence
  ENSG00000248905_87 (sequence is synthesized)
agaaaaaaaggacgcatggaggagaaaaatttgaacgaggctagtgcaatgttttgctgatagattacattgttagggagctggtgattttttgccatggtcgtatcgtggacagctttt

SEQ ID NO: 779016 - DNA, 120 bp, Artificial Sequence
  ENSG00000248905_88 (sequence is synthesized)
ccgtggaaattcaaggcatctgtattaggcaaatgtgagtgcccttgatcttgtattgatcagtgccaatgtactgggaaagcaggtaccccagtgaaactggtctgtgcttggtttaac

SEQ ID NO: 779017 - DNA, 120 bp, Artificial Sequence
  ENSG00000248905_89 (sequence is synthesized)
agctccaacaatttcagatccatggggctgcttgaccatagaccctgtttactccatgcctgttcaaaagtcattttgacttctagctttgtttcactttcttctttcaatacttctgtt

SEQ ID NO: 779018 - DNA, 120 bp, Artificial Sequence
  ENSG00000248905_90 (sequence is synthesized)
tcctcgtccttttccttcatattccatggctatttctttcctactttacagtttcccccagacccagattttttcacacctctgcatcatagacaactgagtagctcccttggcccctcc

SEQ ID NO: 779019 - DNA, 120 bp, Artificial Sequence
  ENSG00000248905_91 (sequence is synthesized)
tccatcctctcacaccctgtgctccgttcctcagccgtttggacagggagctccgctgtcaccaaggagcccatgtgagacacactgctgtgactgcctcttgttaatgtcagcatcacc

SEQ ID NO: 779020 - DNA, 120 bp, Artificial Sequence
  ENSG00000248905_92 (sequence is synthesized)
tcatcacttaagcaaaaaggaaaatccataaaagagatggaaaatacgtctctttttattttattttaagaagattgggcggggtggggggggggttcttattctaggccttctcaattt

SEQ ID NO: 779021 - DNA, 120 bp, Artificial Sequence
  ENSG00000248905_93 (sequence is synthesized)
ctcatagattttaccttaaactaattaaggccattctcttgataaatttgtacatcagaccgggtcaccagctatgatgcagaacgccagatttttgaatctcaagtaactttctgtggt

SEQ ID NO: 779022 - DNA, 120 bp, Artificial Sequence
  ENSG00000248905_94 (sequence is synthesized)
gctggacaaattgacttaattctgtgcaggcaaacactttgaatcataaggatttttattgccgctccattcttactactattcatgattcaaacatctacccctgttctgaatcaggat

SEQ ID NO: 779023 - DNA, 120 bp, Artificial Sequence
  ENSG00000248905_95 (sequence is synthesized)
gttgacacttcttggttattttcagatgaacagtaactgctacactcttgaaagcacttaaaagtgcaagcatgtcctaaatagccatttaacctggtaaaacataggcttttctgttta

SEQ ID NO: 779024 - DNA, 120 bp, Artificial Sequence
  ENSG00000248905_96 (sequence is synthesized)
attaagtattagaccagtctgtagatataatctgaaaagattgtaggcagtaatgaagacagttggggaaaggagaaggccctttaaagacatgaaaccttacacgctcttgggatattt

SEQ ID NO: 779025 - DNA, 120 bp, Artificial Sequence
  ENSG00000248905_97 (sequence is synthesized)
ttaagcataataagctcattggattcaggtatttttccctttgcatttttaaaaatacgtatttctaatttgtttgcatatttaattttgtcaaagctgagaaatgctcatgagttgaat

SEQ ID NO: 779026 - DNA, 120 bp, Artificial Sequence
  ENSG00000248905_98 (sequence is synthesized)
ttataaatgtcatttgcaaccaaatgaagtatttatttttaaaaagagagtgaaggaaccaacactgatttgtacataataaaaatgtgtgtattatatatatatattttttcctccttg

SEQ ID NO: 779027 - DNA, 120 bp, Artificial Sequence
  ENSG00000248905_99 (sequence is synthesized)
acagtacttggtcacaatatcaagtgtatttttgtacataatatatattgattagaaaaacgtcaattgtctattcaaaaaattctatctctgtgatagattatatttatcctaatctgt

SEQ ID NO: 779028 - DNA, 120 bp, Artificial Sequence
  ENSG00000248905_100 (sequence is synthesized)
tgatacctctgttaatttgttttaagagaattatattttttggaatttacagagaattgcattcatggctttcaattgtaaatatgctaagggtattttaataaatcttggtttcatgtc

SEQ ID NO: 779029 - DNA, 120 bp, Artificial Sequence
  ENSG00000248905_101 (sequence is synthesized)
atggaaggcactcattgtaccctccaattgcataagcccattacggaactctgctacatcagcttctgtcttccaaagggggaagtcagaggattttcatacaagggcactgtaactcta

SEQ ID NO: 779030 - DNA, 120 bp, Artificial Sequence
  ENSG00000248905_102 (sequence is synthesized)
gacagatccaataaaggttttcataactgctaccaagtcagggaggagtcagacatcatcagcctcagccaggagccggacgaacatccaggcgacatatttttcaagcagactcccacg

SEQ ID NO: 779031 - DNA, 120 bp, Artificial Sequence
  ENSG00000248905_103 (sequence is synthesized)
aaagacattctaactgagctgtacaaactcacaacagagagggagagactgctaaccaatctcctgagctcagaccacatcctggggatcacgatggggaaccaggaggggaagctgcaa

SEQ ID NO: 779032 - DNA, 120 bp, Artificial Sequence
  ENSG00000248905_104 (sequence is synthesized)
gagctgtccgtgagcctggcccccgaggatgactgtttccagagtgctggtgactggcagggagagctccccgtgggccctctcaataagaggagcacccacgggaacaaaaagcctcgg

SEQ ID NO: 779033 - DNA, 120 bp, Artificial Sequence
  ENSG00000248905_105 (sequence is synthesized)
aggtctagtggaaggagagagagctttggggcccttccacagaagaggaccaaaagaaaagggcgtggaggccgagaatcagctcctctgatgggcaaggacaagatctgttccagccac

SEQ ID NO: 779034 - DNA, 120 bp, Artificial Sequence
  ENSG00000248905_106 (sequence is synthesized)
tcccttcctctttctagaacaaggcctaacctttgggtactagaggagaaaggaaatctgctcccgaatggggcacttgcctgctccctgcagaggagagagagctgccccccagatatt

SEQ ID NO: 779035 - DNA, 120 bp, Artificial Sequence
  ENSG00000248905_107 (sequence is synthesized)
cccaagacgccagacacagaccttggctttgggagctttgagacggctttcaaggacactgggcttggaagagaagtgctgccccctgactgcagctccacagaggcaggaggggatggc

SEQ ID NO: 779036 - DNA, 120 bp, Artificial Sequence
  ENSG00000248905_108 (sequence is synthesized)
attcggaggccgccgagcgggctggagcatcagcaaacaggtttgtctgaaagtcaccaggaccctgagaagcatccagaggcagaaaaggatgagatggagaagccggctaagcggact

SEQ ID NO: 779037 - DNA, 120 bp, Artificial Sequence
  ENSG00000248905_109 (sequence is synthesized)
tgcaagcagaaacctgtctccaaagtggtggccaaagttcaggacctgtcctcccaggtacaaagagtagttaaaacgcattctaagggtaaggagacgattgccattcgcccagcagcc

SEQ ID NO: 779038 - DNA, 120 bp, Artificial Sequence
  ENSG00000248905_110 (sequence is synthesized)
cacgctgagtttgtacccaaagccgacttgctcaccctcccgggagctgaggctggggctcatggctccaggcggcagggcaaggagcggcaaggggataggtcatcgcagtcgccagcc

SEQ ID NO: 779039 - DNA, 120 bp, Artificial Sequence
  ENSG00000248905_111 (sequence is synthesized)
ggggaaacagcctccatttctagtgtgtcggccagtgccgagggggccgtgaacaaggtccccctgaaggtgatagagagtgagaagttagatgaagcccctgaggggaaaagactgggc

SEQ ID NO: 779040 - DNA, 120 bp, Artificial Sequence
  ENSG00000248905_112 (sequence is synthesized)
ttccctgtccacacgagtgtccctcacactcgcccagaaacgagaaacaagaggagagccgggttgccccttggtggccacaagtccttgtttctggatctgccccacaaagtaggtcct

SEQ ID NO: 779041 - DNA, 120 bp, Artificial Sequence
  ENSG00000248905_113 (sequence is synthesized)
gactcctcacaacccagaggtgataagaagaagccatccccaccagcaccggcagctcttggcaaggtgtttaataattcagcctcgcagtccagcacacacaaacagacgtcacctgtt

SEQ ID NO: 779042 - DNA, 120 bp, Artificial Sequence
  ENSG00000248905_114 (sequence is synthesized)
ccctcgcctctgtctccaaggctccccagccctcagcagcatcacaggatcctccggctccctgcattgcctggtgagagggaagctgctcttaatgactctccttgtagaaagagccgt

SEQ ID NO: 779043 - DNA, 120 bp, Artificial Sequence
  ENSG00000248905_115 (sequence is synthesized)
gtcttctctgggtgcgtctctgctgacaccttggagccaccatcctctgcaaaggtcacggagaccaaaggagccagcccggccttcctcagagcaggccaacctcggttggtgcctggg

SEQ ID NO: 779044 - DNA, 120 bp, Artificial Sequence
  ENSG00000248905_116 (sequence is synthesized)
gaaactttggaaaagagcttggggccagggaagaccacagctgagccccagcaccagtcacctccaggtatctcctctgagggctttccctgggacggcttcaatgagcagacacctaaa

SEQ ID NO: 779045 - DNA, 120 bp, Artificial Sequence
  ENSG00000248905_117 (sequence is synthesized)
gaccttcccaacagagatggaggcgcgtgggttctgggctacagagcgggaccagcctgtccatttttgcttcatgaggaaagggagaagtcaaacaggagcgaattgtacttggatctc

SEQ ID NO: 779046 - DNA, 120 bp, Artificial Sequence
  ENSG00000248905_118 (sequence is synthesized)
ctcattgctggagatgactgtcagctgctttctctgcatagccaccatcacatgcctcaccactggagcctgggaagcctgaccacaaaccggcatctccaaggcatgaataattaggta

SEQ ID NO: 779047 - DNA, 87 bp, Artificial Sequence
  ENSG00000248905_119 (sequence is synthesized)
ggaggtcggcgcagctgcccctttgggctttggctctggactggagcgcagcatccttcgaggctgcagccgccacggctgttgccg

SEQ ID NO: 779048 - DNA, 120 bp, Artificial Sequence
  ENSG00000248905_120 (sequence is synthesized)
ctgggactcgggaccagcctcccgagtattggtcagatgacatttaccatcaccgttttcttcttctttcatcatcatcatcatcaccattgccactaccaccacctccaaggccactac

SEQ ID NO: 779049 - DNA, 120 bp, Artificial Sequence
  ENSG00000248905_121 (sequence is synthesized)
caccacagcatctctgttcctccatcagagctcttcaagttctgtaaaggcagattctctaaaggcatgcctggtggcatcacgtttttcacatctccgcatctggaccctgcccaagcg

SEQ ID NO: 779050 - DNA, 120 bp, Artificial Sequence
  ENSG00000248905_122 (sequence is synthesized)
ccaagtgtgtttgctgtgcggctgacagcctgactcccgggtcctgttgctctctgtcctgtaaattaagagcagatggagtggataaactgagagcgcaggagaaggtaacacaagtca

SEQ ID NO: 779051 - DNA, 120 bp, Artificial Sequence
  ENSG00000248905_123 (sequence is synthesized)
cttttagttctagcttagttgactctcagaatttggggttttatttcattataaaatgtaatgctgaagggtttctttttggttttgctgttaaagtgaacctttgcacacttattgtta

SEQ ID NO: 779052 - DNA, 120 bp, Artificial Sequence
  ENSG00000248905_124 (sequence is synthesized)
acgagcctctgaaagatgaaagatgaatgcagtggaatgaatgaaagggggaatgtgtgtgaagtaggagaaccttgggggacctgatggagaaggtagattgcaaatccctcaggaagc

SEQ ID NO: 779053 - DNA, 120 bp, Artificial Sequence
  ENSG00000248905_125 (sequence is synthesized)
cggtggttggtcctcatacaattttgtgagctggcagtgttgctagaagaggcagagtatggttctctagagctgtaatctgatttgttgtttgtcttcgagtaatgcttttgagataaa

SEQ ID NO: 779054 - DNA, 120 bp, Artificial Sequence
  ENSG00000248905_126 (sequence is synthesized)
ggaaccttgtgcagagtgaatgtacagataccgtatcagttactcgttcacttttgtgagacaaagctttatttaatgcatggccaactttaaagcaacctaactctctggaaacctgcc

SEQ ID NO: 779055 - DNA, 120 bp, Artificial Sequence
  ENSG00000248905_127 (sequence is synthesized)
atgtttaccacaggctccccaccctttggcaccatgggtgcctgctaccactgtagcccaagatatggacagtccatttcagttcccaggatttggaagtgccggcacaggaggtcggta

SEQ ID NO: 779056 - DNA, 120 bp, Artificial Sequence
  ENSG00000248905_128 (sequence is synthesized)
aacgattgccacactcacatcagacggatcccacgtgaagcagagcgcagtccctttgtttcctcgttagcatcacccggctcccatatttgtagagctgtaataaaaacaacttcttaa

SEQ ID NO: 779057 - DNA, 120 bp, Artificial Sequence
  ENSG00000248905_129 (sequence is synthesized)
cagtcataagaactgtaagcatctcctgtgcttctaaccttataaaagaagaagctggaaaagggaaggagagtagaagtgggtaagagctttttttgatatgggtaacttctctactgt

SEQ ID NO: 779058 - DNA, 120 bp, Artificial Sequence
  ENSG00000248905_130 (sequence is synthesized)
ggagacttcctatagggcctccagccattacctcctattggccctactttgaaaggcatgagggagggagttccccagatagtacctttgatttgtatcctctgtctagttcccttttct

SEQ ID NO: 779059 - DNA, 120 bp, Artificial Sequence
  ENSG00000248905_131 (sequence is synthesized)
ctcttgattttccctttcctgtcgctgtgagtcctctttatattctgaacccttcagtgactccctgcagctgggaagcccatacagggagaagtttcctgcttccagctacctttgtct

SEQ ID NO: 779060 - DNA, 120 bp, Artificial Sequence
  ENSG00000248905_132 (sequence is synthesized)
ttcacttcatttctcttcccacctaaacccagaagagggctcagagagttgccagcagtccagaaagaggggtgaataattcatttaccatcacactacagtgtccctttatctgaaccc

SEQ ID NO: 779061 - DNA, 120 bp, Artificial Sequence
  ENSG00000248905_133 (sequence is synthesized)
aactcccacctttctcccaggttagctattaaccagattaagtttatggtctgtggacatttatttcctgtggaaataacatctaggtatttttattgaagtgatgtcattaagattatt

SEQ ID NO: 779062 - DNA, 120 bp, Artificial Sequence
  ENSG00000248905_134 (sequence is synthesized)
gaaagctctcattaactgcttaagaaagagattaagtctggcaaaagtaatcagatctgtttccagttggaagactcttcaatgttagaggcaagtagtaattcccaggaaccagtgaaa

SEQ ID NO: 779063 - DNA, 120 bp, Artificial Sequence
  ENSG00000248905_135 (sequence is synthesized)
cccgcttatccttgttacaagactaagcagttaaagctgacattaccattcatgcaggatgtagcataaggatgtcacagaggccagcgatgcaccttctgttgggtttgtaatttctta

SEQ ID NO: 779064 - DNA, 120 bp, Artificial Sequence
  ENSG00000248905_136 (sequence is synthesized)
acttctcatttcaaggatgatgcatgggaatctccattatcaccacatagtggtgataaaatagagaatatactaacaagaactggtagtcaggtttttcttctcctgcctcctcccacc

SEQ ID NO: 779065 - DNA, 120 bp, Artificial Sequence
  ENSG00000248905_137 (sequence is synthesized)
accaacctggagattggttttatagtattttatttggcgggtggagactgatgtggaatgttcccaagcctttgtggagtatggtcttcccccaaaccttgaggaactctagttgtgcta

SEQ ID NO: 779066 - DNA, 120 bp, Artificial Sequence
  ENSG00000248905_138 (sequence is synthesized)
gcctgcaaagcagtgtccttggagcttggtgctaggattcctttctgttttgcttgctttcatttacctttgattcaaagtaaacccttttagtgccagaagaatcacagggagcttggc

SEQ ID NO: 779067 - DNA, 120 bp, Artificial Sequence
  ENSG00000248905_139 (sequence is synthesized)
tcaccatacttgggaaatgcccaatctttagtatgctcttgagtaatcctgtggttgttttcctttgactgaagtcactgatgtggtgatggaagcatatgctccaggcatagttcttcc

SEQ ID NO: 779068 - DNA, 120 bp, Artificial Sequence
  ENSG00000248905_140 (sequence is synthesized)
tgatattgagaactgagaatctcttgatcaattcttgtgcccatgaaaatatgtaattaatgtcaacttattaagagttaagaggcatacatgaaataaattttatttacatgtgtaaac

SEQ ID NO: 779069 - DNA, 120 bp, Artificial Sequence
  ENSG00000248905_141 (sequence is synthesized)
ccctaatactactgtcaaagctttgattgtctctgtggatatacattatgggaagtaaatataaactcttcccatattaatattaaggtttgatgcaattccaataaaattgtaaagaag

SEQ ID NO: 779070 - DNA, 120 bp, Artificial Sequence
  ENSG00000248905_142 (sequence is synthesized)
agcttctaagcaactgttaattctgttggtaccaagcctcccgacagcctattgagtacacagtcgatatttgttactgaatgaacatgggtgcatttggagttcagctccgtaataact

SEQ ID NO: 779071 - DNA, 120 bp, Artificial Sequence
  ENSG00000248905_143 (sequence is synthesized)
acctttaattttaaaaaacgtattccagattgttccatttatctctatcctccccttaacaacatttatattagagcatgcatttttttgtttgctttcttttcactttcgaataaagag

SEQ ID NO: 779072 - DNA, 120 bp, Artificial Sequence
  ENSG00000248905_144 (sequence is synthesized)
aaaatacactcaaaccttagatcatcttgggacacctcaccatgtttgaggagtacagagacacagagacggtgaccccttggtgcaggggaagggcaagcaagtcacattgcatctctg

SEQ ID NO: 779073 - DNA, 120 bp, Artificial Sequence
  ENSG00000248905_145 (sequence is synthesized)
tccctggtccgtgtgtagtaaggtgcgcagcctcggctgcttctgggcatagactccacagatttttcacagttgccctggaacacatcatcgcacaaaccggaaggagggcactgtgac

SEQ ID NO: 779074 - DNA, 120 bp, Artificial Sequence
  ENSG00000248905_146 (sequence is synthesized)
tgtaaaatgacaccaaagcattagaggatgggtatgtaagatattaagaattgcatgtgtgtgtatatatccatgaaacctctctgccttcttcctgatatttggagattacctatacgt

SEQ ID NO: 779075 - DNA, 120 bp, Artificial Sequence
  ENSG00000248905_147 (sequence is synthesized)
ggcttatatttgttgtttttattaggtgtatgtgtgcattgaggtctatctatctatctggttatagaaaaataacttctttccattcctgttcattgatagacatgaacagatcaaagt

SEQ ID NO: 779076 - DNA, 120 bp, Artificial Sequence
  ENSG00000248905_148 (sequence is synthesized)
tgggtggttcagtaggtttttccataatatcaaattactccagtgattgagaacacactggcagttgaatcttgagatgatttctagctttcatttacacagtttctgcagggcattggt

SEQ ID NO: 779077 - DNA, 120 bp, Artificial Sequence
  ENSG00000248905_149 (sequence is synthesized)
tacttcatagcattttctttctgtggtgtttgacttacaggatgaaaactcatatccttaatgaaaatatgtatagcaatttaagtcttctttcccacatttgattttccaaaaatcata

SEQ ID NO: 779078 - DNA, 120 bp, Artificial Sequence
  ENSG00000248905_150 (sequence is synthesized)
attgtgtaagaatgaacagcataagggtggaaaatgattgtttcatctgagcagagcaattcagacacagcagtaaagaaagcataaggatgttctaggtaattgaagcatagaagtagc

SEQ ID NO: 779079 - DNA, 120 bp, Artificial Sequence
  ENSG00000248905_151 (sequence is synthesized)
atagggctaaacttctgtttaacccaaacttgaatggaaaatttcctaaaccacattagatcacttttttccttttgctttgtttagtccaaacgcacttaactttattttctctagggt

SEQ ID NO: 779080 - DNA, 120 bp, Artificial Sequence
  ENSG00000248905_152 (sequence is synthesized)
aattacatatatgactgtatcaatgagggtcgtactaatcaggaatcaggtggcactcaaatggagtgatttgaggagagtttattagagacctttcacagaggtacagacggggtttag

SEQ ID NO: 779081 - DNA, 120 bp, Artificial Sequence
  ENSG00000248905_153 (sequence is synthesized)
aaaaagcagtaagagagcgctactctggggccagtaccaaggagaagcttttaccacacccaagcctgaaggggcaagagtagaagtcgctatcgaaaactagaacttaagagggaggct

SEQ ID NO: 779082 - DNA, 120 bp, Artificial Sequence
  ENSG00000248905_154 (sequence is synthesized)
gagtggtgtggaggcagctgctgggcaggacccgcagccctcagcagggaggtgccgccggtccatagtgacatgccaggctgggaactgagggcacacaacctgatctcttctcatccc

SEQ ID NO: 779083 - DNA, 120 bp, Artificial Sequence
  ENSG00000248905_155 (sequence is synthesized)
actctctggtccctcatcgtcattcccattggccaaacccaaagagaagtcagcagactgggagccacttgaggctatcatttcaggcctgtcaccggggcccagaaagggcacagacct

SEQ ID NO: 779084 - DNA, 120 bp, Artificial Sequence
  ENSG00000248905_156 (sequence is synthesized)
ggagaagcacgtagaagatcccctgcacagttatggtaccaccatgggcgcccagcaggccctgggcagagagacttctaaagccctcctggagaagaatctgcacagacatgctggtgt

SEQ ID NO: 779085 - DNA, 120 bp, Artificial Sequence
  ENSG00000248905_157 (sequence is synthesized)
tgtcataccacacgacacgggagtttagtacaagggcacaaagacaagcttctgttattatcatcctgtgggagggttatattttctagtataatcagttcatagaaaatatacagctat

SEQ ID NO: 779086 - DNA, 120 bp, Artificial Sequence
  ENSG00000248905_158 (sequence is synthesized)
tattcgaggcttgctctgtagaaaactacttcattttaatgtgagggatttgtttactgatctcagaaaatctctcataaggttttaaatgttccccaaataaagtaaaatttgaagata

SEQ ID NO: 779087 - DNA, 120 bp, Artificial Sequence
  ENSG00000248905_159 (sequence is synthesized)
tccagaaaaatcatgaagcaaaagaaactttctatgattctatttcagagaaactgttgtcacttttgaaactaggcctatgaatttaatgtggaaaaataaaaatagaatttgaatcat

SEQ ID NO: 779088 - DNA, 120 bp, Artificial Sequence
  ENSG00000248905_160 (sequence is synthesized)
gtgcagccagctaaatcacaacaccgtcattcctgtgacctgttgcatgcagcaggatgaccctgctgccgggaaaagcagcgctgagatttgtgctgttggatacagtgtgtctcaccc

SEQ ID NO: 779089 - DNA, 120 bp, Artificial Sequence
  ENSG00000248905_161 (sequence is synthesized)
ccctcccccaccccaagagactcccctttctttttctagcaacttgttaattcctcctagactaaacaatttgaccaaaagggtaactgaggaaggaagaaggcattgttctgtttaagg

SEQ ID NO: 779090 - DNA, 120 bp, Artificial Sequence
  ENSG00000249115_0 (sequence is synthesized)
agaggcgggcgccacacttgaagaggctgagggaggcggtgtcgccgccgcggcgctgtcatggagctagcgcaggaagcgcgggaactgggttgctgggcggtcgaagagatgggggtg

SEQ ID NO: 779091 - DNA, 120 bp, Artificial Sequence
  ENSG00000249115_1 (sequence is synthesized)
cccgtggcggcccgggccccggaatcgacgctgcgcaggctgtgtctgggccagggggctgacatctgggcctacatcttgcagcatgtgcacagtcagaggactgtcaagaagatccgg

SEQ ID NO: 779092 - DNA, 120 bp, Artificial Sequence
  ENSG00000249115_2 (sequence is synthesized)
ggaaacctactctggtatggccaccaggacagtccacaggtccgtcggaagttagagctggaagctgctgtgacccgcctgcgggcagaaatccaggaactcgaccagagcctggagctg

SEQ ID NO: 779093 - DNA, 120 bp, Artificial Sequence
  ENSG00000249115_3 (sequence is synthesized)
atggagcgagacactgaggctcaggacacggccatggagcaggcacgtcagcacactcaagacacccagcgtcgagctctcctcctccgggcccaagctggggccatgcgaagacagcag

SEQ ID NO: 779094 - DNA, 120 bp, Artificial Sequence
  ENSG00000249115_4 (sequence is synthesized)
catacgctccgagatcccatgcagcggctgcagaatcaactgaggcgcctgcaggacatggagaggaaagccaaagtagatgtgacctttggatccctcacgtcggcagctctgggcctg

SEQ ID NO: 779095 - DNA, 120 bp, Artificial Sequence
  ENSG00000249115_5 (sequence is synthesized)
gagcccgtggtcctgcgtgatgtccgaacagcctgcaccctccgggcccagttcctgcagaacctcctgcttccccaggccaagaggggcagcctcccaacccctcatgatgaccacttt

SEQ ID NO: 779096 - DNA, 120 bp, Artificial Sequence
  ENSG00000249115_6 (sequence is synthesized)
ggcacttcgtaccagcagtggctgagctcagtggagacgctgctgacaaaccaccccccaggccacgtcctggctgccttggagcacctggctgcagagcgggaggcagagattcggtcc

SEQ ID NO: 779097 - DNA, 120 bp, Artificial Sequence
  ENSG00000249115_7 (sequence is synthesized)
ctgtgcagtggggatgggcttggcgacacagagatatccagaccccaggccccggaccagtcagactccagccagaccctgccgtccatggttcatctcatccaggagggctggcggact

SEQ ID NO: 779098 - DNA, 120 bp, Artificial Sequence
  ENSG00000249115_8 (sequence is synthesized)
gtgggtgtgctggtctcccagcggagcaccctcctgaaggagcggcaagtcttgacccagcgcctccagggcctggtggaggaggtggagagacgcgtcctgggatccagtgagaggcag

SEQ ID NO: 779099 - DNA, 120 bp, Artificial Sequence
  ENSG00000249115_9 (sequence is synthesized)
gtgctgatactggggcttcggcgctgttgcctgtggacggagctcaaggccctgcacgatcagagccaggagctgcaggatgcagctgggcatcggcagctcctgctgagggagctacag

SEQ ID NO: 779100 - DNA, 120 bp, Artificial Sequence
  ENSG00000249115_10 (sequence is synthesized)
gccaaacagcagcggatcctgcactggcgccagctggtggaggagacccaggaacaggtccgcctgctcatcaagggaaactcggccagcaagacccgcctgtgccggagcccgggggag

SEQ ID NO: 779101 - DNA, 120 bp, Artificial Sequence
  ENSG00000249115_11 (sequence is synthesized)
gtgctagctctggtccagcgaaaggtggtccctacatttgaggcagtggcaccacagagccgggagctgctgcgctgtctggaggaggaagtccggcatttgccccacattctgttgggc

SEQ ID NO: 779102 - DNA, 120 bp, Artificial Sequence
  ENSG00000249115_12 (sequence is synthesized)
acgctgctgcggcacaggccgggagagttgaagcccctgcccacggtcctcccatccatccaccagctgcaccccgcgtccccaaggggctccagcttcatagcgctgagccacaagctg

SEQ ID NO: 779103 - DNA, 120 bp, Artificial Sequence
  ENSG00000249115_13 (sequence is synthesized)
gggctgcctccagggaaggcctcggagctgctcctgccggcggctgcctctcttcgccaggaccttctgctcctgcaggaccagcggagcctctggtgctgggatctactccacatgaag

SEQ ID NO: 779104 - DNA, 120 bp, Artificial Sequence
  ENSG00000249115_14 (sequence is synthesized)
accagcctgccgccaggccttcccacccaggagctgctgcagatccaggcatcccaggaaaaacagcagaaagagaacctggggcaggctctgaagaggctggagaagctactgaaacag

SEQ ID NO: 779105 - DNA, 120 bp, Artificial Sequence
  ENSG00000249115_15 (sequence is synthesized)
gcactggagcgaatccctgagctgcaggggatcgtgggggactggtgggagcagccaggccaggccgccctctctgaggagctctgccagggcctgtccctgccccagtggcggctgcgc

SEQ ID NO: 779106 - DNA, 120 bp, Artificial Sequence
  ENSG00000249115_16 (sequence is synthesized)
tgggttcaggcccagggggccctgcagaagctgtgcagctgaagagagggttcaaacggaagccgagaacttgacactgttcaccccaacacctcacctcccccaggacatttggaagaa

SEQ ID NO: 779107 - DNA, 120 bp, Artificial Sequence
  ENSG00000249115_17 (sequence is synthesized)
agcagcgccaggattcctcggcagtcgtccccacccgcacctgcagtcccctcatgtgctgttctgctgccccactcagctcctggaccctgtcctttcatcccgctaaagcacccccta

SEQ ID NO: 779108 - DNA, 120 bp, Artificial Sequence
  ENSG00000249115_18 (sequence is synthesized)
cccttcatcactttcattctcagcaaaaagtaattgagcacctcctctaggcgctggggagtccacactgaacaaaagaaacagaaaaccctgtcttccagcagttgagttctagggcag

SEQ ID NO: 779109 - DNA, 120 bp, Artificial Sequence
  ENSG00000249115_19 (sequence is synthesized)
ggagacagagtttacaagataaggaaaatatatatgtagtatgctgcaagttaactgctgtgtgggaaatccagcagggggtgggatgtgtgatttgaattgagggccacactgcccagg

SEQ ID NO: 779110 - DNA, 120 bp, Artificial Sequence
  ENSG00000249115_20 (sequence is synthesized)
tcgtgctccgtcaaggggtgagcaggagcaacaggggtggctgagtaagggcttgcagctggaggcaacagcacatgcaaaggccctgagccaggatgtgctgcaataagggccactgag

SEQ ID NO: 779111 - DNA, 120 bp, Artificial Sequence
  ENSG00000249115_21 (sequence is synthesized)
ggggacagtgtaggttgggggtgaggaatgtattaaaagatgagattgccttctagtttgtatagtttctttttttacatgtaaatcagccatttggaatttatcctagcacatggatcc

SEQ ID NO: 779112 - DNA, 120 bp, Artificial Sequence
  ENSG00000249115_22 (sequence is synthesized)
aattttgtcttattttacatatatcctagtagcacttactgaaattcccagtcagagtggcagttgcctctgagggaaggtgggtggcagggatcaactgaggaggagacacagaaatgt

SEQ ID NO: 779113 - DNA, 120 bp, Artificial Sequence
  ENSG00000249115_23 (sequence is synthesized)
cctagctgatgggaatgtgctgtgtcaagagcagcggcggtgacgcaggtgtagagatttgtcagagctcatgtagttgtagtcttaaggcctgtgcatttcactgcgtgggttactcaa

SEQ ID NO: 779114 - DNA, 120 bp, Artificial Sequence
  ENSG00000249115_24 (sequence is synthesized)
tttataaagcaaagcccttacacttttgagatgccacctttttatgcactaaatttccatgtttaattgggttatatctggcttctctccagacctgctttgtatttaactctccatgtg

SEQ ID NO: 779115 - DNA, 89 bp, Artificial Sequence
  ENSG00000249115_25 (sequence is synthesized)
gcttctctccagacctgctttgtatttaactctccatgtgtcattcctacagtagcttaatagaaaggcttgtgacacattgtcatatc

SEQ ID NO: 779116 - DNA, 120 bp, Artificial Sequence
  ENSG00000249115_26 (sequence is synthesized)
tccgcctcccaggttcaagccattctcatgcctcagcttccccagtagctaggattacaggtacgcaccaccacgcccagctcatttttgtacttttagtagggacggggtttcatcatg

SEQ ID NO: 779117 - DNA, 82 bp, Artificial Sequence
  ENSG00000249115_27 (sequence is synthesized)
caggcatgagccaccgcgcctgaccacattgccatatctgaaatggctggattctcttaggtgcatctggctgtttcccagg

SEQ ID NO: 779118 - DNA, 73 bp, Artificial Sequence
  ENSG00000249115_28 (sequence is synthesized)
caattctcatctggctaatatttgtattttttgtagagtcggagctttaccatgttggtcaggctgctctcca

SEQ ID NO: 779119 - DNA, 120 bp, Artificial Sequence
  ENSG00000249115_29 (sequence is synthesized)
tagagtcggagctttaccatgttggtcaggctgctctccaactcctggcctcaagtgattctatcgcctctgcctcccaaatcttcacctgctgggattagtttcccctgtctcagtaaa

SEQ ID NO: 779120 - DNA, 120 bp, Artificial Sequence
  ENSG00000249115_30 (sequence is synthesized)
ttttttttcccaaactaagtgaacattagatttaatttggctggccccagaagaaaaacatgcacagatggtagttttactggtgttgcagtaagttttcaaatttggaagtttggcagc

SEQ ID NO: 779121 - DNA, 120 bp, Artificial Sequence
  ENSG00000249115_31 (sequence is synthesized)
tttatgatcttgaaccttgctgtccatctctcacacaactcctctcttggcctccagagtccctttactctcccagctttcctcctgcccctggctgctgtttcccagcctttccacatt

SEQ ID NO: 779122 - DNA, 120 bp, Artificial Sequence
  ENSG00000249115_32 (sequence is synthesized)
ggctttcccatgtagtccttagtgtgtctgctcctcctctctctcctcatcacagttcccagcccccaccttcaactgaactcaacaaaatcttcaacttcatacagtagtcacattgtt

SEQ ID NO: 779123 - DNA, 120 bp, Artificial Sequence
  ENSG00000249115_33 (sequence is synthesized)
agtaataacactggcatttttattttgataaaatagaccgtttaaatttttgagattctaccttatattttttgaattatatactaaagcaaataagtagtgatgtaatgtcattgggga

SEQ ID NO: 779124 - DNA, 120 bp, Artificial Sequence
  ENSG00000249115_34 (sequence is synthesized)
ccaagatttttagtgtaaatgaaaaaagataacaaatataaactcaagtaaacaccctgtagtctttcacatgaattggaaatatcagaataaagtcatgatttttctctttctaaaaaa

SEQ ID NO: 779125 - DNA, 120 bp, Artificial Sequence
  ENSG00000249115_35 (sequence is synthesized)
taactgcttcttaaagctatcccctcctgtcttccccactcccatttagccctgtccccaccacagcatcacacctattgccctcccccctagaagccccactcatccgctgactctggc

SEQ ID NO: 779126 - DNA, 120 bp, Artificial Sequence
  ENSG00000249115_36 (sequence is synthesized)
ctcgttttcctaggtatggccaccaggacagtccacaggtgagaagcatatgctacaagattctctttcatccgaaaaatgacttgtagatcttctgctctaagcccaaccaggtgctgg

SEQ ID NO: 779127 - DNA, 120 bp, Artificial Sequence
  ENSG00000249115_37 (sequence is synthesized)
cgggagagtgagactggggctgccccacccctgccctgcatcccctgccatgggtgactgtcactccctgaacctcctcaaaaaagataaccccagacccccagtgttcccaggctgcca

SEQ ID NO: 779128 - DNA, 120 bp, Artificial Sequence
  ENSG00000249115_38 (sequence is synthesized)
gacctcacccttgggtcagcagccctggtcttggcatcctagtccccagacccaccttgaagttcctgggcccccagagcctccagaacccaaggcctcctctcagtccccacccaaccc

SEQ ID NO: 779129 - DNA, 120 bp, Artificial Sequence
  ENSG00000249115_39 (sequence is synthesized)
acagtccacaggtgagaagcatatgctacaagattctctttcatccgaaaaatgacttgtagatcttctgctctaagcccaaccaggtgctgggtgatgctggggacaatgggtcacaag

SEQ ID NO: 779130 - DNA, 120 bp, Artificial Sequence
  ENSG00000249156_0 (sequence is synthesized)
agcaggcagaacaaacaagtgggcctggggctcacaaccctaaggcattgaattctgccaccaacacgaatgagattgaagacagacccttctcacgtgaaggtaatgaccacacagcca

SEQ ID NO: 779131 - DNA, 120 bp, Artificial Sequence
  ENSG00000249156_1 (sequence is synthesized)
agcaggaggcagtcacttggcctagcagtacttctgacctgtgagctggtgtttgttttaaatatccaaaattggtgagaatttattctgcattgatctaaaactaatatactctccatc

SEQ ID NO: 779132 - DNA, 120 bp, Artificial Sequence
  ENSG00000249156_2 (sequence is synthesized)
tgcattgatctaaaactaatatactctccatccacaagtttcttcacattgtggaagtgagaacattcagtgtgtgtgtttgcatgtgggaaggggaggcagggggctgtgtccagttat

SEQ ID NO: 779133 - DNA, 120 bp, Artificial Sequence
  ENSG00000249156_3 (sequence is synthesized)
ccagttatggttaaactggcacagcagaaacacagcagctcaactctttgaaaggttctcattgcagatccataatcgaaccaccccagccagaacttctgcctgtacagctgctgtcac

SEQ ID NO: 779134 - DNA, 120 bp, Artificial Sequence
  ENSG00000249156_4 (sequence is synthesized)
tcacccatggagacaggcaggcaaagaggtgcgtctgctgagatgttcgccatgccccaaggtctgaagggcagcaacaaggatggaatccctgaggacctagatgggaacttggaagaa

SEQ ID NO: 779135 - DNA, 120 bp, Artificial Sequence
  ENSG00000249156_5 (sequence is synthesized)
gtcatggacctcacagaaggtgacaatgaagcatcagcctcagctcctcctgcagccaaaagacagaaaacagataccaaggggaagaaggagaggaagcccaccgtggatgcagaggag

SEQ ID NO: 779136 - DNA, 120 bp, Artificial Sequence
  ENSG00000249156_6 (sequence is synthesized)
aagaaggagaggaagcccaccgtggatgcagaggaggctcagatgacaaccctgctgtatgccatgtctgaggagcagctatcccgctacgaagtgtgtcgccggtcagctttcccaaaa

SEQ ID NO: 779137 - DNA, 120 bp, Artificial Sequence
  ENSG00000249156_7 (sequence is synthesized)
gcacgcattgcagctctgatgcagtctatcactggcagatcggtgtctgagaacaccgccattgccatggctggaatagctaaggtcttggttggagaggtggtggaagaggccctggac

SEQ ID NO: 779138 - DNA, 120 bp, Artificial Sequence
  ENSG00000249156_8 (sequence is synthesized)
gtcttggttggagaggtggtggaagaggccctggacgtgtgcgagatgtggggagaaacgcccccgctgcagcccaagcatttaagggaggccgttcgcaggttaaagcccaagggcctc

SEQ ID NO: 779139 - DNA, 120 bp, Artificial Sequence
  ENSG00000249158_0 (sequence is synthesized)
ttttcctttgtggattcttttttaaaactaccaagtttgagaatatgaatatatttgtttttcatattgttctgcaatgaatataaagtcacttataatcagaaagcaattaaatgtaaa

SEQ ID NO: 779140 - DNA, 120 bp, Artificial Sequence
  ENSG00000249158_1 (sequence is synthesized)
taacagtaaagaatgagaactatagaaaatagatatgaaaatgcaagcccacagagatgagaatagatcatgtggaacataaacactaaagagctgcttttataaaacttcaattttttc

SEQ ID NO: 779141 - DNA, 120 bp, Artificial Sequence
  ENSG00000249158_2 (sequence is synthesized)
tttgagttccctagcagccaaagtaacaagggagactgaaagtaaaacaattcaaatttgatagtatttttatatgaggaacaacactttcaggaaatgtttaaccctagtttttcatga

SEQ ID NO: 779142 - DNA, 120 bp, Artificial Sequence
  ENSG00000249158_3 (sequence is synthesized)
ggccaccttaacaactgaattctctttctctctcactctgtgtataagtattttagataagtaaaagaacaatgttataatgttaagtcaaacatagacacaataatttaaatttgatgt

SEQ ID NO: 779143 - DNA, 120 bp, Artificial Sequence
  ENSG00000249158_4 (sequence is synthesized)
taatcgagaaatacaatgccatttccatatatatttagtttcaatatgacttataatctgaatattccataaataagcacgttggaaatatttgggggaagaaacccaaaacacgtgaaa

SEQ ID NO: 779144 - DNA, 120 bp, Artificial Sequence
  ENSG00000249158_5 (sequence is synthesized)
ttctgtggtggtaaatgcagtgcacagtactcacagttttaggcgcaaggtgtcgctctttacttggtggaaagttcatttaaaggttggtctgaacagtgaggcactcccatacaaagg

SEQ ID NO: 779145 - DNA, 120 bp, Artificial Sequence
  ENSG00000249158_6 (sequence is synthesized)
aactccatcataccggatgccaccgtttaaggatcctttgaaacttcttaagaattcaacgagatttttaacctgaaactgaagaatctggtactgtaagtgtaaagaagcttattttgg

SEQ ID NO: 779146 - DNA, 120 bp, Artificial Sequence
  ENSG00000249158_7 (sequence is synthesized)
aagccaatttcgtatgcgatgtttggttttcagagaaggggattgggcaccccacgactacagctctggcttctcctcctcgaattctgggaggtggggagcggccagctccactactcc

SEQ ID NO: 779147 - DNA, 120 bp, Artificial Sequence
  ENSG00000249158_8 (sequence is synthesized)
gtctcggaggaggccaaacacggcaccttcgtgggccgcatcgcgcaggacctggggctggagctggcggagctggtgcagcgcctgttccgggtggcgtccaaaacacatggggacctt

SEQ ID NO: 779148 - DNA, 120 bp, Artificial Sequence
  ENSG00000249158_9 (sequence is synthesized)
attttgtttgtgaattctcggatcgaccgcgaggagctgtgcgggcagagcgcggagtgcagcatccacctggaggtgatcgtggacaggccgctgcaggttttccatgtgaacgtggag

SEQ ID NO: 779149 - DNA, 120 bp, Artificial Sequence
  ENSG00000249158_10 (sequence is synthesized)
caggttttccatgtgaacgtggaggtgaaggacattaacgacaacccgccggtgttctcgctcagagaacaaaagctgctgattgcggaatctaagcaatcggactcgcgttttccacta

SEQ ID NO: 779150 - DNA, 120 bp, Artificial Sequence
  ENSG00000249158_11 (sequence is synthesized)
gagggagcttctgatgctgacattgaagagaatgctctattgacctacaggctaagtaaaaatgagtatttttctttagattcaccaacaaatggtaagcagattaaaagactgtcactt

SEQ ID NO: 779151 - DNA, 120 bp, Artificial Sequence
  ENSG00000249158_12 (sequence is synthesized)
attttaaagaagtctctggatagagagaaaactccggaacttaatttgctgctaacagctacagacgggggaaaaccagagcttactggcaccgttcggctgttagtccaagtcttggat

SEQ ID NO: 779152 - DNA, 120 bp, Artificial Sequence
  ENSG00000249158_13 (sequence is synthesized)
gtcaacgacaatgatccagagtttgataaatcagaatataaggtgagccttatggaaaatgctgctaaagaaactcttgtgctcaaactaaacgccacagaccgagacgaaggagtcaat

SEQ ID NO: 779153 - DNA, 120 bp, Artificial Sequence
  ENSG00000249158_14 (sequence is synthesized)
ggagaggtaacatactccttaatgtcaattaagcccaatggaagacacttatttacactagatcaaaataatggagaagtgagggtcaatggaactttagattatgaagaaaacaagttt

SEQ ID NO: 779154 - DNA, 120 bp, Artificial Sequence
  ENSG00000249158_15 (sequence is synthesized)
tataaaattgaagtacaggctacagataaggggactcccccaatggcaggtcactgtacagtctgggtggaaatcttggacaccaacgataactctcctgaagtcgccgtgacttccttg

SEQ ID NO: 779155 - DNA, 120 bp, Artificial Sequence
  ENSG00000249158_16 (sequence is synthesized)
tccctcccagtacgagaggacgctcagcccagcacggtcattgccctgatcagcgtgtctgaccgtgactcaggtgtcaacggacaggtgacctgctcgctgacgccccacgttcccttc

SEQ ID NO: 779156 - DNA, 120 bp, Artificial Sequence
  ENSG00000249158_17 (sequence is synthesized)
aagctggtgtccaccttcaagaattactactcgttggtgctggacagcgccctggaccgcgagaacgtgtgggcctatgaactggtggtgactgcgcgggatgggggttcgccttctctg

SEQ ID NO: 779157 - DNA, 120 bp, Artificial Sequence
  ENSG00000249158_18 (sequence is synthesized)
tgggccacggccagggtatccgtggaggtggccgacgtgaacgacaatgcgcctgcgttcgcacagcccgagtacaccgtgttcgtgaaggagaacaacccaccaggctgccacatcttc

SEQ ID NO: 779158 - DNA, 120 bp, Artificial Sequence
  ENSG00000249158_19 (sequence is synthesized)
acagtgtcggcgcgggacgcggacgcgcaggagaacgcgctggtgtcctactcgctggtggagcggcggttgggcgaccgcgcgctgtcgagctacgtgtcggtgcacgcggagagcggc

SEQ ID NO: 779159 - DNA, 120 bp, Artificial Sequence
  ENSG00000249158_20 (sequence is synthesized)
cggcaaggtgtacgcgctgcagccgttggaccacgaggagctggagctgctacagttccaggtgagcgcgcgcgatgcgggcgtgccgcctctgagcagcaacgtgacgctgcaggtgtt

SEQ ID NO: 779160 - DNA, 120 bp, Artificial Sequence
  ENSG00000249158_21 (sequence is synthesized)
ctggacgagaacgacaacgcgccggcactgctggcgactcaggctggcagcgcgggaggcgcagttaacaagctagtaccgcggtcggtgggtgcgggccacgtggtggcgaaggtgcgc

SEQ ID NO: 779161 - DNA, 120 bp, Artificial Sequence
  ENSG00000249158_22 (sequence is synthesized)
gcagtggatgcggactcaggctacaacgcgtggctttcatatgaattgcagccggcggcgggcggctcgcgcatcccgttccgcgtggggctgtacacgggcgagataagcacaacgcgt

SEQ ID NO: 779162 - DNA, 120 bp, Artificial Sequence
  ENSG00000249158_23 (sequence is synthesized)
gccctggacgaggcagactcgccgcgccaccgacttctagtactggtgaaggatcacggtgagccggcgctgacggccacggccaccgtgctggtgtcgttggtggagagcggacaggcg

SEQ ID NO: 779163 - DNA, 120 bp, Artificial Sequence
  ENSG00000249158_24 (sequence is synthesized)
ccaaaggcctcttcccggactttggcgggcgccgcgagcccagaggctgcgctggtggatgtcaacgtgtacctgatcatcgccatctgcgtggtgtccagcctcctggtactcacgctg

SEQ ID NO: 779164 - DNA, 120 bp, Artificial Sequence
  ENSG00000249158_25 (sequence is synthesized)
ggcggcagagggtgtgctctgaggagggcccacctaagacggacctcatggccttcagccccagtcttcctctaggtctgaataaagaggaggaaggggaaagacaggagccagggtcaa

SEQ ID NO: 779165 - DNA, 120 bp, Artificial Sequence
  ENSG00000249158_26 (sequence is synthesized)
atcaccccggacagccacgacagcccaaccctgactggcgttactctgcctccctgagagcaggcatgcacagctctgtgcacctagaggaggctggcattctacgggctggtccaggag

SEQ ID NO: 779166 - DNA, 120 bp, Artificial Sequence; identical to SEQ ID NO: 745812
  ENSG00000249158_27 (sequence is synthesized)

SEQ ID NO: 779167 - DNA, 120 bp, Artificial Sequence; identical to SEQ ID NO: 745813
  ENSG00000249158_28 (sequence is synthesized)

SEQ ID NO: 779168 - DNA, 120 bp, Artificial Sequence; identical to SEQ ID NO: 745814
  ENSG00000249158_29 (sequence is synthesized)

SEQ ID NO: 779169 - DNA, 120 bp, Artificial Sequence; identical to SEQ ID NO: 745815
  ENSG00000249158_30 (sequence is synthesized)

SEQ ID NO: 779170 - DNA, 120 bp, Artificial Sequence; identical to SEQ ID NO: 745816
  ENSG00000249158_31 (sequence is synthesized)

SEQ ID NO: 779171 - DNA, 120 bp, Artificial Sequence; identical to SEQ ID NO: 745817
  ENSG00000249158_32 (sequence is synthesized)

SEQ ID NO: 779172 - DNA, 120 bp, Artificial Sequence; identical to SEQ ID NO: 745818
  ENSG00000249158_33 (sequence is synthesized)

SEQ ID NO: 779173 - DNA, 120 bp, Artificial Sequence; identical to SEQ ID NO: 745819
  ENSG00000249158_34 (sequence is synthesized)

SEQ ID NO: 779174 - DNA, 120 bp, Artificial Sequence; identical to SEQ ID NO: 745820
  ENSG00000249158_35 (sequence is synthesized)

SEQ ID NO: 779175 - DNA, 120 bp, Artificial Sequence; identical to SEQ ID NO: 745821
  ENSG00000249158_36 (sequence is synthesized)

SEQ ID NO: 779176 - DNA, 120 bp, Artificial Sequence; identical to SEQ ID NO: 745822
  ENSG00000249158_37 (sequence is synthesized)

SEQ ID NO: 779177 - DNA, 120 bp, Artificial Sequence; identical to SEQ ID NO: 745823
  ENSG00000249158_38 (sequence is synthesized)

SEQ ID NO: 779178 - DNA, 120 bp, Artificial Sequence; identical to SEQ ID NO: 745824
  ENSG00000249158_39 (sequence is synthesized)

SEQ ID NO: 779179 - DNA, 120 bp, Artificial Sequence; identical to SEQ ID NO: 745825
  ENSG00000249158_40 (sequence is synthesized)

SEQ ID NO: 779180 - DNA, 120 bp, Artificial Sequence; identical to SEQ ID NO: 745826
  ENSG00000249158_41 (sequence is synthesized)

SEQ ID NO: 779181 - DNA, 120 bp, Artificial Sequence; identical to SEQ ID NO: 745827
  ENSG00000249158_42 (sequence is synthesized)

SEQ ID NO: 779182 - DNA, 120 bp, Artificial Sequence; identical to SEQ ID NO: 745828
  ENSG00000249158_43 (sequence is synthesized)

SEQ ID NO: 779183 - DNA, 120 bp, Artificial Sequence; identical to SEQ ID NO: 745829
  ENSG00000249158_44 (sequence is synthesized)

SEQ ID NO: 779184 - DNA, 120 bp, Artificial Sequence; identical to SEQ ID NO: 745830
  ENSG00000249158_45 (sequence is synthesized)

SEQ ID NO: 779185 - DNA, 120 bp, Artificial Sequence; identical to SEQ ID NO: 745831
  ENSG00000249158_46 (sequence is synthesized)

SEQ ID NO: 779186 - DNA, 120 bp, Artificial Sequence; identical to SEQ ID NO: 745832
  ENSG00000249158_47 (sequence is synthesized)

SEQ ID NO: 779187 - DNA, 120 bp, Artificial Sequence; identical to SEQ ID NO: 745833
  ENSG00000249158_48 (sequence is synthesized)

SEQ ID NO: 779188 - DNA, 120 bp, Artificial Sequence; identical to SEQ ID NO: 745834
  ENSG00000249158_49 (sequence is synthesized)

SEQ ID NO: 779189 - DNA, 120 bp, Artificial Sequence
  ENSG00000249158_50 (sequence is synthesized)
atcaccccggacaggtgagttttctacagattccacctatcaggaagtgtatgtgaaattatttaaaatccagttttttttcacggattttttaagggaaagttttatgaataaccagtg

SEQ ID NO: 779190 - DNA, 120 bp, Artificial Sequence
  ENSG00000249222_0 (sequence is synthesized)
taaataaataagtgaaccacgcagggtccttccggggggtgaccttcagctggccattcgggatgatggactttccatcccagaaccatggctccatttgtccgtaaccttgtggagaag

SEQ ID NO: 779191 - DNA, 120 bp, Artificial Sequence
  ENSG00000249222_1 (sequence is synthesized)
tggttcctcccacccctgctgagatccctagagctattcagagcctgaaaaaaatagtcagtagtgctcagactggtagcttcaaacagctcacagttaaggaagctttgctgaacggtt

SEQ ID NO: 779192 - DNA, 120 bp, Artificial Sequence
  ENSG00000249222_2 (sequence is synthesized)
tggtggccactgaggtgtcgacgtggttttatgtcagagagatcacaggcaagcgtggcatcattggctagaatgtttgaagaccagtcttaacatctgattatatttgatttattattt

SEQ ID NO: 779193 - DNA, 120 bp, Artificial Sequence
  ENSG00000249222_3 (sequence is synthesized)
gagtgttgttggaccaggtgtgatcagactgctatctgaataaaataagatttgtcagaaattccaaaaaaaaaaaaaagtgaatcaagcagttccaacccatgttcaagggtcaactgt

SEQ ID NO: 779194 - DNA, 120 bp, Artificial Sequence
  ENSG00000249242_0 (sequence is synthesized)
acccgccgctactgctgccgccgccgccaccgcagcaggtcacagcccctcgaggcgacagcggccccgccgcaccagagcagtggtacaggcatggatgggaagaaatgcagcgtatgg

SEQ ID NO: 779195 - DNA, 120 bp, Artificial Sequence
  ENSG00000249242_1 (sequence is synthesized)
atgttcctacctcttgtatttactttgtttacttcagctggattgtggatagtatacttcatagctgtggaagatgacaaaattttaccattaaattcagctgaaaggaaacctggtgtg

SEQ ID NO: 779196 - DNA, 120 bp, Artificial Sequence
  ENSG00000249242_2 (sequence is synthesized)
aagcatgcaccatatataagcattgcaggtgatgatcctcctgcaagctgtgtgtttagtcaagttatgaacatggcagccttcctagcccttgtggtagctgttctgcgcttcatacaa

SEQ ID NO: 779197 - DNA, 120 bp, Artificial Sequence
  ENSG00000249242_3 (sequence is synthesized)
ctgaaaccgaaggttttaaacccgtggctgaatattagtggattggtggctctgtgtctggcttccttcggaatgaccttacttggtaattttcagctcacaaatgatgaagaaatccat

SEQ ID NO: 779198 - DNA, 120 bp, Artificial Sequence
  ENSG00000249242_4 (sequence is synthesized)
aacgtcggaacttccttgacctttggatttggcacattgacctgctggatccaggctgcgctgacactcaaggtcaacatcaagaatgaaggacggagagttggaattccacgggttatt

SEQ ID NO: 779199 - DNA, 120 bp, Artificial Sequence
  ENSG00000249242_5 (sequence is synthesized)
ctgtcggcatctatcactctctgtgtggtcctctacttcatcctcatggcccaaagcatccacatgtatgcagccagggtccagtggggcctggtcatgtgcttcctgtcttattttggc

SEQ ID NO: 779200 - DNA, 120 bp, Artificial Sequence
  ENSG00000249242_6 (sequence is synthesized)
acctttgccgtggagttccggcattaccgctatgagattgtttgctctgagtaccaggagaatttcctaagcttctcagaaagcctgtcagaagcttctgaatatcagactgaccaggtg

SEQ ID NO: 779201 - DNA, 120 bp, Artificial Sequence
  ENSG00000249242_7 (sequence is synthesized)
taaaccatcagtttttccttgctggtgaggtgggtgtgacagtgggggaggggccagtaggacacactcacaggacttgacatagaacctcatttcacacacacacacacacacacattc

SEQ ID NO: 779202 - DNA, 120 bp, Artificial Sequence
  ENSG00000249242_8 (sequence is synthesized)
atggccacatttgccaaatgagcttttcagggcgagttatttctttaatgaaaaagcacaagcccttatgtgtcgaaatacacgctgttacactgaaaatatatgcacgacagagcaaga

SEQ ID NO: 779203 - DNA, 120 bp, Artificial Sequence
  ENSG00000249242_9 (sequence is synthesized)
agcttgtgcatgatcacttcttatccgtccccttcccagcactccctcctcttcccattctctccacatgtctcaagcaccctaccgagtagggcaggccaaatgttccttgggagtaat

SEQ ID NO: 779204 - DNA, 120 bp, Artificial Sequence
  ENSG00000249242_10 (sequence is synthesized)
gccaactcccgacgttgccttcaggtccaaagggcttggaaccagctcgtgaggaagttctgaatctggcactaatattcttgagtggataatagtgtatcatagaataggacggaaatt

SEQ ID NO: 779205 - DNA, 120 bp, Artificial Sequence
  ENSG00000249242_11 (sequence is synthesized)
gtattgagatgtgaccctgtgtcgcctgtggaaaggcatagtgagaagaactttcccacgaaagcccccttcatcgttgttcagtggtcggctgtgtggatcccaggagagacatatgcc

SEQ ID NO: 779206 - DNA, 120 bp, Artificial Sequence
  ENSG00000249242_12 (sequence is synthesized)
acagactgtgagagcaaagcccgccgctgtgatctggacttgatgcactgtgactgagaatgatttccaaatgtgaatatgtgtagggacgtggtctatcaggcctggaacaagatgggg

SEQ ID NO: 779207 - DNA, 120 bp, Artificial Sequence
  ENSG00000249242_13 (sequence is synthesized)
tttcatagtttcttttaagtaactaccatgagtctctctaagcctcatggacaaagatgtagaccaaatgcaagagctgagcttgctttgggttcaaccatgatcaaagaaaaactgagg

SEQ ID NO: 779208 - DNA, 120 bp, Artificial Sequence
  ENSG00000249242_14 (sequence is synthesized)
tcacctgcaggcttacgtgggaagctaagaaaatatcacagaaaaatggaaagaaatatggatgtgcagaggtaataaaaagagctgctgctggacatttatcaaagataggcaccttac

SEQ ID NO: 779209 - DNA, 120 bp, Artificial Sequence
  ENSG00000249242_15 (sequence is synthesized)
agtatcttgttgcaagtccaaatcaggggagactttgttaatatgtatcttttgctcaaatttagtagggttttttttttttttggattaagggcttttcaaatttggaatttgtagaag

SEQ ID NO: 779210 - DNA, 120 bp, Artificial Sequence
  ENSG00000249242_16 (sequence is synthesized)
ccaattaaaagaatacccttcctaaaaaccaaattgacacagctggcccccctgctagccaacccgcagttcccagttcccacctgctgagagttcagaactcagaccgtaggtgtgggc

SEQ ID NO: 779211 - DNA, 120 bp, Artificial Sequence
  ENSG00000249242_17 (sequence is synthesized)
ttatgagactgtgcttcatgaagaaaagcagaattccaaattcaaactgttggagtgagccaagtggacagaccctccatgagtgcactttcttccaagaaatccccagatttaccccat

SEQ ID NO: 779212 - DNA, 120 bp, Artificial Sequence
  ENSG00000249242_18 (sequence is synthesized)
gagtgcactttcttccaagaaatccccagatttaccccatagaggtctgggattacctggaatataatatgaaaaacattttttaggctgggtgtggggctcacacctgtaatcccagca

SEQ ID NO: 779213 - DNA, 86 bp, Artificial Sequence
  ENSG00000249242_19 (sequence is synthesized)
taaaaactccatctcaaaaaaaaaagaaaaaaagaaaaacgttttttaattcaacccaaagtctgaatttcttgaggaaaaggtca

SEQ ID NO: 779214 - DNA, 120 bp, Artificial Sequence
  ENSG00000249242_20 (sequence is synthesized)
taattcaacccaaagtctgaatttcttgaggaaaaggtcaatgtcttttcatctctgtattgttccccacctcttaacacagtgcctggcacatactaggtgctcaataaatgtctgttg

SEQ ID NO: 779215 - DNA, 120 bp, Artificial Sequence
  ENSG00000249242_21 (sequence is synthesized)
aatagaattattaataatttaagagtaggaaaaaggagtgtcagagagagactcaaagatgagtgagagagcatggaagatggctgtttcatgtgagacaggaatggaagaagttatgaa

SEQ ID NO: 779216 - DNA, 120 bp, Artificial Sequence
  ENSG00000249242_22 (sequence is synthesized)
tagggatcagatgggggagtgagaatccctgtaagtaaaatgtgaggaaaagaacaagctgagaacaagattctcctgtcaaaaaggcgtcttactgtaaatagtccaaggtgacatttg

SEQ ID NO: 779217 - DNA, 120 bp, Artificial Sequence
  ENSG00000249242_23 (sequence is synthesized)
ttagttttgaatactgcttttgggtttctttttttcatttttatattttaaaatttttatcaaagaacaaagacttatgtagttttcttttattctacacaatccaaattaaacagcttt

SEQ ID NO: 779218 - DNA, 120 bp, Artificial Sequence
  ENSG00000249242_24 (sequence is synthesized)
tggtgatgcaattgtacactttcttaagaatatatctaataccacattttagcagaaccaagcaatgactgacattattcattgggatctggccactaaataaaattcttttatgcataa

SEQ ID NO: 779219 - DNA, 120 bp, Artificial Sequence
  ENSG00000249242_25 (sequence is synthesized)
ttgtgcaaaaaccctaggtgtgcggacgaaagagagccaggcagaaggttacaacaggtcaggaataaataaccaccaggcggaggatccaagattctgtccttccttttgttggatgag

SEQ ID NO: 779220 - DNA, 80 bp, Artificial Sequence
  ENSG00000249242_26 (sequence is synthesized)
actgctgccgccgccgccaccgcagcaggtcacagcccctcgaggcgacagcggccccgccgcaccagagcgatctcggc

SEQ ID NO: 779221 - DNA, 120 bp, Artificial Sequence
  ENSG00000249437_0 (sequence is synthesized)
cttctggtgtgagactctgtaggtttcattactccttttgggtcctgattaaatcctgttgactcaagaccttagagcatttactggtaaagtctctgactgcgcgattttttttttgca

SEQ ID NO: 779222 - DNA, 120 bp, Artificial Sequence
  ENSG00000249437_1 (sequence is synthesized)
ttttagttccttaaatattttctcactgcttcctactaaaggacggacagagcatttgttcttcagccacatactttccttccactggccagcattctcctctattagactagaactgtg

SEQ ID NO: 779223 - DNA, 120 bp, Artificial Sequence
  ENSG00000249437_2 (sequence is synthesized)
gataaacctcagaaaatggccacccagcagaaagcctctgacgagaggatctcccagtttgatcacaatttgctgccagagctgtctgctcttctgggcctagatgcagttcagttggca

SEQ ID NO: 779224 - DNA, 120 bp, Artificial Sequence
  ENSG00000249437_3 (sequence is synthesized)
aaggaactagaagaagaggagcagaaggagcgagcaaaaatgcagaaaggctacaactctcaaatgcgcagtgaagcaaaaaggttaaagacttttgtgacttatgagccgtacagctca

SEQ ID NO: 779225 - DNA, 120 bp, Artificial Sequence
  ENSG00000249437_4 (sequence is synthesized)
tggataccacaggagatggcggccgctgggttttacttcactggggtaaaatctgggattcagtgcttctgctgtagcctaatcctctttggtgccggcctcacgagactccccatagaa

SEQ ID NO: 779226 - DNA, 120 bp, Artificial Sequence
  ENSG00000249437_5 (sequence is synthesized)
gaccacaagaggtttcatccagattgtgggttccttttgaacaaggatgttggtaacattgccaagtacgacataagggtgaagaatctgaagagcaggctgagaggaggtaaaatgagg

SEQ ID NO: 779227 - DNA, 120 bp, Artificial Sequence
  ENSG00000249437_6 (sequence is synthesized)
taccaagaagaggaggctagacttgcgtccttcaggaactggccattttatgtccaagggatatccccttgtgtgctctcagaggctggctttgtctttacaggtaaacaggacacggta

SEQ ID NO: 779228 - DNA, 120 bp, Artificial Sequence
  ENSG00000249437_7 (sequence is synthesized)
cagtgtttttcctgtggtggatgtttaggaaattgggaagaaggagatgatccttggaaggaacatgccaaatggttccccaaatgtgaatttcttcggagtaagaaatcctcagaggaa

SEQ ID NO: 779229 - DNA, 120 bp, Artificial Sequence
  ENSG00000249437_8 (sequence is synthesized)
attacccagtatattcaaagctacaagggatttgttgacataacgggagaacattttgtgaattcctgggtccagagagaattacctatggcatcagcttattgcaatgacagcatcttt

SEQ ID NO: 779230 - DNA, 120 bp, Artificial Sequence
  ENSG00000249437_9 (sequence is synthesized)
gcttacgaagaactacggctggactcttttaaggactggccccgggaatcagctgtgggagttgcagcactggccaaagcaggtcttttctacacaggtataaaggacatcgtccagtgc

SEQ ID NO: 779231 - DNA, 120 bp, Artificial Sequence
  ENSG00000249437_10 (sequence is synthesized)
ttttcctgtggagggtgtttagagaaatggcaggaaggtgatgacccattagacgatcacaccagatgttttcccaattgtccatttctccaaaatatgaagtcctctgcggaagtgact

SEQ ID NO: 779232 - DNA, 120 bp, Artificial Sequence
  ENSG00000249437_11 (sequence is synthesized)
ccagaccttcagagccgtggtgaactttgtgaattactggaaaccacaagtgaaagcaatcttgaagattcaatagcagttggtcctatagtgccagaaatggcacagggtgaagcccag

SEQ ID NO: 779233 - DNA, 120 bp, Artificial Sequence
  ENSG00000249437_12 (sequence is synthesized)
tggtttcaagaggcaaagaatctgaatgagcagctgagagcagcttataccagcgccagtttccgccacatgtctttgcttgatatctcttccgatctggccacggaccacttgctgggc

SEQ ID NO: 779234 - DNA, 120 bp, Artificial Sequence
  ENSG00000249437_13 (sequence is synthesized)
tgtgatctgtctattgcttcaaaacacatcagcaaacctgtgcaagaacctctggtgctgcctgaggtctttggcaacttgaactctgtcatgtgtgtggagggtgaagctggaagtgga

SEQ ID NO: 779235 - DNA, 120 bp, Artificial Sequence
  ENSG00000249437_14 (sequence is synthesized)
aagacggtcctcctgaagaaaatagcttttctgtgggcatctggatgctgtcccctgttaaacaggttccagctggttttctacctctcccttagttccaccagaccagacgaggggctg

SEQ ID NO: 779236 - DNA, 120 bp, Artificial Sequence
  ENSG00000249437_15 (sequence is synthesized)
gccagtatcatctgtgaccagctcctagagaaagaaggatctgttactgaaatgtgcgtgaggaacattatccagcagttaaagaatcaggtcttattccttttagatgactacaaagaa

SEQ ID NO: 779237 - DNA, 120 bp, Artificial Sequence
  ENSG00000249437_16 (sequence is synthesized)
atatgttcaatccctcaagtcataggaaaactgattcaaaaaaaccacttatcccggacctgcctattgattgctgtccgtacaaacagggccagggacatccgccgatacctagagacc

SEQ ID NO: 779238 - DNA, 120 bp, Artificial Sequence
  ENSG00000249437_17 (sequence is synthesized)
attctagagatcaaagcatttcccttttataatactgtctgtatattacggaagctcttttcacataatatgactcgtctgcgaaagtttatggtttactttggaaagaaccaaagtttg

SEQ ID NO: 779239 - DNA, 120 bp, Artificial Sequence
  ENSG00000249437_18 (sequence is synthesized)
cagaagatacagaaaactcctctctttgtggcggcgatctgtgctcattggtttcagtatccttttgacccatcctttgatgatgtggctgttttcaagtcctatatggaacgcctttcc

SEQ ID NO: 779240 - DNA, 120 bp, Artificial Sequence
  ENSG00000249437_19 (sequence is synthesized)
ttaaggaacaaagcgacagctgaaattctcaaagcaactgtgtcctcctgtggtgagctggccttgaaagggtttttttcatgttgctttgagtttaatgatgatgatctcgcagaagca

SEQ ID NO: 779241 - DNA, 120 bp, Artificial Sequence
  ENSG00000249437_20 (sequence is synthesized)
ggggttgatgaagatgaagatctaaccatgtgcttgatgagcaaatttacagcccagagactaagaccattctaccggtttttaagtcctgccttccaagaatttcttgcggggatgagg

SEQ ID NO: 779242 - DNA, 120 bp, Artificial Sequence
  ENSG00000249437_21 (sequence is synthesized)
ctgattgaactcctggattcagataggcaggaacatcaagatttgggactgtatcatttgaaacaaatcaactcacccatgatgactgtaagcgcctacaacaattttttgaactatgtc

SEQ ID NO: 779243 - DNA, 120 bp, Artificial Sequence
  ENSG00000249437_22 (sequence is synthesized)
tccagcctcccttcaacaaaagcagggcccaaaattgtgtctcatttgctccatttagtggataacaaagagtcattggagaatatatctgaaaatgatgactacttaaagcaccagcca

SEQ ID NO: 779244 - DNA, 120 bp, Artificial Sequence
  ENSG00000249437_23 (sequence is synthesized)
gaaatttcactgcagatgcagttacttaggggattgtggcaaatttgtccacaagcttacttttcaatggtttcagaacatttactggttcttgccctgaaaactgcttatcaaagcaac

SEQ ID NO: 779245 - DNA, 120 bp, Artificial Sequence
  ENSG00000249437_24 (sequence is synthesized)
actgttgctgcgtgttctccatttgttttgcaattccttcaagggagaacactgactttgggtgcgcttaacttacagtactttttcgaccacccagaaagcttgtcattgttgaggagc

SEQ ID NO: 779246 - DNA, 120 bp, Artificial Sequence
  ENSG00000249437_25 (sequence is synthesized)
ctatagatcaggactatgcttctgcctttgaacctatgaatgaatgggagcgaaatttagctgaaaaagaggataatgtaaagagctatatggatatgcagcgcagggcatcaccagacc

SEQ ID NO: 779247 - DNA, 120 bp, Artificial Sequence
  ENSG00000249437_26 (sequence is synthesized)
ttagtactggctattggaaactttctccaaagcagtacaagattccctgtctagaagtcgatgtgaatgatattgatgttgtaggccaggatatgcttgagattctaatgacagttttct

SEQ ID NO: 779248 - DNA, 120 bp, Artificial Sequence
  ENSG00000249437_27 (sequence is synthesized)
cagcttcacagcgcatcgaactccatttaaaccacagcagaggctttatagaaagcatccgcccagctcttgagctgtctaaggcctctgtcaccaagtgctccataagcaagttggaac

SEQ ID NO: 779249 - DNA, 120 bp, Artificial Sequence
  ENSG00000249437_28 (sequence is synthesized)
tcagcgcagccgaacaggaactgcttctcaccctgccttccctggaatctcttgaagtctcagggacaatccagtcacaagaccaaatctttcctaatctggataagttcctgtgcctga

SEQ ID NO: 779250 - DNA, 120 bp, Artificial Sequence
  ENSG00000249437_29 (sequence is synthesized)
aagaactgtctgtggatctggagggcaatataaatgttttttcagtcattcctgaagaatttccaaacttccaccatatggagaaattattgatccaaatttcagctgagtatgatcctt

SEQ ID NO: 779251 - DNA, 120 bp, Artificial Sequence
  ENSG00000249437_30 (sequence is synthesized)
ccaaactagtaaaattaattcaaaattctccaaaccttcatgttttccatctgaagtgtaacttcttttcggattttgggtctctcatgactatgcttgtttcctgtaagaaactcacag

SEQ ID NO: 779252 - DNA, 120 bp, Artificial Sequence
  ENSG00000249437_31 (sequence is synthesized)
aaattaagttttcggattcattttttcaagccgtcccatttgttgccagtttgccaaattttatttctctgaagatattaaatcttgaaggccagcaatttcctgatgaggaaacatcag

SEQ ID NO: 779253 - DNA, 120 bp, Artificial Sequence
  ENSG00000249437_32 (sequence is synthesized)
aaaaatttgcctacattttaggttctcttagtaacctggaagaattgatccttcctactggggatggaatttatcgagtggccaaactgatcatccagcagtgtcagcagcttcattgtc

SEQ ID NO: 779254 - DNA, 120 bp, Artificial Sequence
  ENSG00000249437_33 (sequence is synthesized)
tccgagtcctctcatttttcaagactttgaatgatgacagcgtggtggaaattgccaaagtagcaatcagtggaggtttccagaaacttgagaacctaaagctttcaatcaatcacaaga

SEQ ID NO: 779255 - DNA, 120 bp, Artificial Sequence
  ENSG00000249437_34 (sequence is synthesized)
ttacagaggaaggatacagaaatttctttcaagcactggacaacatgccaaacttgcaggagttggacatctccaggcatttcacagagtgtatcaaagctcaggccacaacagtcaagt

SEQ ID NO: 779256 - DNA, 120 bp, Artificial Sequence
  ENSG00000249437_35 (sequence is synthesized)
ctttgagtcaatgtgtgttacgactaccaaggctcattagactgaacatgttaagttggctcttggatgcagatgatattgcattgcttaatgtcatgaaagaaagacatcctcaatcta

SEQ ID NO: 779257 - DNA, 120 bp, Artificial Sequence
  ENSG00000249437_36 (sequence is synthesized)
agtacttaactattctccagaaatggatactgccgttctctccaatcattcagaaataaaagattcagctaaaaactgctgaatcaataatttgtcttggggcatattgaggatgtaaaa

SEQ ID NO: 779258 - DNA, 120 bp, Artificial Sequence
  ENSG00000249437_37 (sequence is synthesized)
aaagttgttgattaatgctaaaaaccaaattatccaaaattattttattaaatattgcatacaaaagaaaatgtgtaaggcttgctaaaaaacaaaacaaaacaaaacacagtcctgcat

SEQ ID NO: 779259 - DNA, 120 bp, Artificial Sequence
  ENSG00000249437_38 (sequence is synthesized)
actcaccaccaagctcaagaaataaatcatcaccaatacctttgaggtccctgagtaatccaccccagctaaaggcaaacccttcaatcaagtttatacagcaaaccctccattgtccat

SEQ ID NO: 779260 - DNA, 120 bp, Artificial Sequence
  ENSG00000249437_39 (sequence is synthesized)
ggtcaacagggaaggggttggggacaggtctgccaatctatctaaaagccacaatatggaagaagtattcaatttatataataaatggctaacttaacggttgaatcactttcatacatg

SEQ ID NO: 779261 - DNA, 120 bp, Artificial Sequence
  ENSG00000249437_40 (sequence is synthesized)
gatgaaacgggtttaacacaggatccacatgaatcttctgtgggccaagagatgttccttaatccttgtagaacctgttttctatattgaactagctttggtacagtagagttaacttac

SEQ ID NO: 779262 - DNA, 120 bp, Artificial Sequence
  ENSG00000249437_41 (sequence is synthesized)
tttccatttatccactgccaatataaagaggaaacaggggttagggaaaaatgacttcattccagaggcttctcagagttcaacatatgctataatttagaattttcttatgaatccact

SEQ ID NO: 779263 - DNA, 120 bp, Artificial Sequence
  ENSG00000249437_42 (sequence is synthesized)
ctacttgggtagaaaatattttatctctagtgattgcatattatttccatatcatagtatttcatagtattatatttgatatgagtgtctatatcaatgtcagtgtccagaatttcgttc

SEQ ID NO: 779264 - DNA, 120 bp, Artificial Sequence
  ENSG00000249437_43 (sequence is synthesized)
ctaccagttaagtagttttctgaacggccagaagaccattcgaaattcatgatactactataagttggtaaacaaccatacttttatcctcatttttattctcactaagaaaaaagtcaa

SEQ ID NO: 779265 - DNA, 120 bp, Artificial Sequence
  ENSG00000249437_44 (sequence is synthesized)
ctaagaaaaaagtcaactcccctccccttgcccaagtatgaaatatagggacagtatgtatggtgtggtctcatttgtttagaaaaccacttatgactgggtgcggtggctcacacctgt

SEQ ID NO: 779266 - DNA, 120 bp, Artificial Sequence
  ENSG00000249437_45 (sequence is synthesized)
tctcaaaacaaaaaacaaaaccacttatattgctagctacattaagaatttctgaatatgttactgagcttgcttgtggtaaccatttataatatcagaaagtatatgtacaccaaaaca

SEQ ID NO: 779267 - DNA, 120 bp, Artificial Sequence
  ENSG00000249437_46 (sequence is synthesized)
tgttgaacatccatgttgtacaactgaaatataaataattttgtcaattatacctaaataaaactggaaaaaaatttctggaagtttatatctaaaaatgttaatagtgcgtacctctag

SEQ ID NO: 779268 - DNA, 120 bp, Artificial Sequence
  ENSG00000249437_47 (sequence is synthesized)
gaagtgggcctggaagccattcttacttttcagtctctcccattctgtactgttttttgttttactttcgtgcctgcattatttttctatttaaaacaaaaataaatctagtttagcact

SEQ ID NO: 779269 - DNA, 120 bp, Artificial Sequence
  ENSG00000249437_48 (sequence is synthesized)
acaaaaggtcctgtgctcacctgggacccttctggacgttgccctgtgtacctcttcgactgcctgttcatctacgacgaaccccgggtattgaccccagacaacaatgccacttcatat

SEQ ID NO: 779270 - DNA, 120 bp, Artificial Sequence
  ENSG00000249437_49 (sequence is synthesized)
tggcacagatctccagaaacccttgtaatttcctgagtgacaggggtgatagaaacatcttttattagaatacttggtcttggttcctgacacaagagcttctaagacctttggaatctc

SEQ ID NO: 779271 - DNA, 120 bp, Artificial Sequence
  ENSG00000249437_50 (sequence is synthesized)
caagtgataagagtgtatgacagtgagctaactggtggctgggatcctttagacaacttcaggatgggggctatcccctgaaagactaaggcatgattagaggtctgggatttgcagccc

SEQ ID NO: 779272 - DNA, 120 bp, Artificial Sequence
  ENSG00000249437_51 (sequence is synthesized)
cacgcctcgacctccagagagggtaaaagggctggagattgattaaccaccagttgccagtgatttaaccaatcatgcctaagtgatggcacctccattaaaaaataaaccacaggtttg

SEQ ID NO: 779273 - DNA, 120 bp, Artificial Sequence
  ENSG00000249437_52 (sequence is synthesized)
cagaagggcataggcattctttttatgtcatgggtttgatttctttcttcctttctcctttcattcccctggctcccatcttcaaagtgaaaaatatcacattcacttgctgacctagag

SEQ ID NO: 779274 - DNA, 120 bp, Artificial Sequence
  ENSG00000249437_53 (sequence is synthesized)
ctatgaaggatgagtcttcatgtctttcatccctttgctccatgacccccttcctgtactagccttcccctctttatagttatggcatagttttggctagattcatatattcacattaca

SEQ ID NO: 779275 - DNA, 120 bp, Artificial Sequence
  ENSG00000249437_54 (sequence is synthesized)
tgtttacattatcatgactatacaaatgctatgtggagctgaagcttgtggtaaatttttatttatttttcccttcctgtatatccttttatttttttaggaagtaataactgtcctgtt

SEQ ID NO: 779276 - DNA, 120 bp, Artificial Sequence
  ENSG00000249437_55 (sequence is synthesized)
ggtatgttagcttatttttttttcctgaggtaaaattcaggtagtaaccattttatttatttatttattattttttgtgacaggttctctctcttgcccaggttggagtgcagtggtgca

SEQ ID NO: 779277 - DNA, 120 bp, Artificial Sequence
  ENSG00000249437_56 (sequence is synthesized)
aacctttctaagtactggatgtgtaatattaaaaatgtagttaaccaaggacagaggctgcacctaatgacttttggaggaaccttcttgctcaagacactatgattctcgttacctgga

SEQ ID NO: 779278 - DNA, 120 bp, Artificial Sequence
  ENSG00000249437_57 (sequence is synthesized)
tagtatcacccatggattgtatcatatatgaaccactgaggaacacacattcctgcagatgtttgcagattattaattgctttatatttggagcacccctcccttcaatcagcataaata

SEQ ID NO: 779279 - DNA, 120 bp, Artificial Sequence
  ENSG00000249437_58 (sequence is synthesized)
tttgagggtgggctgtgtttagaagatgtttagtctccaatgattacaacatgatgcaccactctcctatacaaattttgatttaagaaaagattttatttttcaaaggaaaccacaagt

SEQ ID NO: 779280 - DNA, 120 bp, Artificial Sequence
  ENSG00000249437_59 (sequence is synthesized)
gaaagcaatcttgaagattcaatagcagttggtcctatagtgccaggtaagaactttgaagtagcacgtgggattatatgtatttgtaaatatatttgtatacagggcagttgcaaaaaa

SEQ ID NO: 779281 - DNA, 120 bp, Artificial Sequence
  ENSG00000249437_60 (sequence is synthesized)
aagagtatttataattgtccaaagagcttccaaagaggagcagcattgcaacagtgtcgtgtatgagcaaaagtcaagattcttgtggcttctccagagtgcaggcaggaccaaactgat

SEQ ID NO: 779282 - DNA, 120 bp, Artificial Sequence
  ENSG00000249437_61 (sequence is synthesized)
tgatagtaggcaacgtgtctcaggtacaagcaaaccagtccttagaagcaccaatcagtaaacttctttcctgagatttttatttttattcattttattttattttattttatttgagac

SEQ ID NO: 779283 - DNA, 65 bp, Artificial Sequence
  ENSG00000249437_62 (sequence is synthesized)
agggtcttactttgtcacccaggctggaatgcaatggcaagatcatggctcactgcagcgcacaa

SEQ ID NO: 779284 - DNA, 120 bp, Artificial Sequence
  ENSG00000249437_63 (sequence is synthesized)
tgggattacaggcatgagtcactttgcctggcctctttcctgagatgcatggtgcttatgataagcacacattatgtctaggtccctgcttcaagtgtggcactttggacacatgctttc

SEQ ID NO: 779285 - DNA, 120 bp, Artificial Sequence
  ENSG00000249437_64 (sequence is synthesized)
cacattccgattttgtgccaaaacctatgagatgattgcaatgtgggaatcatggatggctgtggaaaatcctaacacattcgtagtagacaggcagaatcatggaatgaaaaggcatgg

SEQ ID NO: 779286 - DNA, 120 bp, Artificial Sequence
  ENSG00000249437_65 (sequence is synthesized)
acgggctggcttctgacgggctctgcttgccttcctgatagtcttcccctttatgaatgaagccacttgccccagcttccctctgctgcccctatctgcaggcttgctaagatctcctga

SEQ ID NO: 779287 - DNA, 120 bp, Artificial Sequence
  ENSG00000249437_66 (sequence is synthesized)
actatcctgaatcagtaaaaatttcctagtggagagtgatgggaaatcgaatccaaactggcttaaacaaaaatgagaatttattgattaacatgactcaggagaccagaactctataga

SEQ ID NO: 779288 - DNA, 120 bp, Artificial Sequence
  ENSG00000249437_67 (sequence is synthesized)
gaacatggcctgacagtgggggaagagaggtgtttcctcaaaaagaaactgggtgcagctttcccagaagaatcagttgctcaatatataataccctgatgaatttagttaccattctat

SEQ ID NO: 779289 - DNA, 120 bp, Artificial Sequence
  ENSG00000249437_68 (sequence is synthesized)
gtctcttacttcctcattcgtcaaagtacatctgtgatatttaaatgcaggtctgttttcaaggtcagtttccggaaacagtgaccctgagaaggcttcctcctgagtatgcataaacat

SEQ ID NO: 779290 - DNA, 63 bp, Artificial Sequence
  ENSG00000249437_69 (sequence is synthesized)
tcacagccttgcactgcataaaaacaattgcaacatcaacagaaataaaaattaaaggaataa

SEQ ID NO: 779291 - DNA, 120 bp, Artificial Sequence
  ENSG00000249471_0 (sequence is synthesized)
gtcacttggctgctcgcgtcaggccacaccggtggtctgggctgtggcgcgcgggtcggggcccgaggcgggcggccaggaaggacctgatgaccttcgaggatgtggccgtgtacttct

SEQ ID NO: 779292 - DNA, 120 bp, Artificial Sequence
  ENSG00000249471_1 (sequence is synthesized)
cccaggaggagtgggggctcctggacacagcgcagagggccctgtaccgccacgtgatgctggaaaacttcacacttgtgacctcacttggactctctacctcccgacctcgtgtggtca

SEQ ID NO: 779293 - DNA, 120 bp, Artificial Sequence
  ENSG00000249471_2 (sequence is synthesized)
ttcaacttgagcgtggcgaggagccctgggttcccagtggaaaggacatgaccctggccaggaacacctacgggaggctcaactctggttcctggagtttgacagaggatagagatgttt

SEQ ID NO: 779294 - DNA, 120 bp, Artificial Sequence
  ENSG00000249471_3 (sequence is synthesized)
ctggagaatggccacgagctttcccagataccccacctgggatgactactagcgtcttcccagttgccgatgcctgccacagtgtaaaaagcctgcagcgacaaccgggtgcctccccat

SEQ ID NO: 779295 - DNA, 120 bp, Artificial Sequence
  ENSG00000249471_4 (sequence is synthesized)
ctcaggagagaaaacccacgggggtgtcggtgatctactgggagaggctcctgctaggctcgcgcagtgaccaggccagcatcagcctgcgactgacctccccactcaggccccccaaga

SEQ ID NO: 779296 - DNA, 120 bp, Artificial Sequence
  ENSG00000249471_5 (sequence is synthesized)
gcagccggcccagggaaaagaccttcacagagtaccgggtgcctgggaggcagcccaggacgcctgagcggcagaagccatgtgcacaggaggtccctgggagagccttcgggaatgcct

SEQ ID NO: 779297 - DNA, 120 bp, Artificial Sequence
  ENSG00000249471_6 (sequence is synthesized)
cggacctgaaggccgccagtggtggcagggatcgcagaatgggcgcagcttggcaggagcctcatagactcctcggtggccaggagccctcgacctgggacgagctgggcgaggctcttc

SEQ ID NO: 779298 - DNA, 120 bp, Artificial Sequence
  ENSG00000249471_7 (sequence is synthesized)
acgctggggagaagtccttcgaatgcagggcgtgcagcaaagtgttcgtgaagagctccgacctcctcaagcacctacgcacccacaccggggagcggccctacgagtgcacccagtgcg

SEQ ID NO: 779299 - DNA, 120 bp, Artificial Sequence
  ENSG00000249471_8 (sequence is synthesized)
gcaaggccttcagccagacgtcgcacttgacgcagcaccagcgcatccacagcggcgagacgccctacgcgtgccccgtgtgcggcaaggccttccggcatagctcctcgctggtgcggc

SEQ ID NO: 779300 - DNA, 120 bp, Artificial Sequence
  ENSG00000249471_9 (sequence is synthesized)
accagcgcatccacacggccgagaagtccttccgctgctccgagtgcggcaaggccttcagccacggctccaacctcagccagcaccgcaagatccacgcgggtgggcgtccttatgctt

SEQ ID NO: 779301 - DNA, 120 bp, Artificial Sequence
  ENSG00000249471_10 (sequence is synthesized)
gcgcacagtgtggccgccgcttctgccgcaactcgcacctgatccagcacgagcgtacgcacacaggcgagaagcccttcgtatgcgcgctctgcggtgctgccttcagccagggctcct

SEQ ID NO: 779302 - DNA, 120 bp, Artificial Sequence
  ENSG00000249471_11 (sequence is synthesized)
cgctctttttgcaccagcgcgtgcacacaggcgagaagcccttcgcctgcgcccagtgcggccgctcctttagccgcagctccaacctcacccagcaccagctcctgcacacgggcgagc

SEQ ID NO: 779303 - DNA, 120 bp, Artificial Sequence
  ENSG00000249471_12 (sequence is synthesized)
acgcagtgtggccgcgccttccgtgagcgccctgccctcttgcaccaccagaggatccacaccacagagaagaccaatgccgcagcaccagactgcaccccggggccaggtttccttcag

SEQ ID NO: 779304 - DNA, 120 bp, Artificial Sequence
  ENSG00000249471_13 (sequence is synthesized)
ggacatcatcggaaggtgcgccggggagggaagccaagcccagtcctgaagccagcgaaggtctgaggtcacaggtcgcagcccaaccctttcttggccttctgtgaatcccttccacag

SEQ ID NO: 779305 - DNA, 120 bp, Artificial Sequence
  ENSG00000249471_14 (sequence is synthesized)
ctaaagggtccgagtgctcttcagatccacgatggggaaaagctctgtgcctgagagtcagggacgagggagaccctttggctgtggttccatttgcaggtggggacaggatttgccagt

SEQ ID NO: 779306 - DNA, 120 bp, Artificial Sequence
  ENSG00000249471_15 (sequence is synthesized)
ttagtcatagctcacacctccatcctcaaagaggtaacactgcagaaacatcagagggaggacatgtcagctggaactctggtggggctgaggctgtagttggggccataggacgccgac

SEQ ID NO: 779307 - DNA, 120 bp, Artificial Sequence
  ENSG00000249471_16 (sequence is synthesized)
aaaggcagcgctgcatggtggtgctacttcatgtgttatgagagtggatgctgaggtgagggggatgcggacatggggtaggatgacctagagaaacttatgatgtctgcacacaaactg

SEQ ID NO: 779308 - DNA, 120 bp, Artificial Sequence
  ENSG00000249471_17 (sequence is synthesized)
gccgctagacggacgctgaggacattttccccctgaggcctctattcaaggcttcctgggggccatctcagcaaacaggagactacaggggactggggatcagggtgtggcctgtgagtg

SEQ ID NO: 779309 - DNA, 120 bp, Artificial Sequence
  ENSG00000249471_18 (sequence is synthesized)
tcagcctcctcctcggaaaaagaaaagctttgggtcaactcagcatcatgtttgcagatgctgacagacgggatcctaatgagagtcaatgtgtgctcactgccagctcctgggctgtgc

SEQ ID NO: 779310 - DNA, 120 bp, Artificial Sequence
  ENSG00000249471_19 (sequence is synthesized)
tctggtcagccaggtgtgagggcctggcctggggtcacacagctgactcaggagaggaatgcccatggttctcagcattggaaggacaaacctaggatgatggctttccagtggcactcg

SEQ ID NO: 779311 - DNA, 120 bp, Artificial Sequence
  ENSG00000249471_20 (sequence is synthesized)
ttcaggttttcgtccaagtctcagcttggccaaggcctgtcgctcactcatttacaaaagtcgatgtgaggaggagcctttacacctgtggagacagtgatagctttggagcagataagg

SEQ ID NO: 779312 - DNA, 120 bp, Artificial Sequence
  ENSG00000249471_21 (sequence is synthesized)
tggagctgctcatttttgctggatttggtggccgatccccgcccccacccccaccccctccatctcacctttcccttgttatgcctcctcaattggaggctggacagagagctgaatagg

SEQ ID NO: 779313 - DNA, 120 bp, Artificial Sequence
  ENSG00000249471_22 (sequence is synthesized)
aaggacttgccattacctaaggccatgtgtgacagcctcctgaggacctccccaacccagtgtgatgggcctgcatggcagagacaaaagggtagactgggggtcatttgcttcctgtgg

SEQ ID NO: 779314 - DNA, 120 bp, Artificial Sequence
  ENSG00000249471_23 (sequence is synthesized)
ccttaagcctactaggccccatccttacctgagacctcacctccaagaaattaatggtcttttcaatggagaaaaaaaaagactagtatttgcaacttcaaatagatgtagtttccttta

SEQ ID NO: 779315 - DNA, 120 bp, Artificial Sequence
  ENSG00000249471_24 (sequence is synthesized)
gcgttgggactgtcacttggctgctcgcgtcaggccacaccggtggtctgggctgtggcgcgcgggtcggggcccgaggcgggcggccaggaaggttcttggggctgcacccctatgacg

SEQ ID NO: 779316 - DNA, 120 bp, Artificial Sequence
  ENSG00000249471_25 (sequence is synthesized)
acttggctgctcgcgtcaggccacaccggtggtctgggctgtggcgcgcgggtcggggcccgaggcgggcggccaggaaggtacggaccacgagcagccggccgcgcccccaagcctcgg

SEQ ID NO: 779317 - DNA, 120 bp, Artificial Sequence
  ENSG00000249471_26 (sequence is synthesized)
acttggctgctcgcgtcaggccacaccggtggtctgggctgtggcgcgcgggtcggggcccgaggcgggcggccaggaagggcactggtgagctcccgacttccggcagccagggggctg

SEQ ID NO: 779318 - DNA, 120 bp, Artificial Sequence
  ENSG00000249471_27 (sequence is synthesized)
aggtcccgaaggaggctccgaggggagagtcctgcgtgtgcaaaacctgggaggggagccgaagcccagatgcttctgggactgagcgctctcgatgtggagctggagtagaggggatgt

SEQ ID NO: 779319 - DNA, 120 bp, Artificial Sequence
  ENSG00000249471_28 (sequence is synthesized)
gtgcggctgcagtagcaggcgagggagtgggctttatctcgagggcgtcgggagacatagaagttttgaacagaatcaggacatcctctgagttgggactttaaaacggttccaccgttt

SEQ ID NO: 779320 - DNA, 120 bp, Artificial Sequence
  ENSG00000249471_29 (sequence is synthesized)
gttgcgtggagaacagacatgcaggggtgtcggcatgaagggaagaaccgactgccacagtctgggcagcagtggaggtgggcgaccaggtgaattctggtggatctgcggatgcatcag

SEQ ID NO: 779321 - DNA, 120 bp, Artificial Sequence
  ENSG00000249471_30 (sequence is synthesized)
ctaagtaccccatgttgttcagcctgagcgcctggaagaagagagctgctgtagatagaaaggagaattgaaaggaaagcaggtttccttcaggggaaagatcaagagtctgggatgtcc

SEQ ID NO: 779322 - DNA, 120 bp, Artificial Sequence
  ENSG00000249471_31 (sequence is synthesized)
caggttggtcatgtcactggacctgacgttgttggtgtcctgggctgaggacagggcctataaactggactgaagaaggcgatgagcagtcaggcgtgcggagttacagcttgagggacc

SEQ ID NO: 779323 - DNA, 120 bp, Artificial Sequence
  ENSG00000249471_32 (sequence is synthesized)
tgaactaaggaccaacctgtggccaagcccatgtccctgcttttctgactctggaaacacatcctcctctcctgcctcctacctgactcccttctcttccatcatcagcctctcctggag

SEQ ID NO: 779324 - DNA, 120 bp, Artificial Sequence
  ENSG00000249471_33 (sequence is synthesized)
gctgctgccttagtaggtgcccttgaagggagagctccaagggcacaggagctgggttcacacagaagggcctaccttcagctgggctgtgtggccttgaaccctccacaactagcagcc

SEQ ID NO: 779325 - DNA, 120 bp, Artificial Sequence
  ENSG00000249481_0 (sequence is synthesized)
agttgccagttggttcgttggtccgtggaggcctctgagcacagacccgggcctcccctggggaagggggtgggaagaccccgaggtggaaaagaaggagcaccttgagctggatggggg

SEQ ID NO: 779326 - DNA, 120 bp, Artificial Sequence
  ENSG00000249481_1 (sequence is synthesized)
ctgcagcgagcctggttcgggctgggggcggactcgctggggctcccagggcttccaaaccacgaaacgcccaggtggagggagtaaggctcccgtttagaggccagtcctgccctcctg

SEQ ID NO: 779327 - DNA, 120 bp, Artificial Sequence
  ENSG00000249481_2 (sequence is synthesized)
actttcggtggcttgtggaatttgtttgttttgactgatacctttcttacgagggactttctttgtctctgggttgcttctaatatttaaaatcatcatgggcacagatgagtccatcca

SEQ ID NO: 779328 - DNA, 120 bp, Artificial Sequence
  ENSG00000249481_3 (sequence is synthesized)
tgctcactggaaacagtccacggggctgccgtctcccctccatctcaagcacgacctgcggcagacagctggagaaggttccagaaaaaagggactctggcatgaccgaggtggagagga

SEQ ID NO: 779329 - DNA, 120 bp, Artificial Sequence
  ENSG00000249481_4 (sequence is synthesized)
cctacagtgctaattgcagtgattttctggaatctaagggatgttttgccaacacaacaccctctggcaaaagtgtcagttcctcatcttctgtggaaacaggcccaagtgtcagtgagc

SEQ ID NO: 779330 - DNA, 120 bp, Artificial Sequence
  ENSG00000249481_5 (sequence is synthesized)
caccactgctgacttggatcggaaactctccttctcacattctgatcactcctctgaaatgtcgttgcctgaagtccaaaaggataaatatcctgaggaattcagcctgcttaagttgca

SEQ ID NO: 779331 - DNA, 120 bp, Artificial Sequence
  ENSG00000249481_6 (sequence is synthesized)
gacgaaagatgggcatcgtcctgagtggacattttacccaaggtttagcagcaacatccacacctaccacgtcggaaagcagtgcttctttaatggagtcttcctcggcaacaagaggtc

SEQ ID NO: 779332 - DNA, 120 bp, Artificial Sequence
  ENSG00000249481_7 (sequence is synthesized)
tctatcagagaggacggtggacaagtgctttgggagaaagaaatacgatattgatcccaggaatggaatcccaaagttaactccaggcgacaatccatatatgtacccagaacagagtaa

SEQ ID NO: 779333 - DNA, 120 bp, Artificial Sequence
  ENSG00000249481_8 (sequence is synthesized)
aggcttccacaaagcaggatcaatgctcccaccagtgaatttttcaatagtgccttatgaaaagaaatttgatacatttattccacttgagcctcttccacaaattcccaacttgccttt

SEQ ID NO: 779334 - DNA, 120 bp, Artificial Sequence
  ENSG00000249481_9 (sequence is synthesized)
ctgggtgaaggagaaggccaacagtttgaaaaatgagatacaagaggttgaggagcttgacaactggcagccagcagtgcccttaatgcacatgctacacctttctggtgctttggactt

SEQ ID NO: 779335 - DNA, 120 bp, Artificial Sequence
  ENSG00000249481_10 (sequence is synthesized)
tccaagacaatcctgagcataaacaggcccacaaaacatgtgctgactgcactctggcgacccttttccagttgatgttttttgtcatgtgactgttctaaatccagtgtttgaccctta

SEQ ID NO: 779336 - DNA, 120 bp, Artificial Sequence
  ENSG00000249581_0 (sequence is synthesized)
tggaagagctgaccttggagcagagcattgccgagtatctgaaagatgtcaatgaccctcgctgctgctcggagaccttggggatgacctgcacccactagcatgcctggatggttcaaa

SEQ ID NO: 779337 - DNA, 120 bp, Artificial Sequence
  ENSG00000249581_1 (sequence is synthesized)
aaggcgtggtatgggctggcgtctttactcagcttctcctccttcatcctgatcatcgttgccctggtagtgccccactggctgagtgggaaaatcctttgtcagactggagtggatctg

SEQ ID NO: 779338 - DNA, 120 bp, Artificial Sequence
  ENSG00000249581_2 (sequence is synthesized)
gtcaacgccacagacagagagctggtcaagttcattggggacatttactacgggctcttccgagggtgtaaagtgcggcagtgtgggcttgggggccgccaatcccaattcacgatcttc

SEQ ID NO: 779339 - DNA, 120 bp, Artificial Sequence
  ENSG00000249581_3 (sequence is synthesized)
ttaacatgatccaggtcccgtaccgggcagtcagcggtcctgggggcatctgcctatggaatgtcctggcaggcggcgtcgtggcgttagccatcgccagcttcgtggctgcggtgaaat

SEQ ID NO: 779340 - DNA, 120 bp, Artificial Sequence
  ENSG00000249581_4 (sequence is synthesized)
ttcacgacctgacggaacgaatcgccaactttcaggagaagctcttccagtttgtggtggtggaagaacagtatgaagagtcgttttggatctgcgtggccagcgcttcggcccatgctg

SEQ ID NO: 779341 - DNA, 120 bp, Artificial Sequence
  ENSG00000249581_5 (sequence is synthesized)
caaacttggtcgtggtggcgatcagtcaaattcccctccctgagattaagaccaaaatcgaagaggccacggtcacagctgaggatatcttgtattaatagccttcccctgttcacaacc

SEQ ID NO: 779342 - DNA, 120 bp, Artificial Sequence
  ENSG00000249662_0 (sequence is synthesized)
aaataacactagcattttgacatatttggagctgctactgggccagctctgtttccaggcctgcctttcaatcttttccttgcttctggcatgagttaccatctcttttaagaaattggt

SEQ ID NO: 779343 - DNA, 120 bp, Artificial Sequence
  ENSG00000249662_1 (sequence is synthesized)
tatgcatttgaaaatacacgtagctatacatactttaaacatatcatttagcaaggatgctccttatcggaccgttgctgggaacagagaacacgacagttccaggttcctgccaattat

SEQ ID NO: 779344 - DNA, 120 bp, Artificial Sequence
  ENSG00000249662_2 (sequence is synthesized)
agaggcagtcctatttcaaaatgccattaagcatccttctgagctgcggaaagtcataggaccagtcttcagccgtgcccattacagtagcagtgacagcacaccactttgctcatgata

SEQ ID NO: 779345 - DNA, 120 bp, Artificial Sequence
  ENSG00000249662_3 (sequence is synthesized)
cggatcagggttaattttcaagttttggatggttctccctctttgagttaccatttgtttctgcttataacctactgatcatgcctttagtactaagtaaatattgaaaagggaaagcct

SEQ ID NO: 779346 - DNA, 120 bp, Artificial Sequence
  ENSG00000249662_4 (sequence is synthesized)
taggtggcttgcgaaggctctgatgtaaatatgtgttgctgagacggggaagtgaaggtgttggattatgcatgactttcacatgtgttcttataccacattcatgccccctcagcgctg

SEQ ID NO: 779347 - DNA, 120 bp, Artificial Sequence
  ENSG00000249662_5 (sequence is synthesized)
cccatggagacaggcaggcaagcaggtgtgtctgctgagatgttcgccatgccccgaggtctgaaaggcagcaacaaggatgggatccctgaggacctagatgggaacttggaagaaccc

SEQ ID NO: 779348 - DNA, 120 bp, Artificial Sequence
  ENSG00000249662_6 (sequence is synthesized)
tgtcatggacctcacagaaggtgacaaagaaacctcagcctcagctcctcctgcagccaaaaggctgaaaacagataccaaaggaaagaaggagaggaagcccactgtggatgcagagga

SEQ ID NO: 779349 - DNA, 78 bp, Artificial Sequence
  ENSG00000249662_7 (sequence is synthesized)
cccgctacgaagtgtgtcgccagtcagctttcccaaaagcacgcattgcagctctgatgcagtctatcactggcagtt

SEQ ID NO: 779350 - DNA, 120 bp, Artificial Sequence
  ENSG00000249662_8 (sequence is synthesized)
gcacgcattgcagctctgatgcagtctatcactggcagttcggtgtctgagaacgtggccattgccatggctggaatagccaaggtcttggttggagaggtggtggaagaggccctggac

SEQ ID NO: 779351 - DNA, 120 bp, Artificial Sequence
  ENSG00000249662_9 (sequence is synthesized)
gtcttggttggagaggtggtggaagaggccctggacgtgtgtgagatgtggggagaaatgcccccgctgcagcccaagcatttaagggaggctgttcgcaggttaaagcccaagggcctc

SEQ ID NO: 779352 - DNA, 120 bp, Artificial Sequence
  ENSG00000249662_10 (sequence is synthesized)
tgttgggggaggtagtgttgacttccttgtgcaatctaggattgagtgggggatgcagttggaaggcaagagaagtaagactcctccatcttcctggtccagagaaattatgctggatcc

SEQ ID NO: 779353 - DNA, 120 bp, Artificial Sequence
  ENSG00000249662_11 (sequence is synthesized)
ccctacccttaatgagaaaggaggtgtttgtgtttccagcatctatgagatctgattgctaatgtagctacctttaaagaattctgctatttacaataaaagtgagatctccctcctcca

SEQ ID NO: 779354 - DNA, 120 bp, Artificial Sequence
  ENSG00000249693_0 (sequence is synthesized)
agagagcaaactgcgcctgggcaaccagtcgggagggtgagtcccgcgcgcgacagaagcttctggcgcgaatggagaaccaagagtttctaagttcatctgcgccgtccgaggtgaccg

SEQ ID NO: 779355 - DNA, 120 bp, Artificial Sequence
  ENSG00000249693_1 (sequence is synthesized)
atgggcaggtctcaacagaaatatccacttgctccgaagtcttccagaagcccattgtgctcaggattctcgacactcacagagagcttgaggagtccgaggatcccgagaaacacgaga

SEQ ID NO: 779356 - DNA, 120 bp, Artificial Sequence
  ENSG00000249693_2 (sequence is synthesized)
atcccgaggaacccgaggaggtcagggagcaagaccagagagacgagtccgaggaatgtgatgagcctcatgagtcctatgagccccacgctccctatgcgccccacaagccccgggact

SEQ ID NO: 779357 - DNA, 120 bp, Artificial Sequence
  ENSG00000249693_3 (sequence is synthesized)
cctatgcaccttacgaactccatgggccccatgcagcccccaaactcctcaaggcccgtgaaccccgccagctccgccacacccgtgagccccgcaagtcccgcgaggccaaggaaaccg

SEQ ID NO: 779358 - DNA, 120 bp, Artificial Sequence
  ENSG00000249693_4 (sequence is synthesized)
agttgcttcccagcgccgcagtaatgatctccccctctctgatcaccagagccccgccacggcctcagctgtctttcctgggtgcaaatcctgtttcctgtgactttgtaaggaaatgtt

SEQ ID NO: 779359 - DNA, 120 bp, Artificial Sequence
  ENSG00000249693_5 (sequence is synthesized)
tttcttctaggaagagaaccccaaatctttcaaagcctaaaaagcaatggggaactccagacagaaaactgttttggggaaatcaagatcctattcgccctgtttcccagggtgctttga

SEQ ID NO: 779360 - DNA, 120 bp, Artificial Sequence
  ENSG00000249693_6 (sequence is synthesized)
gtggaagagagtctgtaatttgggagatcactcctcctgcattgtttagacaaccctccaaaaggatccagaggctgtcacagcccaatggattcaaaagacagtgtctactaaatagac

SEQ ID NO: 779361 - DNA, 120 bp, Artificial Sequence
  ENSG00000249693_7 (sequence is synthesized)
ccttcagtgataactcagcaagagattctcttcgaatctctgatccttctccccggatattacaactctcagtagccaaaggcacagacccaaactatcatccttcaaaaaaaatgcaaa

SEQ ID NO: 779362 - DNA, 120 bp, Artificial Sequence
  ENSG00000249693_8 (sequence is synthesized)
ccaagatttcactttctaccctgagtgcgattgcaactccaagaattatagagcttgcccacccaaggatcaagttagagggtctgtgctatgaaagacaaagaagtgaactgcccatcc

SEQ ID NO: 779363 - DNA, 120 bp, Artificial Sequence
  ENSG00000249693_9 (sequence is synthesized)
gtcctgtacctcctgctgccatgatagctaaacctagcccccgaacaatagctctagcgaagtccaagtctgttcatcaagattatctacctgaccgtgatgcccattggccagtatctt

SEQ ID NO: 779364 - DNA, 120 bp, Artificial Sequence
  ENSG00000249693_10 (sequence is synthesized)
atgctactactcattccaaagcatcacctaggattcaggaactagctaatccaaataagagggctcctgtgcgtattgtgtattatgatccagatgtctttaaaaccaagccagctgctt

SEQ ID NO: 779365 - DNA, 120 bp, Artificial Sequence
  ENSG00000249693_11 (sequence is synthesized)
tgaaagcacagtgttctcaaaggatctgggagttgtcacaacctcttacacgttaaatacagaaagccacaacagtcagaccctggttatgtatctagaacacatattagatgacttagt

SEQ ID NO: 779366 - DNA, 120 bp, Artificial Sequence
  ENSG00000249693_12 (sequence is synthesized)
tccctgttgcggtactgtcagtttacattcaccccttgcttcccctcccacaaaatgagacctttagggaaaaccaccatgatcattaaatagcagttgttgctgttaacctgtcgctga

SEQ ID NO: 779367 - DNA, 120 bp, Artificial Sequence
  ENSG00000249693_13 (sequence is synthesized)
agacttggttctatttcatggatccatcagacaggtgtggtatggataaagatcctatcctctggggtcaagtcctggatatggaccatagaagattacatttttattttcttgatatta

SEQ ID NO: 779368 - DNA, 120 bp, Artificial Sequence
  ENSG00000249709_0 (sequence is synthesized)
gtcttcctgtttcgtgtccgctgcgtttgggttccggtctccgcttctccagtggccccggtggctccaccgcagcgtctggcgcgctgggacctgcacaggccggagagagccgtaggc

SEQ ID NO: 779369 - DNA, 120 bp, Artificial Sequence
  ENSG00000249709_1 (sequence is synthesized)
aggaccccgggacaccctggaagccaggaaatggactcagtggcctctgaggatgtggctgtgaacttcacacttgaggagtgggctttgctggatccttcccagaagaaactctacaga

SEQ ID NO: 779370 - DNA, 120 bp, Artificial Sequence
  ENSG00000249709_2 (sequence is synthesized)
gatgtgatgcgggaaacctttagaaacctggcctgtgtaggaaaaaaatgggaagaccagagcattgaagattggtacaaaaatcaggggagaattttaagaaatcatatggaagaggga

SEQ ID NO: 779371 - DNA, 120 bp, Artificial Sequence
  ENSG00000249709_3 (sequence is synthesized)
ctcagtgaaagtaaagaatatgatcaatgtggagaagccttcagtcagattctcaatcttaatctgaacaagaaaattcctactatagtaagaccatgtgaatgtagtttgtgtgggaaa

SEQ ID NO: 779372 - DNA, 120 bp, Artificial Sequence
  ENSG00000249709_4 (sequence is synthesized)
gtcttcatgcatcattcatcccttagtaggcacatcagatctcaccttggacacaaaccatatgactatcaggaatatggagagaaaccatataaatgtaagcagtgtgggaaagccttc

SEQ ID NO: 779373 - DNA, 120 bp, Artificial Sequence
  ENSG00000249709_5 (sequence is synthesized)
agttcttgtcaatcctttcgaagacatgaaagaactcacactggtgagaaaccctatgcatgtccggaatgtgggaaagccttcatttctctcccaagtgttcgaagacacatgattaag

SEQ ID NO: 779374 - DNA, 120 bp, Artificial Sequence
  ENSG00000249709_6 (sequence is synthesized)
cacatgattaagcacactggagatggaccatataaatgtcaggaatgtgggaaagcctttgatcgcccaagtttatttcagatacatgaaagaactcacactggagagaaaccctatgaa

SEQ ID NO: 779375 - DNA, 120 bp, Artificial Sequence
  ENSG00000249709_7 (sequence is synthesized)
gcaaaagctttcatttctcttccaagttttcaaagacacatgattaggcacactggagatggaccttataaatgtcaggaatgtggaaaagcctttgaccgccccagtttatttcgaata

SEQ ID NO: 779376 - DNA, 120 bp, Artificial Sequence
  ENSG00000249709_8 (sequence is synthesized)
catgaaagaactcatactggagagaaaccccatgaatgtaaacagtgtgggaaggccttcatttctttcacaaattttcaaagtcatatgattaggcacactggggatggaccttataaa

SEQ ID NO: 779377 - DNA, 120 bp, Artificial Sequence
  ENSG00000249709_9 (sequence is synthesized)
tgtaaagtatgtgggagagcctttatttttcccagttatgttcgaaagcatgaaagaactcatactggggagaaaccctatgaatgtaataaatgtggtaaaaccttcagttcttccagt

SEQ ID NO: 779378 - DNA, 120 bp, Artificial Sequence
  ENSG00000249709_10 (sequence is synthesized)
aatgttcgaacacatgaaaggactcacactggagagaagccctatgaatgtaaggaatgcgggaaagccttcatttctctcccaagtgtccgaagacacatgataaagcacactggagat

SEQ ID NO: 779379 - DNA, 120 bp, Artificial Sequence
  ENSG00000249709_11 (sequence is synthesized)
cacatgataaagcacactggagatggaccttataaatgtcaggtatgtggtagagcctttgactgtcccagttcatttcaaatacacgaaagaactcacactggagagaaaccctatgaa

SEQ ID NO: 779380 - DNA, 120 bp, Artificial Sequence
  ENSG00000249709_12 (sequence is synthesized)
tcttaaaaggattagaaaacatatgatactgcacactggagatggaccttataaatgtcaggtatgtggtaaagcctttgactgtcctagttctgtccgaacacatgaaagaactcatac

SEQ ID NO: 779381 - DNA, 120 bp, Artificial Sequence
  ENSG00000249709_13 (sequence is synthesized)
tggagaaaaaccctatgaatgtaaagaatgtgggaaagcattcaattatgccagttccattagaatacatgaaagaactcataccggagaaaaaccctatgaatgtaagcaatgtggaaa

SEQ ID NO: 779382 - DNA, 120 bp, Artificial Sequence
  ENSG00000249709_14 (sequence is synthesized)
aacgttcagttattccagttcctttcaaagacatgaaagagctcataatggagataaaccttacgtaaagaatgtgggaaagctttcatttatcacacaaccttcgaatacctgtgaaaa

SEQ ID NO: 779383 - DNA, 120 bp, Artificial Sequence
  ENSG00000249709_15 (sequence is synthesized)
tgaatagtggaggacaggtctacaagtatctacatatctaaagaatatggaaagtcttcagtttgctttctgggtttcagacttgtttgggagctcacccctttctcctgtttctcactt

SEQ ID NO: 779384 - DNA, 120 bp, Artificial Sequence
  ENSG00000249709_16 (sequence is synthesized)
ttggaataggaatctctatcctgtgcctgtctcatattttggaaatacatgactagtttggttttcaccggttcggagctgaagaagaattttgcctcagcatgaattgagtctcatcca

SEQ ID NO: 779385 - DNA, 120 bp, Artificial Sequence
  ENSG00000249709_17 (sequence is synthesized)
tatctgagtgatgtgatattgagatgacactttggagtttgagtttaaacattaggcttcatgctggaattaactgagacttttgaggcctttgggatgagatgaatatattttacatgt

SEQ ID NO: 779386 - DNA, 120 bp, Artificial Sequence
  ENSG00000249709_18 (sequence is synthesized)
gatgacatggattttgggggccagaggtgtaatgttttggctgagtgtatgccacctcagattcatatgttgaaaccttacccccgtgccccccctctcccccacaatgtgatggtattt

SEQ ID NO: 779387 - DNA, 120 bp, Artificial Sequence
  ENSG00000249709_19 (sequence is synthesized)
ggaggccctgtctctggtggtttttaggattggaggacatcatgaagatggaggccttgtaattgggattagtttcctgataggaatccctagagagctagctttgcccttcaccatgag

SEQ ID NO: 779388 - DNA, 120 bp, Artificial Sequence
  ENSG00000249709_20 (sequence is synthesized)
agggtgcagtgagaagatagctatctttgaaccgggaagcaggcccttaccagacatggactatgccagtgccttgatattggacttcccagcctcccaaaccatgagaaataaatgttt

SEQ ID NO: 779389 - DNA, 120 bp, Artificial Sequence
  ENSG00000249709_21 (sequence is synthesized)
gttgattaattaagctttccaatttatggtattttgttttagcaacccaagctaagacacaatccaattttaaaatggaggaaaggacttgaatagacatttctccaaagaagataccca

SEQ ID NO: 779390 - DNA, 120 bp, Artificial Sequence
  ENSG00000249709_22 (sequence is synthesized)
gatggccaataagcacgtaacaatgctcgacatctttagtcattagggaaatacaaatcaaactcaagacatacatagcatctcattaggattagtagtatcaaagatggaaaacaagaa

SEQ ID NO: 779391 - DNA, 120 bp, Artificial Sequence
  ENSG00000249709_23 (sequence is synthesized)
atactgtcaaggatgtggaatgttggagaacattgtgcactatcactgggaatgtacagtggtataagcctgctgaaaacagtatggcagatccccagattaaaatatagaaataacata

SEQ ID NO: 779392 - DNA, 78 bp, Artificial Sequence
  ENSG00000249709_24 (sequence is synthesized)
gcacaggccggagagagccgtaggcaggaccccgggacaccctggaagccaggaaaaagatctcagctcactgcaacc

SEQ ID NO: 779393 - DNA, 88 bp, Artificial Sequence
  ENSG00000249709_25 (sequence is synthesized)
tctcaaactccagacctcaggtgatccgctcacctccgcctcccaaaatgctggttgtttgtgtacttgtaacctgagagggaaacgg

SEQ ID NO: 779394 - DNA, 89 bp, Artificial Sequence
  ENSG00000249709_26 (sequence is synthesized)
agacgtgagccaccgcgcccggcctcttgtttgtgtacttgtaacctgagagggaaacggagaataagaacctgacactctacggtaaa

SEQ ID NO: 779395 - DNA, 120 bp, Artificial Sequence
  ENSG00000249709_27 (sequence is synthesized)
ccagtggccccggtggctccaccgcagcgtctggcgcgctgggacctgcacaggccggagagagccgtaggcaggaccccgggacaccctggaagccaggaaatgggtagagattttgtc

SEQ ID NO: 779396 - DNA, 120 bp, Artificial Sequence
  ENSG00000249709_28 (sequence is synthesized)
tctgtatcctttcatctggactttggtgattaatgctaaatcctatcagatgggactttgaaatattaaatattagtgaattaaatattagtaaagaagttgtcatggaagtaacaataa

SEQ ID NO: 779397 - DNA, 120 bp, Artificial Sequence
  ENSG00000249715_0 (sequence is synthesized)
cttggactgaggagctccaaaaaggaagctgtggcgctgcgtagggaaggagggaagaaagtaggtctccgagatgctgcggcttgtggtgcagtcggccaagattgacccaccactagc

SEQ ID NO: 779398 - DNA, 120 bp, Artificial Sequence
  ENSG00000249715_1 (sequence is synthesized)
cccactacccaggccctgcatgtccatcgacttcagagatatcaagaaaagaactcgtgtggtggaagggaatgatcccgtgtggaatgagaccctaatctggcacctctggaaccgccc

SEQ ID NO: 779399 - DNA, 120 bp, Artificial Sequence
  ENSG00000249715_2 (sequence is synthesized)
cctggaaaatgactccttcctgcaagtcacccttcaggacatgggctcacaaaagaaagaaagattcattggcctggccacagtactgctcaagccattgttgaaacaaccaagtgaggt

SEQ ID NO: 779400 - DNA, 120 bp, Artificial Sequence
  ENSG00000249715_3 (sequence is synthesized)
cctttttgtgaaggacttgaccctgctcaaccattccatgaagcccacagattgtactgtcaccctacaggtggcccacatgagcaaccaggatattgagaagacaggagctgaagacca

SEQ ID NO: 779401 - DNA, 120 bp, Artificial Sequence
  ENSG00000249715_4 (sequence is synthesized)
cctgggcataacggcaagagaggcagccagtcagaaactgatggtccctggctccactgcgcacagggctctgtcctcaaagcctcagcactttcaggttcgagtgaaggtgtttgaagc

SEQ ID NO: 779402 - DNA, 120 bp, Artificial Sequence
  ENSG00000249715_5 (sequence is synthesized)
ccgacagctcatgggcaacaacatcaaaccagtggtgaaggtgtccatcgcaggccagcagcaccagacacgcatcaagatgggaaacaaccctttctttaatgagatcttcttccagaa

SEQ ID NO: 779403 - DNA, 120 bp, Artificial Sequence
  ENSG00000249715_6 (sequence is synthesized)
ttttcatgaggttcctgcaaagttctttgatgagaccatcttaatccaggtggtgaactcctcagcaatgagatacaaagcagagatcgggagatttcaaacagatattgggtttatcta

SEQ ID NO: 779404 - DNA, 120 bp, Artificial Sequence
  ENSG00000249715_7 (sequence is synthesized)
ccattctccaggtcacacactcctaaggaaatggctaggcctctgccagccaaataaccctggcagtggtgtgacaggctacctgaaagtcaccatctatgccctcggtgtgggagacca

SEQ ID NO: 779405 - DNA, 120 bp, Artificial Sequence
  ENSG00000249715_8 (sequence is synthesized)
ggccctgatagatcaaaagctgctctatggcaccgatgacaccgatattcagatcttcaagtcagcggtagtcccgatcaacatggcttacttacagctcttcatctactgcgcagagga

SEQ ID NO: 779406 - DNA, 120 bp, Artificial Sequence
  ENSG00000249715_9 (sequence is synthesized)
ccttcacctcaagaaacaccagtcagtgaatcctcagttggaggtggaactaattggggaaaagctcaggacacacatgcagacccaaaccgacaacccgatatggaaccagatcctgac

SEQ ID NO: 779407 - DNA, 120 bp, Artificial Sequence
  ENSG00000249715_10 (sequence is synthesized)
cttccggattcagctaccctgcctctccagctacatcaagttcagagtcttggactgccgcaagaaggactgcccggatgagattgggactgccagcctgtccctcaaccagatctcgtc

SEQ ID NO: 779408 - DNA, 120 bp, Artificial Sequence
  ENSG00000249715_11 (sequence is synthesized)
caccggagaagagatagaaggagtgtactccggcttcctgccctgctttggccccagcttcctgactctgcatgggggtaaaaaggcccctttcaggatccaggaagaaggcgcttgtat

SEQ ID NO: 779409 - DNA, 120 bp, Artificial Sequence
  ENSG00000249715_12 (sequence is synthesized)
tcccgactctgttagggatggtttagcttatcgaggccgagtcttcctggagttaatcacccaaatcaagtcctatcaagactccacgataaaggatctctcccatgaagtgaccaggat

SEQ ID NO: 779410 - DNA, 120 bp, Artificial Sequence
  ENSG00000249715_13 (sequence is synthesized)
agagaagcaccagaaccgccaaaagtatgggctgtgcgtcatcttcctttcctgtaccatgatgcccaactttaaagagctgatccatttcgaggtcagcatcggtcactatgggaacaa

SEQ ID NO: 779411 - DNA, 120 bp, Artificial Sequence
  ENSG00000249715_14 (sequence is synthesized)
gatggacctgaattacaagcctctagtctcaagcacaccgtacagcccagtgatatatgatgggaacatctaccattatgtgccctggtacaacaccaagcctgtcgtggccgtgacctc

SEQ ID NO: 779412 - DNA, 120 bp, Artificial Sequence
  ENSG00000249715_15 (sequence is synthesized)
caactgggaggacgtcagcttccgcatgaactgcctcaacctcctccacttcactcgggaccgcctgaaagccaacctggacaccctgaaatccacgcggaatccgaaggatccagctct

SEQ ID NO: 779413 - DNA, 120 bp, Artificial Sequence
  ENSG00000249715_16 (sequence is synthesized)
cctctaccagtgggagaaactgctgagggagctggcagaggactgcaagcgccctctgccctgcatgacctatcagcccaaagccaccagcctggacaggaagaggtggcagctccgcag

SEQ ID NO: 779414 - DNA, 120 bp, Artificial Sequence
  ENSG00000249715_17 (sequence is synthesized)
cctcctcctgcaggaactggcccaaaaggccaagcaagccaagcccaaggacatggtggccacagcggaggactggctgtaccgcctcaacaccgtgctccctgagccccagatgggcct

SEQ ID NO: 779415 - DNA, 120 bp, Artificial Sequence
  ENSG00000249715_18 (sequence is synthesized)
ccctgacgtgatgatttggctggtggccaaggagcagcgagtggcctatgcacaggtgcctgcccactccgtcctcttctccccggcaggggctctgcactccggcaggctctgtgggaa

SEQ ID NO: 779416 - DNA, 120 bp, Artificial Sequence
  ENSG00000249715_19 (sequence is synthesized)
gatacagacactcttcctacagtacccagagggtgaaggacagaaggatgtgctcccagctcacctccgggtctgcatgtggcttggcaatgtcacagacagcaaggacctgcagctgct

SEQ ID NO: 779417 - DNA, 120 bp, Artificial Sequence
  ENSG00000249715_20 (sequence is synthesized)
ccgccagggtgacacagcggtgtacgccgagatgtatgagaatcaggccaagtataaagaccagtgggggcagcaggggctgtatcactgccccaacttctcggatgtcatggggaacaa

SEQ ID NO: 779418 - DNA, 120 bp, Artificial Sequence
  ENSG00000249715_21 (sequence is synthesized)
gaccctccccatgacggatttccaaccacccctgggatggcactggcaggacagctggacagtggaacctcagagaaggctcctcctggacatagacatcaacaagagccaggtgctgga

SEQ ID NO: 779419 - DNA, 120 bp, Artificial Sequence
  ENSG00000249715_22 (sequence is synthesized)
ggaggtatatgagaaccagggccgtgacaccagaggggcctgggggcctgccgccatcccaaacacagacgtgaatggacagcccatggaggcccgggagaacgtgaagtgcccccaagg

SEQ ID NO: 779420 - DNA, 120 bp, Artificial Sequence
  ENSG00000249715_23 (sequence is synthesized)
ctggcactttaagaaggactgggtggtggagctgaaccacgcagtggacagtaagggctgggagtatggagtggggatcccaccgtcgggcctgccccaggtctggagcccggtggagaa

SEQ ID NO: 779421 - DNA, 120 bp, Artificial Sequence
  ENSG00000249715_24 (sequence is synthesized)
gacctaccactcgtgccgccgccggcgctgggcgcgtgtgcgcttcaggaaccatggggagctgagccacgagcaggagaccctctccttcctgcagctgggcctggccaagggcgagga

SEQ ID NO: 779422 - DNA, 120 bp, Artificial Sequence
  ENSG00000249715_25 (sequence is synthesized)
ggagggctgggagtatgacaccttcggctccaagttccacctcaaccctcagccccagagccggttccgccgccgctgctggcgccgcaggctggcccccaacaaggacaagggcatcgc

SEQ ID NO: 779423 - DNA, 120 bp, Artificial Sequence
  ENSG00000249715_26 (sequence is synthesized)
gccatggggtctggacagacagttcagggacccccagaggcaggacacccggccccccaacttgcccttcatctactgcaccttcaataagccccactactaccagctcttctgctacat

SEQ ID NO: 779424 - DNA, 120 bp, Artificial Sequence
  ENSG00000249715_27 (sequence is synthesized)
ctaccaggcccggaacctggtgtccaatcagatcctgacattccaagggcccttcattcgggtggtcttcctgaaccacagccagtgcacccaaaccctgaggagctctgcaggccccac

SEQ ID NO: 779425 - DNA, 120 bp, Artificial Sequence
  ENSG00000249715_28 (sequence is synthesized)
atgggcccagacactcatcttccagcacctccttctgtacgagaacccacaggacaccaaagagagcccaccgcttgtggtgctggagctgtggcagcgtgacttctggggcaaggagag

SEQ ID NO: 779426 - DNA, 120 bp, Artificial Sequence
  ENSG00000249715_29 (sequence is synthesized)
cttgtggggacggagcgtgtggcccccaatggtctggctggatctccaggaccggatcctgccccccatgaggtggcatccccttgtaaaggagttggggaaggaagagggcgagatctt

SEQ ID NO: 779427 - DNA, 120 bp, Artificial Sequence
  ENSG00000249715_30 (sequence is synthesized)
ggcatcctgtgagctgatcctccagactgagaagcttggagagaagcagctgcctatcttaagcgttccctggaagaatggggcatacacactccccaagagcatccagcccacgataaa

SEQ ID NO: 779428 - DNA, 120 bp, Artificial Sequence
  ENSG00000249715_31 (sequence is synthesized)
gaggatggccattgagatcctggcctggggccttcggaacatgaagaaggcgagctccccccagctcctggtggaattcggggaagagtccctgaggacagaacccatcagggactttca

SEQ ID NO: 779429 - DNA, 120 bp, Artificial Sequence
  ENSG00000249715_32 (sequence is synthesized)
gaccaaccccaacttccccgagtctgagtctgtcctagtcctcacagtgctcatgccgacggaggaggcctatgcactgcccctcgtggtgaaggtggtagacaactgggccttcggcca

SEQ ID NO: 779430 - DNA, 120 bp, Artificial Sequence
  ENSG00000249715_33 (sequence is synthesized)
gcagaccgtgacgggccaggccaacatcgacttcctccagccctacttctgtgacccctgggctcaagactatatgcacccaaagcttccaacgctgtctgagaagaagcaccaagactt

SEQ ID NO: 779431 - DNA, 120 bp, Artificial Sequence
  ENSG00000249715_34 (sequence is synthesized)
cctaggctacctctacagaaagttctggttcaagtccagtaaagcagaggatgagtatgagcatgaggtggactggtggagcaagctgttctgggccacagatgagcacaagtccctgaa

SEQ ID NO: 779432 - DNA, 120 bp, Artificial Sequence
  ENSG00000249715_35 (sequence is synthesized)
gtacaagtacaaagactaccacaccctcaaggtgtatgagtgtgagctggaggccgtgccagccttccagggcctgcaggacttctgccagaccttcaaactctaccaggagcagcccaa

SEQ ID NO: 779433 - DNA, 120 bp, Artificial Sequence
  ENSG00000249715_36 (sequence is synthesized)
gttggacagccccgtggtaggggagttcaagggccttttccgcatctacccctttcctgagaatccagaagccccaaagcccccgctgcagttcttggtttggccagagagagaggactt

SEQ ID NO: 779434 - DNA, 120 bp, Artificial Sequence
  ENSG00000249715_37 (sequence is synthesized)
cccccagccgtgcttggtgcgggtgtacatggtacgagccatcaacctgcagccccaggactacaatggcctgtgtgacccttatgtgatcctgaaactgggcaagacagagcttggcaa

SEQ ID NO: 779435 - DNA, 120 bp, Artificial Sequence
  ENSG00000249715_38 (sequence is synthesized)
ccgggacatgtaccagcccaacactctggatcccatctttggcatgatgtttgaactcacctgcaacatacccctggagaaggacctagagatccagctctatgacttcgacctattttc

SEQ ID NO: 779436 - DNA, 120 bp, Artificial Sequence
  ENSG00000249715_39 (sequence is synthesized)
acctgatgataagataggaaccacagtcatcgaccttgaaaaccgactcctatctggctttggagctcattgtgggctctccaaatcctactgccagtcagggccctttagatggcggga

SEQ ID NO: 779437 - DNA, 120 bp, Artificial Sequence
  ENSG00000249715_40 (sequence is synthesized)
tcagatgcccccaagctacctcctagaacgctatgccaagcggaaagggctacctccgcctctgttcagtcctgaggaagatgctgttttctataatgggaaaaagttcaagctgcaaag

SEQ ID NO: 779438 - DNA, 120 bp, Artificial Sequence
  ENSG00000249715_41 (sequence is synthesized)
ctttgagcccaaaacccctactgttcatggtttgggacccaagaaggaacgccttgcactgtacctcctgcacacccaggggctggtacctgagcacgtggagacccgcacactgtacag

SEQ ID NO: 779439 - DNA, 120 bp, Artificial Sequence
  ENSG00000249715_42 (sequence is synthesized)
ccacagccagccaggcatcgaccagggaaaggtgcaaatgtgggtggacatcttccccaagaagctggggcctcctggcccccaagtcaacatcaaccccagaaagcctaaacggtatga

SEQ ID NO: 779440 - DNA, 120 bp, Artificial Sequence
  ENSG00000249715_43 (sequence is synthesized)
gctgcgatgcatcatctggaagactgccaatgtggacctggtggatgacaatttaagtagagagaagacgagcgacatctacatcaaagggtggttatacgggctggagaaggacatgca

SEQ ID NO: 779441 - DNA, 120 bp, Artificial Sequence
  ENSG00000249715_44 (sequence is synthesized)
gaagacagacatccactaccactcgctgactggggaggccgacttcaactggcggttcatctttaccatggactacctggcggcggagcgcacgtgtgtccagagccagaaggattacat

SEQ ID NO: 779442 - DNA, 120 bp, Artificial Sequence
  ENSG00000249715_45 (sequence is synthesized)
atggagcctggatgccacgtccatgaagttcccagcccgacttatcatccaggtctgggacaatgacatcttctcccccgacgacttcctaggggtcctggagctggatttgtctgacat

SEQ ID NO: 779443 - DNA, 120 bp, Artificial Sequence
  ENSG00000249715_46 (sequence is synthesized)
gcccctcccggctcggcacgccaagcagtgctccatcaggatgatggacgccgaccccaagtggccctatttcatccaatacaagcacttctccctctttaagaagaagactgtgactgg

SEQ ID NO: 779444 - DNA, 120 bp, Artificial Sequence
  ENSG00000249715_47 (sequence is synthesized)
ctggtggccttgccaggtcctcgatggtggcaaatggcgcttgtcgggcaaggtgaagatgagcctggagattctgtcagagaaggaagccttaatcaagccagccgggcgaggccagtc

SEQ ID NO: 779445 - DNA, 120 bp, Artificial Sequence
  ENSG00000249715_48 (sequence is synthesized)
ggaacccaaccagtaccccacacttcatcctcccctacgcaccaacacctctttcacgtggctgcggtcaccagttcaaaacttctgctatattttctggaaacgctatcgcttcaaact

SEQ ID NO: 779446 - DNA, 120 bp, Artificial Sequence
  ENSG00000249715_49 (sequence is synthesized)
catagcctttatggtcatatcgattatagcacttatgctgtttaacttcatctattcagctccgcactatttggccatgagctggatcaaacctcaacttcagctgtatcctcccattaa

SEQ ID NO: 779447 - DNA, 120 bp, Artificial Sequence
  ENSG00000249715_50 (sequence is synthesized)
aatattcaatatcatcaattcactaaacaccagcaacgccagctcttccatccttcccacccaggatccaaacctaaagcctacaatagaccatgagtggaaactccacccaggacccac

SEQ ID NO: 779448 - DNA, 120 bp, Artificial Sequence
  ENSG00000249715_51 (sequence is synthesized)
aaatcacctgagtgatattttcccagaacttccagccccaggagactaattagtccatgctgcctggctttcctcctgctaccaacagccctccccttgggctggctaccagttctttgt

SEQ ID NO: 779449 - DNA, 120 bp, Artificial Sequence
  ENSG00000249715_52 (sequence is synthesized)
ttctatcttctagaatatatgcaagatgctaggaatattctggctattgtgttcagaaatcactttcaacaagacgagcagagctgtaattttccactgaaataaacaagttctataaca

SEQ ID NO: 779450 - DNA, 120 bp, Artificial Sequence
  ENSG00000249715_53 (sequence is synthesized)
aggcgggggtggtctggagtgcgctgcagccttctgctggtcctccctgactactggatccaaagctcacaccccgaaaaagactacctgggaggtggagggagacaggagagaaacgaa

SEQ ID NO: 779451 - DNA, 120 bp, Artificial Sequence
  ENSG00000249715_54 (sequence is synthesized)
gcagtgaggagtaggcaaagggctgtagcatgcatgatcacttgtgggactcacgctgcccctgcgcagtagcaactactttgcagagaaggaaatagaggctccaagagataacacatt

SEQ ID NO: 779452 - DNA, 120 bp, Artificial Sequence
  ENSG00000249715_55 (sequence is synthesized)
ccacgcacagtgatgcagggactaactgacagggccatttaggcccagccctgtctgactgcagatgccaggatgttgctcacctctcttctgagagtagcatgagggtcctcattcaga

SEQ ID NO: 779453 - DNA, 120 bp, Artificial Sequence
  ENSG00000249715_56 (sequence is synthesized)
agctgtgtgccctgccgcaaatgtggcaaagagcacaagacggtcaggcctctgggactgaaggcttccccaagatcaggcaacttggctggttcccgctttaggccccgaggaggccca

SEQ ID NO: 779454 - DNA, 120 bp, Artificial Sequence
  ENSG00000249715_57 (sequence is synthesized)
aagtcagggtgcagctatttcctggcaggatgccaggtcactgaatggccatggggtcctcaatgagctagacggcacaggggccctgagaaatccaggcacttcctgcttcttcaggcc

SEQ ID NO: 779455 - DNA, 120 bp, Artificial Sequence
  ENSG00000249715_58 (sequence is synthesized)
gccagtggccagaggtcacctccctcatgggttgggggacagcgtcccagccccgagggcaagcactgatccctcacaggacggggaagcctgtccttgtgcgccttcagacactggctc

SEQ ID NO: 779456 - DNA, 120 bp, Artificial Sequence
  ENSG00000249715_59 (sequence is synthesized)
ctctgcagccccattccctggccctgcaggctcctgctgcaccgctattgcccctcagcccccttctctggccaggaccccattacagaggcgctgcctgccccttgtcctgccctcctt

SEQ ID NO: 779457 - DNA, 120 bp, Artificial Sequence
  ENSG00000249715_60 (sequence is synthesized)
ttgactagggtgtcttcatgtgtttgttccacaagcatttactgagtgtctactgagggccaagcactgaaaatacagaacagtataactcagagccctgtatctgaggagctggtgggc

SEQ ID NO: 779458 - DNA, 120 bp, Artificial Sequence
  ENSG00000249715_61 (sequence is synthesized)
tggtgggggcacaactcatgaatccgtaaacaattacaacagagcagatcctggtttacagaggtctgggagtattgctattggaggttcgaagcacagacccagaccatgtatgtctca

SEQ ID NO: 779459 - DNA, 120 bp, Artificial Sequence
  ENSG00000249715_62 (sequence is synthesized)
ttgctgctggagccccaaattgtagcactgtgcctgatacacagtaggtgctccataaatacttgttgaattaattagtaaatgaacaaataaaagataaaagcacagtggaagctggaa

SEQ ID NO: 779460 - DNA, 120 bp, Artificial Sequence
  ENSG00000249715_63 (sequence is synthesized)
ggagtaagtgagtaatgaggctgggggtggcggagaggactcagaagggctccagcaaccctgaaggaagattttaccagggaaagacagacaggatgggaaaagataattcaggaaaaa

SEQ ID NO: 779461 - DNA, 120 bp, Artificial Sequence
  ENSG00000249715_64 (sequence is synthesized)
gtcatggtgttttcaaaggcctggaaccaagcaagccgcagacttgacagcagaactatagctatgggtgtggctggaggagactggctggaggggagcctacagtgtgggctggggtcc

SEQ ID NO: 779462 - DNA, 120 bp, Artificial Sequence
  ENSG00000249715_65 (sequence is synthesized)
catcctggacactactcaggagccatggaggacttaagcagaggagtgacaggcctaggtttgcatttgggaaagaagtttctggctgccacggggagcagggacagagtggactggcag

SEQ ID NO: 779463 - DNA, 120 bp, Artificial Sequence
  ENSG00000249715_66 (sequence is synthesized)
ggcaacctagaaggaggtgtgggctcaaatctccatcctgggcagctagctgggccctgagttctccaggaatctcctaccattccccattctgggcagaaaaccctccaggaggctggg

SEQ ID NO: 779464 - DNA, 120 bp, Artificial Sequence
  ENSG00000249715_67 (sequence is synthesized)
cttggtggctcatgcctgtaattccagaactttgggagaccgtggtgagtggatcacctgaggtccggagttcgaaaccatcctgaccaatatggtgaaaccctgtctcttttgtaaaaa

SEQ ID NO: 779465 - DNA, 88 bp, Artificial Sequence
  ENSG00000249715_68 (sequence is synthesized)
gctgaggcaggagaatcgtttgaacccgaggttgcagtgagttgagattgcaccaccacctaaaaataggaaaccctctaggagcccg

SEQ ID NO: 779466 - DNA, 120 bp, Artificial Sequence
  ENSG00000249715_69 (sequence is synthesized)
accctctaggagcccgggaggcctctgcttctgggggagcatgagagaagtggcacaagttgagtatcccttacccaaaatgcatggtatcagaagtgttttggatttcagatttttttt

SEQ ID NO: 779467 - DNA, 120 bp, Artificial Sequence
  ENSG00000249715_70 (sequence is synthesized)
gggaatctggaatatttgcattgtaccagttcagcattcgtaataatgaaaatctgaaacccagaatgctccagtgagcatttcctttgagggtcatgttggcactcagaaagtttcaga

SEQ ID NO: 779468 - DNA, 120 bp, Artificial Sequence
  ENSG00000249715_71 (sequence is synthesized)
ttttggagcattttttatttcagatttttggattaggaatactcagcctgtacttgtaaacccattgaaatgggtaaagttgtggaaagaagcacattattctgagctttcaggtttact

SEQ ID NO: 779469 - DNA, 120 bp, Artificial Sequence
  ENSG00000249715_72 (sequence is synthesized)
gagtgcttgggtgaagtggcggaagaaatcatccactctaccccaattctctttgcctcagatcttcttccagaattttcatgaggttcctgcaaagttctttgatgagaccatcttaat

SEQ ID NO: 779470 - DNA, 120 bp, Artificial Sequence
  ENSG00000249715_73 (sequence is synthesized)
ccaggtgaggagccaaactggtccccagcaaggtgggtttcttgtcccacttcaatactgggaagcactacagctccagcccccacccttagagccaggggcacttcagattgtcttcct

SEQ ID NO: 779471 - DNA, 120 bp, Artificial Sequence
  ENSG00000249715_74 (sequence is synthesized)
gatccccaccactttcttcaccccctggcacccagattattcattcatttactcatttattcaacaaatgttgtggattgccaactgccaggccctgaactgggcgccaaggtgaacaag

SEQ ID NO: 779472 - DNA, 120 bp, Artificial Sequence
  ENSG00000249715_75 (sequence is synthesized)
gcagccccttcccatgtgccaggattttcaagccaccaaaggcccctccaagtagaatactccattccctaaccaaagggagccagtaacaatgtggaacatgtggttatcaggtgccta

SEQ ID NO: 779473 - DNA, 120 bp, Artificial Sequence
  ENSG00000249715_76 (sequence is synthesized)
ctatgtgcccagcacagggctaaggagaacaaagaggcctcttcctttgaagaatttactgttcttgggaacaaaggcacagaggaaacaaccaggagagcatgtaatggataacgttga

SEQ ID NO: 779474 - DNA, 120 bp, Artificial Sequence
  ENSG00000249715_77 (sequence is synthesized)
gtgcaacaccttgctttgtgttgacttggggcaaggaaattgacctctctgatcaatttcctcatcagtaaaatggaattaaaaatctgaacctcacagggttcctctgagagtgaaatg

SEQ ID NO: 779475 - DNA, 120 bp, Artificial Sequence
  ENSG00000249715_78 (sequence is synthesized)
agaacacccatgtgcaagtgtctgccccattaggaagcattcaatacgtcaggaggatcctggttgtgcctttgctatacctcttacaggggctgagggaaattgggattgtgaataatt

SEQ ID NO: 779476 - DNA, 120 bp, Artificial Sequence
  ENSG00000249715_79 (sequence is synthesized)
aaaatatttctgggaactcccttgcaggtggtgaactcctcagcaatgagatacaaagcagagatcgggagatttcaagtgagtactgtacatgggaggaggttcagtgaaacagttatt

SEQ ID NO: 779477 - DNA, 120 bp, Artificial Sequence
  ENSG00000249715_80 (sequence is synthesized)
gaaacagttattaaaacagagacccatgctgggctccatgcccaagtctagggaaaaggacttggattttcacacagaaagatccagacttggccgggtgcagtggctcgcacctgtaat

SEQ ID NO: 779478 - DNA, 120 bp, Artificial Sequence
  ENSG00000249751_0 (sequence is synthesized)
actccctctctcttctccactatggacagagcctccactgagctgctgcctgcccgccacatacccagctgacatgggcaccgcaggagccatgcagctgtgctgggtgatcctgggctt

SEQ ID NO: 779479 - DNA, 120 bp, Artificial Sequence
  ENSG00000249751_1 (sequence is synthesized)
cctcctgttccgaggccacaactcccagcccacaatgacccagacctctagctctcagggaggccttggcggtctaagtctgaccacagagccagtttcttccaacccaggatacatccc

SEQ ID NO: 779480 - DNA, 120 bp, Artificial Sequence
  ENSG00000249751_2 (sequence is synthesized)
ttcctcagaggctaacaggccaagccatctgtccagcactggtaccccaggcgcaggtgtccccagcagtggaagagacggaggcacaagcagagacacatttcaaactgttccccccaa

SEQ ID NO: 779481 - DNA, 120 bp, Artificial Sequence
  ENSG00000249751_3 (sequence is synthesized)
ttcaaccaccatgagcctgagcatgagggaagatgcgaccatcctgcccagccccacgtcagagactgtgctcactgtggctgcatttggtgttatcagcttcattgtcatcctggtggt

SEQ ID NO: 779482 - DNA, 120 bp, Artificial Sequence
  ENSG00000249751_4 (sequence is synthesized)
cccagaaacctgggagttcagggctgtctgaaagctgctccacagccaatggagagaaagacagcatcacccttatctccatgaagaacatcaacatgaataatggcaaacaaagtctct

SEQ ID NO: 779483 - DNA, 120 bp, Artificial Sequence
  ENSG00000249751_5 (sequence is synthesized)
cagcagagaaggttctttaaaagcaactttgggtccccatgagtccaaggatgatgcagctgccctgtgactacaaggaggaagagatggaattagtagaggcaatgaaccacatgtaaa

SEQ ID NO: 779484 - DNA, 120 bp, Artificial Sequence
  ENSG00000249751_6 (sequence is synthesized)
ttattttattgtttcatgtctgcttctagatctaaaggacactagcattgccccagatctgggagcaagctaccaacaggggagactctttcctgtatggacagctgctgtggaaatact

SEQ ID NO: 779485 - DNA, 120 bp, Artificial Sequence
  ENSG00000249751_7 (sequence is synthesized)
gcctgcttctcccacctcctcagagccacaggaaagaggaggtgacagagagagagcaaggaaagtgatgaggtggattgatactttctactttgcattaaaattattttctagcctgca

SEQ ID NO: 779486 - DNA, 120 bp, Artificial Sequence
  ENSG00000249853_0 (sequence is synthesized)
gggagggtgtggactggcagccactctgcagctggtcgccagggacccggtccctcctgcgcgcccaagtgatggaggggaagagattcgcttagacacacacacgcgcacacagctggg

SEQ ID NO: 779487 - DNA, 120 bp, Artificial Sequence
  ENSG00000249853_1 (sequence is synthesized)
gctcgggcgctctgggggccgggcggcggccgtgacagcgccagccgcggggagcggggcgcccgcacagcttggcaccggaggctcgaggacgcaggaagggaagatcccagtcacact

SEQ ID NO: 779488 - DNA, 120 bp, Artificial Sequence
  ENSG00000249853_2 (sequence is synthesized)
ggaagggaagatcccagtcacactgagtgttgctcttttgggcggattgggagggagcgggctgcccgaggagctgtcaccgaggacgcccgaagtctcgccctctgcgcgcagggtccg

SEQ ID NO: 779489 - DNA, 120 bp, Artificial Sequence
  ENSG00000249853_3 (sequence is synthesized)
ctcgccctctgcgcgcagggtccggggctgcgccggtgccctcgtggggcaaggaggatgcgcacctccccccgcagagcggctgcggtctccggcactgcgcggactccggctcctgcg

SEQ ID NO: 779490 - DNA, 120 bp, Artificial Sequence
  ENSG00000249853_4 (sequence is synthesized)
cgggagcgcgccctgccgcacctggttccagcctctcggggaagtgcaggaaacgcgccctaaactccactacttctcgcccgcctgcccccccgcccggctccccgcctcagacctcgc

SEQ ID NO: 779491 - DNA, 120 bp, Artificial Sequence
  ENSG00000249853_5 (sequence is synthesized)
cgccgccgccgccgccgccgccgcctgcgtgtggggcccgctcgcgtcttactcacacgcgccacgcacagccctgttggtttgctctcattcacgccgactcgctctccgccgagccta

SEQ ID NO: 779492 - DNA, 120 bp, Artificial Sequence
  ENSG00000249853_6 (sequence is synthesized)
cctagcccgggcatccgaaactactggaccaactgccgtccggaccgcagcagcggccgggtgacccccacgcgacccgccgccgacccccgcgccctgaggctcccgcccgcgccgcca

SEQ ID NO: 779493 - DNA, 120 bp, Artificial Sequence
  ENSG00000249853_7 (sequence is synthesized)
cggggaccacgagataatcagatactcactgtcttcagcattggtgtcttctattctcaacggcatttctggtggccaccccaggagtctccctgacctgttttaaaacccttggaaatt

SEQ ID NO: 779494 - DNA, 120 bp, Artificial Sequence
  ENSG00000249853_8 (sequence is synthesized)
aaggagagaatccactacatatattcctttgaaagtttccaccatatatgttcaaaaattgctgaatgagcacaaggatttgaaggtgctaaagcaagggataaaccaaaaggacagcca

SEQ ID NO: 779495 - DNA, 120 bp, Artificial Sequence
  ENSG00000249853_9 (sequence is synthesized)
gtaggtgaggagaggccatggaatacccgccaacaagataatcatcgctggaataatagggacctgtctgaatgtaggctgcagcagtcctgaaggttgatggagggccatgctattcaa

SEQ ID NO: 779496 - DNA, 120 bp, Artificial Sequence
  ENSG00000249853_10 (sequence is synthesized)
acagcaggcgtggctgagacagaagctcctggtgctgggaagccttgccgttgggagtctcctgtatctagtcgccagagttgggagcttggataggctacaacccatttgccccattga

SEQ ID NO: 779497 - DNA, 120 bp, Artificial Sequence
  ENSG00000249853_11 (sequence is synthesized)
aggtcgactgggtggagcccgcactcaggctgaattcccacttcgcgccctgcagtttaagcgtggcctgctgcacgagttccggaagggcaacgcttccaaggagcaggttcgcctcca

SEQ ID NO: 779498 - DNA, 120 bp, Artificial Sequence
  ENSG00000249853_12 (sequence is synthesized)
tgacctggtccagcagctccccaaggccattatcattggggtgaggaaaggaggcacaagggccctgcttgaaatgctgaacctacatccggcagtagtcaaagcctctcaagaaatcca

SEQ ID NO: 779499 - DNA, 120 bp, Artificial Sequence
  ENSG00000249853_13 (sequence is synthesized)
cttttttgataatgatgagaattatggtaagggcattgagtggtataggaaaaagatgcctttttcctaccctcagcaaatcacaattgaaaagagcccagcatattttatcacagagga

SEQ ID NO: 779500 - DNA, 120 bp, Artificial Sequence
  ENSG00000249853_14 (sequence is synthesized)
ggttccagaaaggatttacaaaatgaactcatccatcaagttgttgatcattgtcagggagccaaccacaagagctatttctgattatactcaggtgctagaggggaaggagaggaagaa

SEQ ID NO: 779501 - DNA, 120 bp, Artificial Sequence
  ENSG00000249853_15 (sequence is synthesized)
caaaacttattacaagtttgagaagctggccatagaccctaatacatgcgaagtgaacacaaaatacaaagcagtaagaaccagcatctacaccaaacatctggaaaggtggttgaaata

SEQ ID NO: 779502 - DNA, 120 bp, Artificial Sequence
  ENSG00000249853_16 (sequence is synthesized)
gaacttcagctcgtggagaagttcctaaatctgcctccaaggataagtcaatacaatttatacttcaatgctaccagagggttttactgcttgcggtttaatattatctttaataagtgc

SEQ ID NO: 779503 - DNA, 120 bp, Artificial Sequence
  ENSG00000249853_17 (sequence is synthesized)
ctggcgggcagcaaggggcgcattcatccagaggtggacccctctgtcattactaaattgcgcaaattctttcatccttttaatcaaaaattttaccagatcactgggaggacattgaac

SEQ ID NO: 779504 - DNA, 120 bp, Artificial Sequence
  ENSG00000249853_18 (sequence is synthesized)
tggccctaaaataatatgtcatacaacactatgtgttgtgcctggagacacacaatgtctcctgtagattaaaatatgcacttttcctaggcagagctatccaagtcatttttccatgta

SEQ ID NO: 779505 - DNA, 120 bp, Artificial Sequence
  ENSG00000249853_19 (sequence is synthesized)
tatttgtacatacgcagtgtgtgaccaaatataagatcagttctttttctactgaaaatttacgaaaaaaaaaaaattgctgtctgcatagtcgcatcttttaagctatttacaaaagag

SEQ ID NO: 779506 - DNA, 120 bp, Artificial Sequence
  ENSG00000249853_20 (sequence is synthesized)
aagaggtggtggtattgggggaaagtgacttcagctattctcaaagagttagtcttcctttgattcagaatttgtcacccgccattttcatagatttaagccaaaagataaatgtgtgaa

SEQ ID NO: 779507 - DNA, 120 bp, Artificial Sequence
  ENSG00000249853_21 (sequence is synthesized)
aatgtaccaatggctgcgaagcttcaggaagtagaggatccagtgatgcattttttttttcctaagggaaagctggctctttaattcagatgctgaattggtgccatgaaaacagaaaat

SEQ ID NO: 779508 - DNA, 120 bp, Artificial Sequence
  ENSG00000249853_22 (sequence is synthesized)
gctattttcttattatttaaaagaacgtcttatctcataaaattgacattgttccaaagttcttgtggtgattttgcactattgttttctcgtatggaccatggtgtcacttgtagcatg

SEQ ID NO: 779509 - DNA, 120 bp, Artificial Sequence
  ENSG00000249853_23 (sequence is synthesized)
tcaatcacacattggaaagtcaagtccttttacttccatgttgtatgtcaacagagagaaatgtcatgtacataatgtatattgttgtaaatactggtttcacactaagtaattctattt

SEQ ID NO: 779510 - DNA, 120 bp, Artificial Sequence
  ENSG00000249853_24 (sequence is synthesized)
tgtaaactgaatatggctatttaatttattgtgaaaattaaatttattgtggtatttaaaaatggaatggattaaaattactctatgtgcaattttttttttttttactcattttgtttt

SEQ ID NO: 779511 - DNA, 120 bp, Artificial Sequence
  ENSG00000249853_25 (sequence is synthesized)
acgtgccccctgctggcttccaaaatggaagctgtttacgtgcatatgagagcacttggaaagatgtgcttccctgctggatttctgtaccccagtgaaaatgtatttatgaagtgaggt

SEQ ID NO: 779512 - DNA, 120 bp, Artificial Sequence
  ENSG00000249853_26 (sequence is synthesized)
tgagtatattaaaaaagaaaaacctcaaccatctggaaatcaagtataatagccacctcaaagaaccctagtgctgctctgctacaactttgtaacaattaatttactcgcagttgctgc

SEQ ID NO: 779513 - DNA, 120 bp, Artificial Sequence
  ENSG00000249853_27 (sequence is synthesized)
tgctcaggaagagagacaaggaatattttaacagaatcaaggcatagaagaatcaccattttatttgaacctctaatcagagtcagaccagtagagaaattaaataagattagaaaactc

SEQ ID NO: 779514 - DNA, 120 bp, Artificial Sequence
  ENSG00000249853_28 (sequence is synthesized)
tgtactgaaagctgctgatgcttcaaaaatgaaaacaagatctcacaactctccctgttagttgaaaatatatcaatttgctctgaaaggattcagctgcctagtgttgccattactaac

SEQ ID NO: 779515 - DNA, 120 bp, Artificial Sequence
  ENSG00000249853_29 (sequence is synthesized)
ataaacatatggctcatatttccatccagagaaattaatgctaaattggtgcctcgctaacatcagatacactgtattatgcttaaatatattcagtaaaatgtggaaaggggtattaac

SEQ ID NO: 779516 - DNA, 120 bp, Artificial Sequence
  ENSG00000249853_30 (sequence is synthesized)
aacgacaacaaaaagatggattttttttttctcacaatcacagttgctaatccagtgggagatgtttgagagagttttgttcaacatcacagtgagagtgcctagggaaatcagaaaatt

SEQ ID NO: 779517 - DNA, 120 bp, Artificial Sequence
  ENSG00000249853_31 (sequence is synthesized)
acaatggattcccctttgattgtaataagtgttgattttctccatgagttgtttatcctgtctagtgatttgatggtgaacttttctaaataaatagccctttcccctccggtgtcggta

SEQ ID NO: 779518 - DNA, 120 bp, Artificial Sequence
  ENSG00000249853_32 (sequence is synthesized)
gggataaaccaaaaggacagccagtaggtgaggagaggccatggaatacccgccaacaagataatcatcgctggaataatagggacctgtctgaataacccaagaagaggggaaaccagc

SEQ ID NO: 779519 - DNA, 120 bp, Artificial Sequence
  ENSG00000249853_33 (sequence is synthesized)
tctggagctagactgcctgcgtttgagatcctgctcagccaattactagctgggtgatcttggcaaggttttttgttaaaactgttatgccttaatatctttaaaatagggataataata

SEQ ID NO: 779520 - DNA, 120 bp, Artificial Sequence
  ENSG00000249860_0 (sequence is synthesized)
tgcaatagatatagtaccgtaagggaacaatgaaagaactatatcaagcaccaaaaagcaaagacaaatccttgcatcttttgaataatgaattaactagaataaacttcacaaagagag

SEQ ID NO: 779521 - DNA, 120 bp, Artificial Sequence
  ENSG00000249860_1 (sequence is synthesized)
ctctagccaagtcccccaaaatcagaggagcttctccagaacagctagaagagtacactcatttatgtggcaaaatagtgagaagattcattagtagcagtgacaagcctacggaggctg

SEQ ID NO: 779522 - DNA, 120 bp, Artificial Sequence
  ENSG00000249860_2 (sequence is synthesized)
gtgatagctgattgtccaaggtagaattttagttcaactttaaacttaacctacagaattacttaatcctcctgtaagtttaactgttaaagggggacggatcttcagatactagaaaat

SEQ ID NO: 779523 - DNA, 120 bp, Artificial Sequence
  ENSG00000249860_3 (sequence is synthesized)
aaccgtcctatagagagtaaaagattttaccaccataattggcctaaaagcagccaccaattaagaaagcgtttaagctcaacatctgactaacttcatttctaatcaccctgttaaact

SEQ ID NO: 779524 - DNA, 120 bp, Artificial Sequence
  ENSG00000249860_4 (sequence is synthesized)
cctaatattacattggactaatctattattcagtagaagcaataatgttagtgtaagtaacattaagacattatccattgcataagcttacatcagaccagaataatccactgacagtta

SEQ ID NO: 779525 - DNA, 120 bp, Artificial Sequence
  ENSG00000249860_5 (sequence is synthesized)
acaacctaatattaacaaatgattaatagacatcttattatctttattttaacccaatacagtcatgctctaaggaaagattacaaaaagtaaaaggaactcggcacatttcaccccatc

SEQ ID NO: 779526 - DNA, 120 bp, Artificial Sequence
  ENSG00000249860_6 (sequence is synthesized)
tctctaccaaaaacatcacccctagcattgctagtattagaggcactgcctgctcagtgacatatgtttaagggttgcggtatcctgaacttgcaaaggtagcataatcacttgttccct

SEQ ID NO: 779527 - DNA, 120 bp, Artificial Sequence
  ENSG00000249860_7 (sequence is synthesized)
gacttgtatgaatggccacaccagggtttagctgtctcttactttcaaccagtgaaattgacctacctatgaagaggcgggtataaataaataggagaagaccctgtggagcttgaattc

SEQ ID NO: 779528 - DNA, 120 bp, Artificial Sequence
  ENSG00000249860_8 (sequence is synthesized)
gaagaccctgtggagcttgaattcattaatgcaaatagattcaaacaagccaacaggccccaatgtatcatccctgcattaaaaattttggttggggtggccgggcacagtggctcacgc

SEQ ID NO: 779529 - DNA, 120 bp, Artificial Sequence
  ENSG00000249860_9 (sequence is synthesized)
aaaaaaaaattggttggggtgaccttggagcataattcaacctccgaaacgacttaaactaagaccgcactagtgtaagtcagttattacacattgacccaataattctatcaacaggat

SEQ ID NO: 779530 - DNA, 120 bp, Artificial Sequence
  ENSG00000249860_10 (sequence is synthesized)
aagtgaccctagggttaagagtgcaatcctattctagcatccatatcaacaacagggtttacgaccttgatgttggatcgggacatcctaaatggtgtagccgctattaagggatcattt

SEQ ID NO: 779531 - DNA, 120 bp, Artificial Sequence
  ENSG00000249860_11 (sequence is synthesized)
gttcaatgattaaagtccttcgtgatctgagttcagaccagagcaatccaggttggtttctatctatttagcatttttcccagtatgaaaggatatgagaaaccgggcccacttcacaaa

SEQ ID NO: 779532 - DNA, 120 bp, Artificial Sequence
  ENSG00000249861_0 (sequence is synthesized)
actcagaagactggacacaattccgaaggtcgcccagaaggagaggacaatgtcatttctaactgtgccatacaaactgcctgtgtctttgtctgttggttcctgcgtgataatcaaagg

SEQ ID NO: 779533 - DNA, 120 bp, Artificial Sequence
  ENSG00000249861_1 (sequence is synthesized)
gacactgatcgactcttctatcaacgaaccacagctgcaggtggatttctacactgagatgaatgaggactcagaaattgccttccatttgcgagtgcacttaggccgtcgtgtggtcat

SEQ ID NO: 779534 - DNA, 120 bp, Artificial Sequence
  ENSG00000249861_2 (sequence is synthesized)
gtcgtgagtttgggatatggatgttggaggagaatttacactatgtgccctttgaggatggcaaaccatttgacttgcgcatctacgtgtgtcacaatgagtatgaggtaaaggtaaatg

SEQ ID NO: 779535 - DNA, 120 bp, Artificial Sequence
  ENSG00000249861_3 (sequence is synthesized)
gtgaatacatttatgcctttgtccatcgaatcccgccatcatatgtgaagatgattcaagtgtggagagatgtctccctggactcagtgcttgtcaacaatggacggagatgatcacact

SEQ ID NO: 779536 - DNA, 120 bp, Artificial Sequence
  ENSG00000249861_4 (sequence is synthesized)
cctcattgttgaggaaaccctctttctacctgaccatgggattcctagagcctgctaacagaataatccctcctcaaccccttcccctacacttggtcattaaaacagcaccaaaccgta

SEQ ID NO: 779537 - DNA, 120 bp, Artificial Sequence
  ENSG00000249861_5 (sequence is synthesized)
aagactggacacaattccgaaggtcgcccagaaggagaggacaatgtcatttctaactgaagggagactgcacctgaccctgcacctctcacttattctcaataccctggcaggtgccat

SEQ ID NO: 779538 - DNA, 120 bp, Artificial Sequence
  ENSG00000249915_0 (sequence is synthesized)
agaggcggaagcggagtcggcctgagaggtctctcgtcgctgcaggcgcctcagcccagccgcgtgccttggcccatggccgcctactcttaccgccccggccctggggccggccctggg

SEQ ID NO: 779539 - DNA, 120 bp, Artificial Sequence
  ENSG00000249915_1 (sequence is synthesized)
cctgctgcaggcgcggcgctgccggaccagagcttcctgtggaacgttttccagagggtcgataaagacaggagtggagtgatatcagacaccgagcttcagcaagctctctccaacggc

SEQ ID NO: 779540 - DNA, 120 bp, Artificial Sequence
  ENSG00000249915_2 (sequence is synthesized)
acgtggactccctttaatccagtgactgtcaggtcgatcatatccatgtttgaccgtgagaacaaggccggcgtgaacttcagcgagttcacgggtgtgtggaagtacatcacggactgg

SEQ ID NO: 779541 - DNA, 120 bp, Artificial Sequence
  ENSG00000249915_3 (sequence is synthesized)
cagaacgtcttccgcacgtacgaccgggacaactccgggatgatcgataagaacgagctgaagcaggccctctcaggtttcggctaccggctctctgaccagttccacgacatcctcatt

SEQ ID NO: 779542 - DNA, 120 bp, Artificial Sequence
  ENSG00000249915_4 (sequence is synthesized)
attgccttcgacgacttcatccagggctgcatcgtcctgcagaggttgacggatatattcagacgttacgacacggatcaggacggctggattcaggtgtcgtacgaacagtacctgtcc

SEQ ID NO: 779543 - DNA, 120 bp, Artificial Sequence
  ENSG00000249915_5 (sequence is synthesized)
atggtcttcagtatcgtatgaccctggcctctcgtgaagagcagcacaacatggaaagagccaaaatgtcacagttcctatctgtgagggaatggagcacaggtgcagttagatgctgtt

SEQ ID NO: 779544 - DNA, 120 bp, Artificial Sequence
  ENSG00000249915_6 (sequence is synthesized)
cttcctttagattttgtcacgtggggacccagctgtacatatgtggataagctgattaatggttttgcaactgtaatagtagctgtatcgttctaatgcagacattggatttggtgactg

SEQ ID NO: 779545 - DNA, 120 bp, Artificial Sequence
  ENSG00000249915_7 (sequence is synthesized)
tctcattgtgccatgaggtaaatgtaatgtttcaggcattctgcttgcaaaaaaatctatcatgtgcttttctagatgtctctggttctatagtgcaaatgcttttattagccaatagga

SEQ ID NO: 779546 - DNA, 120 bp, Artificial Sequence
  ENSG00000249915_8 (sequence is synthesized)
attttaaaataacatggaacttacacaaaaggcttttcatgtgccttacttttttaaaaaggagtttattgtattcattggaatatgtgacgtaagcaataaagggaatgttagacgtgt

SEQ ID NO: 779547 - DNA, 120 bp, Artificial Sequence
  ENSG00000249915_9 (sequence is synthesized)
gtcgataaagacaggagtggagtgatatcagacaccgagcttcagcaagctctctccaacggcacgtggactccctttaatccagtgactgtcaggtcgatcatatgctaccggctctct

SEQ ID NO: 779548 - DNA, 120 bp, Artificial Sequence
  ENSG00000249915_10 (sequence is synthesized)
attgttattactgcttcgtagtggagatgcttctggtttattttgtggctaccgctgttactgcttggagtgcctcaccgagccagctaacaactgcgtgcgtgagcacagggaaaggct

SEQ ID NO: 779549 - DNA, 120 bp, Artificial Sequence
  ENSG00000249915_11 (sequence is synthesized)
tcttgagaaatgaaaactagattgtaggtttaggaggggaataggaagcttagctctgtacagccgaaagccttttggtaagttggaggtccttgaatttcctgggtgactgcatcttgg

SEQ ID NO: 779550 - DNA, 120 bp, Artificial Sequence
  ENSG00000249915_12 (sequence is synthesized)
tgacttctctgaatagaccttcgagggcactggggggtgattgttggagggcttggggagctcaggcagcccttgtatgggaatgtggctgttacaggaactgcagaaactgggactggg

SEQ ID NO: 779551 - DNA, 120 bp, Artificial Sequence
  ENSG00000249915_13 (sequence is synthesized)
ttcctggggaaaggattgggggtgttggaggcgctggccaggggattatggggaggtgttcttatcagtgtgcgaatactgggcgttcaggcagcgggaaatccgggtccttgcgtgttg

SEQ ID NO: 779552 - DNA, 120 bp, Artificial Sequence
  ENSG00000249915_14 (sequence is synthesized)
acggatgaagccccacccgcccttcaggatgccagccttggcaacattgtgagaccctgtttctacaaaaagtaaatgagtgtagtggtgcacgcctgtattcccagctacttgggaggc

SEQ ID NO: 779553 - DNA, 120 bp, Artificial Sequence
  ENSG00000249915_15 (sequence is synthesized)
cttgagcctgggaggttgaggctgcattgagctgagatcaagccacggcactccagcctgggagacagagcgaaaccccatctcaaaaaaacaaagaaagtggatgcgcgctgctcctgc

SEQ ID NO: 779554 - DNA, 120 bp, Artificial Sequence
  ENSG00000249915_16 (sequence is synthesized)
ttccctctcactactaggttgtgagctgcgtgaaggaaggttcatagttgtgttgtatgtacaggcacacaaaatttgtccttggataaacacatatcctcttccttcttctctctgaat

SEQ ID NO: 779555 - DNA, 87 bp, Artificial Sequence
  ENSG00000249915_17 (sequence is synthesized)
cttggataaacacatatcctcttccttcttctctctgaatttctttattttaagaaaaaaattagagatggagtctcactgtcttgc

SEQ ID NO: 779556 - DNA, 120 bp, Artificial Sequence
  ENSG00000249915_18 (sequence is synthesized)
aatatgattgaaattagtttgatttctataataattgtgctcccagattgggcttctgttttgatagtagaactaaattattaggctatttcaagaaattaatatattactggtagaaaa

SEQ ID NO: 779557 - DNA, 120 bp, Artificial Sequence
  ENSG00000249915_19 (sequence is synthesized)
actgaagctacaaaatggcctggtttctcacttcagttaaatttgtgcttctgagtgcttgtattctaggtgaaaccacactgagaaggtatttgtggcccatacactgattccttcatg

SEQ ID NO: 779558 - DNA, 120 bp, Artificial Sequence
  ENSG00000249915_20 (sequence is synthesized)
agacttgtttgcacaggagagctgctaaaaattactgctctcagggaggtctgtggtgaacaggtatgaagaagaagactgttctctgcccttctttttgcaataaaatgttccaaacta

SEQ ID NO: 779559 - DNA, 120 bp, Artificial Sequence
  ENSG00000249915_21 (sequence is synthesized)
aaagtttgacaggcagggacgggggcagattgccttcgacgacttcatccagggctgcatcgtcctgcagacccttgctccatcacccaggccagagtgtggtggtgcgaacacggctca

SEQ ID NO: 779560 - DNA, 120 bp, Artificial Sequence
  ENSG00000249915_22 (sequence is synthesized)
ctgcagcctcgaccctcaggctcaagcgatcctcacgcctcggacccccaaagtgctgggatcacaggcgagagtcaccatgctggcctgaatcttcaggaggttgacggatatattcag

SEQ ID NO: 779561 - DNA, 120 bp, Artificial Sequence
  ENSG00000249915_23 (sequence is synthesized)
catcttttcctaaccttgtcaggccctggagctccctttgtccatgccagtgaccatcggtcctcagaatgtgcagtggaagttgctgtggacagtgctccctggtctctgaggccctct

SEQ ID NO: 779562 - DNA, 120 bp, Artificial Sequence
  ENSG00000249915_24 (sequence is synthesized)
tcgtcctggtctggccaaggacttcccagaaaactgtgcttagctgtggcgggaggcacggccggtcacgcagccttcctcccgccctggagtgggcaggcctgcttgtgttgtgcagcg

SEQ ID NO: 779563 - DNA, 120 bp, Artificial Sequence
  ENSG00000249915_25 (sequence is synthesized)
gcagaacccttcctgacttccaggtttttcctggggtgcggcatcccatcgcagcattttctctggttaccctcacgagtttcctcctgcgtttggttcttgatctccagggccatctcc

SEQ ID NO: 779564 - DNA, 120 bp, Artificial Sequence
  ENSG00000249915_26 (sequence is synthesized)
cacgtcttccttggaaaggggcattgtcatcctttttgtattttgatgattttgaaagatttcccatagtaactgttaggaagttggcctcagaagcaaaaattcttcttttgtcttggc

SEQ ID NO: 779565 - DNA, 120 bp, Artificial Sequence
  ENSG00000249915_27 (sequence is synthesized)
ccctgtgaacaagtgttctgctctcagatgaagcagggaggctgcactggagcttggtggccagcaggagggaatcaccagggtggtgaagcctgcgagatttctccccgggtgtctctg

SEQ ID NO: 779566 - DNA, 120 bp, Artificial Sequence
  ENSG00000249915_28 (sequence is synthesized)
atggggccacatggtggatttcataatccaccgattcgtttttttaagcctttattgttaacatcaactgtgtgccatgctcagagacctgaagtgaaaaggtgaggaaggcgtgctcac

SEQ ID NO: 779567 - DNA, 120 bp, Artificial Sequence
  ENSG00000249915_29 (sequence is synthesized)
attccagcactcaccacccggcaccgggacagctgactcagcacgtgccgtttaggttgctgtaaacagccggtgagattctcccctctggtgggcagtgcgtgtctgacaaaggcagtc

SEQ ID NO: 779568 - DNA, 120 bp, Artificial Sequence
  ENSG00000249915_30 (sequence is synthesized)
gggcggagaacagttcctccgctgtggtcctttgccactgtaccaggcccccaagagctggggggagccccagggagcctcagcctgttgagtgggggcagctggtttgtcctccgaggt

SEQ ID NO: 779569 - DNA, 120 bp, Artificial Sequence
  ENSG00000249915_31 (sequence is synthesized)
ggaagaggtgatttctgaggaggtcatgctccgcttggctcgttcacagcatttcagagagtccgaaagaggagaaagaccttggcaaggggtgtgtcaggggtgggcccagggacgctg

SEQ ID NO: 779570 - DNA, 120 bp, Artificial Sequence
  ENSG00000249915_32 (sequence is synthesized)
gtggcctcatgtggactgactttcatgaacagaaactcagaaacagttgcttctggattttggcttctcagataaacattctttttgtagttcgtttgttcatccctcattttgctgtct

SEQ ID NO: 779571 - DNA, 120 bp, Artificial Sequence
  ENSG00000249915_33 (sequence is synthesized)
gactttgcctttcttttcccttcactattactgatgaccaaggaaactggaagttaattccagaggcagtggggttgctcctgttgtctgtgcagactggagttcctctgcctctgtcag

SEQ ID NO: 779572 - DNA, 89 bp, Artificial Sequence
  ENSG00000249915_34 (sequence is synthesized)
ctgttgtctgtgcagactggagttcctctgcctctgtcagcatctcctctgtccttccccagccttggcaggagaccagtaatgacctc

SEQ ID NO: 779573 - DNA, 120 bp, Artificial Sequence
  ENSG00000249915_35 (sequence is synthesized)
gatggccgccgtccccgtgcacaccagtgagggccgccgtccccgtgcacaccagtgagggccgccgtccccgtgcaccccagtgagggccgccgtccccgtgcaccccagtgatggccg

SEQ ID NO: 779574 - DNA, 120 bp, Artificial Sequence
  ENSG00000249915_36 (sequence is synthesized)
tctgtcccccatgcactcccagacaggcaatgtccctgtgggcctgtcccaggctctgttctcagcaggctgggctcagccctggtgcagggagtgaggaggtgggagtagtagggacca

SEQ ID NO: 779575 - DNA, 120 bp, Artificial Sequence
  ENSG00000249915_37 (sequence is synthesized)
gaaaaagtggcagctgttgacaactctgccatctctttctgaatgtaatgggaggtcctgtcttttcagcttgcaaggaaggagggtccgaggcaactccgctgttgcacatttagggac

SEQ ID NO: 779576 - DNA, 120 bp, Artificial Sequence
  ENSG00000249915_38 (sequence is synthesized)
ccctgaacttaaatgacagaatgccctgaccactctggaaggcactgtgttcatgtttgtgtgcttgactcttgatccgtaaaatggctgtttgtgcaggtcattaactgtgagattcag

SEQ ID NO: 779577 - DNA, 120 bp, Artificial Sequence
  ENSG00000249915_39 (sequence is synthesized)
agagtaggtgcacacgtccctgcagagattccagcaggactgaaaaccagtagaaatatatcagcacctggatcttgcctcctgagtcagtaaggatatgccacagtcacgaaggcagtg

SEQ ID NO: 779578 - DNA, 120 bp, Artificial Sequence
  ENSG00000249915_40 (sequence is synthesized)
ggatttcgagggagggaagggaaggcggcaggcggggcatgccctccggggtgcccgaacacacctgctgcatccacatgtcttcagagccctctccctgtgggaggcctttttcaggac

SEQ ID NO: 779579 - DNA, 120 bp, Artificial Sequence
  ENSG00000249915_41 (sequence is synthesized)
agccttggtgaactggaaacggaatcccagcccttggtggccctgcagtgacttggacctttccgaggtcaccctgccactgcgtgcccttcagtccctcctggcaggtgggggcacatc

SEQ ID NO: 779580 - DNA, 120 bp, Artificial Sequence
  ENSG00000249915_42 (sequence is synthesized)
ccccagccactcccatttcctgacattgtcactttgtataactggaagccttctgtgaaattttagttttcaaagcattatctggtgatgggcaacccagggcagcgaatcattcagaat

SEQ ID NO: 779581 - DNA, 120 bp, Artificial Sequence
  ENSG00000249915_43 (sequence is synthesized)
tttcttatctaggctaataaacataataaaatcaataaggactttgaaagtaactccactgggttcaggaaactgagtgtggccgccctgtggggtggtgtttggtgagtgcttcccgga

SEQ ID NO: 779582 - DNA, 120 bp, Artificial Sequence
  ENSG00000249915_44 (sequence is synthesized)
ggtgagtagttaattcacaggagtgactaatggcagcgtcccactcactcctccttccggggtcatggtctcaaggggtcactccatgcactggggatgtcagctcattacagaatgata

SEQ ID NO: 779583 - DNA, 120 bp, Artificial Sequence
  ENSG00000249915_45 (sequence is synthesized)
tattcgggaagtgtctcagttctgagtgcctttgagggaatttgcacttccgttcccacacagccttgcattgtgtgtgttagaggctgtgggccttgggcaggaggggtgagtgttggc

SEQ ID NO: 779584 - DNA, 120 bp, Artificial Sequence
  ENSG00000249915_46 (sequence is synthesized)
cccgcttgtgtttcctttgtctgtgggtccgtatcactttgctcccttctggaattccacttagatgagcgtcggccctttcatccctctccctccgtctctgtaccttttcacatctct

SEQ ID NO: 779585 - DNA, 120 bp, Artificial Sequence
  ENSG00000249915_47 (sequence is synthesized)
ccgtgtatgtttgctctattcttgattctgtttatttttaatgtacggtgtaacctgtcctttcagtttctaattctaaagatgacatatatttaaaatttctaaattattagttacttt

SEQ ID NO: 779586 - DNA, 120 bp, Artificial Sequence
  ENSG00000249915_48 (sequence is synthesized)
cacatcttatctgggtgtttttgatagacattgcttatttatttttgtgattccattctttattcaaatatttcatatgatagtcttcagttttaagaacatgcttttttgaaaagcgct

SEQ ID NO: 779587 - DNA, 120 bp, Artificial Sequence
  ENSG00000249915_49 (sequence is synthesized)
agatatttgtgacatggagctccttgactgtgtttgaagtccttgggagggtggtctacagccagatatttttcctgctcaagcccacacagagtgaccaacttccttgatgcttctgta

SEQ ID NO: 779588 - DNA, 120 bp, Artificial Sequence
  ENSG00000249915_50 (sequence is synthesized)
atttttgtttgttttgtgggttcatgtgtagccttaatgtgagggtctgcatcatttctttgggtccagggtctccccagctgtataggcagctgggtttttgtttgtttcttttaagag

SEQ ID NO: 779589 - DNA, 120 bp, Artificial Sequence
  ENSG00000249915_51 (sequence is synthesized)
acagggtgtccctgtgctgcccaggcctggtctggaattcctgggctcacgcaatcctcctgcctcagcctcccaaaaagtggggattacaggtgtgcacccccatgcccagacggtagc

SEQ ID NO: 779590 - DNA, 120 bp, Artificial Sequence
  ENSG00000249915_52 (sequence is synthesized)
cggggtgtgagctgaggctccaggcgcaggcaggtgttcaggagagtcgtgctgtgtctccatcccccgtagccaggtgggagctgcagctccaggggcaggcaggcctgggaggcaggt

SEQ ID NO: 779591 - DNA, 120 bp, Artificial Sequence
  ENSG00000249915_53 (sequence is synthesized)
gttcaggagagtcatgtttccatccctacccgacttgatttctggaaggttccctttgctgggaggtgcagcccccttcagacctctttaatatggaatcccaggttcagttctgcctca

SEQ ID NO: 779592 - DNA, 120 bp, Artificial Sequence
  ENSG00000249915_54 (sequence is synthesized)
cagggaccatggcattgtgtctcgaggtttcccagagcggcctggggctcattccctcgcctcccatccatgcacgtgttttagtcttgtgaggattccctgagttccttgcggagcctg

SEQ ID NO: 779593 - DNA, 120 bp, Artificial Sequence
  ENSG00000249915_55 (sequence is synthesized)
tgtgtggtgaggtgtctgagtcctagtgtgggtgtagctgggggcttttccagatgactgtgccctgctggtcgtgcatatgttgctacgtcacactgatggagggagagaaaacttgga

SEQ ID NO: 779594 - DNA, 120 bp, Artificial Sequence
  ENSG00000249915_56 (sequence is synthesized)
agtgtagtagtggcagggctcagcctttagtgctagaaaaggtgttgatacatggggagctacctccccaccggagaggaatggcctgggagccactcctctgcggagcccttaccctgg

SEQ ID NO: 779595 - DNA, 120 bp, Artificial Sequence
  ENSG00000249915_57 (sequence is synthesized)
cttccctgctggtgtgtggtgcgcagtgggtcctgcacgcaacagcatcgtccacacacactgcacacatcgtggaatggtcgtatgaaaaacagcccctggtccacacaccacacacgt

SEQ ID NO: 779596 - DNA, 120 bp, Artificial Sequence
  ENSG00000249915_58 (sequence is synthesized)
cgtggaacggtgcacgtcgtggaacggttgtgtgaaaaacagccactggttgcacacagggttgtggactgttgggaagaaacatcgatgctgtttctcacatgatttttcatcctgtgg

SEQ ID NO: 779597 - DNA, 120 bp, Artificial Sequence
  ENSG00000249915_59 (sequence is synthesized)
attttcatttaattgtaacatatttctgatcaaaccaggagtagtcttattgcagtcctgtattaacctctgttcttgaaaagagaccacgtgatttatcattttctctgcagcagtaat

SEQ ID NO: 779598 - DNA, 120 bp, Artificial Sequence
  ENSG00000249915_60 (sequence is synthesized)
tcacactgaatttttctatgttttttagccatattgcaactacatataaaggtagttatagattcttttgtatttggacctggagttagactgaaagcaaataggacataggcgagggtc

SEQ ID NO: 779599 - DNA, 120 bp, Artificial Sequence
  ENSG00000249915_61 (sequence is synthesized)
tgtttctaattaaagcaggttttcctgacagggctgttccaagactccaccagtgctgtgggccctggagagtcagagggtcagctctgggaattagattcgcgttctaggccgagaccc

SEQ ID NO: 779600 - DNA, 120 bp, Artificial Sequence
  ENSG00000249915_62 (sequence is synthesized)
aggagccaggggagctggggccacttaccttccccgtgcctcggaagctgagtgtgaagctctgctcttctttctgtcgtggctgcggctggatttcctcacacatcccattgcacggcc

SEQ ID NO: 779601 - DNA, 120 bp, Artificial Sequence
  ENSG00000249915_63 (sequence is synthesized)
tgcctcacagctgcaagtgcaccttctcctgggacttagggggtcagggctgggggacaatcccccacacccccacccagggcgaaggtgacaagactttaagggatttcaccccattca

SEQ ID NO: 779602 - DNA, 120 bp, Artificial Sequence
  ENSG00000249915_64 (sequence is synthesized)
cagacaggcatgcattgcccagtccctggttagtggtcagcagtggggccccgccaggctctgagggctgaggtctggtgggaagcctcaagtgagtttgctgcaactgatcttttgctg

SEQ ID NO: 779603 - DNA, 120 bp, Artificial Sequence
  ENSG00000249915_65 (sequence is synthesized)
ggaatggcttcacgtgggtttgtggtggtggtgggaggggcttgcttgccagcgtgatgcacctgaccttcaatctaaggagctgggcatgtgtagaattagtttttggagcttataaaa

SEQ ID NO: 779604 - DNA, 120 bp, Artificial Sequence
  ENSG00000249915_66 (sequence is synthesized)
gtgagtctcatctttggagaagtagccggttagtgaagtgtggacaaacatgttttcctccccttggaaatggcacagagcagcccatctgcaagacgtggtttttcagtatccggtggg

SEQ ID NO: 779605 - DNA, 89 bp, Artificial Sequence
  ENSG00000249915_67 (sequence is synthesized)
gttttgttttgttttgacgggagtgcagtggcacgatcccggctcactcccacctctgcgtcccgggtttaagcaattctcctgcctca

SEQ ID NO: 779606 - DNA, 120 bp, Artificial Sequence
  ENSG00000249915_68 (sequence is synthesized)
attacagacatgagccaccatgcctggccaactatggtgtatttttacaaaaacttttattctgagaaaatgggcacgttttctgttgtggtcatcactgtgtcctgccgtctgtgtgtg

SEQ ID NO: 779607 - DNA, 120 bp, Artificial Sequence
  ENSG00000249915_69 (sequence is synthesized)
actgtgtcctgccgtctgtgtgtgaggtcagctgtggagcctgtggtcgctcaggccgccctcagtggggtctccgagctcttcccgtgcactccagtgtctgcaggagctggtaatgca

SEQ ID NO: 779608 - DNA, 120 bp, Artificial Sequence
  ENSG00000249915_70 (sequence is synthesized)
ccctgacctgcaaggcaagctccttggtggtgtctctcctgctgggctctctttgagacccacgggagatggagagcagggctcaggggacccgcctgggagctccacacagacctctgc

SEQ ID NO: 779609 - DNA, 120 bp, Artificial Sequence
  ENSG00000249915_71 (sequence is synthesized)
tgctgtttgcaggtggtgatccaggtctctacccaggttcctcaaggtcctgtcttgttggccttggaattcagtgagagataggaacagcatggggtttttagaaataatgtggaaatt

SEQ ID NO: 779610 - DNA, 80 bp, Artificial Sequence
  ENSG00000249931_0 (sequence is synthesized)
aagaaacagcaggagcgaacaggaacaggaaaacaaatggcagtatccctgagaaagccacttctggtggttgccagcca

SEQ ID NO: 779611 - DNA, 120 bp, Artificial Sequence
  ENSG00000249931_1 (sequence is synthesized)
cagtatccctgagaaagccacttctggtggttgccagccacctagggattcagcaacaggtttccacagggaaggccctacatcatctgctaccctgaaagatctggagagcccgtgcca

SEQ ID NO: 779612 - DNA, 120 bp, Artificial Sequence
  ENSG00000249931_2 (sequence is synthesized)
gaaagatctggagagcccgtgccaagaacgagcagtagtcctggattcaaggtccgtagaaatcagtcaactgaagaacaccatcaaatctctgaaacaacagaagaaacaagtggaaca

SEQ ID NO: 779613 - DNA, 120 bp, Artificial Sequence
  ENSG00000249931_3 (sequence is synthesized)
aaacaacaagaaacagaaagccaaaagggtgctagaggttcaaatccagacattgaacatacagaaagaggaactaaatacggacctgtaccacatgaaacgttctctcagatactttga

SEQ ID NO: 779614 - DNA, 120 bp, Artificial Sequence
  ENSG00000249931_4 (sequence is synthesized)
agaaaagtccaaggatctggctgtccgcctgcaacattcattgcagcgtaaaggagagttagagagtgttctctctaatgtcatggccacacagaagaagaaggcaaaccagttgtccag

SEQ ID NO: 779615 - DNA, 120 bp, Artificial Sequence
  ENSG00000249931_5 (sequence is synthesized)
ccgcagcaaagcacgtacggagtggaagttagagcagtccatgcgggaggaggcactactgaaagtgcagctgacacagttgaaggagtcttttcaacaagtccaattagaaagagatga

SEQ ID NO: 779616 - DNA, 78 bp, Artificial Sequence
  ENSG00000249931_6 (sequence is synthesized)
cagaggatgagaaaaatgtcgcaggagatttgcacattaaagaaagagaagcagcaagatatgcgtcgggtagaggaa

SEQ ID NO: 779617 - DNA, 120 bp, Artificial Sequence
  ENSG00000249931_7 (sequence is synthesized)
actagagagagtggcaggagagctccaggcccaggtcaaaaagaatcagcgcataagtctcctgaaccagcgacaagaagagaggattcaggagcaggaagagaggcttcggaagcagga

SEQ ID NO: 779618 - DNA, 120 bp, Artificial Sequence
  ENSG00000249931_8 (sequence is synthesized)
aagcaggaggagaggattcaggagcagcacaagagccttcagcagctggccaagccacagagcgtcttcgaggagccgaacaatgagaacaagaacgcactgcagttggagcagcaagta

SEQ ID NO: 779619 - DNA, 120 bp, Artificial Sequence
  ENSG00000249931_9 (sequence is synthesized)
aaggagctacaggagaagcttggcgaggagcacctggaagcggccagccagcagaaccagcagctaacggcccagctgagcctcatggctctccctggggaaggacacggagaacatctg

SEQ ID NO: 779620 - DNA, 120 bp, Artificial Sequence
  ENSG00000249931_10 (sequence is synthesized)
gacagtgagggggaggaggcacctcagcccatgccgagtgtcccagaggacctggagagcagggaggccatgagcagctttatggaccacctgaaggagaaggcagacctgagtgagctg

SEQ ID NO: 779621 - DNA, 120 bp, Artificial Sequence
  ENSG00000249931_11 (sequence is synthesized)
gtgaaaaaagaactctgcttcatccaccactggcgagacagacgccatcagaaaacccatcaccttttatcagaaccagggggctgtgccaaagatgcggcactgggaggaggacaccat

SEQ ID NO: 779622 - DNA, 120 bp, Artificial Sequence
  ENSG00000249931_12 (sequence is synthesized)
gcccacaaccctgctgatgagcccggtccaggagccccagctccccaggagcttggggctgcagacaagcatggtgatcttcgtgaggtgagcctcacctcctctgcccaaggagaggcc

SEQ ID NO: 779623 - DNA, 120 bp, Artificial Sequence
  ENSG00000249931_13 (sequence is synthesized)
agtcacacagctgcctggtaggtgactggaggccttgatcggttctcattgagattttgctgctgtgaccccaaccctgcctccctccccaccctgcgatggcagaagaaactcaacaca

SEQ ID NO: 779624 - DNA, 120 bp, Artificial Sequence; identical to SEQ ID NO: 769627
  ENSG00000249931_14 (sequence is synthesized)

SEQ ID NO: 779625 - DNA, 120 bp, Artificial Sequence
  ENSG00000249931_15 (sequence is synthesized)
ctggactcgtcccccctaccccggtgcctctgggctacccccaccaaagttttgtcagtcagccccaccccttcagcaagcagcccagtccttgccctcgccaatcaccccagggtgact

SEQ ID NO: 779626 - DNA, 120 bp, Artificial Sequence
  ENSG00000249931_16 (sequence is synthesized)
ttgggtgggtgagtcctggggcttcccgctccattactgggccctcatctcctgccgccccaagcttgatctccctgggctctttgggctctcatctccaaggagccaggccccaccctc

SEQ ID NO: 779627 - DNA, 120 bp, Artificial Sequence
  ENSG00000249931_17 (sequence is synthesized)
tgggctctcatctccaaggagccaggccccaccctcgccagtcatccctgggtgactttggactggtgactcctgggactccctgctgcagactgtgccctcccctcctgctgcctcaag

SEQ ID NO: 779628 - DNA, 120 bp, Artificial Sequence
  ENSG00000249931_18 (sequence is synthesized)
acatggtccctccccccgaccaggaggagtggaatgttgtgatgtcacagtccacctagtaactgccgttactgcaagactggcctttgatcttacgacccagtcccctaagcgttctca

SEQ ID NO: 779629 - DNA, 120 bp, Artificial Sequence
  ENSG00000249931_19 (sequence is synthesized)
ccccgtttctggttcctctggtcacagcacaaatttccagctggaaggggaatggagactatgggacctaggaggaagaggttccaggctgcctcactcccttacagatgttgacggtgg

SEQ ID NO: 779630 - DNA, 120 bp, Artificial Sequence
  ENSG00000249931_20 (sequence is synthesized)
ctgcctcactcccttacagatgttgacggtgggaaaagcctacacttcccccatgaactcaaaacgttgacagtatctctgggtggcaatgagagaatgggtttggtttggttttctccc

SEQ ID NO: 779631 - DNA, 71 bp, Artificial Sequence
  ENSG00000249931_21 (sequence is synthesized)
aattctccatggttctgggaccagactctccttcagtcagtggtctctgaagtgacttgaatcttcctcat

SEQ ID NO: 779632 - DNA, 75 bp, Artificial Sequence
  ENSG00000249931_22 (sequence is synthesized)
agaaaaaacatgaatcctctctctgaaatgaggcttgggttatcctctttctgataaattctgatttaagagaaa

SEQ ID NO: 779633 - DNA, 120 bp, Artificial Sequence
  ENSG00000249961_0 (sequence is synthesized)
gacgtgagcctggtcggctgggcgggaaaccctgtcgtgcgtcgtggcaggtgagcggtgatgaagaaagggcggaagctcccgcttgagggtagacgccacggcctccgctcccgcgcg

SEQ ID NO: 779634 - DNA, 120 bp, Artificial Sequence
  ENSG00000249961_1 (sequence is synthesized)
ttgttgtcctgccttaccgcgcttggaaactctgacttgcgagccctggtcagagaggagcctggaggggccacctaagctctgcacaaggaattcatccaactctgtagacaaaatata

SEQ ID NO: 779635 - DNA, 120 bp, Artificial Sequence
  ENSG00000249961_2 (sequence is synthesized)
aggaaaaagaatatagacaagcatggaaagtgaagacacaaagaaaacacaagaaatgaagactgacctgaacttattattggagtgtctaaagtatcaaatggacaatgctttttcaca

SEQ ID NO: 779636 - DNA, 120 bp, Artificial Sequence
  ENSG00000249961_3 (sequence is synthesized)
aaaggaagctttggtcactattcattcaatttgtcaacaaaacagtaatgcaagtgtttattttcgggaaattggtggtttgatgtttgtaaaaaatcttgcaaagtcaagtgaacatag

SEQ ID NO: 779637 - DNA, 120 bp, Artificial Sequence
  ENSG00000249961_4 (sequence is synthesized)
catggtaaaagaagcagccttatatacattaggagctattgcagagaaaaatgtttactgtcagcagactttgtgtacttcagagttgtttgaagacttaacttggttcttatctaatga

SEQ ID NO: 779638 - DNA, 120 bp, Artificial Sequence
  ENSG00000249961_5 (sequence is synthesized)
ttcaaacataaatttgaaaagaatgtctgtttatgttattttggttctggtttcaaataataggaccggacaaacacttgtgagagaaacaggttgtattacagttctgtcacggttatt

SEQ ID NO: 779639 - DNA, 120 bp, Artificial Sequence
  ENSG00000249961_6 (sequence is synthesized)
caggacagttatttcaaaacatgagttggatttgtcagataaaaatgttttccagagttatcagttgtggtcttcagtgtgtagtactctgtgtgtctgtgtcaacaatcctcaaaatga

SEQ ID NO: 779640 - DNA, 120 bp, Artificial Sequence
  ENSG00000249961_7 (sequence is synthesized)
tgagaatcaaatgttttgctgttccctttttccacatgctaatgaatggctaaaaaattgcacgacacctgagataattcgccctatttgctcatttattggactcactcttgcaaataa

SEQ ID NO: 779641 - DNA, 120 bp, Artificial Sequence
  ENSG00000249961_8 (sequence is synthesized)
cacatatgttcagaaatacttcgtatctgtgggcggactggatgtattgtctcaagttctcatgcagctggaatctgattcacatgagactctttccagtgctaaacttgcagtggttgt

SEQ ID NO: 779642 - DNA, 120 bp, Artificial Sequence
  ENSG00000249961_9 (sequence is synthesized)
gacgaagactgtggatgcatgcattgctgataatcctacttttgggatagtactctccaagtaccacattgtttctaaacttctggcattactgcttcatgaaagtctggattcaggaga

SEQ ID NO: 779643 - DNA, 120 bp, Artificial Sequence
  ENSG00000249961_10 (sequence is synthesized)
gaggaaaatcagtatgacctttttaaaaacaatgggcttccactcatgattcaagccttaactgaatcgcagaatgaggaactgaacaaagctgccacatttgtgcttcacaactgcaaa

SEQ ID NO: 779644 - DNA, 120 bp, Artificial Sequence
  ENSG00000249961_11 (sequence is synthesized)
aaaattactgagaaattatctctaagtctaggagaatatccttttgatgaaaatgaaacacagcaattaaaggacataagtgtgaaggagaataatcttgaagagcactggaggaaagca

SEQ ID NO: 779645 - DNA, 120 bp, Artificial Sequence
  ENSG00000249961_12 (sequence is synthesized)
aaggaaattctacacagaatagaacagcttgaaagagaaggaaatgaggaagaaatacaaagagaaaactatcaggataatatttcatctatgaacataagtattcagaatacatggaaa

SEQ ID NO: 779646 - DNA, 120 bp, Artificial Sequence
  ENSG00000249961_13 (sequence is synthesized)
catctccatgcagatcggattggtcgaggtagcaaagcagaagatgaggataaaagccattctagacagttacagagttataagtcccatggagtcatgtctaaagcatgtacaaatgat

SEQ ID NO: 779647 - DNA, 120 bp, Artificial Sequence
  ENSG00000249961_14 (sequence is synthesized)
gaccaaatgaagacaccgttaaagagcgcaaatccagtccatgcttgttacagggagagtgagcaaaataagactttatataaagccaagtcaagctgcaatcaaaacttacatgaagaa

SEQ ID NO: 779648 - DNA, 120 bp, Artificial Sequence
  ENSG00000249961_15 (sequence is synthesized)
actacttttgaaaagaattttgtttctcaatcaagtgaccatgtttttaaacacccagttcacattgccaaaaatataaagcagcagttaccagtaacagatccatttacattatgttca

SEQ ID NO: 779649 - DNA, 120 bp, Artificial Sequence
  ENSG00000249961_16 (sequence is synthesized)
gatataataaataaagaagtagtcagttttctagcaactcccagttgttccgaaatgttgacgtataggtgctcaggttgcatagcagtagaaaaatccctgaatagccgaaactttagc

SEQ ID NO: 779650 - DNA, 120 bp, Artificial Sequence
  ENSG00000249961_17 (sequence is synthesized)
aagctcttgcactcttgcccataccaatgtgatcgtcacaaagtcattgtggaagctgaagacagatataaaagtgaactaaggaaatcacttatctgtaacaaaaaaattctgctgacc

SEQ ID NO: 779651 - DNA, 120 bp, Artificial Sequence
  ENSG00000249961_18 (sequence is synthesized)
ccacgtagaagacaacgactcagtaatgaatctactacccctggaggaataaaaaaaagaagaattcgcaaaaactttactgaagaagaagtaaattaccttttcaatggagttaagaaa

SEQ ID NO: 779652 - DNA, 120 bp, Artificial Sequence
  ENSG00000249961_19 (sequence is synthesized)
atgggaaatcactggaattcaattttgtggtctttcccctttcagcaaggacggaaggctgtggaccttgctcacaaataccacaagctgaccaaacaccccacgtgtgcagcttcttga

SEQ ID NO: 779653 - DNA, 120 bp, Artificial Sequence
  ENSG00000249961_20 (sequence is synthesized)
caaagtcattgtggaagctgaagacagatataaaagtgaactaaggaaatcacttatctgtaacaaaagtaattaattcagcagctttaaaattaaattctgctgaccccacgtagaaga

SEQ ID NO: 779654 - DNA, 120 bp, Artificial Sequence
  ENSG00000249961_21 (sequence is synthesized)
caacgactcagtaatgaatctactacccctggaggaataagtgaatatatttaatttaattttttttttcttgagacagggtctggctctgttacccaggatggagtgcagtggagcaat

SEQ ID NO: 779655 - DNA, 86 bp, Artificial Sequence
  ENSG00000249961_22 (sequence is synthesized)
tgcacctggctgaatatatttaatttttaaatgaacttaaatttcatatatttctgagaaagaacagctgagtggttgttctcagt

SEQ ID NO: 779656 - DNA, 120 bp, Artificial Sequence
  ENSG00000249961_23 (sequence is synthesized)
tatatttctgagaaagaacagctgagtggttgttctcagtcttattattaatggatcttaaatgataaaccttgcctctgatgagggtcagaccttctaataaaagagactttcctcttc

SEQ ID NO: 779657 - DNA, 66 bp, Artificial Sequence
  ENSG00000249961_24 (sequence is synthesized)
cctggaggggccacctaagctctgcacaaggaattcatccaactgaagtcttccgcccacctcggc

SEQ ID NO: 779658 - DNA, 120 bp, Artificial Sequence
  ENSG00000249961_25 (sequence is synthesized)
gtgcgtcgtggcaggtgagcggtgatgaagaaagggcggaagctcccgcttgagggtagacgccacggcctccgctcccgcgcgttgttgtcctgccttaccgcgcttggaaactctaca

SEQ ID NO: 779659 - DNA, 80 bp, Artificial Sequence
  ENSG00000249992_0 (sequence is synthesized)
agagcagcgcggcagcccaagggccccggcgccgggggcggcggggaaccccaaacgcaaccgggtctggagggatcccc

SEQ ID NO: 779660 - DNA, 80 bp, Artificial Sequence
  ENSG00000249992_1 (sequence is synthesized)
ccggctcccgcggtcccaccgtgagctcgccggcccgtcgcccgctcgccatgcaaccgccgccggcctcgcgcgcgtag

SEQ ID NO: 779661 - DNA, 80 bp, Artificial Sequence
  ENSG00000249992_2 (sequence is synthesized)
cgcctgcccgctgccgcccgtccgcggcggggccgcggacgcgcccggcctcctcggggtgccctccaatgcttcagtca

SEQ ID NO: 779662 - DNA, 80 bp, Artificial Sequence
  ENSG00000249992_3 (sequence is synthesized)
atgcttcagtcaacgcgtcctccgcggacgagcccatcgccccgcggctgctggcctcggcggcccccgggccccccgag

SEQ ID NO: 779663 - DNA, 120 bp, Artificial Sequence
  ENSG00000249992_4 (sequence is synthesized)
gcaacatcagcgtgcagcggcagatgctgagctcgctgctcgtgcgctggggccgcccgcggggcttccagtgcgacctactgctcttctccaccaacgcgcacggccgcgctttcttcg

SEQ ID NO: 779664 - DNA, 120 bp, Artificial Sequence
  ENSG00000249992_5 (sequence is synthesized)
gcgctttcttcgccgccgccttccaccgcgtcgggccgccgctgctcatcgagcacctggggctggcggcgggcggcgcgcagcaggacctgcgcctctgcgtgggctgcggctgggtgc

SEQ ID NO: 779665 - DNA, 120 bp, Artificial Sequence
  ENSG00000249992_6 (sequence is synthesized)
ccgccgccaccgccggggcgcccaccgcgctgccagcctaccccgcggccgagccgcccgggccgctgtggctgcagggcgagccgctgcatttctgctgcctagacttcagcctggagg

SEQ ID NO: 779666 - DNA, 120 bp, Artificial Sequence
  ENSG00000249992_7 (sequence is synthesized)
cttcagcctggaggagctgcagggcgagccgggctggcggctgaaccgtaagcccattgagtccacgctggtggcctgcttcatgaccctggtcatcgtggtgtggagcgtggccgccct

SEQ ID NO: 779667 - DNA, 120 bp, Artificial Sequence
  ENSG00000249992_8 (sequence is synthesized)
catctggccggtgcccatcatcgccggcttcctgcccaacggcatggaacagcgccggaccaccgccagcaccaccgcagccacccccgccgcagtgcccgcagggaccaccgcagccgc

SEQ ID NO: 779668 - DNA, 120 bp, Artificial Sequence
  ENSG00000249992_9 (sequence is synthesized)
gccgccgccgctgccgccgccgccgcggccgtcacttcgggggtggcgaccaagtgacccgctccgctcctccctgtgtccgtcctgtgtccgcgcgcgcgggtgcctttcccgccggag

SEQ ID NO: 779669 - DNA, 120 bp, Artificial Sequence
  ENSG00000249992_10 (sequence is synthesized)
ggagactcggccggtgtgcttcgtgctgtagttatcgttagttcctcttcccgagatggggccgccgagagaccccagcgcctttgaaaagcaaggtttgtgctgcgcttccagttccga

SEQ ID NO: 779670 - DNA, 120 bp, Artificial Sequence
  ENSG00000249992_11 (sequence is synthesized)
aaagcagatgtttaagcccttggactgagggtgggatcgcagctccgaagacggagaggagggaaatggggccctttcccctctattgcatccccctgcccgactccttccccgcaccca

SEQ ID NO: 779671 - DNA, 120 bp, Artificial Sequence
  ENSG00000249992_12 (sequence is synthesized)
cgtgccctagattcatggcagaaaatgaccaaatcctgtgtatttgttttatatatttaataactgttttaaatgaaagttttagtaaaaaaaatacaaaacaaaaagattaaattgcta

SEQ ID NO: 779672 - DNA, 120 bp, Artificial Sequence
  ENSG00000249992_13 (sequence is synthesized)
ttgctgtagtaagagaagctctttgtatctgaacatagttgtatttgaaatttgtggttttttaatttatttaaaattggggggagggcatgggaaggatttaacaccgatatattgtta

SEQ ID NO: 779673 - DNA, 120 bp, Artificial Sequence
  ENSG00000249992_14 (sequence is synthesized)
ccgctgaaaatgaactttatgaaccttttccaagttgatctatccagtgacgtggcctggtgggcgtttcttcttgtacttatgtggttttttggcttttaatacagacattttcctcca

SEQ ID NO: 779674 - DNA, 63 bp, Artificial Sequence
  ENSG00000250036_0 (sequence is synthesized)
gtccccgctcagctcctggggctcctactgctctgggtcccaggtgccagatgtgacatccag

SEQ ID NO: 779675 - DNA, 87 bp, Artificial Sequence
  ENSG00000250036_1 (sequence is synthesized)
tggagtcccatctcggttcagtatcagcagcctgcagcctgaagatgttgcaacttattacggtcaacggacttacaatgcccctcc

SEQ ID NO: 779676 - DNA, 120 bp, Artificial Sequence
  ENSG00000250067_0 (sequence is synthesized)
ggcgcccgggctcacctcggccatgagcagcgcagccggcccagacccgtcggaggcgcccgaagagcggcatttcctcagggccttggagctgcagcccccacttgccgacatgggaag

SEQ ID NO: 779677 - DNA, 120 bp, Artificial Sequence
  ENSG00000250067_1 (sequence is synthesized)
agcggagcttagctcaaatgctaccacctcccttgtccagaggaggaaacaggcctggggaaggcagtcatggctagagcagatttggaacgcagggcctgtttgccagagcaccgcgga

SEQ ID NO: 779678 - DNA, 120 bp, Artificial Sequence
  ENSG00000250067_2 (sequence is synthesized)
ggcagccgccctggagcgggagctgctggaggattatcgctttgggcggcagcagctcgtggagctgtgcggtcatgctagtgccgtggctgtgaccaaggcgttcccgttgcccgctct

SEQ ID NO: 779679 - DNA, 120 bp, Artificial Sequence
  ENSG00000250067_3 (sequence is synthesized)
ctcccggaagcagaggacggtgctggtcgtgtgtggcccggagcagaacggggcagtggggctggtctgtgcccggcacctgcgggtgtttgagtatgaacccaccatcttctaccccac

SEQ ID NO: 779680 - DNA, 120 bp, Artificial Sequence
  ENSG00000250067_4 (sequence is synthesized)
catcgggacctgaccacccagtgcgagaagatggacatccccttcctgagctacctgcccactgaggtgcagctcattaacgaagcctatgggctggtggtggatgccgtactgggcccc

SEQ ID NO: 779681 - DNA, 120 bp, Artificial Sequence
  ENSG00000250067_5 (sequence is synthesized)
ggcgtggagccgggcgaggtcgggggcccctgcacccgcgcgctggccacgctcaagctgctgtccatccccctcgtgagcctggacatcccctcaggctgggacgcagagaccggcagc

SEQ ID NO: 779682 - DNA, 120 bp, Artificial Sequence
  ENSG00000250067_6 (sequence is synthesized)
gattcggaggacgggctgcggcctgacgtgctggtgtctctcgcggcgcccaagcgctgcgctggccgcttctccgggcgccaccacttcgtggccggcaggttcgtgcccgatgacgtg

SEQ ID NO: 779683 - DNA, 120 bp, Artificial Sequence
  ENSG00000250067_7 (sequence is synthesized)
cgccgcaagttcgctctgcgcctgccgggatacacgggcaccgactgcgtcgcggcactgtgaccgccacccgcggccacaccgcagggaccctcgccaataaacagccctcccaccacc

SEQ ID NO: 779684 - DNA, 120 bp, Artificial Sequence
  ENSG00000250067_8 (sequence is synthesized)
cctccctccacggatgcgcttaaaaggcggtggcggtggcggcagcgcccggcgcccgggctcacctcggccatgagcagcgcagccggcccagacccgtcggaggcgcccgaagagcgg

SEQ ID NO: 779685 - DNA, 120 bp, Artificial Sequence
  ENSG00000250067_9 (sequence is synthesized)
ggtggcgaggggcctgccctgggtcagagggggatggaagcagagctgcaacccaggtgtgtctggctctggagtaaacccccacacctcgaggggccaggaggatgacacaagggtgat

SEQ ID NO: 779686 - DNA, 120 bp, Artificial Sequence
  ENSG00000250067_10 (sequence is synthesized)
agcaataatcatactatggagtgcttcaccgtgcagccagcagtgctgggcatcagtttcctctgcaacagcataataaatggtactgacgagtcagtccctaaacgtgaacgcctcaga

SEQ ID NO: 779687 - DNA, 120 bp, Artificial Sequence
  ENSG00000250067_11 (sequence is synthesized)
aaactgtcccatacagtcgaggctctagcgtgactgcctcctcttcctcccctgccctcctcatccccctcgcctttctcctccttcctcctcctcctgccccctcctcttaccctcctc

SEQ ID NO: 779688 - DNA, 120 bp, Artificial Sequence
  ENSG00000250067_12 (sequence is synthesized)
ctcctttctctctccctcctcctccccttccgcccctttcttctctcctttctccttcctctccctcctcctccccctcctcctgttctccttcctccttcccacttaccctacctcctc

SEQ ID NO: 779689 - DNA, 120 bp, Artificial Sequence
  ENSG00000250067_13 (sequence is synthesized)
cccatcctcctcctccccattctctccctcctcacccctcctcctctttttcttcttattaccacggtatactttttaaaaactcaatgtttttcttcatgtggacttaaatgtttgtat

SEQ ID NO: 779690 - DNA, 120 bp, Artificial Sequence
  ENSG00000250067_14 (sequence is synthesized)
ttccaaatgaaatagatcccgggtgaggcgcccaaaggagaaggaaaatcaaaaccccagaaagaaacccagtagtcactactcgcctggcgctcagtggccaactgtctggtttttgca

SEQ ID NO: 779691 - DNA, 120 bp, Artificial Sequence
  ENSG00000250067_15 (sequence is synthesized)
ctgaaagccccttgtctgtccagaagcccctcagtcccagtcttgggtcttgggctctgggcccggtgtggctgggatcgcaggcatgttcatggcaggtcaggactgcgctaagccttt

SEQ ID NO: 779692 - DNA, 120 bp, Artificial Sequence
  ENSG00000250067_16 (sequence is synthesized)
ggggaggatacttgaaaggggagtaatctgctgtctgtgtggttggagcttaaagtacagctggggctcaagagacacccagagtgcctgtcaggcggtggcactgtcatcgcatttgat

SEQ ID NO: 779693 - DNA, 120 bp, Artificial Sequence
  ENSG00000250067_17 (sequence is synthesized)
aaaggccaaactgagtctgggagagaaggggctggggccacgcagaatcagggcagggctggggccaaaatgcctggagagacagagtctgagagatacagagatggccagagacagatg

SEQ ID NO: 779694 - DNA, 120 bp, Artificial Sequence
  ENSG00000250067_18 (sequence is synthesized)
cagagacagccagagacaaatggagagagagacaaatggagaaagagagccagagacatacagaaagacagagacactagagtctgagagatacagacagacacagagacagccagagac

SEQ ID NO: 779695 - DNA, 120 bp, Artificial Sequence
  ENSG00000250067_19 (sequence is synthesized)
agatggagagagacagagacacaaagagagccagagacacagagagtctgagagatacagacagacacagagacggccagagacggagagagacagagacagacagacagagacacagag

SEQ ID NO: 779696 - DNA, 120 bp, Artificial Sequence
  ENSG00000250067_20 (sequence is synthesized)
agtctgagagatacagaaacagccagagacaggtggggagagagacatgaagagagccagagacatacagagagacagagacacacagagagacagagacacggagagtctgagagatac

SEQ ID NO: 779697 - DNA, 120 bp, Artificial Sequence
  ENSG00000250067_21 (sequence is synthesized)
agagagacacagagacagccagagagagacagagaggccccagggcatcgtggctaaggttgggctcccctactccacagcctccaggaggggctgaggtctggaaacatgggcgggggt

SEQ ID NO: 779698 - DNA, 120 bp, Artificial Sequence
  ENSG00000250067_22 (sequence is synthesized)
gggcccgcggtgagaaaggtggaagaatgtctgcaactcaggcggagaataaacaaaccgcactccgggcgacgggcagtggctggatgcacgtttttcctgcaccgacctggcagagcc

SEQ ID NO: 779699 - DNA, 120 bp, Artificial Sequence
  ENSG00000250067_23 (sequence is synthesized)
tgagaccgggcctctgcatctccagcggggaaactgaggccccaagaggcccaacccctcatccagaacagctcacctcctgtcctatcctgttgcctccaggcccaagccccatccctt

SEQ ID NO: 779700 - DNA, 120 bp, Artificial Sequence
  ENSG00000250120_0 (sequence is synthesized)
agccagtttctcaaggactaggaagtagcgtcattctgagatctcagccatttcgataaaaaatagatataagaaataggacagaaaatgtcagatcgtatgtgcgttctagaccgctga

SEQ ID NO: 779701 - DNA, 120 bp, Artificial Sequence
  ENSG00000250120_1 (sequence is synthesized)
ttcgtcgatttgtaaaacaagagaaggataagatggtttccagatgtagctgcctgggggtccagtgtctgctgctctcgcttcttctcctcgcagcctgggaggtggggagcggccagc

SEQ ID NO: 779702 - DNA, 120 bp, Artificial Sequence
  ENSG00000250120_2 (sequence is synthesized)
tccactactcagtctacgaggaggccagacacggcaccttcgtgggccgcatcgcgcaggacctggggctggagctggcggagctggtgcagcgcctgttccgggtggcgtccaaaagac

SEQ ID NO: 779703 - DNA, 120 bp, Artificial Sequence
  ENSG00000250120_3 (sequence is synthesized)
ggcattttgtttgtgaattctcggattgaccgcgaggagctgtgcgggcggagcgtggagtgcagcatccacctggaggtgatcgtggacaggccgctgcaggttttccatgtggacgtg

SEQ ID NO: 779704 - DNA, 120 bp, Artificial Sequence
  ENSG00000250120_4 (sequence is synthesized)
acaggccgctgcaggttttccatgtggacgtggaagtgaaggacattaacgacaacccgcccaggttctccgtaacagaacaaaagctctcaatacctgaatccagactgcttgactctc

SEQ ID NO: 779705 - DNA, 120 bp, Artificial Sequence
  ENSG00000250120_5 (sequence is synthesized)
gatttccactagaaggcgcatctgatgcggatgttggagagaacgcattgcttacttacaaactcagtccaaatgagtattttgttcttgatattataaacaaaaaagacaaagacaaat

SEQ ID NO: 779706 - DNA, 120 bp, Artificial Sequence
  ENSG00000250120_6 (sequence is synthesized)
tcccagtgcttgttctgcggaagctgctggatcgtgaagaaaatcctcagctaaagttgttgttgacagcaactgatggaggcaaacctgaatttaccggatctgtttctctgctgatcc

SEQ ID NO: 779707 - DNA, 120 bp, Artificial Sequence
  ENSG00000250120_7 (sequence is synthesized)
tggtgttagatgccaatgataacgcccctatctttgacagaccggtttatgaagttaagatgtatgaaaatcaagtgaaccaaacattagtaatacggctcaacgcttctgattcggatg

SEQ ID NO: 779708 - DNA, 120 bp, Artificial Sequence
  ENSG00000250120_8 (sequence is synthesized)
aaggaataaacaaggaaatgatgtattcatttagctctttggtcccacccacgataagaaggaaattttggataaacgaaaggacgggagaaataaaagtaaatgatgctattgactttg

SEQ ID NO: 779709 - DNA, 120 bp, Artificial Sequence
  ENSG00000250120_9 (sequence is synthesized)
aggacagtaacacttatgaaattcatgtagatgttacagataagggaaacccacctatggttggtcactgcacggtcctagtggaactactggatgaaaatgataattcacctgaggtga

SEQ ID NO: 779710 - DNA, 120 bp, Artificial Sequence
  ENSG00000250120_10 (sequence is synthesized)
ttgtcacttctctgtctctcccagtgaaagaagatgctcaagtgggcaccgtcattgccctaatcagcgtttctgaccatgattcaggagccaacggacaggtcacctgctctctgacgc

SEQ ID NO: 779711 - DNA, 120 bp, Artificial Sequence
  ENSG00000250120_11 (sequence is synthesized)
ctcacgttccgttcaagctggtgtccacctacaagaattactactcattggtgctggacagcgctctggaccgcgagagggtgtcggcctatgagctggtggtgaccgcgcgggacgggg

SEQ ID NO: 779712 - DNA, 120 bp, Artificial Sequence
  ENSG00000250120_12 (sequence is synthesized)
gctcgcctccgctgtgggccacggccagcgtgtctgtggaggtggccgacgtgaacgacaacgcgcctgcgttcgcgcagtccgagtacacggtgttcgtgaaggagaacaacccgccag

SEQ ID NO: 779713 - DNA, 120 bp, Artificial Sequence
  ENSG00000250120_13 (sequence is synthesized)
gctgccacatcttcacggtgtctgcgtgggacgcggacgcgcaggagaacgccctggtgtcctactctctggtggagcggcggttgggcgagcgctcgctgtcgagctacgtgtcggtgc

SEQ ID NO: 779714 - DNA, 120 bp, Artificial Sequence
  ENSG00000250120_14 (sequence is synthesized)
acgcggagagcggcaaggtgtacgcgctgcagccgctggaccacgaggagctggagctgctacagttccaggtgagcgcgcgcgatgggggcgtgccgcctctgggcagcaacttgacgc

SEQ ID NO: 779715 - DNA, 120 bp, Artificial Sequence
  ENSG00000250120_15 (sequence is synthesized)
tgcaggtgttcgtgctggacgagaacgacaacgctcccgcgctgctggcgtctcccgctggcagcgcgggcggtgcagtcagtgagctggtgctgcggtcggtggttgcgggtcacgtgg

SEQ ID NO: 779716 - DNA, 120 bp, Artificial Sequence
  ENSG00000250120_16 (sequence is synthesized)
tggctaaggtgcgcgcagtggacgctgactctggatacaacgcgtggctgtcgtatgaattgcagtcggcggcggttggtgcacgcatcccgtttcgcgtggggctgtacacgggcgaga

SEQ ID NO: 779717 - DNA, 120 bp, Artificial Sequence
  ENSG00000250120_17 (sequence is synthesized)
tcagtacgacgcgcgctctggatgagactgactcgccacgccagcgcctactggtgctggtgaaggaccatggcgagccgtcgctgacggccacggccactgtgcttgtgtcgcttgtgg

SEQ ID NO: 779718 - DNA, 120 bp, Artificial Sequence
  ENSG00000250120_18 (sequence is synthesized)
agggcagccaggcacccaaggcctcgtcgcgggcttcagtgggcgtggcgcccgaggtggccctggtggatgtcaacgtgtacctgatcatcgccatctgcgcggtgtccagcttgctgg

SEQ ID NO: 779719 - DNA, 120 bp, Artificial Sequence
  ENSG00000250120_19 (sequence is synthesized)
tgctcacgctgctgctgtacactgcactgaggtgctcggcggcgcccaccgagggcgcatgtgggccggtgaagcccacgctggtgtgctctagcgcggtggggagctggtcttactcgc

SEQ ID NO: 779720 - DNA, 120 bp, Artificial Sequence
  ENSG00000250120_20 (sequence is synthesized)
agcagaggcggcagagggtgtgttctggggagggcctgcccaaggcggacctcatggccttcagccccagccttccaccatgcccaatggtagatgtggacggggaagatcagtctattg

SEQ ID NO: 779721 - DNA, 120 bp, Artificial Sequence
  ENSG00000250120_21 (sequence is synthesized)
gaggggaccactctaggaagccacgacagcccaaccctgactggcgttactctgcctccctgagagcaggcatgcacagctctgtgcacctagaggaggctggcattctacgggctggtc

SEQ ID NO: 779722 - DNA, 120 bp, Artificial Sequence; identical to SEQ ID NO: 772619
  ENSG00000250120_22 (sequence is synthesized)

SEQ ID NO: 779723 - DNA, 120 bp, Artificial Sequence; identical to SEQ ID NO: 80633
  ENSG00000250120_23 (sequence is synthesized)

SEQ ID NO: 779724 - DNA, 120 bp, Artificial Sequence; identical to SEQ ID NO: 80634
  ENSG00000250120_24 (sequence is synthesized)

SEQ ID NO: 779725 - DNA, 120 bp, Artificial Sequence; identical to SEQ ID NO: 80635
  ENSG00000250120_25 (sequence is synthesized)

SEQ ID NO: 779726 - DNA, 120 bp, Artificial Sequence; identical to SEQ ID NO: 80636
  ENSG00000250120_26 (sequence is synthesized)

SEQ ID NO: 779727 - DNA, 120 bp, Artificial Sequence; identical to SEQ ID NO: 80637
  ENSG00000250120_27 (sequence is synthesized)

SEQ ID NO: 779728 - DNA, 120 bp, Artificial Sequence; identical to SEQ ID NO: 80638
  ENSG00000250120_28 (sequence is synthesized)

SEQ ID NO: 779729 - DNA, 120 bp, Artificial Sequence; identical to SEQ ID NO: 80639
  ENSG00000250120_29 (sequence is synthesized)

SEQ ID NO: 779730 - DNA, 120 bp, Artificial Sequence; identical to SEQ ID NO: 80640
  ENSG00000250120_30 (sequence is synthesized)

SEQ ID NO: 779731 - DNA, 120 bp, Artificial Sequence; identical to SEQ ID NO: 80641
  ENSG00000250120_31 (sequence is synthesized)

SEQ ID NO: 779732 - DNA, 120 bp, Artificial Sequence; identical to SEQ ID NO: 80642
  ENSG00000250120_32 (sequence is synthesized)

SEQ ID NO: 779733 - DNA, 120 bp, Artificial Sequence; identical to SEQ ID NO: 80643
  ENSG00000250120_33 (sequence is synthesized)

SEQ ID NO: 779734 - DNA, 120 bp, Artificial Sequence; identical to SEQ ID NO: 80644
  ENSG00000250120_34 (sequence is synthesized)

SEQ ID NO: 779735 - DNA, 120 bp, Artificial Sequence; identical to SEQ ID NO: 80645
  ENSG00000250120_35 (sequence is synthesized)

SEQ ID NO: 779736 - DNA, 120 bp, Artificial Sequence; identical to SEQ ID NO: 80646
  ENSG00000250120_36 (sequence is synthesized)

SEQ ID NO: 779737 - DNA, 120 bp, Artificial Sequence; identical to SEQ ID NO: 80647
  ENSG00000250120_37 (sequence is synthesized)

SEQ ID NO: 779738 - DNA, 120 bp, Artificial Sequence; identical to SEQ ID NO: 80648
  ENSG00000250120_38 (sequence is synthesized)

SEQ ID NO: 779739 - DNA, 120 bp, Artificial Sequence; identical to SEQ ID NO: 80649
  ENSG00000250120_39 (sequence is synthesized)

SEQ ID NO: 779740 - DNA, 120 bp, Artificial Sequence; identical to SEQ ID NO: 80650
  ENSG00000250120_40 (sequence is synthesized)

SEQ ID NO: 779741 - DNA, 120 bp, Artificial Sequence; identical to SEQ ID NO: 80651
  ENSG00000250120_41 (sequence is synthesized)

SEQ ID NO: 779742 - DNA, 120 bp, Artificial Sequence; identical to SEQ ID NO: 80652
  ENSG00000250120_42 (sequence is synthesized)

SEQ ID NO: 779743 - DNA, 120 bp, Artificial Sequence; identical to SEQ ID NO: 80653
  ENSG00000250120_43 (sequence is synthesized)

SEQ ID NO: 779744 - DNA, 120 bp, Artificial Sequence; identical to SEQ ID NO: 80654
  ENSG00000250120_44 (sequence is synthesized)

SEQ ID NO: 779745 - DNA, 120 bp, Artificial Sequence
  ENSG00000250120_45 (sequence is synthesized)
ttcatttttgtctacattccatttatgcttgaatatttctagtgatacctttgtaatataatttattccaggagttttaaaatttttttatcctacccagtgtgtcagcctttgattggt

SEQ ID NO: 779746 - DNA, 120 bp, Artificial Sequence
  ENSG00000250120_46 (sequence is synthesized)
acttaaatttttttaaataacaatttattctgaatacactaatattttccaatacaaatatgtgatataggttgcagttctgacgatttactttcataatcacttttcgttacaaatatt

SEQ ID NO: 779747 - DNA, 120 bp, Artificial Sequence
  ENSG00000250120_47 (sequence is synthesized)
tgtgagattagtacttcatgttatttcatttccaatctaaattttgatttgattgtatttgcattaccaaaaaattccactgatctatatctcttcagtgaaaatgtgttttcctccatg

SEQ ID NO: 779748 - DNA, 120 bp, Artificial Sequence
  ENSG00000250120_48 (sequence is synthesized)
tgtagaatatgtgtagcgtaccacagcttatactgccatagtagatttcaatgttcagtgattacagctttttctcaatagtgcagtaagtaggtgggcagttcattggtaaaaatttct

SEQ ID NO: 779749 - DNA, 120 bp, Artificial Sequence
  ENSG00000250120_49 (sequence is synthesized)
taatcttagcaattaagttaaatgctttgaactttaaaaacgttttccatttttattttagttgtagtggtacctgtgtcagtgtgtattattcacttagcagaagaaaatgtatgtttc

SEQ ID NO: 779750 - DNA, 120 bp, Artificial Sequence
  ENSG00000250120_50 (sequence is synthesized)
ttttatttacataattttatccagtagctcttcattatctgctcctttatcagcattaggcattgcttatgatattcaggtattagctctttcactttaaggaaggagtcatgcttatgt

SEQ ID NO: 779751 - DNA, 120 bp, Artificial Sequence
  ENSG00000250120_51 (sequence is synthesized)
atgtttaataatgaagagaatttgaacactttttacttttgagactgaaaatactttagtatgaattaatattaaaagtttgaggagaaaataaaattaatgttttctactgatctgata

SEQ ID NO: 779752 - DNA, 120 bp, Artificial Sequence
  ENSG00000250120_52 (sequence is synthesized)
gtatagtttaatagcttctctagtcatcttaaacagggttgggttagatgatatagactcagaaatgaaagctaacttagttgcagagtgacaaaactacactatcaattgtgttttcct

SEQ ID NO: 779753 - DNA, 120 bp, Artificial Sequence
  ENSG00000250120_53 (sequence is synthesized)
gaaattggttgttacctgatacccatgatttcatttttaaaaaaaatttattaattctagtgttaccaaacaccaatgccatgaatttgtcatcttgcctatggctcttagcaattactt

SEQ ID NO: 779754 - DNA, 120 bp, Artificial Sequence
  ENSG00000250120_54 (sequence is synthesized)
ttttctttcctttctctttgagtatggagattgaatttgttactcagtacgtgcttcacaaatagcttcaaataaaattaaaattattgttcaagtttaggaacaccaaaaaaaaattgt

SEQ ID NO: 779755 - DNA, 120 bp, Artificial Sequence
  ENSG00000250120_55 (sequence is synthesized)
ggcaagaatttaagcatggcattctttcagtgttaatactctccatgccctgtctccagctcttagaaattatagatgctaagttaatgcagagtttagaagtgtatttgttattttatc

SEQ ID NO: 779756 - DNA, 120 bp, Artificial Sequence
  ENSG00000250120_56 (sequence is synthesized)
aggtttatgaaatatatacttccccctctgatattttgaaaaaaaatcttccttaatgtcttatattataagtaatataaaaaacttagtaaaaactcatatcaattgtaaaagtctcag

SEQ ID NO: 779757 - DNA, 79 bp, Artificial Sequence
  ENSG00000250120_57 (sequence is synthesized)
ataaaaaacttagtaaaaactcatatcaattgtaaaagtctcaggtatacaagtgcattaatctctccatcaatactaa

SEQ ID NO: 779758 - DNA, 89 bp, Artificial Sequence
  ENSG00000250120_58 (sequence is synthesized)
ggccaggagttcaagaccaacctgggcgacatagggatatcttgtactgtgtgtgtgtgtatatatatgatgatgggctctccttacat

SEQ ID NO: 779759 - DNA, 120 bp, Artificial Sequence
  ENSG00000250120_59 (sequence is synthesized)
atatatgtacttatgtatatataagccaggcatggtggtacatgcctttagtccctactgtagtgctacttgggagggtgaggtgggaggacggcttgagcctgggaagttgaggctgca

SEQ ID NO: 779760 - DNA, 120 bp, Artificial Sequence
  ENSG00000250120_60 (sequence is synthesized)
ctccagcctggatgacaaagtgagaccctatttcaaaaattgaaaaaagcaaaagcaatagtaacaccattatcctgcaaatatgatctttttcatattaattcacgtgataatacagtt

SEQ ID NO: 779761 - DNA, 120 bp, Artificial Sequence
  ENSG00000250120_61 (sequence is synthesized)
attaattcacgtgataatacagttggtgcagtagtactttatttaggatgtctacatacaagataaaactcttcatggaattctgatttgtaagacaaacccacctttgaagaggtactg

SEQ ID NO: 779762 - DNA, 120 bp, Artificial Sequence
  ENSG00000250120_62 (sequence is synthesized)
atcatacacaagaaggtataggaaaggagttggaagctcacaaagagaaacataaacatatgcaggaatcaggaacgaagaagataagtgaaataatatgaaatcaaatgcacttatgtt

SEQ ID NO: 779763 - DNA, 79 bp, Artificial Sequence
  ENSG00000250120_63 (sequence is synthesized)
aagataagtgaaataatatgaaatcaaatgcacttatgttttgagcgacaggatattgttgttctccatgaaaagacgg

SEQ ID NO: 779764 - DNA, 120 bp, Artificial Sequence
  ENSG00000250120_64 (sequence is synthesized)
tcctgacctcgtgatccaccggcctcggcttcccaaagtgctggccgagtgccaccgcacccggccgaaaggtattttttttaacagaagaaaatcagattattcctagatcagaaagaa

SEQ ID NO: 779765 - DNA, 120 bp, Artificial Sequence
  ENSG00000250120_65 (sequence is synthesized)
ttaacagaagaaaatcagattattcctagatcagaaagaagctccattgttcctgtactttaaaaactacaaacacccattaagaccacttggaacctcaggaacaaggaccaaaaggtc

SEQ ID NO: 779766 - DNA, 120 bp, Artificial Sequence
  ENSG00000250120_66 (sequence is synthesized)
tcagaggaactaagtctttctagtcatgaaatattgttttactaaccaaaagagaggcataattttagctgctagacaaagtggccaggaatcccggagcctacagcactggcttctgct

SEQ ID NO: 779767 - DNA, 120 bp, Artificial Sequence
  ENSG00000250120_67 (sequence is synthesized)
ccttgaattttgtgaagcgggaaaggaccagttccactacaccatcctggaagaggccaaggacggcacatagcgtcttcgcggtccctattgcgcaggacctgggtctggagcttgtgg

SEQ ID NO: 779768 - DNA, 86 bp, Artificial Sequence
  ENSG00000250120_68 (sequence is synthesized)
gcggtccctattgcgcaggacctgggtctggagcttgtggagctgataccgcgcctgtttcagttggattccaaaagccgcagaat

SEQ ID NO: 779769 - DNA, 120 bp, Artificial Sequence
  ENSG00000250120_69 (sequence is synthesized)
tctcggagtgcagcatccacctggaagtgatcgtggacaagctgctacaggttttccatgtggaggtgaaagtgaagaacaataaagacaacctgccagtgttctcagcaacacaaaaga

SEQ ID NO: 779770 - DNA, 120 bp, Artificial Sequence
  ENSG00000250120_70 (sequence is synthesized)
atctgtttctgaaacgagagctcttgattatcgtgtttcactagagggtgtctgtgatgccgacgtcggggccaatgctctgatgacttacatactgtgccgcaatgattatttttccct

SEQ ID NO: 779771 - DNA, 120 bp, Artificial Sequence
  ENSG00000250120_71 (sequence is synthesized)
ggaaataccaagagcaggtaaaaccacttgaaggtgtattttaaaaattctttcagataggtaagtcacttcagagctactcttggtgctcaaagcaactgatgggggcgaagctgagct

SEQ ID NO: 779772 - DNA, 120 bp, Artificial Sequence
  ENSG00000250120_72 (sequence is synthesized)
gacaggcaccaaagcattatatatcacagcgctggatgtaaatgatgatgcccagtgtttgacaaaggagtctatcatgtgaaattactggaaaatgcaagagaaggtacactggttatt

SEQ ID NO: 779773 - DNA, 120 bp, Artificial Sequence
  ENSG00000250120_73 (sequence is synthesized)
tgtaaagataggttttgaggaaactaaataatgaaagattcaaatacaggcagttgacacaggcaattccccaatgtttgatcactgcacagacttgatagaagtcttggacatcaatga

SEQ ID NO: 779774 - DNA, 120 bp, Artificial Sequence
  ENSG00000250120_74 (sequence is synthesized)
tagtgttccagagttagcagtaagtcactatcattccctgtacaggaggacgctccactgggtaccgtcatagccctaatcagtgtaattgaccctaacttcagtgccaagggacagacg

SEQ ID NO: 779775 - DNA, 120 bp, Artificial Sequence
  ENSG00000250120_75 (sequence is synthesized)
acccgcaccctgactcctcacgtctcttcaagctggtgtctaccttcaaaaggcgctgcccagaaactattcgttggtactccacagcgccctggaccaagagagcaaatctatccattg

SEQ ID NO: 779776 - DNA, 120 bp, Artificial Sequence
  ENSG00000250120_76 (sequence is synthesized)
ttggtaatcgctcggaatggggactcgctttcattgttggccacagccatcgggtccgtggaagtggccgaacagtgaaccacaatgccctggcgttccagcagcccgagtacatggtgt

SEQ ID NO: 779777 - DNA, 120 bp, Artificial Sequence
  ENSG00000250120_77 (sequence is synthesized)
tcgtgaaaggtaacaacccgcggggctgccacgacttcacagtgtccgcgcgggaccgggacgcgcaggagaacgtgctggtgtcctactcgttgatggaacagcgggtgggcgagtgcg

SEQ ID NO: 779778 - DNA, 120 bp, Artificial Sequence
  ENSG00000250120_78 (sequence is synthesized)
cgctgtctagctatgtgtgggtgcacgcggagagcggcaagaggtacgcgttgcagccactggactacgaggagctggagctgctgcagttctaggtgagagcgcgcgacgcgggcatgc

SEQ ID NO: 779779 - DNA, 120 bp, Artificial Sequence
  ENSG00000250120_79 (sequence is synthesized)
cgcctctgagcagcaatgtgacgctgccaggtattagtgctggaacgacaactttgtctgcgctgctggcgccttgggtgggctggcggcgctgtgagtgagctggtgcggtattcagtg

SEQ ID NO: 779780 - DNA, 120 bp, Artificial Sequence
  ENSG00000250120_80 (sequence is synthesized)
gatgcaggccacttggtggcgaaggtgcgcacggtggactccagctatgacgcctggttgtcgcaacagctgcatctgtcagctggcagcacccgttccacgtggggctctgcacgggcg

SEQ ID NO: 779781 - DNA, 120 bp, Artificial Sequence
  ENSG00000250120_81 (sequence is synthesized)
agatcagcacgacgagtaccctggacgaggcgaaagctacgcgccaccgcctgctggtgctggtgaaggaccactgcgagctggcgctgactgccaccgtcaccgtggtggcgtcgctgg

SEQ ID NO: 779782 - DNA, 120 bp, Artificial Sequence
  ENSG00000250120_82 (sequence is synthesized)
cggagagcagccaagcgaggaaggtcccatcgcgggctttggcgggcgtcgaggtccgggaggcagcgctggtggatgtcaacgtgtacctgatcatcgccatctgcgtggtgtccagcc

SEQ ID NO: 779783 - DNA, 120 bp, Artificial Sequence
  ENSG00000250120_83 (sequence is synthesized)
tgttagtgctcacgttgctgctgtacacgacgctgcggtgcttggcgcagctcaccgagagctcgtgcatgccgggcaagcccacgctggtgtaccgcagcgtagtgggatctggtctta

SEQ ID NO: 779784 - DNA, 120 bp, Artificial Sequence
  ENSG00000250120_84 (sequence is synthesized)
ctcgcagcaaaggagattttactctggagagtcgcctcccaaggtcaacattacggcttttagtcctagtgttctcccatggttcagattttggagatggacttcaataggaaatttttg

SEQ ID NO: 779785 - DNA, 120 bp, Artificial Sequence
  ENSG00000250120_85 (sequence is synthesized)
agaatataagtactgtaatcctggaaagtatttcattcctattaatgtccctcatagtgacattgataatgttcaccaagttattaatttgattgctttatttattttgcttttgctttt

SEQ ID NO: 779786 - DNA, 120 bp, Artificial Sequence
  ENSG00000250120_86 (sequence is synthesized)
tttatttattttgcttttgctttttcttttgagatgctttatttaaagtacactggggccgggtgcggtagctcatgcctatttgtaatcccggcactttgggaagccgaggcgggcgga

SEQ ID NO: 779787 - DNA, 120 bp, Artificial Sequence
  ENSG00000250120_87 (sequence is synthesized)
aacctaggaggcagaggttgcggtgagcctagattaggccactgcactacagcctgggagacagggtgaaactctgtcttaaaaaaaaaagtacattggaagtctagccatcttaatcac

SEQ ID NO: 779788 - DNA, 120 bp, Artificial Sequence
  ENSG00000250120_88 (sequence is synthesized)
tttttactacagtcaccatgaacattctttaggaatattcttcagttgataagtataatgataatagtaataatgaattagactgagtggctgtttcctgtaaatgagaaagttaaatct

SEQ ID NO: 779789 - DNA, 120 bp, Artificial Sequence
  ENSG00000250120_89 (sequence is synthesized)
taccggaaggatcatgatgaataatgatccttatgagaaggtcaaatcttctcaattttgaagcaagttctttattcctattcattttcttattctgatttgtgtcctccattccttatt

SEQ ID NO: 779790 - DNA, 120 bp, Artificial Sequence
  ENSG00000250120_90 (sequence is synthesized)
ttatgtattcaaaaataccatgacaatatttaatatcataattatttgagtttaaaacatgtttaaatgtttatctttctataatcgataagtttatctctcacaaatggtgatgagcag

SEQ ID NO: 779791 - DNA, 120 bp, Artificial Sequence
  ENSG00000250120_91 (sequence is synthesized)
gcagggttgaggcagcttcgtccacaaacaattttgtttcttcatgatcaatatccatcttttttgagatgttgattgcagtgggtggaattttagccttgcctttaaaggtgattttac

SEQ ID NO: 779792 - DNA, 120 bp, Artificial Sequence
  ENSG00000250120_92 (sequence is synthesized)
ttcttaatttttgtcttcaatcttcttataatttcattttaggtcattgtcttcacaatcttcaactacttcagatagccaacaactttgttcttttttaaaaagaaaacaaaacaaaac

SEQ ID NO: 779793 - DNA, 120 bp, Artificial Sequence
  ENSG00000250120_93 (sequence is synthesized)
aatgtcagctctacttaattacctgttgacttaattgctgctgtcctccagtttaagttgttgagctcttctactattttgggaagatttctttgagcaccgattatactcatttttctt

SEQ ID NO: 779794 - DNA, 120 bp, Artificial Sequence
  ENSG00000250120_94 (sequence is synthesized)
tcatttttggtacctggctgtatgaaaatattttagggtaggaaaattcacacttatttgggctttaagtataagagagtcttcccatacatgatgaagggtgataccattgtctgtgtt

SEQ ID NO: 779795 - DNA, 120 bp, Artificial Sequence
  ENSG00000250120_95 (sequence is synthesized)
ccatacatgatgaagggtgataccattgtctgtgttcattaagctgcatggtcttcagaatggcattgctgagcttggcagggtgtctcaggcctgtaatcccagcattttgggaagccg

SEQ ID NO: 779796 - DNA, 120 bp, Artificial Sequence
  ENSG00000250120_96 (sequence is synthesized)
cagcctcggcaacatagtgagacccccatctctaccaaaaaatgtcattgtttttaataacttaagtataagaaccatgggatattaataaaggcacttccacttgacaattgtggtgtt

SEQ ID NO: 779797 - DNA, 120 bp, Artificial Sequence
  ENSG00000250120_97 (sequence is synthesized)
aattataccttagaatttaacattgtatacttttgatatatttgatgcaaaatattttttgccttcacaccatattaatgtgaattgctttctttaaagggatcccagagaacacgtatt

SEQ ID NO: 779798 - DNA, 120 bp, Artificial Sequence
  ENSG00000250120_98 (sequence is synthesized)
tatagctgtaaggatgtgtatcaaattatatgtaaaattactttgctctttttggctctaattacaaatgagatggcctttaattctgtgtaaagaaatagtatatttacatattgcagg

SEQ ID NO: 779799 - DNA, 120 bp, Artificial Sequence
  ENSG00000250120_99 (sequence is synthesized)
ataaccatgttataggtagggtaaagttaatataaatgctgaaaaggaattagtagtgtctacctagaaaaataacttctgagaagatgatttctatgaagataaacattaaggaaatct

SEQ ID NO: 779800 - DNA, 120 bp, Artificial Sequence
  ENSG00000250120_100 (sequence is synthesized)
tcagaaaagggaaaaccctgtcctactttatggtgctggaattctcttcatccatagctataggacaagagccaatattgatcagtaactcatgataataaatcaccattgtttgagcag

SEQ ID NO: 779801 - DNA, 120 bp, Artificial Sequence
  ENSG00000250120_101 (sequence is synthesized)
gcagtttattaatatatttgttagacatcatgaagggacttaaatacattatttcatttaatacttataacaatttctaaagtacatatgactgttccaatttgaaagataaaataagag

SEQ ID NO: 779802 - DNA, 120 bp, Artificial Sequence
  ENSG00000250120_102 (sequence is synthesized)
tgagatgtgtatctattttatccagtgccagtacatggtggagatattattcaaatgtgtatctttcaggcttcagactcattcttttatccactataatgtagagctttctttagtaag

SEQ ID NO: 779803 - DNA, 120 bp, Artificial Sequence
  ENSG00000250120_103 (sequence is synthesized)
tcatttctctgctcaaacatggtctcggctaggaaaatcaagcacaaattgtgtacaggcaaatctttctttctgttgtgcttagaagaaacttcatgattgtcttcatcattaattttg

SEQ ID NO: 779804 - DNA, 120 bp, Artificial Sequence
  ENSG00000250120_104 (sequence is synthesized)
tacaatgtgtgattgagatggcactaagtttttttatgttaagtgatttttttcttgtaagagttcgtgatcatcattatcatttgttttaatcaatgccacactgagataggtattttg

SEQ ID NO: 779805 - DNA, 120 bp, Artificial Sequence
  ENSG00000250120_105 (sequence is synthesized)
gttatgtaattgttaagtaattaagagttgccttataagaactacgtatctgttgtttggaagtgatataagtaagaatcgtttaacatgtaagaaaagtcagaaaactgtggtttccaa

SEQ ID NO: 779806 - DNA, 120 bp, Artificial Sequence
  ENSG00000250120_106 (sequence is synthesized)
tatccttgtggaacacctaaactaaatactatataccaaaaatgacacccttctttctttactgtgaataaagacagtgtttgggacaagtatagatgttgatattattatttcagggac

SEQ ID NO: 779807 - DNA, 120 bp, Artificial Sequence
  ENSG00000250120_107 (sequence is synthesized)
cctgaacttggccaaaggattcaagaaatgtttacaatattgcatacttcaataacaattttaaagacatagattcccatgaaaatcttcaaatgtgtgtaggtctttcagtcttcttca

SEQ ID NO: 779808 - DNA, 120 bp, Artificial Sequence
  ENSG00000250120_108 (sequence is synthesized)
gtcttattgttggctgggaagctcataacaactgacaaatgatttgtgaccaaataactgtttttacttgactaagccatgatagagcagaattagcatcacggaataaatcctataatt

SEQ ID NO: 779809 - DNA, 120 bp, Artificial Sequence
  ENSG00000250120_109 (sequence is synthesized)
ttgttaatacagtggttggataatgtaattctaatctgttggttttggagaacctcctggggttctgacaacggtgtcaaaatttatttatgtgttttcaagaaataatagcactaggtc

SEQ ID NO: 779810 - DNA, 120 bp, Artificial Sequence
  ENSG00000250120_110 (sequence is synthesized)
tgttagaatatcagtggatgacgtgcactagtaagacattaaactatgcactctaatacttatatgactaacaggacatacaggcagattgtatgtcctgactgatatagtaaaagtcag

SEQ ID NO: 779811 - DNA, 120 bp, Artificial Sequence
  ENSG00000250120_111 (sequence is synthesized)
gcacaaagttccttaatcttcaattgattttacaaaatcagttaacaataactgtattgaaatgacttcttggtattagcctatacccagatattaggctgatcctcaaagatgagttca

SEQ ID NO: 779812 - DNA, 120 bp, Artificial Sequence
  ENSG00000250120_112 (sequence is synthesized)
aagggcgcataatctcttcactaggggctggttgagatggtgacatctgaaatatcacagccaaaatgcaaaagatgggtcattgattcatacactatatcaaactcttttatgacttgg

SEQ ID NO: 779813 - DNA, 120 bp, Artificial Sequence
  ENSG00000250120_113 (sequence is synthesized)
cgtttgttcagtactactttatatattcacaaaatactgtattgttggaaattaacacctaaattaacatattgttttaattcaaatatgtgatattatcatttttccagagtaaacctt

SEQ ID NO: 779814 - DNA, 120 bp, Artificial Sequence
  ENSG00000250120_114 (sequence is synthesized)
ctaaggttcatttccctacctcgcaagactccacattccatgtaacatcttcatccccaattcccataataaggtgattgaggatctgttgtttccttttgttcaaaataaacctgatgt

SEQ ID NO: 779815 - DNA, 120 bp, Artificial Sequence
  ENSG00000250120_115 (sequence is synthesized)
gcttcaaatatcatgttgaatatactgtcatctggtctaatgttatgttttgattagaggctactatgattgattattttacagatgcgtaatggaattaacggttataaaagttgatat

SEQ ID NO: 779816 - DNA, 120 bp, Artificial Sequence
  ENSG00000250120_116 (sequence is synthesized)
gtctcctttaattttttaatacagaattttgcatttacctgaattagagttctagtgttatgacaacattgggaaaagagtaaatatgaaaaaagtagaacaaaatctcaaattaatagt

SEQ ID NO: 779817 - DNA, 120 bp, Artificial Sequence
  ENSG00000250120_117 (sequence is synthesized)
tgaatatatatataaaatattagcatacacatatgataactttttcatatgcccttgcagtatttttagattggagataaaccatcaaaactatagaacaaaatatttaagctagagtga

SEQ ID NO: 779818 - DNA, 120 bp, Artificial Sequence
  ENSG00000250120_118 (sequence is synthesized)
tatttattctaaatcactttctactctaaaattttgttgcatcttctttttttcctcctaaatcctaagggtatatgaaaagacaaagaaaattcaagcaagttacaacttcaggcaaag

SEQ ID NO: 779819 - DNA, 120 bp, Artificial Sequence
  ENSG00000250120_119 (sequence is synthesized)
aaaactctcataagcaattcctgtattttacttagcattttctatgaaattccatttccacaagcactaaggtaatttaccatttagttgaattgtttgattaattttctatgttttaag

SEQ ID NO: 779820 - DNA, 120 bp, Artificial Sequence
  ENSG00000250120_120 (sequence is synthesized)
cacaatatcaggtacttacagaaggtataattaaaaatcacttcccttgttttccatgaacttctgctcccaaacccaaaattctttcaacaagaaacaaactattttcatgaatataac

SEQ ID NO: 779821 - DNA, 120 bp, Artificial Sequence
  ENSG00000250120_121 (sequence is synthesized)
tgaattagattaaggaaaccaatgttggtgacttggaaataccaatatggcacaaagatgttcagggtgattttatttattttataaaatgataataaaatttattttatagttgaaaag

SEQ ID NO: 779822 - DNA, 120 bp, Artificial Sequence
  ENSG00000250120_122 (sequence is synthesized)
cctatttctgtcatatcattgattctgttacataaagtgctaaattttgatatctcatattatgctactatggcttacattagaaataatatatgtcaaataaaaactcatctagatcaa

SEQ ID NO: 779823 - DNA, 120 bp, Artificial Sequence
  ENSG00000250120_123 (sequence is synthesized)
tgactggcgttactctgcctccctgagagcaggcatgcacagtaattgattaactaccattatttctggaggtgatccagtatccatgccatggggccaaataaaagattcattatttgc

SEQ ID NO: 779824 - DNA, 120 bp, Artificial Sequence
  ENSG00000250120_124 (sequence is synthesized)
aagaagaaataatcttcaaacttaagcccctcaaaatatctgggcaactatcaagtgaatattcaccaaacttagatcagttcgtaaagagaaagcctacaaactctgtgcacctagagg

SEQ ID NO: 779825 - DNA, 120 bp, Artificial Sequence
  ENSG00000250120_125 (sequence is synthesized)
aggctggcattctacgggctggtccaggagggcctgatcagcagtggccaacagtatccagtgcaacaccagtgccaacgatggagtgaagaaatgatggaggaggaagtggttttagac

SEQ ID NO: 779826 - DNA, 120 bp, Artificial Sequence
  ENSG00000250120_126 (sequence is synthesized)
tgccaagtgttgcaggatgtggaggcatctgggaaggtgagaacttcccaaagaagccacgtgaaatcatgactttctaccttgcctttatttcagagtttttcttgctcttatggaggc

SEQ ID NO: 779827 - DNA, 120 bp, Artificial Sequence
  ENSG00000250254_0 (sequence is synthesized)
agatgaatgtggctgttgagagcggcaataatccagaatggctactctgatctacgttgataaggaaattggagaaccaggcacccgtgtggctgccaaggatgtgctgaagctggagtc

SEQ ID NO: 779828 - DNA, 120 bp, Artificial Sequence
  ENSG00000250254_1 (sequence is synthesized)
tagaccttcaatcaaagcattagatgggatatctcaagttttaacacgacgttttggcaaaacatacgatgctccatcagccttacctaaagctaccagaaaggctttgggcactgtcaa

SEQ ID NO: 779829 - DNA, 120 bp, Artificial Sequence
  ENSG00000250254_2 (sequence is synthesized)
cagagctacagaaaagtcagtaaagaccaatggacccagaaaacaaaaacagccaagcttttctgccaaaaagatgaccgagaagactgttaaaacaaaaagttctgttcctgcctcaga

SEQ ID NO: 779830 - DNA, 120 bp, Artificial Sequence
  ENSG00000250254_3 (sequence is synthesized)
cagaaatagaaaaattctttcccttcaatcttctagactttgagagttttgacctgcctgaagagcgccagattgcacacctccccttgagtggagtgcctctcatgatccttgatgagg

SEQ ID NO: 779831 - DNA, 120 bp, Artificial Sequence
  ENSG00000250254_4 (sequence is synthesized)
agggagagcttgaaaagctgtttcagctgggccccccttcacctgtgaaaatgccctctccaccatgggaatgcaatctgtttgcagtctccttcaagcattctgtcgaccctggatgtt

SEQ ID NO: 779832 - DNA, 120 bp, Artificial Sequence
  ENSG00000250254_5 (sequence is synthesized)
gaattgccagctgtttgctatgacatagatatttaaatttcttagtgctttggagtttgtgtgtacttgtattaataaagcattatttgtttaacaacataataaatacataaatataaa

SEQ ID NO: 779833 - DNA, 120 bp, Artificial Sequence
  ENSG00000250298_0 (sequence is synthesized)
atgacagaccccaacaagatgatcatcaacttggccctctttggcatgactcagagtggaaaaagttctgctggaaacattctgctgggaagcacagactttcacagcagctttgctccc

SEQ ID NO: 779834 - DNA, 120 bp, Artificial Sequence
  ENSG00000250298_1 (sequence is synthesized)
tgttctgtgaccacatgttgtagcctgggccgcagttgtcacctccacagcttcatgcgtcgaggtgggctagaggtagccctgcaggtccaggtgttggacactccaggttatccacac

SEQ ID NO: 779835 - DNA, 120 bp, Artificial Sequence
  ENSG00000250298_2 (sequence is synthesized)
cacttcgggcaagggggtctccaccttgcactcctggttcagagagcagatgtgcctttctgtgggcaggaagtaactgacccagtccagatgatccaggaacttcttggacatgcttgg

SEQ ID NO: 779836 - DNA, 120 bp, Artificial Sequence
  ENSG00000250298_3 (sequence is synthesized)
atgaattacacagccattctttttacccatgcagaaaaaatagaagaggctgggcttactgaagataaatatttacatgaggcctctgataccctgaaaacgctgctaaattctattcag

SEQ ID NO: 779837 - DNA, 120 bp, Artificial Sequence
  ENSG00000250298_4 (sequence is synthesized)
cacaaatacgttttccagtacaaaaaaggaaaatcactcaatgaacaaagaatgaaaatcttagaaagaatcatggaatttataaaagagaactgttaccaagttcttacatttaaataa

SEQ ID NO: 779838 - DNA, 120 bp, Artificial Sequence
  ENSG00000250298_5 (sequence is synthesized)
tatgctgctggtgagagtgtacattggtataaccactttggaaaactagaagttaaaaagaacatcaatgattcaagatttctaatgcaaatcccatgacatagcaattacactcctaag

SEQ ID NO: 779839 - DNA, 120 bp, Artificial Sequence
  ENSG00000250298_6 (sequence is synthesized)
tgtatacccaacataaatgtgtacatttgtgtactagaagacatgtatgcacaataatgttcatggaactactattcaaaagctaaacatacagactattcaaatgtctattaatattag

SEQ ID NO: 779840 - DNA, 120 bp, Artificial Sequence
  ENSG00000250298_7 (sequence is synthesized)
aatggttaagtaaattgtggtatattcccacagtgggatattagaataagtaattagaataagcaagctcaactatatgtaacgataccagtgaattgcccaaacataatgttgaaaaat

SEQ ID NO: 779841 - DNA, 120 bp, Artificial Sequence
  ENSG00000250298_8 (sequence is synthesized)
aagccagacataaaagagtacatactccatgattccatgtgcagaaagttcaaaaacagtaaaacaaatgtaatctaaactactctgatggtagaagtgctggaaattgggagagtggtt

SEQ ID NO: 779842 - DNA, 120 bp, Artificial Sequence
  ENSG00000250298_9 (sequence is synthesized)
aaccttggggaggagattgtgagtgaaaggttacacttgatgtggcttctgagattctggtcatgttcttttgttctcttgatttggagcctggtttcacaggatttgttcactttgtga

SEQ ID NO: 779843 - DNA, 120 bp, Artificial Sequence
  ENSG00000250305_0 (sequence is synthesized)
attcagtattgtgtagtacagaaaagatcacacatgtatatgtcagaagtagatgcacatgttcttttggctttttttctttgttttattcttttttcattttttgtgttttttgttagt

SEQ ID NO: 779844 - DNA, 120 bp, Artificial Sequence
  ENSG00000250305_1 (sequence is synthesized)
ttgttttgaattttttttcttgatgcatatgttccttcaacttattcagtacttccatgtgcagggctctggactagactttcaggatctaaggctgaatcctacacagtcctccctctg

SEQ ID NO: 779845 - DNA, 120 bp, Artificial Sequence
  ENSG00000250305_2 (sequence is synthesized)
ggaaagtgatgaaacctgtgagctctcctagcaactctgcagtcttccttcaagggcctgtgcttccttcagagactcacacaagaggtttatcatgagaaggaccgcactatttcattt

SEQ ID NO: 779846 - DNA, 120 bp, Artificial Sequence
  ENSG00000250305_3 (sequence is synthesized)
cactcctacaagttttcatttacgttacacattgagaaagttatgagaagcaactgtcactctctggaggtggagactgccgtgattcacaaagacaagaggtaattttcctgtaatcac

SEQ ID NO: 779847 - DNA, 120 bp, Artificial Sequence
  ENSG00000250305_4 (sequence is synthesized)
aggatgactcaggatggatcatgaagccgcccagctggagaagcagcatgtgcacaatgtgtacgagagcacagccccttacttcagcgacctgcagagcaaagcctggcctcgtgtccg

SEQ ID NO: 779848 - DNA, 120 bp, Artificial Sequence
  ENSG00000250305_5 (sequence is synthesized)
ccagttcctgcaagagcagaagccaggcagcctcatcgctgacataggttgtgggactggaaaatatcttaaagtgaacagccaggtacataccgtgggctgtgactactgtgggccact

SEQ ID NO: 779849 - DNA, 120 bp, Artificial Sequence
  ENSG00000250305_6 (sequence is synthesized)
ggtagagattgcccggaatagaggatgtgaagccatggtatgtgacaaccttaatctcccctttagggatgagggcttcgatgccatcatctccataggagtcatacatcatttttctac

SEQ ID NO: 779850 - DNA, 120 bp, Artificial Sequence
  ENSG00000250305_7 (sequence is synthesized)
aaaacaaagaagaatcagagcaataaaagaaatggccagggtcttagttcccggaggccaactgatgatttacgtttgggcaatggaacaaaagaaccgtcactttgagaagcaagacgt

SEQ ID NO: 779851 - DNA, 120 bp, Artificial Sequence
  ENSG00000250305_8 (sequence is synthesized)
gcttgttccatggaacagggctctgtgttcccagctcttctcagagtccagccagtctgggaggaagaggcagtgtggatacccagaaagaggccatccctaccatcctccttgctctga

SEQ ID NO: 779852 - DNA, 120 bp, Artificial Sequence
  ENSG00000250305_9 (sequence is synthesized)
gtgtagctgttctgtttgttttaaagagcagtgtggttcaaaacggtcccacagcgtgggctatgaacctgctatggcaagaacctgttttgcaaatatttctaaggaaggcgaggaaga

SEQ ID NO: 779853 - DNA, 120 bp, Artificial Sequence
  ENSG00000250305_10 (sequence is synthesized)
atatggattttacagcacattaggaaaatcgtttcgttcctggtttttctccagatctttggatgaatcgactctgaggaagcaaattgaaagagtaagacccttgaaaaacacagaagt

SEQ ID NO: 779854 - DNA, 120 bp, Artificial Sequence
  ENSG00000250305_11 (sequence is synthesized)
ttgggccagtagcactgtaacagtccagccttccagacactctagtttagactttgatcaccaagagccattttcaacaaaagggcaaagtttagatgaggaagtgtttgtggaatcttc

SEQ ID NO: 779855 - DNA, 120 bp, Artificial Sequence
  ENSG00000250305_12 (sequence is synthesized)
ttctggaaaacacttggagtggctgagagcaccaggcactctgaaacatttaaatggagaccatcaaggggaaatgaggagaaatggagggggaaattttctggatagcactaatactgg

SEQ ID NO: 779856 - DNA, 120 bp, Artificial Sequence
  ENSG00000250305_13 (sequence is synthesized)
tgtgaattgtgtggatgcaggcaacatagaagatgataatccttctgctagtaaaatattgagaaggatttctgcagttgattccacagatttcaacccagatgatacaatgtctgtcga

SEQ ID NO: 779857 - DNA, 120 bp, Artificial Sequence
  ENSG00000250305_14 (sequence is synthesized)
agatccacagactgatgttttggactccacagcctttatgcgctactaccatgtgtttcgagaaggggagctctgcagtctgctcaaggagaatgtgtcagagctccgtatcctgagttc

SEQ ID NO: 779858 - DNA, 120 bp, Artificial Sequence
  ENSG00000250305_15 (sequence is synthesized)
tgggaatgatcatggtaactggtgtatcattgcagagaaaaagagaggttgtgattgattggatccttttagacaactcctccaaaagatgaaccacattctttcctcttggtttgatat

SEQ ID NO: 779859 - DNA, 120 bp, Artificial Sequence
  ENSG00000250305_16 (sequence is synthesized)
ggttacctgaatttgcattcagtgttatttgttaatccatttacgctttggtctgcagagactattaattatttggttgttttgttttcatttttgaataagcacagattctggcattga

SEQ ID NO: 779860 - DNA, 120 bp, Artificial Sequence
  ENSG00000250305_17 (sequence is synthesized)
aagcacttgacaaagggtatttgtgcttaaatgttaatatacaagatctgaagaagcaacagaaagtacccttcagtacacctcagacttttttttaaccccagagagataaaatacatg

SEQ ID NO: 779861 - DNA, 120 bp, Artificial Sequence
  ENSG00000250305_18 (sequence is synthesized)
tatagtgtttttcagtattacacattgatttaaaaagattatgctgttaaataatcttttaaaacggtatttttataaagtgaggggataatttctggttctcaggttataactgagagc

SEQ ID NO: 779862 - DNA, 120 bp, Artificial Sequence
  ENSG00000250305_19 (sequence is synthesized)
agtgtgcaagataataggtaaatttgatccattgcacagatatactttgaaccatgtgatgagttatcttgttgccaaggccttgcttctacttaaagttttcagaaaactgagtgacag

SEQ ID NO: 779863 - DNA, 120 bp, Artificial Sequence
  ENSG00000250305_20 (sequence is synthesized)
tggagagaaacaagaagttttacaaggactttactaaattataagcaaacttgcttcaaaataagttgacatgtgataataaggttttcaatgtagcccaggaggtttttaaaggcactg

SEQ ID NO: 779864 - DNA, 120 bp, Artificial Sequence
  ENSG00000250305_21 (sequence is synthesized)
ataaaaattagcaagatgtggtggtgcatgcctgtcatccaagctactcaagagactgaggcaggaggatcacgtgagcccaggaattcaaggctgcagtgaactatgattgcatcactg

SEQ ID NO: 779865 - DNA, 120 bp, Artificial Sequence
  ENSG00000250305_22 (sequence is synthesized)
tctcaaaataataataataataataataaaggcgttgttagcttgtaaggagtggagtatgtaggtagtaggagttatatgcaagtacccaagtggtattcttccaatcttattagaagc

SEQ ID NO: 779866 - DNA, 120 bp, Artificial Sequence
  ENSG00000250305_23 (sequence is synthesized)
ccaagtggtattcttccaatcttattagaagcatgaatattcaagattgatattactattgcttattagcaagattgttatcaatcatgcttattagaaggatgaatatccaagaccaag

SEQ ID NO: 779867 - DNA, 120 bp, Artificial Sequence
  ENSG00000250305_24 (sequence is synthesized)
attgactaatgatgagtctgcatcaagaactaggcatttcttctgagttgacggactctttaggaaaggagaatctaagtgaagcactgattttagctctgagaacaaacaaattaaggt

SEQ ID NO: 779868 - DNA, 120 bp, Artificial Sequence
  ENSG00000250305_25 (sequence is synthesized)
acagcatagttagccttggtagaggtatgacttggatttgctgtatcctttaaaatagtatctgggcatttattttattgaaggtgactacattttattagttatattaggaatttaggt

SEQ ID NO: 779869 - DNA, 120 bp, Artificial Sequence
  ENSG00000250305_26 (sequence is synthesized)
agaatcaacttctactgattacaggttgaatttctgtcactttgtagagaaacgaatagactggacactgtgtggtcactgtttagatttgcccatgggtctctttaaatctatgtcatg

SEQ ID NO: 779870 - DNA, 120 bp, Artificial Sequence
  ENSG00000250305_27 (sequence is synthesized)
gatcctgagacacaaatataattaagacaggtctagagacaggagaagcagaaataagttgacccaggagtacagtctcaagtagttcattaatgagaaaattgacatctgacaagagtc

SEQ ID NO: 779871 - DNA, 120 bp, Artificial Sequence
  ENSG00000250305_28 (sequence is synthesized)
tttttactttatgctggatgaaaatccaaatcttgttttattttttccactaaaagtgactaaaataataacgaatttcatttgttcttgggttcttttttcctttaatgattgtgctat

SEQ ID NO: 779872 - DNA, 120 bp, Artificial Sequence
  ENSG00000250305_29 (sequence is synthesized)
aacttaaaataatgatgttacttttgaacaaacttaaagaaatatttttaaagcgtatctgaaaacgattgatgtttataactctcttttggcttcaaaataagattgtgttatcaccat

SEQ ID NO: 779873 - DNA, 120 bp, Artificial Sequence
  ENSG00000250305_30 (sequence is synthesized)
tttggtagatgaggttgtctggtgaaaatgatgcatatgagttgtactgttcagtgtacatcctgcagtagtggatgattgaaaacatatataagtggagtataaattaaaaattaattt

SEQ ID NO: 779874 - DNA, 79 bp, Artificial Sequence
  ENSG00000250305_31 (sequence is synthesized)
cttttatttcttaattcaggacactaaaccatgactgcaagggatttccttggtaaaaagaaaagattctcagagtcaa

SEQ ID NO: 779875 - DNA, 120 bp, Artificial Sequence
  ENSG00000250305_32 (sequence is synthesized)
agggatttccttggtaaaaagaaaagattctcagagtcaaaatggtcttacaactcgggcttgacggcctttgaattatgaatggattgttcctctctctgaagcctattgtcacatggg

SEQ ID NO: 779876 - DNA, 120 bp, Artificial Sequence
  ENSG00000250305_33 (sequence is synthesized)
tttttaatcctggccttgctgctagaaatctgtgcttgaagtcctctctttctgctgctagcctaccagttaaaagtcaagacttggtggaactcagtttaccagactctttagcctttg

SEQ ID NO: 779877 - DNA, 120 bp, Artificial Sequence
  ENSG00000250305_34 (sequence is synthesized)
agctaaactgtctgagcaacctcttagatgtgcacacaccactttgtatgaaagggttctctagaacggttctttggagagaaatattttcatgtacgtttgacaggggtgtaaataaag

SEQ ID NO: 779878 - DNA, 120 bp, Artificial Sequence
  ENSG00000250305_35 (sequence is synthesized)
catgctgactaataagtcttttactcttcatctaatgaacataagaatctatgcatccagatattattttgtatacaaatatttaatttggtgattgataatctctctttggggtagtca

SEQ ID NO: 779879 - DNA, 120 bp, Artificial Sequence
  ENSG00000250305_36 (sequence is synthesized)
gaaaggaaacacaggtcatcagtgagtataaacgtagacagttgatttgtgaatgctgtcggcctcaacttgcttgatgatagattctactgacctagctggagtaatctgatcacttac

SEQ ID NO: 779880 - DNA, 120 bp, Artificial Sequence
  ENSG00000250305_37 (sequence is synthesized)
ttccttattaatactagatcacacagtgtctttcttattccttcttctttacttactggcatcagcacagagtcccactatctgaaatagaagggagagtttgggggtttattggaggag

SEQ ID NO: 779881 - DNA, 120 bp, Artificial Sequence
  ENSG00000250305_38 (sequence is synthesized)
gagtttgggggtttattggaggagtcttaaaaacttggttggcagctgggtacgatgactcacacctgtactcccagcacttcaggaagctgaggtgggtggatcagctgaggtcaggag

SEQ ID NO: 779882 - DNA, 120 bp, Artificial Sequence
  ENSG00000250305_39 (sequence is synthesized)
gcaacaagagtgaaactccatctccaacaaaacaaaactttgctggcttcctgatgcctcactgtctatttgaggaattccacagaatcttcaaaggatttgggggaaagcgcattaaca

SEQ ID NO: 779883 - DNA, 120 bp, Artificial Sequence
  ENSG00000250305_40 (sequence is synthesized)
gaatcttcaaaggatttgggggaaagcgcattaacatggacaaaggatggaatcaaaataatgttatagtgagaatcattcaagcacctatttaaattttttccaattgccagtatagtg

SEQ ID NO: 779884 - DNA, 120 bp, Artificial Sequence
  ENSG00000250305_41 (sequence is synthesized)
atgatatgacaccagcatatcaaagtaactaacaaactagctacacaaacgtcttggagtttggtttcgttctcttttctcatcatagatctccgtgcagaatagtgctaattcttattt

SEQ ID NO: 779885 - DNA, 120 bp, Artificial Sequence
  ENSG00000250305_42 (sequence is synthesized)
ctcgtttgcctttctatttccttccaaattctacatgccagtaattcctctgtcttttaagtgaccatcaattcaataggcaaaaatttggagtaatccagagaaaaaaccatccaaata

SEQ ID NO: 779886 - DNA, 120 bp, Artificial Sequence
  ENSG00000250305_43 (sequence is synthesized)
taaaccagctaggaacatgaatgcccctgattattaatggccaaaaaaaaagcactggtggattttaaattaaattaatacatatatacgagtttggaggagaacagaagttctaactca

SEQ ID NO: 779887 - DNA, 120 bp, Artificial Sequence
  ENSG00000250305_44 (sequence is synthesized)
gtacttgaacttggtgggggagggcacaggttaaatatgagctgtgagcccccagttttggaggaaggaggaaatgggaaccaaccaccagacaagcagctgcagtctaagaaaaacaaa

SEQ ID NO: 779888 - DNA, 120 bp, Artificial Sequence
  ENSG00000250305_45 (sequence is synthesized)
aaaacaaattagggcaggcctcagcatctctttcctattacatagaaaatctgaaatgagaatagctgtgaacttttctaaatatgcaacattcaactatcgcaaggacaaaaaaccaaa

SEQ ID NO: 779889 - DNA, 120 bp, Artificial Sequence
  ENSG00000250305_46 (sequence is synthesized)
ggacacagtaaggggaacatcacacactgggacctgttgtgaccccgctgagggagttcctcttgccctctacccccggggcttgtatatagattataaatatataagggggaaaggggt

SEQ ID NO: 779890 - DNA, 120 bp, Artificial Sequence
  ENSG00000250305_47 (sequence is synthesized)
gcttgtatatagattataaatatataagggggaaaggggtgggggggaggggttgtgcggctggggcctcacttcccctccttccccttctcctggtcccctgtcccaggggctgtttgt

SEQ ID NO: 779891 - DNA, 120 bp, Artificial Sequence
  ENSG00000250305_48 (sequence is synthesized)
taaaaaagagtaataaaggatttttgtttttaaaaaaagcaacgttcattaatttatatgcagtcctcaccacagccctccaagataactatacttattgttcccattttgcagatgagg

SEQ ID NO: 779892 - DNA, 120 bp, Artificial Sequence
  ENSG00000250305_49 (sequence is synthesized)
aaaactgaggcagaaagaaattaaattgcttaaggttacacacatagtaggtatcacacatttagttagaggcagagctgggattcaaacccaggtctggctcctagtctctgctcttaa

SEQ ID NO: 779893 - DNA, 120 bp, Artificial Sequence
  ENSG00000250305_50 (sequence is synthesized)
ccacaacaccatatactcccacccctgggcccagctcatgtgcttggcggagtattagagcctttcaaggtaagtgtgattatcccctttccaaatgagctttggaaaagtttaagcaaa

SEQ ID NO: 779894 - DNA, 120 bp, Artificial Sequence
  ENSG00000250305_51 (sequence is synthesized)
gattacacagctagacaataattcaatagtagtctcttacatattttcccttttatctttttttcatttgtaaatctgtttcgatttgatttgaattaaaaaatagttcttggttgcaaa

SEQ ID NO: 779895 - DNA, 120 bp, Artificial Sequence
  ENSG00000250305_52 (sequence is synthesized)
atattctgggaccacttttctccaactcttcaacctttcaacaattatattattgttttcccattttataagtaaggcaactgaggactattcagatatttcattcactccatttgttta

SEQ ID NO: 779896 - DNA, 120 bp, Artificial Sequence
  ENSG00000250305_53 (sequence is synthesized)
ctaagccctgctgtgtgctggatacacagtctgctgtgtgctggatacatatgatacaaggtaatgactatctggcatcttgaaggtacccagaatattagaattaactgacccacaggt

SEQ ID NO: 779897 - DNA, 120 bp, Artificial Sequence
  ENSG00000250305_54 (sequence is synthesized)
gccaagctgaaacattcttcgtattccctgtgtgcctattaccaagttatattgtttagtttgaggaaaacaacaaacaaccctcccttagagaatcatgatgcatattagcatatttaa

SEQ ID NO: 779898 - DNA, 120 bp, Artificial Sequence
  ENSG00000250305_55 (sequence is synthesized)
ggagtaccctaaagcttggacttaatctagcttaccctagacgtattaacatcctatagcgcacgtgttctgtgggatatatttcagaaaataatatgtcttacagaataaatgcagact

SEQ ID NO: 779899 - DNA, 120 bp, Artificial Sequence
  ENSG00000250305_56 (sequence is synthesized)
cctttggatggcattcaggcccttcataaagtaactctgaattatttttcagtctcatttcctgcagttgcacccgattttttctgttctgcaatctgctattttagacaaagctttcat

SEQ ID NO: 779900 - DNA, 120 bp, Artificial Sequence
  ENSG00000250305_57 (sequence is synthesized)
aagaaattacataatgacaagtaattcccacattccctagatatatacttggatttcaaatgccataattgtaatctttctccaaagaaaaatgcacgatacaggcttcattctatcaag

SEQ ID NO: 779901 - DNA, 120 bp, Artificial Sequence
  ENSG00000250305_58 (sequence is synthesized)
aggcatatgaggtaagcgttattatacacccgtccagcagatgggaaaaccacggaagtgggagggaatcaagaagcattaacagaccctccaccaaccgtaatgcttaactcctcttgt

SEQ ID NO: 779902 - DNA, 120 bp, Artificial Sequence
  ENSG00000250305_59 (sequence is synthesized)
tccaatcttaactcaaaattatgattattttgattatttaatgattgttttgatagtataaactccatatctgcaacctcagttatctacaacactgaggtgcaaacatttaaaaagatc

SEQ ID NO: 779903 - DNA, 120 bp, Artificial Sequence
  ENSG00000250305_60 (sequence is synthesized)
tctcaccaaacaaggattgaaattgtattgcaaatgaaagagctcagcatgagagcacaatcagaaactgaagagagttgatcaaagagaagattctagctgaattgttctatttttaat

SEQ ID NO: 779904 - DNA, 120 bp, Artificial Sequence
  ENSG00000250305_61 (sequence is synthesized)
tccccagggatcctacggtctatgacacattaacaggggtgtgaatcatttcagttacatcacatactctgtcctcttgtggtgcgggtcttccccagttgattatacacagataatcaa

SEQ ID NO: 779905 - DNA, 120 bp, Artificial Sequence
  ENSG00000250305_62 (sequence is synthesized)
tgactttatttgggagggattggagctatagaataatctatcttaccaatctgatggaccatttgtaagagctgtttgtcaaattggatcttcatttgacaaataaatactagagctgca

SEQ ID NO: 779906 - DNA, 120 bp, Artificial Sequence
  ENSG00000250305_63 (sequence is synthesized)
gaaagtaaagtttactccaacccaattaatcattaatacatccacaggaaaaatacattttctccacatggaatattgatttttctatgaatattacctccacattgaaaaacgagtgag

SEQ ID NO: 779907 - DNA, 120 bp, Artificial Sequence
  ENSG00000250305_64 (sequence is synthesized)
tcactgcagttaagccagtgtaccttgatgttgaattccctgaagaaggtacaattatatttacattcccttagcaagaatttggctaagtgataagcacttttctcttttcttttcttt

SEQ ID NO: 779908 - DNA, 75 bp, Artificial Sequence
  ENSG00000250305_65 (sequence is synthesized)
cactcctggctaatttttgtatttttttttaagtaaagacaaacgagctaatcataccacttctaactagatttt

SEQ ID NO: 779909 - DNA, 120 bp, Artificial Sequence
  ENSG00000250305_66 (sequence is synthesized)
cgagctaatcataccacttctaactagattttctattaatgtacaaggagggactccactactaaagtttgttttacttctctggttatttacacaaaacgctggcaatacattaaggct

SEQ ID NO: 779910 - DNA, 120 bp, Artificial Sequence
  ENSG00000250305_67 (sequence is synthesized)
cactaatgtggacctaagtgagtatctgagaggctttgaatatgtatgtgcaaactgtcctattttctttatatgctctcttaaatatgtatgtctgtaaatatatatataacacacata

SEQ ID NO: 779911 - DNA, 120 bp, Artificial Sequence
  ENSG00000250305_68 (sequence is synthesized)
tatatatattcctagacatctagtgtttgctgtcattagtgaccaagaaaaagtagttcttttgtgcacgcgtgaatacatcaaattagcaattaccatagaaatgtatttcattgaata

SEQ ID NO: 779912 - DNA, 120 bp, Artificial Sequence
  ENSG00000250305_69 (sequence is synthesized)
aatagcttttgtttgtttgtttgtttgtttcagggaaatttagaacaattattagatgttatagtgcctcttctcgtgttgatacgtgtatttgggtcaaaagtgcaaaaacttttttct

SEQ ID NO: 779913 - DNA, 120 bp, Artificial Sequence
  ENSG00000250305_70 (sequence is synthesized)
acaatgtacagttattttgacttttcccaggggaagctagcaatagttttaaaagcacaaagtgatgtaaaatattttgacttttataataatgcgaagtagttttatttgcattaatca

SEQ ID NO: 779914 - DNA, 120 bp, Artificial Sequence
  ENSG00000250305_71 (sequence is synthesized)
ataatgttcaggatctttttgtagtaagtatattttaaatggtgtaatttgtgtgtttatgatatgtattcaattatttaagttaagtatcagtgtatttttaaaaagtgttcccaggtg

SEQ ID NO: 779915 - DNA, 120 bp, Artificial Sequence
  ENSG00000250305_72 (sequence is synthesized)
aacaaaagtttgcttttcttcaccattctgtacaggacaagcattattcagttcacatagtcagctctcactacacttcaacagaacggggcaagttcgtatttgaattctgttatattt

SEQ ID NO: 779916 - DNA, 120 bp, Artificial Sequence
  ENSG00000250305_73 (sequence is synthesized)
atctaagggaagcaaaattaaccttttaataatagattatctttaatggttattaaaagaatgttattgaccaaaaagacatattttgagattaataaagatgtattagattatccaaaa

SEQ ID NO: 779917 - DNA, 120 bp, Artificial Sequence
  ENSG00000250305_74 (sequence is synthesized)
ctattttttcctcttcctttcatcctcacactctaaaataggtcaaggggtggaagttacacctggtgcagccctcggctctgatgcaaaagcagcttttgcccctggctgcgggacagc

SEQ ID NO: 779918 - DNA, 120 bp, Artificial Sequence
  ENSG00000250305_75 (sequence is synthesized)
gctgtgactactcgcaacgggagagctgctgccagtcgccacaccgtgcggaaagcgccggcgaccggagcactgacaatggtctgcataggggagcggagagaagcttctgttgcgccc

SEQ ID NO: 779919 - DNA, 120 bp, Artificial Sequence
  ENSG00000250305_76 (sequence is synthesized)
acataggtaaccaggcagcctcatcgctgacataggtaaccaggcagcctcattgctgtcataggtaacccagcactgggccgtgtagcatgaaataccttccattgagcctttgctttt

SEQ ID NO: 779920 - DNA, 120 bp, Artificial Sequence
  ENSG00000250305_77 (sequence is synthesized)
cacattgatttttcatttttgttctaataggaatcctgaaattgcacccttggcatgccagtacctagaatattcattttacagcagaaactcgagacagtcaagtcagcagcaagtaaa

SEQ ID NO: 779921 - DNA, 83 bp, Artificial Sequence
  ENSG00000250305_78 (sequence is synthesized)
tatttttattcttttgagatggagtttcactcttgtcaaccagattggagtgcagtggtgcaatctcagcttgctgcaaaact

SEQ ID NO: 779922 - DNA, 120 bp, Artificial Sequence
  ENSG00000250305_79 (sequence is synthesized)
gagccaccgtgcctggcctcaaactttacctttagacagtggctcttcagggcctttgtgtacatcctccaccaaaacggacctgacattgattgactaaatcaggatggaaatgatggc

SEQ ID NO: 779923 - DNA, 120 bp, Artificial Sequence
  ENSG00000250305_80 (sequence is synthesized)
ttgtgaaactaaccgttgtaaatttaaagatattcacatttgccaaatgtgttctcctctggtggctcactttgagtggctcacatgccttctatagaattgtgggattatggaagaggt

SEQ ID NO: 779924 - DNA, 120 bp, Artificial Sequence
  ENSG00000250305_81 (sequence is synthesized)
ccagtaatatcttatgaatctcatgggtcctttcctttaattattctataggtgtttcattataggagcgcatctttaattagacagtattttaataataacttatttgtctggaggacg

SEQ ID NO: 779925 - DNA, 120 bp, Artificial Sequence
  ENSG00000250305_82 (sequence is synthesized)
ttggttcagtatcttcgtaaatcaagaactggtaaaccacagcttagtagatctaggactaagacttaaaatgtggttggaatctcactcaaggcctacccacctaaaactgcgttctag

SEQ ID NO: 779926 - DNA, 120 bp, Artificial Sequence
  ENSG00000250305_83 (sequence is synthesized)
caattgcatgctgactgcacctatgagtcgtaagtctgtagttgcaaagtgtgtctagtttgatattctttctaaatactggtaagagaaacagacataccagaacttgtggcttgctga

SEQ ID NO: 779927 - DNA, 120 bp, Artificial Sequence
  ENSG00000250305_84 (sequence is synthesized)
agatggtatgagtaatgtggaatctggggaaggggtgcatgtcacatggaaattgggagtctttgaaaaatatctctatcctgtaaattaaaaaataataaatctagtttcggagtgtgc

SEQ ID NO: 779928 - DNA, 120 bp, Artificial Sequence
  ENSG00000250305_85 (sequence is synthesized)
ggaactcagaaacagaaggccaaccatgcataacgaggcagaacttttggagatccttggtgacctcactgttgctgaataaactttagcccctcacctggtgataacaccaataccacc

SEQ ID NO: 779929 - DNA, 120 bp, Artificial Sequence
  ENSG00000250305_86 (sequence is synthesized)
tggttttcttccagggcctgtgcttccttcagagactcacacaagaggtttatcatgagaaggaccgcactatttcatttcactcctacaagttttcatttacgttacacattgagaaag

SEQ ID NO: 779930 - DNA, 120 bp, Artificial Sequence
  ENSG00000250305_87 (sequence is synthesized)
atgaaatatgaatgtgagcttagaggctacacgtggtctctcggatactagaactatctttcttgccttggaccagctaacgtgccttggttgcgccagtgtactgagccctgtggacat

SEQ ID NO: 779931 - DNA, 120 bp, Artificial Sequence
  ENSG00000250305_88 (sequence is synthesized)
cacctcattaaatattcaataaatgttatttttttcctattgcctttctctcttctatatgagaatctgtaagtattcgccgaaggcttttcttttgcttttgtgaataccttcacacca

SEQ ID NO: 779932 - DNA, 86 bp, Artificial Sequence
  ENSG00000250305_89 (sequence is synthesized)
cgaaggcttttcttttgcttttgtgaataccttcacaccatgttgtattctgtcttggttagttaaaaaaaaaaaaaaagttggcc

SEQ ID NO: 779933 - DNA, 82 bp, Artificial Sequence
  ENSG00000250305_90 (sequence is synthesized)
gtctctactaaaaatacaaaattatccggtcatggtggcacgcgcctatgatcccacctactcgggaggctaaggcaaaccg

SEQ ID NO: 779934 - DNA, 86 bp, Artificial Sequence
  ENSG00000250305_91 (sequence is synthesized)
ccactgcactccagcctgggtgactgaggggttaattatatttcttgttatgagacaaatgaagtatttcacattttccattgagg

SEQ ID NO: 779935 - DNA, 120 bp, Artificial Sequence
  ENSG00000250305_92 (sequence is synthesized)
agggcgtcctggaaccaaccccccacggatattgagggaccacagtatttttatcctccatgtcaccccatccctgacctccagaaacaaacaatcatttgccattttaaaggacctaca

SEQ ID NO: 779936 - DNA, 120 bp, Artificial Sequence
  ENSG00000250305_93 (sequence is synthesized)
ctaaatgagcaacagaagagctctcccacccaccaccgactccatgcctgttttcagcattgtagggaggaagagtcccggccctggctgatggctctcagctcctgggatcaggtggca

SEQ ID NO: 779937 - DNA, 120 bp, Artificial Sequence
  ENSG00000250305_94 (sequence is synthesized)
atggagggtcatgtctcggcttcattgacttcttgcatcgtaaggctcctcttatgagacaacctttcctctcaggcccttaggtccaagtcccctctctcagctttctctgagacctca

SEQ ID NO: 779938 - DNA, 120 bp, Artificial Sequence
  ENSG00000250305_95 (sequence is synthesized)
tttaaactattcaataaatagggtcatattttcattgcaaaatgaaagatgcattttaatgaaattgaagttaaagaagaaagaaatgaaaaagaaagaagttcaaagggatgaggagaa

SEQ ID NO: 779939 - DNA, 120 bp, Artificial Sequence
  ENSG00000250305_96 (sequence is synthesized)
gaaaagacagatggtaatatgactgtcctctaaaggaaatggtttctgttgctaggtttttccacttagctaaagtcatcagctgtttgatgaatagacaatagtttggattaaaaaata

SEQ ID NO: 779940 - DNA, 120 bp, Artificial Sequence
  ENSG00000250305_97 (sequence is synthesized)
tttaaaattcttttattgttcacattcaagatttaaacatgaaggccattagaaatgaataggggcaaatcaagagttctagggcactggaagcatgtcaggagaaaagacctctgtttc

SEQ ID NO: 779941 - DNA, 120 bp, Artificial Sequence
  ENSG00000250305_98 (sequence is synthesized)
cttcttattacaaaatgctctctgaacaggccctcctcattctaaagatgtatgagtctgattttattaatatcattgaagtaactttccctttcatttctcctaaagtatccctcgagc

SEQ ID NO: 779942 - DNA, 120 bp, Artificial Sequence
  ENSG00000250305_99 (sequence is synthesized)
caatgaaaaagcaaatgaattgcaaggttatttttcttaaaataggaccatcgtcttttgaaatacacaggattttaattttaaaatactttgtgaattatattttccccatgattgcct

SEQ ID NO: 779943 - DNA, 120 bp, Artificial Sequence
  ENSG00000250305_100 (sequence is synthesized)
tcaaacagagggtactttttctcataatcattattgggaacagtgtggctacgagatcaaagaaataatatcatagaaataatatggtcacatttacgtagaaataataatcctggaatt

SEQ ID NO: 779944 - DNA, 120 bp, Artificial Sequence
  ENSG00000250305_101 (sequence is synthesized)
gttttctttttcttttttgagacaaaatctaactctgtcatcacctaggctggagtgaggtgatgctaccccagctcactgcaacctccacctcctgaatttaagtgatttttttctgcc

SEQ ID NO: 779945 - DNA, 120 bp, Artificial Sequence
  ENSG00000250305_102 (sequence is synthesized)
aggattataggcatgagccaccgcgccagaccccaaattttattttttattcatatattctccactgtctcagctggcattaatgaatcttaagtttgcttttactgtatcataattttg

SEQ ID NO: 779946 - DNA, 120 bp, Artificial Sequence
  ENSG00000250305_103 (sequence is synthesized)
cttaagtttgcttttactgtatcataattttgaaagtgcctagtaaggaggggttattagtgtcctgatgtatttcagaagcagcaaactaatcatctttgaatagtggtagatatcttt

SEQ ID NO: 779947 - DNA, 120 bp, Artificial Sequence
  ENSG00000250305_104 (sequence is synthesized)
tcaggtagaaaaatttcatcagtaatgccaataagtacaaatataggctctaatgatttcttttaatatttctggaaagtaattagattatatatctgtgatagaatataatactaagta

SEQ ID NO: 779948 - DNA, 120 bp, Artificial Sequence
  ENSG00000250305_105 (sequence is synthesized)
tacttaggtctctgctactggaaagtgaatatcaaaaattgtctatttaagaaaaaaagtagtttttataatctgagttgtatactggacccatagagatcattttaaatgtagcaatga

SEQ ID NO: 779949 - DNA, 120 bp, Artificial Sequence
  ENSG00000250305_106 (sequence is synthesized)
atagagattggataaaaacaatgttaaaaattcttttctaattcaagttcaaattttaaaaatttgaaaggcatgttttagtgtataaataatagaaaagttgttgacagttgtttgttt

SEQ ID NO: 779950 - DNA, 80 bp, Artificial Sequence
  ENSG00000250305_107 (sequence is synthesized)
aggcgccgcaggcctgggttcccggacagctgagcccgagcgccgcctcccgaaaggtgaaggcggcccggggaggcggg

SEQ ID NO: 779951 - DNA, 120 bp, Artificial Sequence
  ENSG00000250305_108 (sequence is synthesized)
gctgtcgcggggccagcccaaagcccccgatccccggtagctgcgcttcccgcgcggggcgccggagtagggcgggccaagctggcctgcggccgcggcgggaagaagggctagcgaagc

SEQ ID NO: 779952 - DNA, 120 bp, Artificial Sequence
  ENSG00000250305_109 (sequence is synthesized)
gaagggctagcgaagcacccccgaccgggcccaggcgccggacgccggggggcgcctcgctgcaacttctctttggaagccccgacacgagccccggcccgcgcgcgcgctcccccacgg

SEQ ID NO: 779953 - DNA, 120 bp, Artificial Sequence
  ENSG00000250312_0 (sequence is synthesized)
ggcttttgcttgtagctccagccagagctcggttagggcctcatcgctctgctcccgctccttagggaagcctcggtgattctgccacagcctcagcctctgtggctctgtgacctgccg

SEQ ID NO: 779954 - DNA, 120 bp, Artificial Sequence
  ENSG00000250312_1 (sequence is synthesized)
gtattggatgattcgtatctaagactctgggacactcctgaagtcgggaaatggaactcttaacattcaaggatgtggccatagaattctctccagaagagtggaaatgtctggacactt

SEQ ID NO: 779955 - DNA, 120 bp, Artificial Sequence
  ENSG00000250312_2 (sequence is synthesized)
cccagcagaatttatatagagatgtgatgttggagaactacagaaacctggtctccctgggtgttagtatctctaacccagacctggtcaccagtctggagcaaagaaaagagccctaca

SEQ ID NO: 779956 - DNA, 120 bp, Artificial Sequence
  ENSG00000250312_3 (sequence is synthesized)
atttgaagatacatgaaacagcagccagacccccagctgtgtgttctcatttcacccaaaacctttggacagtgcagggcatagaagattcattccacaaacttataccaaaaggacatg

SEQ ID NO: 779957 - DNA, 120 bp, Artificial Sequence
  ENSG00000250312_4 (sequence is synthesized)
agaaacgtggacatgagaatttaagaaaaacttgtaaaagtataaatgagtgtaaggtgcagaaaggtggttataatagaattaaccaatgcttattaactacccagaaaaaaacaattc

SEQ ID NO: 779958 - DNA, 120 bp, Artificial Sequence
  ENSG00000250312_5 (sequence is synthesized)
aatctaatatatgtgtcaaagtttttcataaattttcaaattcaaacaaagataagataagatatactggagataaaacctttaaatgtaaagaatgtggcaaatcatttcacgtgctct

SEQ ID NO: 779959 - DNA, 86 bp, Artificial Sequence
  ENSG00000250312_6 (sequence is synthesized)
cattggtcctcaattcttactaaacataagagaattcatgccagagagaaattctacaagtgtgaagaatgtggtaaaggctttac

SEQ ID NO: 779960 - DNA, 120 bp, Artificial Sequence
  ENSG00000250312_7 (sequence is synthesized)
caattcttactaaacataagagaattcatgccagagagaaattctacaagtgtgaagaatgtggtaaaggctttactcggtcctcacaccttactaaacataagagaattcatactggag

SEQ ID NO: 779961 - DNA, 120 bp, Artificial Sequence
  ENSG00000250312_8 (sequence is synthesized)
ttaaccaatcctcaacccttaatttacataagagaattcattctgcacaaaaatactacaaatgtgaagaatgtggtaaagcctttaagtggtcctcatcccttaatgaacataagagaa

SEQ ID NO: 779962 - DNA, 120 bp, Artificial Sequence
  ENSG00000250312_9 (sequence is synthesized)
ttcatgctggagagaaacccttctcatgcgaagaatgtggcaatgtctttaccacatcctcagactttgctaaacataagagaattcatacaggagagaaaccctacaaatgtgaagaat

SEQ ID NO: 779963 - DNA, 82 bp, Artificial Sequence
  ENSG00000250312_10 (sequence is synthesized)
agaaaccctacaaatgtgaagaatgtggaaaatcctttaataggtccacaactcttacgacacataagagaatcaaaagcct

SEQ ID NO: 779964 - DNA, 120 bp, Artificial Sequence
  ENSG00000250312_11 (sequence is synthesized)
ccttaatgtacacaagagaattcactctggaaaaaatccctacaaatgtgaagattgtggcaaagcctttaaagtgtttgcaaacctgcataatcataagaaaattcatactggagagaa

SEQ ID NO: 779965 - DNA, 120 bp, Artificial Sequence
  ENSG00000250312_12 (sequence is synthesized)
tatgtaaacaatgtggcaaagcctttaaacagtcctcacacttgaataaacataagaaaattcacactgtagataaaccctacaaatgtaaagaatgcgggaaagcttttaagcagtact

SEQ ID NO: 779966 - DNA, 120 bp, Artificial Sequence
  ENSG00000250312_13 (sequence is synthesized)
ccaaccttcctcaacataagagaactcatactggaggaaaattttagaaatgtgaagaatgtgggagcctttaagtcttcctcagtcttttctaatcataattcatactggagagaaact

SEQ ID NO: 779967 - DNA, 120 bp, Artificial Sequence
  ENSG00000250312_14 (sequence is synthesized)
ctacacatgaaaaaattgacaaagcttttaaccgcaactcaatctgttctaaacataagagaaatggtattggtgagaagccataaaaatatgaaaaatgtggaaaagccttcaaatgct

SEQ ID NO: 779968 - DNA, 120 bp, Artificial Sequence
  ENSG00000250312_15 (sequence is synthesized)
atattaaaagtgtggcaaaacctttaaccaatgctcatatctctttgcacatgatagcatttatacttgagaaaaattgtacaaatatagaaaatgtagaaaagccattaatgcctactc

SEQ ID NO: 779969 - DNA, 120 bp, Artificial Sequence
  ENSG00000250312_16 (sequence is synthesized)
atgtgttactaaatatcagagagtttgtacttaataaaaggattataaatgtagtatttgttgaaagacctattagaaaatacaggtcttaaaagtgaagaagagtattctgaagataga

SEQ ID NO: 779970 - DNA, 120 bp, Artificial Sequence
  ENSG00000250312_17 (sequence is synthesized)
caatagaaatagtaagagggttgtagtacctgtacttgcatcatgggtcttattgtgcatatttcatactagaagaaaaccctgaagcagttgcccaaactttctttgacattagagaat

SEQ ID NO: 779971 - DNA, 120 bp, Artificial Sequence
  ENSG00000250312_18 (sequence is synthesized)
ttatattggaaagaaattttacaaatgtaataaatttggaaaagcatttgttcaaaaactatagcttaaaaaaaaccagtttatactagaagatattttgtagatgcggtaagtatgaaa

SEQ ID NO: 779972 - DNA, 120 bp, Artificial Sequence
  ENSG00000250312_19 (sequence is synthesized)
agatagtctgaaattaagactaaatgtcagaatatttacagtagaaagaaaaaggcattaacacttgaaacattacagtatatcagagtgtaaagtataaaaaaattccaaagctgaaac

SEQ ID NO: 779973 - DNA, 120 bp, Artificial Sequence
  ENSG00000250312_20 (sequence is synthesized)
tgttagataatttctttctatataagttgaaaaggagtagctttttgaaattattccattgaaattatactttttttacctgaaaaaattatagattttttgaaaagcaaattcaactct

SEQ ID NO: 779974 - DNA, 120 bp, Artificial Sequence
  ENSG00000250312_21 (sequence is synthesized)
aaaattacttcatactgattcaacttattgtttatatgaaagcatgtgatgaattgttgcatcagaggtatgagtgattctttttaggtgggcatcattcatgaactttttttttttttt

SEQ ID NO: 779975 - DNA, 120 bp, Artificial Sequence
  ENSG00000250312_22 (sequence is synthesized)
ctcccaaagtgctgggattacaggcgtattcatgaacttttacatgaatgagtaaggacattgaaagatgcatgagatgatgcatacatctttgtggttgacttatcattgcatgatgca

SEQ ID NO: 779976 - DNA, 120 bp, Artificial Sequence
  ENSG00000250312_23 (sequence is synthesized)
tgacgtacatgttcagagtaatattcttctgcattatagtgagagaaaaatcttgaattttagtaataaattgcttttaccagttgcacatttatgtaataaaatacagtaaattttaaa

SEQ ID NO: 779977 - DNA, 120 bp, Artificial Sequence
  ENSG00000250312_24 (sequence is synthesized)
attctcttttaagattgtgtgtgaaccttactcaagggtgtaggtaaaaaatggtaacagtatacttttagtaacatagtttaatgacatttctagtaatttctttttccagtggcttta

SEQ ID NO: 779978 - DNA, 120 bp, Artificial Sequence
  ENSG00000250312_25 (sequence is synthesized)
aacagcaaataagttgaagaatattgttctcatgttaaatttttattattttttatatttaaatttatttttaaaaatttatgtgggtacatggtatgtgtatacattcatggcatagat

SEQ ID NO: 779979 - DNA, 120 bp, Artificial Sequence
  ENSG00000250312_26 (sequence is synthesized)
acatggtatgtgtatacattcatggcatagatgggttactttgatacagacatgcaacatgtaatcacatcagagtaaatgagttattcatcacctcaagcatttatcctttgtattaca

SEQ ID NO: 779980 - DNA, 120 bp, Artificial Sequence
  ENSG00000250312_27 (sequence is synthesized)
ctgaagtcgggaaatggtgagtgtgcagggcagggcgtcccaaggctgtggaggcctcatcggaaccggcgggaaatggcggcggtgggaggagtctgtgaatggagttcccgctcagcc

SEQ ID NO: 779981 - DNA, 120 bp, Artificial Sequence
  ENSG00000250312_28 (sequence is synthesized)
ctctgtcctcagtcccctccggtgagggacccgcgctcttgtcagtccccgtacagcggctctggcccagcctgcagccctccttgtgcagctctgcgccggtagccctgcactttcccc

SEQ ID NO: 779982 - DNA, 120 bp, Artificial Sequence
  ENSG00000250312_29 (sequence is synthesized)
gggctgtggagtgagtaggagctcatccggaagacaccgcggcggcctgcgcggtgccggcgtgggaggagctgtggtccggaatcccgtccctactttaccctgttcagaatgagattg

SEQ ID NO: 779983 - DNA, 120 bp, Artificial Sequence
  ENSG00000250312_30 (sequence is synthesized)
aggccccatcaaaacatggagttcatgtgagcaaacaggacttattaatgggaaagctctgccgtggctcgtggtttggggactgccagcgggtcttgaaggaaaggcttttgtgaggtg

SEQ ID NO: 779984 - DNA, 120 bp, Artificial Sequence
  ENSG00000250312_31 (sequence is synthesized)
tgtgaggaagcgaagcaaatcacctgcctgcgccaactttgccgccagtccccttgccctgtgcgcctcctccgcgtggctgttcctgaatacgctggtgtctgttcgcatcttttagaa

SEQ ID NO: 779985 - DNA, 120 bp, Artificial Sequence
  ENSG00000250312_32 (sequence is synthesized)
atttgaagatacatgaaacagcagccagacccccaggtcactacaggaaaagatatcttcattaaagtgcaacagcacactgagagcaacacaccaccacagcagttaattttggaaagg

SEQ ID NO: 779986 - DNA, 120 bp, Artificial Sequence
  ENSG00000250312_33 (sequence is synthesized)
aaatttgggcaactctgtaaattcttggaaaagcctatgtggtatctgaggtaatcttttctacctgattccatgccactggtctccattcctgggaagagattcagcaccagcagcaca

SEQ ID NO: 779987 - DNA, 120 bp, Artificial Sequence
  ENSG00000250312_34 (sequence is synthesized)
taccactgtgagggcaagtacaaaatacctgcttttagtagatgatatagttcttctgtaaaacttcatttccaaaaaaaggactatcatcctgttaaatctgtggactagagatccttg

SEQ ID NO: 779988 - DNA, 120 bp, Artificial Sequence
  ENSG00000250312_35 (sequence is synthesized)
ttacatgcccaggattacctattttaagtataactttgttggatgcctagtgacatgctttggctgtgtctccacccaaacctcatcttgaattatagctcctataattcccatacgttg

SEQ ID NO: 779989 - DNA, 120 bp, Artificial Sequence
  ENSG00000250312_36 (sequence is synthesized)
ataattgaatcatgggggcagtttccccaatattgttctcctggcagtgaataagtctcaatagttctgatggttttatacagggaaacctgtttcacttgcttctctcattctctcata

SEQ ID NO: 779990 - DNA, 120 bp, Artificial Sequence
  ENSG00000250312_37 (sequence is synthesized)
gcttctctcattctctcatatctgctgccaagtaagatgtgccttttgccttctgacatgattgagaggcctccccagcaatgtggaatgtgagtccattaaacatctttttctttatgc

SEQ ID NO: 779991 - DNA, 120 bp, Artificial Sequence
  ENSG00000250317_0 (sequence is synthesized)
gcgaaagcctctccacctcttccgagcggggtcacggcccggccgtcggtaacctggtttccgagagtgccgggcggtcggcgggtcagggcagcccggggcctgacgccatgtcccgga

SEQ ID NO: 779992 - DNA, 120 bp, Artificial Sequence
  ENSG00000250317_1 (sequence is synthesized)
acctgcgcaccgcgctcattttcggcggcttcatctccctgatcggcgccgccttctatcccatctacttccggcccctaatgagattggaggagtacaagaaggaacaagctataaatc

SEQ ID NO: 779993 - DNA, 120 bp, Artificial Sequence
  ENSG00000250317_2 (sequence is synthesized)
gggctggaattgttcaagaggatgtgcagccaccagggttaaaagtgtggtctgatccatttggcaggaaatgagagggctgtcatcagctctgattaagaaaggagatttcttcatgct

SEQ ID NO: 779994 - DNA, 120 bp, Artificial Sequence
  ENSG00000250317_3 (sequence is synthesized)
aaagactgtgcacaaggattaatatttcccttcttaagtatcaaaagaactctggaacaaattataccattaggaaggttttcatgattcagttgattttccaaaaatgaagctatctca

SEQ ID NO: 779995 - DNA, 120 bp, Artificial Sequence
  ENSG00000250317_4 (sequence is synthesized)
cccagctgggtttggaggagcaatctgcttattattctgtcgttaccacttactcaagcgagctgtgatatgaatacaagcaaccagtgggctcgggaaggtccgggtctcttctgccat

SEQ ID NO: 779996 - DNA, 120 bp, Artificial Sequence
  ENSG00000250317_5 (sequence is synthesized)
cttccagataagagatttcagtaaaaaactgccatgctgagctgccttatagagctcttcgaaaatgttcgagttgataaagctctttgaggacaaggtacttcgtgcacctcatgctga

SEQ ID NO: 779997 - DNA, 120 bp, Artificial Sequence
  ENSG00000250317_6 (sequence is synthesized)
agattgcaccgtgttggaaaataaatatgaagcaagtcaaactagatgcatacacttgtgtagaaatcaataatcaattaatagaagtgaaaaaatagacattaaaatgatttatttcta

SEQ ID NO: 779998 - DNA, 120 bp, Artificial Sequence
  ENSG00000250317_7 (sequence is synthesized)
atggtaaaggaggtctggagggtgctgagggaggaaccgggccgaaggaaggaaagtagacagaacagggcccgcgggaatcgagtgcagcaaaacagctccaacctcaatccaacgcca

SEQ ID NO: 779999 - DNA, 120 bp, Artificial Sequence
  ENSG00000250317_8 (sequence is synthesized)
acgccatgtcccggaacctgcgcaccgcgctcattttcggcggcttcatctccctgatcggcgccgccttctatcccatctacttccggcccctaatgagattggaggagtacaggttaa

SEQ ID NO: 780000 - DNA, 120 bp, Artificial Sequence
  ENSG00000250317_9 (sequence is synthesized)
aagcaagcaagccctcaaaggaactgagaaaatttctccccactttgttctgaggggtctcagctactctggtatttaaaataaatgggttttgaaaaataggttactgccctttagttg

SEQ ID NO: 780001 - DNA, 120 bp, Artificial Sequence
  ENSG00000250317_10 (sequence is synthesized)
atgactaaaacagaagccaagaagtgtgcaaattgcaaactgacatgcatgagccaaacatattctctgaaatgacaatgttcaagacgcagctaaagtcaccactctggcggtaagcgt

SEQ ID NO: 780002 - DNA, 120 bp, Artificial Sequence
  ENSG00000250361_0 (sequence is synthesized)
gtctttggtagtttttttgcactaacttcaggaaccagctcatgatctcaggatgtatggaaaaataatctttgtattactattgtcagaaattgtgagcatatcagcattaagtaccac

SEQ ID NO: 780003 - DNA, 120 bp, Artificial Sequence
  ENSG00000250361_1 (sequence is synthesized)
tgaggtggcaatgcacacttcaacctcttcttcagtcacaaagagttacatctcatcacagacaaatggagaaacgggacaacttgtccatcgtttcactgtaccagctcctgtagtgat

SEQ ID NO: 780004 - DNA, 120 bp, Artificial Sequence
  ENSG00000250361_2 (sequence is synthesized)
cgatcctcttaatttcttacagtattcgccgactgataaaggcatgaggatgtggcctgcatgctgcctgatcttgcctagaaccggctgcacctgctgttctcttgtttatgcaaactg

SEQ ID NO: 780005 - DNA, 120 bp, Artificial Sequence
  ENSG00000250361_3 (sequence is synthesized)
gctgcacctgctattcctttgcttatgcccctacccctggctatcctaattccctgttctcctgcctcactattactgtattctctacttctaaataaaaataaaacaaaatacaaaccg

SEQ ID NO: 780006 - DNA, 120 bp, Artificial Sequence
  ENSG00000250361_4 (sequence is synthesized)
tttgcactaacttcaggaaccagctcatgatctcaggatgtatggaaaaataatctttgtattactattgtcaggtcaccctacaatgctatgttagaggtacaacactcctaccctcag

SEQ ID NO: 780007 - DNA, 120 bp, Artificial Sequence
  ENSG00000250361_5 (sequence is synthesized)
tttgcactaacttcaggaaccagctcatgatctcaggatgtatggaaaaataatctttgtattactattgtcaggagaaacgggacaacttgtccatcgtttcactgtaccagctcctgt

SEQ ID NO: 780008 - DNA, 120 bp, Artificial Sequence
  ENSG00000250361_6 (sequence is synthesized)
tttgcactaacttcaggaaccagctcatgatctcaggatgtatggaaaaataatctttgtattactattgtcaggaaactttgagcattcagctgaggggccaagttggctgcctctgag

SEQ ID NO: 780009 - DNA, 120 bp, Artificial Sequence
  ENSG00000250361_7 (sequence is synthesized)
gtctttggtagtttttttgcactaacttcaggaaccagctcatgatctcaggatgtatggaaaaataatctttgtattactattgtcaggagatggagccaaccctgaaaattctgggag

SEQ ID NO: 780010 - DNA, 120 bp, Artificial Sequence
  ENSG00000250361_8 (sequence is synthesized)
tttgcactaacttcaggaaccagctcatgatctcaggatgtatggaaaaataatctttgtattactattgtcagctcctgtagtgataatactcattattttgtgtgtgatggctggtat

SEQ ID NO: 780011 - DNA, 120 bp, Artificial Sequence
  ENSG00000250361_9 (sequence is synthesized)
tctgttacaactgtttcccctccagaaaagaaaaacgttatgttcttagttttaaatagtttctctggagtcattgttgtgattgaactctatttacacgagctgtaactcatgacagtt

SEQ ID NO: 780012 - DNA, 120 bp, Artificial Sequence
  ENSG00000250361_10 (sequence is synthesized)
ctcaaactttcgtgacagaaaacccaactcttttactccaaagcccatatagcacccacaactattaactgtgaccaagaaagagaaggcaagccccaattaacctttgtacgtaaagcc

SEQ ID NO: 780013 - DNA, 120 bp, Artificial Sequence
  ENSG00000250361_11 (sequence is synthesized)
taaagaatgaaaaaatatacctgaatcctcaatcatcaaacaacatagcatatactaagtaatttgtaataattaaactctagaaaattgtgtggctttggtataagagagcttcatgac

SEQ ID NO: 780014 - DNA, 120 bp, Artificial Sequence
  ENSG00000250361_12 (sequence is synthesized)
atcctcttaatttcttacagtattcgccgactgataaaggtgagaattcagtttttaattttgctctaaataccagtgtgaacagctctaggagggtttattcctctgagttcagttaaa

SEQ ID NO: 780015 - DNA, 120 bp, Artificial Sequence
  ENSG00000250361_13 (sequence is synthesized)
ctcagaagagaaacagaactgcataaaattccatctttttcaactggacacatagaagtcactgtgtttctctagcagaattttttttttgcatttgcccaattaaagggaacctctaaa

SEQ ID NO: 780016 - DNA, 120 bp, Artificial Sequence
  ENSG00000250361_14 (sequence is synthesized)
cattttaaactatccattgcttgtttcaaatgcctaagaaaatgtgtctatcttaaaacagaagagcatatgttgttaactttattcacacgaaattgtaaagacaaagaaaatattctc

SEQ ID NO: 780017 - DNA, 120 bp, Artificial Sequence
  ENSG00000250361_15 (sequence is synthesized)
ggtagtttttttgcactaacttcaggaaccagctcatgatctcaggatgtatggaaaaataatctttgtattactattgtcagttgtcccagcaccatttgttgaagagactatcctttg

SEQ ID NO: 780018 - DNA, 120 bp, Artificial Sequence
  ENSG00000250361_16 (sequence is synthesized)
aaagttaattggccatggatatatgagtttatttctggagtctcaattctatccgaagaatatgtctgttcttggggcaaaatcacacagattttattgctgttacttggttataagttt

SEQ ID NO: 780019 - DNA, 120 bp, Artificial Sequence
  ENSG00000250361_17 (sequence is synthesized)
tgcattcatgaagtatgattcaccaaactgtgttcttcttcaagattgttttggctatttagatccctaataatttcacagaaattttaggattaggttttccattcttgcaaaaaaatt

SEQ ID NO: 780020 - DNA, 120 bp, Artificial Sequence
  ENSG00000250366_0 (sequence is synthesized)
gtgctgctggcgcccggcccccgcggggtgcagctctgcgcgttctcatgctgtctctctctctttccctccgcgctgcctctccgaggtcctcccgccgagccccggcgcggggcatga

SEQ ID NO: 780021 - DNA, 120 bp, Artificial Sequence
  ENSG00000250366_1 (sequence is synthesized)
atgaggagcccccgggtgccgcccagagaccagcaggctgcgcgcacacctagccagcggcagacggggacatgagcagcgcgcacggggtcccgcgcccggcggccagccctatccggc

SEQ ID NO: 780022 - DNA, 120 bp, Artificial Sequence
  ENSG00000250366_2 (sequence is synthesized)
gccagcgggtcaacgctgcccgggagaatgaggcaggagccggcggcagcctcctttttttccttctcctcgccttcctgcggctccggcgctccgggtccgggccgggctgcggctctg

SEQ ID NO: 780023 - DNA, 120 bp, Artificial Sequence
  ENSG00000250366_3 (sequence is synthesized)
ctgcgtgccccgcgcgcccctcaaccgcctccggatgcgcttctcggttagcctggcaaggaagataaagacatttgcaaccaagatggtaatcactagtgaaaatgatgaagacagagg

SEQ ID NO: 780024 - DNA, 120 bp, Artificial Sequence
  ENSG00000250366_4 (sequence is synthesized)
aggtcaagaaaaagaaagtaaagaggagagtgtcttggcaatgctggggattatcgggaccattctgaacctgattgtgatcatatttgtctacatatacaccaccctgtgaatggccca

SEQ ID NO: 780025 - DNA, 120 bp, Artificial Sequence
  ENSG00000250366_5 (sequence is synthesized)
gagcgtcctcagaggcctcagaatggccaaagacggaagtcctgcgtgtcggcgcatcactgaccagaccctgcgagaacaagcaggcttgacccgcacataccacccaatcaaatgcac

SEQ ID NO: 780026 - DNA, 120 bp, Artificial Sequence
  ENSG00000250366_6 (sequence is synthesized)
cttcaaactttacaaaaggtcacacaaatagaccgatcctgctgcagggagcagacactaaagcacaatgattccaacaaaactcattcacagcactaggaactcaacgtctttggcagg

SEQ ID NO: 780027 - DNA, 120 bp, Artificial Sequence
  ENSG00000250366_7 (sequence is synthesized)
gggcccagaagaatgcttggaagaccagcctctgacaccatcagtgagcggatgggtgcagaaattcattattccagatcgctgacagatatcacatatttgaaaagatgaatagggcgg

SEQ ID NO: 780028 - DNA, 120 bp, Artificial Sequence
  ENSG00000250366_8 (sequence is synthesized)
acatggctcagatgtgtgtctcccaggacaagtgtttcatcttcacttgacgagctatttagtggaaaaaccacaggcgcagccctttgacaggcatcccattcatcaaaagtgtctaac

SEQ ID NO: 780029 - DNA, 120 bp, Artificial Sequence
  ENSG00000250366_9 (sequence is synthesized)
tatttgatactggggagataacttatttttcttttttcattggcttgacatgtgtatctgttcatgtcaaggtttataaatatatatttttaataaatgtgctctattttttagcatgaa

SEQ ID NO: 780030 - DNA, 120 bp, Artificial Sequence
  ENSG00000250366_10 (sequence is synthesized)
ccaaatacttggagaggcactcccagatccatagagctttccttagttttatctgctttgtcccctcctcccccaactacagatgttctgttgtggagccattctagtccttttgtctca

SEQ ID NO: 780031 - DNA, 120 bp, Artificial Sequence
  ENSG00000250366_11 (sequence is synthesized)
tcttgagtcttttaccttgcgcttttgttctctctctctcctctctctctgcctctttggtctgaaggacattttcccatactgtcagccatggttttgggtgcatgttttaagattgtc

SEQ ID NO: 780032 - DNA, 120 bp, Artificial Sequence
  ENSG00000250366_12 (sequence is synthesized)
cattgagtggctttttgttgttatctcggagatataaaatgattgtgggcatgcagaccttagatgcaccctatctttactgagaattatgcatgaataagggctgagtgatagatcagc

SEQ ID NO: 780033 - DNA, 120 bp, Artificial Sequence
  ENSG00000250366_13 (sequence is synthesized)
cttcttaccggcagcgttattgtttcattcttgtgaccattcgtttatcagattttgattttagcggtcatgtaccgcgagagttgggaagaacaagggggaaagctcgggattaggtgc

SEQ ID NO: 780034 - DNA, 120 bp, Artificial Sequence
  ENSG00000250366_14 (sequence is synthesized)
attactccttcctttgcaagatacctgggatcctcctcaaaagcgggtggggtataaatgacacaagaactcccccaggagatctcatggtgattcaggctgtgaggacagccctgtgac

SEQ ID NO: 780035 - DNA, 120 bp, Artificial Sequence
  ENSG00000250366_15 (sequence is synthesized)
aggtgacttttcagggacatgaggaggggatttaatgattgccctaaaggacttctgtatttttaaagcccctggtttacacccacatgaagctatttcctctctggcagggatggttgc

SEQ ID NO: 780036 - DNA, 120 bp, Artificial Sequence
  ENSG00000250366_16 (sequence is synthesized)
ataaaaacaaattagctcccttctggctccctgaaatgggcccttgcctggctacagtggcatggccttaaagagagggttagtattccttctgccattgccagctgtattagtctgttt

SEQ ID NO: 780037 - DNA, 81 bp, Artificial Sequence
  ENSG00000250366_17 (sequence is synthesized)
tagtattccttctgccattgccagctgtattagtctgttttcacactgctgaaaaagacatccccaagactgggcaattta

SEQ ID NO: 780038 - DNA, 120 bp, Artificial Sequence
  ENSG00000250366_18 (sequence is synthesized)
tctcacatggtggcagacaagagaagtgaacatgtgcaaggagactcccatttttaaaacagatctcgtgagactttttcactatcatgcaaacagcatgggaaacctgcccccgtgatt

SEQ ID NO: 780039 - DNA, 120 bp, Artificial Sequence
  ENSG00000250366_19 (sequence is synthesized)
cagttacctcccaccgggtccctcccacaacacatgggtattcaagatgagatttgggtggggttacagccaaactctatcaccagccttgcccctgggcagaagcagcagcagtctgcc

SEQ ID NO: 780040 - DNA, 120 bp, Artificial Sequence
  ENSG00000250366_20 (sequence is synthesized)
tggctggattcaaatgattctgaggcttctatagtctatgcctgcagatctctccctcacccatgctatagtgtctgaaattccaccattagagagtcatttcttgggctctgttaaatg

SEQ ID NO: 780041 - DNA, 120 bp, Artificial Sequence
  ENSG00000250366_21 (sequence is synthesized)
gaccaggctcttttataaagaaaatgcccctgagcagctggctctggcattgatttatgatatcttctcttccctgccagaaggaaggaagctaaggtgcatgtagggcgtactgtgtgc

SEQ ID NO: 780042 - DNA, 120 bp, Artificial Sequence
  ENSG00000250366_22 (sequence is synthesized)
ccaggcactgtgccagatgctttggatacttggagtcattgaattcttgtagtaaccctgtgagagagggagtcttttctccacattgtagaagaaggaaaaagggctcagagaggtcaa

SEQ ID NO: 780043 - DNA, 120 bp, Artificial Sequence
  ENSG00000250366_23 (sequence is synthesized)
gaaatgtccctgagatcacatggcttctagtggagtcaagatccaaacccaatgtgtctgattccttagcccttgggggtccggaggctgctgaacaagaaaggaggtggagaggagaga

SEQ ID NO: 780044 - DNA, 120 bp, Artificial Sequence
  ENSG00000250366_24 (sequence is synthesized)
aagctgcaggcataccaccgcacacccttctccctcccctgtaaaaacaaccctgggaactccctggacactagcagaatatcatacactaaggataagggatgagaggaggctggttag

SEQ ID NO: 780045 - DNA, 120 bp, Artificial Sequence
  ENSG00000250366_25 (sequence is synthesized)
aaataaagcagtgtcagggggaaggagctactcagtaggctctgtgtgattctagaaagactgtatgaaaattctgaacagtgaacagaataaacaataaaggtgcaatggaaaaaaata

SEQ ID NO: 780046 - DNA, 120 bp, Artificial Sequence
  ENSG00000250366_26 (sequence is synthesized)
agagaccctccccaatcccggcctgccaccacctggctcgcgcgcagccccggcccagaatgccttaacctgcgccgattgctgccgccgaggtgcccctcccctgtagggaccccgacg

SEQ ID NO: 780047 - DNA, 120 bp, Artificial Sequence
  ENSG00000250366_27 (sequence is synthesized)
aggctgttgctccggtgtctctgggctgctccaccacgtggtgcctgcccatcatggcatccaccaccaggtggcctttttcttggttagcctggcaaggaagataaagacatttgcaac

SEQ ID NO: 780048 - DNA, 120 bp, Artificial Sequence
  ENSG00000250374_0 (sequence is synthesized)
gcactttccatgtgtgtttagttagtatctagtgtgtggccttttgcacggataaaggaccgccgcagagctccccctgctccagcaaccaatgatttgaggcaacagctgttttcctaa

SEQ ID NO: 780049 - DNA, 120 bp, Artificial Sequence
  ENSG00000250374_1 (sequence is synthesized)
cagctgcttagcttggcatcattttctctgagcagccaaaggctggaagagcagttgtctggctgagctgtgactgccggcaggctgtgtgtgggactccttttggcagttggaattaaa

SEQ ID NO: 780050 - DNA, 120 bp, Artificial Sequence
  ENSG00000250374_2 (sequence is synthesized)
gggtccgaagattcaaaggacttcaagggctgccaccaatgtgagaaatcagtgggactgtagtgaggtcatcagctgcctccaggaaggacagtgagatctaagagcatatctgcttct

SEQ ID NO: 780051 - DNA, 120 bp, Artificial Sequence
  ENSG00000250374_3 (sequence is synthesized)
cactgaagagtacccacagaactcaacctcttgaagaaagcccaccttggtcgagaccttcaccgacagcccaatggcagtggcagcagctctgaccggactccaagcagaagctaagtg

SEQ ID NO: 780052 - DNA, 120 bp, Artificial Sequence
  ENSG00000250374_4 (sequence is synthesized)
ctccatctgtctggattacctgagtgaccccgtcaccatcgaatgtgggcacaacttctgtcgttcctgcatccaacagtcctggctggatctacaggaattgttcccttgccctgtctg

SEQ ID NO: 780053 - DNA, 120 bp, Artificial Sequence
  ENSG00000250374_5 (sequence is synthesized)
tcgtcaccagtgtcaagaggggcacttcaggagcaacacccagctgggaaggatgattgaaattgccaagctactccagagcaccaagagtaataaaaggaagcaggaagagaccacctt

SEQ ID NO: 780054 - DNA, 120 bp, Artificial Sequence
  ENSG00000250374_6 (sequence is synthesized)
gtgcgagaaacacaaccagcccctgagcgttttctgcaaggaggacctgatggtgttgtgtccgctgtgcactcagccccctgaccaccagggccaccatgtgaggcccatagagaaagc

SEQ ID NO: 780055 - DNA, 120 bp, Artificial Sequence
  ENSG00000250374_7 (sequence is synthesized)
cccctgaaaaagcaattggcagacctccaaaaattaataagcactcaaagcaaaaaacccttagaactgagagagatggtggaaaaccaaaggcaggaattatcctctgaatttgagcac

SEQ ID NO: 780056 - DNA, 120 bp, Artificial Sequence
  ENSG00000250374_8 (sequence is synthesized)
ctcaaccagtttttagaccgtgagcaacaggcagttctctccagattagctgaagaagagaaggacaatcaacagaaactcagtgcaaacataacagcattttcaaactacagtgccaca

SEQ ID NO: 780057 - DNA, 120 bp, Artificial Sequence
  ENSG00000250374_9 (sequence is synthesized)
ctcaaaagccagttaagtaaggtagtagagctcagtgagctgtctgaactggaattgctgtcacaaattaaaattttctacgaatctgaaaatgagagtagcccatcgatcttttcaatt

SEQ ID NO: 780058 - DNA, 120 bp, Artificial Sequence
  ENSG00000250374_10 (sequence is synthesized)
catttaaagagagatggctgcagttttcctccccaatattctgctctgcagagaattataaagaaatttaaagtagaaataattctagaccctgaaacagcacaccctaacctgattgta

SEQ ID NO: 780059 - DNA, 120 bp, Artificial Sequence
  ENSG00000250374_11 (sequence is synthesized)
tctgaagataaaaaacgtgtgagatttacaaagagaaaacaaaaggttcctggtttcccaaaaagatttacagtcaagccagttgttctgggttttccgtattttcattctggcaggcat

SEQ ID NO: 780060 - DNA, 120 bp, Artificial Sequence
  ENSG00000250374_12 (sequence is synthesized)
ttctgggagattgaagtgggggataagtcagaatgggctattggcatttgcaaagattctcttcccacaaaggcgaggagaccctcatcagcccagcaggaatgttggagaattgagctg

SEQ ID NO: 780061 - DNA, 120 bp, Artificial Sequence
  ENSG00000250374_13 (sequence is synthesized)
caagatgatggctatcatgcaccaggggcttttccaacccctctgttgttagaggtgaaagccagggccattggcattttcctggactatgagatgggtgagatctcattctataacatg

SEQ ID NO: 780062 - DNA, 120 bp, Artificial Sequence
  ENSG00000250374_14 (sequence is synthesized)
gctgagaaatctcacatctgtactttcactgacacttttactgggcctcttcggccttatttctatgtaggaccagattcacaacctctcagaatctgtacagggacagtttgtgaatga

SEQ ID NO: 780063 - DNA, 120 bp, Artificial Sequence
  ENSG00000250423_0 (sequence is synthesized)
atgagggccggctggacgcctcgaggcttctctgcctttcacgcttctctccttcctggccggcacccctacctggctcacctgggccccagggaccgaggggccaggattggaagtcga

SEQ ID NO: 780064 - DNA, 120 bp, Artificial Sequence
  ENSG00000250423_1 (sequence is synthesized)
gcgtattcccaaggctgttgcagttgtctttggttgacttacaaaggcaagaaggagggaagcaccaagggggagcttggcccagctgcagtgactgacctggaaatacctagttattcc

SEQ ID NO: 780065 - DNA, 120 bp, Artificial Sequence
  ENSG00000250423_2 (sequence is synthesized)
cggggcttcctgccctgcacaccgcgattccctaccacttggtgcaggggacctggatgcttttgtggcactgcagtgattgctggtaatcttggggatctggccaggatagtgggcccc

SEQ ID NO: 780066 - DNA, 120 bp, Artificial Sequence
  ENSG00000250423_3 (sequence is synthesized)
tcacatcatgctagtcagcttctcctactccaagaacaggattcaggaaatcatcctacaatggctgaatcactaagtgaaatttctgacagtctggatgttctggaggccggtgatgag

SEQ ID NO: 780067 - DNA, 120 bp, Artificial Sequence
  ENSG00000250423_4 (sequence is synthesized)
ggaaagaagaaatgcaaatttaaagcccttaagagcttttttgttaagaagaaggaaaaagaagccgaagatacccaggaagaagaaatgctagaactgagcttgtccagcagcaacatt

SEQ ID NO: 780068 - DNA, 120 bp, Artificial Sequence
  ENSG00000250423_5 (sequence is synthesized)
aacatctcttctctgcagcccgttcgggaaaatcaaccaactaaggccagggccaagagcagcatggggagcaaagccctatcccatgatagcatcttcatgttgggtcctgagcctgaa

SEQ ID NO: 780069 - DNA, 120 bp, Artificial Sequence
  ENSG00000250423_6 (sequence is synthesized)
agatcagcaagtaaaatgtttccttctatggatccccagagaggcagacctcagcagagatcccatatttccagaactctgcctaaacctaggagtaaggttcctggagttgtgtctgga

SEQ ID NO: 780070 - DNA, 120 bp, Artificial Sequence
  ENSG00000250423_7 (sequence is synthesized)
gccatgtcaggagctgtgcttcaaaatgtgcctacaagtgcagtctgggttgctggccccaagatcactgagaacccaccatcgcgccgacgccgactcagcatcatcccacctgttatc

SEQ ID NO: 780071 - DNA, 120 bp, Artificial Sequence
  ENSG00000250423_8 (sequence is synthesized)
caacctgaaataatttctaagaacttggtagaaatctctctcgatgatgagtcacctaagaatccacaaaagaaggctttaccacataagagtttgacagcgactcagagcttctctgag

SEQ ID NO: 780072 - DNA, 120 bp, Artificial Sequence
  ENSG00000250423_9 (sequence is synthesized)
ttatcatctggacctgattgctcacagtccttgactgcatttgccacacttgcctctaccagtagcacccagctgcccattggtttcagcaccccagccaccacccagggctgtttggat

SEQ ID NO: 780073 - DNA, 120 bp, Artificial Sequence
  ENSG00000250423_10 (sequence is synthesized)
tcttcagctgctcgccacaaaatgactttaaatccccgcaaacaaaagaagaaccttcaagtgattattcgtggccttccagtgtggttcagtcatttccagggtattttagagggatcc

SEQ ID NO: 780074 - DNA, 120 bp, Artificial Sequence
  ENSG00000250423_11 (sequence is synthesized)
ctgcagtgtgtcactcagacattagaaactccaaacctggatgaaccacttccagtggaaccaaaggaggaggagccaaaccttccattggtttctgaagaagaaaagagcataaccaaa

SEQ ID NO: 780075 - DNA, 120 bp, Artificial Sequence
  ENSG00000250423_12 (sequence is synthesized)
ccaaaagaaatcaacgaaaagaagctgggaatggacagtgcagattcctcaagccagaaacagaacaacaaaactgagatgtatgataagaagacaacagaccaggctccaaacactgat

SEQ ID NO: 780076 - DNA, 120 bp, Artificial Sequence
  ENSG00000250423_13 (sequence is synthesized)
gcttctcggagtcagggctatccaatgtcagcagcatatggaagaagatggagaagaaaaggagcaagtgtttcaggattgagtgggtgtgaattcaaaggaagaagccttaaacaatcc

SEQ ID NO: 780077 - DNA, 120 bp, Artificial Sequence
  ENSG00000250423_14 (sequence is synthesized)
agtgaagggtatggcctgggcgatagagctgggtcttcacctaccaataagactgccaggaatgtccctttctcgcacttgtccttagagaaggacaacatggagcagcctacaacttca

SEQ ID NO: 780078 - DNA, 120 bp, Artificial Sequence
  ENSG00000250423_15 (sequence is synthesized)
caaccagaaaccactacccctcaggggttgctttcagataaagatgacatgggaaggagaaatgctggcatagatttcggatccagaaaagcatcagcagcacagcccatacctgaaaac

SEQ ID NO: 780079 - DNA, 120 bp, Artificial Sequence
  ENSG00000250423_16 (sequence is synthesized)
atggacaattccatggttagtgatccacaaccataccatgaagatgcagcttctggagctgagaagacagaagccagagcttctctctcactgatggtggaaagcctttctacaacccaa

SEQ ID NO: 780080 - DNA, 120 bp, Artificial Sequence
  ENSG00000250423_17 (sequence is synthesized)
gaggaggccattctctcagtagcagcagaggctcaggtgtttatgaatccttctcatatccagttagaagatcaagaagctttcagctttgatttacaaaaggcccaatccaaaatggag

SEQ ID NO: 780081 - DNA, 120 bp, Artificial Sequence
  ENSG00000250423_18 (sequence is synthesized)
tcagcccaggatgttcaaactatctgcaaagaaaagccttctggaaatgttcaccagacctttacagcaagtgttttgggtatgacaagtactacagccaaaggagatgtttatgccaag

SEQ ID NO: 780082 - DNA, 120 bp, Artificial Sequence
  ENSG00000250423_19 (sequence is synthesized)
actctgcctcccagaagcctttttcagtcctcaaggaagcctgatgctgaagaagtctcctcagattcagagaatattcctgaggagggggatggttctgaagaactggctcatggtcac

SEQ ID NO: 780083 - DNA, 120 bp, Artificial Sequence
  ENSG00000250423_20 (sequence is synthesized)
tcttcccagtccttggggaagtttgaagatgaacaagaagtcttctcagaatcaaaaagttttgttgaggacttgagcagctctgaggaggagctggacctcagatgcctctcccaggct

SEQ ID NO: 780084 - DNA, 120 bp, Artificial Sequence
  ENSG00000250423_21 (sequence is synthesized)
ttagaggagcctgaagatgcagaagtcttcacagaatcaagcagttatgttgaaaagtacaacacttctgatgattgcagcagctcagaggaagacctgcctctcagacaccctgctcag

SEQ ID NO: 780085 - DNA, 120 bp, Artificial Sequence
  ENSG00000250423_22 (sequence is synthesized)
gccttgggaaagcccaaaaaccaacaagaagtctcctctgcttcaaataatactcctgaagagcagaatgattttatgcagcagctgccttccagatgcccttctcagcccattatgaat

SEQ ID NO: 780086 - DNA, 120 bp, Artificial Sequence
  ENSG00000250423_23 (sequence is synthesized)
cctactgttcagcaacaagtccccaccagttcagtgggcacttctataaaacagagcgattccgtggagccaatccctccaagacaccctttccagccatgggtgaaccctaaagtggag

SEQ ID NO: 780087 - DNA, 120 bp, Artificial Sequence
  ENSG00000250423_24 (sequence is synthesized)
caagaagtttcctcatctccaaagagcatggctgttgaagagagcatttctatgaagcctctgcctcctaaacttctttgccagcccttgatgaatcctaaagttcaacaaaacatgttc

SEQ ID NO: 780088 - DNA, 120 bp, Artificial Sequence
  ENSG00000250423_25 (sequence is synthesized)
tcaggttcagaggacattgctgttgagagagtcatttctgtggagccactactccccagatattctcctcagtccttgacagatcctcaaatccggcaaatctcagaaagcacagctgtt

SEQ ID NO: 780089 - DNA, 120 bp, Artificial Sequence
  ENSG00000250423_26 (sequence is synthesized)
gaggaaggcacttatgtggaaccgctgcctcccagatgcctttcccagccctcggagaggcctaagttcctggactcaatgagtacttctgcagaatggagcagtcctgtggcaccaaca

SEQ ID NO: 780090 - DNA, 120 bp, Artificial Sequence
  ENSG00000250423_27 (sequence is synthesized)
ccttccaaatacacttccccgccatgggtgacccctaaatttgaggaactgtatcaactctctgcacatccagaaagcactactgttgaagaggacatttctaaggagcagctgcttccc

SEQ ID NO: 780091 - DNA, 120 bp, Artificial Sequence
  ENSG00000250423_28 (sequence is synthesized)
agacatctttcccagttgactgtgggaaataaagtccagcaactgtcctcaaatttcgagcgggctgctattgaggcagacatttctgggagtccattgcctccccaatatgctacccag

SEQ ID NO: 780092 - DNA, 120 bp, Artificial Sequence
  ENSG00000250423_29 (sequence is synthesized)
ttcttaaagaggtctaaagttcaggaaatgacctcacgactagagaaaatggctgttgaaggcacttctaacaaatcaccgattcccaggcgtccgacccagtcattcgtgaaatttatg

SEQ ID NO: 780093 - DNA, 120 bp, Artificial Sequence
  ENSG00000250423_30 (sequence is synthesized)
gcacagcaaatcttttcagagagctctgctcttaagaggggcagtgatgtggcacctctgcctcccaatcttccttccaaatctttatcaaagcctgaagtcaagcaccaagttttctca

SEQ ID NO: 780094 - DNA, 120 bp, Artificial Sequence
  ENSG00000250423_31 (sequence is synthesized)
gattcagggagtgctaatcctaagggaggcatttcttcaaagatgctacctatgaagcaccctttacagtccttggggaggcctgaagacccacagaaagttttctcttattcagagaga

SEQ ID NO: 780095 - DNA, 120 bp, Artificial Sequence
  ENSG00000250423_32 (sequence is synthesized)
aaagagcagctgtctcccaggcagctttcccaggccttgaggaaacctgagtatgagcaaaaagtctcccctgtttctgccagttctcctaaagagtggaggaattctaaaaagcagctg

SEQ ID NO: 780096 - DNA, 120 bp, Artificial Sequence
  ENSG00000250423_33 (sequence is synthesized)
cctcccaaacattcttcccaagcctcagataggtctaaattccagccacagatgtcatcaaagggcccagtgaatgtacctgtaaagcagagcagcggtgagaagcacctgccttcaagt

SEQ ID NO: 780097 - DNA, 120 bp, Artificial Sequence
  ENSG00000250423_34 (sequence is synthesized)
agtcctttccagcaacaggttcattcaagttctgtgaatgctgctgctaggcgatctgtttttgagagcaattctgacaattggttcctaggaagagatgaagcttttgcaatcaaaacc

SEQ ID NO: 780098 - DNA, 120 bp, Artificial Sequence
  ENSG00000250423_35 (sequence is synthesized)
aagaaattcagccaaggttccaaaaaccccataaagagcattccagcccctgctaccaaacctgggaagttcaccattgctcctgtcaggcaaacatccacttctgggggcatttactct

SEQ ID NO: 780099 - DNA, 120 bp, Artificial Sequence
  ENSG00000250423_36 (sequence is synthesized)
aagaaagaagatcttgagagtggtgatggtaataataaccagcatgcaaacctatccaatcaggatgatgttgaaaagctttttggagttcgactgaaaagagcccctccctcgcagaag

SEQ ID NO: 780100 - DNA, 120 bp, Artificial Sequence
  ENSG00000250423_37 (sequence is synthesized)
tataagagtgagaaacaagataacttcacccagcttgcttcagtgccctcgggcccaatttcatcctctgtaggcaggggacataaaatcagaagcacttcccaggggctcctggatgct

SEQ ID NO: 780101 - DNA, 120 bp, Artificial Sequence
  ENSG00000250423_38 (sequence is synthesized)
gcagggaacctcaccaaaatatcttacgttgcagataagcaacagagcaggcccaaatctgaaagcatggccaagaagcaacctgcttgcaagaccccaggaaagcctgctggtcaacag

SEQ ID NO: 780102 - DNA, 120 bp, Artificial Sequence
  ENSG00000250423_39 (sequence is synthesized)
tcagattatgctgtctcagagccggtttggataactatggcaaagcagaagcagaagagtttcaaggcccacatttctgtgaaagagctgaaaactaagagcaatgctggagccgatgct

SEQ ID NO: 780103 - DNA, 120 bp, Artificial Sequence
  ENSG00000250423_40 (sequence is synthesized)
gagactaaggagcctaaatatgagggagctggctctgcaaatgaaaaccaacctaaaaagatgttcacttccagtgtccataaacaggagaagacagcacagatgaagccacctaagcct

SEQ ID NO: 780104 - DNA, 120 bp, Artificial Sequence
  ENSG00000250423_41 (sequence is synthesized)
acaaaatcagttggatttgaagctcagaagatactgcaagttcctgccatggaaaaagaaaccaaacgatcttcaactctcccagccaagttccagaacccagttgagccaattgagcct

SEQ ID NO: 780105 - DNA, 120 bp, Artificial Sequence
  ENSG00000250423_42 (sequence is synthesized)
gcctgtctggttctcactggccaggaagaaagccaaagcatggagccacatggcagaaatcacgcaataaagagctcttgtgtggagcatcagcatttattttatttagttttttttttt

SEQ ID NO: 780106 - DNA, 120 bp, Artificial Sequence
  ENSG00000250423_43 (sequence is synthesized)
aggcgtgagccaccgcgcccggccaagcatcagcgttttaaatgataattgctaatagctgtattaattctatgtagtgatctttttactgtgaccacttgtattaagcaaaataagtat

SEQ ID NO: 780107 - DNA, 120 bp, Artificial Sequence
  ENSG00000250423_44 (sequence is synthesized)
gaccacttgtattaagcaaaataagtattaagcaaactaagaatttattaagcaaaataagaatttattaagcaaaatagccttagaaatgcaaattaaaacataattatttgaatgaaa

SEQ ID NO: 780108 - DNA, 120 bp, Artificial Sequence
  ENSG00000250423_45 (sequence is synthesized)
taaatgccatgaatgcttaaccttccacgtagtcactgccagcacccagaaacccagcatttcctctattaaaactatcgaaaacatttgcactgctgtaaaattgcaaaatctttaact

SEQ ID NO: 780109 - DNA, 120 bp, Artificial Sequence
  ENSG00000250423_46 (sequence is synthesized)
ttggacaatgtgctttagaagggagaaagcaaaaacattttgttggagcaactagaaaattgtcatttccctcaaccaaataaagtaattctaatggaaacattcagatgatttgaccta

SEQ ID NO: 780110 - DNA, 120 bp, Artificial Sequence
  ENSG00000250423_47 (sequence is synthesized)
aagattggcctttaggttttatgagcctagatagatgccgcaattatttggttgttgctctaagctttgcaagggatcctaaaagaggcggtggaagtgaaaattctgggtctccaagaa

SEQ ID NO: 780111 - DNA, 120 bp, Artificial Sequence
  ENSG00000250423_48 (sequence is synthesized)
aatttctgcacagccagttctccaatcagcctatcaccccttgaaacatcttccctgtgtccctgggggcccctgatgctttctccttgggtgatagtaacatgcagagcacttacacaa

SEQ ID NO: 780112 - DNA, 120 bp, Artificial Sequence
  ENSG00000250423_49 (sequence is synthesized)
agctccctctttggacataccccacgtcgacctgtcacaggcctggctgtagcgagcacctccctatgacgcagaatgcttcttgggaattatcttactcctctggagggttagtccatc

SEQ ID NO: 780113 - DNA, 120 bp, Artificial Sequence
  ENSG00000250423_50 (sequence is synthesized)
aatgttttgcttcttgtcccaatactactgtgaccctctctgatcgcacagaaatcactgcctatcacatatatcctgttaagcactgaagaccctattgaaattagagttctacagatg

SEQ ID NO: 780114 - DNA, 120 bp, Artificial Sequence
  ENSG00000250423_51 (sequence is synthesized)
ccaaaagctgtactttccatcaggcagatggcaagcttactgccttgatgcacatctggagccactggagctccttcctctctggttccagcattaaggtggagaactccatgtagcttc

SEQ ID NO: 780115 - DNA, 120 bp, Artificial Sequence
  ENSG00000250423_52 (sequence is synthesized)
ttgtcctttcccctcagctgtctttgcttcacaaggttttagcccaaagcaagagtgcaatcccaaagccacagagaaatgaactttccgctacctggaagctttaagtgagtaaatcag

SEQ ID NO: 780116 - DNA, 120 bp, Artificial Sequence
  ENSG00000250423_53 (sequence is synthesized)
cttttcccctctcattcctagaggcacacacctcaaaagttactaggctggagagaccctaccttccagtgacccactcatcccccagccacggagaagagggaagaccaaaaagggaga

SEQ ID NO: 780117 - DNA, 120 bp, Artificial Sequence
  ENSG00000250423_54 (sequence is synthesized)
gtgagaaagaggatgagagggatggtcagctgtgaggggagggggcaagtggcccagcaaatgttgatgcctcccttcccatcttgccacacggtctttttcttttgtagcacagcctcc

SEQ ID NO: 780118 - DNA, 120 bp, Artificial Sequence
  ENSG00000250423_55 (sequence is synthesized)
attaataactcctcggctgaggatgaagatgtaggcacctttacccccagagccagttccttaattggctggctttctgagatgcagaccaccctagaatctcatctaggttcactagaa

SEQ ID NO: 780119 - DNA, 120 bp, Artificial Sequence
  ENSG00000250423_56 (sequence is synthesized)
gttagttaaatcttcctttctctgtctttctcttcattccatcccccaaacccaccaaacactaagggagagctccctttggatgtctgggcagtaaacctagctcatttttctaggaga

SEQ ID NO: 780120 - DNA, 120 bp, Artificial Sequence
  ENSG00000250423_57 (sequence is synthesized)
cccagaagtgacttctgagtagttatcactgtgtctgcctctgttacactgtgctgctttgcttaaacagaaatgcaggcctggacatctgactgtgcctttatattctgagtggggtgc

SEQ ID NO: 780121 - DNA, 120 bp, Artificial Sequence
  ENSG00000250423_58 (sequence is synthesized)
tgccccatgcaaaaaaatccagagaggtagtgaggtgtcagagctaaacacttggtgctgggttttgttgatgctggtataatgtgacacagtacaattacatgctaaattttgcatttt

SEQ ID NO: 780122 - DNA, 120 bp, Artificial Sequence
  ENSG00000250423_59 (sequence is synthesized)
ctctatataacatctatttttcctgatactgtgcctttgccattttgataatgctattttgattgagtgaattttatttcctttgtattcccatagtgaacaatatattaaggtagatgc

SEQ ID NO: 780123 - DNA, 120 bp, Artificial Sequence
  ENSG00000250423_60 (sequence is synthesized)
cctttatctgggtactcctggtagattagctgttacacctcccttcccttttttacagtgaacctgtattcagttattgtcactctgagaactctccaataacaatttcttttccacagt

SEQ ID NO: 780124 - DNA, 120 bp, Artificial Sequence
  ENSG00000250423_61 (sequence is synthesized)
taacaacacagctgttacacctcccttcctttttttcacagtgaacctgtattcagctattctcactctgagaactctccaataacaatttcttttccacagttaacaacaaagttctgt

SEQ ID NO: 780125 - DNA, 120 bp, Artificial Sequence
  ENSG00000250423_62 (sequence is synthesized)
ttttaaatgaagagattaagttctttttaaatgcctaaaggcatattctgacaacttttctacttctttaacttttttgatttaagatatatgcaaagcaaataaattcaataaagccta

SEQ ID NO: 780126 - DNA, 120 bp, Artificial Sequence
  ENSG00000250479_0 (sequence is synthesized)
cagggccgcgcttcacttccctaggccaccggagactcccaggccacgcggtggtcagcagaccctgtctggagggaggggacagacagccgagtccgggagggggcagagagcggagtc

SEQ ID NO: 780127 - DNA, 120 bp, Artificial Sequence
  ENSG00000250479_1 (sequence is synthesized)
cagcctggagcctcgcgtccccttcccagctggccccatcccgtcgcctccccgtctcctctcccctccagggctcgcaacaacccccaactccgctccctgccctctgcggtggtccta

SEQ ID NO: 780128 - DNA, 120 bp, Artificial Sequence
  ENSG00000250479_2 (sequence is synthesized)
acagaaggcactgtcgccctccttaagccctcggcgctttgcgacactggcccctgtccccagaacccgcacagcctgccaggcgcagggagggagcagggtcccatttccagccgagac

SEQ ID NO: 780129 - DNA, 120 bp, Artificial Sequence
  ENSG00000250479_3 (sequence is synthesized)
ccggagctgctggaagggagatgtccggaggacgggagaagggggatagggttgggggcagtgccgcctcccgctgggggcgtgttcctgaggccccgcccggggccccgccttttttgc

SEQ ID NO: 780130 - DNA, 80 bp, Artificial Sequence
  ENSG00000250479_4 (sequence is synthesized)
ccgcgcacccaccgccctcggcagccgccccagcccccgccccttcgggccagccggggctcatggctcagatggcgacc

SEQ ID NO: 780131 - DNA, 120 bp, Artificial Sequence
  ENSG00000250479_5 (sequence is synthesized)
gccggggctcatggctcagatggcgaccacggccgcaggggtagccgtgggctcggctgtgggacacgtcatgggcagcgccctgaccggagccttcagcggggggagctcggagccctc

SEQ ID NO: 780132 - DNA, 120 bp, Artificial Sequence
  ENSG00000250479_6 (sequence is synthesized)
ccagcctgctgtccagcaggcccccacccccgctgccccccagcccctgcagatggggccctgcgcctacgagatcaggcagttcctggactgttccaccactcagagtgacctgtccct

SEQ ID NO: 780133 - DNA, 120 bp, Artificial Sequence
  ENSG00000250479_7 (sequence is synthesized)
gtgtgagggcttcagcgaggccctgaagcagtgcaagtactaccatggtctgagctccctgccctgaagaggtcggtgcagactcgggggccagtcctgcacccacctctacccctcgcc

SEQ ID NO: 780134 - DNA, 120 bp, Artificial Sequence
  ENSG00000250479_8 (sequence is synthesized)
gacagccagaccacaacaccagattgtacccagatagctgggattggaagtgaggaggtttctcaccccacagataacccaagacacaaatgtgcaattaaaagtttattttagaccaca

SEQ ID NO: 780135 - DNA, 120 bp, Artificial Sequence
  ENSG00000250479_9 (sequence is synthesized)
aaaaaaaaaaaaaggcagcagaaacatgctgtctgtagccgcctctgctgctggatcactcagcctgcctaggacccttgggacacccaggctggggatgtggggaggggcaggtggccc

SEQ ID NO: 780136 - DNA, 120 bp, Artificial Sequence
  ENSG00000250486_0 (sequence is synthesized)
gcttcgacttccgggtgagaccgtgaaggtgtggcgcgacgttggagaccggggcagcgccatgtaccacagtggatggaaggatgcgcggtgcggcggggcagctgtcctcttctcccc

SEQ ID NO: 780137 - DNA, 120 bp, Artificial Sequence
  ENSG00000250486_1 (sequence is synthesized)
ggacccagcgcctggagagccagccctgcagggtgggctgggcgagccaaactgcgttcctggtgcagggcttcgggtctccctaacagaccttatacgctgaccggcggccgccatggc

SEQ ID NO: 780138 - DNA, 120 bp, Artificial Sequence
  ENSG00000250486_2 (sequence is synthesized)
agtgtctctttgctcagacatccagggacgaccacattcgtccaacagcggtcgctccaccaatcctgggagaagcgaatcgttttctccgcgtgccctgtcagccgctcatggtgccca

SEQ ID NO: 780139 - DNA, 120 bp, Artificial Sequence
  ENSG00000250486_3 (sequence is synthesized)
gagaggaattttagtggcagcattccggctgtcacgccaccgaaattgccaggccactccaagtcagaaggaccaccaggaaaagtcaggaagagaaccaccatcaggtcccagcctctt

SEQ ID NO: 780140 - DNA, 120 bp, Artificial Sequence
  ENSG00000250486_4 (sequence is synthesized)
tttgtgacaaggactagagggtttgggtctgcagtgggctggctcccgctgggctcacctgtcctatagagcaggctgcctcaaggaagaagctcacaggggacatctgacatctgaaac

SEQ ID NO: 780141 - DNA, 120 bp, Artificial Sequence
  ENSG00000250486_5 (sequence is synthesized)
agcaagtgtaaaatgctttaaataagccaaaactaaaccaatcgttatgttaactaaaaatacatgaatgctaccgaagatagtcgaatattagaggaagagattaaactctgattttga

SEQ ID NO: 780142 - DNA, 120 bp, Artificial Sequence
  ENSG00000250486_6 (sequence is synthesized)
gcactttgtgctttattcggaaaatgaataagatgcagttctgaaaacctgaaaatataaagaataggatatgatacgcacactagatgaaaacaaaactttcagaccatattttcttat

SEQ ID NO: 780143 - DNA, 120 bp, Artificial Sequence
  ENSG00000250486_7 (sequence is synthesized)
ttaaagctctaataagtgagatagcagagtaaactattcactcaaataattagtaactgatataagggtatgtatcaataacaggtattaagacaaaaactttatgagcttttccatttt

SEQ ID NO: 780144 - DNA, 120 bp, Artificial Sequence
  ENSG00000250486_8 (sequence is synthesized)
aacaagggatgatgattctagacttctgccacaacattatggtcgacaaaacattcttaattcattttacatagatctgactctagattctgaaacagcaagtcataatcttgtatctct

SEQ ID NO: 780145 - DNA, 120 bp, Artificial Sequence
  ENSG00000250486_9 (sequence is synthesized)
gtgcgatttggaaagacaccacaaaaactcatgatccaaaaaagattaaggctgttattaccaggaggaagagaaagaggacaaaatcaaactggatagatataatagagttgtttgtta

SEQ ID NO: 780146 - DNA, 120 bp, Artificial Sequence
  ENSG00000250486_10 (sequence is synthesized)
gaattgtcttcccaggagatggaaaaagacgccatcacaataggattcatgctttagttttcagctatagaaatgtaataactttgccaaagtaattacactacatagagtggcaatcgt

SEQ ID NO: 780147 - DNA, 120 bp, Artificial Sequence
  ENSG00000250486_11 (sequence is synthesized)
tctattaaaagtaagacccagtaatgttaggatttgttctggacaatgaaggggatgaggtttaatcttatgacttgaatgccaggtctgaaatcttttcttcaagtgatatttttatga

SEQ ID NO: 780148 - DNA, 120 bp, Artificial Sequence
  ENSG00000250486_12 (sequence is synthesized)
aactacttaggctgtgtttcacactgggtatgatttctaacctcttataacctgtacagtaatagattatgaaggatgaattatttgaaagctattttgtattatttaggagaggagctc

SEQ ID NO: 780149 - DNA, 120 bp, Artificial Sequence
  ENSG00000250486_13 (sequence is synthesized)
ttcaattctgaattgtctgccacttacaagcagaagaaagtttttttctttcattattttagcaactatcaataaaacagtattagaaatgcctactcttcagagatgtaatgggaataa

SEQ ID NO: 780150 - DNA, 120 bp, Artificial Sequence
  ENSG00000250486_14 (sequence is synthesized)
attgtaaagtacttttgatattctaagatgaaagatggtattacacagtcaataattcaatgcttcccacattatgaattttatcaaaattatgtagagagctattagttcattccagca

SEQ ID NO: 780151 - DNA, 120 bp, Artificial Sequence
  ENSG00000250486_15 (sequence is synthesized)
acaaaacaggcttatataaaaacaaaaacctcctgggtcatgccatcctacaccaaattcctgttaaacagaggcatgatttattccagtgaccttgctatttcttcataactgtaatat

SEQ ID NO: 780152 - DNA, 120 bp, Artificial Sequence
  ENSG00000250486_16 (sequence is synthesized)
gtctaatgttagacattttaaattaacattctattagataaactgagaatttaggtctctcgcaccacccaggcacatactctatctttccccacaaatatccaaatatggtaatataat

SEQ ID NO: 780153 - DNA, 120 bp, Artificial Sequence
  ENSG00000250486_17 (sequence is synthesized)
tggattaatacgttcatatgactatataattgttcacagctgagccacttaggtgctataattataatttctttgatacacaaattttgttttattgtgattaaaattgcctgatttctt

SEQ ID NO: 780154 - DNA, 120 bp, Artificial Sequence
  ENSG00000250506_0 (sequence is synthesized)
ccacatggaagctggaggagcaacgggagcgctgggcgtggggtgcaaattgcccggtgccttctgtttcccaggcagctctgtggccatggatatgttccagaaggtagagaagatcgg

SEQ ID NO: 780155 - DNA, 120 bp, Artificial Sequence
  ENSG00000250506_1 (sequence is synthesized)
agagggcacctatggggtggtgtacaaggccaagaacagggagacagggcagctggtggccctgaagaagatcagactggatttggagatggagggggtcccaagcactgccatcaggga

SEQ ID NO: 780156 - DNA, 120 bp, Artificial Sequence
  ENSG00000250506_2 (sequence is synthesized)
gatctcgctgctcaaggaactgaagcaccccaacatcgtccgactgctggacgtggtgcacaacgagaggaagctctatctggtgtttgagttcctcagccaggacctgaagaagtacat

SEQ ID NO: 780157 - DNA, 120 bp, Artificial Sequence
  ENSG00000250506_3 (sequence is synthesized)
ggactccaccccaggctcagagctccccctgcacctcatcaagagctacctcttccagctgctgcagggggtgagtttctgccactcacatcgggtcatccaccgagacctgaagcccca

SEQ ID NO: 780158 - DNA, 120 bp, Artificial Sequence
  ENSG00000250506_4 (sequence is synthesized)
gaacctgctcatcaatgagttgggtgccatcaagctggctgacttcggcctggctcgcgccttcggggtgcccctgcgcacctacacccatgaggtggtgacactgtggtatcgcgcccc

SEQ ID NO: 780159 - DNA, 120 bp, Artificial Sequence
  ENSG00000250506_5 (sequence is synthesized)
cgagattctcttgggcagcaagttctataccacagctgtggatatctggagcattggttgcatctttgcagagatggtgactcgaaaagccctgtttcctggtgactctgagattgacca

SEQ ID NO: 780160 - DNA, 120 bp, Artificial Sequence
  ENSG00000250506_6 (sequence is synthesized)
ctggggacacccagcgaagacacatggcccggggtcacccagctgcctgactataagggcagcttccctaagtggaccaggaagggactggaagagattgtgcccaatctggagccagag

SEQ ID NO: 780161 - DNA, 120 bp, Artificial Sequence
  ENSG00000250506_7 (sequence is synthesized)
ggcagggacctgctcatgcaactcctgcagtatgaccccagccagcggatcacagccaagactgccctggcccacccgtacttctcatcccctgagccctccccagctgcccgccagtat

SEQ ID NO: 780162 - DNA, 120 bp, Artificial Sequence
  ENSG00000250506_8 (sequence is synthesized)
gtgctgcagcgattccgccattgagaatgtcaaggccacactcagatcctttctcgagcagctgctgccccagctgcctcctacccattgccaagagaggatgcatctggggagagcaaa

SEQ ID NO: 780163 - DNA, 120 bp, Artificial Sequence
  ENSG00000250506_9 (sequence is synthesized)
gcactaaggaattcagcatcagcctgcagagggctgagtctgggttagtcctgcccgcaggttagcgagatcctgtgttgttttttgggttggacggtgccgtttcaaaatagaggcaca

SEQ ID NO: 780164 - DNA, 120 bp, Artificial Sequence
  ENSG00000250506_10 (sequence is synthesized)
gatgctccatgcacgaggggtccccgggcactggaacaagtgccaagttgaaggcagggggcctgccagagctgggtgtgggtattcaggccctcacctgccctgcctgcagggccagac

SEQ ID NO: 780165 - DNA, 120 bp, Artificial Sequence
  ENSG00000250506_11 (sequence is synthesized)
cctgaggaaagggcgccccctgctggtctttttggatttaaaatgtttgggggaagagttgagttccagttcagtcccaagttaaacaggagggagtgagggagaggagagagggcgttc

SEQ ID NO: 780166 - DNA, 120 bp, Artificial Sequence
  ENSG00000250506_12 (sequence is synthesized)
cccggatcccaggagagctgggctatgactgcaataaggagttgttccttcacctgagatgtgcttcttttggttcatttctggcttgacaacaataaataaacgtggtatgttcctgag

SEQ ID NO: 780167 - DNA, 120 bp, Artificial Sequence
  ENSG00000250506_13 (sequence is synthesized)
ctgactgtggagtttggtggatgacgtgccaaggagcacaggtctccattgccggggccctggtcattctgtggggttaaggagaagccgatccccctggctggaagtgcccttcttggc

SEQ ID NO: 780168 - DNA, 120 bp, Artificial Sequence
  ENSG00000250510_0 (sequence is synthesized)
agccggcaggcagcgggagcccgagagagccgcgtcgggagtgcggtctccatggcagtgctgggcgcagccggagagagcctgtccagggggctgagccccacccccaaatccctgggg

SEQ ID NO: 780169 - DNA, 120 bp, Artificial Sequence
  ENSG00000250510_1 (sequence is synthesized)
catccagaagattcctgactggtcaagaaccagaggcaaaagagacctggaagtcccagcatggggaccagaaccccccagccagcctcatagttgggaaagtagccagcttgcctgccc

SEQ ID NO: 780170 - DNA, 120 bp, Artificial Sequence
  ENSG00000250510_2 (sequence is synthesized)
catcaattgcagggatgcttaaggaaggccccgcccagtatgaaagctgaggattgcctctgctgaccctcagtctcctcccctgccctctacatctgccctcagctgggtccatcatgc

SEQ ID NO: 780171 - DNA, 120 bp, Artificial Sequence
  ENSG00000250510_3 (sequence is synthesized)
aatgctgagcactggggtgagcctgggggcagcctgcctgctgacagggcgaggattgtggggatcatgggagtgtttgtgagtggggctcctgggtgagacctagcccccacccccaca

SEQ ID NO: 780172 - DNA, 120 bp, Artificial Sequence
  ENSG00000250510_4 (sequence is synthesized)
gagctcaagggggtggggggctgaggataggatggctcggggcggggcgggggcagaggaggcctccctgcgctccaacgcattgtcctggctggcctgtgggctcctggcgctgctggc

SEQ ID NO: 780173 - DNA, 120 bp, Artificial Sequence
  ENSG00000250510_5 (sequence is synthesized)
caatgcctggatcatcctcagcatctcggccaagcagcagaagcacaagccactggagctgctgctctgcttcctagcgggcacacacatactcatggcagctgtgcccctcaccacctt

SEQ ID NO: 780174 - DNA, 120 bp, Artificial Sequence
  ENSG00000250510_6 (sequence is synthesized)
tgccgtggtgcagctgcgtcgtcaggcttcctccgactatgactggaacgagagtatctgcaaggtcttcgtgtccacctactacaccctggcgctggccacctgcttcacggtcgcctc

SEQ ID NO: 780175 - DNA, 120 bp, Artificial Sequence
  ENSG00000250510_7 (sequence is synthesized)
cctctcctaccatcgcatgtggatggtgcgctggcccgtcaactaccgcctcagcaacgccaagaagcaggcactgcatgccgtcatgggcatctggatggtcagcttcatcctctccac

SEQ ID NO: 780176 - DNA, 120 bp, Artificial Sequence
  ENSG00000250510_8 (sequence is synthesized)
actgccctccattggctggcacaacaacggcgagcgctactatgcccgcggctgccagttcatagtctccaagatcggcctcggctttggcgtttgcttcagcctcttgctacttggggg

SEQ ID NO: 780177 - DNA, 120 bp, Artificial Sequence
  ENSG00000250510_9 (sequence is synthesized)
aattgtcatgggtctggtctgtgtggccatcaccttctaccagacactgtgggcccggccccggagggctcggcaggcccggagagtggggggtggtggggggaccaaagcgggtgggcc

SEQ ID NO: 780178 - DNA, 120 bp, Artificial Sequence
  ENSG00000250510_10 (sequence is synthesized)
ctgccaagacatccctgcaggtcaccaacttggtcagcgccatcgtctttctctatgactcactcacaggggtgcccatcttggtggtgagcttcttctccctcaagtcggactcggcgc

SEQ ID NO: 780179 - DNA, 120 bp, Artificial Sequence
  ENSG00000250510_11 (sequence is synthesized)
ccccctggatggtgctggctgtgctgtggtgctccatggcacagacgctgctgctgccctccttcatctggtcctgcgagcgctaccgcgccgacgtgcgcacagtgtgggagcaatgcg

SEQ ID NO: 780180 - DNA, 120 bp, Artificial Sequence
  ENSG00000250510_12 (sequence is synthesized)
tggccatcatgtctgaggaggatggagatgacgatgggggctgtgacgactatgcagagggccgagtttgcaaagttcgctttgatgctaacggagccacaggaccagggagccgggacc

SEQ ID NO: 780181 - DNA, 120 bp, Artificial Sequence
  ENSG00000250510_13 (sequence is synthesized)
ccgcccaggtgaagctgctgcctggaaggcacatgctcttccctcctcttgagagagtccactacttacaggtccccctatcccggcgtctgtcccatgatgagacaaacatcttctcta

SEQ ID NO: 780182 - DNA, 120 bp, Artificial Sequence
  ENSG00000250510_14 (sequence is synthesized)
cccctcgggaaccaggctccttcctgcacaagtggtcatcctctgatgacatccgggtcctcccagcccagagccgggccctcgggggtcctcctgagtacctgggacaaagacacaggt

SEQ ID NO: 780183 - DNA, 120 bp, Artificial Sequence
  ENSG00000250510_15 (sequence is synthesized)
tggaggacgaggaggacgaggaagaggctgaaggtggggggctggccagccttcgccaattcttggagagtggggttctggggtcaggtgggggacccccacggggtcctggcttcttcc

SEQ ID NO: 780184 - DNA, 120 bp, Artificial Sequence
  ENSG00000250510_16 (sequence is synthesized)
gggaggagatcaccaccttcatcgatgagacacctctgccttctccgactgcctcaccagggcactctcctcgtcggccccggccactgggcctctcaccccgccgactctcccttgggt

SEQ ID NO: 780185 - DNA, 120 bp, Artificial Sequence
  ENSG00000250510_17 (sequence is synthesized)
cccctgagagcagagccgttggacttcctttgggactaagcgcagggagacgctgctccctgacggggggtgaagaaagtgcaagggcttggggaggatcctggggcccaggcaacccca

SEQ ID NO: 780186 - DNA, 120 bp, Artificial Sequence
  ENSG00000250510_18 (sequence is synthesized)
tctttccccagctgaccctgtgagcccaagcaggcctgctgaactcagaggagaaagcctgagtgagtaacacctcattctggccgagagtagggcagctgcctccagactctggggaga

SEQ ID NO: 780187 - DNA, 120 bp, Artificial Sequence
  ENSG00000250510_19 (sequence is synthesized)
cgggcgctagatttggggctcagaaggccctgctctctcccatccaagtgaccagatgccctactcagcttccatcacccctagcaatatgtattaaagtctgaagtgttgccatggaaa

SEQ ID NO: 780188 - DNA, 120 bp, Artificial Sequence
  ENSG00000250510_20 (sequence is synthesized)
ttacagttgaagaagctggatctggcagctgcggcagcacacaccttctttgtagcaaaccccatgcacctgcagatgcgggaggacatggctaagtacagacgaatgtcgggagttcgg

SEQ ID NO: 780189 - DNA, 120 bp, Artificial Sequence
  ENSG00000250510_21 (sequence is synthesized)
aaagctgtcctgccttccctctggcctgggctcactggcaggacgaccccgggagagagggtcctggagagtgagaggggcagagaccgagtgagccgtgggctgagcctgggaggccgg

SEQ ID NO: 780190 - DNA, 120 bp, Artificial Sequence
  ENSG00000250510_22 (sequence is synthesized)
agcatcatcacctgacctccaacttcatcagccatacagcagctccgtcatctctcctccagttccatcatccatcttcctctcctctgtccatcccccactccatttgtggcccccatc

SEQ ID NO: 780191 - DNA, 120 bp, Artificial Sequence
  ENSG00000250510_23 (sequence is synthesized)
ttgatcatctgtcttttagttcccactaccctgtttaccccagctccagcatctgcttcagttcccactcctcagctccatcaccgtccttcagttccacgacctgtcctccagctccgt

SEQ ID NO: 780192 - DNA, 120 bp, Artificial Sequence
  ENSG00000250510_24 (sequence is synthesized)
catccatcctgcagctccacggttcagccgcagacctctcatccagccgctgggctccactctccattccctccttccctcgggctgccacatggtctctgagcactcttggctggaaat

SEQ ID NO: 780193 - DNA, 120 bp, Artificial Sequence
  ENSG00000250565_0 (sequence is synthesized)
ggagaggagggtcaccaactccaggcagggctgctaagtttattacaaacaggcaagactagaatatgtttccactttagtgagtggaaacctaatcattcataggtatcctgtacacac

SEQ ID NO: 780194 - DNA, 120 bp, Artificial Sequence
  ENSG00000250565_1 (sequence is synthesized)
agaacaactatgatgaagagtgaggcctaaatcagaggagacgaggacaataatagtagtagtggtcatgatgataataataactaccagacatgaagattaaccatgcctaacattgtg

SEQ ID NO: 780195 - DNA, 120 bp, Artificial Sequence
  ENSG00000250565_2 (sequence is synthesized)
ttaaacgtctcacttctttcatttaatccttacaataatccaatgatgtagctgctattatttttattatacagatgaagaaactgagggcttgaggggtatactgctttgccaaagtcg

SEQ ID NO: 780196 - DNA, 120 bp, Artificial Sequence
  ENSG00000250565_3 (sequence is synthesized)
tacaaatggtaagtgcagaaccaggatctgaattccgtcagtctgactgcagagtccacgccgacaccgtggaagctggtgatgcccattaggccctgtctgggcatgaagaggatgccc

SEQ ID NO: 780197 - DNA, 120 bp, Artificial Sequence
  ENSG00000250565_4 (sequence is synthesized)
tccctcatgagctggaacacagcatcccctgttgtgggtgtggctctcttaaagaccatctggtgaattttgcttgtgctggtttcttattaaacaaccttcagatttggcttcacgtgc

SEQ ID NO: 780198 - DNA, 120 bp, Artificial Sequence
  ENSG00000250565_5 (sequence is synthesized)
aactcacatagagggaaaggagaccatgatccgccaacatgacagctgtatttttcattagtaaattagcaaactggctgcctgggtcaccatgcatacctgttaaggtgagcccgcccc

SEQ ID NO: 780199 - DNA, 120 bp, Artificial Sequence
  ENSG00000250565_6 (sequence is synthesized)
agagctaaaggctaccatgtgccaacttaactgagattctgagtgtgcaaggataacccccgtcatggccccgggtgccaaggaaatcccttttagcctcctcttggcagacttggccag

SEQ ID NO: 780200 - DNA, 120 bp, Artificial Sequence
  ENSG00000250565_7 (sequence is synthesized)
ccttccccagtgacagcctggctctttggattcaagctgcctggtcagactgcaagggtcatctgtacaaagaaggaagcaacagtgccaggttccagcgtgcgttccaagttccacatt

SEQ ID NO: 780201 - DNA, 120 bp, Artificial Sequence
  ENSG00000250565_8 (sequence is synthesized)
aagtggaactccagagacactcctgaaattgtcctaagtcaaaggagccaaacggtgtacgagctccctctctgccgtcccctctgagagcagccatggccctgagtgatgtcgatgtga

SEQ ID NO: 780202 - DNA, 120 bp, Artificial Sequence
  ENSG00000250565_9 (sequence is synthesized)
aaaagcagattaagcacatgatggctttcattgagcaggaagccaatgagaaagcagaggaaatcgatgccaaggctgaggaagagtttaacattgagaaaggacgcctcgtgcaaaccc

SEQ ID NO: 780203 - DNA, 120 bp, Artificial Sequence
  ENSG00000250565_10 (sequence is synthesized)
aacgactgaagattatggagtattatgagaaaaaggagaagcagatagagcagcagaagaaaatcctgatgtccaccatgaggaatcaggcgaggctgaaagtcctgagagcccgaaatg

SEQ ID NO: 780204 - DNA, 120 bp, Artificial Sequence
  ENSG00000250565_11 (sequence is synthesized)
acctcatctcagatttgctcagtgaggcgaagctgagactcagcaggattgtggaggacccagaggtctaccaggggctgctggataaactggtgctccagggtctgctccgactgctgg

SEQ ID NO: 780205 - DNA, 120 bp, Artificial Sequence
  ENSG00000250565_12 (sequence is synthesized)
aacctgtgatgattgtacgctgccggccacaagacctcctcctggtggaggctgctgtacaaaaagccatccccgagtacatgacaatttcccagaaacatgtggaggtccagattgata

SEQ ID NO: 780206 - DNA, 120 bp, Artificial Sequence
  ENSG00000250565_13 (sequence is synthesized)
aagaggcatacctggctgtgaatgcagctggaggtgtggaggtctacagtggcaatcagagaataaaggtttcaaataccttggaaagccgactggatctctcagccaagcaaaagatgc

SEQ ID NO: 780207 - DNA, 120 bp, Artificial Sequence
  ENSG00000250565_14 (sequence is synthesized)
cagaaatacgaatggccttgtttggtgctaacaccaacagaaagttctttatataagcctctgggaagtgaagctagtgttgaaccactaaaccataaaagtttaagttttttggggaaa

SEQ ID NO: 780208 - DNA, 120 bp, Artificial Sequence
  ENSG00000250565_15 (sequence is synthesized)
ggaaactagtagtgtttcctcctctttgatgctctgatactgttctgtttttcttcacgaaataccctttggatagctaaagtgttaactttgaaataaagcccaaattaatgctcagaa

SEQ ID NO: 780209 - DNA, 120 bp, Artificial Sequence
  ENSG00000250565_16 (sequence is synthesized)
cacccgagccccactccctgcgagggccgcgcggaggggcgcgcaggaggaggaggagccgaggaccgcggaggggaggaggggagtcgcctggggagccgagggctcctcgcgcaagtg

SEQ ID NO: 780210 - DNA, 120 bp, Artificial Sequence
  ENSG00000250565_17 (sequence is synthesized)
agtcgcctggggagccgagggctcctcgcgcaagtgcccgcagcgcccggaagcgtccaaaggccccgatgctgggagaagacgtggaggcctctcggggaaccacgacgacctccacga

SEQ ID NO: 780211 - DNA, 120 bp, Artificial Sequence
  ENSG00000250565_18 (sequence is synthesized)
tgacgcaatagtcatgccaaattatacatgcatatttcacctccacccggaaggccagagccatcctctcggcctctaagtgcacaacggaactagaaatcaaggaggagagaccaaaag

SEQ ID NO: 780212 - DNA, 120 bp, Artificial Sequence
  ENSG00000250565_19 (sequence is synthesized)
ggaggcctgaactctcaaactccgaatctgatttccactctcccaggaagtcttcggaaatcactgtggattgtcaatacaggagtccatactgactgaatccctaattttggcctgtat

SEQ ID NO: 780213 - DNA, 120 bp, Artificial Sequence
  ENSG00000250565_20 (sequence is synthesized)
tcttctccctctgtgaaccatcttcttagaagtcactgaaccaagagtgccagaaaaccatcccaagactcacacagagttgttcttccatagtggatgttttggccactggacatcaga

SEQ ID NO: 780214 - DNA, 120 bp, Artificial Sequence
  ENSG00000250565_21 (sequence is synthesized)
agggaagaaaactgagacctagaaaggtgaagcggttgtcccaaaggcttccagctgctcccagtactcaaggacttggagcacacttggggaaatgctcactgttgtattcccgttcct

SEQ ID NO: 780215 - DNA, 120 bp, Artificial Sequence
  ENSG00000250565_22 (sequence is synthesized)
cttggagacacccaatgcaggtctctgctggctgagtgcactggcttgtggctggaggtgagtgctcaggaccacagagggataaagaacctctataactcaacaacaacaaaaaaacaa

SEQ ID NO: 780216 - DNA, 120 bp, Artificial Sequence
  ENSG00000250565_23 (sequence is synthesized)
ctggaagcaaaatggttgcaccaagtccaggcatcaccatccatataccatgttttccagaaggaaagagagcttctcttgacccactcattgaacaaagtcttgaacttcttctgatta

SEQ ID NO: 780217 - DNA, 120 bp, Artificial Sequence
  ENSG00000250565_24 (sequence is synthesized)
ggtggcggtccttgagctggaaagcaggaaccctggcttattgcgtggtcccccccaccaccaccaccccacgccttccgtagcacgagctttaatcatttactatgaaaccggtaacta

SEQ ID NO: 780218 - DNA, 120 bp, Artificial Sequence
  ENSG00000250565_25 (sequence is synthesized)
agggagatacagcgtgttgaaccactgaagcacgcccctccacacacacaccagccagaaaaaggataccccgtcggctccggacccggcaaatgtacctgggctccccctggaggccac

SEQ ID NO: 780219 - DNA, 120 bp, Artificial Sequence
  ENSG00000250565_26 (sequence is synthesized)
attctccgaggtcgcctttcggtccccaatgttcctcaaaggtattccgttgtaatcccggagaactgatacacactagtgctctgaaacttggcctgtgctcgaggcggcaacccctgc

SEQ ID NO: 780220 - DNA, 120 bp, Artificial Sequence
  ENSG00000250565_27 (sequence is synthesized)
ccggaacacacccatctggccaggtcctgttcactggccaagaatgcagcattgaacactgggcattggggcgggggtgcactctgcgctgacaccgcacccctcccctcaacttgctga

SEQ ID NO: 780221 - DNA, 120 bp, Artificial Sequence
  ENSG00000250565_28 (sequence is synthesized)
aaagaatatcccttccttatagaagctgaaattacagactcttgctttccttgtcagacttaaaagctagtgtagccagagttaaatacagggcacattgtctctggaggctgcagcttt

SEQ ID NO: 780222 - DNA, 120 bp, Artificial Sequence
  ENSG00000250565_29 (sequence is synthesized)
agtggtgggtacacagttcagttcctgacccaggaagtggcacatcagggcaggcagtggtgttggttgtggtataattgagttcctggttcagaagtgacaactgtacacatgagttgt

SEQ ID NO: 780223 - DNA, 120 bp, Artificial Sequence
  ENSG00000250565_30 (sequence is synthesized)
cctgagtcatgtgtcggacactgtttctatcttgagcagcttctctagcctttctaaatcctgtgacctgcctgtgatccttttaagatttctttctgtttaatcagccacaaacagctt

SEQ ID NO: 780224 - DNA, 120 bp, Artificial Sequence
  ENSG00000250565_31 (sequence is synthesized)
ctgttgcttgcaacccaggctcctgagaagagactggagaagcagatcactttattaatgtgcttcatgtagagggagtagagatttccacctctaccatacccaaataactggtattgg

SEQ ID NO: 780225 - DNA, 120 bp, Artificial Sequence
  ENSG00000250565_32 (sequence is synthesized)
ctgtacctttctaatgtgagcaactttaaaattgaacagaatatatgaaacctctcttttcagacattgaacagcatgtagcacagcaccgtgattcctgaaagtagggaacaaatgggg

SEQ ID NO: 780226 - DNA, 120 bp, Artificial Sequence
  ENSG00000250565_33 (sequence is synthesized)
caaaccctatcactctaactttctgctgaaaaatgctgtctaaattgcagcacaatgagggggaacccaagcagagcatagtggtcttgctgagttgaggagatagttgagcagactttt

SEQ ID NO: 780227 - DNA, 120 bp, Artificial Sequence
  ENSG00000250565_34 (sequence is synthesized)
caaggcagagtatcagaaaggagagaatataacagcaaaacaggctcctggaatccctgtgaatctgttgctgaatactaagctgcacatgcataaggtgaaacttcacagtgcgatgca

SEQ ID NO: 780228 - DNA, 120 bp, Artificial Sequence
  ENSG00000250565_35 (sequence is synthesized)
aagaactactgcggagctgtgagctgattggttcccagggctcactgggcaatgtttgagtttcaactcgccaatgtgaagaaaccttgctgactgtccagggaattcagtagaaatccc

SEQ ID NO: 780229 - DNA, 120 bp, Artificial Sequence
  ENSG00000250565_36 (sequence is synthesized)
aaaagggtaaggcattaggagaagggctaactaagccgaaaagtgaggtaactctagacttcctccaacaaggtttagaaagcagcctcaaaaagaggaagttcatccgctactaccgta

SEQ ID NO: 780230 - DNA, 120 bp, Artificial Sequence
  ENSG00000250565_37 (sequence is synthesized)
actgccagccaaaacaaattttaccatttttaaaacaacaaaatacagacatttaacaacattaaattcagaatgttaaaaatactagatatgcaaataagtaggcaaatagaacccaaa

SEQ ID NO: 780231 - DNA, 120 bp, Artificial Sequence
  ENSG00000250565_38 (sequence is synthesized)
atcaggagaaaaatcatttaatagaaacaaaccccaaaatgacagagataataacgttagcagacaaggacttaaaaaattaaaataaaacaaggatttaaaggaaaacatgaacatagt

SEQ ID NO: 780232 - DNA, 120 bp, Artificial Sequence
  ENSG00000250565_39 (sequence is synthesized)
gaagaaaaaactggaagatatagaaaataaccaaatggaacttctggagctaaaaaatacaacacctgtaatgaataattcagtggctgaacttaacagtaggttagacattgtggaatg

SEQ ID NO: 780233 - DNA, 120 bp, Artificial Sequence
  ENSG00000250571_0 (sequence is synthesized)
acttccgtccggcgcgcggcgtcctcctcccgctcggaaggtcccaggtgtgacaccttcagcaggtctcagggaagatggcagccctaggggacattcaggagtccccttctgtcccgt

SEQ ID NO: 780234 - DNA, 120 bp, Artificial Sequence
  ENSG00000250571_1 (sequence is synthesized)
cccctgtcagtctctcatcaccggggacacctggaacccagcaccacgagcctcagcttcacctccatgggcatcaacatggctcccctggctccagccctaaggtgctctcccagccgt

SEQ ID NO: 780235 - DNA, 120 bp, Artificial Sequence
  ENSG00000250571_2 (sequence is synthesized)
ccgacctggatctccaagacgtagaggaagtggagatcggcagagacaccttctggcccgactccgagcccaagccggagcaggctccacgctctcctggctctcaggcccctgacgagg

SEQ ID NO: 780236 - DNA, 120 bp, Artificial Sequence
  ENSG00000250571_3 (sequence is synthesized)
tctcctggctctcaggcccctgacgagggggcgggcggggcgctgcgcagcctcctgaggagccttccccgcagggcccggtgcagcgccggcttcgggcctgaatccagcgcggagcgg

SEQ ID NO: 780237 - DNA, 120 bp, Artificial Sequence
  ENSG00000250571_4 (sequence is synthesized)
cttgcgcccagccgcggggcgcctggcgcgtgacgctcgtgcagcaagcagcggccgggcccgagggtgcgcccgagcgggctgccgagctgggagtcaacttcggtcggagccggcagg

SEQ ID NO: 780238 - DNA, 120 bp, Artificial Sequence
  ENSG00000250571_5 (sequence is synthesized)
ccaagccgcacaggtgcgaggcctgcggcaagagtttcaagtataactcgctgctcctgaagcaccagcgcatccacacgggcgagaagccctacgcctgccacgagtgcggcaagcgct

SEQ ID NO: 780239 - DNA, 120 bp, Artificial Sequence
  ENSG00000250571_6 (sequence is synthesized)
tccgcggctggtcgggcttcatccagcaccaccgcatccacacgggcgagaagccctacgagtgcggccagtgcggccgcgccttcagccacagctcgcacttcacgcagcacctgcgca

SEQ ID NO: 780240 - DNA, 120 bp, Artificial Sequence
  ENSG00000250571_7 (sequence is synthesized)
tccacaacggcgagaagccctacaagtgcggcgagtgcggccaggccttcagccagagctccaacctggtgcgccaccagcggctgcacacgggtgagaagccctacgcctgcagccagt

SEQ ID NO: 780241 - DNA, 120 bp, Artificial Sequence
  ENSG00000250571_8 (sequence is synthesized)
gcggcaaggccttcatctggagctccgtgctcatcgagcaccagcgcatccacactggcgagaagccctacgagtgctccgactgcggcaaagccttccgcggccgctcgcacttcttcc

SEQ ID NO: 780242 - DNA, 120 bp, Artificial Sequence
  ENSG00000250571_9 (sequence is synthesized)
ggcacctgcggacccacacgggcgagaagcccttcgcgtgtggcgcctgcggcaaggccttcggccagagctcccagctcatccagcaccagcgggtgcactaccgcgagtagccgggcg

SEQ ID NO: 780243 - DNA, 120 bp, Artificial Sequence
  ENSG00000250571_10 (sequence is synthesized)
ggggctcggggctcggcctcctacctgcccccaacccaccctccaccccgtcccccacggtgggcactgcccagcaccgcatgccacgtgtccggaataaattctttttgattgttggaa

SEQ ID NO: 780244 - DNA, 120 bp, Artificial Sequence
  ENSG00000250571_11 (sequence is synthesized)
tgtctcaggtgatgtcctcaccgccccctctgtaggagcatggcgctggagcctgccctgtatttggccatctgtggaacaagccagctcccctggctgccaggggatggtgacatggtg

SEQ ID NO: 780245 - DNA, 120 bp, Artificial Sequence
  ENSG00000250571_12 (sequence is synthesized)
cccccaggcctgtctccacaatggggagggtatccgaaagacccaaagatggtttgggacccccacatcctgctttggggcagccaagcagttctggaccctcggctctcgaggaaggga

SEQ ID NO: 780246 - DNA, 120 bp, Artificial Sequence
  ENSG00000250571_13 (sequence is synthesized)
gctgaaggggaatgagctcccaatgctggcccctggaggaggaggctcttgaaccgagctgggaaggaaggtaaagggcattcgtggctagagaagcccaagcagcgggcctgctgttgg

SEQ ID NO: 780247 - DNA, 120 bp, Artificial Sequence
  ENSG00000250571_14 (sequence is synthesized)
gattgggagggccaggaggtgtcctgtgtcagggccacagcccgggagcacgtggcggtcagagaggagcggaggcagtggtccagagggtggaggtgagccccagcctccctgaccccc

SEQ ID NO: 780248 - DNA, 120 bp, Artificial Sequence
  ENSG00000250571_15 (sequence is synthesized)
ccagtggccccacgtggactcctgccggccccagctggacacagtgaatcaggaactcctccctcccctccacctgccttgggctggggcttctggctcagggcaccactgtccccccag

SEQ ID NO: 780249 - DNA, 120 bp, Artificial Sequence
  ENSG00000250571_16 (sequence is synthesized)
ccacgagttatcctgtgtcccctcctcctcctgcatcccctagatggcctcccctcagcctggttggagctgtgtccaggtcccctgcacctcccccttgagaagctcccagggttccct

SEQ ID NO: 780250 - DNA, 120 bp, Artificial Sequence
  ENSG00000250571_17 (sequence is synthesized)
ctgggcgatgttagtgatatggctggatttaacagtgctgagccctcgcccacatctgggcggccctggggtggggagcaggtgtctgaggtcaggtccctggaaagagaccctgggcca

SEQ ID NO: 780251 - DNA, 120 bp, Artificial Sequence
  ENSG00000250571_18 (sequence is synthesized)
gagatttgcgtgggaagctcctggggtgggcatgggagctgggcggcagcacacttgccaccgaggcctggggcagccccatgaggagctgtgcccatatggaccacatcctcggcaagg

SEQ ID NO: 780252 - DNA, 120 bp, Artificial Sequence
  ENSG00000250571_19 (sequence is synthesized)
gctttgaggcgccctctggagctctggcgtcccccaggctccgggtcctcaccaacacttagtgcttcctcctggctaagggtgaccccatggtctgtcttgccactgtggctccgtgca

SEQ ID NO: 780253 - DNA, 120 bp, Artificial Sequence
  ENSG00000250571_20 (sequence is synthesized)
ccggcacggccgccgtggtgactgtggatggtcccagcagctctgggtcaccctgcaacgccccccacccctgtgtctatgtcagctctcctgggcacggcactccgagcccctgtccgc

SEQ ID NO: 780254 - DNA, 120 bp, Artificial Sequence
  ENSG00000250571_21 (sequence is synthesized)
tctggcccgatggcctcccctcagcctggttggagctgtgtccaggtcccctgcacctcccccttgagaagctcccagggttccctctgggcgatgttagtgatatggctggatttaaca

SEQ ID NO: 780255 - DNA, 120 bp, Artificial Sequence
  ENSG00000250571_22 (sequence is synthesized)
ctctgcgcgtgccaggctcctcacaatgcccacctctgtggcacccccaatgctggcaccacccccttcctggggccccttttcttccctggcatcagctcacctctgccccgtggcccc

SEQ ID NO: 780256 - DNA, 120 bp, Artificial Sequence
  ENSG00000250673_0 (sequence is synthesized)
gttggatttggacactgaggaacagttcctggagatgctgaggattagtggtagcagctgttattctccccattagaggaaaaactgaaaggagaagaaaatacttatgtttaagggatg

SEQ ID NO: 780257 - DNA, 120 bp, Artificial Sequence
  ENSG00000250673_1 (sequence is synthesized)
tgtttgcaactctgcgggaggaagccattctatcaagcctgaagaaaactgtgttcctaggatgaggatgcaggctgccctcgtgggctgggcttgtaccaccctctgcctggcttcctg

SEQ ID NO: 780258 - DNA, 120 bp, Artificial Sequence
  ENSG00000250673_2 (sequence is synthesized)
ctcatctgccttttcccatggtgccagcacggtggcctgtgatgacatgcagcccaagcacatccaagcccagcctcagcaccaggacagccaccacatcaccatccacacccacaggac

SEQ ID NO: 780259 - DNA, 120 bp, Artificial Sequence
  ENSG00000250673_3 (sequence is synthesized)
ttcctatgcaccaggtgacaagattccagtgacagtgagaagcagtcgtgatttcatgggatttctccttcaggctcgaagagtgtccgatcatcaaatcgctggcactttcgttctcat

SEQ ID NO: 780260 - DNA, 120 bp, Artificial Sequence
  ENSG00000250673_4 (sequence is synthesized)
tcctcctcattccaaactgatgacttgttttcaagaggctgatgcagtcacccactctgacaagtccctgaagagaaacctgtcattcgtgtggaaggccccagcccagcctgtggggga

SEQ ID NO: 780261 - DNA, 120 bp, Artificial Sequence
  ENSG00000250673_5 (sequence is synthesized)
cattaagttccttttatcagtagtccagtcatattttgtttactgggcaaggattgaatcatctgttgtgtctcaacagacacatagcagcgcccattctgacgaccgcatggagcccag

SEQ ID NO: 780262 - DNA, 120 bp, Artificial Sequence
  ENSG00000250673_6 (sequence is synthesized)
attgctgatgccaaaccttcaccagaggctgggcgatgttgaaggagctgctccagctcccaggacccccatcactcttccacagcagcacacacatgtctttgctgttgcccttcctgg

SEQ ID NO: 780263 - DNA, 120 bp, Artificial Sequence
  ENSG00000250673_7 (sequence is synthesized)
agctgcagaggaggacaacctagatcctgttcctgccagtatttgggtgacaaagtttcctggggatgcagagactctgtcccaaccatcttcacacacagccactgaaggcagcatcaa

SEQ ID NO: 780264 - DNA, 120 bp, Artificial Sequence
  ENSG00000250673_8 (sequence is synthesized)
ctcctcagagagctttgcttccagccttagcacccatcacagaactcaggatgatcccagctttgattcactggaaacttgcctgtcctcagatgggggtgaacaggacaagacgaaggc

SEQ ID NO: 780265 - DNA, 120 bp, Artificial Sequence
  ENSG00000250673_9 (sequence is synthesized)
ctctaacaggaccgtgacacagcctcctctgtccaccgtccagcttacctatccccagtgcctctggtcctctgaaactttcacagggaatggggtcagggcaagcaacccaatccctgt

SEQ ID NO: 780266 - DNA, 120 bp, Artificial Sequence
  ENSG00000250673_10 (sequence is synthesized)
cctccagacctctggcacttctgggctacctgctgctggtgaccagtcagaggcatccagggcctctgccagcttcttacctcagtcaaagcacaaggagctcagagcagggaagggaaa

SEQ ID NO: 780267 - DNA, 120 bp, Artificial Sequence
  ENSG00000250673_11 (sequence is synthesized)
tggagagggtggagtgggataccctcggcagaccaacccacggcctgacattgggctagagggagcccaggcccctctgggtatccagctcagaactcctcagctgggaattctgctttg

SEQ ID NO: 780268 - DNA, 120 bp, Artificial Sequence
  ENSG00000250673_12 (sequence is synthesized)
cctgtcagccaccctgggcatggccctggccgctggccttcgctacctgcacacccagtattgccaccagcagacagaagtgtctttcagtgagcccgcttcggatgctgttgccaggag

SEQ ID NO: 780269 - DNA, 120 bp, Artificial Sequence
  ENSG00000250673_13 (sequence is synthesized)
caacagtggtgagactgtgcacgtcaggaagattggggagaacagttttgttttggttcaagcagagtacaactggatcactccttctgtgggtagcaagaaaacagtcctctgagaaga

SEQ ID NO: 780270 - DNA, 120 bp, Artificial Sequence
  ENSG00000250673_14 (sequence is synthesized)
ctgtcaccccagacctctcagtggccctccttgggccctggagagtgtcccagacagagcagagataatgagaataactgatgaagacagggactcattgtgcctctgtcaatgtgcagt

SEQ ID NO: 780271 - DNA, 120 bp, Artificial Sequence
  ENSG00000250673_15 (sequence is synthesized)
tagtggaggaacccgggagaggacactttcatcaacagagggagttattcctgagctttgttgtcttaacatctgtaattgggcttccttctttctttttgcaattagacgttctgtttg

SEQ ID NO: 780272 - DNA, 120 bp, Artificial Sequence
  ENSG00000250673_16 (sequence is synthesized)
aagacttaaactcaacacaatgaatattgtataacccgctcattaactagacccctgtggccactaagcttcctctgttgtggtaaggaagccatagaaataaaaatactgtccctcctt

SEQ ID NO: 780273 - DNA, 120 bp, Artificial Sequence
  ENSG00000250673_17 (sequence is synthesized)
gccattctatcaagcctgaagaaaactgtgttcctagagacagggtcttgctctgtacccaggctggagtgtagtgatgtgatcataactcactgcagcctcgacctcctggattcaagt

SEQ ID NO: 780274 - DNA, 120 bp, Artificial Sequence
  ENSG00000250719_0 (sequence is synthesized)
tgtgcccatggggccatctcggcttgtccgtggccctcggccccagggcatgcgttccccctaccgcaggccaggtatgggctggcccaggccccgatttcccaggatgttcaagtgtag

SEQ ID NO: 780275 - DNA, 120 bp, Artificial Sequence
  ENSG00000250719_1 (sequence is synthesized)
ctgccagcagtgcagccatcaatcctgccaccagggccatgggtatcaacaacacccacactgacaccaccatagtgtggatcttcccacctcaagttctcagacatctcaggcaacctg

SEQ ID NO: 780276 - DNA, 120 bp, Artificial Sequence
  ENSG00000250719_2 (sequence is synthesized)
ggatttttctgatcctctagaagtgcccagaagctagcccagaagcttggtttgccctggacctgcatctcctaggggccgtgtgggtggtgaacaacaaatacagtcattctgctcaaa

SEQ ID NO: 780277 - DNA, 120 bp, Artificial Sequence
  ENSG00000250722_0 (sequence is synthesized)
acagacaggcaggtgcaggagacggggtgagcgcttttgggctctagccccatggcagcatctaggggtgtgttacaattaatgctcttttagcagttgctgttcgcggatggctaagtg

SEQ ID NO: 780278 - DNA, 120 bp, Artificial Sequence
  ENSG00000250722_1 (sequence is synthesized)
ttaaaccagctcagtggagagtcagggtggcagccttttacgccctgtcctcttggtacccgggtctttgtctagcatccaggaagaatcaggtcctacagacttgaaggatggtgaata

SEQ ID NO: 780279 - DNA, 120 bp, Artificial Sequence
  ENSG00000250722_2 (sequence is synthesized)
cagagattttattgaatgatggaggaggctttcagcaggatggatggggagctggaaagcggatggagtgagaagataatcttcccctggggtttggccatcccatggctgatctctctg

SEQ ID NO: 780280 - DNA, 120 bp, Artificial Sequence
  ENSG00000250722_3 (sequence is synthesized)
acagtccccagccgaactcctctcgatgttcagacactctttctcctctctcctctgccacactgctctgctgctcttctgctcatggagcctgaggacaaccccagcaatgtggagaag

SEQ ID NO: 780281 - DNA, 120 bp, Artificial Sequence
  ENSG00000250722_4 (sequence is synthesized)
cctggggcttgccctggctctctgtctcctcccatcgggaggaacagagagccaggaccaaagctccttatgtaagcaacccccagcctggagcataagagatcaagatccaatgctaaa

SEQ ID NO: 780282 - DNA, 120 bp, Artificial Sequence
  ENSG00000250722_5 (sequence is synthesized)
ctccaatggttcagtgactgtggttgctcttcttcaagccagctgatacctgtgcatactgcaggcatctaaattagaagacctgcgagtaaaactgaagaaagaaggatattctaatat

SEQ ID NO: 780283 - DNA, 120 bp, Artificial Sequence
  ENSG00000250722_6 (sequence is synthesized)
ttcttatattgttgttaatcatcaaggaatctcttctcgattaaaatacacacatcttaagaataaggtttcagagcatattcctgtttatcaacaagaagaaaaccaaacagatgtctg

SEQ ID NO: 780284 - DNA, 120 bp, Artificial Sequence
  ENSG00000250722_7 (sequence is synthesized)
gactcttttaaatggaagcaaagatgacttcctcatatatgatagatgtggccgtcttgtatatcatcttggtttgcctttttccttcctaactttcccatatgtagaagaagccattaa

SEQ ID NO: 780285 - DNA, 120 bp, Artificial Sequence
  ENSG00000250722_8 (sequence is synthesized)
gattgcttactgtgaaaagaaatgtggaaactgctctctcacgactctcaaagatgaagacttttgtaaacgtgtatctttggctactgtggataaaacagttgaaactccatcgcctca

SEQ ID NO: 780286 - DNA, 120 bp, Artificial Sequence
  ENSG00000250722_9 (sequence is synthesized)
gcagcagtgagctttcagagaatcagcaaccaggagcaccaaatgctcctactcatcctgctcctccaggccttcatcaccaccataagcacaagggtcagcataggcagggtcacccag

SEQ ID NO: 780287 - DNA, 120 bp, Artificial Sequence
  ENSG00000250722_10 (sequence is synthesized)
agaaccgagatatgccagcaagtgaagatttacaagatttacaaaagaagctctgtcgaaagagatgtataaatcaattactctgtaaattgcccacagattcagagttggctcctagga

SEQ ID NO: 780288 - DNA, 120 bp, Artificial Sequence
  ENSG00000250722_11 (sequence is synthesized)
gctgatgctgccattgtcgacatctgatatttgaaaaaacagggtctgcaatcacctgacagtgtaaagaaaacctcccatctttatgtagctgacagggacttcgggcagaggagaaca

SEQ ID NO: 780289 - DNA, 120 bp, Artificial Sequence
  ENSG00000250722_12 (sequence is synthesized)
taactgaatcttgtcagtgacgtttgcctccagctgcctgacaaataagtcagcagcttatacccacagaagccagtgccagttgacgctgaaagaatcaggcaaaaaagtgagaatgac

SEQ ID NO: 780290 - DNA, 120 bp, Artificial Sequence
  ENSG00000250722_13 (sequence is synthesized)
cttcaaactaaatatttaaaataggacatactccccaatttagtctagacacaatttcatttccagcatttttataaactaccaaattagtgaaccaaaaatagaaattagatttgtgca

SEQ ID NO: 780291 - DNA, 120 bp, Artificial Sequence
  ENSG00000250722_14 (sequence is synthesized)
aacatggagaaatctactgaattggcttccagattttaaattttatgtcatagaaatattgactcaaaccatattttttatgatggagcaactgaaaggtgattgcagcttttggttaat

SEQ ID NO: 780292 - DNA, 120 bp, Artificial Sequence
  ENSG00000250722_15 (sequence is synthesized)
atgtctttttttttctttttccagtgttctatttgctttaatgagaatagaaacgtaaactatgacctaggggtttctgttggataattagcagtttagaatggaggaagaacaacaaag

SEQ ID NO: 780293 - DNA, 120 bp, Artificial Sequence
  ENSG00000250722_16 (sequence is synthesized)
acatgctttccatttttttctttacttatctctcaaaacaatattactttgtcttttcaatcttctacttttaactaataaaataagtggattttgtattttaagatccagaaatactta

SEQ ID NO: 780294 - DNA, 120 bp, Artificial Sequence
  ENSG00000250722_17 (sequence is synthesized)
acacgtgaatattttgctaaaaaagcatatataactattttaaatatccatttatcttttgtatatctaagactcatcctgatttttactatcacacatgaataaagcctttgtatcttt

SEQ ID NO: 780295 - DNA, 120 bp, Artificial Sequence
  ENSG00000250722_18 (sequence is synthesized)
gttgtatcatactcttctaaaacttgagtggctgtcttaaaagatataaggggaaagataatattgtctgtctctatattgcttagtaagtatttccatagtcaatgatggtttaatagg

SEQ ID NO: 780296 - DNA, 120 bp, Artificial Sequence
  ENSG00000250722_19 (sequence is synthesized)
taaaccaaaccctataaacctgacctcctttatggttaatactattaagcaagaatgcagtacagaattggatacagtacggatttgtccaaataaattcaataaaaaccttaaagctga

SEQ ID NO: 780297 - DNA, 120 bp, Artificial Sequence
  ENSG00000250722_20 (sequence is synthesized)
caggagcatgacgagggagagaggtcatcgaggctggggtgagacatctgacttaccgtcaggagccacgtcagtgcctcataaaatccaatctccattcaggacaaccccagcaatgtg

SEQ ID NO: 780298 - DNA, 120 bp, Artificial Sequence
  ENSG00000250722_21 (sequence is synthesized)
tgataggtttgtacatacacacaaacacatcccaaatttaaaaataactgtttcgtatctatttatttacttcccatcacacataacaatcttctttactgttaaatacaatgccatatt

SEQ ID NO: 780299 - DNA, 120 bp, Artificial Sequence
  ENSG00000250722_22 (sequence is synthesized)
tcagtcttcatctcatataatctctctttaacatttagaagtaaaaatcactccttatttttgaaatactctcattttaaaaaatttctatgacactataccctgctggttttcctcata

SEQ ID NO: 780300 - DNA, 120 bp, Artificial Sequence
  ENSG00000250722_23 (sequence is synthesized)
tccttcctcttctttctcctcctccacacttcctcctcttccacctcctgatttttcttcctcccacattcttccttggtttattctgtatgtgtttgtgttattcagggctatacagct

SEQ ID NO: 780301 - DNA, 120 bp, Artificial Sequence
  ENSG00000250722_24 (sequence is synthesized)
ttctgcctattcacactctgcacattttacctgagcaatctcatctatcccttgattacaattaaaacacatattaggatgatcccatatatacaaagctgaaacacaatgactgaactc

SEQ ID NO: 780302 - DNA, 120 bp, Artificial Sequence
  ENSG00000250722_25 (sequence is synthesized)
cagacgagtctacttcctagacatattcacaaacatcttaaatttaattattcaaatctgtattgattatcttctcctaaaacatgcttatactttcacttttgtgtgatttttatatac

SEQ ID NO: 780303 - DNA, 120 bp, Artificial Sequence
  ENSG00000250722_26 (sequence is synthesized)
aacctattggaggcagatgcagccaaccactagggcatataatcctataattttcagaccctgcactcccagtcatcatccactattttgcaggacatcacaaaaaccatcaggtatggc

SEQ ID NO: 780304 - DNA, 120 bp, Artificial Sequence
  ENSG00000250722_27 (sequence is synthesized)
agccttgctgccatccaccccttcacaaaactgtgtgacaggaatgtattacttactccttccaccacacttcccacctcagtcagtaatcaaattctatgggttcttaatcctgagtat

SEQ ID NO: 780305 - DNA, 120 bp, Artificial Sequence
  ENSG00000250722_28 (sequence is synthesized)
atttatctcatatccgtaattattatctcaagttacttcctggtgaccactcctctagatttttccactaatctcttcacttgatttcttcttgttttgtatttaatagtaagtgattta

SEQ ID NO: 780306 - DNA, 120 bp, Artificial Sequence
  ENSG00000250722_29 (sequence is synthesized)
aaataatatatttgcttttgattattgccaaatagtttataaactctttattcacatttatttttttgaaatgactttgatttttgaaatgactttttaaaaagtaaggcatgtaaaaga

SEQ ID NO: 780307 - DNA, 120 bp, Artificial Sequence
  ENSG00000250722_30 (sequence is synthesized)
gttcaccattccaagaggaaaatacagaaaattgattatccccataaattggcatttcggttaaataaaaagaatgaccaatttgtatatcctgtacaattctaacctaattcttttgca

SEQ ID NO: 780308 - DNA, 120 bp, Artificial Sequence
  ENSG00000250722_31 (sequence is synthesized)
aatgaataaccatatcttctaattaattttaatctaaataataattttaaggctacatacctgaatttctgaactgtaaagtgagttaatcatttaagcatgatctgcacaaatctactt

SEQ ID NO: 780309 - DNA, 120 bp, Artificial Sequence
  ENSG00000250722_32 (sequence is synthesized)
ttgattctatgaacaaataaaacatttatattttgagggaatctcaattcatgcattatgccattataaacattcttagttggtgctttgttttttttgactctccggagtctggtgagc

SEQ ID NO: 780310 - DNA, 120 bp, Artificial Sequence
  ENSG00000250722_33 (sequence is synthesized)
cctacttggtcttacactaaatttttaaaaattcacatttcattcttttaggcctttaaacttctaatttttaggataacctaaaagtataaccctttgatagtcacataaaaccatata

SEQ ID NO: 780311 - DNA, 120 bp, Artificial Sequence
  ENSG00000250722_34 (sequence is synthesized)
gcattagatacatttttaaataaatgggctactggccaaggcttggagatgtttttgttatgtgatgatttcttgttgtgtcaaatttgtgctgccttagcagttatgacaagctcaagt

SEQ ID NO: 780312 - DNA, 120 bp, Artificial Sequence
  ENSG00000250722_35 (sequence is synthesized)
gattttcagagcctaatttataagttagcggtttgggcactggtagaatttataagtcagtcacaaaattgtattttaccaagtcacagtgatgacatttttgatattatatagtgacat

SEQ ID NO: 780313 - DNA, 120 bp, Artificial Sequence
  ENSG00000250722_36 (sequence is synthesized)
atctataacatttcaaaatactagtattagactaattatagtgttgctatgacctgacctggtgtgcagtacctgggagctcatttgtagctctcatccaaagaaatttagtaaaggcgt

SEQ ID NO: 780314 - DNA, 120 bp, Artificial Sequence
  ENSG00000250722_37 (sequence is synthesized)
gaaagggtcttagttatgaccattaaacctataatacctatcccagactgtatttgagtaggatcgtgatacagaaaatattatagtgacattgtatttgtcctttttcttagatgtggc

SEQ ID NO: 780315 - DNA, 120 bp, Artificial Sequence
  ENSG00000250722_38 (sequence is synthesized)
acaagttttaagtaattctaaaaatgaaagttttaaaatcttttacagcaatataaagaataggtgcagtatgggttagttaaaaataagaaggagagtttcacatagaaaattaaggaa

SEQ ID NO: 780316 - DNA, 120 bp, Artificial Sequence
  ENSG00000250722_39 (sequence is synthesized)
atacctgtgcatactgcaggcatctaagtaagacagtctttctgtggcttaaaataccttaaggggaaggctattaaatacacacacgcatatagacataaaataaaagtgtaaataatg

SEQ ID NO: 780317 - DNA, 120 bp, Artificial Sequence
  ENSG00000250722_40 (sequence is synthesized)
tattaagtcacacttttagaaaaactatgtgtttgcatagaacatattagaagagagaaactaggatgatacacaccaaaatgtttacagtgggtttcctagggttatggaaattttttc

SEQ ID NO: 780318 - DNA, 120 bp, Artificial Sequence
  ENSG00000250722_41 (sequence is synthesized)
ttctttttgtgcacctatattttataacttcctactaaatatgtattacttgtgtaatgaaaatgctctaaaatgtacttctgcaaatagaacagttacttcaatacaagaggcagagaa

SEQ ID NO: 780319 - DNA, 83 bp, Artificial Sequence
  ENSG00000250722_42 (sequence is synthesized)
tgtggagctgccagagtaaagcaaagagaaaggaagcaggcccgttggaagtggttgtctacttgcaatatgtgctctgggct

SEQ ID NO: 780320 - DNA, 120 bp, Artificial Sequence
  ENSG00000250782_0 (sequence is synthesized)
atggagaccggcaggcaaacaggtgtgtctgctgagatgttcgccataccccgaggtctgaagggctgcaacgaggatggaatccctgaggccctagatgggaacttggaagaacccagg

SEQ ID NO: 780321 - DNA, 120 bp, Artificial Sequence
  ENSG00000250782_1 (sequence is synthesized)
gagtgaggatgtcatggacctcacagtagttgacaatgaggcctcagcctcagctcctcctgcagccaaaagacagaaaacagataccaaaggccagaaggagaggaagcccagtgtgga

SEQ ID NO: 780322 - DNA, 120 bp, Artificial Sequence
  ENSG00000250782_2 (sequence is synthesized)
aaagcacttgttgcacgtctgatgtggtctatcactgggagatcggtgcctgagaacatggccattgccatggctggaatagccaaggtctttgttggagaggtggtggaagaggccctg

SEQ ID NO: 780323 - DNA, 120 bp, Artificial Sequence
  ENSG00000250782_3 (sequence is synthesized)
tgttggagaggtggtggaagaggccctggacatgtgtgagatgtggggagaaatgcccccattgcagcccatggatttaagggaggctgtttgcaggttaaagcccaagggcctcttccc

SEQ ID NO: 780324 - DNA, 90 bp, Artificial Sequence
  ENSG00000250799_0 (sequence is synthesized)
actcctcgaacgtgagaaccgtattttcaaatgtattcaataacactacagcgtttccaattttaagaggaagcaattgccacaaaatca

SEQ ID NO: 780325 - DNA, 120 bp, Artificial Sequence
  ENSG00000250799_1 (sequence is synthesized)
gcgtttccaattttaagaggaagcaattgccacaaaatcactgcccctggtctgggcaaggggcagttggtgaacttgctgcctccagagaaccttccctggtgtggaggcagccaggga

SEQ ID NO: 780326 - DNA, 120 bp, Artificial Sequence
  ENSG00000250799_2 (sequence is synthesized)
cccaggatgctccggacctgttacgtgctctgttcccaagctggtcccccctccaggggctggcagtccctgagctttgatggcggggccttccaccttaagggcacaggagagctgaca

SEQ ID NO: 780327 - DNA, 120 bp, Artificial Sequence
  ENSG00000250799_3 (sequence is synthesized)
cgggccttgctggttctccggctgtgtgcctggcccccactcgtcactcacgggctgttgctccaggcctggtctcggcgactcctgggctcccggctctcaggcgcatttctccgagca

SEQ ID NO: 780328 - DNA, 120 bp, Artificial Sequence
  ENSG00000250799_4 (sequence is synthesized)
tccgtctatgggcagtttgtggctggtgagacagcagaggaggtgaagggctgcgtgcagcagctgcggaccctcagcctccgaccactgctggcagtgcccactgaggaggagccggac

SEQ ID NO: 780329 - DNA, 120 bp, Artificial Sequence
  ENSG00000250799_5 (sequence is synthesized)
tctgctgccaagagtggtgaggcgtggtatgaggggaacctcggtgctatgctgcggtgtgtggacctgtcacggggcctcctggagccccccagcctggctgaggccagcctcatgcag

SEQ ID NO: 780330 - DNA, 120 bp, Artificial Sequence
  ENSG00000250799_6 (sequence is synthesized)
gggcagaacctccaggtctcctgcctcaatgctgagcagaaccagcacctccgggcctccctcagccgcctgcatcgggtggcacagtatgcccgggcccagcacgtgcggctcctggtg

SEQ ID NO: 780331 - DNA, 120 bp, Artificial Sequence
  ENSG00000250799_7 (sequence is synthesized)
gatgcggagtacacctcactgaaccctgcgctctcgctgctggtggctgccctggctgtgcgctggaacagcccgggtgaaggcgggccctgggtgtggaacacctaccaggcctgtcta

SEQ ID NO: 780332 - DNA, 120 bp, Artificial Sequence
  ENSG00000250799_8 (sequence is synthesized)
aaggacacattcgagcggctggggagggatgcagaggctgcgcacagggccggcctggccttcggagtgaagctggtacgaggtgcatatctggacaaggagagagcggtggcccagctc

SEQ ID NO: 780333 - DNA, 120 bp, Artificial Sequence
  ENSG00000250799_9 (sequence is synthesized)
catgggatggaagaccccactcagcctgactatgaggccaccagtcagagttacagccgctgcctggaactgatgctgacgcacgtggcccgccatggccccatgtgccacctcatggtg

SEQ ID NO: 780334 - DNA, 120 bp, Artificial Sequence
  ENSG00000250799_10 (sequence is synthesized)
gcttcccacaatgaggaatctgttcgccaggcaaccaagcgcatgtgggagctgggcattcctctggatgggactgtctgtttcggacaacttctgggcatgtgtgaccacgtctctcta

SEQ ID NO: 780335 - DNA, 120 bp, Artificial Sequence
  ENSG00000250799_11 (sequence is synthesized)
gcactggggcaggccggctatgtagtgtataagtccattccctatggctccttggaggaggtaatcccctacctgatccggagggcccaggagaaccggagcgtgcttcagggtgcccgc

SEQ ID NO: 780336 - DNA, 120 bp, Artificial Sequence
  ENSG00000250799_12 (sequence is synthesized)
agggaacaggagctgctcagccaagaactgtggcggcggctgctgccaggatgccgaaggataccccactagcacccctgagggggtcatgtggtcaataaaagtccttaggtgctgcct

SEQ ID NO: 780337 - DNA, 120 bp, Artificial Sequence
  ENSG00000250799_13 (sequence is synthesized)
ccttactccctcccagccagagcccttctcctattcccaaccaaggcccagcctccagatccttccagagagatctgtcattccagtgtctgtgggccttccaaggctgtgtctctgtgt

SEQ ID NO: 780338 - DNA, 120 bp, Artificial Sequence
  ENSG00000250799_14 (sequence is synthesized)
ctgccgtctgtcatttctgctggttcttgatcatggtgtattatttcttgtgtgttttgttatctttactgtgctgctcctcagggcctgacaccaggtaattaatgtttccttctgcca

SEQ ID NO: 780339 - DNA, 120 bp, Artificial Sequence
  ENSG00000250799_15 (sequence is synthesized)
ggtgctaagcagaacgaaatcactttatcctaaattcatagcttgaggtttcttgaaacaccccactggcacaaatttgagctgcaaatacataagggggttaacccatagccccaactt

SEQ ID NO: 780340 - DNA, 120 bp, Artificial Sequence
  ENSG00000250799_16 (sequence is synthesized)
gaaccagcacctccgggcctccctcagccgcctgcatcgggtggcacaggtaacccctcctgctgggatctggctccactgcccctgctggacacccggggccctgaccgtcgtctctgt

SEQ ID NO: 780341 - DNA, 120 bp, Artificial Sequence
  ENSG00000250799_17 (sequence is synthesized)
tgagggctccagggaactggctgggagtcactgggggaccttcaaggaatgcaaaggactggttattatgtatcattgagtttggaaatacttcaatgtttgaattactggagccgccat

SEQ ID NO: 780342 - DNA, 120 bp, Artificial Sequence
  ENSG00000250803_0 (sequence is synthesized)
atctttccttggtgccaaccatgcctgcatatcagggcagcattctatgatcccatggctctcacatcgacagaccacaacactaagccaacaatgatacggcgtccaccagcagttgtt

SEQ ID NO: 780343 - DNA, 120 bp, Artificial Sequence
  ENSG00000250803_1 (sequence is synthesized)
tgctacatttgtggtcgtgaatatggaacaaaatctattagcattcatgagccacaatgtctgaaaaaatggcataatgaaaacaacttgttgcctaaagagttaaggagaccagtacct

SEQ ID NO: 780344 - DNA, 120 bp, Artificial Sequence
  ENSG00000250803_2 (sequence is synthesized)
aaaaaaccagaagtcaggaccattactgccaaaggcttctatgatcttgatgctttaaatgaagctgcttggacaagtgcccacagccagttggttccctgtaatgtttgtgggcgtacc

SEQ ID NO: 780345 - DNA, 120 bp, Artificial Sequence
  ENSG00000250803_3 (sequence is synthesized)
ttcctgccagacagactgattgttcaccaacgatcttgtaaacccaaagccgccaagtaaagcccttttctctctactgaagtgttacagaaattaatccttttgaaagagattgggata

SEQ ID NO: 780346 - DNA, 120 bp, Artificial Sequence
  ENSG00000250803_4 (sequence is synthesized)
aagtgggaaggagaaaaaggagctgacgaggggaaacaaggaaaactggaattgaccaagggctggtctagccggggaggcccagttcagcgcttcggtgttgcaagcattgctcactat

SEQ ID NO: 780347 - DNA, 120 bp, Artificial Sequence
  ENSG00000250803_5 (sequence is synthesized)
tatgcagttgggcaaatgctctggttttaacaagcagctgcatgtgcataggcatgctggggaccatttcacacttttgtcaggcagatttacaagcaggctgcttctcatcagagctgg

SEQ ID NO: 780348 - DNA, 120 bp, Artificial Sequence
  ENSG00000250803_6 (sequence is synthesized)
gatttttgtctaaaagaaatttcagagccaatggtccccatttttcttccattttctttcctgaacaagattttgaacttcacaattaggactcttattcagtgcacaagggttttggag

SEQ ID NO: 780349 - DNA, 120 bp, Artificial Sequence
  ENSG00000250803_7 (sequence is synthesized)
tctccctgagctttctgaaataacctgtcattccacatgtccttttatccagggacattttttgagttcttgactggggtgcttcttttctctataagattgtttaacagcagagacatt

SEQ ID NO: 780350 - DNA, 120 bp, Artificial Sequence
  ENSG00000250803_8 (sequence is synthesized)
caaaacatcgctgagaactcaatgtactggaaccatatctaactcattctcgctttcaaatggcaagaaatgatacaagatatttcagagccactgccagcctcatgtgtcaggagactg

SEQ ID NO: 780351 - DNA, 120 bp, Artificial Sequence
  ENSG00000250803_9 (sequence is synthesized)
ctgcaatacaattcatcaaaataggtggaggctaactccttccttatttaggagaagtccagcatgaattctttatgccgacataggggtttataggtgttttattgttgtggtctaaat

SEQ ID NO: 780352 - DNA, 120 bp, Artificial Sequence
  ENSG00000250803_10 (sequence is synthesized)
gcctgccagaaagttctgtgcctccccacccaaggcttatgcacagtaagtgggttgtgaaactgcttagtattttagagtccttgaatgtgtattcatcgaggtggggctctcctggga

SEQ ID NO: 780353 - DNA, 120 bp, Artificial Sequence
  ENSG00000250803_11 (sequence is synthesized)
ggacgccagggtcagggagggactctgcctaggaaattctgctcccccgggctgtgctgctttgcctggactcccagcggttttgcttgagatctttgttcattttatggcagaattcca

SEQ ID NO: 780354 - DNA, 120 bp, Artificial Sequence
  ENSG00000250803_12 (sequence is synthesized)
gggccattctggatccagtgggttcctgcaagcctcacattcatgactttacacagcatagtcagatccaaattacacaggcaaatttattctacctaatactttggtcatacttctact

SEQ ID NO: 780355 - DNA, 120 bp, Artificial Sequence
  ENSG00000250803_13 (sequence is synthesized)
tattacacagggttaagttaggataattgtgcaaatatttctgttttttcctgcctgcttcaaaggaagcaagagatgaacattttaaaagtctttagataccctcaaataaaaatcttg

SEQ ID NO: 780356 - DNA, 120 bp, Artificial Sequence
  ENSG00000250803_14 (sequence is synthesized)
aacactgtgcatgagagggacctatgggaatttgctgtattctccaaaagtttctttcatacatcatcaaaccctttgaatgtaaaataaataataaaatacttaaaaaataaaaatgaa

SEQ ID NO: 780357 - DNA, 120 bp, Artificial Sequence
  ENSG00000250803_15 (sequence is synthesized)
ggaagtccgaaatcaaggtaccagcaggatttttatgaacttgtgaggaatgctctacttccaagatgtgtggaatggtggaagacaaacattcaggatcttggctagagaaaacctgtg

SEQ ID NO: 780358 - DNA, 120 bp, Artificial Sequence
  ENSG00000250803_16 (sequence is synthesized)
ggaggaagatatttcagctaagacataaaaggtgtgaaagcactagccaagaggaaacatgtggaggaagggaatggttagagaaaaagacattcggatcaatggcagcatgtatgaagg

SEQ ID NO: 780359 - DNA, 120 bp, Artificial Sequence
  ENSG00000250803_17 (sequence is synthesized)
tcctgagtggtcctagttcacctcctcagctgtgctgatgtcatgaaaaccagccttgacctcacaaactaccccttgatgatgctgaccgctggactactaatatccaactgcctgtgt

SEQ ID NO: 780360 - DNA, 120 bp, Artificial Sequence
  ENSG00000250803_18 (sequence is synthesized)
catttcttcatctttccttggtgccaaccatgcctgcatatcagggcagcattctatgatcccatggctctcacatcgacagaccacaacactaaggttaaaaggaacaaaagaaaactc

SEQ ID NO: 780361 - DNA, 120 bp, Artificial Sequence
  ENSG00000250803_19 (sequence is synthesized)
cagtgatttccaaaaacaatttaatttcaaacaacgatccttccagatatgacatttgggaagaattgtttaaaaacaccagaagtaaatgtgaaataccagtggtttctagacaatcaa

SEQ ID NO: 780362 - DNA, 120 bp, Artificial Sequence
  ENSG00000250803_20 (sequence is synthesized)
actctgcaattgttaagaagcaactggaatcagacagacctggattcagatcatagatgcacagttaaatcaaatacctttgaacaagttacttaacctccccaagcctcagtttctacc

SEQ ID NO: 780363 - DNA, 120 bp, Artificial Sequence
  ENSG00000250803_21 (sequence is synthesized)
ataagaggttggaatgagaggatgactgcaaaggacctgggatggtgcctaacaaaactttatctgtcagcttctccctgccacttcacaggagacccaactctctgcaacagaaaccag

SEQ ID NO: 780364 - DNA, 120 bp, Artificial Sequence
  ENSG00000250803_22 (sequence is synthesized)
cttttccacttagtaatcactgtgtgctttagtttcctggtttataaaataggggcattgagctctgcccagagggttattatgagaacaaatgaaataaagcatgtaaagtgtttagta

SEQ ID NO: 780365 - DNA, 120 bp, Artificial Sequence
  ENSG00000250803_23 (sequence is synthesized)
cagctccttccctgaaaactcagaggtgctcagcatgccatgctaaaaggcaaaataaaaagatcttggagacatctcagctttaatgaggactttccaacattccagactgccgtcctg

SEQ ID NO: 780366 - DNA, 120 bp, Artificial Sequence
  ENSG00000250803_24 (sequence is synthesized)
gccctttcaagctaattggaacagaagagagctaattaactataaaccagaatgaagcttttgtctaataagtttttattaggcaaaactcacagtgggaagagcataatcagaaaaaca

SEQ ID NO: 780367 - DNA, 120 bp, Artificial Sequence
  ENSG00000250803_25 (sequence is synthesized)
catgagggcaggatattctcatcttttcaaattctgcatgtgtatctattagccaacaatgatacggcgtccaccagcagttgtttgctacatttgtggtcgtgaatatggaacaaaatc

SEQ ID NO: 780368 - DNA, 120 bp, Artificial Sequence
  ENSG00000250821_0 (sequence is synthesized)
gggcagataccgcagtgaggggtctgaccgcgctgagtgctctcgggaatctgggctctggctaggaatgagaagttaagagagggagggctgagaggtgggcaggactcaccaaggagc

SEQ ID NO: 780369 - DNA, 120 bp, Artificial Sequence
  ENSG00000250821_1 (sequence is synthesized)
tgcaaacccaaacgagaaatctagggagcaaaaggagaggaaagagtgagcttgagccaagacatcaggccaagtggaactggaggaaatgtcatcattggtaaaggaggacttggagaa

SEQ ID NO: 780370 - DNA, 120 bp, Artificial Sequence
  ENSG00000250821_2 (sequence is synthesized)
gaaactgtttaagccactctcgcagaatctgtacgagtttattgaaatagagttctccgtccaggacaggtattacctctgtgtgtcagtgaccaaaaaggaagaagtaaaaatagtcat

SEQ ID NO: 780371 - DNA, 120 bp, Artificial Sequence
  ENSG00000250821_3 (sequence is synthesized)
tagatgaaaaatatgaagtaacaaaaaagtggtctttgaacgatctgcagatgattgatggaaaagaagcagatactgacaatccattttttgatctgcacttcaagaaagtgtacagtt

SEQ ID NO: 780372 - DNA, 120 bp, Artificial Sequence
  ENSG00000250821_4 (sequence is synthesized)
tggaagcatatagctgtgcttctaaatatgcctttgctcgaactgtaaataagctgaatcatgcatatcttaaaaaggacttacagatcgtgaactttgattctacatacattaacgatg

SEQ ID NO: 780373 - DNA, 120 bp, Artificial Sequence
  ENSG00000250821_5 (sequence is synthesized)
attccatttggtcctccaacaataaggattgtttggtccttatgagaatatgcttttacgctttcaatcttgtgtgcttgtccctatgtcccttgccactctgaagctgtgtaccacatt

SEQ ID NO: 780374 - DNA, 120 bp, Artificial Sequence
  ENSG00000250821_6 (sequence is synthesized)
ccttcatcagtgacctatgaaaatggtttcccaagtaaatattgattgtcataattttgtttttccttcatcagtgattattataatttaaataaaaataaagtaatgctttgtgaattg

SEQ ID NO: 780375 - DNA, 120 bp, Artificial Sequence
  ENSG00000251039_0 (sequence is synthesized)
gaggatattgtgatgacccagactccactctccctgcccgtcacccctggagagccggcctccatctcctgcaggtctagtcagagcctcttggatagtgatgatggaaacacctatttg

SEQ ID NO: 780376 - DNA, 120 bp, Artificial Sequence
  ENSG00000251039_1 (sequence is synthesized)
gtcccagacaggttcagtggcagtgggtcaggcactgatttcacactgaaaatcagcagggtggaggctgaggatgttggagtttattactgcatgcaacgtatagagtttccttccaca

SEQ ID NO: 780377 - DNA, 120 bp, Artificial Sequence
  ENSG00000251192_0 (sequence is synthesized)
ccggagggtggcgcttcgttcacactggctgttgtcatccgcccctgaggtttcaggctgtcggcagtgaaggtcagagtgcagacctgagaccactgctcaccgatttcagactccagt

SEQ ID NO: 780378 - DNA, 120 bp, Artificial Sequence
  ENSG00000251192_1 (sequence is synthesized)
ttatctgtgcctcggcttccccacttagtcgcagaagacttaggctgaggccccaggaagagatctccatcctttgcaggagcacaacaagatggccatgtcccaggaatcattgacctt

SEQ ID NO: 780379 - DNA, 120 bp, Artificial Sequence
  ENSG00000251192_2 (sequence is synthesized)
caaggacgtgtttgtggacttcaccctggaggagtggcagcaactggactctgcccagaagaacctctacagggatgtcatgcttgagaactacagccacctggtgtccgtggggcatct

SEQ ID NO: 780380 - DNA, 120 bp, Artificial Sequence
  ENSG00000251192_3 (sequence is synthesized)
agttgggaagccagatgtgatcttcaggttgggaccaggtgacgagtcctggatggcagatggagggaccccggtacggacctgtgcaggtgaggacaggccagaagtctgggaagttga

SEQ ID NO: 780381 - DNA, 120 bp, Artificial Sequence
  ENSG00000251192_4 (sequence is synthesized)
cgagcagatagatcactacaaggaaagccaagacaaatttctgtggcaagctgcattcataggcaaggaaacactgaaggatgaaagtggtcaagaatgtaaaatatgtagaaaaatcat

SEQ ID NO: 780382 - DNA, 120 bp, Artificial Sequence
  ENSG00000251192_5 (sequence is synthesized)
ttatctcaacacagactttgtttctgtaaaacaaagactccctaaatattattcatgggaaaggtgttcaaaacatcatttaaactttcttggtcaaaatagaagctatgtaagaaagaa

SEQ ID NO: 780383 - DNA, 120 bp, Artificial Sequence
  ENSG00000251192_6 (sequence is synthesized)
agatgatggatgtaaggcatattggaaagtatgcctccattataatcttcataaagctcaacctgcagagagattttttgaccctaatcaacgagggaaagccctccaccaaaagcaagc

SEQ ID NO: 780384 - DNA, 120 bp, Artificial Sequence
  ENSG00000251192_7 (sequence is synthesized)
ccttagaaaaagtcagagaagtcaaactggggagaaactctacaaatgtactgaatgtggaaaagtgtttatccagaaagcaaacttagttgtacatcaaagaactcacaccggagagaa

SEQ ID NO: 780385 - DNA, 120 bp, Artificial Sequence
  ENSG00000251192_8 (sequence is synthesized)
accttatgaatgctgcgaatgtgcaaaagccttcagccagaagtcaaccctcatagcacaccagagaactcacacaggggagaagccctatgaatgcagtgaatgtggaaaaacctttat

SEQ ID NO: 780386 - DNA, 120 bp, Artificial Sequence
  ENSG00000251192_9 (sequence is synthesized)
ccagaagtcaactctgattaaacatcaacgaactcatacaggagagaaaccatttgtatgtgacaaatgtccaaaagcctttaagagttcatatcatcttattagacatgaaaaaacaca

SEQ ID NO: 780387 - DNA, 120 bp, Artificial Sequence
  ENSG00000251192_10 (sequence is synthesized)
cattagacaagcattttataaaggtattaaatgtactacgtccagccttatatatcaaagaattcacacaagtgagaaacctcagtgcagtgaacatgggaaagcctctgatgagaagcc

SEQ ID NO: 780388 - DNA, 120 bp, Artificial Sequence
  ENSG00000251192_11 (sequence is synthesized)
cagtcccactaaacattggagaactcatacaaaagagaacatttatgagtgtagtaaatgtgggaaaagcttcagaggaaagtcacacctctctgttcatcagagaattcatacaggaga

SEQ ID NO: 780389 - DNA, 120 bp, Artificial Sequence
  ENSG00000251192_12 (sequence is synthesized)
gaaaccctatgaatgtagtatatgtgggaagactttcagtggaaagtcacacctctctgtccatcatagaactcatacaggagagaaaccttatgaatgcagaagatgtgggaaagcctt

SEQ ID NO: 780390 - DNA, 120 bp, Artificial Sequence
  ENSG00000251192_13 (sequence is synthesized)
tggggagaagtcaacccttattgtacatcagagaatgcatacaggagagaaaccctataaatgcaacgaatgtgggaaagcctttagtgagaagtcaccactgattaaacatcagagaat

SEQ ID NO: 780391 - DNA, 120 bp, Artificial Sequence
  ENSG00000251192_14 (sequence is synthesized)
tcatacaggagagagaccctatgaatgcactgactgtaaaaaagccttcagtaggaagtcaactctcatcaaacatcagagaattcatacaggagaaaaaccttacaaatgtagtgaatg

SEQ ID NO: 780392 - DNA, 120 bp, Artificial Sequence
  ENSG00000251192_15 (sequence is synthesized)
tgggaaggccttcagtgtgaaatcaactctcattgtgcatcacagaactcatacaggagagaaaccttatgaatgcagagactgtgggaaagcattcagtgggaagtcaactctcattaa

SEQ ID NO: 780393 - DNA, 120 bp, Artificial Sequence
  ENSG00000251192_16 (sequence is synthesized)
aatcatggcgagtaatcttataaatgtccagaatattggaaattcttcatatgttaatgttcatttaacttaatacaaagtacaaaagtataattccagaggtgtcaataaatgtgatca

SEQ ID NO: 780394 - DNA, 120 bp, Artificial Sequence
  ENSG00000251192_17 (sequence is synthesized)
gttttttcacccagaattcttcacccaggagtgaagaactgtatgtcaaataattcaaaaggggcaaaactgaatgtagttatgtgggaaagccttcagaaataatttaaatggcactgt

SEQ ID NO: 780395 - DNA, 120 bp, Artificial Sequence
  ENSG00000251192_18 (sequence is synthesized)
ttatcagagtatgtatgccgaggaaaactaagaatttagtgagcttataaaaccatggtagccaggcgtggtacgtagctcacacctgtaatcctagcacttttgggaggctgaggtggg

SEQ ID NO: 780396 - DNA, 84 bp, Artificial Sequence
  ENSG00000251192_19 (sequence is synthesized)
gttatctgagtgtagtggtgcatacctttagtcccagctactcaggaggttgaagtaggagggtggcttgagcccaggaggcag

SEQ ID NO: 780397 - DNA, 74 bp, Artificial Sequence
  ENSG00000251192_20 (sequence is synthesized)
ttatagccagaccttgtcaaataaataaataaacaaacccatggtataaatgagaggaatcatgctctatattc

SEQ ID NO: 780398 - DNA, 86 bp, Artificial Sequence
  ENSG00000251192_21 (sequence is synthesized)
tgggcattatagccagaccttgtcaaataaataaataaacaaacccatggtataaatgagaggaatcatgctctatattcttttat

SEQ ID NO: 780399 - DNA, 120 bp, Artificial Sequence
  ENSG00000251192_22 (sequence is synthesized)
gcctcccaaagcacttgtattatagatatgagccaccacacttaccatgttctttaccaaacattttgtggaagaggtgtagaggtggcaaacaattataaatttaagatatgttcactg

SEQ ID NO: 780400 - DNA, 88 bp, Artificial Sequence
  ENSG00000251192_23 (sequence is synthesized)
agaggtggcaaacaattataaatttaagatatgttcactgtggagtagagtatgattatttatttatttagagatggagtttcgctct

SEQ ID NO: 780401 - DNA, 87 bp, Artificial Sequence
  ENSG00000251192_24 (sequence is synthesized)
cacgctcagtgagtatgacatttttaaaagaacagtataaagcataaaatatcccatgtggggcaaactcccagattattttcctaa

SEQ ID NO: 780402 - DNA, 120 bp, Artificial Sequence
  ENSG00000251192_25 (sequence is synthesized)
aatatcccatgtggggcaaactcccagattattttcctaaacaaatagaaaaaatgcttcctgaaatagggtaagagaggatgagtcatcaggatccctgaaacaaagatctcaaacagg

SEQ ID NO: 780403 - DNA, 120 bp, Artificial Sequence
  ENSG00000251192_26 (sequence is synthesized)
agaccttacgtatattattcatcaatatcttcagtgcaaaaatgcaaagccattacagaaagggcacatagtaagcttttacatactttccttaggaacagtgcttagaacttaaaattc

SEQ ID NO: 780404 - DNA, 120 bp, Artificial Sequence
  ENSG00000251192_27 (sequence is synthesized)
tccatgttttaataaagagtaataattttatggtgaagcaatataagatttaaaattttcagagtatcttccataacagcagtattatttaaagtagtgaaaaaataagacaatttaata

SEQ ID NO: 780405 - DNA, 120 bp, Artificial Sequence
  ENSG00000251192_28 (sequence is synthesized)
tccaatgatagatgattaaaaattggtatgtcaggtgaaataacatgcaccaattaagactactggcaaatttgggaaaatgttcgtggtaaatcattaggtaaaaaatattataaaaca

SEQ ID NO: 780406 - DNA, 120 bp, Artificial Sequence
  ENSG00000251192_29 (sequence is synthesized)
ataaccatatgattaatattgtacaaacaggaagtatatgaaccattatatcagtgattctgggtggttgacatataaaaattttgtgatgagtaaagttatatgcacatataagtataa

SEQ ID NO: 780407 - DNA, 120 bp, Artificial Sequence
  ENSG00000251192_30 (sequence is synthesized)
atttgtatttatttaagtataaatttgtattcacctatttcataggtgagtgtgtgtgtatagataaacacatggaacaaaaagttaggtatatctgtgtagtgtggagggaaaaagcta

SEQ ID NO: 780408 - DNA, 120 bp, Artificial Sequence
  ENSG00000251192_31 (sequence is synthesized)
ggaaagaaatacaccaaattattaagtaaattggcatttgaatgtggggattattgatgtgtaaaaatttttttgattgtagtctccagaaatcaccaataaagtatatcgtttaaagtg

SEQ ID NO: 780409 - DNA, 120 bp, Artificial Sequence
  ENSG00000251192_32 (sequence is synthesized)
atccttattgattactatatcttgcatacagaagagcatttagaacacgtgcgtacttttcagaagaaatatatagctaacacctggataatcaccactcaggttgagaactacgactct

SEQ ID NO: 780410 - DNA, 120 bp, Artificial Sequence
  ENSG00000251192_33 (sequence is synthesized)
ttacaggcgtgagccatcacgcccggccaaggtgtcattttgtatcaatctttatgtcacaggacttaccagcctggcctctattcagtaaacatgtgttgaatgaatgaatttccaggg

SEQ ID NO: 780411 - DNA, 120 bp, Artificial Sequence
  ENSG00000251192_34 (sequence is synthesized)
gaatttccagggtaagatatttctcatactctatctctttctcctataaagttcaaaatgattttagtcatatactctatgtaatatgctatgccaaactgactagtgactggcataaga

SEQ ID NO: 780412 - DNA, 120 bp, Artificial Sequence
  ENSG00000251192_35 (sequence is synthesized)
acagttatataaagaaaggccagcgtggatgcgggagccagactgcgtggattcgaatccctcattcctggctgtgtgacctggactggttatttaggctctgtgtgcctcacactcttc

SEQ ID NO: 780413 - DNA, 120 bp, Artificial Sequence
  ENSG00000251192_36 (sequence is synthesized)
atctgtcaagttccttctagggtggcggcgaagactgaaatctttagtacatgtaaaggacctcaaagggcacagagtaagccctccgtgtgtgtgaggtgccatgtcccagtgccccag

SEQ ID NO: 780414 - DNA, 120 bp, Artificial Sequence
  ENSG00000251192_37 (sequence is synthesized)
agggaaaagggaccaggttggttggtgagagcttggcctctgggatgtgctcaggagctcttctcagagcctcggacttgtggacatgcctaggctctgatgagcagaactgttgtcatg

SEQ ID NO: 780415 - DNA, 120 bp, Artificial Sequence
  ENSG00000251192_38 (sequence is synthesized)
tccaaatgaggcttctgcctggccgccggttacaggctctgtgttctttgcttggcattcacatagattgtggccactcttgttctgagatcccatttctaccttccagcctcctggctt

SEQ ID NO: 780416 - DNA, 120 bp, Artificial Sequence
  ENSG00000251192_39 (sequence is synthesized)
gttagtgagaagtgccaagccccttctcattcctctcaccctgtcctttctggaagcttttagaactttttctcccttcttgtgcttatgtatttttaccagactagatgcaaatgtcag

SEQ ID NO: 780417 - DNA, 120 bp, Artificial Sequence
  ENSG00000251192_40 (sequence is synthesized)
catttcctctttattgggcatactgtgggccctttcaggctgaaagttggagtcttttttttttttttagactcaaggaaattatcatacattattttttggagttggtataggcaacaa

SEQ ID NO: 780418 - DNA, 120 bp, Artificial Sequence
  ENSG00000251192_41 (sequence is synthesized)
agctttgctggtgacctttactctacccagcctggtacccaccatgttcttgcctgctcttattttgtggtaaacactgtaaacctcacactgttttctattttctctttgtattccttc

SEQ ID NO: 780419 - DNA, 120 bp, Artificial Sequence
  ENSG00000251192_42 (sequence is synthesized)
ttctcctgatattgataatgtatgttttttcttgatcagtctgacttaagatttatccattgtattgatcttttcacagaaccagcttttgattgtgtttatttttgtgtttttcatttt

SEQ ID NO: 780420 - DNA, 120 bp, Artificial Sequence
  ENSG00000251247_0 (sequence is synthesized)
ggatttgggcaagcggccttggggctttgtgagatagctagggtcgacttgtgtggattctagtagaacggagctgaccctatccgaacaggcccctgccctgcttggatagaggcctcc

SEQ ID NO: 780421 - DNA, 120 bp, Artificial Sequence
  ENSG00000251247_1 (sequence is synthesized)
gaacaggagtaaagaatggctgttgaacatccacaaggcacctgcaagactatgaatcaaagttgagaccaagaaattatttctgaaaaaggatatggaaaaccttacaaaacacagcat

SEQ ID NO: 780422 - DNA, 120 bp, Artificial Sequence
  ENSG00000251247_2 (sequence is synthesized)
tgagtgttcaagtttcagaggtgattgggaatgtaaaaaccagtttgagagaaaacagggatctcaggaaggacatttcagtgaaatgatatttactcctgaagacatgcccactttcag

SEQ ID NO: 780423 - DNA, 120 bp, Artificial Sequence
  ENSG00000251247_3 (sequence is synthesized)
tatccagcatcagagaattcatactgatgagaaactccttgaatgtaaggaatgtgggaaggattttagttttgtatcagtccttgttcgacatcagcgaattcatactggtgagaaacc

SEQ ID NO: 780424 - DNA, 120 bp, Artificial Sequence
  ENSG00000251247_4 (sequence is synthesized)
ttatgaatgcaaagaatgtggcaaggcctttggtagtggtgcaaaccttgcttaccatcaaagaattcatactggtgagaagccttttgaatgtaaagaatgtgggaaggcctttggtag

SEQ ID NO: 780425 - DNA, 120 bp, Artificial Sequence
  ENSG00000251247_5 (sequence is synthesized)
tggctcaaaccttactcaccatcagagaattcatactggtgagaaaccctatgagtgtaaggaatgtgggaaagcctttagttttggatcaggccttattcgacatcagatcattcacag

SEQ ID NO: 780426 - DNA, 120 bp, Artificial Sequence
  ENSG00000251247_6 (sequence is synthesized)
tggtgagaagccttatgagtgtaaggaatgtgggaagtcctttagttttgaatcagcccttattcggcatcacagaattcacacaggtgagaaaccttatgaatgtatagattgtggtaa

SEQ ID NO: 780427 - DNA, 120 bp, Artificial Sequence
  ENSG00000251247_7 (sequence is synthesized)
agcctttggcagtggttcaaaccttactcaacatcggcggattcatactggtgagaaaccttatgaatgcaaagcatgtggaatggcctttagcagtggttcggctcttactcggcatca

SEQ ID NO: 780428 - DNA, 120 bp, Artificial Sequence
  ENSG00000251247_8 (sequence is synthesized)
gagaattcataccggtgagaaaccatatatatgtaatgaatgtggtaaggcctttagttttggatcagcccttactcgacatcaaagaattcatactggtgagaaaccttatgtatgtaa

SEQ ID NO: 780429 - DNA, 120 bp, Artificial Sequence
  ENSG00000251247_9 (sequence is synthesized)
ggaatgtgggaaggcttttaatagtggctcagatctcactcagcatcagagaattcacactggtgagaaaccctatgagtgtaaggagtgtgagaaagcctttagaagtggttcaaaact

SEQ ID NO: 780430 - DNA, 120 bp, Artificial Sequence
  ENSG00000251247_10 (sequence is synthesized)
tattcagcatcaaagaatgcatactggagagaaaccttatgaatgtaaggaatgtgggaagacctttagtagtggttcagaccttactcaacatcacagaattcatactggtgagaaacc

SEQ ID NO: 780431 - DNA, 120 bp, Artificial Sequence
  ENSG00000251247_11 (sequence is synthesized)
ctatgaatgtaaggaatgtgggaaggcctttggtagtggctcaaaacttatccaacaccagctaatccatactggtgaaagaccctatgaatgtaaagaatgtggaaagtcctttagtag

SEQ ID NO: 780432 - DNA, 120 bp, Artificial Sequence
  ENSG00000251247_12 (sequence is synthesized)
tatagtggctcaagccttactcagcatcagagaattcatacaggtgagaaactttatgaatgtaagaactgtgggaaggcttatgggagggattcagagtttcagcaacataagaaaagt

SEQ ID NO: 780433 - DNA, 120 bp, Artificial Sequence
  ENSG00000251247_13 (sequence is synthesized)
cataatggtaagaaactctgcgaattggaaactataaattgaaattatgtgctgaaggaaggactctaaacatatgacttaagaaaattcatagtggtgaaaatctctacaaatagaact

SEQ ID NO: 780434 - DNA, 120 bp, Artificial Sequence
  ENSG00000251247_14 (sequence is synthesized)
aaggtacaaatgccttacttatgcttcacaggttagtcagtctaagaatatttatacaggaaaaaaatcaccccaaataaaataaatatttgaagatccttatctatattcattccttca

SEQ ID NO: 780435 - DNA, 120 bp, Artificial Sequence
  ENSG00000251247_15 (sequence is synthesized)
ttacttttggaaaattcttacttgtgaatgttaaaaatgaaaaaaaaatcatttattatattttgcctcaactttaaacattggaaaactcatttctgggttaatcctactatatttttt

SEQ ID NO: 780436 - DNA, 120 bp, Artificial Sequence
  ENSG00000251247_16 (sequence is synthesized)
caatggtcttttttttttgtattatacagaattactgattcattgaaaaattattttatttattgcaagtctaaatttatcctttttttctttcctgattatcctaacaccatttattca

SEQ ID NO: 780437 - DNA, 120 bp, Artificial Sequence
  ENSG00000251247_17 (sequence is synthesized)
ttcaataaccttgtccattttcatattttttttattgactatttgatggtaagttacatttttattcacataaagcttggatatcaggtcagtgtttttttgtttttgtttttgtttttg

SEQ ID NO: 780438 - DNA, 120 bp, Artificial Sequence
  ENSG00000251247_18 (sequence is synthesized)
aggcatgagccaccatgcctggcccagtgtttgttttttaaatttatatatatgtatctatgtctcatcctgtttatggtcaataactgttacttttaagtatcctttaatacctgtacc

SEQ ID NO: 780439 - DNA, 120 bp, Artificial Sequence
  ENSG00000251247_19 (sequence is synthesized)
ctttaatacctgtaccttttgttttagaagattgtttactttccttttataaaattatactctccattttagcaaaacagctttccctcatcataatgtagataaaaagaaaaaaaggat

SEQ ID NO: 780440 - DNA, 120 bp, Artificial Sequence
  ENSG00000251247_20 (sequence is synthesized)
atggttacctgtaatcttaccaatcatagataatcactgtcaaacttttggagcaaatcctttaatactatctctcattgttttggaaacaaggtgtgattatgctatactataaccagc

SEQ ID NO: 780441 - DNA, 120 bp, Artificial Sequence
  ENSG00000251247_21 (sequence is synthesized)
ccttaatattttttgtctgtaaatatgttgttaccattttattggctttatagtattcacctgtctttatcaaaccccaattttgtcaaatattaaaaattttgccattataaacactta

SEQ ID NO: 780442 - DNA, 120 bp, Artificial Sequence
  ENSG00000251247_22 (sequence is synthesized)
tttaattgtgaccgggttgggcactgtgtttgcgagtgtgaggttcctggaccgcggttgtgactgtatgtccccttggggtgtgtgtgtgtgtgtttactaccatttgccgaactgtgt

SEQ ID NO: 780443 - DNA, 120 bp, Artificial Sequence
  ENSG00000251247_23 (sequence is synthesized)
gtagtatgccttaattttgaggtttgtggctgcttccgtgtgtgtgtgtgcgcgcgcgttggtgatattgttgatggagggtgcgtgtgaatttgttgtcattgtgaccccaaggtgtat

SEQ ID NO: 780444 - DNA, 120 bp, Artificial Sequence
  ENSG00000251247_24 (sequence is synthesized)
gtcactgggaatttgagagatgcccacggactctgtggttgtgtccgtgtctacccccgtggtgtgtatgagtgtgtgattgtgtgttgtgtttaggtttggggtgcctgtgacgtttat

SEQ ID NO: 780445 - DNA, 120 bp, Artificial Sequence
  ENSG00000251247_25 (sequence is synthesized)
gtccctgcggtgtgagtgagtttgtgtgactatgtgtccgtatagccaatgtaggtatggggagtctttgtctttgtgacttcagccattggagacccctgtgagctcagggacaggttc

SEQ ID NO: 780446 - DNA, 120 bp, Artificial Sequence
  ENSG00000251247_26 (sequence is synthesized)
tgcccagaacggcattgaccctaccgttgtctgtgatgcccggattaagcaggatgccctagacttctctgaccttcctctgtaggtgatgggcagtaggggctgagcaaagataacttc

SEQ ID NO: 780447 - DNA, 120 bp, Artificial Sequence
  ENSG00000251247_27 (sequence is synthesized)
gggtgaaagaaagcttgccccagaggacttaaacaggcaagaaggacttggttaaagactattgcaatagtcaacttccaatacaacagcagctggagatttatagctaacgggctgggt

SEQ ID NO: 780448 - DNA, 120 bp, Artificial Sequence
  ENSG00000251247_28 (sequence is synthesized)
gaaggagttaaaggatgctaaattactaagaggaagtgatgggcagtaggggctgagcaaagataacttctgacatagtcaaaccaactccctctcagaagaacctgatgtttcctgact

SEQ ID NO: 780449 - DNA, 120 bp, Artificial Sequence
  ENSG00000251247_29 (sequence is synthesized)
gaacaggagtaaagaatggctgttgaacatccacaaggcacctgcaagacctctaacttcaccctggagttgagcagaaacatggcttgccttttccctcagatcagtcttggactccag

SEQ ID NO: 780450 - DNA, 120 bp, Artificial Sequence
  ENSG00000251247_30 (sequence is synthesized)
acaaagggttggaactttgagccaataagcaggttactggtaacagtgcctgaggaaagacaaagctatgggtactatgaatcaaagttgagaccaagaaattatttctgaaaaaggata

SEQ ID NO: 780451 - DNA, 120 bp, Artificial Sequence
  ENSG00000251247_31 (sequence is synthesized)
gttaagctggagggccatggaggaggacaggccagcaggatgccgcttctgctccagggcatgcaccatgcgtgagatattctaattatatacacgttcataaacatatgctcacatgca

SEQ ID NO: 780452 - DNA, 120 bp, Artificial Sequence
  ENSG00000251247_32 (sequence is synthesized)
atccacaaggcacctgcaagggaggaaatttggacacacagagagatgccaaggatacacacagaggaaagaccatgtgagtgcatagcaagaaagtgaccatctgcaagccaagactat

SEQ ID NO: 780453 - DNA, 120 bp, Artificial Sequence
  ENSG00000251247_33 (sequence is synthesized)
tgcctgaggaaagacaaagctatgggtatcccccacaggcgctgcctgagacccagctctgtgtctcctcgtcgtacagcttgtggagctccgactgcaaggccatcagcatgcccaggc

SEQ ID NO: 780454 - DNA, 120 bp, Artificial Sequence
  ENSG00000251247_34 (sequence is synthesized)
ggattctagtagaacggagctgaccctatccgaacaggcccctgccctgcttggatagaggcctccgaacaggagtaaagaatggctgttgaacatccacaaggcacctgcaagatcccc

SEQ ID NO: 780455 - DNA, 120 bp, Artificial Sequence
  ENSG00000251247_35 (sequence is synthesized)
gagaccaagaaattatttctgaaaaagggacatttcagtgaaatgatatttactcctgaagacatgcccactttcagtatccagctatcagtccttgttcgacatcagcgaattcatact

SEQ ID NO: 780456 - DNA, 120 bp, Artificial Sequence
  ENSG00000251247_36 (sequence is synthesized)
gaacaggagtaaagaatggctgttgaacatccacaaggcacctgcaagctcctcttcaccttctgctagtggaagcagcctgaaaccttcatcagaagaagctgttggtgccatgcatct

SEQ ID NO: 780457 - DNA, 120 bp, Artificial Sequence
  ENSG00000251258_0 (sequence is synthesized)
gagaggagcagaggtctgtagaggtagagacgtaggcttcggatcttttagaattctgctggaagtctccaagtcaagaggatctacaaagaaatactgagtggagactatactgagatt

SEQ ID NO: 780458 - DNA, 120 bp, Artificial Sequence
  ENSG00000251258_1 (sequence is synthesized)
ctgttaaagacccacttgaattcagcccccattaggagaaactttggccggagcagccaacacatcacctggaagtcttcagactagactattgaagagtggattgtgtactgagggctc

SEQ ID NO: 780459 - DNA, 120 bp, Artificial Sequence
  ENSG00000251258_2 (sequence is synthesized)
ccaagtgcttccagaagccaataaaggatcacttcagtttacttcacggctaaggagtaacccttaagaaccatggccaaacgcctgcaagcagagttgtcctgtccagtttgcctggat

SEQ ID NO: 780460 - DNA, 120 bp, Artificial Sequence
  ENSG00000251258_3 (sequence is synthesized)
tttttctcctgttccatttctctctcttgtacacacgtgttctgctttgattgcatccagaggtatatactagaaaaccatgattttagagcgatgtgccccttgtgtcgagacgtggtg

SEQ ID NO: 780461 - DNA, 120 bp, Artificial Sequence
  ENSG00000251258_4 (sequence is synthesized)
aaggtacctgctttggaagaatggcaagtgagcgtcctaacacttatgaccaagcagcacaatagccgacttgagcaaagtctgcacgtgagggaggagctccggcattttcgggaggat

SEQ ID NO: 780462 - DNA, 120 bp, Artificial Sequence
  ENSG00000251258_5 (sequence is synthesized)
gtgaccctggatgcagccactgccagctccctccttgtcttctccaatgatctaagaagcgctcagtgtaagaagatccaccacgatctgacaaaagatcccaggctggcctgtgtcctg

SEQ ID NO: 780463 - DNA, 120 bp, Artificial Sequence
  ENSG00000251258_6 (sequence is synthesized)
ggtactccctgcttctcctccggccaacattactgggaggttgaagtgggagaggtgaagtcatggtccctgggcgtctgcaaggagccggctgacagaaagagcaatgatttattccct

SEQ ID NO: 780464 - DNA, 120 bp, Artificial Sequence
  ENSG00000251258_7 (sequence is synthesized)
tttcctggatgctgacttagaagaaatccagttttttgatgttgacaataatgtcctcatctatacacatgatggtttcttctctttggagcttttgtgtccattcttctgtcttgagct

SEQ ID NO: 780465 - DNA, 120 bp, Artificial Sequence
  ENSG00000251258_8 (sequence is synthesized)
cttgggagaaggggagagtggcaacgtcctgaccatctgcccatgagaaagtcagcccttcctagaagctttctgagaggtgaaagagaattttggcctgagaaaggtcagcatgattga

SEQ ID NO: 780466 - DNA, 120 bp, Artificial Sequence
  ENSG00000251258_9 (sequence is synthesized)
ggaagagataatgtgctatagtgcaaagacttggtaaatttttaaagtagattttgtagactttgtagcaaaacaattttcggatttttggggtaaattttgtggaatttgtagctaggt

SEQ ID NO: 780467 - DNA, 120 bp, Artificial Sequence
  ENSG00000251258_10 (sequence is synthesized)
aactggggtctttagggatgttattaagtactgtaagcttcagttttctagtctgtagatgcggataattgtatctcagtcaaacagctgtggtaattagagacaatactatgcctttgt

SEQ ID NO: 780468 - DNA, 120 bp, Artificial Sequence
  ENSG00000251258_11 (sequence is synthesized)
cttatagtaaataacaaatagagaaatcttagattgtaagtaagctagatattaggttttgtggatagacaatatctttttcattatttcaagctgttttgtgtaattcctgataatgtc

SEQ ID NO: 780469 - DNA, 120 bp, Artificial Sequence
  ENSG00000251258_12 (sequence is synthesized)
tgaggaggaagaaaaattcaacagccagtgtgagttattttgttgatacagcatgaaatttcagagagacaaactgatattggggaagaactaagtttttcatttttattttctttgaaa

SEQ ID NO: 780470 - DNA, 120 bp, Artificial Sequence
  ENSG00000251258_13 (sequence is synthesized)
cacagccacataagttttcttgaaagacaaagaactttgaccaaaatgcattgttaatggtgattcatattcttatgggaagtgtcatttacccatctcaataattggactattgtgatt

SEQ ID NO: 780471 - DNA, 120 bp, Artificial Sequence
  ENSG00000251258_14 (sequence is synthesized)
tataagaattcttatcaaccatgttaactaacacatattcatcaaaaattgttttcaaggttgcttttggattttttatttgtagaatttattttcttgcaaataaatttataaagcatt

SEQ ID NO: 780472 - DNA, 120 bp, Artificial Sequence
  ENSG00000251287_0 (sequence is synthesized)
gtgggaggtgacaccaggaggtaaccaggtggaaatcaccctcaagtagcagagacaggtgtgcaaaggctcagagggagcttctccaggatcagcagagctcgattgtagggtgtgagg

SEQ ID NO: 780473 - DNA, 120 bp, Artificial Sequence
  ENSG00000251287_1 (sequence is synthesized)
ctgtcacagaggctggagaaataagcagttccttgctaagaagtctgaattttaacctgaagggacatgggagctactgcaggctgggctgtgaccgtctacgacaagccggcatctttc

SEQ ID NO: 780474 - DNA, 120 bp, Artificial Sequence
  ENSG00000251287_2 (sequence is synthesized)
tttaaagaggcacctctggacctgcagcaccggctcttcatgaagctgggcagcacgcactctccgttcagggcccgctcagaacctgaggacccagacacagagcggtcggccttcacg

SEQ ID NO: 780475 - DNA, 120 bp, Artificial Sequence
  ENSG00000251287_3 (sequence is synthesized)
gagcgggattctgggagcgggctggtgacgcgtctccacgagcggccagccctgctggtcagcagcacaagctggacagagtttgaacaactgactcttgacggacagaaccttccttct

SEQ ID NO: 780476 - DNA, 120 bp, Artificial Sequence
  ENSG00000251287_4 (sequence is synthesized)
gtgataacaggcaaagggcctctgagggagtattacagccgcctcatccaccagaagcatttccagcacatccaggtctgcatcccctggctggagggccgaggactacccccgcttcta

SEQ ID NO: 780477 - DNA, 81 bp, Artificial Sequence
  ENSG00000251287_5 (sequence is synthesized)
ggtgctgtttgcctgcgtgtgccgtgaacttcaagtgtttacatgagctggtgaaacatgaagaaaaccgcctggtctttg

SEQ ID NO: 780478 - DNA, 86 bp, Artificial Sequence
  ENSG00000251287_6 (sequence is synthesized)
ttttgcagatgcttttctcaaactttcctgatcctgaaggcaagctaaaccagttccggaagaacctgcgggagtcgcagcagctc

SEQ ID NO: 780479 - DNA, 89 bp, Artificial Sequence
  ENSG00000251287_7 (sequence is synthesized)
agatgcttttctcaaactttcctgatcctgaaggcaagctaaaccagttccggaagaacctgcgggagtcgcagcagctctgatgggat

SEQ ID NO: 780480 - DNA, 120 bp, Artificial Sequence
  ENSG00000251287_8 (sequence is synthesized)
ggctggagaaataagcagttccttgctaagaagtctgaattttaacctgaagggacatgggagctactgcaggctgccctgccatgatttcattgcagggctgtgaccgtctacgacaag

SEQ ID NO: 780481 - DNA, 120 bp, Artificial Sequence
  ENSG00000251287_9 (sequence is synthesized)
aggctcccaggactggtttggaacccgcgccatgtgctctggaggctgtggcagggcaggcaaagggcctctgagggagtattacagccgcctcatccaccagaagcatttccagcacat

SEQ ID NO: 780482 - DNA, 120 bp, Artificial Sequence
  ENSG00000251287_10 (sequence is synthesized)
ccaggggctcaggggctcgtggaagaagtggacattgaagtatttatcacacaaatgagtgtaaaagtacaatagcatatctgccacgaaggtgagcagacagagctagcggggcttgca

SEQ ID NO: 780483 - DNA, 120 bp, Artificial Sequence
  ENSG00000251287_11 (sequence is synthesized)
aagtctaaaacgtttaccttagcaaattcctcataaaactccatttggaagagtcccgagagctaatttgttaagtatacttgcagaaggtagatgaggagacagattaaatcttattac

SEQ ID NO: 780484 - DNA, 120 bp, Artificial Sequence
  ENSG00000251322_0 (sequence is synthesized)
atggacggccccggggccagcgccgtggtcgtgcgcgtcggcatcccggacctgcagcagacgaagtgcctgcgcctggacccggccgcgcccgtgtgggccgccaagcagcgcgtgctc

SEQ ID NO: 780485 - DNA, 120 bp, Artificial Sequence
  ENSG00000251322_1 (sequence is synthesized)
tgcgccctcaaccacagcctccaggacgcgctcaactatgggcttttccagccgccctcccggggccgcgccggcaagttcctggatgaggagcggctcctgcaggagtacccgcccaac

SEQ ID NO: 780486 - DNA, 120 bp, Artificial Sequence
  ENSG00000251322_2 (sequence is synthesized)
ctggacacgcccctgccctacctggagtttcgatacaagcggcgagtttatgcccagaacctcatcgatgataagcagtttgcaaagcttcacacaaaggcgaacctgaagaagttcatg

SEQ ID NO: 780487 - DNA, 120 bp, Artificial Sequence
  ENSG00000251322_3 (sequence is synthesized)
gactacgtccagctgcatagcacggacaaggtggcacgcctgttggacaaggggctggaccccaacttccatgaccctgactcaggagagtgccccctgagcctcgcagcccagctggac

SEQ ID NO: 780488 - DNA, 120 bp, Artificial Sequence
  ENSG00000251322_4 (sequence is synthesized)
aacgccacggacctgctaaaggtgctgaagaatggtggtgcccacctggacttccgcactcgcgatgggctcactgccgtgcactgtgccacacgccagcggaatgcggcagcactgacg

SEQ ID NO: 780489 - DNA, 120 bp, Artificial Sequence
  ENSG00000251322_5 (sequence is synthesized)
accctgctggacctgggggcttcacctgactacaaggacagccgcggcttgacacccctctaccacagcgccctggggggtggggatgccctctgctgtgagctgcttctccacgaccac

SEQ ID NO: 780490 - DNA, 120 bp, Artificial Sequence
  ENSG00000251322_6 (sequence is synthesized)
gctcagctggggatcaccgacgagaatggctggcaggagatccaccaggcctgccgctttgggcacgtgcagcatctggagcacctgctgttctatggggcagacatgggggcccagaac

SEQ ID NO: 780491 - DNA, 120 bp, Artificial Sequence
  ENSG00000251322_7 (sequence is synthesized)
gcctcggggaacacagccctgcacatctgtgccctctacaaccaggagagctgtgctcgtgtcctgctcttccgtggagctaacagggatgtccgcaactacaacagccagacagccttc

SEQ ID NO: 780492 - DNA, 120 bp, Artificial Sequence
  ENSG00000251322_8 (sequence is synthesized)
caggtggccatcatcgcagggaactttgagcttgcagaggttatcaagacccacaaagactcggatgttgtaccattcagggaaacccccagctatgcgaagcggcggcgactggctggc

SEQ ID NO: 780493 - DNA, 120 bp, Artificial Sequence
  ENSG00000251322_9 (sequence is synthesized)
cccagtggcttggcatcccctcggcctctgcagcgctcagccagcgatatcaacctgaagggggaggcacagccagcagcttctcctggaccctcgctgagaagcctcccccaccagctg

SEQ ID NO: 780494 - DNA, 120 bp, Artificial Sequence
  ENSG00000251322_10 (sequence is synthesized)
ctgctccagcggctgcaagaggagaaagatcgtgaccgggatgccgaccaggagagcaacatcagtggccctttagcaggcagggccggccaaagcaagatcagtccagctggcccaggg

SEQ ID NO: 780495 - DNA, 120 bp, Artificial Sequence
  ENSG00000251322_11 (sequence is synthesized)
gatccgggccctggacctggagggcccgcgccccctgcgccccccgcaccgccgccccggggcccgaagcggaaactttacagcgccgtccccggccgcaagttcatcgccgtgaaggcg

SEQ ID NO: 780496 - DNA, 120 bp, Artificial Sequence
  ENSG00000251322_12 (sequence is synthesized)
cacagcccgcagggtgaaggcgagatcccgctgcaccgcggcgaggccgtgaaggtgctcagcattggggagggcggtttctgggagggaaccgtgaaaggccgcacgggctggttcccg

SEQ ID NO: 780497 - DNA, 120 bp, Artificial Sequence
  ENSG00000251322_13 (sequence is synthesized)
gccgactgcgtggaggaagtgcagatgaggcagcatgacacacggcctgaaacgcgggaggaccggacgaagcggctctttcggcactacacagtgggctcctacgacagcctcacctca

SEQ ID NO: 780498 - DNA, 120 bp, Artificial Sequence
  ENSG00000251322_14 (sequence is synthesized)
cacagcgattatgtcattgatgacaaagtggctgtcctgcagaaacgggaccacgagggctttggttttgtgctccggggagccaaagcagagacccccatcgaggagttcacgcccacg

SEQ ID NO: 780499 - DNA, 120 bp, Artificial Sequence
  ENSG00000251322_15 (sequence is synthesized)
ccagccttcccggcgctgcagtatctcgagtcggtggacgtggagggtgtggcctggagggccgggctgcgcacgggagacttcctcatcgaggtgaacggggtgaacgtggtgaaggtc

SEQ ID NO: 780500 - DNA, 120 bp, Artificial Sequence
  ENSG00000251322_16 (sequence is synthesized)
ggacacaagcaggtggtggctctgattcgccagggtggcaaccgcctcgtcatgaaggttgtgtctgtgacaaggaagccagaagaggacggggctcggcgcagagccccaccgcccccc

SEQ ID NO: 780501 - DNA, 120 bp, Artificial Sequence
  ENSG00000251322_17 (sequence is synthesized)
aagagggcccccagcaccacactgaccctgcgctccaagtccatgacagctgagctcgaggaacttgcctccattcggagaagaaaaggggagaagctggacgagatgctggcagccgcc

SEQ ID NO: 780502 - DNA, 120 bp, Artificial Sequence
  ENSG00000251322_18 (sequence is synthesized)
gcagagccaacgctgcggccagacatcgcagacgcagactccagagccgccaccgtcaaacagaggcccaccagtcggaggatcacacccgccgagattagctcattgtttgaacgccag

SEQ ID NO: 780503 - DNA, 120 bp, Artificial Sequence
  ENSG00000251322_19 (sequence is synthesized)
ggcctcccaggcccagagaagctgccgggctccttgcggaaggggattccacggaccaagtctgtaggggaggacgagaagctggcgtccctgctggaagggcgcttcccgcggagcacc

SEQ ID NO: 780504 - DNA, 120 bp, Artificial Sequence
  ENSG00000251322_20 (sequence is synthesized)
cacctcgatgcaagacccggtgcgcgagggtcgcggcatcccgcccccgccgcagaccgcgccgcctcccccgcccgcgccctactacttcgactcggggccgcccccggccttctcgcc

SEQ ID NO: 780505 - DNA, 120 bp, Artificial Sequence
  ENSG00000251322_21 (sequence is synthesized)
cctacgacacggtgcgctccagcttcaagcccggcctggaggcgcgcctgggcgcgggcgctgccggcctgtacgagccgggcgcggccctcggcccgctgccgtatcccgagcggcaga

SEQ ID NO: 780506 - DNA, 120 bp, Artificial Sequence
  ENSG00000251322_22 (sequence is synthesized)
tatcccgagcggcagaagcgcgcgcgctccatgatcatcctgcaggactcggcgcccgagtcgggcgacgcccctcgacccccgcccgcggccaccccgcccgagcgacccaagcgccgg

SEQ ID NO: 780507 - DNA, 120 bp, Artificial Sequence
  ENSG00000251322_23 (sequence is synthesized)
ccgcggccgcccggccccgacagcccctacgccaacctgggcgccttcagcgccagcctcttcgctccgtccaagccgcagcgccgcaagagccccctggtgaagcagctgcaggtggag

SEQ ID NO: 780508 - DNA, 80 bp, Artificial Sequence
  ENSG00000251322_24 (sequence is synthesized)
gtcccggcggcggcagcttcgcccgcgagccctccccgacccaccgcggtccgcgcccgggtggcctcgactacggcgcg

SEQ ID NO: 780509 - DNA, 120 bp, Artificial Sequence
  ENSG00000251322_25 (sequence is synthesized)
cctcgactacggcgcgggcgatggcccggggctcgcgttcggcggcccgggcccggccaaggaccggcggctggaggagcggcgccgctccactgtgttcctgtccgtgggggccatcga

SEQ ID NO: 780510 - DNA, 120 bp, Artificial Sequence
  ENSG00000251322_26 (sequence is synthesized)
gcggatctgccatccctacagccctcccgctccatcgacgagcgcctcctggggaccggccccaccgccggccgcgacctgctgctgccctccccggtgtctgccctgaagccgttggtc

SEQ ID NO: 780511 - DNA, 120 bp, Artificial Sequence
  ENSG00000251322_27 (sequence is synthesized)
agcggcccgagcctggggccctcgggttccaccttcatccacccactcaccggcaaacccctggaccccagctcacccctggcccttgccctggctgcccgagagcgagctctggcctcc

SEQ ID NO: 780512 - DNA, 120 bp, Artificial Sequence
  ENSG00000251322_28 (sequence is synthesized)
caggcgccctcccggtcccccacacccgtgcacagtcccgacgccgaccgccccggacccctgtttgtggatgtacaggcccgggacccagagcgagggtccctggcttccccggctttc

SEQ ID NO: 780513 - DNA, 120 bp, Artificial Sequence
  ENSG00000251322_29 (sequence is synthesized)
cccagcctggattcctgtgcctgctcgcagggaggcagagaaggtcccccgggaggagcggaagtcacccgaggacaagaagtccatgatcctcagcgtcctggacacatccctgcagcg

SEQ ID NO: 780514 - DNA, 120 bp, Artificial Sequence
  ENSG00000251322_30 (sequence is synthesized)
gccagctggcctcatcgttgtgcacgccaccagcaacgggcaggagcccagcaggctggggggggccgaagaggagcgcccgggcaccccggagttggccccggcccccatgcagtcagc

SEQ ID NO: 780515 - DNA, 120 bp, Artificial Sequence
  ENSG00000251322_31 (sequence is synthesized)
ggctgtggcagagcccctgcccagcccccgggcccagccccctggtggcaccccggcagacgccgggccaggccagggcagctcagaggaagagccagagctggtgtttgctgtgaacct

SEQ ID NO: 780516 - DNA, 120 bp, Artificial Sequence
  ENSG00000251322_32 (sequence is synthesized)
gccacctgcccagctgtcgtccagcgatgaggagaccagggaggagctggcccgaattgggttggtgccaccccctgaagagtttgccaacggggtcctgctggccaccccactcgctgg

SEQ ID NO: 780517 - DNA, 120 bp, Artificial Sequence
  ENSG00000251322_33 (sequence is synthesized)
cccgggcccctcgcccaccacggtgcccagcccggcctcagggaagcccagcagtgagccaccccctgcccctgagtctgcagccgactctggggtggaggaggctgacacacgcagctc

SEQ ID NO: 780518 - DNA, 120 bp, Artificial Sequence
  ENSG00000251322_34 (sequence is synthesized)
cagcgacccccacctggagaccacaagcaccatctccacggtgtccagcatgtccaccttgagctcggagagcggggaactcactgacacccacacctccttcgctgacggacacacttt

SEQ ID NO: 780519 - DNA, 120 bp, Artificial Sequence
  ENSG00000251322_35 (sequence is synthesized)
tctactcgagaagccaccagtgcctcccaagcccaagctcaagtccccgctggggaaggggccggtgaccttcagggacccgctgctgaagcagtcctcggacagcgagctcatggccca

SEQ ID NO: 780520 - DNA, 120 bp, Artificial Sequence
  ENSG00000251322_36 (sequence is synthesized)
gcagcaccacgccgcctctgccgggctggcctctgccgccgggcctgcccgccctcgctacctcttccagagaaggtccaagctatggggggaccccgtggagagccgggggctccctgg

SEQ ID NO: 780521 - DNA, 120 bp, Artificial Sequence
  ENSG00000251322_37 (sequence is synthesized)
gcctgaagacgacaaaccaactgtgatcagtgagctcagctcccgcctgcagcagctgaacaaggacacgcgttccctgggggaggaaccagttggtggcctgggcagcctgctggaccc

SEQ ID NO: 780522 - DNA, 120 bp, Artificial Sequence
  ENSG00000251322_38 (sequence is synthesized)
tgccaagaagtcgcccatcgcagcagctcggctcttcagcagcctcggtgagctgagctccatttcagcgcagcgcagccccgggggcccgggcggcggggcctcgtactcggtgaggcc

SEQ ID NO: 780523 - DNA, 120 bp, Artificial Sequence
  ENSG00000251322_39 (sequence is synthesized)
cccggtgaagcccgcgtcgctggagcgggtggaggggctgggggcgggcgcggggggcgcagggcggcccttcggcctcacgccccccaccatcctcaagtcgtccagcctctccatccc

SEQ ID NO: 780524 - DNA, 120 bp, Artificial Sequence
  ENSG00000251322_40 (sequence is synthesized)
ccccaccatcctcaagtcgtccagcctctccatcccgcacgagcccaaggaggtgcgcttcgtggtgcgcagcgtgagcgcgcgcagtcgctccccctcgccgtcgccgctgccctcgcc

SEQ ID NO: 780525 - DNA, 120 bp, Artificial Sequence
  ENSG00000251322_41 (sequence is synthesized)
cgcgtccggccccggccccggcgcccccggcccacgccgacccttccagcagaagccgctgcagctctggagcaagttcgacgtgggcgactggctggagagcatccacctaggcgagca

SEQ ID NO: 780526 - DNA, 120 bp, Artificial Sequence
  ENSG00000251322_42 (sequence is synthesized)
ccgcgaccgcttcgaggaccatgagatagaaggcgcgcacctacccgcgcttaccaaggacgacttcgtggagctgggcgtcacgcgcgtgggccaccgcatgaacatcgagcgcgcgct

SEQ ID NO: 780527 - DNA, 120 bp, Artificial Sequence
  ENSG00000251322_43 (sequence is synthesized)
ccactcccgccccggccgtgccctgccggcagggccccccacccccaccccgggccgcgggctcggcctgccccttacgacggcgcccgggccaggaatgttgcatgaatcgtcctgttt

SEQ ID NO: 780528 - DNA, 120 bp, Artificial Sequence
  ENSG00000251322_44 (sequence is synthesized)
gggccaggaatgttgcatgaatcgtcctgtttgctgttgctcggagactcgccctgtacattgcttagtgccctcaccggccgcccagcccacccagcgcacagtcaggaagggcgtgga

SEQ ID NO: 780529 - DNA, 120 bp, Artificial Sequence
  ENSG00000251322_45 (sequence is synthesized)
ccagggaggctggggcgggaggtgccgggggtggggtgccctagcgtgaccacctccttcgcagctcctggtggccattctcccagagggggaacctagtccagcatgcgaggtcaggac

SEQ ID NO: 780530 - DNA, 120 bp, Artificial Sequence
  ENSG00000251322_46 (sequence is synthesized)
ccgccttggtgactcggggggaggggggagacattgggattctcgatgggggccaaggagcccccctgttttgcatattttaatccactctatatttggaacgagaaaaggaacaaatat

SEQ ID NO: 780531 - DNA, 120 bp, Artificial Sequence
  ENSG00000251322_47 (sequence is synthesized)
ctctgtccgtaatagtttcctctcccctcccttctacttccactggtcccactgcagctgcccagtcttccatctccggcccctcactgccactgccaccccacaacggggcaggggacg

SEQ ID NO: 780532 - DNA, 120 bp, Artificial Sequence
  ENSG00000251322_48 (sequence is synthesized)
ctccagctggtctggggttggccagggccctagtggcccgccctggggccccagctcggcccctcgcctcgctgagctctagtgtgccccaccgacccttcaggtgctgctcgtggtggg

SEQ ID NO: 780533 - DNA, 120 bp, Artificial Sequence
  ENSG00000251322_49 (sequence is synthesized)
aggggcggcaggccgcgggtcctgctgtgcacccgcgggaccagccggcctgggagaccatcggccgggggggatgagggcagggccctgccgctccaccgcagccatcttcctcacagg

SEQ ID NO: 780534 - DNA, 120 bp, Artificial Sequence
  ENSG00000251322_50 (sequence is synthesized)
gtctctccccaaggagggggctagcttggtccccatgctcttgggcaactacagcagagaagcctccctgccttggaccccaaagtctcctgtcctgccctttatgtgtgtgggtgaaac

SEQ ID NO: 780535 - DNA, 120 bp, Artificial Sequence
  ENSG00000251322_51 (sequence is synthesized)
tgggtgcgtctgagcacgtgggagccgtgtgtgtgcctgattactgagtggccaccaggggccgctctggactagcgcggggccgtggaggcgtgcaccgtgtgcatgcgtggggtgtac

SEQ ID NO: 780536 - DNA, 120 bp, Artificial Sequence
  ENSG00000251322_52 (sequence is synthesized)
ctgtgagagcaccctgtctcctcttccaaagaaagtcagaggccatcctgcaccctgggtccagctgtttgcccagcctgtccttccagagcctcacccagcctgagcggggttccctgg

SEQ ID NO: 780537 - DNA, 120 bp, Artificial Sequence
  ENSG00000251322_53 (sequence is synthesized)
tgaatccctgctgcttggggaggccccaagggccccttggaggcagcgcccccaccttgggcttctgagggcatcatagggggacccctagagtcagttcaccacaggccctggggagag

SEQ ID NO: 780538 - DNA, 120 bp, Artificial Sequence
  ENSG00000251322_54 (sequence is synthesized)
tcaaagacccccgagggtgcccagccccccacactgtgactcctcacactcagcgatgacctgtggggtggggggccctgggacgtttttaaacctagggtttggagtctggactaagct

SEQ ID NO: 780539 - DNA, 120 bp, Artificial Sequence
  ENSG00000251322_55 (sequence is synthesized)
ccatccacgtcactcacaagtttctgtttatatttctagctttttttaataaaataaaaaaaaaaagaaaacagaagttttcacaacccaggggcctggcacgccggtctgtgcctgccc

SEQ ID NO: 780540 - DNA, 120 bp, Artificial Sequence
  ENSG00000251322_56 (sequence is synthesized)
gccccgccctggcccaccggccccactccctgggcacagagtcacacccactcatccttccgccaacagtccaggtcacacagcagcagtcactgtaacagactgccacatacacactcg

SEQ ID NO: 780541 - DNA, 120 bp, Artificial Sequence
  ENSG00000251322_57 (sequence is synthesized)
gtctcacactcacctgtgggttttggttccgttcaatttgggtttttaactttacagggtcagttccgcttcacctccttttgtatggagttccatccggggggtttcaccccctgctcc

SEQ ID NO: 780542 - DNA, 120 bp, Artificial Sequence
  ENSG00000251322_58 (sequence is synthesized)
agtcctgaggcctcctgaccctgacgttgtgatacgccccacagagatctatgtttcttatattattattattgataataattattataatattattatgtaataaatttataagaaatg

SEQ ID NO: 780543 - DNA, 120 bp, Artificial Sequence
  ENSG00000251322_59 (sequence is synthesized)
cctggctgcccattgtgtggttgcagctgtgggtcgcgtgggcctggccggctaactctctctctcattgctctctcctgcccatctgcatgtggctgctctgtcgagctgcgccgtggt

SEQ ID NO: 780544 - DNA, 120 bp, Artificial Sequence
  ENSG00000251322_60 (sequence is synthesized)
gcggcacctgagggaagaggaaaagcgtcttctccccgcgacgacgcggcacagcctgggcccaggaggctttgccggccaggcccagcccaggcccgtggcttggctgaccacaccctg

SEQ ID NO: 780545 - DNA, 120 bp, Artificial Sequence
  ENSG00000251322_61 (sequence is synthesized)
gccccacaaggggcagtggccacccgggcctggggggagccctggagcagcaggagccccgcccgcaaggagacccctcccagcccccaccccatggctctggtgcccccttgcttagcc

SEQ ID NO: 780546 - DNA, 120 bp, Artificial Sequence
  ENSG00000251322_62 (sequence is synthesized)
ctcgaagcctgcagggtgggtgctcaggccagagccagccggcaccgtgacccccgccagcacccttgatcgtctcctgaggccctgattctgggggttcccagggcccctgaggccctg

SEQ ID NO: 780547 - DNA, 120 bp, Artificial Sequence
  ENSG00000251322_63 (sequence is synthesized)
accgcccgcccccccccccccgcactccctgagctccttgagccatgaagaagtttgcgtccagccgtaacctgaacaagatcctggcacagtgcgactcatcctcgcgggagtacgagg

SEQ ID NO: 780548 - DNA, 120 bp, Artificial Sequence
  ENSG00000251369_0 (sequence is synthesized)
gggacttccggcctcgctggcgtggacgtttgtggtggggcgtgttggtccgcgctctcagaactgtgctgggaaggatggtagggcgactggggctcacctccgcaccgttgtaggacc

SEQ ID NO: 780549 - DNA, 120 bp, Artificial Sequence
  ENSG00000251369_1 (sequence is synthesized)
cggggtagggttttgagcccgtgggagctgccccacgcggcctcgtcctgccaacggtcggatggcggagacgaaggacgcagcgcagatgttggtgaccttcaaggatgtggctgtgac

SEQ ID NO: 780550 - DNA, 120 bp, Artificial Sequence
  ENSG00000251369_2 (sequence is synthesized)
ctttacccgggaggagtggagacagctggacctggcccagaggaccctgtaccgagaggtgatgctggagacctgtgggcttctggtttcactagggcatcgggttcccaaaccagagtt

SEQ ID NO: 780551 - DNA, 120 bp, Artificial Sequence
  ENSG00000251369_3 (sequence is synthesized)
ggtccacctgctagagcatgggcaggagctgtggatagtgaagagaggcctctcacatgctacctgtgcaggtgacagagcacaagttcataccagagagccaaccacttacccgccagt

SEQ ID NO: 780552 - DNA, 120 bp, Artificial Sequence
  ENSG00000251369_4 (sequence is synthesized)
cttatctgagcgggcctttctccggggaagcctgactctggaatcttcaacctcaagtgattcgaggttggggagagctagggatgaggaagggcttttggaaatgcagaaaggtaaagt

SEQ ID NO: 780553 - DNA, 120 bp, Artificial Sequence
  ENSG00000251369_5 (sequence is synthesized)
gacaccggagacagacctccacaaggagacccatcttgggaaagtgagccttgaaggtgaaggtttggggacagatgatggtctgcactccagggcattacaagagtggttatcagcaga

SEQ ID NO: 780554 - DNA, 120 bp, Artificial Sequence
  ENSG00000251369_6 (sequence is synthesized)
tgttctccatgaatgtgactcacagcaaccagggaaagacgccttgattcatgcagggacaaacccctacaaatgcaagcagtgtgggaaaggttttaacaggaagtggtatctcgttcg

SEQ ID NO: 780555 - DNA, 120 bp, Artificial Sequence
  ENSG00000251369_7 (sequence is synthesized)
acatcagagggttcacactggaatgaaaccctatgaatgcaatgcatgtgggaaagcctttagccagagctcaactctcattcggcactacctcatccacaccggggagaaaccatacaa

SEQ ID NO: 780556 - DNA, 120 bp, Artificial Sequence
  ENSG00000251369_8 (sequence is synthesized)
gtgccttgagtgtgggaaggccttcaaacgcaggtcgtacctcatgcagcaccatccaatccacactggagagaaaccctatgagtgtagtcaatgtcgaaaggccttcacccaccggtc

SEQ ID NO: 780557 - DNA, 120 bp, Artificial Sequence
  ENSG00000251369_9 (sequence is synthesized)
tacttttattcgccataataggacccacactggagaaaagccctttgagtgcaaagaatgtgagaaagcctttagcaatagagcccacctaattcaacattacatcatccacactggaga

SEQ ID NO: 780558 - DNA, 120 bp, Artificial Sequence
  ENSG00000251369_10 (sequence is synthesized)
gaagccctatgattgcatggcatgtggaaaggccttcagatgcagctcagaactcatacagcaccagcggattcacactggggagaagccctatgaatgcacccagtgtgggaaagcctt

SEQ ID NO: 780559 - DNA, 120 bp, Artificial Sequence
  ENSG00000251369_11 (sequence is synthesized)
tcaccggagcacgtacctcattcagcactctgtcatccacactggggagatgccctacaagtgtatcgagtgtgggaaggccttcaaacgcaggtcacaccttctgcagcaccaaagggt

SEQ ID NO: 780560 - DNA, 120 bp, Artificial Sequence
  ENSG00000251369_12 (sequence is synthesized)
ccatacatgagagaaccctattgctgcaatgaatacagcaaggcctttacccactgttattttatcattcataatgggacccacactgtaggaagaagtccttcgaatgcaaagaatgtc

SEQ ID NO: 780561 - DNA, 120 bp, Artificial Sequence
  ENSG00000251369_13 (sequence is synthesized)
aggaaacttttcattttttttgtcagctctttcttaactaacacatgagcagtcactttggagagaagccctgtgaatacagtgaatgtaaggatcccttcagtcaccactcagttctca

SEQ ID NO: 780562 - DNA, 120 bp, Artificial Sequence
  ENSG00000251369_14 (sequence is synthesized)
ctcattgcagaaggattcataccagggggaaatgtggaaggcattccatcaacatcagagaactcatgctggagaaagacattccaaatataactattaaggacagtctttggccagagc

SEQ ID NO: 780563 - DNA, 120 bp, Artificial Sequence
  ENSG00000251369_15 (sequence is synthesized)
agaaatcttactatctgagaatcataatgaaaagttactacataattgttattgatgtgagaaaactttgtgaccaggttgtcacttgcttgtcctataaagagccatgctggaatttga

SEQ ID NO: 780564 - DNA, 120 bp, Artificial Sequence
  ENSG00000251369_16 (sequence is synthesized)
cccaccttgggattttctctatgaacttatgaaaaccttcagttacaggacagagtgcacagtttcctctcctgtgggaaggagagttgactcttgaggacccccaccctcctgcatcct

SEQ ID NO: 780565 - DNA, 120 bp, Artificial Sequence
  ENSG00000251369_17 (sequence is synthesized)
aaagggttctttccaggcctgaggacctaggccccagtttgtcccaaagcaggagtgttttccatgggataaaggacaccctaggtttttcttagcttccagctctttccatacagtctt

SEQ ID NO: 780566 - DNA, 120 bp, Artificial Sequence
  ENSG00000251369_18 (sequence is synthesized)
cactgaagtgtttggtacaaggatctactatgaacttgctgctgtgataggcaagaatctcatgagacacctgtcatttagctccatggccactcactgttgtggtcatacttagaagag

SEQ ID NO: 780567 - DNA, 120 bp, Artificial Sequence
  ENSG00000251369_19 (sequence is synthesized)
tgggatgcagtggatggctgggctatgggtcctgcccttgagcagggaaggaacttactgtctaatataggaaaaacacatgagaacaggtgcaatatattgacttaaacttgtttagca

SEQ ID NO: 780568 - DNA, 120 bp, Artificial Sequence
  ENSG00000251369_20 (sequence is synthesized)
cccgtttttaagtcagtagaagttttgaacttacagtaaaagttgtgaacttctgtatgttttccacagtttatgattgaggtaaaacatgttttttgttttgtttttgagacagagttt

SEQ ID NO: 780569 - DNA, 120 bp, Artificial Sequence
  ENSG00000251369_21 (sequence is synthesized)
caggcgtgagccaccgtgcccggcagagaaaaactgcttaaggttgaaaagagaaatttaagaaattgctgacggaataaaaacataatagaactacaacaccgaaggaaatgaaagaag

SEQ ID NO: 780570 - DNA, 120 bp, Artificial Sequence
  ENSG00000251369_22 (sequence is synthesized)
gaaagaagcaagaaggaaagcaccagaagtgatttggaagagaaatcctaaaatgaatgtgaacaacagagtgatcagaagagtgtagggaattaatagtttctttaaacaagccatctc

SEQ ID NO: 780571 - DNA, 120 bp, Artificial Sequence
  ENSG00000251369_23 (sequence is synthesized)
acaatggaagcctgtgtgtcttgaaattgctgtggttattattcactctgccctttgaagaactgcagaaattcatagggcaatgttaagtgtttgtgtctccaaaaaagatgttggagt

SEQ ID NO: 780572 - DNA, 120 bp, Artificial Sequence
  ENSG00000251369_24 (sequence is synthesized)
cgttaccctcagaacctcaggtaatcatgttagttaatccattaggttagttcctaattgactatgactgtgtccttagaaaaatgggaaatttggtcacagaggcagatgtacagaggg

SEQ ID NO: 780573 - DNA, 120 bp, Artificial Sequence
  ENSG00000251369_25 (sequence is synthesized)
aagacgatgtgaagacacaggaagaacatcttcaagccaaggaacacacggggctaccagaagccgagatagaagcatggaacatatgttctagtaagaagtgtctgggttgttttggtt

SEQ ID NO: 780574 - DNA, 120 bp, Artificial Sequence
  ENSG00000251369_26 (sequence is synthesized)
ttttttctttggagtttttgtggtattaaattatttttaaattatgttttattgtagacctcacaattctttttttttctttttcactcaaactacagcaaaatattatatttctatcct

SEQ ID NO: 780575 - DNA, 120 bp, Artificial Sequence
  ENSG00000251369_27 (sequence is synthesized)
atatttcatgggcttacctctagccaattgtttttaactgccatgtaatattttacatcatgaagctttcatccttgattcaaatcctctgattatggacatgtatttcctccattttcc

SEQ ID NO: 780576 - DNA, 120 bp, Artificial Sequence
  ENSG00000251369_28 (sequence is synthesized)
tgctatgaaatatatcaccaccagcttgattcaaccttaaaaataaggtcatcagtattatgttctaaataaacttatggccatacatgagaaatgtaccttgcagctgaatggctaggt

SEQ ID NO: 780577 - DNA, 120 bp, Artificial Sequence
  ENSG00000251369_29 (sequence is synthesized)
catatggtgatctagtatgtaactggaattatgttatacattgcccttcctctcccataagatggacaaaagtgtttctgtatcactgtgtcccagacaatatttagaattacccagctt

SEQ ID NO: 780578 - DNA, 120 bp, Artificial Sequence
  ENSG00000251369_30 (sequence is synthesized)
tccagtttttactttagaagtttaaagtgatatagaatatatctggtatttctcatattgaaatacatttgaacattagttcatatcctttcattgccttttgtttttcctcttctgtca

SEQ ID NO: 780579 - DNA, 120 bp, Artificial Sequence
  ENSG00000251369_31 (sequence is synthesized)
atggtctactcatatgttggcctgtctttatttgtatcttgactttttattgtgtattttgtttatggtggggtactttattggtgattaatacgattttcaagtatattatatgggcta

SEQ ID NO: 780580 - DNA, 120 bp, Artificial Sequence
  ENSG00000251369_32 (sequence is synthesized)
gtcccttgatactattgacactgtatttatcttcagtctcttgttggtatctaactttggttctgaagtttatggaatggaagtatttaattggaaagattaaacatattgattttaatt

SEQ ID NO: 780581 - DNA, 120 bp, Artificial Sequence
  ENSG00000251369_33 (sequence is synthesized)
acaggcgtgagccaccgtgcccggcagaggtaaaacgttttcatgttcatgtttttgtaactttgttacatttaatgaacaaattagataaaaagcactatgctcttatgctgcttaatc

SEQ ID NO: 780582 - DNA, 120 bp, Artificial Sequence
  ENSG00000251369_34 (sequence is synthesized)
tagataaaaagcactatgctcttatgctgcttaatctgtgagaaatgattgtgggggtgggactagttatgaccattcacagttggtgcacttcaatcagtaaatgtcacagaggaaatg

SEQ ID NO: 780583 - DNA, 120 bp, Artificial Sequence
  ENSG00000251369_35 (sequence is synthesized)
tggacggtaaattaactcggcaagtcggtcatgcaaagacgaattagaaatcttaatatttgtaagcagacaaaaaatgtgtctggaaggatcctcacccagttaaatggtatttgctcc

SEQ ID NO: 780584 - DNA, 120 bp, Artificial Sequence
  ENSG00000251369_36 (sequence is synthesized)
ttgggtgtagagggagggaagggatggggtagaggggaatgtcagagttcactttaacttcatgcacatgtggaaatgtttgaaatgttcacagtaaattttataatttcagaaaaactg

SEQ ID NO: 780585 - DNA, 120 bp, Artificial Sequence
  ENSG00000251369_37 (sequence is synthesized)
tcactaggtaatgactcacctctcatccctgaggaggaccctaaccctgattcttggccaggcaaaaaggtcactggaactgcccacctttctcttgacagacctttctgttcccacctc

SEQ ID NO: 780586 - DNA, 120 bp, Artificial Sequence
  ENSG00000251369_38 (sequence is synthesized)
ttcctgactggtctccctttgtctgcatcagagattgtcggggtagaaaatgtccttttaacacaaaccctcactccagtgctcagcccattctgaggtccttaatcaagattgcataag

SEQ ID NO: 780587 - DNA, 120 bp, Artificial Sequence
  ENSG00000251369_39 (sequence is synthesized)
aagaagaagggcccatgtccaactctgggaaagacaggaaactcctggaaaaaggggaagagcagagtccagcagaggttgatggtgtggttttaagagatcttacctactgaggccata

SEQ ID NO: 780588 - DNA, 120 bp, Artificial Sequence
  ENSG00000251380_0 (sequence is synthesized)
cagaacccaagggcttacctgtgctctgtgattccccaactagggatttagttgtagccacggacctggtaggcaacagggaggggattttaatctgctccttgcatcagaaggtccaat

SEQ ID NO: 780589 - DNA, 120 bp, Artificial Sequence
  ENSG00000251380_1 (sequence is synthesized)
aggcagggttagtataatgggagatgccctggtagggctggcaaggagaagaagccacatgtattttggtctgatgaaaagcagcagtgatctgtcactgaccaaaatggtcccccaact

SEQ ID NO: 780590 - DNA, 120 bp, Artificial Sequence
  ENSG00000251380_2 (sequence is synthesized)
atgcattacggagcagcaacccacatacagaactcgagaagccacggcctggagactgtacctggacaccaaagactggagagaggagctggtggggaaaccccagagttcccagggtgc

SEQ ID NO: 780591 - DNA, 120 bp, Artificial Sequence
  ENSG00000251380_3 (sequence is synthesized)
cactccccagctccaccagagaactttgggaatgagctgctgcccctgagtgcccctctccagggcctcagtgagggtctctaccctccagggaggaacaaaaccttgccagctggggtc

SEQ ID NO: 780592 - DNA, 120 bp, Artificial Sequence
  ENSG00000251380_4 (sequence is synthesized)
ctgcgagagggggcagttcaattcctccacaggggactctgcaactccaatctttcgagtgaagcatctgcgaggccctcagggacccaggatgaactgcatagcagcagaaggaagaca

SEQ ID NO: 780593 - DNA, 120 bp, Artificial Sequence
  ENSG00000251380_5 (sequence is synthesized)
ggccagaccaggcgggagggagcccggaaacatctggtttgtagtttcagactctacccgttcacagttcacacagtctcaccgggaaactcacaccttgccctgtaccaagtttttaag

SEQ ID NO: 780594 - DNA, 120 bp, Artificial Sequence
  ENSG00000251380_6 (sequence is synthesized)
gcagttaagctctgcccatccgagacttcatttttcttgagtagaaaatcactgaaatcatcagatccatggcacccaccttcactttctcctaacagctggaaccgtcaggctggcttc

SEQ ID NO: 780595 - DNA, 120 bp, Artificial Sequence
  ENSG00000251380_7 (sequence is synthesized)
agggcctggtcttcgcacttgatatcactatccctcacctgctcagacagccagagcaggcgggtgagttcctcccaacaacctccactgcattctctcagctcccaccgcagggcagcc

SEQ ID NO: 780596 - DNA, 120 bp, Artificial Sequence
  ENSG00000251380_8 (sequence is synthesized)
cacgtgcctgagtgaacatgtgtgcgtgtgcacacacgcaagtatgcacagacatacactaaacacgaacatacagtgcacatgaacgctgctcccagctagggccctctggtcagactg

SEQ ID NO: 780597 - DNA, 120 bp, Artificial Sequence
  ENSG00000251380_9 (sequence is synthesized)
ctgcctgggttagaattcttgtccccacccccacttactatagttctgtgatcctggacaagtaactgaatctctccgtgccacagtttcttcttgtagaaaacgggaaagttcacagta

SEQ ID NO: 780598 - DNA, 120 bp, Artificial Sequence
  ENSG00000251380_10 (sequence is synthesized)
cttacctccttagagtcattgtgaaggtcagtttgaggcatcacaaatttaaggcacccagacataagggtcaacagggttagctatcactgtccagtttggtgggaggaactgaatgca

SEQ ID NO: 780599 - DNA, 120 bp, Artificial Sequence
  ENSG00000251380_11 (sequence is synthesized)
tgtaggcacatggacccagtctacactcaggcacaaaaggagctacattagttacattcaggcataccccagagcactacaattctctgagacattgtctggaaatctagaaatcatctc

SEQ ID NO: 780600 - DNA, 120 bp, Artificial Sequence
  ENSG00000251380_12 (sequence is synthesized)
cttgccctttaaggtattttaaccctcgcattcctctgcttttccaagaatgtgaatcttgccaagctgtccgtgagagacacgggctcccctcgagggagacttgcaaatgctccataa

SEQ ID NO: 780601 - DNA, 120 bp, Artificial Sequence
  ENSG00000251380_13 (sequence is synthesized)
ggctctgccatgaggaagtcacagcagacacgctagacagcatagtcctggatgcaacctggaggaagggaggcccatggtggagcactcactccgtgcctgtctgcccggtgagacctc

SEQ ID NO: 780602 - DNA, 120 bp, Artificial Sequence
  ENSG00000251380_14 (sequence is synthesized)
aagttccttgcagacaaaggccatgggttgttggctcttgtgttcccggtggcctttccagagctgaacagaggacagatgcacagacgggggggctctggtggtcaaggcagcagtccc

SEQ ID NO: 780603 - DNA, 120 bp, Artificial Sequence
  ENSG00000251380_15 (sequence is synthesized)
cttggatactaaagtctgagccaggcccctcaggcccggcatgggcagtgcgaggcccatagtggtgggaagccagttggccagctggggtgagaaggccgcgaagccatgggcagacag

SEQ ID NO: 780604 - DNA, 120 bp, Artificial Sequence
  ENSG00000251380_16 (sequence is synthesized)
gaagtggaggtgaatgtctctgcctcctgtaggcctcagcagggacagcacagaccctctggctggggcagcgcagaccctctagctggggcagaacaaggctggtgcttccttctagtc

SEQ ID NO: 780605 - DNA, 120 bp, Artificial Sequence
  ENSG00000251380_17 (sequence is synthesized)
cttgagactttgtagctctaactcaagcagaaccctggggttttgggattctgtgtggtgactgctgaggaaggtttatggatttgacagggtgcatgtcacagagagacagttctcagt

SEQ ID NO: 780606 - DNA, 120 bp, Artificial Sequence
  ENSG00000251380_18 (sequence is synthesized)
cagcacttcctgtcccctgcagaggctcataggggacagcccctgccaaggagaccctggaggggctctgaggatagcaatcagaggttgggctggctggactgagcccaggcctgttgc

SEQ ID NO: 780607 - DNA, 120 bp, Artificial Sequence
  ENSG00000251380_19 (sequence is synthesized)
ccaccaagtctccataggttctagtctgacccctctctccacccctgggctatgcaggccagcccgtgcagaccacccccgacgcgtccacttgcaacacccgcctcactgtgccaacac

SEQ ID NO: 780608 - DNA, 120 bp, Artificial Sequence
  ENSG00000251380_20 (sequence is synthesized)
tccatccacacaggaaaggactgagaacgtgatgcttaacccaaaggagtgagtttcataggatgggtggctttaacagtttcacagcaggacactgagggaatatttccctatcccttc

SEQ ID NO: 780609 - DNA, 120 bp, Artificial Sequence
  ENSG00000251380_21 (sequence is synthesized)
aaatggacggtcactacagaaacgtgtagagcaagactttgtcaaggggctgtttccaggtctcccggtgtctaaatagcagagctggaatgggaactgagaaccgattctttccacaac

SEQ ID NO: 780610 - DNA, 120 bp, Artificial Sequence
  ENSG00000251380_22 (sequence is synthesized)
cgcccactgagcagcaaggctgcagccagcaaagaggtgcggaggcaagcaagctccatgtggtggggacagcgcattgcgacctccaccacccctgcagtgggctgccagctgagccac

SEQ ID NO: 780611 - DNA, 120 bp, Artificial Sequence
  ENSG00000251380_23 (sequence is synthesized)
ctgtcttccactgtatctactgtacgaacttctccagctctgctctgttttctcttcctcagcatccaccccgtgacacgtagtggtggctgatgtcgccacagtaccatgaggttaaca

SEQ ID NO: 780612 - DNA, 120 bp, Artificial Sequence
  ENSG00000251380_24 (sequence is synthesized)
ggtcctccctccagcttccctcatggtggcagcctaacctgcattgcagccgttcaccggacaccgcaccagaccctcaaaacccatccaagactgtgggaggagtaaacaacccagccc

SEQ ID NO: 780613 - DNA, 120 bp, Artificial Sequence
  ENSG00000251380_25 (sequence is synthesized)
agttaagaggagatgccgaatttaatgaaccctatttgaattgcagggctgtgattcctcttacctttaacgtgaactcacaggcggattaaagtgaaataaaacctaccatttgagtta

SEQ ID NO: 780614 - DNA, 120 bp, Artificial Sequence
  ENSG00000251493_0 (sequence is synthesized)
ggactcagccctggcctcgccgagctctgttcttagactctcacccgtcccgcacgttcctgggcgcctggcgttctgattcgcccgcccgggccccgccaccccctcctcagctgacgg

SEQ ID NO: 780615 - DNA, 120 bp, Artificial Sequence
  ENSG00000251493_1 (sequence is synthesized)
ggcaaaagctgctccgagaggagaaggtcaagtcctccgcccgggccgggcgcgagcggagcccagggagcgcagcatccgcgcggctaccgcggcggcgcaggagttataaagtcggcg

SEQ ID NO: 780616 - DNA, 80 bp, Artificial Sequence
  ENSG00000251493_2 (sequence is synthesized)
ataaagtcggcgcgcgagactccgccgccacccggcagccccggcgcagctccggcagccgcagtcgcagcgcccccagc

SEQ ID NO: 780617 - DNA, 120 bp, Artificial Sequence
  ENSG00000251493_3 (sequence is synthesized)
ggagcccggagcccggcgcccccatgcgccgccccgccgccgccgcgccacagctatgaccctgagcactgagatgtccgatgcctctggcctcgccgaggaaacagacatcgacgtggt

SEQ ID NO: 780618 - DNA, 120 bp, Artificial Sequence
  ENSG00000251493_4 (sequence is synthesized)
gggggagggcgaggacgaagaagacgaggaagaggaggacgacgacgagggcggcggtggcgggccccggctggctgtccccgcgcagcggcggcggcggcggcgctcgtacgccgggga

SEQ ID NO: 780619 - DNA, 120 bp, Artificial Sequence
  ENSG00000251493_5 (sequence is synthesized)
gggaggacgagctggaggatctggaggaggaggaggacgacgatgacatcctgctggccccgcctgctgggggctccccggcgcccccgggcccggccccggcggcgggggcaggagccg

SEQ ID NO: 780620 - DNA, 120 bp, Artificial Sequence
  ENSG00000251493_6 (sequence is synthesized)
gggcggcggcggcggcggcgcgggcggcggcgggagcgcgggtagcggcgccaagaacccgctggtgaagccgccctactcgtatatcgcgctcatcactatggccatcctgcagagccc

SEQ ID NO: 780621 - DNA, 120 bp, Artificial Sequence
  ENSG00000251493_7 (sequence is synthesized)
caagaagcggctgacgctgagcgagatctgtgagttcatcagcggccgcttcccctactaccgggagaagttccccgcctggcagaacagcatccgccacaacctctcgctcaacgactg

SEQ ID NO: 780622 - DNA, 120 bp, Artificial Sequence
  ENSG00000251493_8 (sequence is synthesized)
cttcgtcaagatcccccgcgagcccggcaacccgggcaagggcaactactggacgctggacccggagtccgccgacatgttcgacaacggcagcttcctgcgccggaggaagcgcttcaa

SEQ ID NO: 780623 - DNA, 120 bp, Artificial Sequence
  ENSG00000251493_9 (sequence is synthesized)
caacggcagcttcctgcgccggaggaagcgcttcaagcggcagccgctgctcccacccaacgccgcggccgccgagtctctgctgctgcgcggcgcgggagccgcagggggcgcgggcga

SEQ ID NO: 780624 - DNA, 80 bp, Artificial Sequence
  ENSG00000251493_10 (sequence is synthesized)
ggccccctgccggcctccgcggccaaggcgggcggcccgggcgcctcagcgctggcgcgctcgcccttctccatcgagag

SEQ ID NO: 780625 - DNA, 80 bp, Artificial Sequence
  ENSG00000251493_11 (sequence is synthesized)
gctcaggcctcgccctcgccctcgccggtggcggcgccgccagctcccggatccagcggaggaggctgcgcggcgcaggc

SEQ ID NO: 780626 - DNA, 120 bp, Artificial Sequence
  ENSG00000251493_12 (sequence is synthesized)
gccgcgctcacccgatccctcgtggccgccgcggccgccgccgcctcctcagtctcctcgtccgccgccttggggactctgcaccaagggactgccctgtccagtgtcgagaactttact

SEQ ID NO: 780627 - DNA, 120 bp, Artificial Sequence
  ENSG00000251493_13 (sequence is synthesized)
gctaggatttccaattgttaataacgctatgttagcgcgctcgaggaagaaggtaggaatcccggctccttttctcgtcttggtggttcggtgttttgttcgctcctccaggcgcggccc

SEQ ID NO: 780628 - DNA, 120 bp, Artificial Sequence
  ENSG00000251493_14 (sequence is synthesized)
ctctcgacctcgcgcgcccattttcgccgctgcgaattctcggacaaaactgtcaacagcccgggcgcgccttttggctctgcgggtccctctatttatgcaaagccgacctatgctaca

SEQ ID NO: 780629 - DNA, 120 bp, Artificial Sequence
  ENSG00000251493_15 (sequence is synthesized)
gccccccaacccccgacctggggtagggaggaagagggtgccggggaagggagtccgccctgtccaggcactagaggctcccttgacgtttggcagatgaaaaacaactaagcctttttg

SEQ ID NO: 780630 - DNA, 120 bp, Artificial Sequence
  ENSG00000251493_16 (sequence is synthesized)
aggtgtagagattctcaggtccaggcgttaaaaaataatggtcaaaagaataatacaaaaatagtaaaggtcttgaagaatgccagcgaagcaattcttttttatttgaggacacttgtc

SEQ ID NO: 780631 - DNA, 120 bp, Artificial Sequence
  ENSG00000251493_17 (sequence is synthesized)
tggtgtactttttcatgaaaaggaaaaatggttaacatgtttacacaagaaaaaaagtcaaaattatcatttatttcaacctgtgttttgtatcataacagacgtgtggatttttttgta

SEQ ID NO: 780632 - DNA, 120 bp, Artificial Sequence
  ENSG00000251493_18 (sequence is synthesized)
cttactgcgtattctttacaaggagtattgtaaattttactggcaattattattgtactattctaaatgtaagatttttacactttttcagaaataaaaatgcttaattttcaaagaaaa

SEQ ID NO: 780633 - DNA, 120 bp, Artificial Sequence
  ENSG00000251493_19 (sequence is synthesized)
actgctaggatttccaattgttaataacgctatgttagcgcgctcgaggaagaagggagaaaacggactctcacgggctcaaatgaagttcttccccgtccccgcaacccttgttaaatg

SEQ ID NO: 780634 - DNA, 120 bp, Artificial Sequence
  ENSG00000251493_20 (sequence is synthesized)
tatagatacaaattgaaatactgttagaccaaagtcttatatacaaaagttacttttactctagcccggctaagagagaggagtcattgaacccgagaacgtccggactccacgcgccgc

SEQ ID NO: 780635 - DNA, 120 bp, Artificial Sequence
  ENSG00000251493_21 (sequence is synthesized)
cccgggtggagaggggttggcaggcggaatccaaacggcacagacactgctggcgcgcctggtagccttctgtaacgcacgcatctgaaatttagatctgaaaataattacgaagagagc

SEQ ID NO: 780636 - DNA, 77 bp, Artificial Sequence
  ENSG00000251546_0 (sequence is synthesized)
taagctcctgatctatgctgcatccagtttgcaaagtggggtcccatcaaggttcagctgcaacctgaagattttgc

SEQ ID NO: 780637 - DNA, 120 bp, Artificial Sequence
  ENSG00000251655_0 (sequence is synthesized)
gcacagagttgggagtgactccagagcctcctgcaagatgctgttgattctgctgtcagtggccttgctggccctgagctcagctcagaacttaaatgaagatgtcagccaggaagaatc

SEQ ID NO: 780638 - DNA, 120 bp, Artificial Sequence
  ENSG00000251655_1 (sequence is synthesized)
tgaagatgtcagccaggaagaatctccctccctaatagcaggaaatccacaaggaccatccccacaaggaggcaacaagccccagggccccccacctcctccaggaaagccacaaggacc

SEQ ID NO: 780639 - DNA, 120 bp, Artificial Sequence
  ENSG00000251655_2 (sequence is synthesized)
gaaagccacaaggaccacccccacaaggggacaagtcccgaagtccccgatctcctccaggaaaaccacaaggaccacccccacaaggaggtaaccagccccaaggtcccccacctcctc

SEQ ID NO: 780640 - DNA, 74 bp, Artificial Sequence
  ENSG00000251655_3 (sequence is synthesized)
gaaaaccacaaggaccacccccacaaggaggtaaccagccccaaggtcccccagacctcaaggtcccccacctc

SEQ ID NO: 780641 - DNA, 82 bp, Artificial Sequence
  ENSG00000251655_4 (sequence is synthesized)
cccacaaggaggcaagaaacctcagggtcccccacaagtcccgaagttcccaatctcctccaggaaagccacaaggaccacc

SEQ ID NO: 780642 - DNA, 74 bp, Artificial Sequence
  ENSG00000251655_5 (sequence is synthesized)
cccccaaacctcaaggtcccccacctccaggaaagccacaaggaccacccgcacaaggaggcagcaagtcccaa

SEQ ID NO: 780643 - DNA, 89 bp, Artificial Sequence
  ENSG00000251655_6 (sequence is synthesized)
aaggaggcaacaaacctcaaggtcccccacctccaggaaagccacaaggaccacccgcacaaggaggcagcaagtcccaaagtgcccga

SEQ ID NO: 780644 - DNA, 120 bp, Artificial Sequence
  ENSG00000251655_7 (sequence is synthesized)
aggaggcaatccccagcagcctcaggcacctcctgctggacagccccagggaccaccacgccctcctcaagggggcagaccttccagacctccccagtgacagcctccccagtcatctag

SEQ ID NO: 780645 - DNA, 120 bp, Artificial Sequence
  ENSG00000251655_8 (sequence is synthesized)
gattcaatgacaggaagtgaataagaagatgagagtgattcaaatgattcaaattccatgacattggaaaaaggtcatcatagctctaacttcaatataccaataaaataatcagcttgc

SEQ ID NO: 780646 - DNA, 120 bp, Artificial Sequence
  ENSG00000251664_0 (sequence is synthesized)
acattccaatcattcacggaataggatcgactccataatgactgtgatgctggaaaaaatttactaaatatgtacttacagaaaagggtgactgctcataaaatacctcaggcaagcgat

SEQ ID NO: 780647 - DNA, 120 bp, Artificial Sequence
  ENSG00000251664_1 (sequence is synthesized)
cccttaaaactgattgtcccaactcagaggccctcattttctgcaatggtgattatcggaccaagaggcccgggatcccagcgtctgctgctctcgcttctgctccttgcagcctgggag

SEQ ID NO: 780648 - DNA, 120 bp, Artificial Sequence
  ENSG00000251664_2 (sequence is synthesized)
gtggggagcggccagctccactactccgtctacgaggaggccaaacacggcaccttcgtgggccgcatcgctcaggacctggggctggagctggcggagctggtgccgcgcctgttccgg

SEQ ID NO: 780649 - DNA, 82 bp, Artificial Sequence
  ENSG00000251664_3 (sequence is synthesized)
cgcgagaagctgtgcgggcggagcgcggagtgcagtatccacctggaggtgatcgtggacaggccgctgcaggttttccatg

SEQ ID NO: 780650 - DNA, 120 bp, Artificial Sequence
  ENSG00000251664_4 (sequence is synthesized)
ctggaggtgatcgtggacaggccgctgcaggttttccatgtggacgtggaggtgaaggacattaacgacaacccgccggtgttcagagaaagggaacaaaaggtacctgtttctgaatct

SEQ ID NO: 780651 - DNA, 120 bp, Artificial Sequence
  ENSG00000251664_5 (sequence is synthesized)
gcgcctctggactctcattttcctctagagggcgcttctgatgcggatatcggcgtaaactctcttttgacctatgcgttaagtctaaatgagaattttgagcttaaaataaaaacaaaa

SEQ ID NO: 780652 - DNA, 120 bp, Artificial Sequence
  ENSG00000251664_6 (sequence is synthesized)
aaagataaaagtatattgcctgaattagttcttcggaagttattggacagagagcaaacgccaaaactcaatttattgctgatggtaatcgatggcggtaaaccagaactaacagggtct

SEQ ID NO: 780653 - DNA, 120 bp, Artificial Sequence
  ENSG00000251664_7 (sequence is synthesized)
gtccagattcaaataaccgtcctggatgtgaatgacaatggtccggcgtttgataagcccagctataaagtagtgttgtctgaaaatgtccaaaacgacacaagagtgatccaactaaat

SEQ ID NO: 780654 - DNA, 120 bp, Artificial Sequence
  ENSG00000251664_8 (sequence is synthesized)
gcttccgatccagacgaaggacttaatggagaaatttcctatgggatcaaaatgattttgccagtgagtgagaaatgtatgttttcaataaatccagacacaggtgaaattagaatttat

SEQ ID NO: 780655 - DNA, 120 bp, Artificial Sequence
  ENSG00000251664_9 (sequence is synthesized)
ggtgaactggattttgaagagaataatgcctatgaaattcaggttaacgccattgataaagggattccttccatggcaggtcacagcatggtcctggtggaagttctggacgtgaatgac

SEQ ID NO: 780656 - DNA, 120 bp, Artificial Sequence
  ENSG00000251664_10 (sequence is synthesized)
aatgtccctgaagtaatggttacttcactgtcgctccctgtgcaagaggatgctcaggtgggtaccgtcattgccctgattagcgtgtcggatcgtgactctggagccaatggacaggtc

SEQ ID NO: 780657 - DNA, 120 bp, Artificial Sequence
  ENSG00000251664_11 (sequence is synthesized)
atctgctcactgacacctcatgttcccttcaagctggtgtccacctacaagaattactactcgttggtgctggacagcgccctggaccgcgagagcgtgtcggcctatgagctggtggtg

SEQ ID NO: 780658 - DNA, 120 bp, Artificial Sequence
  ENSG00000251664_12 (sequence is synthesized)
actgcgcgggatgggggctcgccttcgctgtgggccacggctagagtgtccgtggaggtggccgacgtgaacgacaatgcgcctgcgttcgcgcagcccgagtacacagtgttcgtgaag

SEQ ID NO: 780659 - DNA, 120 bp, Artificial Sequence
  ENSG00000251664_13 (sequence is synthesized)
gagaacaacccgccgggctgccacatcttcacggtgtcggcatgggacgcggacgcgcagaagaacgcgctggtgtcctactcgctggtggagcggcgggtgggcgagcacgcactgtcg

SEQ ID NO: 780660 - DNA, 120 bp, Artificial Sequence
  ENSG00000251664_14 (sequence is synthesized)
agctacgtgtcggtgcacgcggagagcggcaaggtgtacgcgctgcagccgctagaccacgaggagctggagctgctgcagttccaggtgagcgcgcgcgacgccggcgtgccgcctctg

SEQ ID NO: 780661 - DNA, 120 bp, Artificial Sequence
  ENSG00000251664_15 (sequence is synthesized)
tgcaggtgttcgtgctggacgagaacgacaacgcgccggcactgctggcgactccggctggcagcgcaggaggcgcagttagcgagttggtaccgcggtcggtgggtgcgggccacgtgg

SEQ ID NO: 780662 - DNA, 120 bp, Artificial Sequence
  ENSG00000251664_16 (sequence is synthesized)
ggtgcgggccacgtggtggcgaaagtgcgcgcggtggacgctgactccggctataacgcttggctgtcctacgagttgcaaccggcggcggtcggcgcgcacatcccgttccacgtgggg

SEQ ID NO: 780663 - DNA, 120 bp, Artificial Sequence
  ENSG00000251664_17 (sequence is synthesized)
ctgtacactggcgagatcagcacgacacgcatcctggatgaggcggacgctccgcgccaccgcctgctggtgctggtgaaggaccacggtgagcccgcgctgacgtccacggccacggtg

SEQ ID NO: 780664 - DNA, 120 bp, Artificial Sequence
  ENSG00000251664_18 (sequence is synthesized)
ctggtgtcgctggtggagaacggccaggccccaaagacgtcgtcgcgggcctcagtgggcgctgtggatcccgaagcggctctggtggatattaacgtgtacctcatcatcgccatctgt

SEQ ID NO: 780665 - DNA, 120 bp, Artificial Sequence
  ENSG00000251664_19 (sequence is synthesized)
gcggtgtccagcctgctggtgctcacgctgctgctgtacactgcgctgcgttgctcagcgccgcccaccgtgagccggtgcgcgccgggcaagcccacgctggtgtgctccagcgccgtg

SEQ ID NO: 780666 - DNA, 120 bp, Artificial Sequence
  ENSG00000251664_20 (sequence is synthesized)
gggagttggtcttactcgcagcagaggaggcagagggtgtgctctgcagagagcccgcccaagacggacctcatggccttcagcccaagccttcagctgtctcgagaagattgtttaaat

SEQ ID NO: 780667 - DNA, 120 bp, Artificial Sequence
  ENSG00000251664_21 (sequence is synthesized)
cctcccagtgaaccacgacagcccaaccctgactggcgttactctgcctccctgagagcaggcatgcacagctctgtgcacctagaggaggctggcattctacgggctggtccaggaggg

SEQ ID NO: 780668 - DNA, 120 bp, Artificial Sequence; identical to SEQ ID NO: 772619
  ENSG00000251664_22 (sequence is synthesized)

SEQ ID NO: 780669 - DNA, 120 bp, Artificial Sequence; identical to SEQ ID NO: 80633
  ENSG00000251664_23 (sequence is synthesized)

SEQ ID NO: 780670 - DNA, 120 bp, Artificial Sequence; identical to SEQ ID NO: 80634
  ENSG00000251664_24 (sequence is synthesized)

SEQ ID NO: 780671 - DNA, 120 bp, Artificial Sequence; identical to SEQ ID NO: 80635
  ENSG00000251664_25 (sequence is synthesized)

SEQ ID NO: 780672 - DNA, 120 bp, Artificial Sequence; identical to SEQ ID NO: 80636
  ENSG00000251664_26 (sequence is synthesized)

SEQ ID NO: 780673 - DNA, 120 bp, Artificial Sequence; identical to SEQ ID NO: 80637
  ENSG00000251664_27 (sequence is synthesized)

SEQ ID NO: 780674 - DNA, 120 bp, Artificial Sequence; identical to SEQ ID NO: 80638
  ENSG00000251664_28 (sequence is synthesized)

SEQ ID NO: 780675 - DNA, 120 bp, Artificial Sequence; identical to SEQ ID NO: 80639
  ENSG00000251664_29 (sequence is synthesized)

SEQ ID NO: 780676 - DNA, 120 bp, Artificial Sequence; identical to SEQ ID NO: 80640
  ENSG00000251664_30 (sequence is synthesized)

SEQ ID NO: 780677 - DNA, 120 bp, Artificial Sequence; identical to SEQ ID NO: 80641
  ENSG00000251664_31 (sequence is synthesized)

SEQ ID NO: 780678 - DNA, 120 bp, Artificial Sequence; identical to SEQ ID NO: 80642
  ENSG00000251664_32 (sequence is synthesized)

SEQ ID NO: 780679 - DNA, 120 bp, Artificial Sequence; identical to SEQ ID NO: 80643
  ENSG00000251664_33 (sequence is synthesized)

SEQ ID NO: 780680 - DNA, 120 bp, Artificial Sequence; identical to SEQ ID NO: 80644
  ENSG00000251664_34 (sequence is synthesized)

SEQ ID NO: 780681 - DNA, 120 bp, Artificial Sequence; identical to SEQ ID NO: 80645
  ENSG00000251664_35 (sequence is synthesized)

SEQ ID NO: 780682 - DNA, 120 bp, Artificial Sequence; identical to SEQ ID NO: 80646
  ENSG00000251664_36 (sequence is synthesized)

SEQ ID NO: 780683 - DNA, 120 bp, Artificial Sequence; identical to SEQ ID NO: 80647
  ENSG00000251664_37 (sequence is synthesized)

SEQ ID NO: 780684 - DNA, 120 bp, Artificial Sequence; identical to SEQ ID NO: 80648
  ENSG00000251664_38 (sequence is synthesized)

SEQ ID NO: 780685 - DNA, 120 bp, Artificial Sequence; identical to SEQ ID NO: 80649
  ENSG00000251664_39 (sequence is synthesized)

SEQ ID NO: 780686 - DNA, 120 bp, Artificial Sequence; identical to SEQ ID NO: 80650
  ENSG00000251664_40 (sequence is synthesized)

SEQ ID NO: 780687 - DNA, 120 bp, Artificial Sequence; identical to SEQ ID NO: 80651
  ENSG00000251664_41 (sequence is synthesized)

SEQ ID NO: 780688 - DNA, 120 bp, Artificial Sequence; identical to SEQ ID NO: 80652
  ENSG00000251664_42 (sequence is synthesized)

SEQ ID NO: 780689 - DNA, 120 bp, Artificial Sequence; identical to SEQ ID NO: 80653
  ENSG00000251664_43 (sequence is synthesized)

SEQ ID NO: 780690 - DNA, 120 bp, Artificial Sequence; identical to SEQ ID NO: 80654
  ENSG00000251664_44 (sequence is synthesized)

SEQ ID NO: 780691 - DNA, 120 bp, Artificial Sequence
  ENSG00000251692_0 (sequence is synthesized)
atggggagtggaaactgggaggtcacaggtccaccttgtggcagtcggtgtgaacggcctcccggactcccacgcggggtccacggacagttccggagtgctgtgggcctgtcgggcctg

SEQ ID NO: 780692 - DNA, 120 bp, Artificial Sequence
  ENSG00000251692_1 (sequence is synthesized)
cgctggttccggagattccaggaggtgacctggacacacctgcagaacatcgccagcaactacaacgtgtcctacaacgttgacgtccggttccggagcctggcggaagagagccaggct

SEQ ID NO: 780693 - DNA, 120 bp, Artificial Sequence
  ENSG00000251692_2 (sequence is synthesized)
gtggctcaggcagtcaaccggtcacaggcctcggtgcagggggagctggcgcagctcaaggcctgggtgaggaagctgcagcgccgaggccggaaagtagacacgcggctgcgggccttg

SEQ ID NO: 780694 - DNA, 120 bp, Artificial Sequence
  ENSG00000251692_3 (sequence is synthesized)
gacctcaccctgggcgagaggagccagcagcgggcccgggaaaggaaggcacacaaggcccagagggacgccctgcaggactcactggcacgcctggagggcctcgtccacagccagggc

SEQ ID NO: 780695 - DNA, 120 bp, Artificial Sequence
  ENSG00000251692_4 (sequence is synthesized)
gccaggctggctgctctggaggggcggctgcccgtggcccaccctggcactgcagccctcgggccggccctggtcccaaccccaacccagcctgaggagctgggcccgacctccctgaag

SEQ ID NO: 780696 - DNA, 120 bp, Artificial Sequence
  ENSG00000251692_5 (sequence is synthesized)
ggcagccatcgggtactcagtgggactgccccaaaagaccctcggcagcaggcatggtccccccaggtgccaggagagatttgcggcgtgggccccaccctcgttttcccaaacgcctcc

SEQ ID NO: 780697 - DNA, 120 bp, Artificial Sequence
  ENSG00000251692_6 (sequence is synthesized)
accaggaacgtggtcttcctcagccctggtttcgtcactgccctgcgagccctgtccttctgcagctgggtccgcacggcctccggccgcctgggcaccctcctgtcctacgccaccgag

SEQ ID NO: 780698 - DNA, 120 bp, Artificial Sequence
  ENSG00000251692_7 (sequence is synthesized)
gacaatgacaacaagctggtgctgcacggccgagactccctgctgcccggatccatccacttcgtgatcggggacccggccttcagggagctgcccttgcagctgctgctggacggccag

SEQ ID NO: 780699 - DNA, 120 bp, Artificial Sequence
  ENSG00000251692_8 (sequence is synthesized)
tggcaccacatctgtgtcatctggacgtccacccagggcaggtactggctccacgtggatcgcaggctggtggccaccggctcccgcttcagggagggctatgagatcccccccggaggg

SEQ ID NO: 780700 - DNA, 120 bp, Artificial Sequence
  ENSG00000251692_9 (sequence is synthesized)
tccctcgtgctgggccaggaacaagacagcgtggggggcggattcgacagctccgaggccttcgtggggagcatgtctggcttggctatctgggatcgggcgctggttcccggggaagtt

SEQ ID NO: 780701 - DNA, 120 bp, Artificial Sequence
  ENSG00000251692_10 (sequence is synthesized)
gcaaaccttgccatcgggaaagagttcccgacaggtgccatcctgacgctggccaatgctgcactagcaggcggatttgtgcagggggccaactgcacctgcctggaacgctgtccctga

SEQ ID NO: 780702 - DNA, 120 bp, Artificial Sequence
  ENSG00000251692_11 (sequence is synthesized)
ctgctggggccttgccgtctctccggatgggttgctcgtggaggaagaccttgtctttcttccttgtttttgtgcctatatatctacatggggcttcatcgcaggaagccgccccagtgg

SEQ ID NO: 780703 - DNA, 120 bp, Artificial Sequence
  ENSG00000253117_0 (sequence is synthesized)
ctagcatcattcatccagctgcactccagtggagccttcacggagtccgttccagttgctgcctaagccccatcctttgttctcctgctatgattgcgtttctcctcaccagtgtgctga

SEQ ID NO: 780704 - DNA, 120 bp, Artificial Sequence
  ENSG00000253117_1 (sequence is synthesized)
tgatcccccatgccggaggccatcctctggacactccacatcttccacaggagctgcctccaggactcccaaacaatatcaatatcactttcttcagtgggatgtttaaaaatgtggaaa

SEQ ID NO: 780705 - DNA, 120 bp, Artificial Sequence
  ENSG00000253117_2 (sequence is synthesized)
gtgtggctgaaatttttgattgcctgggcccccacttcacctggctgcaggctgtcttcaccaatttccctgtgctgatccagtttgtcaatggtatgaagtgtgtggctggtctctgcc

SEQ ID NO: 780706 - DNA, 120 bp, Artificial Sequence
  ENSG00000253117_3 (sequence is synthesized)
cccgagactttgaagactatggttgcacctgcaggtttgagatggaagggttgcctgtggatgaatctgacagctgctgcttccagcaccgcaggtgctatgaggaggccgctgagatgg

SEQ ID NO: 780707 - DNA, 120 bp, Artificial Sequence
  ENSG00000253117_4 (sequence is synthesized)
actgtctccaagaccccgccaaacttagcacagaggtcaattgtgtcagcaagaagatcatatgtgagtccaaggacaactgtgagcacctgctgtgtacctgtgataaggctgccatag

SEQ ID NO: 780708 - DNA, 120 bp, Artificial Sequence
  ENSG00000253117_5 (sequence is synthesized)
agtgcttggctcgatccagcctcaactcttccctgaaccttctggacacctccttctgcctggctcagactccagagacaaccatcaaggaagacttgacaacacttctgcccagagtgg

SEQ ID NO: 780709 - DNA, 120 bp, Artificial Sequence
  ENSG00000253117_6 (sequence is synthesized)
ttcctgtggagcccacagacaccagcctgacagccctttcaggagaagaagcaggccacgatcaggaaggagtgggagctgctagggctacgtcccctccaggatctgcagagatagttg

SEQ ID NO: 780710 - DNA, 120 bp, Artificial Sequence
  ENSG00000253117_7 (sequence is synthesized)
cctgtgacagattcaccttcctgcacctgggaagtggggacaacatgcaggtgatgccacagcttggagagatgctcttttgtctgacatcccggtgcccggaggaatttgagtcttatg

SEQ ID NO: 780711 - DNA, 120 bp, Artificial Sequence
  ENSG00000253117_8 (sequence is synthesized)
gctgttactgtggacaagaaggaagaggcgagccaagggatgacctagacaggtgctgcttgtcccatcactgctgcctagagcaagtgagaaggctgggctgcctgcttgagaggcttc

SEQ ID NO: 780712 - DNA, 120 bp, Artificial Sequence
  ENSG00000253117_9 (sequence is synthesized)
cttggtcaccggtggtgtgtgtggatcatacgcccaagtgtgggggccaaagcctgtgtgagaagttgctctgtgcctgtgaccagacggcagctgagtgcatgacctctgcctccttta

SEQ ID NO: 780713 - DNA, 120 bp, Artificial Sequence
  ENSG00000253117_10 (sequence is synthesized)
accaaagcctcaagtccccaagcagactcgggtgccctgggcagccagcagcctgtgaagacagcctgcaccctgtgcccgcagcccccaccctgggctccagctctgaggaggacagcg

SEQ ID NO: 780714 - DNA, 120 bp, Artificial Sequence
  ENSG00000253117_11 (sequence is synthesized)
aggaggaccctccacaggaggacctcggcagagccaagaggtttctgcggaagtcactgggtcccttggggatcgggcctcttcatggaagatagatgcccagagaaaatggctaacacc

SEQ ID NO: 780715 - DNA, 120 bp, Artificial Sequence
  ENSG00000253117_12 (sequence is synthesized)
ttcagtagcgtggctcctgctccaccttcagctctttatctctcagcctcctctgtcccttggagccttcttcccttcctttaactcagaggcggggagggaacagaggccgtgagccct

SEQ ID NO: 780716 - DNA, 120 bp, Artificial Sequence
  ENSG00000253117_13 (sequence is synthesized)
gcccatgcctcatcagctgtggtcacctcacaagccaatgtacacttggagaaggcacaccatggtacctccatgctcctttagtgcactgtggaagctcaataaatactccaatcaaca

SEQ ID NO: 780717 - DNA, 120 bp, Artificial Sequence
  ENSG00000253148_0 (sequence is synthesized)
gttaccacttggaaaacaattcatctgaaagaagcacagattttctcatctatcctgtcaacaaagaaggaatcaagagagcaaggacagtgatttcccctgcattgcatttgtcttgaa

SEQ ID NO: 780718 - DNA, 120 bp, Artificial Sequence
  ENSG00000253148_1 (sequence is synthesized)
gatcagtcagaaagagaaactcggcatcatctgtgacagacagtggaacgaaaaatgccagtgaaatgctgtttctacaggtcaccaactgcggaaacaatgacatggtctgaaaatatg

SEQ ID NO: 780719 - DNA, 120 bp, Artificial Sequence
  ENSG00000253148_2 (sequence is synthesized)
gacacgcttttagccaaccaagctggtctagatgcttttcgaatatttctaaaatcagagtttagtgaagaaaatgttgagttctggcttgcctgtgaagactttaagaaaacgaaaaat

SEQ ID NO: 780720 - DNA, 120 bp, Artificial Sequence
  ENSG00000253148_3 (sequence is synthesized)
gcagacaaaattgcttccaaagccaagatgatttattctgaattcattgaagctgatgcacctaaagagattaacattgacttcggtaccagagacctcatctcaaagaatattgctgaa

SEQ ID NO: 780721 - DNA, 120 bp, Artificial Sequence
  ENSG00000253148_4 (sequence is synthesized)
ccaacactcaaatgctttgatgaggctcagaaattaatctattgtctcatggccaaggattctttccctcgatttctgaagtcagagatttataaaaaactggtaaatagccaacaggtt

SEQ ID NO: 780722 - DNA, 120 bp, Artificial Sequence
  ENSG00000253148_5 (sequence is synthesized)
ccaaatcataaaaaatggctcccttttttgtgaggaaggtaaaagttaactaatcactatacttcagggctacaatattttaaatatacaagcatgatgcattgtcttttgttttgtttt

SEQ ID NO: 780723 - DNA, 120 bp, Artificial Sequence
  ENSG00000253148_6 (sequence is synthesized)
taggatttagaaaacattttttacccaaacagatgaataacgttttatacaacaagcctgaatttctaactcagttgtttagaatgtatttgctttaccagctatttaatctcctactgg

SEQ ID NO: 780724 - DNA, 120 bp, Artificial Sequence
  ENSG00000253148_7 (sequence is synthesized)
cttttgagcatcatatacacaattttaaataccattgctttattcaaaaaaatctcacttttgtaaaaagagaatttctgaaccaaaatacaagctttcatttaatatatttaactgttt

SEQ ID NO: 780725 - DNA, 120 bp, Artificial Sequence
  ENSG00000253148_8 (sequence is synthesized)
tttttctgccatttctttccaactatttctaataatgtggttatgaaaactgctacgcctctcaaattatattttttaaatcacaggaatgtatacacatttatatgtatgtcttgaatg

SEQ ID NO: 780726 - DNA, 120 bp, Artificial Sequence
  ENSG00000253148_9 (sequence is synthesized)
caccatggaccaaagtttttcaaaatatatcacttggctcaattcaatggcatcacatataaaatgtgatgagttatgtatgaaaaggcctcaagggtggggaatactgattttcttatg

SEQ ID NO: 780727 - DNA, 120 bp, Artificial Sequence
  ENSG00000253148_10 (sequence is synthesized)
ttaacagaaatataaaagaaagtggaagactaaggagcatagataaatccttataagatgaagtatatagcaagtcataaaatttaagaatttgcaacattatctactcaattgtgggga

SEQ ID NO: 780728 - DNA, 120 bp, Artificial Sequence
  ENSG00000253148_11 (sequence is synthesized)
agtatctattcactccttcagcactgatacttgtttataaaacccaaacaatttttaaatgcatttattttgagatgttcctaaaattgtttcattctatatgtaaatatcctgtgataa

SEQ ID NO: 780729 - DNA, 120 bp, Artificial Sequence
  ENSG00000253148_12 (sequence is synthesized)
atacgaataatttcatttcaatatgagaagctgtaaagattcaacagatctcccacgtttccattttctttgcacagatttatttatctgcattgatatttctgcttttagattgtttga

SEQ ID NO: 780730 - DNA, 120 bp, Artificial Sequence
  ENSG00000253148_13 (sequence is synthesized)
acattaaaaaatggaggaaaaatagcatggcttattttatgttttcacaaactactcatttgatagacaaaattttgtcttcccttcatcatgagaaataaacatttaaacatattcaaa

SEQ ID NO: 780731 - DNA, 120 bp, Artificial Sequence
  ENSG00000253159_0 (sequence is synthesized)
aagattgtgcagtaattggttaggactctgagcgccgctgttcaccaatcggggagagaaaagcggagatcctgctcgccttgcacgcgcctgaagcacaaagcagatagctaggaatga

SEQ ID NO: 780732 - DNA, 120 bp, Artificial Sequence
  ENSG00000253159_1 (sequence is synthesized)
accatccctgggagtatgtggaaacaacggaggagctctgacttcccaactgtcccattctatgggcgaaggaactgctcctgacttcagtggttaagggcagaattgaaaataattctg

SEQ ID NO: 780733 - DNA, 120 bp, Artificial Sequence
  ENSG00000253159_2 (sequence is synthesized)
gaggaagataagaatgattcctgcgcgactgcaccgggactacaaagggcttgtcctgctgggaatcctcctggggactctgtgggagaccggatgcacccagatacgctattcagttcc

SEQ ID NO: 780734 - DNA, 120 bp, Artificial Sequence
  ENSG00000253159_3 (sequence is synthesized)
ggaagagctggagaaaggctctagggtgggcgacatctccagggacctggggctggagccccgggagctcgcggagcgcggagtccgcatcatccccagaggtaggacgcagcttttcgc

SEQ ID NO: 780735 - DNA, 120 bp, Artificial Sequence
  ENSG00000253159_4 (sequence is synthesized)
cctgaatccgcgcagcggcagcttggtcacggcgggcaggatagaccgggaggagctctgtatgggggccatcaagtgtcaattaaatctagacattctgatggaggataaagtgaaaat

SEQ ID NO: 780736 - DNA, 120 bp, Artificial Sequence
  ENSG00000253159_5 (sequence is synthesized)
atatggagtagaagtagaagtaagggacattaacgacaatgcgccttactttcgtgaaagtgaattagaaataaaaattagtgaaaatgcagccactgagatgcggttccctctacccca

SEQ ID NO: 780737 - DNA, 120 bp, Artificial Sequence
  ENSG00000253159_6 (sequence is synthesized)
cgcctgggatccggatatcgggaagaactctctgcagagctacgagctcagcccgaacactcacttctccctcatcgtgcaaaatggagccgacggtagtaagtaccccgaattggtgct

SEQ ID NO: 780738 - DNA, 120 bp, Artificial Sequence
  ENSG00000253159_7 (sequence is synthesized)
gaaacgcgccctggaccgcgaagaaaaggctgctcaccacctggtccttacggcctccgacgggggcgacccggtgcgcacaggcaccgcgcgcatccgcgtgatggttctggatgcgaa

SEQ ID NO: 780739 - DNA, 120 bp, Artificial Sequence
  ENSG00000253159_8 (sequence is synthesized)
cgacaacgcaccagcgtttgctcagcccgagtaccgcgcgagcgttccggagaatctggccttgggcacgcagctgcttgtagtcaacgctaccgaccctgacgaaggagtcaatgcgga

SEQ ID NO: 780740 - DNA, 120 bp, Artificial Sequence
  ENSG00000253159_9 (sequence is synthesized)
agtgaggtattccttccggtatgtggacgacaaggcggcccaagttttcaaactagattgtaattcagggacaatatcaacaataggggagttggaccacgaggagtcaggattctacca

SEQ ID NO: 780741 - DNA, 120 bp, Artificial Sequence
  ENSG00000253159_10 (sequence is synthesized)
gatggaagtgcaagcaatggataatgcaggatattctgcgcgagccaaagtcctgatcactgttctggacgtgaacgacaatgccccagaagtggtcctcacctctctcgccagctcggt

SEQ ID NO: 780742 - DNA, 120 bp, Artificial Sequence
  ENSG00000253159_11 (sequence is synthesized)
tcccgaaaactctcccagagggacattaattgcccttttaaatgtaaatgaccaagattctgaggaaaacggacaggtgatctgtttcatccaaggaaatctgccctttaaattagaaaa

SEQ ID NO: 780743 - DNA, 120 bp, Artificial Sequence
  ENSG00000253159_12 (sequence is synthesized)
atcttacggaaattactatagtttagtcacagacatagtcttggatagggaacaggttcctagctacaacatcacagtgaccgccactgaccggggaaccccgcccctatccacggaaac

SEQ ID NO: 780744 - DNA, 120 bp, Artificial Sequence
  ENSG00000253159_13 (sequence is synthesized)
tcatatctcgctgaacgtggcagacaccaacgacaacccgccggtcttccctcaggcctcctattccgcttatatcccagagaacaatcccagaggagtttccctcgtctctgtgaccgc

SEQ ID NO: 780745 - DNA, 120 bp, Artificial Sequence
  ENSG00000253159_14 (sequence is synthesized)
ccacgaccccgactgtgaagagaacgcccagatcacttattccctggctgagaacaccatccaaggggcaagcctatcgtcctacgtgtccatcaactccgacactggggtactgtatgc

SEQ ID NO: 780746 - DNA, 120 bp, Artificial Sequence
  ENSG00000253159_15 (sequence is synthesized)
gctgagctccttcgactacgagcagttccgagacttgcaagtgaaagtgatggcgcgggacaacgggcacccgcccctcagcagcaacgtgtcgttgagcctgttcgtgctggaccagaa

SEQ ID NO: 780747 - DNA, 120 bp, Artificial Sequence
  ENSG00000253159_16 (sequence is synthesized)
gaccagaacgacaatgcgcccgagatcctgtaccccgccctccccacggacggttccactggcgtggagctggctccccgctccgcagagcccggctacctggtgaccaaggtggtggcg

SEQ ID NO: 780748 - DNA, 120 bp, Artificial Sequence
  ENSG00000253159_17 (sequence is synthesized)
agactccggccagaacgcctggctgtcctaccgtctgctcaaggccagcgagccgggactcttctcggtgggtctgcacacgggcgaggtgcgcacggcgcgagccctgctggacagaga

SEQ ID NO: 780749 - DNA, 120 bp, Artificial Sequence
  ENSG00000253159_18 (sequence is synthesized)
cgcgctcaagcagagcctcgtagtggccgtccaggaccacggccagccccctctctccgccactgtcacgctcaccgtggccgtggccgacagcatcccccaagtcctggcggacctcgg

SEQ ID NO: 780750 - DNA, 120 bp, Artificial Sequence
  ENSG00000253159_19 (sequence is synthesized)
cagcctcgagtctccagctaactctgaaacctcagacctcactctgtacctggtggtagcggtggccgcggtctcctgcgtcttcctggccttcgtcatcttgctgctggcgctcaggct

SEQ ID NO: 780751 - DNA, 120 bp, Artificial Sequence
  ENSG00000253159_20 (sequence is synthesized)
agcgccggcgtcgcactttgtgggcgtggacggggtgcaggctttcctgcagacctattcccacgaggtttccctcaccacggactcgcggaagagtcacctgatcttcccccagcccaa

SEQ ID NO: 780752 - DNA, 120 bp, Artificial Sequence
  ENSG00000253159_21 (sequence is synthesized)
ctatgcagacatgctcgtcagccaggagagctttgaaaaaagcgagccccttttgctgtcaggtgattcggtattttctaaagacagtcatgggttaattgagcaagccccgcccaacac

SEQ ID NO: 780753 - DNA, 120 bp, Artificial Sequence; identical to SEQ ID NO: 80682
  ENSG00000253159_22 (sequence is synthesized)

SEQ ID NO: 780754 - DNA, 120 bp, Artificial Sequence; identical to SEQ ID NO: 80683
  ENSG00000253159_23 (sequence is synthesized)

SEQ ID NO: 780755 - DNA, 120 bp, Artificial Sequence; identical to SEQ ID NO: 80684
  ENSG00000253159_24 (sequence is synthesized)

SEQ ID NO: 780756 - DNA, 120 bp, Artificial Sequence; identical to SEQ ID NO: 80685
  ENSG00000253159_25 (sequence is synthesized)

SEQ ID NO: 780757 - DNA, 120 bp, Artificial Sequence; identical to SEQ ID NO: 80686
  ENSG00000253159_26 (sequence is synthesized)

SEQ ID NO: 780758 - DNA, 120 bp, Artificial Sequence; identical to SEQ ID NO: 80687
  ENSG00000253159_27 (sequence is synthesized)

SEQ ID NO: 780759 - DNA, 120 bp, Artificial Sequence; identical to SEQ ID NO: 80688
  ENSG00000253159_28 (sequence is synthesized)

SEQ ID NO: 780760 - DNA, 120 bp, Artificial Sequence; identical to SEQ ID NO: 80689
  ENSG00000253159_29 (sequence is synthesized)

SEQ ID NO: 780761 - DNA, 120 bp, Artificial Sequence; identical to SEQ ID NO: 80690
  ENSG00000253159_30 (sequence is synthesized)

SEQ ID NO: 780762 - DNA, 120 bp, Artificial Sequence; identical to SEQ ID NO: 80691
  ENSG00000253159_31 (sequence is synthesized)

SEQ ID NO: 780763 - DNA, 120 bp, Artificial Sequence; identical to SEQ ID NO: 80692
  ENSG00000253159_32 (sequence is synthesized)

SEQ ID NO: 780764 - DNA, 120 bp, Artificial Sequence; identical to SEQ ID NO: 80693
  ENSG00000253159_33 (sequence is synthesized)

SEQ ID NO: 780765 - DNA, 120 bp, Artificial Sequence; identical to SEQ ID NO: 80694
  ENSG00000253159_34 (sequence is synthesized)

SEQ ID NO: 780766 - DNA, 120 bp, Artificial Sequence; identical to SEQ ID NO: 80695
  ENSG00000253159_35 (sequence is synthesized)

SEQ ID NO: 780767 - DNA, 120 bp, Artificial Sequence; identical to SEQ ID NO: 80696
  ENSG00000253159_36 (sequence is synthesized)

SEQ ID NO: 780768 - DNA, 120 bp, Artificial Sequence; identical to SEQ ID NO: 80697
  ENSG00000253159_37 (sequence is synthesized)

SEQ ID NO: 780769 - DNA, 120 bp, Artificial Sequence; identical to SEQ ID NO: 80698
  ENSG00000253159_38 (sequence is synthesized)

SEQ ID NO: 780770 - DNA, 120 bp, Artificial Sequence; identical to SEQ ID NO: 80699
  ENSG00000253159_39 (sequence is synthesized)

SEQ ID NO: 780771 - DNA, 120 bp, Artificial Sequence
  ENSG00000253188_0 (sequence is synthesized)
atgagcctcgggctcctgtgctgtgtggccttttctctcctgtgggcaggtccaatgaatgctggtgtcactcagaccccaaaattccacgtcctgaagacaggacagagcatgactctg

SEQ ID NO: 780772 - DNA, 120 bp, Artificial Sequence
  ENSG00000253188_1 (sequence is synthesized)
caaaggagaagttcccaatggctacaatgtctccagatcaaacacagaggatttccccctcaagctggagtcagctgctccctctcagacttctgtttacttctgtgccagcagttactc

SEQ ID NO: 780773 - DNA, 120 bp, Artificial Sequence
  ENSG00000253250_0 (sequence is synthesized)
accgcggtcagccagcggaccagcggcaggagccgttccccgacgggcagcagggcgctcggcctccgcgtgtgggctgagcgcggcgacgctgctgccccgaaatccccgtggattttg

SEQ ID NO: 780774 - DNA, 120 bp, Artificial Sequence
  ENSG00000253250_1 (sequence is synthesized)
agtcgtatggaacctcaaagtctttgtgacaatggaaaccaaaaaattaattggtaaaccgcttcaaccagcaagacctgttcgtcatctgacttctcccccaggagcagtgttcccttt

SEQ ID NO: 780775 - DNA, 120 bp, Artificial Sequence
  ENSG00000253250_2 (sequence is synthesized)
caactttcaaaacgaatatccatgcaacactcagtgcatacaaagtggagttagcagatgtaagacgaatggaatgcaagccttttctcaaggtcttaatgagcaacagcaacagcagtc

SEQ ID NO: 780776 - DNA, 120 bp, Artificial Sequence
  ENSG00000253250_3 (sequence is synthesized)
tccagttaagaaagagagaattaaatacagcagagatttcctgttgaagctctcaagtgtttccatctgcagaaaaaaaccagactttctgcctgatcatcccattgtactgcaaaaacc

SEQ ID NO: 780777 - DNA, 120 bp, Artificial Sequence
  ENSG00000253250_4 (sequence is synthesized)
aacaataactgtaatggactgtgacaattcaatttattcttaattttgatggttggctatttgacttctctaaaaatgagaaagagctattttaaaatataaagaattttctaatcagtt

SEQ ID NO: 780778 - DNA, 120 bp, Artificial Sequence
  ENSG00000253250_5 (sequence is synthesized)
tcagctttgcaggaggtttcctgcataaattgggaagtaacactggaaagtaggaatttggttagtgaagtgggaagactgtatatttataatttgcatactacttgcaattttttgttt

SEQ ID NO: 780779 - DNA, 120 bp, Artificial Sequence
  ENSG00000253250_6 (sequence is synthesized)
ttcatcacttgtaataatggaatggaaatgtaagctgtaaagactctcaaatataaaatatttgctacagtgtatatatggtacataattgcttgttgcttttaaagttccttctgttgt

SEQ ID NO: 780780 - DNA, 120 bp, Artificial Sequence
  ENSG00000253250_7 (sequence is synthesized)
tctgcttcccactgatttcataccagctcatgaatggatcattacagtctctccagaggcttagaatgattcagaatgttcaatgcatagttctcaataaacaggaggcagaatttttaa

SEQ ID NO: 780781 - DNA, 120 bp, Artificial Sequence
  ENSG00000253251_0 (sequence is synthesized)
gggaggccgcgtattgttacctaggggtggtttcttttcctgcagtcgcgatgtgtgattgcagatggaaaacaaagtattttatgcctacgtttctaagatagaagaaatggacttgtt

SEQ ID NO: 780782 - DNA, 120 bp, Artificial Sequence
  ENSG00000253251_1 (sequence is synthesized)
gaaaagaagccagtttgtaaaggacacagtaggagaatttaaggtaccaccaccagagagaggttgagagtgcgtttgacttttggttttgccaaacgcgaggttttccgtttccttccg

SEQ ID NO: 780783 - DNA, 120 bp, Artificial Sequence
  ENSG00000253251_2 (sequence is synthesized)
gggcaagttgaacctgtccagcccccgtaggctgtgggtcaaaagtgccggtcaaaatggaagtgaatccccctaaacaggagcacctgctggcgctaaaaggtcctgtttccctctgat

SEQ ID NO: 780784 - DNA, 120 bp, Artificial Sequence
  ENSG00000253251_3 (sequence is synthesized)
ttggcaagagagacaatcttgcaataataaattaacattctagctctgaggagttcaactaagaaattttctcatcactaagagtaactggattactgcagaatgactacagaagtaata

SEQ ID NO: 780785 - DNA, 120 bp, Artificial Sequence
  ENSG00000253251_4 (sequence is synthesized)
ttacattatcgaccatgtgagagtgatcccacacaactgccaaaaattgcagaaaaagcaattcaagactttcctactcgtccgctatcaagatttataccttggtttccatatgatggg

SEQ ID NO: 780786 - DNA, 120 bp, Artificial Sequence
  ENSG00000253251_5 (sequence is synthesized)
tccaagcttccactcagacctaaaagatcaccacctgtgatttctgaagaggcagctgaagatgtgaaacagtacttaaccatttcagaacatgatgctaagtcacacagttatgattgc

SEQ ID NO: 780787 - DNA, 120 bp, Artificial Sequence
  ENSG00000253251_6 (sequence is synthesized)
acagtagatctattggagtttcaacctagcttgaaaaagcagcatttaacctggtcacacacactgaaggaacagactaattctggaaatctgggtaaacaatcagaaaagggaaaacag

SEQ ID NO: 780788 - DNA, 120 bp, Artificial Sequence
  ENSG00000253251_7 (sequence is synthesized)
tttaaaggcactaaatttacactcactttatagagcaagatggacaatagaacacactatttgtaacagccaaactctggaagacatttggacaaaactcaatcaaattattaggcacaa

SEQ ID NO: 780789 - DNA, 120 bp, Artificial Sequence
  ENSG00000253251_8 (sequence is synthesized)
tgaacttccatcttgtaatgctacaattcagaggcatttaggccaaatatgggtgttctgtgatattatgtattgtgaatatgtgggaagtcttcttaaaggaagattagctcttactgg

SEQ ID NO: 780790 - DNA, 120 bp, Artificial Sequence
  ENSG00000253251_9 (sequence is synthesized)
ctggaaaaattaatttatttgtgcataaatatggtgttatttttagtatgtaatgaattccactgattgtcaaaaagaatattctgaatgaaatgaatatggattgaaatagataaaata

SEQ ID NO: 780791 - DNA, 120 bp, Artificial Sequence
  ENSG00000253251_10 (sequence is synthesized)
ttacaggttttaaaatttttaatgactttttagaattcctaggcttgtcaattaagtcaagaaattgctgagttctgcttattggcagccttcttttaaatgtgataaattattgtttac

SEQ ID NO: 780792 - DNA, 120 bp, Artificial Sequence
  ENSG00000253251_11 (sequence is synthesized)
actgaatttgaaggtaaaaatgttctgttccttttgttacaaactgtgattgaattagtcatgaattaagttgtatagtttggattttggttaatctctaaaatctaattttactgtatt

SEQ ID NO: 780793 - DNA, 120 bp, Artificial Sequence
  ENSG00000253251_12 (sequence is synthesized)
tttttccttacctcaagtgtaattttttaaaaaataaaactcgaaacaattctctttggagtgctatttatgtggcatgaatgtagttcaaagtgggagactagtctagatttataatga

SEQ ID NO: 780794 - DNA, 120 bp, Artificial Sequence
  ENSG00000253251_13 (sequence is synthesized)
tgtttccaaagatatgtaataacaattgataggctgttttcaaacaacgatacaaaatgtatactttgcctaaaacgataatgtatcctgttttgaaggaaagtatcaaatgttgaatga

SEQ ID NO: 780795 - DNA, 120 bp, Artificial Sequence
  ENSG00000253251_14 (sequence is synthesized)
gatgcctgtgttagcgagattgtctcttactgtggaactttgtaatgtttagtgatacagtgatgggacctgtaagcttaacctgagcaaatgatctagactaaaatggagattaaaatg

SEQ ID NO: 780796 - DNA, 120 bp, Artificial Sequence
  ENSG00000253276_0 (sequence is synthesized)
aagagaggagaagaaagagaaaccaggggggcgaggcgccgtccaatgacaaagcccaggggtgggcgccggccgccatcttgtaccgggcagcaggatattcgcccgcgtcctccgccc

SEQ ID NO: 780797 - DNA, 120 bp, Artificial Sequence
  ENSG00000253276_1 (sequence is synthesized)
tcggagggggaggggcggcggcggaggcgagaaaagtagcgagagacgccagcagcagccgccgccgcggagccaacgcggactgggacggcggcggcagtagtgggacccggcgagcgt

SEQ ID NO: 780798 - DNA, 120 bp, Artificial Sequence
  ENSG00000253276_2 (sequence is synthesized)
gagtggcccggagcggccttcgatgcggcgcagtatgaagaggcggcggcgccggcgcccggtcgccccggccacggccgcccggggcggcgactttagggcagaagacggggctgggtt

SEQ ID NO: 780799 - DNA, 120 bp, Artificial Sequence
  ENSG00000253276_3 (sequence is synthesized)
ggaggcgcgggaggagaaggtggtgtactcgcggtcgcaactgtcgctggctgacagcaccaaggcgctgggcgacgccttcaagctcttcatgccccgcagcacggagttcatgagctc

SEQ ID NO: 780800 - DNA, 120 bp, Artificial Sequence
  ENSG00000253276_4 (sequence is synthesized)
ggacgcggagctctggagcttcctctgcagcctcaagcaccagttctccccgcacatcctgcgcagcaaggacgtctacggctactcctcctgccgggccctggtacccgaccccccggg

SEQ ID NO: 780801 - DNA, 80 bp, Artificial Sequence
  ENSG00000253276_5 (sequence is synthesized)
gctactcctcctgccgggccctggtacccgaccccccggggccccctacagcccgcggccaggcgcgccggccggttccg

SEQ ID NO: 780802 - DNA, 120 bp, Artificial Sequence
  ENSG00000253276_6 (sequence is synthesized)
caccgccgccgccccccgaggagagctgcccggccaagcccgtggcccccgggccctgcttcgggggccgcaccttggaggagatctggagggcggccaccccgacgctgaccaccttcc

SEQ ID NO: 780803 - DNA, 120 bp, Artificial Sequence
  ENSG00000253276_7 (sequence is synthesized)
catccgcgtcggcagcgacgtgtggggcgagcgcagcctggcggcagcgcggcgcagggcgcgccaggtcctgcgagtgaacctggaacccatggtgaggctccgccgcttcccggtgcc

SEQ ID NO: 780804 - DNA, 120 bp, Artificial Sequence
  ENSG00000253276_8 (sequence is synthesized)
ccgggcatgaggtgcggcctccagggcgcctcctgccggccccgaccttgggacaggccttccgcccggaggaatgaacaagtgtcagtcgagtgtttacagatccggccaggaccccgg

SEQ ID NO: 780805 - DNA, 120 bp, Artificial Sequence
  ENSG00000253276_9 (sequence is synthesized)
cccccaatgcactttacgcgcgaagaagttgccggatggttgtccctgtcccgggccgcggcgcggtcgtcttggacgctggggcaggtgtgccctctgctgcctcccgtacccggcctg

SEQ ID NO: 780806 - DNA, 120 bp, Artificial Sequence
  ENSG00000253276_10 (sequence is synthesized)
cggagggaggggacagctggacccgcaggggaggtccctttcttcctgaccaccgattgagacgtctccaggaccttaggggcagatccgttttctcactgttggactctacctcactgg

SEQ ID NO: 780807 - DNA, 120 bp, Artificial Sequence
  ENSG00000253276_11 (sequence is synthesized)
tctggaagtcctccgaagacattatttttccaaaggaatttggtttcgtgcttgtgtaataaagccagaatttacttgttctttatctccccctttttctatttcactgtcacccctctt

SEQ ID NO: 780808 - DNA, 120 bp, Artificial Sequence
  ENSG00000253276_12 (sequence is synthesized)
tgtggacagaagttcgaacatgtggtgttgcactagtttgtgctcagggtattctgaagcccactcgtttcctaatttttactggattccaaagctttgatcgaggatattttttaagag

SEQ ID NO: 780809 - DNA, 120 bp, Artificial Sequence
  ENSG00000253276_13 (sequence is synthesized)
gttcaagcttgtgactgttagtagtgcaaggatttgtatgggctcagtgattacaaacaaagacatgcaaaatacaactgtttaaacattttcaaggtatttttaaaggttttgtattga

SEQ ID NO: 780810 - DNA, 120 bp, Artificial Sequence
  ENSG00000253276_14 (sequence is synthesized)
aacaatgtttatatttactgagctcctaaaaatggtagaatacacatgaaaacttttgtttaggaaaagttaacttgttaaattcttttgaattgaataaaaaaatgcattgaaaccata

SEQ ID NO: 780811 - DNA, 120 bp, Artificial Sequence
  ENSG00000253276_15 (sequence is synthesized)
tggtgtgtgattaaaaaaaatgaataaattgtgaagaactggttttggttacaggagtcactggaatccgactggagatgatttggccccctgtcctggtctaacatacaaatctaggaa

SEQ ID NO: 780812 - DNA, 120 bp, Artificial Sequence
  ENSG00000253276_16 (sequence is synthesized)
tattatgcgttaaagtattttaaaatacattatccttgtaatgtattttacaaggataatgtattttaaaatgggagttgcataggagagatggatgtgtgtaaacattatcactaaaat

SEQ ID NO: 780813 - DNA, 120 bp, Artificial Sequence
  ENSG00000253276_17 (sequence is synthesized)
gataaacagaatacccattagaattcttagaactattaatgatcaagaggggtggaggcatttcttggtatcaaataactggttaaggttactttgggcgaaatctatttcctttttgtt

SEQ ID NO: 780814 - DNA, 120 bp, Artificial Sequence
  ENSG00000253276_18 (sequence is synthesized)
tttgttgttggataacaagaaatgtctagactaatattcatcagttttacaaacataatgaaaattagttgatttttagttgatttttttgtcccaacattttttttaacctttttgcca

SEQ ID NO: 780815 - DNA, 120 bp, Artificial Sequence
  ENSG00000253276_19 (sequence is synthesized)
ctcattatatgtttgcagttctaggtctttgacagctgaagaccacaggaatcaaacaggcgagacacacagaatactgacccttctttacgcttttatagtgtttataccatatggccc

SEQ ID NO: 780816 - DNA, 120 bp, Artificial Sequence
  ENSG00000253276_20 (sequence is synthesized)
agtgtggaattcttgattatccaagtgcctttggtcatttgtggcaggaaaacttaatagtttttagccagcagtgccacagccagcttttactgcaatacctaaagggtcaagtagtgt

SEQ ID NO: 780817 - DNA, 120 bp, Artificial Sequence
  ENSG00000253276_21 (sequence is synthesized)
ttttgtaccactattatttcaaatttaagtattctgccatgaaacgatccatactgggctggaacttgacatgtgaaatctttaatactaaagcttatctctgcttggcagctttttagg

SEQ ID NO: 780818 - DNA, 120 bp, Artificial Sequence
  ENSG00000253276_22 (sequence is synthesized)
agaataatgagagttacaattttgactcttgcgttcctagaattcaaatggcatagctttctgaaatgagtatttcaagtttagtagtccgtataggagtgttgtgacttcaatttcagt

SEQ ID NO: 780819 - DNA, 120 bp, Artificial Sequence
  ENSG00000253276_23 (sequence is synthesized)
gttcttgttaaaagaaataatatgatatatatatacacacatatatataacttgatgccagttttctagtaagcctcagtcttttattcactactcaatgataatgcattgtacaaacac

SEQ ID NO: 780820 - DNA, 120 bp, Artificial Sequence
  ENSG00000253276_24 (sequence is synthesized)
tgtcacatgagtaaataaaaatgaataattccttagaagatggagagtgttaaattatatttgtgataggaagcttagacatatcttttggttattagcttccattgccaattgtatttc

SEQ ID NO: 780821 - DNA, 120 bp, Artificial Sequence
  ENSG00000253276_25 (sequence is synthesized)
agatgcatagggttttcttcccaaaaatatattgttaacttttatagctaactagcacctggaaaaaatgtatttgtacaactttactattgtatatagttttataataatgaaaaataa

SEQ ID NO: 780822 - DNA, 120 bp, Artificial Sequence
  ENSG00000253276_26 (sequence is synthesized)
acccaatggccatattagaatgcaatttcgacatacagcttatctagatagttttccagaggattttgaaatttggcttaactgggaggataactgctcagcacaccactgaaacataac

SEQ ID NO: 780823 - DNA, 120 bp, Artificial Sequence
  ENSG00000253276_27 (sequence is synthesized)
cactgacaccattcatttattttaactgagattcttgacatttttctctcctatgccttgttactttagcatacttgaactcacataaatgcttctttggattacatgggctatctgatt

SEQ ID NO: 780824 - DNA, 120 bp, Artificial Sequence
  ENSG00000253276_28 (sequence is synthesized)
tgtgaaataagatgtaaaaaatctttatttttgccctttggtaaaaacctatgtgacaacttttaaaatgtgaagcaacatctaatatagttgactggtatactaataggaaagtgaaag

SEQ ID NO: 780825 - DNA, 120 bp, Artificial Sequence
  ENSG00000253276_29 (sequence is synthesized)
tatttcatgggtactttgtcacagaatgtgaaaagaaacttggcatagtggcctttataatgaggcatccacttactcctctgaagtgaagtctgtagcttagcttgtgtatagtttttg

SEQ ID NO: 780826 - DNA, 120 bp, Artificial Sequence
  ENSG00000253276_30 (sequence is synthesized)
aaagaaatctcatgatcttcgttcattctcttgccttctcttttatctcatatggcacaagtagagggggaagccaggaggaaattcatcacctcgctatgcttttatttgatttttaat

SEQ ID NO: 780827 - DNA, 120 bp, Artificial Sequence
  ENSG00000253276_31 (sequence is synthesized)
tcctgagtgcctaaatgtggtgaccggcacctcacataactttttgagattcttgatgtcatttttatccttcctgtcaaccagcaatgtatttttatgttactaaaaccagtaacgtca

SEQ ID NO: 780828 - DNA, 120 bp, Artificial Sequence
  ENSG00000253276_32 (sequence is synthesized)
taattgttgagggcaagcttcattgttgatagtgcaaagtgtcgctgttgtgatgtgtgtttattttattcaagtttgaatattgacaagtgtaacttaagctggtgactgacacctatt

SEQ ID NO: 780829 - DNA, 120 bp, Artificial Sequence
  ENSG00000253276_33 (sequence is synthesized)
gatctgctgtgtgcaaatgatagtactattttttagaaaactcttaagtaaattttaaaaatatttgaatacaaaatatctgagcaattttgaactcaaaagtttttcattgttttaagg

SEQ ID NO: 780830 - DNA, 120 bp, Artificial Sequence
  ENSG00000253276_34 (sequence is synthesized)
attgccacaggactctttaatggtttttaatggacatacatgcctaatatttattggtgtgtttaaaatattttttgatagagtgttatgtcttaagcgcattagaaaacaattgtttgt

SEQ ID NO: 780831 - DNA, 120 bp, Artificial Sequence
  ENSG00000253276_35 (sequence is synthesized)
aatggaatcaaagtgtttccctggacagtttgatgtgcttatggttgagatttataatctgcttgtactttgctttttaacttattaactgtaaataaattttagagaatacatagtgtc

SEQ ID NO: 780832 - DNA, 120 bp, Artificial Sequence
  ENSG00000253276_36 (sequence is synthesized)
tagtttttctaatgatttgaacatttttgaaatggtattttgtatttgtatgtgactcagaaaacatcttaatttacaatttgataaattttgacttttttgtgaacttcaaattcccag

SEQ ID NO: 780833 - DNA, 120 bp, Artificial Sequence
  ENSG00000253276_37 (sequence is synthesized)
aaatctcgagatttgttttttgtgctatctcgggagtctgtgttccatcaattctttaattatctagcgaatttttaggatggcgctacaagcccaacttattaaccagtttgccagcaa

SEQ ID NO: 780834 - DNA, 120 bp, Artificial Sequence
  ENSG00000253276_38 (sequence is synthesized)
taaaatatcctacaaaaaaaaaatgcatcaaaattcagaattctctaaatcctgacccgaggtgcccctgtgacgatgacaaaaggtctaaagctcttgctctttcatggcatgaaagga

SEQ ID NO: 780835 - DNA, 120 bp, Artificial Sequence
  ENSG00000253276_39 (sequence is synthesized)
agtaagagtgctccatttgagtaccagtggtatgggctgttccacagaataagggcagggctagaattttcattagagtctagaaggcagaagtggagtattagtgaacagcacagcaag

SEQ ID NO: 780836 - DNA, 120 bp, Artificial Sequence
  ENSG00000253276_40 (sequence is synthesized)
agccggattcatagatagtactgtgtgggctgaatttgtctttgtacctaagttcctattagttggaggaagcgtagtgtaatagttgtggagtcacagtgcctggggtggaattattat

SEQ ID NO: 780837 - DNA, 120 bp, Artificial Sequence
  ENSG00000253276_41 (sequence is synthesized)
gcatacctttgtgacttgcaagtgttgagactgtaggtaagttacttaaaatctttgtgccttgcttcctcaactatcaaatgtgattagtgaaagaaactattgggatattataaggat

SEQ ID NO: 780838 - DNA, 120 bp, Artificial Sequence
  ENSG00000253276_42 (sequence is synthesized)
taataactacccctttcaaagggtagtaatgctagacacataggaagtactaaataaatgctcttaattataggtatgcacagtgagaataggtatataagctgagagtggtccgttgtg

SEQ ID NO: 780839 - DNA, 120 bp, Artificial Sequence
  ENSG00000253276_43 (sequence is synthesized)
agtttagctctccaggtttctcagcatcccaagaatattgtgtggctctgggaaagctgtaagataaatgaagagaagagaatttgtgcatgaataaaattgaagacataaggaaatcat

SEQ ID NO: 780840 - DNA, 120 bp, Artificial Sequence
  ENSG00000253276_44 (sequence is synthesized)
ataattttttagcttgctgactatgcagtaggagattggattaagttgatttattacaatttttgttgttggagtttttttaaagattcacatcttcttttgttatatctctataagaca

SEQ ID NO: 780841 - DNA, 120 bp, Artificial Sequence
  ENSG00000253276_45 (sequence is synthesized)
tttgaatgtactgttatgtgttttaaactatctgagaatttataacagtaatagatttaaagctgttgatccaagaacttacaaaagttttggactacatatttgcttagagtaagctca

SEQ ID NO: 780842 - DNA, 120 bp, Artificial Sequence
  ENSG00000253276_46 (sequence is synthesized)
gtaagtgttgcttataaatgatgttaatttatatgcatagaaccaagctatagtttgtataaagtttataattcaggtgttaaaggaaacaaagtgagtacaatagctgtgcttgaaaca

SEQ ID NO: 780843 - DNA, 120 bp, Artificial Sequence
  ENSG00000253276_47 (sequence is synthesized)
ccagaaaattattactgaaagtaaaaaaaatcttgtatttgaagcattgacacactcatttttggatgtcagatataaagcctgtaatttaggtttaattcctcatagcacagagaatag

SEQ ID NO: 780844 - DNA, 120 bp, Artificial Sequence
  ENSG00000253276_48 (sequence is synthesized)
aacatcctctaaattggtgaacaagccaaagttgcagttatctgaagttgacacaaaataatttcctggaaaattattagatgaaagtcatacaagaacaagaagctaaaaattgagcct

SEQ ID NO: 780845 - DNA, 120 bp, Artificial Sequence
  ENSG00000253276_49 (sequence is synthesized)
aattgcagatttcacagaagtaatgacttctcactgtcatcactctcttgtgtcttggtaaatgtcattctaaaccatgatctataacataataaacatatctaaagcccaattggaaag

SEQ ID NO: 780846 - DNA, 120 bp, Artificial Sequence
  ENSG00000253276_50 (sequence is synthesized)
taataatcataaaaacaccaaacactatgtttagcccagaaaatttgaataagtagtctactgaatccaaaactggacttatttagcttccgaaagcattcatagaaaagttaaattgag

SEQ ID NO: 780847 - DNA, 120 bp, Artificial Sequence
  ENSG00000253276_51 (sequence is synthesized)
attcttccaagtagtacaattaactgtaaaatgtgtacatatttctcttttcaaggatttttttcaagtacatattctttaaagagtacagaaaaaaaaagagtgtggcttagggttcta

SEQ ID NO: 780848 - DNA, 120 bp, Artificial Sequence
  ENSG00000253276_52 (sequence is synthesized)
aatcttacagagtaaaaaaattattgaagcaaaaacaaatgtataaaaagtacatataaacgtacagtttgatgaattttcataaattcaataggctcatggaactagcactcagattaa

SEQ ID NO: 780849 - DNA, 120 bp, Artificial Sequence
  ENSG00000253276_53 (sequence is synthesized)
aaaaatacagttatgagtacccctgaagtcctccctaacaccccatcagccattacctactcaccttcttgcccaagataaccattattttgatttcttacagcatattttttgcttatt

SEQ ID NO: 780850 - DNA, 120 bp, Artificial Sequence
  ENSG00000253276_54 (sequence is synthesized)
tttgaactttacataaatggaattattggtcatgtgtctagcttctttcacttgaaattatgtttgtgagattcatttatattgttgtgtgtactattattgtagatcatttattctcat

SEQ ID NO: 780851 - DNA, 120 bp, Artificial Sequence
  ENSG00000253276_55 (sequence is synthesized)
tggtgtatagaattccactgtgtgaatattccacaatatatttattccagtcttggtgggcatttgggtagattccagtttggaacaattataaataaagctttgatgaatattctaaaa

SEQ ID NO: 780852 - DNA, 120 bp, Artificial Sequence
  ENSG00000253291_0 (sequence is synthesized)
atgggtaccagtctcctatgctgggtggtcctgggtttcctagggacagatcacacaggtgctggagtctcccagtctcccaggtacaaagtcacaaagaggggacaggatgtaactctc

SEQ ID NO: 780853 - DNA, 120 bp, Artificial Sequence
  ENSG00000253291_1 (sequence is synthesized)
atcagggctgcccagtgatcggttctctgcagagaggcctgagggatccatctccactctgacgattcagcgcacagagcagcgggactcagccatgtatcgctgtgccagcagcttagc

SEQ ID NO: 780854 - DNA, 120 bp, Artificial Sequence
  ENSG00000253293_0 (sequence is synthesized)
gttttgcacaagaaatgtcagccagaaagggctatctgctcccttcgccaaattatcccacaacaatgtcatgctcggagagccccgccgcgaactcttttttggtcgactcgctcatca

SEQ ID NO: 780855 - DNA, 120 bp, Artificial Sequence
  ENSG00000253293_1 (sequence is synthesized)
gctcatcagctcgggcagaggcgaggcaggcggcggtggtggtggcgcggggggcggcggcggtggcggttactacgcccacggcggggtctacctgccgcccgccgccgacctgcccta

SEQ ID NO: 780856 - DNA, 120 bp, Artificial Sequence
  ENSG00000253293_2 (sequence is synthesized)
agagctgcgggctcttccccacgctgggcggcaagcgcaatgaggcagcgtcgccgggcagcggtggcggtggcgggggtctaggtcccggggcgcacggctacgggccctcgcccatag

SEQ ID NO: 780857 - DNA, 120 bp, Artificial Sequence
  ENSG00000253293_3 (sequence is synthesized)
cttgccggatggagccgcctgacgggccgccgccgccgccccagcagcagccgccgcccccgccgcaaccaccccagccagcgccgcaggccacctcgtgctctttcgcgcagaacatca

SEQ ID NO: 780858 - DNA, 120 bp, Artificial Sequence
  ENSG00000253293_4 (sequence is synthesized)
cgtgctctttcgcgcagaacatcaaagaagagagctcctactgcctctacgactcggcggacaaatgccccaaagtctcggccaccgccgccgaactggctcccttcccgcggggcccgc

SEQ ID NO: 780859 - DNA, 120 bp, Artificial Sequence
  ENSG00000253293_5 (sequence is synthesized)
cgcccgacggctgcgccctgggcacctccagcggggtgccagtgcctggctacttccgcctttctcaggcctacggcaccgccaagggctatggcagcggcggcggcggcgcgcagcaac

SEQ ID NO: 780860 - DNA, 120 bp, Artificial Sequence
  ENSG00000253293_6 (sequence is synthesized)
caactcggggctggcccgttccccgcgcagcccccggggcgcggtttcgatctcccgcccgcgctagcctccggctcggccgatgcggcccggaaggagcgagccctcgattcgccgccg

SEQ ID NO: 780861 - DNA, 120 bp, Artificial Sequence
  ENSG00000253293_7 (sequence is synthesized)
ccacgctggcttgcggcagcggcgggggctcgcagggcgacgaggaggcgcacgcgtcgtcctcggccgcggaggagctctccccggccccttccgagagcagcaaagcctcgccggaga

SEQ ID NO: 780862 - DNA, 120 bp, Artificial Sequence
  ENSG00000253293_8 (sequence is synthesized)
aggattccctgggcaattccaaaggtgaaaacgcagccaactggctcacggcaaagagtggtcggaagaagcgctgcccctacacgaagcaccagacactggagctggagaaggagtttc

SEQ ID NO: 780863 - DNA, 120 bp, Artificial Sequence
  ENSG00000253293_9 (sequence is synthesized)
tgttcaatatgtaccttactcgagagcggcgcctagagattagccgcagcgtccacctcacggacagacaagtgaaaatctggtttcagaaccgcaggatgaaactgaagaaaatgaatc

SEQ ID NO: 780864 - DNA, 120 bp, Artificial Sequence
  ENSG00000253293_10 (sequence is synthesized)
tcacagccaactttaatttttcctgatgaatctccaggcgacgcggttttttcacttcccgagcgctggtcccctccctctgtcttcaggctctgcccaggaactcgcacctgtgctgga

SEQ ID NO: 780865 - DNA, 120 bp, Artificial Sequence
  ENSG00000253293_11 (sequence is synthesized)
gccctgttcctccctcccacactcgccatctcctgggccgttacatctgtgcagggctggtttgttctgactttttgtttctttgtgtttgcttggtgctggtttatttgttgttttctg

SEQ ID NO: 780866 - DNA, 120 bp, Artificial Sequence
  ENSG00000253293_12 (sequence is synthesized)
ggggaaaaagccatatcatgctaaaattctatagagatagatattgtcctaagtgtcaagtcctgactgggctgggtttgctgtcttggggtcccactgctcgaaatggcccctgtcttc

SEQ ID NO: 780867 - DNA, 120 bp, Artificial Sequence
  ENSG00000253293_13 (sequence is synthesized)
ggccgagctggtttcctgcccagcctggggcaaacctagccggaaggccgaggtcccattgttggcgctgaggtgtctggcctgaggtcaatggtgcaaaggagccgccaccgggcatgt

SEQ ID NO: 780868 - DNA, 120 bp, Artificial Sequence
  ENSG00000253293_14 (sequence is synthesized)
ctgcctggagtgctgtgctgtgtttaatcaggggatacaggcccctgggtttcttttttctttcttcctttcttccttggccaagagaagggcttacaggcatggacatgcaggttggca

SEQ ID NO: 780869 - DNA, 120 bp, Artificial Sequence
  ENSG00000253293_15 (sequence is synthesized)
aacgggcttgactttggctgatttaaaaagtgagaaagaaagtaaaaaaggttaatttttccttcctctgtaagatatcccagctttaaaaagaaaaaaaaagaattaccaagagaaggg

SEQ ID NO: 780870 - DNA, 120 bp, Artificial Sequence
  ENSG00000253293_16 (sequence is synthesized)
gacttctcttccagtttctgtaaggtcttacattgcctgactaaaatgtttcatttacctctaaatttccatatccttctggctgtagataaataatgtagttttgtttatgcatttgga

SEQ ID NO: 780871 - DNA, 120 bp, Artificial Sequence
  ENSG00000253293_17 (sequence is synthesized)
attagtggatttttttgtcattaaaattgttaccactggtaacatgtgacaagcacaccacaattctccctatcttgtgaagttgtttttttaaatcgccttgaacaaaaagtttttttt

SEQ ID NO: 780872 - DNA, 120 bp, Artificial Sequence
  ENSG00000253293_18 (sequence is synthesized)
ttgtttgtttttgctttctgaaattcacagaagcctaggaggactggggtaagcggaataaactagagaagggagacattgtttggatttcctttatactgtgaagttacatgcataaaa

SEQ ID NO: 780873 - DNA, 120 bp, Artificial Sequence
  ENSG00000253293_19 (sequence is synthesized)
gggtcaaacctgtagatgcagaaaaagaaaaaaactataaatacaaatctgtataaatgtctattattatgaagaattgccaatcttgttttaagcaaatgcattctatcgttattataa

SEQ ID NO: 780874 - DNA, 120 bp, Artificial Sequence
  ENSG00000253293_20 (sequence is synthesized)
atgttagttctagctctatttacttctaatcttaaatcagaataaattaatattgtattgctgctgtgcgtggaaaaagacgatgtttatgttcttatagaataaaagctgtggaatgaa

SEQ ID NO: 780875 - DNA, 120 bp, Artificial Sequence
  ENSG00000253293_21 (sequence is synthesized)
aaccaaagtctctcaagttgctagagagagtctagccaggaggactgctcgcgggcgggcggcgggcgggcgcgggtttgatttctgagccctataaaagcccatcctccgatggctgtg

SEQ ID NO: 780876 - DNA, 120 bp, Artificial Sequence
  ENSG00000253293_22 (sequence is synthesized)
acaatgtggtcgtaaacccgtccggggccggccaatttgcatatttggaatgcgccgctataaacccggctggggttttgcagcgatttcttagatgtaaaaatgagatctcaatagcag

SEQ ID NO: 780877 - DNA, 120 bp, Artificial Sequence
  ENSG00000253293_23 (sequence is synthesized)
cgggctgggcacatcctctcctctctccttctctctctgcccggagctggtttccgtctctcggctcggggctggaactccggcccaacctaggcgcgcagccgccacgagatggcgcac

SEQ ID NO: 780878 - DNA, 120 bp, Artificial Sequence
  ENSG00000253293_24 (sequence is synthesized)
ttccgatcaatgtcaaagccgccggggagccgggaaccccagcatgattcttggcctttgttcgcttctgatactaagagcagcacggtacattatttcacttgtcccgctccccttcat

SEQ ID NO: 780879 - DNA, 120 bp, Artificial Sequence
  ENSG00000253293_25 (sequence is synthesized)
aacagaaaaaggggactcaccctcaagaagtgattggtatggtaatttaaagcaacgcgcattcgctaggcctcgcgagcgtcgccgcgcggagaagccagctgtcccttggcagtgatt

SEQ ID NO: 780880 - DNA, 120 bp, Artificial Sequence
  ENSG00000253293_26 (sequence is synthesized)
gagtttacgatcccccatgcttttttcaaagttgctgaggggcgggaatcttcgttgcgggaagaagaaaaggcaaatccggcctggaagcggggggccctgagctgagagccagagaag

SEQ ID NO: 780881 - DNA, 120 bp, Artificial Sequence
  ENSG00000253293_27 (sequence is synthesized)
ggccatttcccttcccctggacctcggaatcgcccagctatctatccctggctcctggagaaacttgagggagggcccttgacccccgaatcggtttttcctgccttccccattggacca

SEQ ID NO: 780882 - DNA, 120 bp, Artificial Sequence
  ENSG00000253293_28 (sequence is synthesized)
atgatgcccttctttctccccttatcgagtcttgggcaatcagggccctggggtgagacagccaagctgcctggcccatcttccaagtaagcaccccgcgctcctagcctgggggctaca

SEQ ID NO: 780883 - DNA, 120 bp, Artificial Sequence
  ENSG00000253293_29 (sequence is synthesized)
ggaaatgcttgtctgccatatggcaagaggcaaagaaaagcgttaagttcaagatgtacagcctgccctcccaggcctttccttctgcaagcatctacggcttagcgctaaaacaggcaa

SEQ ID NO: 780884 - DNA, 120 bp, Artificial Sequence
  ENSG00000253293_30 (sequence is synthesized)
cgcggatgtttgtaaggcatccaaaataagcagccgccagcgccaataaataagcccattaaccggcgaagttcgagtttacgatcccccatgcttttttcaaagttgctgaggggcggg

SEQ ID NO: 780885 - DNA, 120 bp, Artificial Sequence
  ENSG00000253304_0 (sequence is synthesized)
gtcttgatccgagcggtcttcccggtgtctagctcaagtcgctcctgctgcagcttcgctgcgggcggaggaggtctggaaggagggggcgggcagggagaggctggagccggtgacgcc

SEQ ID NO: 780886 - DNA, 120 bp, Artificial Sequence
  ENSG00000253304_1 (sequence is synthesized)
ccctcctcccgcgctgcgagcgcccagacgacggcgagatgacggccgggagccccgaagaatgcggggaggtgcggaggagccccgagggccgcgtctctcgcttgggccgccgcctgg

SEQ ID NO: 780887 - DNA, 120 bp, Artificial Sequence
  ENSG00000253304_2 (sequence is synthesized)
tccccgcccgagcctctgcgggtgcgggcgcggctgcggctgcgctcgccgtcgggggcgttcgcggcgctgggggcgctcgtggtactggtgggtatgggcattgcagtggccggctac

SEQ ID NO: 780888 - DNA, 120 bp, Artificial Sequence
  ENSG00000253304_3 (sequence is synthesized)
gggtatgggcattgcagtggccggctactggccgcaccgggccggggccccagggtcccgggccgccaatgccagctcgccccagatgagcgagctgcgacgcgagggtcgcggcggggg

SEQ ID NO: 780889 - DNA, 120 bp, Artificial Sequence
  ENSG00000253304_4 (sequence is synthesized)
acggcccgcacgagcggctgcggctcctcgggccggtgatcatgggcgtcggcctgttcgtgttcatctgcgccaacacactgctgtatgagaaccgagacttggagacgcgacggctcc

SEQ ID NO: 780890 - DNA, 120 bp, Artificial Sequence
  ENSG00000253304_5 (sequence is synthesized)
gggggtgctgcgggcccaggcgctccggccccccgacggcccgggctgggactgcgccctccttcccagccccggccctaggagtccccgagccgtaggctgcgcagagccagaaatctg

SEQ ID NO: 780891 - DNA, 120 bp, Artificial Sequence
  ENSG00000253304_6 (sequence is synthesized)
tctgggacccgtccccgcgtcggggtacttcacccgtcccgtcagtgcggagtctgcgttcagagcccgctaatcctcgcttggggttacctgccttgctcaacagctacccgctgaagg

SEQ ID NO: 780892 - DNA, 120 bp, Artificial Sequence
  ENSG00000253304_7 (sequence is synthesized)
gccccgggctgcccccaccctggggtccacggacgcagactggccatgtgatcatcaccgtgcagccgtctggctcctgcattgaacattccaagtctctggatctgggccttggggagc

SEQ ID NO: 780893 - DNA, 120 bp, Artificial Sequence
  ENSG00000253304_8 (sequence is synthesized)
tcctccttggggccccagcagctcgggactgtgctcaccgaagctggccacggctggaccgcctcagtcttgggggctatgccaaattgggaggaggaggggacttgggggcccgggtct

SEQ ID NO: 780894 - DNA, 120 bp, Artificial Sequence
  ENSG00000253304_9 (sequence is synthesized)
gaagagaggggagacagcctgctctgaggctgcagcatggaccatgctaataggaccaaaggaccaggagtcccaacgtctaatagatgtttcagtcacatcccaggctggggatggatg

SEQ ID NO: 780895 - DNA, 120 bp, Artificial Sequence
  ENSG00000253304_10 (sequence is synthesized)
cctgcatgcgggcagagaaatgccagctgcaccagggctcagtgagctggagagggtgcgtttcactgtggggtgtggaggactcgcctcaggaatttcttcagcctctgtaagtggcct

SEQ ID NO: 780896 - DNA, 120 bp, Artificial Sequence
  ENSG00000253304_11 (sequence is synthesized)
tagccctaacagggctggaggtccaggccagggtgactgggagatgtacccagtgtcttggcaaacccaagaaagtggtgggcaagggcccctaagactgggaggtaggttgggatgtta

SEQ ID NO: 780897 - DNA, 120 bp, Artificial Sequence
  ENSG00000253304_12 (sequence is synthesized)
caggctggggcaggctccctccaaggcggcactggtgatggagtgtggggcctctgggaagatggaccacgggatgagactctccactgccatctgggacggggactgagccttgaactc

SEQ ID NO: 780898 - DNA, 120 bp, Artificial Sequence
  ENSG00000253304_13 (sequence is synthesized)
ctaccacctcaatccctttcttccctcagccatctggggtatatccctctagagctacactactgccaatgccttcatactgagttctgggcccttctgcaaataagtctgagaagcccc

SEQ ID NO: 780899 - DNA, 120 bp, Artificial Sequence
  ENSG00000253304_14 (sequence is synthesized)
ttctctccttcctttatcgtggcctatgctgcagaatctcactgcagctggcaaaaggcattggccagctctcagaaatccctttactcaacgttgaagctgcattttggtcaatgtggg

SEQ ID NO: 780900 - DNA, 120 bp, Artificial Sequence
  ENSG00000253304_15 (sequence is synthesized)
taacttactttagaaaatgacttgagtttaggtctcccccacccatatttaatttttcccaagttgctggtagaagagaaatttaaaagtggatcaatcctcacagagagagttcttttt

SEQ ID NO: 780901 - DNA, 120 bp, Artificial Sequence
  ENSG00000253304_16 (sequence is synthesized)
gttgttgtttattgaaaaaaatgcaatacaagaagcaagaccaaacagatatctaaacactacaaccacttctactacgaaaggccaaaacagcagacttgattattgcctgtgtagtct

SEQ ID NO: 780902 - DNA, 120 bp, Artificial Sequence
  ENSG00000253304_17 (sequence is synthesized)
aaagattctgccaatctgattctgctgcccgagttcctattttttcaagaaatgtaaacaactacttgatatgattcataattttaaaaaaaatttacaaagctccttcatttttgtcac

SEQ ID NO: 780903 - DNA, 120 bp, Artificial Sequence
  ENSG00000253304_18 (sequence is synthesized)
caaaataatacatttgagagagatttgtagaaacaaccagcctggggctgagatcctgggcagaaatttcccgtgagcatcaaaaggcgtcagtcaggccgcagctctggctccagttcc

SEQ ID NO: 780904 - DNA, 120 bp, Artificial Sequence
  ENSG00000253304_19 (sequence is synthesized)
cgaggtttgttgtctcctcacccccagctgccaagcatccccccaacacacactgatgggcccagcggtggaggggggggtggggacggggatgggtcacggggccctgacgggtcccgc

SEQ ID NO: 780905 - DNA, 120 bp, Artificial Sequence
  ENSG00000253304_20 (sequence is synthesized)
agttaggctccctgagccctcggcttataaatacaggtcttgctttgtgggtgggtgccagagtcctcatgtggcttggaggaaatctttatttctcaaattaaaataaaattgcagcga

SEQ ID NO: 780906 - DNA, 120 bp, Artificial Sequence
  ENSG00000253305_0 (sequence is synthesized)
atgggagggagctgcgcgcagaggcgccgggccggcccgcggcaggtgctatttcctttgctgctgcctttgttctaccccaccctgagtgagccgatccgctactcgattccggaggag

SEQ ID NO: 780907 - DNA, 120 bp, Artificial Sequence
  ENSG00000253305_1 (sequence is synthesized)
ctggccaagggctcggtggtggggaacctcgctaaggatctagggctcagtgtcctggatgtgtcggctcgcaagctgcgagtgagcgcggagaagctgcacttcagcgtagacgcggag

SEQ ID NO: 780908 - DNA, 120 bp, Artificial Sequence
  ENSG00000253305_2 (sequence is synthesized)
agcggggacttacttgtgaagaaccgaatagaccgtgagcaaatatgcaaagagagaagaagatgtgagttgcaattggaagctgtggtggaaaatcctttaaatatttttcatgtcatt

SEQ ID NO: 780909 - DNA, 120 bp, Artificial Sequence
  ENSG00000253305_3 (sequence is synthesized)
gtggtgattgaggatgttaatgaccacgcccctcaatttgataaaaaggaaatacatttagaaattttcgaatctgcatccgctggtacacgactatcgcttgaccctgccacggatcct

SEQ ID NO: 780910 - DNA, 120 bp, Artificial Sequence
  ENSG00000253305_4 (sequence is synthesized)
gatataaacataaactcaattaaagattataagataaactctaatccttatttttcattaatggttagagttaattccgatggtggcaaatacccagagttatctctggagaaactccta

SEQ ID NO: 780911 - DNA, 120 bp, Artificial Sequence
  ENSG00000253305_5 (sequence is synthesized)
gaccgggaagaacagagatctcatagcttgatattgactgccttggacggaggggacccaccaagaagtgccaccgctcacatagaaatttctgtcaaggataccaatgataaccccccg

SEQ ID NO: 780912 - DNA, 120 bp, Artificial Sequence
  ENSG00000253305_6 (sequence is synthesized)
gttttcagcagagacgaatatagaattagtcttagtgaaaatctgccccctgggtcccctgtgttgcaagtgacagccactgaccaggatgagggggtcaatgctgagataaactactac

SEQ ID NO: 780913 - DNA, 120 bp, Artificial Sequence
  ENSG00000253305_7 (sequence is synthesized)
ttccgaagcactgcccagagcacaaaacatatgttctcattggatgagaaaacaggtatgattaagaataaccagtcatttgattttgaagatgtagaaaggtacaccatggaagtggaa

SEQ ID NO: 780914 - DNA, 120 bp, Artificial Sequence
  ENSG00000253305_8 (sequence is synthesized)
gcgaaggacggaggtggtctctctacccagtgtaaagtaatcatagaaatccttgatgaaaacgacaacagcccagaaataatcatcacttctctctctgatcagattttggagaattca

SEQ ID NO: 780915 - DNA, 120 bp, Artificial Sequence
  ENSG00000253305_9 (sequence is synthesized)
cctccaggaatggttgttgccctcttcaaaacacgggatctggatttcggaggaaatggagaagtcaggtgtaatatagaaacagacattccattcaagatttattcttcttccaataac

SEQ ID NO: 780916 - DNA, 120 bp, Artificial Sequence
  ENSG00000253305_10 (sequence is synthesized)
tactacaaactggtgacagatggagccctggaccgagagcagacaccagaatacaatgtcaccatcgtagccactgacaggggcaagccgcctctttcttccagtagaagcatcaccttg

SEQ ID NO: 780917 - DNA, 120 bp, Artificial Sequence
  ENSG00000253305_11 (sequence is synthesized)
tatgtcgctgacatcaacgacaacgccccagttttcgaccagacgtcctacgtggtccacgtggccgagaacaacccgccaggagcctccattgcgcaagtgagcgcctctgacccggat

SEQ ID NO: 780918 - DNA, 120 bp, Artificial Sequence
  ENSG00000253305_12 (sequence is synthesized)
ttggggctcaatggccacatctcctactctatagtggcgagtgacctagagcccctggcggtgtcgtcatacgtgtcagtgagcgcgcagagcggggtggtgttcgcgcagcgcgccttt

SEQ ID NO: 780919 - DNA, 120 bp, Artificial Sequence
  ENSG00000253305_13 (sequence is synthesized)
gatcacgagcagctgcgcgccttcgcgctcacgctgcaggcccgcgaccacggctcgcccacgctcagcgccaacgtgagcctgcgcgtgttggtgggagaccgcaatgacaacgcaccg

SEQ ID NO: 780920 - DNA, 120 bp, Artificial Sequence
  ENSG00000253305_14 (sequence is synthesized)
cgggtgctgtacccagctctgggtcctgacggctccgcgttcttcgatatggtacctcgctctgcagagcccggctacctagtgactaaggtggtagcggtggacgccgactcgggacac

SEQ ID NO: 780921 - DNA, 120 bp, Artificial Sequence
  ENSG00000253305_15 (sequence is synthesized)
aacgcctggctgtcctaccacgtgctgcaggccagtgagcccggactcttcagcctggggctgcgcactggggaggtgcgcacggctcgagccttaggcgacagggacgcagcccgccag

SEQ ID NO: 780922 - DNA, 120 bp, Artificial Sequence
  ENSG00000253305_16 (sequence is synthesized)
cgcctgctggtcgctgtgcgtgacggtggacagccgccactctctgccaccgccacgcttcatctggtcttcgcagacaacttgcaagagatactgccagacctcagcgaccgccctgta

SEQ ID NO: 780923 - DNA, 120 bp, Artificial Sequence
  ENSG00000253305_17 (sequence is synthesized)
ctctctgacccccaggctgaactgcagttttacctggtggtggccttggccttaatctcagtgctcttcctcctcgccgtgattctggccattgccttgcgcctgcgacgctctctcagc

SEQ ID NO: 780924 - DNA, 120 bp, Artificial Sequence
  ENSG00000253305_18 (sequence is synthesized)
cctgctacttgggactgcttccatcctggtctctgtgtcaagtctggacctgtagttccccccaactacagtgaggggactttgccttattcttataatctgtgcattgcacatacgggt

SEQ ID NO: 780925 - DNA, 120 bp, Artificial Sequence
  ENSG00000253305_19 (sequence is synthesized)
cattccaatgaagacatggtttgcagtgtttctcctggagccttaattccacctcatggtggggaggatttgacttcacatcctgagactctgacttcgcaagccccgcccaacacggac

SEQ ID NO: 780926 - DNA, 120 bp, Artificial Sequence; identical to SEQ ID NO: 773797
  ENSG00000253305_20 (sequence is synthesized)

SEQ ID NO: 780927 - DNA, 120 bp, Artificial Sequence; identical to SEQ ID NO: 773798
  ENSG00000253305_21 (sequence is synthesized)

SEQ ID NO: 780928 - DNA, 120 bp, Artificial Sequence; identical to SEQ ID NO: 773799
  ENSG00000253305_22 (sequence is synthesized)

SEQ ID NO: 780929 - DNA, 120 bp, Artificial Sequence; identical to SEQ ID NO: 773800
  ENSG00000253305_23 (sequence is synthesized)

SEQ ID NO: 780930 - DNA, 120 bp, Artificial Sequence; identical to SEQ ID NO: 773801
  ENSG00000253305_24 (sequence is synthesized)

SEQ ID NO: 780931 - DNA, 120 bp, Artificial Sequence; identical to SEQ ID NO: 773802
  ENSG00000253305_25 (sequence is synthesized)

SEQ ID NO: 780932 - DNA, 120 bp, Artificial Sequence; identical to SEQ ID NO: 773803
  ENSG00000253305_26 (sequence is synthesized)

SEQ ID NO: 780933 - DNA, 120 bp, Artificial Sequence; identical to SEQ ID NO: 773804
  ENSG00000253305_27 (sequence is synthesized)

SEQ ID NO: 780934 - DNA, 120 bp, Artificial Sequence; identical to SEQ ID NO: 773805
  ENSG00000253305_28 (sequence is synthesized)

SEQ ID NO: 780935 - DNA, 120 bp, Artificial Sequence; identical to SEQ ID NO: 773806
  ENSG00000253305_29 (sequence is synthesized)

SEQ ID NO: 780936 - DNA, 120 bp, Artificial Sequence; identical to SEQ ID NO: 773807
  ENSG00000253305_30 (sequence is synthesized)

SEQ ID NO: 780937 - DNA, 120 bp, Artificial Sequence; identical to SEQ ID NO: 773808
  ENSG00000253305_31 (sequence is synthesized)

SEQ ID NO: 780938 - DNA, 120 bp, Artificial Sequence; identical to SEQ ID NO: 773809
  ENSG00000253305_32 (sequence is synthesized)

SEQ ID NO: 780939 - DNA, 120 bp, Artificial Sequence; identical to SEQ ID NO: 773810
  ENSG00000253305_33 (sequence is synthesized)

SEQ ID NO: 780940 - DNA, 120 bp, Artificial Sequence; identical to SEQ ID NO: 773811
  ENSG00000253305_34 (sequence is synthesized)

SEQ ID NO: 780941 - DNA, 120 bp, Artificial Sequence; identical to SEQ ID NO: 773812
  ENSG00000253305_35 (sequence is synthesized)

SEQ ID NO: 780942 - DNA, 120 bp, Artificial Sequence; identical to SEQ ID NO: 773813
  ENSG00000253305_36 (sequence is synthesized)

SEQ ID NO: 780943 - DNA, 120 bp, Artificial Sequence; identical to SEQ ID NO: 773814
  ENSG00000253305_37 (sequence is synthesized)

SEQ ID NO: 780944 - DNA, 120 bp, Artificial Sequence
  ENSG00000253305_38 (sequence is synthesized)
agaaagaagaaaaccagctcccacacagagcctcccggctgcgcagacctttcccagcacagcggattgccagctccgagacccgggactcctcctgtcctgggccgaatgctcttttag

SEQ ID NO: 780945 - DNA, 120 bp, Artificial Sequence
  ENSG00000253305_39 (sequence is synthesized)
tctagaatcatatgtttaaaatccatagctttttacaatattttctcaatgttttttcaattatagttttcactatgtatttggttcataagttgctctatctttttgtaaaataatgtc

SEQ ID NO: 780946 - DNA, 80 bp, Artificial Sequence
  ENSG00000253305_40 (sequence is synthesized)
tagctgggattactggtgcccctcaccacagctacgaccaggctgttcagaaactcctgtcctcgtgatcctcccacctt

SEQ ID NO: 780947 - DNA, 80 bp, Artificial Sequence
  ENSG00000253305_41 (sequence is synthesized)
attttgtcaagttctgactatcgaacagaagcagtggtcttggcatctaagaaaacaaacaagtaacctatctattcaaa

SEQ ID NO: 780948 - DNA, 120 bp, Artificial Sequence
  ENSG00000253305_42 (sequence is synthesized)
tggcatctaagaaaacaaacaagtaacctatctattcaaatttgcgaagacttagtgaatttacgatatcttatttatatatttttaaagcctaaaaatattcagaagacaggcccagtg

SEQ ID NO: 780949 - DNA, 120 bp, Artificial Sequence
  ENSG00000253305_43 (sequence is synthesized)
taaaaatattcagaagacaggcccagtggctcacacctataatcacagcactttgataggctgaatcggaaagtatcacttgagcccaagaattgagaccagcctgggcaatatagggag

SEQ ID NO: 780950 - DNA, 88 bp, Artificial Sequence
  ENSG00000253305_44 (sequence is synthesized)
caatatagggagaccccccatctctactaaaacaacaacaacaaaaaaaaacattagcagagtgtggtagcattctgggtggattgct

SEQ ID NO: 780951 - DNA, 87 bp, Artificial Sequence
  ENSG00000253305_45 (sequence is synthesized)
tgcactccagcctgggcgacagagtgcgaccctgtctctaaaataaataaataaatatgcaggcagggccaagtgtgagaatctctt

SEQ ID NO: 780952 - DNA, 87 bp, Artificial Sequence
  ENSG00000253305_46 (sequence is synthesized)
ggagactccatcgctacagaacatttggtctcagctactctggtggctgtggtgggagaatcgcttgagcccaggaagtctaggctg

SEQ ID NO: 780953 - DNA, 89 bp, Artificial Sequence
  ENSG00000253305_47 (sequence is synthesized)
tgtggtggcacatgcctgtggtctcagctactctggtggctgtggtgggagaatcgcttgagcccaggaagtctaggctgcagtgagct

SEQ ID NO: 780954 - DNA, 120 bp, Artificial Sequence
  ENSG00000253305_48 (sequence is synthesized)
cctttgcactcagtctctgtctctgattctctgatagaagatttttgaagaaaaaagataaaatctttgaagagttctatacttggaaggcatagtgacataaacacttctgaacatcct

SEQ ID NO: 780955 - DNA, 120 bp, Artificial Sequence
  ENSG00000253305_49 (sequence is synthesized)
gttctctgtgtgaaagaagtgaacttctataccctttgcatttgagggaacaattgctactgggttgatgggcacacacagttgaagatatgtgaaccactggactttggcctctgatac

SEQ ID NO: 780956 - DNA, 120 bp, Artificial Sequence
  ENSG00000253305_50 (sequence is synthesized)
aaactgcctaagagaagagattatttatactggtattaatgctctgatgaaaacaggtcatttgacataaacacttacttgttaaaaacctatatcactacatctaactttgttttctaa

SEQ ID NO: 780957 - DNA, 120 bp, Artificial Sequence
  ENSG00000253305_51 (sequence is synthesized)
aacttttagtacttcaaattctacgtatttcttttctcattacaatgcaaacagtttaatttgcaactgtaatatatgttcattttagtttgtgattacctgcttaatcatttaaatagg

SEQ ID NO: 780958 - DNA, 120 bp, Artificial Sequence
  ENSG00000253305_52 (sequence is synthesized)
tccatttaacttgtatccctgtaagataaagtatgttttacacaaaaaggttaattaaggctcagtaaaactattctagaagagtactttaaaaacctcttacacaatcctaagctaaat

SEQ ID NO: 780959 - DNA, 120 bp, Artificial Sequence
  ENSG00000253305_53 (sequence is synthesized)
aagtttaatgaattaagtagttacaattataaagcttcagagtgaattatctcatgagtttatttaatataatctttgtatgaatgtatactaaataaaattggcctattcaaatcacaa

SEQ ID NO: 780960 - DNA, 120 bp, Artificial Sequence
  ENSG00000253309_0 (sequence is synthesized)
ccagcttccagcctaccctgcatctcttccctctgaattgcaggaaccctcccagcctccatgccgcctttcctgatcaccctcttcctctttcactcttgctgcctccgagcaaatggc

SEQ ID NO: 780961 - DNA, 120 bp, Artificial Sequence
  ENSG00000253309_1 (sequence is synthesized)
cacctccgtgaaggaatgacattgctgaagactgagtttgcacttcacctctaccagagtgtggccgcgtgtagaaatgagacgaactttgtcatctctcctgctggtgtgtccctcccc

SEQ ID NO: 780962 - DNA, 120 bp, Artificial Sequence
  ENSG00000253309_2 (sequence is synthesized)
ctggagatcctgcagtttggagcagaagggagcactggtcagcagctggcagatgccctggggtacactgtccatgacaaaagggtgaaagatttcttgcatgctgtttatgccacacta

SEQ ID NO: 780963 - DNA, 120 bp, Artificial Sequence
  ENSG00000253309_3 (sequence is synthesized)
cccacctccagccaaggcaccgagatggagctggcctgcagcctttttgtgcaagtgggaacgccactgtccccctgctttgtggagcacgtctcctggtgggctaacagcagcctggaa

SEQ ID NO: 780964 - DNA, 120 bp, Artificial Sequence
  ENSG00000253309_4 (sequence is synthesized)
ccagccgacctcagtgagcccaatagcaccgccatccagactagcgaaggggcctccagagagactgcaggtgggggccccagtgagggccctggtggctggccgtgggagcaagtcagt

SEQ ID NO: 780965 - DNA, 120 bp, Artificial Sequence
  ENSG00000253309_5 (sequence is synthesized)
tcaggtccccatgatgcaccaaacgaccgaggtcaactacggtcagttccaggacactgcaggccatcaggtgggggtgctggagcttccttacctgggaagtgcagtgagtctgttcct

SEQ ID NO: 780966 - DNA, 120 bp, Artificial Sequence
  ENSG00000253309_6 (sequence is synthesized)
ggtgctgccccgtgacaaagacacccccctgagccacatcgagccacacctcacagccagcaccatccacctctggaccaccagcctgaggagagccaggatggatgtgttcctgcccag

SEQ ID NO: 780967 - DNA, 120 bp, Artificial Sequence
  ENSG00000253309_7 (sequence is synthesized)
gtttaggatccaaaatcaattcaacttaaaaagcattttaaattcttggggagtcaccgatctttttgatccactcaaagctaacttgaaaggaatttcaggccaagatggcttttatgt

SEQ ID NO: 780968 - DNA, 120 bp, Artificial Sequence
  ENSG00000253309_8 (sequence is synthesized)
ttctgaagcaatccacaaggccaagattgaagttttggaggaaggcaccaaggcatctggagccacagctctgttgttattgaaaaggtctcggattcctatttttaaagcagatcggcc

SEQ ID NO: 780969 - DNA, 120 bp, Artificial Sequence
  ENSG00000253309_9 (sequence is synthesized)
attcatctatttcctgagagaacctaacacaggtattacagtattttttgacaggattcagataatttatcagtgtctctctagcaacaagggctcatttgtccactatcccctcaaaaa

SEQ ID NO: 780970 - DNA, 120 bp, Artificial Sequence
  ENSG00000253309_10 (sequence is synthesized)
taagcattctttctagctgtttttatggtgcttcagaagctacccagttgctatcttctatcctaagaaaggggactatttcgtaagtacaaaggaaacttatcctccatgttttttacc

SEQ ID NO: 780971 - DNA, 120 bp, Artificial Sequence
  ENSG00000253309_11 (sequence is synthesized)
atcagatgcatgcatagcaccacacagctacatcttaaaaaacgtagtgtttactcaaaaacattagggaataacgaaatacataacataaaagcaggaggaggggggaagcattaggta

SEQ ID NO: 780972 - DNA, 120 bp, Artificial Sequence
  ENSG00000253309_12 (sequence is synthesized)
cctggtacccagcaaaagcccaacaagcaaagttatcagtggaattcctcaatgtgacaaagggctggatgaggggttccttgctggtacaaccaggtcacaagcctaagaaggcttgac

SEQ ID NO: 780973 - DNA, 120 bp, Artificial Sequence
  ENSG00000253309_13 (sequence is synthesized)
gggtgtggctggctctccccccacggccctgctctgttcccgatctgggctttgctgccctgggctgggctgcttctcctggctctctgcaggacctccaggctccaggaatttggaccg

SEQ ID NO: 780974 - DNA, 120 bp, Artificial Sequence
  ENSG00000253309_14 (sequence is synthesized)
agtggtagagacatcgccggcagagacggcaatcgccagcttcctctctgtgctgtcttgtgattcaaagcagattctgctccacttttttaaaaggggagcacatgaatgctggagacc

SEQ ID NO: 780975 - DNA, 120 bp, Artificial Sequence
  ENSG00000253309_15 (sequence is synthesized)
cacaagaacagagtcgagcaaggaaacgtgcaacagtgatacaaaagtctggctttgctaaagtcacacatccagtaagtggccgaagcagatcttcagacccacagtttggctgccaaa

SEQ ID NO: 780976 - DNA, 120 bp, Artificial Sequence
  ENSG00000253309_16 (sequence is synthesized)
gggagagtttcaaatcccctagactaaatgcatgttctccactttcatcaatgcttttcttcataaagttataatttcattttgctatacccttgaaatttaaaaaaatgtctgataaag

SEQ ID NO: 780977 - DNA, 120 bp, Artificial Sequence
  ENSG00000253309_17 (sequence is synthesized)
tgtaaaaagctaagggtatgtgattttcaatattataaacctaaaaatacttcagtttttaaatgttataagtttattttgcctactcttaatccaaatctattttgaccttcttttcta

SEQ ID NO: 780978 - DNA, 120 bp, Artificial Sequence
  ENSG00000253309_18 (sequence is synthesized)
ctgcttaccccccaaaccactaaaaggcacagcagtgatcatgaatggtgagtgagtcaggccataagattgcttcctcagtacggatactctaggccatgttgaattgagggtggagaa

SEQ ID NO: 780979 - DNA, 120 bp, Artificial Sequence
  ENSG00000253309_19 (sequence is synthesized)
tgaatagcgtggttttccttatcctgtgaaactcaggggggatgcaaaatgagcaaagtcatcttaaaggtgtttcctttccatttagcttataaataaaacagagtttaagtgtgagaa

SEQ ID NO: 780980 - DNA, 120 bp, Artificial Sequence
  ENSG00000253313_0 (sequence is synthesized)
acctgtccaggttctgccggccccagccggaagcttactccgcggattgtgcacagttcttgaaggacttgtgccctggggctgcctggcatctgggggcctcctcagagccagggctct

SEQ ID NO: 780981 - DNA, 120 bp, Artificial Sequence
  ENSG00000253313_1 (sequence is synthesized)
ttctggttgaggctgagactcactggtgtcatcaggcccctccatgaatgagacaaacaaaacacttgttgggccttcggagctccccacagcgtctgctgtggcccctggcccaggcac

SEQ ID NO: 780982 - DNA, 120 bp, Artificial Sequence
  ENSG00000253313_2 (sequence is synthesized)
gatttgtgctgggggctgtggtcctctcgctcctcattgcacttgctgccaaatgccacctctgccgccgataccatgccagctaccggcaccgcccactgcctgagacaggaaggggag

SEQ ID NO: 780983 - DNA, 120 bp, Artificial Sequence
  ENSG00000253313_3 (sequence is synthesized)
gccgcccacaggtggctgaagatgaggatgatgatggcttcatcgaggacaattacattcagcctgggactggcgagctggggacagagggtagcagggaccacttctccctctgagctc

SEQ ID NO: 780984 - DNA, 120 bp, Artificial Sequence
  ENSG00000253313_4 (sequence is synthesized)
ccatctttagaccctccccactccctccatgcctgacagcttaaggacagtggttatgacatgggggccttgaacctcagggacagaggtggctggggcttaaaggttggccagggatgg

SEQ ID NO: 780985 - DNA, 120 bp, Artificial Sequence
  ENSG00000253313_5 (sequence is synthesized)
actccgcggattgtgcacagttcttgaaggtgggaacagaagagaaggcccgggggggccggggagggggtacccaggctctgcacagtacccaaggggcttctggcagcaggaaggaag

SEQ ID NO: 780986 - DNA, 120 bp, Artificial Sequence
  ENSG00000253313_6 (sequence is synthesized)
ctcaactgttccctgctgttctcaggataaagccaaacaaaggcttgagtgtggacataaggccctctgtgatcatgcctctcggcctcttggtttcttttcttgccttcccctacttta

SEQ ID NO: 780987 - DNA, 120 bp, Artificial Sequence
  ENSG00000253313_7 (sequence is synthesized)
ctgtcgaaatcaatgttattctccctcccaccacttcccatgcagtttccccaggcacctttgctcacattggtccccctgcctacgctactcttctcctaaatcctctatgactgtgat

SEQ ID NO: 780988 - DNA, 120 bp, Artificial Sequence
  ENSG00000253313_8 (sequence is synthesized)
tgatggcctgcctacctgccagcatttcaaatatgcccagatggtaacatttgtgcaggtgaaaaccagtgccaagcttcctttttttttttttcctgagacggagtctcactctgttgc

SEQ ID NO: 780989 - DNA, 120 bp, Artificial Sequence
  ENSG00000253313_9 (sequence is synthesized)
caccatgcccggccagcttcttaatgaaatattttcctataaataaagtgggtaatccggttataatatgtttttcacaggaattaataaatctattttcattttgaataaaaataaaaa

SEQ ID NO: 780990 - DNA, 120 bp, Artificial Sequence
  ENSG00000253368_0 (sequence is synthesized)
ggggtgggggctgtggccgtgtctagctgttcgggtgtgctgtggtcatcctccctgcgcacctacagccgcagaccgccggtggggggcgggggatgccgggctgccgcatcagcgcct

SEQ ID NO: 780991 - DNA, 120 bp, Artificial Sequence
  ENSG00000253368_1 (sequence is synthesized)
gcggcccgggggcccaggaggggacggcagagcagaggtcgccgccgccgccctgggatcccatgccgtcctctcagcccccgcccccaactccgaccttgactcctaccccgaccccgg

SEQ ID NO: 780992 - DNA, 120 bp, Artificial Sequence
  ENSG00000253368_2 (sequence is synthesized)
cctaccccgaccccgggtcagtccccgccgctgccggacgcagctggggcttcagcaggcgcggccgaggaccaggagctgcagcgctggcgccagggcgctagcgggatcgcggggctc

SEQ ID NO: 780993 - DNA, 120 bp, Artificial Sequence
  ENSG00000253368_3 (sequence is synthesized)
gcggggggccgcgcgctggagctggccgaagcacggcggcggctgctggaggtggagggccgccggcgcctggtgtcggagctggagagccgcgtgctgcagctgcaccgcgttttcttg

SEQ ID NO: 780994 - DNA, 120 bp, Artificial Sequence
  ENSG00000253368_4 (sequence is synthesized)
agctgcaccgcgttttcttggcggccgagctgcgcctggcgcaccgcgcggagagcctgagccgcctgagcggcggcgtggcgcaggccgagctctacctggcggctcacgggtcgcgcc

SEQ ID NO: 780995 - DNA, 80 bp, Artificial Sequence
  ENSG00000253368_5 (sequence is synthesized)
ctctacctggcggctcacgggtcgcgcctcaagaagggcccgcgccgcggccgccgcggccgaccccccgcgctgctggc

SEQ ID NO: 780996 - DNA, 120 bp, Artificial Sequence
  ENSG00000253368_6 (sequence is synthesized)
cgactcgcccttccgccgcagcccgccccgcggccccgcctccccgcagcgctgacctccacgcccggacccctggccaccccgacaagcttcgccgaggtgccgaccgaccgactgatc

SEQ ID NO: 780997 - DNA, 120 bp, Artificial Sequence
  ENSG00000253368_7 (sequence is synthesized)
gatcgcggacgccggctggaaggactacggatccgcaggaagaggcagttgggggccaggggcccagtagaggaggctgagctccttccaactcctcagaacctccactctatggatctg

SEQ ID NO: 780998 - DNA, 120 bp, Artificial Sequence
  ENSG00000253368_8 (sequence is synthesized)
aagacgttgagaattgaccttacacaatcccagcgccctcctcacaggagcctttcactttacagtggcaaggggctggttctggagaactggctgatgctctgaatttcttcatatacc

SEQ ID NO: 780999 - DNA, 120 bp, Artificial Sequence
  ENSG00000253368_9 (sequence is synthesized)
ccacatttgactttggcttacactgtacaattggagatgttgctacaggtccctgagatgcaatcagattaagcgtagcaagcattgccaatgggaaagtcaaaataatttatttttttt

SEQ ID NO: 781000 - DNA, 120 bp, Artificial Sequence
  ENSG00000253368_10 (sequence is synthesized)
ccctttccccctaccccatccccagccaagaatttcttttcaagatatcgtcatcattcttaaacaacattcttaacccccagctggggtccccattttaatagatgtcattgcttcaag

SEQ ID NO: 781001 - DNA, 120 bp, Artificial Sequence
  ENSG00000253368_11 (sequence is synthesized)
tctaacggcgccgggaggcctgtttgagggaaaacattagtttgaaaaatccccgttcccttcatccactgcccttgttctccacgtgggagtgtgcttgtggcccctcagaaagatagt

SEQ ID NO: 781002 - DNA, 120 bp, Artificial Sequence
  ENSG00000253368_12 (sequence is synthesized)
ctgctggctcctaggggttggggtgggggacacacctttttctcaggaagaggtgatggcaatgtaaaacatctaagcaaagttttaaatgaaaaaaaggaaacacatttaaacatcctg

SEQ ID NO: 781003 - DNA, 120 bp, Artificial Sequence
  ENSG00000253368_13 (sequence is synthesized)
ataatggagggaaggggggcacatttacacatagcccagaacttgtagaattctgcatagtgaatgtatattgaattagtctcctgccttatacattcaggaggaataaatttccataat

SEQ ID NO: 781004 - DNA, 120 bp, Artificial Sequence
  ENSG00000253368_14 (sequence is synthesized)
gtaaggcaaatgcatggggttctgaggttcactttgcaagtgcccttgctgcctttcctctgtgtctattatggctctttaagttgacggttcctggagcagcttgtatttagtttcgtt

SEQ ID NO: 781005 - DNA, 120 bp, Artificial Sequence
  ENSG00000253368_15 (sequence is synthesized)
tggcagtctggccctgttgactttgatttgcagaccaattctcccttgacctgactcacagccgcctgctcttacccccctcctcaggaagtcttcctcattaaaggatgtgatgacgga

SEQ ID NO: 781006 - DNA, 120 bp, Artificial Sequence
  ENSG00000253409_0 (sequence is synthesized)
atgggcaccaggctcctctgctgggtggtcctgggtttcctagggacagatcacacaggtgctggagtctcccagtccccaaggtacaaagtcgcaaagaggggacgggatgtagctctc

SEQ ID NO: 781007 - DNA, 120 bp, Artificial Sequence
  ENSG00000253409_1 (sequence is synthesized)
atcagggcggcccagtggtcggttctctgcagagaggcctgagagatccgtctccactctgaagatccagcgcacagagcagggggactcagctgtgtatctctgtgccagcagcttagc

SEQ ID NO: 781008 - DNA, 120 bp, Artificial Sequence
  ENSG00000253457_0 (sequence is synthesized)
actagactgcattacaaacagacgataccatcgcttcagcagcatcctctcagacaagagccactatttctgattcagatcacctgtcatcgaagtttaaagaaggggaaacaggagaca

SEQ ID NO: 781009 - DNA, 120 bp, Artificial Sequence
  ENSG00000253457_1 (sequence is synthesized)
gaaatacactgaaccaaaaagattcaaaagagcaagtggaatctctaagaatggcttccagccactggaatgaaaccactacctctgtttatcagtaccttggttttcaagttcaaaaaa

SEQ ID NO: 781010 - DNA, 120 bp, Artificial Sequence
  ENSG00000253457_2 (sequence is synthesized)
tttaccctttccatgacaactggaacactgcctgctttgtcatcctgcttttatttatatttacagtggtatctttagtggtgctggctttcctttatgaagtgcttgactgctgctgct

SEQ ID NO: 781011 - DNA, 120 bp, Artificial Sequence
  ENSG00000253457_3 (sequence is synthesized)
tgaagtggtctaacactctatagaagatgaacaaaatctctgaaagcagctcaacctcttctgagaaaaaaaatatattctgaggccaactgttgctacaaaacaaattctgactgaatg

SEQ ID NO: 781012 - DNA, 120 bp, Artificial Sequence
  ENSG00000253457_4 (sequence is synthesized)
gttaaaacatttctagtagaaggggaaaaaaaagttaaacatgcactgtttgtgtgtatagccatttcattaaatatacagtaaaacttcatgaatgtgaatttactaatctgtttaata

SEQ ID NO: 781013 - DNA, 120 bp, Artificial Sequence
  ENSG00000253457_5 (sequence is synthesized)
ctgacacttcaaaaactggataaaagattcctagagttcaatattaagcagcaaaagataagctggaaaagacaagcaaggctaatgatgctaaaatgattttataactaaccaattcat

SEQ ID NO: 781014 - DNA, 120 bp, Artificial Sequence
  ENSG00000253457_6 (sequence is synthesized)
gtagacaaaaaatagtgtgttggtaacaaaaaggctatttaaaacatgtttctaagtctgaagtaaaatacttccacttatatatataaagttcctatttattaaaaagtagtattttct

SEQ ID NO: 781015 - DNA, 120 bp, Artificial Sequence
  ENSG00000253485_0 (sequence is synthesized)
atggcgagtccacctaggggctggggctgcggagagctgctgctgcccttcatgctcctggggacgctgtgcgagccaggatccgggcagatccgctactcgatgccggaggagctggac

SEQ ID NO: 781016 - DNA, 120 bp, Artificial Sequence
  ENSG00000253485_1 (sequence is synthesized)
aaaggctccttcgtcggcaacatagccaaggaccttgggctggagccccaggagctggcggagcgcggagtccgcatcgtctccagaggtaggacgcagctttttgccctgaacccgcga

SEQ ID NO: 781017 - DNA, 120 bp, Artificial Sequence
  ENSG00000253485_2 (sequence is synthesized)
agcggcagcttggtcaccgcgggcaggatagaccgggaggagctctgcgctcagagcccactgtgtgtggtgaactttaacatcttggttgagaacaaaatgaaaatttatggagtagaa

SEQ ID NO: 781018 - DNA, 120 bp, Artificial Sequence
  ENSG00000253485_3 (sequence is synthesized)
gtagaaataatcgatattaatgataacttcccgcgtttccgggatgaagagttaaaagtaaaagttaatgaaaatgcggctgcagggacacggttagtgcttcccttcgcgcgggatgcg

SEQ ID NO: 781019 - DNA, 120 bp, Artificial Sequence
  ENSG00000253485_4 (sequence is synthesized)
gatgtgggtgtgaactctctccggagttaccagctcagctccaatctgcacttctctctggatgtggtaagcggaactgatggacaaaagtatccggagctggtgttggaacagccccta

SEQ ID NO: 781020 - DNA, 120 bp, Artificial Sequence
  ENSG00000253485_5 (sequence is synthesized)
gaccgcgagaaagagactgttcacgacctcctcctcacagctttagatggcggagacccggtactctccggcaccacgcacatccgtgttacggtcctcgacgcaaacgacaatgcgccc

SEQ ID NO: 781021 - DNA, 120 bp, Artificial Sequence
  ENSG00000253485_6 (sequence is synthesized)
ctgttcaccccatccgagtacagcgtgagtgttccagagaacatacctgtgggcactcggctgctcatgctaaccgccacggatccagatgagggaataaacgggaaattgacctactct

SEQ ID NO: 781022 - DNA, 120 bp, Artificial Sequence
  ENSG00000253485_7 (sequence is synthesized)
tttcgcaatgaagaagaaaaaatttcggagactttccaacttgattccaacctgggggaaatctcaactctacaatcactggactatgaagaatccagattctacctcatggaagtggta

SEQ ID NO: 781023 - DNA, 120 bp, Artificial Sequence
  ENSG00000253485_8 (sequence is synthesized)
gctcaggatggaggcgctcttgttgccagcgctaaggtggtggtcacagtacaggacgtgaatgacaatgcccccgaagtgatcctcacctctctgaccagttcgatctctgaagactgt

SEQ ID NO: 781024 - DNA, 120 bp, Artificial Sequence
  ENSG00000253485_9 (sequence is synthesized)
cttcccggaactgtaatcgcgctgtttagcgtacatgatggtgattctggagaaaatggtgagattgcatgctctattcctaggaatttgccttttaaattggagaagtcagttgataat

SEQ ID NO: 781025 - DNA, 120 bp, Artificial Sequence
  ENSG00000253485_10 (sequence is synthesized)
tactatcacctattaacaactagggacctggacagagaagagacttcagattataatatcactttaaccgtcatggaccatggaaccccgcccctctctacagaaagccacatccccttg

SEQ ID NO: 781026 - DNA, 120 bp, Artificial Sequence
  ENSG00000253485_11 (sequence is synthesized)
aaagtagcagacgttaatgacaacccacccaatttccctcaagcctcctactccacctctgtcacagaaaacaatcccagaggtgtctctatcttctctgtgacagcccatgaccccgac

SEQ ID NO: 781027 - DNA, 120 bp, Artificial Sequence
  ENSG00000253485_12 (sequence is synthesized)
agcggcgacaacgctcgagtcacctactccctggctgaagacacatttcagggggcgcccttgtcctcctatgtatccattaactctgacaccggtgtcctgtatgctctgagatccttc

SEQ ID NO: 781028 - DNA, 120 bp, Artificial Sequence
  ENSG00000253485_13 (sequence is synthesized)
gactatgagcagttgagagacctacagttgtgggtgacagccagcgacagtgggaaccctccacttagcagcaacgtgtcgctgagcctgtttgtgctggaccagaacgacaatacgcct

SEQ ID NO: 781029 - DNA, 120 bp, Artificial Sequence
  ENSG00000253485_14 (sequence is synthesized)
gagatcctgtaccccgccctccccacagacggttccacgggcgtggagctggcgcctcgctccgcagaacctggctacctggtgaccaaggtggtagcggtggacaaagattcaggccag

SEQ ID NO: 781030 - DNA, 120 bp, Artificial Sequence
  ENSG00000253485_15 (sequence is synthesized)
aacgcctggctgtcctaccgcctgcttaaggccagcgagccaggactctttgcggttgggctgcacacgggcgaggtgcgcacagcgcgagccctgctggacagagacgcgctcaagcag

SEQ ID NO: 781031 - DNA, 120 bp, Artificial Sequence
  ENSG00000253485_16 (sequence is synthesized)
agcctcgtggtggccgtcgaagaccatggccagccccctctgtcagccaccttcacggtcaccgttgccgtggccgacaggatccctgacatcctggctgacctaggcagtatcaagacc

SEQ ID NO: 781032 - DNA, 120 bp, Artificial Sequence
  ENSG00000253485_17 (sequence is synthesized)
cccattgaccctgaggatctggacctcacactctatcttgtggtggcagtggctgcagtctcctgcgtcttcctggccttcgtcatcgtgctgctggtgctcagactgaggcgctggcac

SEQ ID NO: 781033 - DNA, 120 bp, Artificial Sequence
  ENSG00000253485_18 (sequence is synthesized)
aagtcacgcctgcttcaggctgaaggcagcaggttggcgggtgtgcccgcctcgcactttgtgggcgtggatggggttcgggctttcctgcagacctattcccacgaggtctccctcacc

SEQ ID NO: 781034 - DNA, 120 bp, Artificial Sequence
  ENSG00000253485_19 (sequence is synthesized)
tacgcagacacgctccttagtgaagagagctgtgagaaaagcgagcctcttctgatgtctgataaggtagatgcaaacaaagaagaacggcgagttcagcaagccccgcccaacacggac

SEQ ID NO: 781035 - DNA, 120 bp, Artificial Sequence; identical to SEQ ID NO: 773797
  ENSG00000253485_20 (sequence is synthesized)

SEQ ID NO: 781036 - DNA, 120 bp, Artificial Sequence; identical to SEQ ID NO: 773798
  ENSG00000253485_21 (sequence is synthesized)

SEQ ID NO: 781037 - DNA, 120 bp, Artificial Sequence; identical to SEQ ID NO: 773799
  ENSG00000253485_22 (sequence is synthesized)

SEQ ID NO: 781038 - DNA, 120 bp, Artificial Sequence; identical to SEQ ID NO: 773800
  ENSG00000253485_23 (sequence is synthesized)

SEQ ID NO: 781039 - DNA, 120 bp, Artificial Sequence; identical to SEQ ID NO: 773801
  ENSG00000253485_24 (sequence is synthesized)

SEQ ID NO: 781040 - DNA, 120 bp, Artificial Sequence; identical to SEQ ID NO: 773802
  ENSG00000253485_25 (sequence is synthesized)

SEQ ID NO: 781041 - DNA, 120 bp, Artificial Sequence; identical to SEQ ID NO: 773803
  ENSG00000253485_26 (sequence is synthesized)

SEQ ID NO: 781042 - DNA, 120 bp, Artificial Sequence; identical to SEQ ID NO: 773804
  ENSG00000253485_27 (sequence is synthesized)

SEQ ID NO: 781043 - DNA, 120 bp, Artificial Sequence; identical to SEQ ID NO: 773805
  ENSG00000253485_28 (sequence is synthesized)

SEQ ID NO: 781044 - DNA, 120 bp, Artificial Sequence; identical to SEQ ID NO: 773806
  ENSG00000253485_29 (sequence is synthesized)

SEQ ID NO: 781045 - DNA, 120 bp, Artificial Sequence; identical to SEQ ID NO: 773807
  ENSG00000253485_30 (sequence is synthesized)

SEQ ID NO: 781046 - DNA, 120 bp, Artificial Sequence; identical to SEQ ID NO: 773808
  ENSG00000253485_31 (sequence is synthesized)

SEQ ID NO: 781047 - DNA, 120 bp, Artificial Sequence; identical to SEQ ID NO: 773809
  ENSG00000253485_32 (sequence is synthesized)

SEQ ID NO: 781048 - DNA, 120 bp, Artificial Sequence; identical to SEQ ID NO: 773810
  ENSG00000253485_33 (sequence is synthesized)

SEQ ID NO: 781049 - DNA, 120 bp, Artificial Sequence; identical to SEQ ID NO: 773811
  ENSG00000253485_34 (sequence is synthesized)

SEQ ID NO: 781050 - DNA, 120 bp, Artificial Sequence; identical to SEQ ID NO: 773812
  ENSG00000253485_35 (sequence is synthesized)

SEQ ID NO: 781051 - DNA, 120 bp, Artificial Sequence; identical to SEQ ID NO: 773813
  ENSG00000253485_36 (sequence is synthesized)

SEQ ID NO: 781052 - DNA, 120 bp, Artificial Sequence; identical to SEQ ID NO: 773814
  ENSG00000253485_37 (sequence is synthesized)

SEQ ID NO: 781053 - DNA, 120 bp, Artificial Sequence
  ENSG00000253485_38 (sequence is synthesized)
cagaatcagctagttatgtaaatagtggaacattatttgctgtattggagattaattttttttatataattcatgctttctccatttgttttcaaattctgttttgggaagtctagctga

SEQ ID NO: 781054 - DNA, 120 bp, Artificial Sequence
  ENSG00000253485_39 (sequence is synthesized)
tatctgtagacttaagtgaaacaaataccttaaaggaaagtggttaaatataatcattttacccaaatattttgttatattggaactgcagttctattaatagaaaagatgttttattta

SEQ ID NO: 781055 - DNA, 120 bp, Artificial Sequence
  ENSG00000253485_40 (sequence is synthesized)
ttcaaattgttagatatattgttctcttttgagtgtctgcctagacaccattagtgaatgtgttttggaaaggataatgtataggactgatattttagtctacctgaaatttgtttaagg

SEQ ID NO: 781056 - DNA, 120 bp, Artificial Sequence
  ENSG00000253485_41 (sequence is synthesized)
tacctgaaatttgtttaaggaaataatttacagtatttacataaatcagtggaaaggtacagagaacttctgggtcataaatatcagaaaagaggccgggtgcggtggctgacgcctgta

SEQ ID NO: 781057 - DNA, 120 bp, Artificial Sequence
  ENSG00000253485_42 (sequence is synthesized)
ataaataaataaataaataaatatcagaaaagtagataaaatttatattaatgataacatgtagcattctaaagtctggaaagtttgtgttaagccatgtagttattggatatgtgggct

SEQ ID NO: 781058 - DNA, 120 bp, Artificial Sequence
  ENSG00000253485_43 (sequence is synthesized)
tgtgggcttgttgagagaagaaatcagtgtaaaggaaccttaaggttgggcttcgttctgtgatgtaaagcctccagagagttacatactgctgcactcaataaatgtaaatatgtcaca

SEQ ID NO: 781059 - DNA, 120 bp, Artificial Sequence
  ENSG00000253506_0 (sequence is synthesized)
ctttctgccgccatcttgcttccgcgttccctgcacaaaatgccgggcgaagccacagaaaccgtccctgctacagagcaggagttgccgcagtcccaggctgagacagggtctggaaca

SEQ ID NO: 781060 - DNA, 120 bp, Artificial Sequence
  ENSG00000253506_1 (sequence is synthesized)
gcatctgatagtggtgaatcagtaccagggattgaagaacaggattccacccagaccaccacacaaaaagcctggctggtggcagcagctgaaattgatgaagaaccagtcggtaaagca

SEQ ID NO: 781061 - DNA, 120 bp, Artificial Sequence
  ENSG00000253506_2 (sequence is synthesized)
aaacagagtcggagtgaaaagagggcacggaaggctatgtccaaactgggtcttctacaggttacaggagttactagagtcactatctggaaatctaagaatatcctctttgtcatcaca

SEQ ID NO: 781062 - DNA, 120 bp, Artificial Sequence
  ENSG00000253506_3 (sequence is synthesized)
aagcacaactagcagctgcggagaaattcagagttcaaggtgaagctgtcggaaacattcaagaaaacacacagactccaactgtacaagaggagagtgaagaggaagaggtcgatgaaa

SEQ ID NO: 781063 - DNA, 120 bp, Artificial Sequence
  ENSG00000253506_4 (sequence is synthesized)
caggtgtagaagttaaagacgtgaaattggtcatgtcacaagcaaatgtgtcgagagcaaaggcagtccgagctctgaagaacaacagtaatgatattgtaaatgcgattatggaattaa

SEQ ID NO: 781064 - DNA, 120 bp, Artificial Sequence
  ENSG00000253506_5 (sequence is synthesized)
cagtgtaaccatctgaaagcaactttttttggtgtctcaaaggagtaactgcagcttggtttgaaatttgtactgtttctatcataaataaagttatgacttcttgctggaaaaagaaaa

SEQ ID NO: 781065 - DNA, 120 bp, Artificial Sequence
  ENSG00000253534_0 (sequence is synthesized)
atgagcctcgggctcctgtgctgtgcggccttttctctcctgtgggcaggtcccgtgaatgctggtgtcactcagaccccaaaattccacatcctgaagacaggacagagcatgacactg

SEQ ID NO: 781066 - DNA, 120 bp, Artificial Sequence
  ENSG00000253534_1 (sequence is synthesized)
tgacaaagaagtccccaatggctacaatgtctctagattaaacacagaggatttcccactcaggctggtgtcggctgctccctcccagacatctgtgtacttgtgtgccagcagttactc

SEQ ID NO: 781067 - DNA, 120 bp, Artificial Sequence
  ENSG00000253537_0 (sequence is synthesized)
agattgcgataagccctcttccaggctgcactaaactcaagcctctatcctgctggattctgagctccccttcctaagacagaggggtccacccggatacacccgcattctgaagcactt

SEQ ID NO: 781068 - DNA, 120 bp, Artificial Sequence
  ENSG00000253537_1 (sequence is synthesized)
cccgagatcggcgcctaagcaagagaagcaggacgactatggcggctcagccgaggggcggggactacagaggattcttcctgctctccatcctcctggggaccccctgggaagcctggg

SEQ ID NO: 781069 - DNA, 120 bp, Artificial Sequence
  ENSG00000253537_2 (sequence is synthesized)
caggacgtattctctactccgtgtcggaggagacggacaaagggtcctttgtgggagacatcgccaaggacctggggctggagccccgggagctggcggagcgcggagtccgcatcatct

SEQ ID NO: 781070 - DNA, 120 bp, Artificial Sequence
  ENSG00000253537_3 (sequence is synthesized)
ccagaggtaggacgcagcttttcgccctgaaccagcgcagcggcagcttggtcactgcgggcaggatagaccgggaagagatctgcgctcagagtgcgcggtgtctggtaaactttaaca

SEQ ID NO: 781071 - DNA, 120 bp, Artificial Sequence
  ENSG00000253537_4 (sequence is synthesized)
tcctgatggaagataaaatgaatctttaccctatagacgtggaaataatagatattaatgacaacgttccaagattcttgacggaagaaataaatgtaaaaataatggagaatacagctc

SEQ ID NO: 781072 - DNA, 120 bp, Artificial Sequence
  ENSG00000253537_5 (sequence is synthesized)
ctggggttcggtttccgttaagcgaggctggggatccagatgtgggcacgaactccctccagagttaccagctcagccccaatcgccacttctccctggctgtgcaaagtggagacgatg

SEQ ID NO: 781073 - DNA, 120 bp, Artificial Sequence
  ENSG00000253537_6 (sequence is synthesized)
aaactaagtacccggaactggtgctggagcgggtgctggaccgggaggaagagcgggttcaccacctggtcctcacagcctctgatggcggcgacccgccccgatccagcaccgcccaca

SEQ ID NO: 781074 - DNA, 120 bp, Artificial Sequence
  ENSG00000253537_7 (sequence is synthesized)
tccaggtgacagtggtggatgtgaatgaccacacgcctgtcttctctctgcctcagtaccaagtaactgtccccgagaatgtgccagtgggtacaagactgctcacggtacatgctatcg

SEQ ID NO: 781075 - DNA, 120 bp, Artificial Sequence
  ENSG00000253537_8 (sequence is synthesized)
acctggacgagggagtcaatggggaagtgacatattcttttcggaaaataactcctaaacttccaaagatgtttcatctgaactcgcttacaggagaaatatcaactttagaaggattag

SEQ ID NO: 781076 - DNA, 120 bp, Artificial Sequence
  ENSG00000253537_9 (sequence is synthesized)
attatgaagaaactgccttctatgaaatggaggttcaggctcaagatggtcctggtagtctgacaaaggcaaaagtactgatcacagttttagatgtaaatgataatgctccagaagtga

SEQ ID NO: 781077 - DNA, 120 bp, Artificial Sequence
  ENSG00000253537_10 (sequence is synthesized)
ctatgacgtctttaagtagctcaatccctgaagacacacctcttgggacagtcattgctcttttctacctacaagacagagattctggaaagaatggtgaggtgacctgcaccattccag

SEQ ID NO: 781078 - DNA, 120 bp, Artificial Sequence
  ENSG00000253537_11 (sequence is synthesized)
aaaacctaccttttaaattagaaaaatcaatagataattattatagattggtcacaaccaaaaacttggaccgggaaacactctctttgtataacatcacactgaaagccacagatggtg

SEQ ID NO: 781079 - DNA, 120 bp, Artificial Sequence
  ENSG00000253537_12 (sequence is synthesized)
gaactcctcccttgtccagggaaactcacatattcatgcaggtggcagacaccaacgataacccacccaccttcccccactcatcctactcagtctacatcgctgagaacaaccccagag

SEQ ID NO: 781080 - DNA, 120 bp, Artificial Sequence
  ENSG00000253537_13 (sequence is synthesized)
gggcctccattttcttagtgactgcacaggaccacgacagtgaggataatgcccagatcacttattccttggccgaagacaccatccagggggctccagtgtcctcctatgtctccataa

SEQ ID NO: 781081 - DNA, 120 bp, Artificial Sequence
  ENSG00000253537_14 (sequence is synthesized)
actctgacactggagtcctgtacgcgctgcaatcctttgattatgagcagttgagagaactacaactaagagtgactgcacatgacagcggggacccgcctctcagcagcaacatgtcac

SEQ ID NO: 781082 - DNA, 120 bp, Artificial Sequence
  ENSG00000253537_15 (sequence is synthesized)
tgagcctgttcgtgctggaccagaatgacaacccgcccgagatcctgtacccggccctccccacagatggttctactggcatggagctggcaccccgctccgcagagcccggctacctgg

SEQ ID NO: 781083 - DNA, 120 bp, Artificial Sequence
  ENSG00000253537_16 (sequence is synthesized)
tgaccaaggtggtggcggtggacaaagattcaggccagaacgcctggctgtcatacctcctgcttaaggccagcgagccaggactctttgcggttgggctgtacacgggcgaggtgcgca

SEQ ID NO: 781084 - DNA, 120 bp, Artificial Sequence
  ENSG00000253537_17 (sequence is synthesized)
cggctcgggccctgctggacagagatgccctcaagcagagcctcgtggtggccgtccaggaccacggtcagcctcctctgtcagccaccgtcacactcaccgtggctgtggctgacagca

SEQ ID NO: 781085 - DNA, 120 bp, Artificial Sequence
  ENSG00000253537_18 (sequence is synthesized)
tccccgaagtcttggccgacctgggcagccttgagccctccgacggtccttacaactatgacctcacgttgtacctggtggtggcggtggccacagtctcctgcgtcttcctagccttcg

SEQ ID NO: 781086 - DNA, 120 bp, Artificial Sequence
  ENSG00000253537_19 (sequence is synthesized)
cgtgcccacctcgcactttgtgggcatggacggggtgcaggctttcctgcagacctattcccatgaggtctccctcaccgcggactctcggaagagtcacctgatcttcccccagcccaa

SEQ ID NO: 781087 - DNA, 120 bp, Artificial Sequence
  ENSG00000253537_20 (sequence is synthesized)
ctatgtagacatgctcatcagccaggagagctgtgagaaaaatgattctttgctaacatccgtagattttcaggaatgtaaagaaaacctgccaagtattcagcaagccccgcccaacac

SEQ ID NO: 781088 - DNA, 120 bp, Artificial Sequence; identical to SEQ ID NO: 80682
  ENSG00000253537_21 (sequence is synthesized)

SEQ ID NO: 781089 - DNA, 120 bp, Artificial Sequence; identical to SEQ ID NO: 80683
  ENSG00000253537_22 (sequence is synthesized)

SEQ ID NO: 781090 - DNA, 120 bp, Artificial Sequence; identical to SEQ ID NO: 80684
  ENSG00000253537_23 (sequence is synthesized)

SEQ ID NO: 781091 - DNA, 120 bp, Artificial Sequence; identical to SEQ ID NO: 80685
  ENSG00000253537_24 (sequence is synthesized)

SEQ ID NO: 781092 - DNA, 120 bp, Artificial Sequence; identical to SEQ ID NO: 80686
  ENSG00000253537_25 (sequence is synthesized)

SEQ ID NO: 781093 - DNA, 120 bp, Artificial Sequence; identical to SEQ ID NO: 80687
  ENSG00000253537_26 (sequence is synthesized)

SEQ ID NO: 781094 - DNA, 120 bp, Artificial Sequence; identical to SEQ ID NO: 80688
  ENSG00000253537_27 (sequence is synthesized)

SEQ ID NO: 781095 - DNA, 120 bp, Artificial Sequence; identical to SEQ ID NO: 80689
  ENSG00000253537_28 (sequence is synthesized)

SEQ ID NO: 781096 - DNA, 120 bp, Artificial Sequence; identical to SEQ ID NO: 80690
  ENSG00000253537_29 (sequence is synthesized)

SEQ ID NO: 781097 - DNA, 120 bp, Artificial Sequence; identical to SEQ ID NO: 80691
  ENSG00000253537_30 (sequence is synthesized)

SEQ ID NO: 781098 - DNA, 120 bp, Artificial Sequence; identical to SEQ ID NO: 80692
  ENSG00000253537_31 (sequence is synthesized)

SEQ ID NO: 781099 - DNA, 120 bp, Artificial Sequence; identical to SEQ ID NO: 80693
  ENSG00000253537_32 (sequence is synthesized)

SEQ ID NO: 781100 - DNA, 120 bp, Artificial Sequence; identical to SEQ ID NO: 80694
  ENSG00000253537_33 (sequence is synthesized)

SEQ ID NO: 781101 - DNA, 120 bp, Artificial Sequence; identical to SEQ ID NO: 80695
  ENSG00000253537_34 (sequence is synthesized)

SEQ ID NO: 781102 - DNA, 120 bp, Artificial Sequence; identical to SEQ ID NO: 80696
  ENSG00000253537_35 (sequence is synthesized)

SEQ ID NO: 781103 - DNA, 120 bp, Artificial Sequence; identical to SEQ ID NO: 80697
  ENSG00000253537_36 (sequence is synthesized)

SEQ ID NO: 781104 - DNA, 120 bp, Artificial Sequence; identical to SEQ ID NO: 80698
  ENSG00000253537_37 (sequence is synthesized)

SEQ ID NO: 781105 - DNA, 120 bp, Artificial Sequence; identical to SEQ ID NO: 80699
  ENSG00000253537_38 (sequence is synthesized)

SEQ ID NO: 781106 - DNA, 120 bp, Artificial Sequence
  ENSG00000253537_39 (sequence is synthesized)
tttgaaaatagggatttaaaaaactttatagaggtaaaaatgagtttaccagtttccttcagtggtgacactttaatatagaacacataggatatagtatttctttagtgaaagcctatg

SEQ ID NO: 781107 - DNA, 120 bp, Artificial Sequence
  ENSG00000253537_40 (sequence is synthesized)
gacaagattatgaatatgtggactatcacattttataatttccacctactttccaatctatgttccaacctactttcttaactcatatattttatacattggaatgaatcgagtctttca

SEQ ID NO: 781108 - DNA, 120 bp, Artificial Sequence
  ENSG00000253537_41 (sequence is synthesized)
tattgcacaaggttagcaggaataaaacacacctcagctgtcttctcaggattctctttagcattcaaatatgtaaaaggttctgaaagatttcttccatgtgaagatttttttctgtgg

SEQ ID NO: 781109 - DNA, 120 bp, Artificial Sequence
  ENSG00000253537_42 (sequence is synthesized)
ctgattctgcctccatgtacctcagcttggtggtcctaaaaaatcttgattgcttcttgacctatttacagtataatcatttattaatggggtggtagtagaaggttggatttatgccta

SEQ ID NO: 781110 - DNA, 120 bp, Artificial Sequence
  ENSG00000253537_43 (sequence is synthesized)
aagaatgaaatgtgtgtgtatcacacttcactaagatctatatcaaagacagacatcaagtctaatgccacactaaaggccatcggacaaaaccaataaaatatgtcaaataaaatgtca

SEQ ID NO: 781111 - DNA, 120 bp, Artificial Sequence
  ENSG00000253548_0 (sequence is synthesized)
atggcatcttctgcagagctggacttcaacctgcaggctcttctggagcagctcagccaggatgagttgagcaagttcaagtctctgatcagaacaatctccctgggaaaggagctacag

SEQ ID NO: 781112 - DNA, 120 bp, Artificial Sequence
  ENSG00000253548_1 (sequence is synthesized)
ttcaccagccactcctgcagctactgggcagggatggcagccatccaggtctttgaaaagatgaatcaaacgcatctgtctgggagagctgatgaacactgtgtgatgcccccaccttaa

SEQ ID NO: 781113 - DNA, 120 bp, Artificial Sequence
  ENSG00000253598_0 (sequence is synthesized)
agactgtcactggaacacctgcatgaagaatgttctttcattttttaaaaacgattttgcatatatgatttatttcagctttcaaaatgattagaaaactttttattgttctacttttgt

SEQ ID NO: 781114 - DNA, 120 bp, Artificial Sequence
  ENSG00000253598_1 (sequence is synthesized)
tgcttgtgactatagaagaagcaaggatgtcatcgctcagttttctgaatatagagaagactgaaatactatttttcacaaagactgaagaaaccatccttgtaagttcaagctacgaaa

SEQ ID NO: 781115 - DNA, 120 bp, Artificial Sequence
  ENSG00000253598_2 (sequence is synthesized)
ataaacggcctaattccagccacctctttgtgaaaatagaagatcctaaaatactacaaatggtgaatgtggccaagaagatctcatcagatgctacaaactttaccataaatctggtga

SEQ ID NO: 781116 - DNA, 120 bp, Artificial Sequence
  ENSG00000253598_3 (sequence is synthesized)
ctgatgaagaaggagaaacaaatgtgactattcaactctgggattctgaaggtaggcaagaaagactcattgaagaaatcaagaatgtgaaagtcaaagtgctcaaacaaaaagacagtc

SEQ ID NO: 781117 - DNA, 120 bp, Artificial Sequence
  ENSG00000253598_4 (sequence is synthesized)
tactccaggcaccaatgcatattgatagaaatatcctaatgcttattttaccactaatactattgaataagtgtgcatttggttgtaagattgaattacagctgtttcaaacagtatgga

SEQ ID NO: 781118 - DNA, 120 bp, Artificial Sequence
  ENSG00000253598_5 (sequence is synthesized)
agagacctttgccagtaattcttggggcagttacacagttttttctgatgccattttgcgggtttcttttgtctcagattgtggcattgcctgaggcgcaagcttttggagttgtaatga

SEQ ID NO: 781119 - DNA, 120 bp, Artificial Sequence
  ENSG00000253598_6 (sequence is synthesized)
caggagggggtgggggctatctctttgctctgcttctagatggagatttcacattggccattttgatgacttgcacatcaacattattggctctgatcatgatgcctgtcaattcttata

SEQ ID NO: 781120 - DNA, 120 bp, Artificial Sequence
  ENSG00000253598_7 (sequence is synthesized)
tatacagtaggatattagggttgtcaggtacattccatattcctgtttctaaaattgtgtcaacactccttttcatacttgtgccagtatcaattggaatagtcatcaagcatagaatac

SEQ ID NO: 781121 - DNA, 120 bp, Artificial Sequence
  ENSG00000253598_8 (sequence is synthesized)
ctgaaaaagcaagcttcttagagagaataattagacctctgagttttattttaatgttcgtaggaatttatttgactttcacagtgggattagtgttcttaaaaacagataatctagagg

SEQ ID NO: 781122 - DNA, 120 bp, Artificial Sequence
  ENSG00000253598_9 (sequence is synthesized)
tgattctgttgggtctcttagttcctgctttgggtttgctgtttgggtactcctttgctaaagtttgtacgctgcctcttcctgtttgtaaaactgttgctattgaaagtgggatgttaa

SEQ ID NO: 781123 - DNA, 120 bp, Artificial Sequence
  ENSG00000253598_10 (sequence is synthesized)
atagtttcttagctcttgccgttattcagctgtcttttccacagtccaaggccaatttagcttctgtggctccttttacagtagccatgtgttctggatgtgaaatgttactgatcattc

SEQ ID NO: 781124 - DNA, 120 bp, Artificial Sequence
  ENSG00000253598_11 (sequence is synthesized)
tagtttacaaggctaagaaaagatgtatctttttcttacaagataaaaggaaaagaaatttcctaatctaacaattaaagcattactgaattcctactctgggtagggcactgtgggaga

SEQ ID NO: 781125 - DNA, 120 bp, Artificial Sequence
  ENSG00000253626_0 (sequence is synthesized)
ggggtcgagtcagtgccgtttgcgccagttggaatcgaagcctcttaaaatggcagatgatttggacttcgagacaggagatgcaggggcctcagccaccttcccaatgcagtgctcagc

SEQ ID NO: 781126 - DNA, 120 bp, Artificial Sequence
  ENSG00000253626_1 (sequence is synthesized)
attacgtaagaatggctttgtggtgctcaaaggctggccatgtaagatcgtggagatgtctgcttcgaagactggcaagcacggccacgccaaggtccatctggttggtattgacatctt

SEQ ID NO: 781127 - DNA, 120 bp, Artificial Sequence
  ENSG00000253626_2 (sequence is synthesized)
tactgggaagaaatatgaagatatctgcccgtcaactcataatatggatgtccccaacatcaaaaggaatgacttccagctgattggcatccaggatgggtacctatcactgctccagga

SEQ ID NO: 781128 - DNA, 120 bp, Artificial Sequence
  ENSG00000253626_3 (sequence is synthesized)
cagcggggaggtaccagaggaccttcgtctccctgagggagaccttggcaaggagattgagcagaagtacgactgtggagaagagatcctgatcacggtgctgtctgccatgacagagga

SEQ ID NO: 781129 - DNA, 120 bp, Artificial Sequence
  ENSG00000253626_4 (sequence is synthesized)
ggcagctgttgcaatcaaggccatggcaaaataactggctcccaaggtggcagtggtggcagcagtgatcctccgaacctgcagaggccccctcccccagcctggcctggctctggcctg

SEQ ID NO: 781130 - DNA, 120 bp, Artificial Sequence
  ENSG00000253626_5 (sequence is synthesized)
gtcctaggttggactcctcctacacaatttatttgacgttttattttggttttccccaccccctcaatctgtcagggagcccctgcccttcacctagctcccttggccaggagcgagcga

SEQ ID NO: 781131 - DNA, 120 bp, Artificial Sequence
  ENSG00000253626_6 (sequence is synthesized)
agccatggccttggtgaagctgccctcctcttctcccctcacactacagccctggtgggggagaagggggtgggtgctgcttgtggtttagtcttttttttttttttaaattcaatctgg

SEQ ID NO: 781132 - DNA, 120 bp, Artificial Sequence
  ENSG00000253626_7 (sequence is synthesized)
aatcagaaagcggtggattctggcaaatggtccttgtgccctccccactcatccttggtctggtcccctgttgcccatagccctttaccctgagcaccacccaacagactggggaccagc

SEQ ID NO: 781133 - DNA, 120 bp, Artificial Sequence
  ENSG00000253626_8 (sequence is synthesized)
cccctcgcctgcctgtgtctctccccaaacccctttagatggggagggaagaagaggagaggggaggggacctgccccctcctcaggcatctgggaagggcctgcccccatgggctttac

SEQ ID NO: 781134 - DNA, 120 bp, Artificial Sequence
  ENSG00000253626_9 (sequence is synthesized)
ccttccctgcgggctctctccccgacacatttgttaaaatcaaacctgaataaaactacaagtttaatatgaaaaaaaaaaaaaaagaaagaaagacgtgtaaaatgccaagaactctag

SEQ ID NO: 781135 - DNA, 120 bp, Artificial Sequence
  ENSG00000253626_10 (sequence is synthesized)
gaaacagggacaaaaacacttcaaagagaaagttcatgcacttgtttctgaccacccagggcacccttcagcacacgctgtctggagtggcctgaagcaaggagtgtcttgtgaggtgca

SEQ ID NO: 781136 - DNA, 120 bp, Artificial Sequence
  ENSG00000253626_11 (sequence is synthesized)
gagtggcctgaagcaaggagtgtcttgtgaggtgcagaggatgcaatgggagcagggtcctgtccccaccctaaaggagttcacagtttaacgcaaatgagaagccagtgaggacatcac

SEQ ID NO: 781137 - DNA, 120 bp, Artificial Sequence
  ENSG00000253626_12 (sequence is synthesized)
acctgagtctggagggaagctaaggaagcattctgctctggagtagacatgagtgcgtgtgaagcttctgatctcccatgagagcaatggggacatggggcagaatctaaaacccatgac

SEQ ID NO: 781138 - DNA, 120 bp, Artificial Sequence
  ENSG00000253626_13 (sequence is synthesized)
tgaaagcaccaaattgctaaaatggcaataaagagacatgaggccaagatggagaagaaggaacccaggacgagggtcagcctcacatttggggctcatttccctcagtttcctcactga

SEQ ID NO: 781139 - DNA, 120 bp, Artificial Sequence
  ENSG00000253626_14 (sequence is synthesized)
atttcagaagggactaactgagatgcaaagaagcagagcagcttttgcaccatgtggaggactagatggaaaacaagtagactgagggtctgctagtgaaggtgacccctactgaagtcc

SEQ ID NO: 781140 - DNA, 120 bp, Artificial Sequence
  ENSG00000253626_15 (sequence is synthesized)
actggctttggttgggacccagaagagtcacacgccaggaatagaggtggacaggaaacaccctgacttttgtagggactgaacctcactgataacctcaattgcggatggtatggaggg

SEQ ID NO: 781141 - DNA, 120 bp, Artificial Sequence
  ENSG00000253626_16 (sequence is synthesized)
tgtctaggtgtgctaggacccctgcccattccccagaaatagactcccatcttttctacagcaagataacgtgctagtaggcctcaattcattgctaaatatttttaacgagtgtcttac

SEQ ID NO: 781142 - DNA, 120 bp, Artificial Sequence
  ENSG00000253626_17 (sequence is synthesized)
atttagccaaaaagactagtcatgtggcaggaaaaatacaatgtcatatgaccaaaagctaaaagactgtgaaaatgaatccagaggtgacccaagcattgaatttaacaatgccagtac

SEQ ID NO: 781143 - DNA, 120 bp, Artificial Sequence
  ENSG00000253626_18 (sequence is synthesized)
ctggacctccgcttgcccctaaaacattacaatcaagaatgtaggaagggaaaggaaacacgaagattaatcaagcaggaaggacaagctcagttttgcacccactgaatttgccacaaa

SEQ ID NO: 781144 - DNA, 120 bp, Artificial Sequence
  ENSG00000253626_19 (sequence is synthesized)
tattgtggaaaatattctcggggacattgcagttgtctactttggttggcacatggttcatacaacagtgtttgtgtcagtgaacatcttactcttcctcggcagtctttctttgcccag

SEQ ID NO: 781145 - DNA, 120 bp, Artificial Sequence
  ENSG00000253626_20 (sequence is synthesized)
agatttcgcaatgactgttgaccttcatcatcaccttttggactttggcttgcactttagcttctgtagatctccatgatgtaaagaagtattttaggtccattttaattcctgcaaagg

SEQ ID NO: 781146 - DNA, 120 bp, Artificial Sequence
  ENSG00000253626_21 (sequence is synthesized)
ataaaatccttctatttgtgtgcatataagtggacctgagcccttggttagggtgtagagaggagaaggggagaaacctgagggccagaagctgttctttcccttaaaagggcaaactca

SEQ ID NO: 781147 - DNA, 120 bp, Artificial Sequence
  ENSG00000253626_22 (sequence is synthesized)
tttccacactatggggactctgacagatagcataccttcctgtctatggctattggacctgcaggctttcccctgtaaatccgtgttctgtcattgacattttgtgactgtaagacagac

SEQ ID NO: 781148 - DNA, 120 bp, Artificial Sequence
  ENSG00000253626_23 (sequence is synthesized)
ttgagataagacatctagaaaacaataattgaacaatgatgtgaatatatttcacacaactgaactgtacatttcaacaaggttaagatggtaattatcacgttatacattttttaccgc

SEQ ID NO: 781149 - DNA, 120 bp, Artificial Sequence
  ENSG00000253626_24 (sequence is synthesized)
aagatggtaattatcacgttatacattttttaccgcaggttaaaatgtttcacaggttgaaaggaaagcaactaccttcagttctctgagttcaagaatttgtaacatttcaccccctgc

SEQ ID NO: 781150 - DNA, 120 bp, Artificial Sequence
  ENSG00000253626_25 (sequence is synthesized)
ccatgctctactcagagcccactttcccttccctgacaccagcttcactgaggctggttggaacctaacacaaaacattctcagtaatgactgaattcccacaaagaattccatatagac

SEQ ID NO: 781151 - DNA, 120 bp, Artificial Sequence
  ENSG00000253626_26 (sequence is synthesized)
tgcatatgagttgaatcttctaagacatgaaatatttgttctcttcttggctaatatgcaatgcaaatcctgttgcagatgtacgtcatatacctctgaaattcctgatgtattcaatga

SEQ ID NO: 781152 - DNA, 120 bp, Artificial Sequence
  ENSG00000253626_27 (sequence is synthesized)
aataacatctttaaagttctgtgtagaatgttttttttctgatttcttcacatacgatagaaaaaaaaacccaaaaaaacatgtactaggatttcaatagaagcaatgggtgatctaaaa

SEQ ID NO: 781153 - DNA, 120 bp, Artificial Sequence
  ENSG00000253626_28 (sequence is synthesized)
aagcaatgggtgatctaaaaagatgaaagagcaaccgcatgcgccctacagctaccgctagattttatggggaaagcagctggcccagtttgcagctaggagaaatgtcaaacacatgaa

SEQ ID NO: 781154 - DNA, 120 bp, Artificial Sequence
  ENSG00000253626_29 (sequence is synthesized)
accatgaggcatgaacatttcatggcaatcacgatgtcctggtttgtgagataatgggatagaggagtagaaaacaaggagaaagatgagaaggtacaaagtggttcaagtcaaacagct

SEQ ID NO: 781155 - DNA, 120 bp, Artificial Sequence
  ENSG00000253626_30 (sequence is synthesized)
caactgaacttttcttaatggaatatttaaaaagtggtacattaaaaaacttcccccagttcacatcaaaaattctctcttcaggactaagttgggtagagactgttcaatgtgcctaga

SEQ ID NO: 781156 - DNA, 120 bp, Artificial Sequence
  ENSG00000253626_31 (sequence is synthesized)
tatcttcagaacttatatattttctgttttctacgtatgttgaagggcagtgccaaatgatgtgtaattatctaggttgtaaaaataaaacatactcccccttcccttgaggataaaaaa

SEQ ID NO: 781157 - DNA, 120 bp, Artificial Sequence
  ENSG00000253649_0 (sequence is synthesized)
ggcaattttggactggaattgacaagaagatgttccagcttctaattcccctgcttttggcactcaagggacatgcccaggacaatccagaaaacgtacaatgtggccacaggcctgctt

SEQ ID NO: 781158 - DNA, 120 bp, Artificial Sequence
  ENSG00000253649_1 (sequence is synthesized)
ttccaaactcgtcatggttaccatttcatgaacggcttcaagtccagaatggtgagtgcccgtggcaagtgagtatccagatgtcacggaaacacctctgtggaggctcaatcttacatt

SEQ ID NO: 781159 - DNA, 120 bp, Artificial Sequence
  ENSG00000253649_2 (sequence is synthesized)
ggtggtgggttctgacagccgcacactgcttccgaagaaccctattagacatggccgtggtaaatgtcactgtggtcatgggaacgagaacattcagcaacatccactcggagagaaagc

SEQ ID NO: 781160 - DNA, 120 bp, Artificial Sequence
  ENSG00000253649_3 (sequence is synthesized)
cctgtctgcctgcaggaggaggagaggacctgggactggtgttggatggcacagtgggtaacgaccaatgggtatgaccaatatgatgacttaaacatgcacctggaaaagctgagagtg

SEQ ID NO: 781161 - DNA, 120 bp, Artificial Sequence
  ENSG00000253649_4 (sequence is synthesized)
gtgcagattagccggaaagaatgtgccaagaggataaaccagctgtccaggaacatgatttgtgcttggaacgaaccaggcaccaatggtatcttcaagggagacagtggggcacctctg

SEQ ID NO: 781162 - DNA, 120 bp, Artificial Sequence
  ENSG00000253649_5 (sequence is synthesized)
gtttgtgctatttatggaacccagagactcttccaagtgggtgtcttcagtgggggcataagatctggctccagggggagacctggtatgtttgtgtctgtggctcaatttattccatga

SEQ ID NO: 781163 - DNA, 120 bp, Artificial Sequence
  ENSG00000253649_6 (sequence is synthesized)
agaagccgagaagctcactggtgtgtgttcctcagtaccccttcttgctaggattggggtctcaaatgctgctggccaccatgtttaccgttgataaacctaactgctaagctttggacc

SEQ ID NO: 781164 - DNA, 120 bp, Artificial Sequence
  ENSG00000253649_7 (sequence is synthesized)
caccctttttccttctctttcttctctctcctctcttcctttccattctcccacaagcatctgtggagcatgtgctgtggggtagcatctacaccagcccccagaagttagacatggact

SEQ ID NO: 781165 - DNA, 120 bp, Artificial Sequence
  ENSG00000253649_8 (sequence is synthesized)
taacctccaacaaagaaggacggtttcaggaaagcattggaaactcaacgttgggaaatgacttacgtttcttgatctcagtttccttgtccatgaaaaagcagattccattagatgaac

SEQ ID NO: 781166 - DNA, 120 bp, Artificial Sequence
  ENSG00000253649_9 (sequence is synthesized)
tgtaaggtctttcatcacaccaacattctgtgacgcttaataacttatttctgtcatggaaggcaatattacctcatcatcattgccccactctaattccgtcagttcagtgcatgatac

SEQ ID NO: 781167 - DNA, 120 bp, Artificial Sequence
  ENSG00000253649_10 (sequence is synthesized)
ggacgcacacacagggaacccccatctgaggtgcaaattctttcatctcctgggccatccatgaaagaaagtctccggtagagttaggatcaggggtcttttgtccagtttgaacttgaa

SEQ ID NO: 781168 - DNA, 120 bp, Artificial Sequence
  ENSG00000253649_11 (sequence is synthesized)
catggggagattatggcttgctacttatagaccacaccatcctttctctatccttaattattcaaataaaaagtataatgaggtggattggaggaagtggcaacatctgccctctccaca

SEQ ID NO: 781169 - DNA, 120 bp, Artificial Sequence
  ENSG00000253649_12 (sequence is synthesized)
tatgtgggtcactgagtgaggcccactgccagtcgccaaagtcatcatccagccagtgagaaaggataaaaattccagatgagaaagcagcacatcttttcactgagtggcaacaaaata

SEQ ID NO: 781170 - DNA, 120 bp, Artificial Sequence
  ENSG00000253649_13 (sequence is synthesized)
gcttgtgtggccagactgaaatataagtgataagaatttgtttttagaaaactaagagaccatgtttatttaaagattggtgccatgaaggacagtcagggactggtggtagttttctgg

SEQ ID NO: 781171 - DNA, 120 bp, Artificial Sequence
  ENSG00000253649_14 (sequence is synthesized)
gaggtcctttcttggttatgtctacctggcatagctacaaaggagacaatcatatgtggccccataaaaaagaaagacattcagctgctcattcattcattcattcattcagatactttg

SEQ ID NO: 781172 - DNA, 120 bp, Artificial Sequence
  ENSG00000253649_15 (sequence is synthesized)
tgaaacaggcactggaaagatacaggaatgtagatggtatgggtggttcatgacatctaatgtatatgtcacagccaaatttgtgcctcttctcatagggtcccctcgcaattagtaatt

SEQ ID NO: 781173 - DNA, 120 bp, Artificial Sequence
  ENSG00000253649_16 (sequence is synthesized)
agtttcattatataaatgcagttgtcccttggtatctgtgggaaattggttccaggacccttcttggatacgaaaatccatggatgctcaagttcctcatataaaacagtatttgtatat

SEQ ID NO: 781174 - DNA, 120 bp, Artificial Sequence
  ENSG00000253649_17 (sequence is synthesized)
ggatgtggcgaggcagccgcggtgtcagaaagaggaaggcaggaggctgaggccgagggccctggaatctcgcacattccagggttcagaaagatcacggtggggtccacctctggagtc

SEQ ID NO: 781175 - DNA, 120 bp, Artificial Sequence
  ENSG00000253649_18 (sequence is synthesized)
attgatatacttagggccatcttccttaacaccccagacctgctggtttcggagccatcgacctcctcatttccaccgcagagggctggaggagattcagaaaatcagggcagggcccag

SEQ ID NO: 781176 - DNA, 120 bp, Artificial Sequence
  ENSG00000253649_19 (sequence is synthesized)
gagaaggttctttcagagcatggcttcagcctggttacttctgacaccagccaggaggaacagacttcttccccatacagcaggtaccaccagaagtacctgagcaagatcaccctcagc

SEQ ID NO: 781177 - DNA, 120 bp, Artificial Sequence
  ENSG00000253649_20 (sequence is synthesized)
tcctgcagcctcagggcaccggagtgtcctgtccacggggcatttgttacggacaaagatttgtgtggcctttcactttgcacgctgaagcttaaccctggctgcaacgggacggggggc

SEQ ID NO: 781178 - DNA, 120 bp, Artificial Sequence
  ENSG00000253649_21 (sequence is synthesized)
caccaaggaagtcattaaggttaactaaggtatagggtggtgccctggttgacaggatggtggccttatgaggacacttacaagatggacgcccacttgtcccccgacccctctggcaca

SEQ ID NO: 781179 - DNA, 120 bp, Artificial Sequence
  ENSG00000253710_0 (sequence is synthesized)
gagttcgggggtcggcggaagatggcggccggcgaaaggagctggtgcctgtgcaagttgttgaggtttttttattcattattcttccctgggctcattgtatgtggaactttatgtgtg

SEQ ID NO: 781180 - DNA, 120 bp, Artificial Sequence
  ENSG00000253710_1 (sequence is synthesized)
tgtttggtcattgtcctttggggaatcagactgctgctacagagaaagaaaaaattagtgtcaactagcaaaaatgggaaaaatcaaatggtgattgcattttttcatccatactgcaat

SEQ ID NO: 781181 - DNA, 120 bp, Artificial Sequence
  ENSG00000253710_2 (sequence is synthesized)
gctggtggaggaggagaaagagttttatggtgtgctttaagagccctgcagaaaaagtatcctgaagcagtttatgttgtttataccggcgatgttaatgtcaacggtcaacagatacta

SEQ ID NO: 781182 - DNA, 120 bp, Artificial Sequence
  ENSG00000253710_3 (sequence is synthesized)
gaaggtgctttcagaagatttaacatcagattaattcacccagtgcagtttgtttttttaaggaaacgctatcttgtggaagattcactgtatcctcacttcacactgctgggccaaagt

SEQ ID NO: 781183 - DNA, 120 bp, Artificial Sequence
  ENSG00000253710_4 (sequence is synthesized)
ctaggatccatttttcttggctgggaagctctaatgcagtgtgttcctgatgtttacattgattcaatgggatacgcttttacgcttcctctgtttaagtatatagggggttgccaagtt

SEQ ID NO: 781184 - DNA, 120 bp, Artificial Sequence
  ENSG00000253710_5 (sequence is synthesized)
ggaagctatgttcattatcctactatcagcaccgacatgctctctgtagtgaagaatcaaaatattggatttaataatgcagccttcattaccaggaatccttttctcagcaaagtaaag

SEQ ID NO: 781185 - DNA, 120 bp, Artificial Sequence
  ENSG00000253710_6 (sequence is synthesized)
ctcatctactactatttatttgcttttatttatggacttgttggttcttgcagtgatgtagtcatggtcaattcttcttggacactaaaccatattctctcactatggaaagttgggaat

SEQ ID NO: 781186 - DNA, 120 bp, Artificial Sequence
  ENSG00000253710_7 (sequence is synthesized)
tgcactaacattgtttatccaccttgtgatgtgcagacatttctggacattcccttacatgagaaaaagatgaccccaggacatttgctggtttctgttggccagtttaggccggaaaag

SEQ ID NO: 781187 - DNA, 120 bp, Artificial Sequence
  ENSG00000253710_8 (sequence is synthesized)
aatcatccattgcagatcagagcctttgctaaattgctgaataagaagatggttgagtcacctccttcgcttaaacttgtcctcattggaggttgtcgtaacaaagatgatgaacttagg

SEQ ID NO: 781188 - DNA, 120 bp, Artificial Sequence
  ENSG00000253710_9 (sequence is synthesized)
gtaaaccaactgagaaggctgtctgaggatttaggagttcaagaatatgtggaatttaaaataaacattccatttgatgaattaaagaattatttgtctgaagcaacaattggtctgcat

SEQ ID NO: 781189 - DNA, 120 bp, Artificial Sequence
  ENSG00000253710_10 (sequence is synthesized)
accatgtggaacgagcattttgggattggagttgtggagtgtatggcagctggcacaattatccttgcacacaattcggggggcccaaagcttgacattgtggttcctcacgaaggagat

SEQ ID NO: 781190 - DNA, 120 bp, Artificial Sequence
  ENSG00000253710_11 (sequence is synthesized)
ataactggctttctggctgagagtgaagaagactatgctgaaactatcgctcacattctttccatgtctgcagaaaagagactccaaatcagaaaaagtgctcgtgcatctgtaagcaga

SEQ ID NO: 781191 - DNA, 120 bp, Artificial Sequence
  ENSG00000253710_12 (sequence is synthesized)
ttctctgatcaggaatttgaagtgacattcctatcatctgtggaaaagttatttaagtaatgccatatctgtaaaattaaagatattttatataaactggttaaacaccttcatatgtaa

SEQ ID NO: 781192 - DNA, 120 bp, Artificial Sequence
  ENSG00000253710_13 (sequence is synthesized)
atatttttctaaattcaatctcatttgtcaaatcattttactttagaaaacagacaaaatttccttttagaataaaaggaagtgttgaaaagaaaatggatgactagccttcggcttcca

SEQ ID NO: 781193 - DNA, 120 bp, Artificial Sequence
  ENSG00000253710_14 (sequence is synthesized)
ttcttggtatacatgagagaggctggctgctgagatgaatgtgaaccaggttgcagagaatctggctttgagccaccaggaagaactagtggatttgccaaaaaactaccccttgagtga

SEQ ID NO: 781194 - DNA, 120 bp, Artificial Sequence
  ENSG00000253710_15 (sequence is synthesized)
aaatgaagatgagggggacagtgatggagagagaaagcatcaaaagcttctggaagcaatcatttcccttgatggaaagaataggcggaaattggctgagaggtctgaggctagtctgaa

SEQ ID NO: 781195 - DNA, 120 bp, Artificial Sequence
  ENSG00000253710_16 (sequence is synthesized)
agtgtcagagttcagtgtcagttctgaaggatcaggagaaaagctgggccttgcagatctgcttgagcccgttaaaacttcatcttctttggccactgtaaaaaagcaactgaatagagt

SEQ ID NO: 781196 - DNA, 120 bp, Artificial Sequence
  ENSG00000253710_17 (sequence is synthesized)
caaatcaaagaaggtggtggagttacctcttaacaaagaaaaaattgaacagatccacagagaagtagcattcagtaaaacctcacaggtcctctccaaatgggaccctatcatcctgaa

SEQ ID NO: 781197 - DNA, 120 bp, Artificial Sequence
  ENSG00000253710_18 (sequence is synthesized)
gaaccagcaggcagagcagctggtttttcccctggggaaggagcagccagccattgctcccattgaacatgcgctcagtggctggaaggcaagaactcccctggagcaggaaatttttaa

SEQ ID NO: 781198 - DNA, 120 bp, Artificial Sequence
  ENSG00000253710_19 (sequence is synthesized)
cctcctccataagaacaagcagccagtgacagatcctttactgactcccatggaaaaggcctctctccaagccatgagcctggaagaggcaaagatgcaccgagcagagcttcagagggc

SEQ ID NO: 781199 - DNA, 120 bp, Artificial Sequence
  ENSG00000253710_20 (sequence is synthesized)
tcgggctctgcagtcctactatgaggccaaggctcgaaaagagaagaaaatcaaaagtaaaaagtatcacaaagtcgtgaagaaaggaaaggccaagaaagccttaaaagagtttgagca

SEQ ID NO: 781200 - DNA, 120 bp, Artificial Sequence
  ENSG00000253710_21 (sequence is synthesized)
gctacagaaggttaatccaactgtggcactggaagaaatggaaaaaattgaaaatgccagaatgatggaaagaatgagccttaagcaccaaaacagtgggaaatgggccaagtcaaaggc

SEQ ID NO: 781201 - DNA, 120 bp, Artificial Sequence
  ENSG00000253710_22 (sequence is synthesized)
aattatggccaaatatgacctggaggctcgccaagctatgcaggaacagttggccaagaacaaagaactgacacagaaactccaggtagcctctgagagtgaggaagaggagggaggcac

SEQ ID NO: 781202 - DNA, 120 bp, Artificial Sequence
  ENSG00000253710_23 (sequence is synthesized)
agaagtggaagaactccttgtccctcatgtagcgaatgaagtgcagatgaatgtggacggaccgaatccctggatgttcaggagctgcaccagtgacaccaaagaggctgcaacacagga

SEQ ID NO: 781203 - DNA, 120 bp, Artificial Sequence
  ENSG00000253710_24 (sequence is synthesized)
ggaccctgagcaagtgccagagcttgcagctcatgaggtttctgcaagtgaggcagaagaaagaccagtggcagaggaagaaattttgttgagagaatttgaggaaaggcaatcccttag

SEQ ID NO: 781204 - DNA, 120 bp, Artificial Sequence
  ENSG00000253710_25 (sequence is synthesized)
aaaaagatctgagctcaaccaggatgctgagccagcaagcagtcaagaaacaaaagattctagcagccaggaggtgctgtccgaattgagggcactatctcagaaattgaaggaaaaaca

SEQ ID NO: 781205 - DNA, 120 bp, Artificial Sequence
  ENSG00000253710_26 (sequence is synthesized)
tcagtccaggaagcaaaaagcaagttcagaggggactgttccccaggtccagagagaggaacctgccccagaagaagcggaacccctattgctacagaggtcagagagagtacaaactct

SEQ ID NO: 781206 - DNA, 120 bp, Artificial Sequence
  ENSG00000253710_27 (sequence is synthesized)
ttgttttcaaaataaggagcttcccagacctgtgttagaaggacagcagtcagagaggaccccaaataatcggcctgatgcccctaaggagaagaaagagaaggagcaactgatcaacct

SEQ ID NO: 781207 - DNA, 120 bp, Artificial Sequence
  ENSG00000253710_28 (sequence is synthesized)
acagaacttcctgaccacacagtctccttccgtgaggtctttggcagttcccacaataatagaggagctggaagatgaagaggagagagaccaaaggcagatgataaaggaagcttttgc

SEQ ID NO: 781208 - DNA, 120 bp, Artificial Sequence
  ENSG00000253710_29 (sequence is synthesized)
tggggatgatgtcatcagagatttcttgaaagagaagagggaagctgtggaggcgagtaagccaaaggacgtggacctgacactacctggctggggcgagtggggtggtgtgggcctaaa

SEQ ID NO: 781209 - DNA, 120 bp, Artificial Sequence
  ENSG00000253710_30 (sequence is synthesized)
gcccagtgccaagaaaagacgccagtttctcattaaagcccctgagggtcctccaagaaaagataagaatttgccaaatgtgattatcagtgagaagcgcaacatccacgcagcagctca

SEQ ID NO: 781210 - DNA, 120 bp, Artificial Sequence
  ENSG00000253710_31 (sequence is synthesized)
tcaggtacaagtgcttccatatccatttacccaccatcggcaatttgaaaggaccatccagacccctataggatccacatggaacacccagagggctttccaaaagctgactactcccaa

SEQ ID NO: 781211 - DNA, 120 bp, Artificial Sequence
  ENSG00000253710_32 (sequence is synthesized)
ggtcgtcaccaagccaggccatatcattaagcccataaaagcagaggatgtgggctaccagtcttcctcaaggtcagacctgcctgtcatacagaggaatccaaaacgaatcaccacacg

SEQ ID NO: 781212 - DNA, 120 bp, Artificial Sequence
  ENSG00000253710_33 (sequence is synthesized)
tcacaataaagaagaaaaactgtaggttgtgtagctggagaagtgacagtcaggggccctgattccacttcctttggtccagttttactctgctacagggtggattccaaaactggctca

SEQ ID NO: 781213 - DNA, 120 bp, Artificial Sequence
  ENSG00000253710_34 (sequence is synthesized)
gcacattgcatgtagttgagccacattttttaaaaaaagaaaatggatgaccattaattgactagcattttagaattgatcagacattagaacacagaaaaattctagtacatttaaatt

SEQ ID NO: 781214 - DNA, 120 bp, Artificial Sequence
  ENSG00000253710_35 (sequence is synthesized)
ctaaacaatacagtggatgacccttttgaatatacctaatgatttccttaaaaaagaaattttaaacagacttgtttaatcgtgttctcaaagcatacagtcaagaggtgggactgactg

SEQ ID NO: 781215 - DNA, 120 bp, Artificial Sequence
  ENSG00000253710_36 (sequence is synthesized)
atgctttataggtgtgtgtagggtggtagaggccaaggtgctgccagcaatcctttccatactaggtactggtgaaaattgtttttgtttatgctgtcagcacatttgtgtgggtctctc

SEQ ID NO: 781216 - DNA, 120 bp, Artificial Sequence
  ENSG00000253710_37 (sequence is synthesized)
attgtcccttaacagtgccgcatctcagcctggaagtcagctttaagtcattcaagagaacctcaggctgtttttctgacagtgatgatatgatatacagatacatccacagggtatcta

SEQ ID NO: 781217 - DNA, 120 bp, Artificial Sequence
  ENSG00000253710_38 (sequence is synthesized)
ttaccagcataatgcattgtaagatggcaaggtggcattttgaaagagcgctgggcaagcagttagcacatctgggcctaccttcagcttcttcatttacaaacttctgaccttttgaca

SEQ ID NO: 781218 - DNA, 120 bp, Artificial Sequence
  ENSG00000253710_39 (sequence is synthesized)
ctaaagctgctcctttatctttctgagtctcagattcttcatctgtaatctggagttgttaattccagtccttactaccttttagagttggaatgagatggaaagtagatgaaactactt

SEQ ID NO: 781219 - DNA, 61 bp, Artificial Sequence
  ENSG00000253710_40 (sequence is synthesized)
tttagagttggaatgagatggaaagtagatgaaactactttgaaaattacgacagttaagg

SEQ ID NO: 781220 - DNA, 120 bp, Artificial Sequence
  ENSG00000253710_41 (sequence is synthesized)
gtgccactgcactctagcctgggcaataagcaaaactccatctcaaaaaagaaaaaaaggaaaaagaaaattatgagagttacttaaaggtaacatcacatactaaatgtcttctataat

SEQ ID NO: 781221 - DNA, 120 bp, Artificial Sequence
  ENSG00000253710_42 (sequence is synthesized)
aaatgtcttctataatcctatatttattaatgcattacaactctgtagattgttagttactaggccagtagctaggaattggtataaatttaatgcaccttctatcctgaataactagca

SEQ ID NO: 781222 - DNA, 120 bp, Artificial Sequence
  ENSG00000253710_43 (sequence is synthesized)
tggaaaagtgaatatatgtgtgagcagatatggctataaagacctatagcttttgcactttatgcatatataatcaatcctttctagttcagtgaattgaccccatccacaggctgattc

SEQ ID NO: 781223 - DNA, 120 bp, Artificial Sequence
  ENSG00000253710_44 (sequence is synthesized)
atctttgtgttaaggggcaaatgaaacggtatattatttctttgcagtctcctctcagtcattcatcaatgtggccagcttatctactcccaattatgttgttgatacatctccaagcca

SEQ ID NO: 781224 - DNA, 120 bp, Artificial Sequence
  ENSG00000253710_45 (sequence is synthesized)
tctgtcatcagatcaaaaagcagcaaacagagggtcagtcacaggatgttctgacacaccattgtaactttttgttagagatgatcccatttagaaaaagactggtagaaattggagtga

SEQ ID NO: 781225 - DNA, 120 bp, Artificial Sequence
  ENSG00000253710_46 (sequence is synthesized)
aaggaaccctacagattagcccagttctctcttattttcagctttacagacaagaacaatttaaatctaaagaatttagtagattccttcagtgtcacaaagctgtttcatgaaagaatc

SEQ ID NO: 781226 - DNA, 120 bp, Artificial Sequence
  ENSG00000253710_47 (sequence is synthesized)
aagattataacctggatattctgactcctggcccagtgctttttcttactttgtagctacactttgaagtaagattcaaactgttatccactcaattgccttattcctgaggatgtagtg

SEQ ID NO: 781227 - DNA, 120 bp, Artificial Sequence
  ENSG00000253710_48 (sequence is synthesized)
aaggaagaaaaagttttctggaattccgtaaattatattttaagcttatttcttcaaaattattttcatatatcacagatatatcattggaagatataatttgcatatatgttcattatc

SEQ ID NO: 781228 - DNA, 120 bp, Artificial Sequence
  ENSG00000253710_49 (sequence is synthesized)
agtgttcctaatttggtattacatgtattctatttttttctgaatgatagcatgaaaagtgtcaaagtggtttgtccgctagcgtctgtctgcagaactttcaggatgactattaattcc

SEQ ID NO: 781229 - DNA, 120 bp, Artificial Sequence
  ENSG00000253710_50 (sequence is synthesized)
tctcagatgtcatttttgagtggtccaagcctgctgttttgaacccacagcagtggagatttgtattcttatttacagttgtgtactataaagtgtgtgttacataggttttgtgtaata

SEQ ID NO: 781230 - DNA, 120 bp, Artificial Sequence
  ENSG00000253710_51 (sequence is synthesized)
tttgtaaatattatttagatttgtatttagacatgatttatatctaatatagatacaaagtctgtgtctaaatattatttaaagaagtgatttttcattctcttggattctttccagtgt

SEQ ID NO: 781231 - DNA, 120 bp, Artificial Sequence
  ENSG00000253710_52 (sequence is synthesized)
gtgtggtgccttttatatgcctcacatagtctccttgttctcctactaatattcccaagctccatatgccaattaaagaagaaacaaaaataaaagtttgtcttgcttgtgaaacattaa

SEQ ID NO: 781232 - DNA, 120 bp, Artificial Sequence
  ENSG00000253710_53 (sequence is synthesized)
ggcggaagatggcggccggcgaaaggagctggtgcctgtgcaagttgttgagtttcgagtatgtctttatcagcagcgtgaaaatgaacttggtaccataaattagtaccagtagagtgg

SEQ ID NO: 781233 - DNA, 78 bp, Artificial Sequence
  ENSG00000253710_54 (sequence is synthesized)
tggaactgggccaggaaaatgtgggaaagtttggaacatcctagagacttgttgaatggctttgaacaaaatgcggat

SEQ ID NO: 781234 - DNA, 120 bp, Artificial Sequence
  ENSG00000253710_55 (sequence is synthesized)
agaagaagccaggaaaatgtgggaaagtttggaacatcctagagacttgttgaatggctttgaacaaaatgcggatagtgatatggacaacgaaatccaggctgaggtggtctcagatgg

SEQ ID NO: 781235 - DNA, 63 bp, Artificial Sequence
  ENSG00000253710_56 (sequence is synthesized)
agatgaagaacttgttgggaactggagaaaggtgactcctcttatgttttagcaaaggtacta

SEQ ID NO: 781236 - DNA, 120 bp, Artificial Sequence
  ENSG00000253710_57 (sequence is synthesized)
tgatttagggtatctggtgtaagaaatttctaagcagcaaagaattcaagaagtgacttgggtgctcttaaaagcattccattttaaaagcggaacagagcataaaagttcagaaaattt

SEQ ID NO: 781237 - DNA, 120 bp, Artificial Sequence
  ENSG00000253710_58 (sequence is synthesized)
agaaattcaagctggctgcagaaattttcaaaagtagcaaggagcctaatgttaatcctgaagaccatgggggaaaatgtctccaggcaatgtcggagaccttcatggcagcctctctca

SEQ ID NO: 781238 - DNA, 89 bp, Artificial Sequence
  ENSG00000253710_59 (sequence is synthesized)
tgtgggccaggtgcaggggaccctgtgtcccagctgctccagccgtggctgaaaggggccaatgcagagctagtgctgtggcttcagag

SEQ ID NO: 781239 - DNA, 120 bp, Artificial Sequence
  ENSG00000253710_60 (sequence is synthesized)
tgaaaggggccaatgcagagctagtgctgtggcttcagagggtgaaagccccaagccatggtagcttcacatggtgttgagcctgcgggtgcacagaagtcaagaatggaaatttgggaa

SEQ ID NO: 781240 - DNA, 79 bp, Artificial Sequence
  ENSG00000253710_61 (sequence is synthesized)
tactggggcactgcctagtggagctgcgagaagagggccaccgtcctccataccccagaacctcagacactcaacgccg

SEQ ID NO: 781241 - DNA, 87 bp, Artificial Sequence
  ENSG00000253710_62 (sequence is synthesized)
agccaggagggaggctgtaccctgcaaatctacaggggcagagctgctcaagaccatgggaacccacctcttgcttaagcgtcattt

SEQ ID NO: 781242 - DNA, 120 bp, Artificial Sequence
  ENSG00000253710_63 (sequence is synthesized)
ttttggacttgcatgggccctgtaacccccttgttttggccaatttctcccatttggaacagctgtacttacccaatacctgtactcccattgtatctgggaagtaactagcttactttt

SEQ ID NO: 781243 - DNA, 85 bp, Artificial Sequence
  ENSG00000253710_64 (sequence is synthesized)
gccagggcagaagtttgaattgtgtctcccagaattcccatgtgttgtggaagggacccaggggaaggtaattgaatcatggggg

SEQ ID NO: 781244 - DNA, 75 bp, Artificial Sequence
  ENSG00000253710_65 (sequence is synthesized)
aatctcagtttgaattgtgtctcccagaattcccatgtgttgtggaagggacccaggggtaataatgaataagtc

SEQ ID NO: 781245 - DNA, 120 bp, Artificial Sequence
  ENSG00000253710_66 (sequence is synthesized)
ctgcttcctcgtttttctcttgcccactgccctgtaagaagtgccttacacctcctgccgtgattctgaggtctccccagccatatggaactgtaagtccaattaaatctctttttgttc

SEQ ID NO: 781246 - DNA, 120 bp, Artificial Sequence
  ENSG00000253710_67 (sequence is synthesized)
gggggtcggcggaagatggcggccggcgaaaggagctggtgcctgtgcaagttgttgaggtgagcagccggtcgtgtgggctcacagacgttttctcttctgtaggggtacttgcccgtc

SEQ ID NO: 781247 - DNA, 120 bp, Artificial Sequence
  ENSG00000253710_68 (sequence is synthesized)
ttctctaaccagattatctacctcttgatggcggtggtaaagtttcatgatatctgtacacatagtccccagcagcctctattactcctaacccatctacaaggagaaaaaaaccaaatc

SEQ ID NO: 781248 - DNA, 120 bp, Artificial Sequence
  ENSG00000253710_69 (sequence is synthesized)
attaatatgacttggaagatactttttcatcttgctctggccacattgcgtttctcatccctccccattccttcacaggtactttactctgacatgcagaacaaggagcagctccctgaa

SEQ ID NO: 781249 - DNA, 120 bp, Artificial Sequence
  ENSG00000253710_70 (sequence is synthesized)
cacatcatgctctctctcgagtccttccctttctatatagtgttcttttcttctgaaataacctttttctccccagttaatttctacaagcctttcctaactcaacacatactacagtgc

SEQ ID NO: 781250 - DNA, 120 bp, Artificial Sequence
  ENSG00000253710_71 (sequence is synthesized)
acttttcattcgacctagcagtatttattggggacctgctatgtgtcaggcactgttctgggggttgagattaagagaacaagatcgatcaagtccttctctcctggacgtttgatttta

SEQ ID NO: 781251 - DNA, 120 bp, Artificial Sequence
  ENSG00000253710_72 (sequence is synthesized)
gttgagagagacaagataataagcaaagaagaaaaatatcaaatagtgagacgtgctatataaaaagttaaaatagggtaatataggagtgacttgatactttagatagagtgatcaggg

SEQ ID NO: 781252 - DNA, 120 bp, Artificial Sequence
  ENSG00000253710_73 (sequence is synthesized)
aaatatctgataacaatcaaaatctgaatgacaaaaacagctgcattcactgcgtgatgattgtatgttaggtattgtttgaagtgctttacatgtgttagctcacttgatcctcagaac

SEQ ID NO: 781253 - DNA, 120 bp, Artificial Sequence
  ENSG00000253710_74 (sequence is synthesized)
agccttttgcagttgttaccattatcctcatttgacaaagaagaaaactggggcactagagcccatgttctgaaccacatgctaaactgcctgccttatgaaaagacagtgaaaatgaga

SEQ ID NO: 781254 - DNA, 120 bp, Artificial Sequence
  ENSG00000253710_75 (sequence is synthesized)
aaagagaattcagagtagagagaacaaccactgcaagtcccctaaggctggttggagcttggcgtgttaaaaaaaaagaatgccagtttggctgcaccctggagggcaaaggagagcatg

SEQ ID NO: 781255 - DNA, 120 bp, Artificial Sequence
  ENSG00000253710_76 (sequence is synthesized)
ggaagggaggtgacagagggaggcaggttccagatcacacaggacttgagtgagcagggaaattagtttagattttattctaagtgctatagtaaaccagttttggggttactgttctgt

SEQ ID NO: 781256 - DNA, 120 bp, Artificial Sequence
  ENSG00000253710_77 (sequence is synthesized)
gacatggtttaggggctgccatgtttggtctccatcatactgttgcaattagatggcagctggggctggaggcatctgaagcctttttcactcacattctggttcttgggctgggataac

SEQ ID NO: 781257 - DNA, 120 bp, Artificial Sequence
  ENSG00000253710_78 (sequence is synthesized)
tggacctgctgggggctgtcgggcatctctctcactgaggagcttcttcatgtgacttggttgtgcttgcatacaacatagcaatctcgggctggttggactccgtacatgacagctgtc

SEQ ID NO: 781258 - DNA, 120 bp, Artificial Sequence
  ENSG00000253710_79 (sequence is synthesized)
ttctcctagcatgagcattccaggagacaggaagtaggagctgccagtcccttagagtctatgttgggaaactggcacaatgtcacttttgccatattctgttggtcaaaatagtcacag

SEQ ID NO: 781259 - DNA, 120 bp, Artificial Sequence
  ENSG00000253710_80 (sequence is synthesized)
gtcaaaatagtcacagagccaggtgttattccaggggaggggacttagatgccacctctcagtgagaaaagtatcaaagaatttgtggcccgtccgggcacagtggctcacacctgtaat

SEQ ID NO: 781260 - DNA, 71 bp, Artificial Sequence
  ENSG00000253710_81 (sequence is synthesized)
cccagcacttcaggaggccaagtccaaaaccccttctctacttaaaaaatacaaaaattagctgggcatgg

SEQ ID NO: 781261 - DNA, 120 bp, Artificial Sequence
  ENSG00000253710_82 (sequence is synthesized)
tcccagcttctcaggaggctgaggcacgaaaatcacttgaacccgagaggtggaggctacaataagccaagatcacgccactgtactcccgcctgggcgacagacagagcgagaccctgt

SEQ ID NO: 781262 - DNA, 120 bp, Artificial Sequence
  ENSG00000253710_83 (sequence is synthesized)
cttaaaaaaagaaagaaaaaacaaatggaatttgtgggcatttttaggctaccagagatcacaatcttttttcacattttaaaaggctcattcttgctgctgggtaaagagtgactggga

SEQ ID NO: 781263 - DNA, 120 bp, Artificial Sequence
  ENSG00000253710_84 (sequence is synthesized)
aggggccagagaggagcagttagattgtcatcctttaggcttccccagcatcctgtgggtgtctttatcaatgcgtagcacacagttttgcagttatttgttttgcatgtctgttttctc

SEQ ID NO: 781264 - DNA, 120 bp, Artificial Sequence
  ENSG00000253710_85 (sequence is synthesized)
cactggactgaacttctgaagataaagactctctctcatctccatacccccaaaacctggcatctcattactagatgcttaataaatttgtttttttttttttttttcagatggagtttc

SEQ ID NO: 781265 - DNA, 120 bp, Artificial Sequence
  ENSG00000253710_86 (sequence is synthesized)
aagaataattataaacagagggagaccaaagtattacaagtcattaaagaatatacttttagatattttcatactaattatatctaattgtgatataggcacaagatctagcttttaaag

SEQ ID NO: 781266 - DNA, 120 bp, Artificial Sequence
  ENSG00000253710_87 (sequence is synthesized)
acttgcatttttcagataaaaaccctgagtattgctttagtattgtgatcctatctgaagacaggtttgttgaatcttaattcttgtttatagtattttattaccattttttttactaag

SEQ ID NO: 781267 - DNA, 120 bp, Artificial Sequence
  ENSG00000253710_88 (sequence is synthesized)
aacactgtcaaaactttttagtatttctttagaccatctcattcataaatcaacacttactgttgatgcctgttctgtgtgaaaccctcagtggaggaaatagcaaagaactagaagtca

SEQ ID NO: 781268 - DNA, 120 bp, Artificial Sequence
  ENSG00000253710_89 (sequence is synthesized)
ggaggaaatagcaaagaactagaagtcatggtctcatttgaaggactgtacttctaattcaataaaaaatgtagaaaacatcatttttagtatgaccaacatggagaaaccctgactcta

SEQ ID NO: 781269 - DNA, 65 bp, Artificial Sequence
  ENSG00000253710_90 (sequence is synthesized)
agctactcgggaggctgaggcgggagaagcacttgaacccgggaggcagagattgtcaaaaaaaa

SEQ ID NO: 781270 - DNA, 120 bp, Artificial Sequence
  ENSG00000253710_91 (sequence is synthesized)
gaaactgtctccaaaaaaaaaaaaaaaatcaaatcttctttataactgtaagaaaatagttatctacaactttttgcttgattttaacctaatatattcttttttttgtttttgtttttg

SEQ ID NO: 781271 - DNA, 120 bp, Artificial Sequence
  ENSG00000253710_92 (sequence is synthesized)
tttttttgagacggagtttcacacttgttgcccaggcaggagtgcagtgatgcagtctcggctctcagtctctcagggtatcctgaagcagtttatgttgtttataccggcgatgttaat

SEQ ID NO: 781272 - DNA, 120 bp, Artificial Sequence
  ENSG00000253719_0 (sequence is synthesized)
aggaggctgggtgaggcgctgagacggtttggcggtgagtcctgggccaggcgcagctgaaaggcccgcaacccgggaaacgtcaaaacaaacagaaggacttgggattccggagcagtc

SEQ ID NO: 781273 - DNA, 120 bp, Artificial Sequence
  ENSG00000253719_1 (sequence is synthesized)
gcccctatcgctgctcctgcagttgcggacgccaccgaccccgccgccggaggactgggcactgaaaggcctctaggcctaggcgcggcccgcggagccagacgtgttgctgccgtgagt

SEQ ID NO: 781274 - DNA, 120 bp, Artificial Sequence
  ENSG00000253719_2 (sequence is synthesized)
aaaacgagcgccctctccgcactcgtttacaaattaaaatggaggaaatttcgttggccaacctggatactaacaagctagaggccatcgctcaggagatttacgtagacctgatagagg

SEQ ID NO: 781275 - DNA, 120 bp, Artificial Sequence
  ENSG00000253719_3 (sequence is synthesized)
attcttgtttgggattctgctttgaggtgcaccgggcagtcaagtgtggctacttctacctggagttcgcagagactggtagcgtgaaggattttggcattcagccagtggaagacaaag

SEQ ID NO: 781276 - DNA, 120 bp, Artificial Sequence
  ENSG00000253719_4 (sequence is synthesized)
gagcgtgccgcctcccgctttgctcccttcccggagaacctgggaatgggcctgatcagcagctgcagcgctcacctccggaattccagtagctgcaaaatgagagtctgaaagtggcca

SEQ ID NO: 781277 - DNA, 120 bp, Artificial Sequence
  ENSG00000253719_5 (sequence is synthesized)
ggacaataacatagactggtcctgtggcttcgaggagtaagctaagtagaaaaaagtagaaaaatcagacaaaagttttaattcccccttgaagatcctagcatttaaaaacccaaagtg

SEQ ID NO: 781278 - DNA, 120 bp, Artificial Sequence
  ENSG00000253719_6 (sequence is synthesized)
gataatttaggaatcctttttttaaagtgtattacctggagcaagctctgaagccctgggcaggaggagctgcacagcctgcgggccatgcagtgcctgttgatctctaaacacaccagg

SEQ ID NO: 781279 - DNA, 120 bp, Artificial Sequence
  ENSG00000253719_7 (sequence is synthesized)
atgtgcgcaagatcctgtagtgcccccagtgcacaggtgagcagttgtgtgcccagcatataaaatttttggttcctcagcctttctgtctgcctgatgtcaagggcttcttggacagtt

SEQ ID NO: 781280 - DNA, 120 bp, Artificial Sequence
  ENSG00000253719_8 (sequence is synthesized)
tggacgttacagttcgtcaggccgtgatcagtggcctgcagtgggactgctcctttgatatctgaacctctgttatgggcttctctgagacaagtaaatgtcaggtgcaagatctggata

SEQ ID NO: 781281 - DNA, 120 bp, Artificial Sequence
  ENSG00000253719_9 (sequence is synthesized)
ctaacagtttcagtttgggaaatccaagaaaaagaattatcaagtttgatagggaagctctgtagccttgactccagcaagaagaaaaggtcaaaaccacgtgtttcccaaaagtccaga

SEQ ID NO: 781282 - DNA, 120 bp, Artificial Sequence
  ENSG00000253719_10 (sequence is synthesized)
ctacaatgattcagctgacttgaggacaaggcctagcatttggctgagcagagccctcttccttgccctccaacctggtggcataggcttggcaaatggacaacttggttgtccagacag

SEQ ID NO: 781283 - DNA, 120 bp, Artificial Sequence
  ENSG00000253719_11 (sequence is synthesized)
gttgaggattcggttatgatcccctggggaggtagcagggacctctgcaactatgcatgatttctcaaacttcaagattcatgtctggatgtattatgctgtggatataagtttagtagg

SEQ ID NO: 781284 - DNA, 120 bp, Artificial Sequence
  ENSG00000253719_12 (sequence is synthesized)
gcggtcatttcctactctgagttactggttacctagccagtccatgggtgtgacttggtccttaagtcaggtcactatctgcctcccaccctgggggcaggactgaagtatggaagagca

SEQ ID NO: 781285 - DNA, 120 bp, Artificial Sequence
  ENSG00000253719_13 (sequence is synthesized)
tcatggctgtgcaggaggctgtggtttgaaaactgagcccagagggcactttcagctgccctcaataatgtgaatggattagtgctaggagccaaggagcaggactggattatctcatct

SEQ ID NO: 781286 - DNA, 120 bp, Artificial Sequence
  ENSG00000253719_14 (sequence is synthesized)
gactgtgtgcagaatcctgttgaatgtccctgttttctttggttgggcagtcagagctctgctatggtgaacatccagactgtcaccactttctgtctgccgctcgaaagggatagtcct

SEQ ID NO: 781287 - DNA, 120 bp, Artificial Sequence
  ENSG00000253719_15 (sequence is synthesized)
ttccactcggtcccctttggatcttcttgacaacaggagcagtccttttattgttagaagtcagagaaagacctccagaatctcctgactttagggaatggtataggggaagatgggaag

SEQ ID NO: 781288 - DNA, 120 bp, Artificial Sequence
  ENSG00000253719_16 (sequence is synthesized)
taagagtcacatatcaaaactaccctccactttattccctgagcgagggtttatgaagtataaaggggtgggagccccgaggtgagcgggaacggtgctgctttatttgaaatgttttct

SEQ ID NO: 781289 - DNA, 120 bp, Artificial Sequence
  ENSG00000253719_17 (sequence is synthesized)
tacctcattctgtgccccagtagggggtccagcctcatctgtctggcttggccctgtgttcctcctgtcccctgctccactgcctatctggtgccccaggtgctgcttgccactccagct

SEQ ID NO: 781290 - DNA, 120 bp, Artificial Sequence
  ENSG00000253719_18 (sequence is synthesized)
gtcacattgaacagtttcaattcagctcttaatgctcctgcttccgaagcctgcccaatttcttttttcttggcctctgttttttttttttctttctttttcccttgtttttgtagaaga

SEQ ID NO: 781291 - DNA, 120 bp, Artificial Sequence
  ENSG00000253719_19 (sequence is synthesized)
ctcagaggagaatctttcttatggctccctctgttgagattggaattggaagagaacttaattttttgtatttaaaatgcagtgtcatgcctataagcatttctcctatataggactgct

SEQ ID NO: 781292 - DNA, 120 bp, Artificial Sequence
  ENSG00000253719_20 (sequence is synthesized)
ttgctagtgtgccctcttgctgtgtcttacttcataaggagttgtatcttcccacctccatttcaatactgccggttaggacctaagtagaagagcagtaaaggctgattgacacacagg

SEQ ID NO: 781293 - DNA, 120 bp, Artificial Sequence
  ENSG00000253719_21 (sequence is synthesized)
gggatggagttggtccttgtccattctctcacccttgctgtgcatgtatcaatccttatcccagaaggtactatttagactgtatagactgatttagattacatactttagaggattaag

SEQ ID NO: 781294 - DNA, 120 bp, Artificial Sequence
  ENSG00000253719_22 (sequence is synthesized)
gaaaccatagagtttgggccttggaactgttactgccttgtcctagagttgtcctgatcaggcttggggcctagttacagattagtcttaaagaattgcattaacttaaaaaaaatcaaa

SEQ ID NO: 781295 - DNA, 120 bp, Artificial Sequence
  ENSG00000253719_23 (sequence is synthesized)
ccttggcaagagctaaaataatttggagatatctttgcccttgacttgtagacgacatctaagaggatgaagaaaggagagtctaagtgagactctggcctacttcctaacaatgtcttg

SEQ ID NO: 781296 - DNA, 120 bp, Artificial Sequence
  ENSG00000253719_24 (sequence is synthesized)
gaagtgggatgatggtaaaggagaaaggccacagtccaatccctctgccttcagatagggaactcaaatcctgaaattactgttttctttctggccttttctcctggttagaggaggaag

SEQ ID NO: 781297 - DNA, 120 bp, Artificial Sequence
  ENSG00000253719_25 (sequence is synthesized)
cggaaagtagttttgagtagtattttgttcatattaccccccttttgttttttgtttctggcccctctaccaatagggcagtagcctcctgccctggatgggtataaggtgggcttggtc

SEQ ID NO: 781298 - DNA, 120 bp, Artificial Sequence
  ENSG00000253719_26 (sequence is synthesized)
caacaggtgcccagagggtacatactcctttctggggagagaatgctccctaccatatagttgacagtggttaggaactctccctttccctacctaccttccttttaatagcagaattcc

SEQ ID NO: 781299 - DNA, 120 bp, Artificial Sequence
  ENSG00000253719_27 (sequence is synthesized)
tatttttcccttgattatgtgtattgatcaccctgcaatcctattatgtatctgagtgtgtgtgtgtgtgtatgtgtgtgttatgggggaaggggggggttctttaaaatttctgtggtt

SEQ ID NO: 781300 - DNA, 120 bp, Artificial Sequence
  ENSG00000253719_28 (sequence is synthesized)
tgtggctttttcttccatacattagttcccaccatcgcatgcccagggaccactgcctggcattatcgcatgctgggatcatcgggggagggtagtgaagctcaccactgtcctttgttt

SEQ ID NO: 781301 - DNA, 120 bp, Artificial Sequence
  ENSG00000253719_29 (sequence is synthesized)
tggagatttttatttttgcataagtagtccatcctatacagatagctgattaactgtattcccctttcccctatggctgctggtgtaaataaactgcatctccccattggtaaacagtaa

SEQ ID NO: 781302 - DNA, 120 bp, Artificial Sequence
  ENSG00000253719_30 (sequence is synthesized)
taaaattttaaaaaatgactacttggtccttggactctgtatattcatcttttaaagctgtatgttttcaggcattgacataatgagataaacgttgaaatgctattgaaccttaatact

SEQ ID NO: 781303 - DNA, 120 bp, Artificial Sequence
  ENSG00000253719_31 (sequence is synthesized)
tgtccaaccttgtttctcaatttggcctgcaaatttaactgtctgtagcatccagtgaaagagccaaaccgtatacaatcatcccttttccatatgaggtaagaaggtggtaagataaat

SEQ ID NO: 781304 - DNA, 120 bp, Artificial Sequence
  ENSG00000253719_32 (sequence is synthesized)
ccagtcctgtcactaaaagcccactgtgacagatagttccatttgaattgaactcaatatatcttagtaagtacattttaccatcattttaagctaatatccttgttctcaaaaggtaaa

SEQ ID NO: 781305 - DNA, 120 bp, Artificial Sequence
  ENSG00000253719_33 (sequence is synthesized)
gtgattcacagcagacgatggttctgcctaatttttttctcaatacttaaaaaattacctcaacactttagatctttcatttcatttttaatagtaattctgaggtttttcatcccattc

SEQ ID NO: 781306 - DNA, 120 bp, Artificial Sequence
  ENSG00000253719_34 (sequence is synthesized)
ctaacccagagtttgagcacttcccctagaaactacttagtgatcctgtgtcctaatcagtctcttgctatgtgttctaatttattaaagtttcgtattggacataatactgagattaat

SEQ ID NO: 781307 - DNA, 120 bp, Artificial Sequence
  ENSG00000253719_35 (sequence is synthesized)
aaaaattacagaaatgagtccagagaagaatctgactcaataggatacctcagggaagcttatagatgtgtaacatggtattgagtcttctcttctaggagcactcgatgtacttgtcac

SEQ ID NO: 781308 - DNA, 120 bp, Artificial Sequence
  ENSG00000253719_36 (sequence is synthesized)
tgtccagtttaaataggccagggccaacgtggtgatttgagaaaacttaaaaatttgacgtgtgaaacccatgatgtaaccatagcaggagaaattcttcaaatgaaatttcaccaagat

SEQ ID NO: 781309 - DNA, 120 bp, Artificial Sequence
  ENSG00000253719_37 (sequence is synthesized)
tgggtattttgccttaagtaagatttctactacttttattaaaattcactgtagggatctactatcaattagctttcaaatacatctgcagcaaatacttttggttcctgttttgtaggt

SEQ ID NO: 781310 - DNA, 120 bp, Artificial Sequence
  ENSG00000253719_38 (sequence is synthesized)
ttggagtttaatatatttagtgctaagctaattagttttctaaaaagataattgcaagacccctgctttaccaaatacttgacaatgggactttgaaggttatttcttatgttttctgac

SEQ ID NO: 781311 - DNA, 120 bp, Artificial Sequence
  ENSG00000253719_39 (sequence is synthesized)
tagtatgatctttaaagaaaaaaaaaaacacattgcataccttttaactaccaatgtttaacctcctagatttagcatttaactacagcatgtaccatcaggtcaagaatctgataaatg

SEQ ID NO: 781312 - DNA, 120 bp, Artificial Sequence
  ENSG00000253719_40 (sequence is synthesized)
attgcttgatgttgacaaagtgaaagacaaaatgaagtgtactgaagtaactaaaaattcaggaagaactttcttgtgcacacattaataagtaacattgccttctcttaagacctatct

SEQ ID NO: 781313 - DNA, 120 bp, Artificial Sequence
  ENSG00000253719_41 (sequence is synthesized)
gaagtgttgtgaagtttttcttacaattttttaaaagagatttatgaagaaactatgtgctaaaagcacaacaattattaaatttattttcatgttgttgtttaattatggttaacgaat

SEQ ID NO: 781314 - DNA, 120 bp, Artificial Sequence
  ENSG00000253719_42 (sequence is synthesized)
tgccagttttcaagtcagccagagataataccagatttcagaagttttactctgctgtgaaggattacgagctctctgattttcatttatgttccaaaagatgcccataatgttgctttg

SEQ ID NO: 781315 - DNA, 120 bp, Artificial Sequence
  ENSG00000253719_43 (sequence is synthesized)
gaggacagcattagaagtgatgttcctattcaaaaaggttttgtggataaaccttaaactcttggcggtgtttttgtttgtatttgttttcccatttttgaaaacattttcaatcatatt

SEQ ID NO: 781316 - DNA, 120 bp, Artificial Sequence
  ENSG00000253719_44 (sequence is synthesized)
tcttgagactcattggaaatatgtgagctaaaaaggaaatactaaattgattttagagatgaaaaaaaaatcttcagcagcagtgacttgcccatagttcaaaaagcaaaaatttacaag

SEQ ID NO: 781317 - DNA, 120 bp, Artificial Sequence
  ENSG00000253719_45 (sequence is synthesized)
tggtggaagcaaaagtagaatgctgctgttgtgactcctaggtcagcggtctttgttgaagcaatggagtaataaatcaaacgactaattaaaaacaaaacaatgaaaaatccatgatgc

SEQ ID NO: 781318 - DNA, 120 bp, Artificial Sequence
  ENSG00000253719_46 (sequence is synthesized)
ttatgaacaacgttagggcaatgaatttgaaaacaaaaaaagggaagtctattttaaaatagaactcaaaagtaactcaaggaattgttaattttttaagtaaatgaatacatctataac

SEQ ID NO: 781319 - DNA, 120 bp, Artificial Sequence
  ENSG00000253719_47 (sequence is synthesized)
ttttaaaacaccacacaattagaattttatagagaatacagtaaatgaaacaacaacaacaaaaacaggcaaaataataccaaaatagattttttttttaaatgaagatgttagcaaacc

SEQ ID NO: 781320 - DNA, 120 bp, Artificial Sequence
  ENSG00000253719_48 (sequence is synthesized)
aactcctttaaaataacaaaagtaaacatcaacaagtcagtttaatcacaggatggcaagatttcatctcaaaatcatcacattaccattagagaaaatccatgtgaaaatttgaactga

SEQ ID NO: 781321 - DNA, 120 bp, Artificial Sequence
  ENSG00000253719_49 (sequence is synthesized)
tactgaaaaatagtttgaaaaaattcaatacgaattattgcctaaaaaacaaagacattaacaatatagaaaccaaagctcaagaacttgtacacactgcaaaagggtatgtaccaaaaa

SEQ ID NO: 781322 - DNA, 120 bp, Artificial Sequence
  ENSG00000253719_50 (sequence is synthesized)
tctacaccagttactatacttattaatgaatacttggaagcactccctttaaaagcaggaatggaagaaacaaaatttttactgttctaagatgatatttacatgaacaattttatagaa

SEQ ID NO: 781323 - DNA, 120 bp, Artificial Sequence
  ENSG00000253719_51 (sequence is synthesized)
tctagaaacagttgttctcagatgacatctacatctacatggataattttatagaatctacaaacataccattgaaagtagtgagaaaatttagcacagttactggatataagatcaata

SEQ ID NO: 781324 - DNA, 120 bp, Artificial Sequence
  ENSG00000253719_52 (sequence is synthesized)
tctaaaatcagaataccaacatttaaaaagtgttattaaatttagaatgtaattcaacaagttataacagtcctatgaaataatatcacaagaactgtgtaagattttataaagaaaata

SEQ ID NO: 781325 - DNA, 120 bp, Artificial Sequence
  ENSG00000253719_53 (sequence is synthesized)
atattttctaatatgttgggaaaatcccaagtaaatggagagaagatgttcacgcacagaaaatgcaatcaatatcattgctccaaattatgtgaatcggaagcaatctgtattacaatc

SEQ ID NO: 781326 - DNA, 120 bp, Artificial Sequence
  ENSG00000253719_54 (sequence is synthesized)
caaatagatgtgctcatggaacttgacaaattaattttaagatttatatgaacaccagatgctagaatagacaagatctttttgacagatgtatattttagttttggtgcagaaacaatg

SEQ ID NO: 781327 - DNA, 120 bp, Artificial Sequence
  ENSG00000253719_55 (sequence is synthesized)
gaatagaatagagtttagaattagatcgaaacacacagattacacgtttatgtcttgatgtgtggttaaatttgtattataatcagtggaatataaaccagtattgtggaacagattatc

SEQ ID NO: 781328 - DNA, 120 bp, Artificial Sequence
  ENSG00000253719_56 (sequence is synthesized)
cataaataataaaactgtgctcagacacaaaattaattcctatatggattaaagatttaatgtgtaaaagtaaaaaatgtcaaatctttctagaaaaatataggaggatgtgttcataat

SEQ ID NO: 781329 - DNA, 120 bp, Artificial Sequence
  ENSG00000253719_57 (sequence is synthesized)
tgtgtataaggggaaaatttcttaaaagtacaaaacatagagaaaagattgatgtgttcgaccataataaaaatagaactttctgttcattaaatcatactagaaacaaacaaaccaata

SEQ ID NO: 781330 - DNA, 120 bp, Artificial Sequence
  ENSG00000253719_58 (sequence is synthesized)
acctgatgtgctagttgtttagttcttataactgattaaagattactaacaaaatagttgtacaattgccaaatgtataaagtaaaagaacagctcattcttacaaaaagaaatatgaat

SEQ ID NO: 781331 - DNA, 120 bp, Artificial Sequence
  ENSG00000253719_59 (sequence is synthesized)
ggccaaaaagttgtaaaagttcccttaggttcaaagaaatgcaaactaaaaacaaaataccaatttaccctactcagtatgattaaatttttttaaatggtgatgacatcaactctgaaa

SEQ ID NO: 781332 - DNA, 120 bp, Artificial Sequence
  ENSG00000253719_60 (sequence is synthesized)
ggcatatggagcaattaaaacacttaaactgctagtaggctgtaaattggtaaaaaatgtttttaaaagcaatttagaaatacctgttgtggttgaagacaaaagtaaccaatatcccaa

SEQ ID NO: 781333 - DNA, 120 bp, Artificial Sequence
  ENSG00000253719_61 (sequence is synthesized)
tatttccacctgttgcagcattatatgtaatagggaaaaattgaaagtaatatacccatttggaatacatatagtcactatactgaagtgagaataaattaaccagagctgtacaaataa

SEQ ID NO: 781334 - DNA, 120 bp, Artificial Sequence
  ENSG00000253719_62 (sequence is synthesized)
aatagtaaacctatgttcttatactttgttgcctttcttttgatgtttaacaataggcaaatcaatgctgtatgttgtttaaataattgtgaatatgaaataaaaactataccaaaaata

SEQ ID NO: 781335 - DNA, 120 bp, Artificial Sequence
  ENSG00000253729_0 (sequence is synthesized)
ggggcatttccgggtccgggccgagcgggcgcacgcgcgggagcgggactcggcggcatggcgggctccggagccggtgtgcgttgctccctgctgcggctgcaggagaccttgtccgct

SEQ ID NO: 781336 - DNA, 120 bp, Artificial Sequence
  ENSG00000253729_1 (sequence is synthesized)
gcggaccgctgcggtgctgccctggccggtcatcaactgatccgcggcctggggcaggaatgcgtcctgagcagcagccccgcggtgctggcattacagacatctttagttttttccaga

SEQ ID NO: 781337 - DNA, 120 bp, Artificial Sequence
  ENSG00000253729_2 (sequence is synthesized)
gatttcggtttgcttgtatttgtccggaagtcactcaacagtattgaatttcgtgaatgtagagaagaaatcctaaagtttttatgtattttcttagaaaaaatgggccagaagatcgca

SEQ ID NO: 781338 - DNA, 120 bp, Artificial Sequence
  ENSG00000253729_3 (sequence is synthesized)
ccttactctgttgaaattaagaacacttgtaccagtgtttatacaaaagatagagctgctaaatgtaaaattccagccctggaccttcttattaagttacttcagacttttagaagttct

SEQ ID NO: 781339 - DNA, 120 bp, Artificial Sequence
  ENSG00000253729_4 (sequence is synthesized)
agactcatggatgaatttaaaattggagaattatttagtaaattctatggagaacttgcattgaaaaaaaaaataccagatacagttttagaaaaagtatatgagctcctaggattattg

SEQ ID NO: 781340 - DNA, 120 bp, Artificial Sequence
  ENSG00000253729_5 (sequence is synthesized)
ggtgaagttcatcctagtgagatgataaataatgcagaaaacctgttccgcgcttttctgggtgaacttaagacccagatgacatcagcagtaagagagcccaaactacctgttctggca

SEQ ID NO: 781341 - DNA, 120 bp, Artificial Sequence
  ENSG00000253729_6 (sequence is synthesized)
ggatgtctgaaggggttgtcctcacttctgtgcaacttcactaagtccatggaagaagatccccagacttcaagggagatttttaattttgtactaaaggcaattcgtcctcagattgat

SEQ ID NO: 781342 - DNA, 120 bp, Artificial Sequence
  ENSG00000253729_7 (sequence is synthesized)
ctgaagagatatgctgtgccctcagctggcttgcgcctatttgccctgcatgcatctcagtttagcacctgccttctggacaactacgtgtctctatttgaagtcttgttaaagtggtgt

SEQ ID NO: 781343 - DNA, 120 bp, Artificial Sequence
  ENSG00000253729_8 (sequence is synthesized)
gcccacacaaatgtagaattgaaaaaagctgcactttcagccctggaatcctttctgaaacaggtttctaatatggtggcgaaaaatgcagaaatgcataaaaataaactgcagtacttt

SEQ ID NO: 781344 - DNA, 120 bp, Artificial Sequence
  ENSG00000253729_9 (sequence is synthesized)
atggagcagttttatggaatcatcagaaatgtggattcgaacaacaaggagttatctattgctatccgtggatatggactttttgcaggaccgtgcaaggttataaacgcaaaagatgtt

SEQ ID NO: 781345 - DNA, 120 bp, Artificial Sequence
  ENSG00000253729_10 (sequence is synthesized)
gacttcatgtacgttgagctcattcagcgctgcaagcagatgttcctcacccagacagacactggtgacgaccgtgtttatcagatgccaagcttcctccagtctgttgcaagcgtcttg

SEQ ID NO: 781346 - DNA, 120 bp, Artificial Sequence
  ENSG00000253729_11 (sequence is synthesized)
ctgtaccttgacacagttcctgaggtgtatactccagttctggagcacctcgtggtgatgcagatagacagtttcccacagtacagtccaaaaatgcagctggtgtgttgcagagccata

SEQ ID NO: 781347 - DNA, 120 bp, Artificial Sequence
  ENSG00000253729_12 (sequence is synthesized)
gtgaaggtgttcctagctttggcagcaaaagggccagttctcaggaattgcattagtactgtggtgcatcagggtttaatcagaatatgttctaaaccagtggtccttccaaagggccct

SEQ ID NO: 781348 - DNA, 120 bp, Artificial Sequence
  ENSG00000253729_13 (sequence is synthesized)
gagtctgaatctgaagaccaccgtgcttcaggggaagtcagaactggcaaatggaaggtgcccacatacaaagactacgtggatctcttcagacatctcctgagctctgaccagatgatg

SEQ ID NO: 781349 - DNA, 120 bp, Artificial Sequence
  ENSG00000253729_14 (sequence is synthesized)
gattctattttagcagatgaagcatttttctctgtgaattcctccagtgaaagtctgaatcatttactttatgatgaatttgtaaaatccgttttgaagattgttgagaaattggatctt

SEQ ID NO: 781350 - DNA, 120 bp, Artificial Sequence
  ENSG00000253729_15 (sequence is synthesized)
acacttgaaatacagactgttggggaacaagagaatggagatgaggcgcctggtgtttggatgatcccaacttcagatccagcggctaacttgcatccagctaaacctaaagatttttcg

SEQ ID NO: 781351 - DNA, 120 bp, Artificial Sequence
  ENSG00000253729_16 (sequence is synthesized)
gctttcattaacctggtggaattttgcagagagattctccctgagaaacaagcagaattttttgaaccatgggtgtactcattttcatatgaattaattttgcaatctacaaggttgccc

SEQ ID NO: 781352 - DNA, 120 bp, Artificial Sequence
  ENSG00000253729_17 (sequence is synthesized)
ctcatcagtggtttctacaaattgctttctattacagtaagaaatgccaagaaaataaaatatttcgagggagttagtccaaagagtctgaaacactctcctgaagacccagaaaagtat

SEQ ID NO: 781353 - DNA, 120 bp, Artificial Sequence
  ENSG00000253729_18 (sequence is synthesized)
tcttgctttgctttatttgtgaaatttggcaaagaggtggcagttaaaatgaagcagtacaaagatgaacttttggcctcttgtttgacctttcttctgtccttgccacacaacatcatt

SEQ ID NO: 781354 - DNA, 120 bp, Artificial Sequence
  ENSG00000253729_19 (sequence is synthesized)
gaactcgatgttagagcctacgttcctgcactgcagatggctttcaaactgggcctgagctatacccccttggcagaagtaggcctgaatgctctagaagaatggtcaatttatattgac

SEQ ID NO: 781355 - DNA, 120 bp, Artificial Sequence
  ENSG00000253729_20 (sequence is synthesized)
agacatgtaatgcagccttattacaaagacattctcccctgcctggatggatacctgaagacttcagccttgtcagatgagaccaagaataactgggaagtgtcagctctttctcgggct

SEQ ID NO: 781356 - DNA, 120 bp, Artificial Sequence
  ENSG00000253729_21 (sequence is synthesized)
gcccagaaaggatttaataaagtggtgttaaagcatctgaagaagacaaagaacctttcatcaaacgaagcaatatccttagaagaaataagaattagagtagtacaaatgcttggatct

SEQ ID NO: 781357 - DNA, 120 bp, Artificial Sequence
  ENSG00000253729_22 (sequence is synthesized)
ctaggaggacaaataaacaaaaatcttctgacagtcacgtcctcagatgagatgatgaagagctatgtggcctgggacagagagaagcggctgagctttgcagtgccctttagagagatg

SEQ ID NO: 781358 - DNA, 120 bp, Artificial Sequence
  ENSG00000253729_23 (sequence is synthesized)
aaacctgtcattttcctggatgtgttcctgcctcgagtcacagaattagcgctcacagccagtgacagacaaactaaagttgcagcctgtgaacttttacatagcatggttatgtttatg

SEQ ID NO: 781359 - DNA, 120 bp, Artificial Sequence
  ENSG00000253729_24 (sequence is synthesized)
ttgggcaaagccacgcagatgccagaagggggacagggagccccacccatgtaccagctctataagcggacgtttcctgtgctgcttcgacttgcgtgtgatgttgatcaggtgacaagg

SEQ ID NO: 781360 - DNA, 120 bp, Artificial Sequence
  ENSG00000253729_25 (sequence is synthesized)
caactgtatgagccactagttatgcagctgattcactggttcactaacaacaagaaatttgaaagtcaggatactgttgccttactagaagctatattggatggaattgtggaccctgtt

SEQ ID NO: 781361 - DNA, 120 bp, Artificial Sequence
  ENSG00000253729_26 (sequence is synthesized)
gacagtactttaagagatttttgtggtcggtgtattcgagaattccttaaatggtccattaagcaaataacaccacagcagcaggagaagagtccagtaaacaccaaatcgcttttcaag

SEQ ID NO: 781362 - DNA, 120 bp, Artificial Sequence
  ENSG00000253729_27 (sequence is synthesized)
cgactttatagccttgcgcttcaccccaatgctttcaagaggctgggagcatcacttgcctttaataatatctacagggaattcagggaagaagagtctctggtggaacagtttgtgttt

SEQ ID NO: 781363 - DNA, 120 bp, Artificial Sequence
  ENSG00000253729_28 (sequence is synthesized)
gaagccttggtgatatacatggagagtctggccttagcacatgcagatgagaagtccttaggtacaattcaacagtgttgtgatgccattgatcacctatgccgcatcattgaaaagaag

SEQ ID NO: 781364 - DNA, 120 bp, Artificial Sequence
  ENSG00000253729_29 (sequence is synthesized)
catgtttctttaaataaagcaaagaaacgacgtttgccgcgaggatttccaccttccgcatcattgtgtttattggatctggtcaagtggcttttagctcattgtgggaggccccagaca

SEQ ID NO: 781365 - DNA, 120 bp, Artificial Sequence
  ENSG00000253729_30 (sequence is synthesized)
gaatgtcgacacaaatccattgaactcttttataaattcgttcctttattgccaggcaacagatcccctaatttgtggctgaaagatgttctcaaggaagaaggtgtctcttttctcatc

SEQ ID NO: 781366 - DNA, 120 bp, Artificial Sequence
  ENSG00000253729_31 (sequence is synthesized)
aacacctttgaggggggtggctgtggccagccctcgggcatcctggcccagcccaccctcttgtaccttcgggggccattcagcctgcaggccacgctatgctggctggacctgctcctg

SEQ ID NO: 781367 - DNA, 120 bp, Artificial Sequence
  ENSG00000253729_32 (sequence is synthesized)
gccgcgttggagtgctacaacacgttcattggcgagagaactgtaggagcgctccaggtcctaggtactgaagcccagtcttcacttttgaaagcagtggctttcttcttagaaagcatt

SEQ ID NO: 781368 - DNA, 120 bp, Artificial Sequence
  ENSG00000253729_33 (sequence is synthesized)
gccatgcatgacattatagcagcagaaaagtgctttggcactggggcagcaggtaacagaacaagcccacaagagggagaaaggtacaactacagcaaatgcaccgttgtggtccggatt

SEQ ID NO: 781369 - DNA, 120 bp, Artificial Sequence
  ENSG00000253729_34 (sequence is synthesized)
atggagtttaccacgactctgctaaacacctccccggaaggatggaagctcctgaagaaggacttgtgtaatacacacctgatgagagtcctggtgcagacgctgtgtgagcccgcaagc

SEQ ID NO: 781370 - DNA, 120 bp, Artificial Sequence
  ENSG00000253729_35 (sequence is synthesized)
ataggtttcaacatcggagacgtccaggttatggctcatcttcctgatgtttgtgtgaatctgatgaaagctctaaagatgtccccatacaaagatatcctagagacccatctgagagag

SEQ ID NO: 781371 - DNA, 120 bp, Artificial Sequence
  ENSG00000253729_36 (sequence is synthesized)
aaaataacagcacagagcattgaggagctttgtgccgtcaacttgtatggccctgacgcgcaagtggacaggagcaggctggctgctgttgtgtctgcctgtaaacagcttcacagagct

SEQ ID NO: 781372 - DNA, 120 bp, Artificial Sequence
  ENSG00000253729_37 (sequence is synthesized)
gggcttctgcataatatattaccgtctcagtccacagatttgcatcattctgttggcacagaacttctttccctggtttataaaggcattgcccctggagatgagagacagtgtctgcct

SEQ ID NO: 781373 - DNA, 120 bp, Artificial Sequence
  ENSG00000253729_38 (sequence is synthesized)
tctctagacctcagttgtaagcagctggccagcggacttctggagttagcctttgcttttggaggactgtgtgagcgccttgtgagtcttctcctgaacccagcggtgctgtccacggcg

SEQ ID NO: 781374 - DNA, 120 bp, Artificial Sequence
  ENSG00000253729_39 (sequence is synthesized)
tccttgggcagctcacagggcagcgtcatccacttctcccatggggagtatttctatagcttgttctcagaaacgatcaacacggaattattgaaaaatctggatcttgctgtattggag

SEQ ID NO: 781375 - DNA, 120 bp, Artificial Sequence
  ENSG00000253729_40 (sequence is synthesized)
ctcatgcagtcttcagtggataataccaaaatggtgagtgccgttttgaacggcatgttagaccagagcttcagggagcgagcaaaccagaaacaccaaggactgaaacttgcgactaca

SEQ ID NO: 781376 - DNA, 120 bp, Artificial Sequence
  ENSG00000253729_41 (sequence is synthesized)
attctgcaacactggaagaagtgtgattcatggtgggccaaagattcccctctcgaaactaaaatggcagtgctggccttactggcaaaaattttacagattgattcatctgtatctttt

SEQ ID NO: 781377 - DNA, 120 bp, Artificial Sequence
  ENSG00000253729_42 (sequence is synthesized)
aatacaagtcatggttcattccctgaagtctttacaacatatattagtctacttgctgacacaaagctggatctacatttaaagggccaagctgtcactcttcttccattcttcaccagc

SEQ ID NO: 781378 - DNA, 120 bp, Artificial Sequence
  ENSG00000253729_43 (sequence is synthesized)
ctcactggaggcagtctggaggaacttagacgtgttctggagcagctcatcgttgctcacttccccatgcagtccagggaatttcctccaggaactccgcggttcaataattatgtggac

SEQ ID NO: 781379 - DNA, 120 bp, Artificial Sequence
  ENSG00000253729_44 (sequence is synthesized)
tgcatgaaaaagtttctagatgcattggaattatctcaaagccctatgttgttggaattgatgacagaagttctttgtcgggaacagcagcatgtcatggaagaattatttcaatccagt

SEQ ID NO: 781380 - DNA, 120 bp, Artificial Sequence
  ENSG00000253729_45 (sequence is synthesized)
ttcaggaggattgccagaaggggttcatgtgtcacacaagtaggccttctggaaagcgtgtatgaaatgttcaggaaggatgacccccgcctaagtttcacacgccagtcctttgtggac

SEQ ID NO: 781381 - DNA, 120 bp, Artificial Sequence
  ENSG00000253729_46 (sequence is synthesized)
cgctccctcctcactctgctgtggcactgtagcctggatgctttgagagaattcttcagcacaattgtggtggatgccattgatgtgttgaagtccaggtttacaaagctaaatgaatct

SEQ ID NO: 781382 - DNA, 120 bp, Artificial Sequence
  ENSG00000253729_47 (sequence is synthesized)
acctttgatactcaaatcaccaagaagatgggctactataagattctagacgtgatgtattctcgccttcccaaagatgatgttcatgctaaggaatcaaaaattaatcaagttttccat

SEQ ID NO: 781383 - DNA, 120 bp, Artificial Sequence
  ENSG00000253729_48 (sequence is synthesized)
ggctcgtgtattacagaaggaaatgaacttacaaagacattgattaaattgtgctacgatgcatttacagagaacatggcaggagagaatcagctgctggagaggagaagactttaccat

SEQ ID NO: 781384 - DNA, 120 bp, Artificial Sequence
  ENSG00000253729_49 (sequence is synthesized)
tgtgcagcatacaactgcgccatatctgtcatctgctgtgtcttcaatgagttaaaattttaccaaggttttctgtttagtgaaaaaccagaaaagaacttgcttatttttgaaaatctg

SEQ ID NO: 781385 - DNA, 120 bp, Artificial Sequence
  ENSG00000253729_50 (sequence is synthesized)
atcgacctgaagcgccgctataattttcctgtagaagttgaggttcctatggaaagaaagaaaaagtacattgaaattaggaaagaagccagagaagcagcaaatggggattcagatggt

SEQ ID NO: 781386 - DNA, 120 bp, Artificial Sequence
  ENSG00000253729_51 (sequence is synthesized)
ccttcctatatgtcttccctgtcatatttggcagacagtaccctgagtgaggaaatgagtcaatttgatttctcaaccggagttcagagctattcatacagctcccaagaccctagacct

SEQ ID NO: 781387 - DNA, 120 bp, Artificial Sequence
  ENSG00000253729_52 (sequence is synthesized)
gccactggtcgttttcggagacgggagcagcgggaccccacggtgcatgatgatgtgctggagctggagatggacgagctcaatcggcatgagtgcatggcgcccctgacggccctggtc

SEQ ID NO: 781388 - DNA, 120 bp, Artificial Sequence
  ENSG00000253729_53 (sequence is synthesized)
aagcacatgcacagaagcctgggcccgcctcaaggagaagaggattcagtgccaagagatcttccttcttggatgaaattcctccatggcaaactgggaaatccaatagtaccattaaat

SEQ ID NO: 781389 - DNA, 120 bp, Artificial Sequence
  ENSG00000253729_54 (sequence is synthesized)
atccgtctcttcttagccaagcttgttattaatacagaagaggtctttcgcccttacgcgaagcactggcttagccccttgctgcagctggctgcttctgaaaacaatggaggagaagga

SEQ ID NO: 781390 - DNA, 120 bp, Artificial Sequence
  ENSG00000253729_55 (sequence is synthesized)
attcactacatggtggttgagatagtggccactattctttcatggacaggcttggccactccaacaggggtccctaaagatgaagtgttagcaaatcgattgcttaatttcctaatgaaa

SEQ ID NO: 781391 - DNA, 120 bp, Artificial Sequence
  ENSG00000253729_56 (sequence is synthesized)
tggaaggattgtttatccatcccttataggttaatatttgaaaagttttccggtaaagatcctaattctaaagacaactcagtagggattcaattgctaggcatcgtgatggccaatgac

SEQ ID NO: 781392 - DNA, 120 bp, Artificial Sequence
  ENSG00000253729_57 (sequence is synthesized)
ctgcctccctatgacccacagtgtggcatccagagtagcgaatacttccaggctttggtgaataatatgtcctttgtaagatataaagaagtgtatgccgctgcagcagaagttctagga

SEQ ID NO: 781393 - DNA, 120 bp, Artificial Sequence
  ENSG00000253729_58 (sequence is synthesized)
cttatacttcgatatgttatggagagaaaaaacatactggaggagtctctgtgtgaactggttgcgaaacaattgaagcaacatcagaatactatggaggacaagtttattgtgtgcttg

SEQ ID NO: 781394 - DNA, 120 bp, Artificial Sequence
  ENSG00000253729_59 (sequence is synthesized)
aacaaagtgaccaagagcttccctcctcttgcagacaggttcatgaatgctgtgttctttctgctgccaaaatttcatggagtgttgaaaacactctgtctggaggtggtactttgtcgt

SEQ ID NO: 781395 - DNA, 120 bp, Artificial Sequence
  ENSG00000253729_60 (sequence is synthesized)
gtggagggaatgacagagctgtacttccagttaaagagcaaggacttcgttcaagtcatgagacatagagatgatgaaagacaaaaagtatgtttggacataatttataagatgatgcca

SEQ ID NO: 781396 - DNA, 120 bp, Artificial Sequence
  ENSG00000253729_61 (sequence is synthesized)
aagttaaaaccagtagaactccgagaacttctgaaccccgttgtggaattcgtttcccatccttctacaacatgtagggaacaaatgtataatattctcatgtggattcatgataattac

SEQ ID NO: 781397 - DNA, 120 bp, Artificial Sequence
  ENSG00000253729_62 (sequence is synthesized)
agagatccagaaagtgagacagataatgactcccaggaaatatttaagttggcaaaagatgtgctgattcaaggattgatcgatgagaaccctggacttcaattaattattcgaaatttc

SEQ ID NO: 781398 - DNA, 120 bp, Artificial Sequence
  ENSG00000253729_63 (sequence is synthesized)
tggagccatgaaactaggttaccttcaaataccttggaccggttgctggcactaaattccttatattctcctaagatagaagtgcactttttaagtttagcaacaaattttctgctcgaa

SEQ ID NO: 781399 - DNA, 120 bp, Artificial Sequence
  ENSG00000253729_64 (sequence is synthesized)
atgaccagcatgagcccagattatccaaaccccatgttcgagcatcctctgtcagaatgcgaatttcaggaatataccattgattctgattggcgtttccgaagtactgttctcactccg

SEQ ID NO: 781400 - DNA, 120 bp, Artificial Sequence
  ENSG00000253729_65 (sequence is synthesized)
atgtttgtggagacccaggcctcccagggcactctccagacccgtacccaggaagggtccctctcagctcgctggccagtggcagggcagataagggccacccagcagcagcatgacttc

SEQ ID NO: 781401 - DNA, 120 bp, Artificial Sequence
  ENSG00000253729_66 (sequence is synthesized)
acactgacacagactgcagatggaagaagctcatttgattggctgaccgggagcagcactgacccgctggtcgaccacaccagtccctcatctgactccttgctgtttgcccacaagagg

SEQ ID NO: 781402 - DNA, 120 bp, Artificial Sequence
  ENSG00000253729_67 (sequence is synthesized)
agtgaaaggttacagagagcacccttgaagtcagtggggcctgattttgggaaaaaaaggctgggccttccaggggacgaggtggataacaaagtgaaaggtgcggccggccggacggac

SEQ ID NO: 781403 - DNA, 120 bp, Artificial Sequence
  ENSG00000253729_68 (sequence is synthesized)
ctactacgactgcgcagacggtttatgagggaccaggagaagctcagtttgatgtatgccagaaaaggcgttgctgagcaaaaacgagagaaggaaatcaagagtgagttaaaaatgaag

SEQ ID NO: 781404 - DNA, 120 bp, Artificial Sequence
  ENSG00000253729_69 (sequence is synthesized)
caggatgcccaggtcgttctgtacagaagctaccggcacggagaccttcctgacattcagatcaagcacagcagcctcatcaccccgttacaggccgtggcccagagggacccaataatt

SEQ ID NO: 781405 - DNA, 120 bp, Artificial Sequence
  ENSG00000253729_70 (sequence is synthesized)
gcaaaacagctctttagcagcttgttttctggaattttgaaagagatggataaatttaagacactgtctgaaaaaaacaacatcactcaaaagttgcttcaagacttcaatcgttttctt

SEQ ID NO: 781406 - DNA, 120 bp, Artificial Sequence
  ENSG00000253729_71 (sequence is synthesized)
aataccaccttctctttctttccaccctttgtctcttgtattcaggacattagctgtcagcacgcagccctgctgagcctcgacccagcggctgttagcgctggttgcctggccagccta

SEQ ID NO: 781407 - DNA, 120 bp, Artificial Sequence
  ENSG00000253729_72 (sequence is synthesized)
cagcagcccgtgggcatccgcctgctagaggaggctctgctccgcctgctgcctgctgagctgcctgccaagcgagtccgtgggaaggcccgcctccctcctgatgtcctcagatgggtg

SEQ ID NO: 781408 - DNA, 120 bp, Artificial Sequence
  ENSG00000253729_73 (sequence is synthesized)
gagcttgctaagctgtatagatcaattggagaatacgacgtcctccgtgggatttttaccagtgagataggaacaaagcaaatcactcagagtgcattattagcagaagccagaagtgat

SEQ ID NO: 781409 - DNA, 120 bp, Artificial Sequence
  ENSG00000253729_74 (sequence is synthesized)
tattctgaagctgctaagcagtatgatgaggctctcaataaacaagactgggtagatggtgagcccacagaagccgagaaggatttttgggaacttgcatcccttgactgttacaaccac

SEQ ID NO: 781410 - DNA, 120 bp, Artificial Sequence
  ENSG00000253729_75 (sequence is synthesized)
cttgctgagtggaaatcacttgaatactgttctacagccagtatagacagtgagaaccccccagacctaaataaaatctggagtgaaccattttatcaggaaacatatctaccttacatg

SEQ ID NO: 781411 - DNA, 120 bp, Artificial Sequence
  ENSG00000253729_76 (sequence is synthesized)
atccgcagcaagctgaagctgctgctccagggagaggctgaccagtccctgctgacatttattgacaaagctatgcacggggagctccagaaggcgattctagagcttcattacagtcaa

SEQ ID NO: 781412 - DNA, 120 bp, Artificial Sequence
  ENSG00000253729_77 (sequence is synthesized)
gagctgagtctgctttacctcctgcaagatgatgttgacagagccaaatattacattcaaaatggcattcagagttttatgcagaattattctagtattgatgtcctcttacaccaaagt

SEQ ID NO: 781413 - DNA, 120 bp, Artificial Sequence
  ENSG00000253729_78 (sequence is synthesized)
agactcaccaaattgcagtctgtacaggctttaacagaaattcaggagttcatcagctttataagcaaacaaggcaatttatcatctcaagttccccttaagagacttctgaacacctgg

SEQ ID NO: 781414 - DNA, 120 bp, Artificial Sequence
  ENSG00000253729_79 (sequence is synthesized)
acaaacagatatccagatgctaaaatggacccaatgaacatctgggatgacatcatcacaaatcgatgtttctttctcagcaaaatagaggagaagcttacccctcttccagaagataat

SEQ ID NO: 781415 - DNA, 120 bp, Artificial Sequence
  ENSG00000253729_80 (sequence is synthesized)
agtatgaatgtggatcaagatggagaccccagtgacaggatggaagtgcaagagcaggaagaagatatcagctccctgatcaggagttgcaagttttccatgaaaatgaagatgatagac

SEQ ID NO: 781416 - DNA, 120 bp, Artificial Sequence
  ENSG00000253729_81 (sequence is synthesized)
agtgcccggaagcagaacaatttctcacttgctatgaaactactgaaggagctgcataaagagtcaaaaaccagagacgattggctggtgagctgggtgcagagctactgccgcctgagc

SEQ ID NO: 781417 - DNA, 120 bp, Artificial Sequence
  ENSG00000253729_82 (sequence is synthesized)
cactgccggagccggtcccagggctgctctgagcaggtgctcactgtgctgaaaacagtctctttgttggatgagaacaacgtgtcaagctacttaagcaaaaatattctggctttccgt

SEQ ID NO: 781418 - DNA, 120 bp, Artificial Sequence
  ENSG00000253729_83 (sequence is synthesized)
gaccagaacattctcttgggtacaacttacaggatcatagcgaatgctctcagcagtgagccagcctgccttgctgaaatcgaggaggacaaggctagaagaatcttagagctttctgga

SEQ ID NO: 781419 - DNA, 120 bp, Artificial Sequence
  ENSG00000253729_84 (sequence is synthesized)
tccagttcagaggattcagagaaggtgatcgcgggtctgtaccagagagcattccagcacctctctgaggctgtgcaggcggctgaggaggaggcccagcctccctcctggagctgtggg

SEQ ID NO: 781420 - DNA, 120 bp, Artificial Sequence
  ENSG00000253729_85 (sequence is synthesized)
cctgcagctggggtgattgatgcttacatgacgctggcagatttctgtgaccaacagctgcgcaaggaggaagagaatgcatcagttattgattctgcagaactgcaggcgtatccagca

SEQ ID NO: 781421 - DNA, 120 bp, Artificial Sequence
  ENSG00000253729_86 (sequence is synthesized)
cttgtggtggagaaaatgttgaaagctttaaaattaaattccaatgaagccagattgaagtttcctagattacttcagattatagaacggtatccagaggagactttgagcctcatgaca

SEQ ID NO: 781422 - DNA, 120 bp, Artificial Sequence
  ENSG00000253729_87 (sequence is synthesized)
aaagagatctcttccgttccctgctggcagttcatcagctggatcagccacatggtggccttactggacaaagaccaagccgttgctgttcagcactctgtggaagaaatcactgataac

SEQ ID NO: 781423 - DNA, 120 bp, Artificial Sequence
  ENSG00000253729_88 (sequence is synthesized)
tacccgcaggctattgtttatcccttcatcataagcagcgaaagctattccttcaaggatacttctactggtcataagaataaggagtttgtggcaaggattaaaagtaagttggatcaa

SEQ ID NO: 781424 - DNA, 120 bp, Artificial Sequence
  ENSG00000253729_89 (sequence is synthesized)
ggaggagtgattcaagattttattaatgccttagatcagctctctaatcctgaactgctctttaaggattggagcaatgatgtaagagctgaactagcaaaaacccctgtaaataaaaaa

SEQ ID NO: 781425 - DNA, 120 bp, Artificial Sequence
  ENSG00000253729_90 (sequence is synthesized)
aacattgaaaaaatgtatgaaagaatgtatgcagccttgggtgacccaaaggctccaggcctgggggcctttagaaggaagtttattcagacttttggaaaagaatttgataaacatttt

SEQ ID NO: 781426 - DNA, 120 bp, Artificial Sequence
  ENSG00000253729_91 (sequence is synthesized)
gggaaaggaggttctaaactactgagaatgaagctcagtgacttcaacgacattaccaacatgctacttttaaaaatgaacaaagactcaaagccccctgggaatctgaaagaatgttca

SEQ ID NO: 781427 - DNA, 120 bp, Artificial Sequence
  ENSG00000253729_92 (sequence is synthesized)
ccctggatgagcgacttcaaagtggagttcctgagaaatgagctggagattcccggtcagtatgacggtaggggaaagccattgccagagtaccacgtgcgaatcgccgggtttgatgag

SEQ ID NO: 781428 - DNA, 120 bp, Artificial Sequence
  ENSG00000253729_93 (sequence is synthesized)
cgggtgacagtcatggcgtctctgcgaaggcccaagcgcatcatcatccgtggccatgacgagagggaacaccctttcctggtgaagggtggcgaggacctgcggcaggaccagcgcgtg

SEQ ID NO: 781429 - DNA, 120 bp, Artificial Sequence
  ENSG00000253729_94 (sequence is synthesized)
gagcagctcttccaggtcatgaatgggatcctggcccaagactccgcctgcagccagagggccctgcagctgaggacctatagcgttgtgcccatgacctccaggttaggattaattgag

SEQ ID NO: 781430 - DNA, 120 bp, Artificial Sequence
  ENSG00000253729_95 (sequence is synthesized)
tggcttgaaaatactgttaccttgaaggaccttcttttgaacaccatgtcccaagaggagaaggcggcttacctgagtgatcccagggcaccgccgtgtgaatataaagattggctgaca

SEQ ID NO: 781431 - DNA, 120 bp, Artificial Sequence
  ENSG00000253729_96 (sequence is synthesized)
aaaatgtcaggaaaacatgatgttggagcttacatgctaatgtataagggcgctaatcgtactgaaacagtcacgtcttttagaaaacgagaaagtaaagtgcctgctgatctcttaaag

SEQ ID NO: 781432 - DNA, 120 bp, Artificial Sequence
  ENSG00000253729_97 (sequence is synthesized)
cgggccttcgtgaggatgagtacaagccctgaggctttcctggcgctccgctcccacttcgccagctctcacgctctgatatgcatcagccactggatcctcgggattggagacagacat

SEQ ID NO: 781433 - DNA, 120 bp, Artificial Sequence
  ENSG00000253729_98 (sequence is synthesized)
ctgaacaactttatggtggccatggagactggcggcgtgatcgggatcgactttgggcatgcgtttggatccgctacacagtttctgccagtccctgagttgatgccttttcggctaact

SEQ ID NO: 781434 - DNA, 120 bp, Artificial Sequence
  ENSG00000253729_99 (sequence is synthesized)
cgccagtttatcaatctgatgttaccaatgaaagaaacgggccttatgtacagcatcatggtacacgcactccgggccttccgctcagaccctggcctgctcaccaacaccatggatgtg

SEQ ID NO: 781435 - DNA, 120 bp, Artificial Sequence
  ENSG00000253729_100 (sequence is synthesized)
tttgtcaaggagccctcctttgattggaaaaattttgaacagaaaatgctgaaaaaaggagggtcatggattcaagaaataaatgttgctgaaaaaaattggtacccccgacagaaaata

SEQ ID NO: 781436 - DNA, 120 bp, Artificial Sequence
  ENSG00000253729_101 (sequence is synthesized)
tgttacgctaagagaaagttagcaggtgccaatccagcagtcattacttgtgatgagctactcctgggtcatgagaaggcccctgccttcagagactatgtggctgtggcacgaggaagc

SEQ ID NO: 781437 - DNA, 120 bp, Artificial Sequence
  ENSG00000253729_102 (sequence is synthesized)
aaagatcacaacattcgtgcccaagaaccagagagtgggctttcagaagagactcaagtgaagtgcctgatggaccaggcaacagaccccaacatccttggcagaacctgggaaggatgg

SEQ ID NO: 781438 - DNA, 120 bp, Artificial Sequence
  ENSG00000253729_103 (sequence is synthesized)
gagccctggatgtgaggtctgtgggagtctgcagatagaaagcattacattgtttaaagaatctactatactttggttggcagcattccatgagctgattttcctgaaacactaaagaga

SEQ ID NO: 781439 - DNA, 120 bp, Artificial Sequence
  ENSG00000253729_104 (sequence is synthesized)
aatgtcttttgtgctacagtttcgtagcatgagtttaaatcaagattatgatgagtaaatgtgtatgggttaaatcaaagataaggttatagtaacatcaaagattaggtgaggtttata

SEQ ID NO: 781440 - DNA, 120 bp, Artificial Sequence
  ENSG00000253729_105 (sequence is synthesized)
gaaagatagatatccaggcttaccaaagtattaagtcaagaatataatatgtgatcagctttcaaagcatttacaagtgctgcaagttagtgaaacagctgtctccgtaaatggaggaaa

SEQ ID NO: 781441 - DNA, 120 bp, Artificial Sequence
  ENSG00000253729_106 (sequence is synthesized)
tgtggggaagccttggaatgcccttctggttctggcacattggaaagcacactcagaaggcttcatcaccaagattttgggagagtaaagctaagtatagttgatgtaacattgtagaag

SEQ ID NO: 781442 - DNA, 120 bp, Artificial Sequence
  ENSG00000253729_107 (sequence is synthesized)
cagcataggaacaataagaacaataggtaaagctataattatggcttatatttagaaatgactgcatttgatattttaggatatttttctaggttttttcctttcattttattctcttct

SEQ ID NO: 781443 - DNA, 120 bp, Artificial Sequence
  ENSG00000253729_108 (sequence is synthesized)
agttttgacattttatgatagatttgctctctagaaggaaacgtctttatttaggagggcaaaaattttggtcatagcattcacttttgctattccaatctacaactggaagatacataa

SEQ ID NO: 781444 - DNA, 120 bp, Artificial Sequence
  ENSG00000253729_109 (sequence is synthesized)
aagtgctttgcattgaatttgggataacttcaaaaatcccatggttgttgttagggatagtactaagcatttcagttccaggagaataaaagaaattcctatttgaaatgaattcctcat

SEQ ID NO: 781445 - DNA, 120 bp, Artificial Sequence
  ENSG00000253729_110 (sequence is synthesized)
ttggaggaaaaaaagcatgcattctagcacaacaagatgaaattatggaatacaaaagtggctccttcccatgtgcagtccctgtccccccccgccagtcctccacacccaaactgtttc

SEQ ID NO: 781446 - DNA, 120 bp, Artificial Sequence
  ENSG00000253729_111 (sequence is synthesized)
tgattggcttttagctttttgttgtttttttttttccttctaacacttgtatttggaggctcttctgtgattttgagaagtatactcttgagtgtttaataaagtttttttccaaaagta

SEQ ID NO: 781447 - DNA, 120 bp, Artificial Sequence
  ENSG00000253729_112 (sequence is synthesized)
atttgttggatctgatggttttgtacctgaatttttcataggcaatagcttggatttctttaggagtaattaagaatgaataatggtatattgaaattcaagatccagagtaatgtgggt

SEQ ID NO: 781448 - DNA, 120 bp, Artificial Sequence
  ENSG00000253729_113 (sequence is synthesized)
tcaatgttaatattgaatatggttaaaagtcttattattttttcctgcctctttgctatttttcaatgaattcttggtgatctttgcctttgaaatcacataatgctaaaatcttcctaa

SEQ ID NO: 781449 - DNA, 64 bp, Artificial Sequence
  ENSG00000253729_114 (sequence is synthesized)
actataggcgcccaagccaggatggtctctgtctcctgacctcatgatctgctcgccttggcct

SEQ ID NO: 781450 - DNA, 120 bp, Artificial Sequence
  ENSG00000253729_115 (sequence is synthesized)
ggcgtgagccactgtgcccggccgagaaataacattttttttaaagtcagttccctttaagtgaaaacttttcagtaaaaggttttatcatgttagattggctttttaaaaagtagatca

SEQ ID NO: 781451 - DNA, 120 bp, Artificial Sequence
  ENSG00000253729_116 (sequence is synthesized)
cagacttatgtgtatccttggtctcttagtcccttctctaggaaaaatgtatcacatagccttatttaagacacttttctgaacctgatagagactaagcaaaatggaagcaaagggtct

SEQ ID NO: 781452 - DNA, 120 bp, Artificial Sequence
  ENSG00000253729_117 (sequence is synthesized)
taatgtttagaagaattgtgatgtgtattgtaattaaaatggaaatggagtaactataataggtaggactgtatttttgtaacttctgaaatttaagcccagtgtgttcaaaatatgttt

SEQ ID NO: 781453 - DNA, 120 bp, Artificial Sequence
  ENSG00000253729_118 (sequence is synthesized)
gtttgattgctatttttgtaatttccctaatttatctgactctaattgtgataaagaaatatagttgaggtattaaaaaatttttcatttactcacttatagcttactaagatttataaa

SEQ ID NO: 781454 - DNA, 120 bp, Artificial Sequence
  ENSG00000253729_119 (sequence is synthesized)
tcaaagacaagtactgtcttcaataccttgaaatttttatgactcctaatacactgctttgcaaaaaaaacttgttgaataaatcagtcaggaattaaacacttcagaaaattcaacagt

SEQ ID NO: 781455 - DNA, 120 bp, Artificial Sequence
  ENSG00000253729_120 (sequence is synthesized)
ctgctcccggccctgggtttcttaatatattatgtctccagtgtttgaacaacagttctatttaagatatcataaactcaaagagtaagctgtgtgtgagtatccactataaaatatgtg

SEQ ID NO: 781456 - DNA, 120 bp, Artificial Sequence
  ENSG00000253729_121 (sequence is synthesized)
tagcattagcttactactgtagaaagtttgcatgttggctgttgctgcttgctaaagatatccacattcataagcaagtatttataatcaggaatacaacatttctgcgggcacagcagt

SEQ ID NO: 781457 - DNA, 120 bp, Artificial Sequence
  ENSG00000253729_122 (sequence is synthesized)
caggcacaagcaggtagcagaaattcgttgctggcctgggcgctctgctctttggcactgtcttcagagggcggccccacggaggaatgctcacagccactctggcttttccctctgagt

SEQ ID NO: 781458 - DNA, 120 bp, Artificial Sequence
  ENSG00000253729_123 (sequence is synthesized)
aaaaattgaagaaatgtaattgaagtcatgttcttttaactctttagcaatgcctgggtgggaactttttcccctttgtagtaaaagtgcctctttttagcattttaaatattcaaatac

SEQ ID NO: 781459 - DNA, 120 bp, Artificial Sequence
  ENSG00000253731_0 (sequence is synthesized)
gcaaattagacgggaaagcaggaaagctgtgcagaaattctgacctgaaacgcttcgcatccggtctctgcttgttgaaggaccttcaccgctatttctgagaagagcaaaagtgatgca

SEQ ID NO: 781460 - DNA, 120 bp, Artificial Sequence
  ENSG00000253731_1 (sequence is synthesized)
gatctgttcttcctcttcttaatcccagagaagttcctaataagccagtaatggcgcctccgcagaggcatccgcagcgcagcgagcaggtcctgctcctcacgctcctggggacgctgt

SEQ ID NO: 781461 - DNA, 120 bp, Artificial Sequence
  ENSG00000253731_2 (sequence is synthesized)
ggggggccgcggcagcgcagatccgctactctattcccgaggagctggagaaaggctccttcgtaggcaacatcgtcaaggatctgggactggagccccaggagttggcggagcacggag

SEQ ID NO: 781462 - DNA, 120 bp, Artificial Sequence
  ENSG00000253731_3 (sequence is synthesized)
tccgcatcgtctccagaggtaggatgcagcttttctctctgaatccgcgaaacggcagcttggtcaccgcgggtaggatagaccgcgaggagctctgtgctcagagcccgcggtgtctgg

SEQ ID NO: 781463 - DNA, 120 bp, Artificial Sequence
  ENSG00000253731_4 (sequence is synthesized)
tgagttttaacatccttgtcgaggataaactgaatctttatcccgtggaagtggaaatagtggacattaatgacaatacaccccgattcttaaaggaagaattggaagtgaaaattctcg

SEQ ID NO: 781464 - DNA, 120 bp, Artificial Sequence
  ENSG00000253731_5 (sequence is synthesized)
aaaacgcagctccatcctctcgttttccactaatggaggtctatgaccctgatgtgggaatgaactcccttcagggatttaagctcagtggtaatagtcacttctcagtggacgtgcaaa

SEQ ID NO: 781465 - DNA, 120 bp, Artificial Sequence
  ENSG00000253731_6 (sequence is synthesized)
gcgaagcccatgggcccaagtacccggagctggtgctggagggcacactggaccgggaaggagaagccgtttaccgcctggtccttactgccatggatggcggcgaccctgtccgctcaa

SEQ ID NO: 781466 - DNA, 120 bp, Artificial Sequence
  ENSG00000253731_7 (sequence is synthesized)
gcgtcgcccaaattctggtaacagttctagatgtgaatgacaacactccaatgtttactcagcctgtctaccgtgtaagtgttcctgaaaacctgccagtaggcacaccagtgttggcag

SEQ ID NO: 781467 - DNA, 120 bp, Artificial Sequence
  ENSG00000253731_8 (sequence is synthesized)
tgactgccaccgaccaggatgaaggagtccacggggaagtaacttattcctttgtgaagattacagaaaagatctcacaaattttctgtttgaatgttttgactggagaaatttcaactt

SEQ ID NO: 781468 - DNA, 120 bp, Artificial Sequence
  ENSG00000253731_9 (sequence is synthesized)
ctgcaaatctagactatgaggactcgagtttttatgagctgggtgttgaagcccgggatgggccaggtcttcgagacagagcgaaagtcttaataactatcttggatgtcaatgataatg

SEQ ID NO: 781469 - DNA, 120 bp, Artificial Sequence
  ENSG00000253731_10 (sequence is synthesized)
taccagaagtggttgttacatctggaagcagaacaattgctgaaagtgcacctccaggaacagtaatcgccctttttcaagtgttcgatcgagactctggcctgaatggcctggtaacct

SEQ ID NO: 781470 - DNA, 120 bp, Artificial Sequence
  ENSG00000253731_11 (sequence is synthesized)
gttccatcccgagaagtctcccatttgaattggaaaaatcagttggcaattattatcgattagtgacaaatgcagctctagaccgggaagaggtattcttgtacaacatcactgtgacag

SEQ ID NO: 781471 - DNA, 120 bp, Artificial Sequence
  ENSG00000253731_12 (sequence is synthesized)
ccacggacaaaggaacaccacctctgtctacagaaacaatcatctctctaaatgtggcagacaccaacgacaacccgcccaccttcccccattcatcctactcagtctatgtccttgaaa

SEQ ID NO: 781472 - DNA, 120 bp, Artificial Sequence
  ENSG00000253731_13 (sequence is synthesized)
acaaccccaggggtgcctccatcttctctgtgaatgcactggaccctgacgtggaccagaacgcccaagtctcctactcactggcagaagacaccctccagggggcgcccctgtcctcct

SEQ ID NO: 781473 - DNA, 120 bp, Artificial Sequence
  ENSG00000253731_14 (sequence is synthesized)
acgtgtccatcaactccgacactgggattctgtacgccctgcgctccttcgactatgagcagttgagagacctacagctgtgggtgacagccagcgacagcggggacccgcctcttagca

SEQ ID NO: 781474 - DNA, 120 bp, Artificial Sequence
  ENSG00000253731_15 (sequence is synthesized)
gcaacgtgtcactgagcctgtttgtgctggaccagaatgacaatgcgcccgagatcctgtaccccgccctccccacagacggttccactggcgtggagctggcgccccgctccgcagagc

SEQ ID NO: 781475 - DNA, 120 bp, Artificial Sequence
  ENSG00000253731_16 (sequence is synthesized)
ctggtgaccaaggtggtggcggtggacagagactcgggccagaacgcctggctgtcctaccgcctgctcaaggccagcgagccaggacttttctcagtgggcctgcacacgggcgaggtg

SEQ ID NO: 781476 - DNA, 120 bp, Artificial Sequence
  ENSG00000253731_17 (sequence is synthesized)
gcgaggtgcgcacggcgcgcgccctgctggacagagacgcgctcaagcagagcctagtggtggccgtccaggaccacggccagccccctctctccgccactgtcacgctcaccgtggccg

SEQ ID NO: 781477 - DNA, 120 bp, Artificial Sequence
  ENSG00000253731_18 (sequence is synthesized)
tggccgacaggatccccgacatcctggccgacctgggcagcctcgagccctccgccaaacccaacgattcggacctcactctgtacctggtggtggcggtggccgcggtctcctgcgtct

SEQ ID NO: 781478 - DNA, 120 bp, Artificial Sequence
  ENSG00000253731_19 (sequence is synthesized)
cccggctcgcactttgtgggcgtggaaggggttcgggctttcctgcagacctattcccacgaggtctcactcactgcagactcgcgtaagagtcatctgattttcccccagcccaactat

SEQ ID NO: 781479 - DNA, 120 bp, Artificial Sequence
  ENSG00000253731_20 (sequence is synthesized)
gccgacacgcttatcaaccaggagagctatgagaaaagcgagcctcttctgataactcaggatttacttgaaacgaaaggagaacccaggcaacttcagcaagccccgcccaacacggac

SEQ ID NO: 781480 - DNA, 120 bp, Artificial Sequence; identical to SEQ ID NO: 773797
  ENSG00000253731_21 (sequence is synthesized)

SEQ ID NO: 781481 - DNA, 120 bp, Artificial Sequence; identical to SEQ ID NO: 773798
  ENSG00000253731_22 (sequence is synthesized)

SEQ ID NO: 781482 - DNA, 120 bp, Artificial Sequence; identical to SEQ ID NO: 773799
  ENSG00000253731_23 (sequence is synthesized)

SEQ ID NO: 781483 - DNA, 120 bp, Artificial Sequence; identical to SEQ ID NO: 773800
  ENSG00000253731_24 (sequence is synthesized)

SEQ ID NO: 781484 - DNA, 120 bp, Artificial Sequence; identical to SEQ ID NO: 773801
  ENSG00000253731_25 (sequence is synthesized)

SEQ ID NO: 781485 - DNA, 120 bp, Artificial Sequence; identical to SEQ ID NO: 773802
  ENSG00000253731_26 (sequence is synthesized)

SEQ ID NO: 781486 - DNA, 120 bp, Artificial Sequence; identical to SEQ ID NO: 773803
  ENSG00000253731_27 (sequence is synthesized)

SEQ ID NO: 781487 - DNA, 120 bp, Artificial Sequence; identical to SEQ ID NO: 773804
  ENSG00000253731_28 (sequence is synthesized)

SEQ ID NO: 781488 - DNA, 120 bp, Artificial Sequence; identical to SEQ ID NO: 773805
  ENSG00000253731_29 (sequence is synthesized)

SEQ ID NO: 781489 - DNA, 120 bp, Artificial Sequence; identical to SEQ ID NO: 773806
  ENSG00000253731_30 (sequence is synthesized)

SEQ ID NO: 781490 - DNA, 120 bp, Artificial Sequence; identical to SEQ ID NO: 773807
  ENSG00000253731_31 (sequence is synthesized)

SEQ ID NO: 781491 - DNA, 120 bp, Artificial Sequence; identical to SEQ ID NO: 773808
  ENSG00000253731_32 (sequence is synthesized)

SEQ ID NO: 781492 - DNA, 120 bp, Artificial Sequence; identical to SEQ ID NO: 773809
  ENSG00000253731_33 (sequence is synthesized)

SEQ ID NO: 781493 - DNA, 120 bp, Artificial Sequence; identical to SEQ ID NO: 773810
  ENSG00000253731_34 (sequence is synthesized)

SEQ ID NO: 781494 - DNA, 120 bp, Artificial Sequence; identical to SEQ ID NO: 773811
  ENSG00000253731_35 (sequence is synthesized)

SEQ ID NO: 781495 - DNA, 120 bp, Artificial Sequence; identical to SEQ ID NO: 773812
  ENSG00000253731_36 (sequence is synthesized)

SEQ ID NO: 781496 - DNA, 120 bp, Artificial Sequence; identical to SEQ ID NO: 773813
  ENSG00000253731_37 (sequence is synthesized)

SEQ ID NO: 781497 - DNA, 120 bp, Artificial Sequence; identical to SEQ ID NO: 773814
  ENSG00000253731_38 (sequence is synthesized)

SEQ ID NO: 781498 - DNA, 120 bp, Artificial Sequence
  ENSG00000253731_39 (sequence is synthesized)
tttctttccgcctaagcgggaagagtaatctgatcttcccgcaacccaactaatcagacaggctcatcagctagatcggctgttatagaagcgaacctcttttggtacaggaagattcgt

SEQ ID NO: 781499 - DNA, 82 bp, Artificial Sequence
  ENSG00000253731_40 (sequence is synthesized)
tgttatagaagcgaacctcttttggtacaggaagattcgtgattttgtaaagtggaagactcccttgttcaggtgagggtat

SEQ ID NO: 781500 - DNA, 120 bp, Artificial Sequence
  ENSG00000253731_41 (sequence is synthesized)
ttggttgacaggaaaattcaagattgtctttgattagtgcttagttttcttagccctttgcagagagtcacataattctaatgtttttcttttatatcaaaagaatgttctgaagtctta

SEQ ID NO: 781501 - DNA, 120 bp, Artificial Sequence
  ENSG00000253731_42 (sequence is synthesized)
attttgtgggggaaaataatgcatgtcctagtttttctttacctttctcttcttggcaaactatttgtgtcttggattgagtacatctcgtttcttaggttttttcctactatgtgacat

SEQ ID NO: 781502 - DNA, 120 bp, Artificial Sequence
  ENSG00000253731_43 (sequence is synthesized)
ttgtaaggttctttctttttctaatgtgggaaaaaaaataaccttaatttaggtcagtgttaaagatcaagatcttggttttagctagcatggtggttcacgcctgtaatcccacctctt

SEQ ID NO: 781503 - DNA, 120 bp, Artificial Sequence
  ENSG00000253731_44 (sequence is synthesized)
agaccaggagtttgagaccagcctgggtgactctgtctctaccaaaaagaaaaaaaagtagccagatgtgtggcgtacacctgtagtcccagctactcgagaagctctgataggaggatt

SEQ ID NO: 781504 - DNA, 120 bp, Artificial Sequence
  ENSG00000253731_45 (sequence is synthesized)
ctactcgagaagctctgataggaggattgcttaagtccaggggtatgaggctgcagtgagatataattgtgtcactgcaccctagcctgggagacagaatgagactttttctctctctct

SEQ ID NO: 781505 - DNA, 120 bp, Artificial Sequence
  ENSG00000253731_46 (sequence is synthesized)
ctcaaaaaaaaaaaaagattttgttttttctcagtgttacttgataactataaacgacagacgttcatacaagagatctttcacctttactacttaggaatcaaaaattatttttgaaaa

SEQ ID NO: 781506 - DNA, 120 bp, Artificial Sequence
  ENSG00000253731_47 (sequence is synthesized)
gataagaatcattggtaactgcagcaggggacaccagatctttggtgttaaaagacctgaataacattcctgtaactatctgttatttacttgggccagttacaatcgccattatcttcc

SEQ ID NO: 781507 - DNA, 120 bp, Artificial Sequence
  ENSG00000253731_48 (sequence is synthesized)
aattaaaattaagatttaaaagacttctcttatcagagataggatccccctctgttgcccagtctggagtaaaaatccacctgtaactgctgcttatagagtgtgtatccagggcaactt

SEQ ID NO: 781508 - DNA, 120 bp, Artificial Sequence
  ENSG00000253731_49 (sequence is synthesized)
gaatctatgttcctgggttgcaatcctaaagcttggctcaaataagctctacttatattattttttaaaacaagactttccttatctatctgactcaaattctaagaaaataattttata

SEQ ID NO: 781509 - DNA, 120 bp, Artificial Sequence
  ENSG00000253731_50 (sequence is synthesized)
actttttttcaaactctaaagcagcatagtgaacacgtatttgttgacatcaccattattataattattgggttgttaacaataactaagcaccgatgctgtgtgcctactacagtgtct

SEQ ID NO: 781510 - DNA, 78 bp, Artificial Sequence
  ENSG00000253731_51 (sequence is synthesized)
aataactaagcaccgatgctgtgtgcctactacagtgtcttttgcatactgtgtgcctgatagtatttaagagtgaaa

SEQ ID NO: 781511 - DNA, 67 bp, Artificial Sequence
  ENSG00000253731_52 (sequence is synthesized)
gataattaataaataaagagtgaacatgaattttaaaacatgctcggtagtgtctgcttacaggaca

SEQ ID NO: 781512 - DNA, 120 bp, Artificial Sequence
  ENSG00000253731_53 (sequence is synthesized)
gaattttaaaacatgctcggtagtgtctgcttacaggacatatctctaaaaatagatgactgactggtgaatgggagaacaaatgttaatgaggttcaaataaaaatttaaatattttag

SEQ ID NO: 781513 - DNA, 120 bp, Artificial Sequence
  ENSG00000253731_54 (sequence is synthesized)
cattttaacccagacaataaggctttcatcatataggaactctttattgaaatatttcaagaaaaaagggattatcatttagaagactgattagtcttatttattatgactgaaatgtgc

SEQ ID NO: 781514 - DNA, 120 bp, Artificial Sequence
  ENSG00000253731_55 (sequence is synthesized)
aaacagaatcattgtttcatgaacagaaaacagcagagtttttgactgtcaatgatgttcgaatagaaaatggatcactaaggagataggagattctgttatcgacagtcttcaaaagta

SEQ ID NO: 781515 - DNA, 120 bp, Artificial Sequence
  ENSG00000253731_56 (sequence is synthesized)
agttgatggccctggaatgaatggagtacaggggattctctaatttgatgacttgttgaactacattatagtcaagatttttctccagtcatgagttggaagattctacaatctggtggt

SEQ ID NO: 781516 - DNA, 120 bp, Artificial Sequence
  ENSG00000253731_57 (sequence is synthesized)
attatagaatggattggccacttgtgcatctgaatttgttatgaatgtgtaagaaaaaagcaattgagaagataccttgaaaataaatgagaacctcctttgtaacctgactttgtcagt

SEQ ID NO: 781517 - DNA, 120 bp, Artificial Sequence
  ENSG00000253731_58 (sequence is synthesized)
cttcttaaagataacattgagttgatgtgtttttaaataagctgctaagagtaatatgtgtttttctgaaccaatattgtggtatttacatttaaggaattgttatagatttatttattt

SEQ ID NO: 781518 - DNA, 120 bp, Artificial Sequence
  ENSG00000253731_59 (sequence is synthesized)
caagtttccaaaggtatatacctaaacaagagatctaatcatacacatcttcaaagctcattttcttgtatctttgtgatataatttgataaaataacaattttaaacaacttgaatctt

SEQ ID NO: 781519 - DNA, 120 bp, Artificial Sequence
  ENSG00000253731_60 (sequence is synthesized)
ggatattagtctcatgagttagatgggctgttatacatatgattatttcataaactctgaaagtgtgaatgttattttactatactaccaatttgggatgttaaactacatcttgagcat

SEQ ID NO: 781520 - DNA, 120 bp, Artificial Sequence
  ENSG00000253731_61 (sequence is synthesized)
ttgttgttatagggaaagctcactaactacttttcatggagatcaggctggtttattttattctcttattacctgtgaccatttcatttaaacaaataaaatatttctctgatggaaaaa

SEQ ID NO: 781521 - DNA, 120 bp, Artificial Sequence
  ENSG00000253767_0 (sequence is synthesized)
atggccgctccacagagtcgccccagacgcggcgagctgatcctgctgtgcgcgctgctgggaacgctgtgggaaatcgggaggggacagattcgctactctgtgccagaagagacggac

SEQ ID NO: 781522 - DNA, 120 bp, Artificial Sequence
  ENSG00000253767_1 (sequence is synthesized)
aaaggctccttcgtgggtaatatctccaaggacctggggctggacccccggaagctggcgaagcacggagtccgtatcgtctccagaggtaggacgcagctctttgctctgaacccgcgc

SEQ ID NO: 781523 - DNA, 120 bp, Artificial Sequence
  ENSG00000253767_2 (sequence is synthesized)
agcggcagcttgatcaccgcgggcaggatagatcgggaggagctctgcgctcagagcccgcggtgtctgataaatattaacaccctggttgaggataaaggaaaactctttggggtagaa

SEQ ID NO: 781524 - DNA, 120 bp, Artificial Sequence
  ENSG00000253767_3 (sequence is synthesized)
atagaaataattgatattaacgataataacccaaaattccaggtcgaagatctagaagtaaaaattaacgaaatcgcggttcctggagcacgttatccactcccagaagctgttgacccg

SEQ ID NO: 781525 - DNA, 120 bp, Artificial Sequence
  ENSG00000253767_4 (sequence is synthesized)
gatgtgggcgtgaactccctccagagctaccagctcagccccaatcaccacttctccctggacgtgcagactggagacaatggagccataaacccagagctggtgctggagcgcgccctg

SEQ ID NO: 781526 - DNA, 120 bp, Artificial Sequence
  ENSG00000253767_5 (sequence is synthesized)
gacagggaggaagaggctgctcaccacctggtcctcacggcctcggatggcggcaagccgcctcgctctagcacagtgcgcatccacgtgacagtgttggatacaaatgacaatgccccg

SEQ ID NO: 781527 - DNA, 120 bp, Artificial Sequence
  ENSG00000253767_6 (sequence is synthesized)
gtttttcctcacccgatttaccgagtgaaagtccttgagaacatgcccccaggcacgcggctgcttactgtaacagccagcgacccggatgagggaatcaacggaaaagtggcatacaaa

SEQ ID NO: 781528 - DNA, 120 bp, Artificial Sequence
  ENSG00000253767_7 (sequence is synthesized)
ttccggaaaattaatgaaaaacaaactccgttattccagcttaatgaaaatactggggaaatatcaatagcaaaaagtctagattatgaagaatgttcattttatgaaatggaaatacaa

SEQ ID NO: 781529 - DNA, 120 bp, Artificial Sequence
  ENSG00000253767_8 (sequence is synthesized)
gccgaagatgtgggggcacttctggggaggaccaaattgctcatttcggtggaagatgtaaatgacaatagaccagaagtgatcattacgtctttgtttagcccagtgttagaaaattct

SEQ ID NO: 781530 - DNA, 120 bp, Artificial Sequence
  ENSG00000253767_9 (sequence is synthesized)
cttcccgggacagtaattgccttcttgagtgtgcatgaccaagactctggaaagaatggtcaagttgtctgttacacacgtgataatttaccttttaaattagaaaagtcaataggtaat

SEQ ID NO: 781531 - DNA, 120 bp, Artificial Sequence
  ENSG00000253767_10 (sequence is synthesized)
tattatagattagtgacaaggaaatatttggaccgagaaaatgtctctatctacaatatcacagtgatggcctcagatctaggaacaccacctctgtccactgaaactcaaatcgctctg

SEQ ID NO: 781532 - DNA, 120 bp, Artificial Sequence
  ENSG00000253767_11 (sequence is synthesized)
cacgtggcagacattaacgacaaccctcctactttccctcatgcctcctactcagcgtatatcctagagaacaacctgagaggagcctccatcttttccttgactgcacacgaccccgac

SEQ ID NO: 781533 - DNA, 120 bp, Artificial Sequence
  ENSG00000253767_12 (sequence is synthesized)
agccaggagaatgcccaggtcacttactctgtgaccgaggacacgctgcagggggcgcccctgtcctcgtatatctccatcaactctgacaccggtgtcctgtatgcgctgcaatctttc

SEQ ID NO: 781534 - DNA, 120 bp, Artificial Sequence
  ENSG00000253767_13 (sequence is synthesized)
gactatgagcagatccgagacctgcagctactggtaacagccagcgacagcggggacccgcccctcagcagcaacatgtcactgagcctgttcgtgctggaccagaatgacaacgcgccc

SEQ ID NO: 781535 - DNA, 120 bp, Artificial Sequence
  ENSG00000253767_14 (sequence is synthesized)
accagaatgacaacgcgcccgagatcctgtaccccgccctccccacagacggttccactggcgtggagctggcgccccgctccgcagagcgtggctacctggtgaccaaggtggtggcgg

SEQ ID NO: 781536 - DNA, 120 bp, Artificial Sequence
  ENSG00000253767_15 (sequence is synthesized)
aacgcctggctgtcctaccgcctgctcaaggccagcgagccgggactcttctcggtgggtctgcacacgggcgaggtgcgcacggcgcgagccctgctggacagagatgcgctcaagcag

SEQ ID NO: 781537 - DNA, 120 bp, Artificial Sequence
  ENSG00000253767_16 (sequence is synthesized)
agcctcgtggtggccgtccaggaccatggccagccccctctctccgccactgtcacgctcaccgtagccgtggctgacagcatccccgaagtcctgaccgagttgggcagtctgaagcct

SEQ ID NO: 781538 - DNA, 120 bp, Artificial Sequence
  ENSG00000253767_17 (sequence is synthesized)
tcggtcgacccgaacgattcgagccttacactctatctcgtggtggcagtggctgccatctcctgtgtcttcctcgcctttgtcgctgtgcttctggggctcaggctgaggcgctggcac

SEQ ID NO: 781539 - DNA, 120 bp, Artificial Sequence
  ENSG00000253767_18 (sequence is synthesized)
aagtcacgcctgctccaggattccggtggcagattggtaggcgtgcctgcctcacattttgtgggtgttgaggaggtacaggctttcctgcagacctattcccaggaagtctccctcacc

SEQ ID NO: 781540 - DNA, 120 bp, Artificial Sequence
  ENSG00000253767_19 (sequence is synthesized)
gcagacatgctcatcagtcaggagggctgtgagaaaaatgattctttgttaacatccgtagattttcatgaatataagaatgaagctgatcatggtcagcaagccccgcccaacacggac

SEQ ID NO: 781541 - DNA, 120 bp, Artificial Sequence; identical to SEQ ID NO: 773797
  ENSG00000253767_20 (sequence is synthesized)

SEQ ID NO: 781542 - DNA, 120 bp, Artificial Sequence; identical to SEQ ID NO: 773798
  ENSG00000253767_21 (sequence is synthesized)

SEQ ID NO: 781543 - DNA, 120 bp, Artificial Sequence; identical to SEQ ID NO: 773799
  ENSG00000253767_22 (sequence is synthesized)

SEQ ID NO: 781544 - DNA, 120 bp, Artificial Sequence; identical to SEQ ID NO: 773800
  ENSG00000253767_23 (sequence is synthesized)

SEQ ID NO: 781545 - DNA, 120 bp, Artificial Sequence; identical to SEQ ID NO: 773801
  ENSG00000253767_24 (sequence is synthesized)

SEQ ID NO: 781546 - DNA, 120 bp, Artificial Sequence; identical to SEQ ID NO: 773802
  ENSG00000253767_25 (sequence is synthesized)

SEQ ID NO: 781547 - DNA, 120 bp, Artificial Sequence; identical to SEQ ID NO: 773803
  ENSG00000253767_26 (sequence is synthesized)

SEQ ID NO: 781548 - DNA, 120 bp, Artificial Sequence; identical to SEQ ID NO: 773804
  ENSG00000253767_27 (sequence is synthesized)

SEQ ID NO: 781549 - DNA, 120 bp, Artificial Sequence; identical to SEQ ID NO: 773805
  ENSG00000253767_28 (sequence is synthesized)

SEQ ID NO: 781550 - DNA, 120 bp, Artificial Sequence; identical to SEQ ID NO: 773806
  ENSG00000253767_29 (sequence is synthesized)

SEQ ID NO: 781551 - DNA, 120 bp, Artificial Sequence; identical to SEQ ID NO: 773807
  ENSG00000253767_30 (sequence is synthesized)

SEQ ID NO: 781552 - DNA, 120 bp, Artificial Sequence; identical to SEQ ID NO: 773808
  ENSG00000253767_31 (sequence is synthesized)

SEQ ID NO: 781553 - DNA, 120 bp, Artificial Sequence; identical to SEQ ID NO: 773809
  ENSG00000253767_32 (sequence is synthesized)

SEQ ID NO: 781554 - DNA, 120 bp, Artificial Sequence; identical to SEQ ID NO: 773810
  ENSG00000253767_33 (sequence is synthesized)

SEQ ID NO: 781555 - DNA, 120 bp, Artificial Sequence; identical to SEQ ID NO: 773811
  ENSG00000253767_34 (sequence is synthesized)

SEQ ID NO: 781556 - DNA, 120 bp, Artificial Sequence; identical to SEQ ID NO: 773812
  ENSG00000253767_35 (sequence is synthesized)

SEQ ID NO: 781557 - DNA, 120 bp, Artificial Sequence; identical to SEQ ID NO: 773813
  ENSG00000253767_36 (sequence is synthesized)

SEQ ID NO: 781558 - DNA, 120 bp, Artificial Sequence; identical to SEQ ID NO: 773814
  ENSG00000253767_37 (sequence is synthesized)

SEQ ID NO: 781559 - DNA, 120 bp, Artificial Sequence
  ENSG00000253767_38 (sequence is synthesized)
gaaagacggagtttaatttcctaaaatgtagtgagcagttgagttcaggacaagacatactttgcggtgattcatctggggccttatttccactttgtaattccagtgaattgacttccc

SEQ ID NO: 781560 - DNA, 120 bp, Artificial Sequence
  ENSG00000253767_39 (sequence is synthesized)
atcaggtgagtttcctttaagtataatttaatgctcattgcctacccatttctccatattcacaagaaaatatacatatttgcaggaaaatatataatttttagatgtcatggatcattt

SEQ ID NO: 781561 - DNA, 120 bp, Artificial Sequence
  ENSG00000253767_40 (sequence is synthesized)
taggaaagttgtagtcagttaaaaagctgtcatatcattctacaaaggaggagtaaagtaggagcaattgtgtggcccaacatttgtttgttttttagccaagcttagatttataaagca

SEQ ID NO: 781562 - DNA, 120 bp, Artificial Sequence
  ENSG00000253767_41 (sequence is synthesized)
atgagggtgtggttttaaccacaaagtgaaagtgttagacagttgttggctctctcctaaaaagtgaatgagatttttcctatacattttccttcttgttgactaatatatgatgaatac

SEQ ID NO: 781563 - DNA, 120 bp, Artificial Sequence
  ENSG00000253767_42 (sequence is synthesized)
ttttttcagcttggatataccataaatataaaaataataaagccaaagaatttaagctaaaattcaacacttttcttaactaatttaactggtatggtctccatagtagtccactgtttt

SEQ ID NO: 781564 - DNA, 120 bp, Artificial Sequence
  ENSG00000253767_43 (sequence is synthesized)
gtttcctgtgttaacttcccttttgtttcaaaagctcttagaataaggagtcaactggatttttatgtccatggaccccttgtgattatatgcagtgtacgctgtgtgtgcgtgtgtgtg

SEQ ID NO: 781565 - DNA, 120 bp, Artificial Sequence
  ENSG00000253767_44 (sequence is synthesized)
tgtgtgtgtgtgagagagatccttttacttagaaaaaggtctactatgctcattagaagatcaaaagcagattctccttacttgtaacataggagtttcaggattaatctgtattcaagc

SEQ ID NO: 781566 - DNA, 120 bp, Artificial Sequence
  ENSG00000253767_45 (sequence is synthesized)
tcattctatatccttcatcaaagaaaagacaatgttttgtgtctgttgtccctctcacacacagccctaatatataatgtgtaactgccttatctgcagccctaaactaatatagctaga

SEQ ID NO: 781567 - DNA, 120 bp, Artificial Sequence
  ENSG00000253767_46 (sequence is synthesized)
ggtcttctaatcattctcctacctctaggaaagaaatatagtcttgaaaactgccaatctggtgtgcatacaaaatatatacaaaataccaaggaacattatatgagccttttgctaggt

SEQ ID NO: 781568 - DNA, 120 bp, Artificial Sequence
  ENSG00000253767_47 (sequence is synthesized)
ccaaggaacattatatgagccttttgctaggtatatctaagcaactgcttcagttaatggccactttacaaattgctgaaagaaggaaacgtctttcgattcttttttttttcttttttt

SEQ ID NO: 781569 - DNA, 120 bp, Artificial Sequence
  ENSG00000253767_48 (sequence is synthesized)
ggctgtagtgcagtggcacaatgatagctccctccagcctcaaactcctgggctcaagcattccttctgcatcagcctcctgactagctggaactcaggctcatgccaccagacctggct

SEQ ID NO: 781570 - DNA, 120 bp, Artificial Sequence
  ENSG00000253767_49 (sequence is synthesized)
aatttttctgttttcagtagagaaaatattttctttcactaatttaactggtatggtttccattgtctacccagttttccatatgcataagaaaatatattcacaggaaaatataaagtt

SEQ ID NO: 781571 - DNA, 120 bp, Artificial Sequence
  ENSG00000253767_50 (sequence is synthesized)
ttcagatttcatgagtggttttaagaaagttttagtcagtgaaaaaactatcataccagtcttcaaaggaagggtgaaataagttcatctgctacgttgcccaggctggtcttgaaggga

SEQ ID NO: 781572 - DNA, 120 bp, Artificial Sequence
  ENSG00000253767_51 (sequence is synthesized)
aacagacttttttgtagtcatacttatcctttggcttcttagtaagtattatatagtcattactttttgcagttttttagatcaaagtgttaatgtaggtaaagttaattttagaatata

SEQ ID NO: 781573 - DNA, 120 bp, Artificial Sequence
  ENSG00000253767_52 (sequence is synthesized)
tgtaaaagtcaagtctgctttaaatttaatcatctctttggtgaaagggatgggatggagctttgctttttatcatatattcatctgtacctttcaagtattcaaatagaaaaatataaa

SEQ ID NO: 781574 - DNA, 120 bp, Artificial Sequence
  ENSG00000253767_53 (sequence is synthesized)
caatgtaaataaaatagcaaaacaatgtaatatctcataaaactgcaatggtaaaagcatttatcctattgaaattccacaatttttatttgaaaatattatcgacatgtaattcaagtg

SEQ ID NO: 781575 - DNA, 120 bp, Artificial Sequence
  ENSG00000253767_54 (sequence is synthesized)
gcatttagaagaataatttaaaagcaacaactctatagaaagcttgtaaaatgattaagtagtttaaaccaaataaaacaatttctgagtcagtcatctccagtaggtctattttagtct

SEQ ID NO: 781576 - DNA, 120 bp, Artificial Sequence
  ENSG00000253767_55 (sequence is synthesized)
caagataaattcatttctggtgacaactgaagttcttagttatttgttagtatatattggagacatttacaataaagcttagagcacaatgggaaatgaaagtatcatgttttttttaag

SEQ ID NO: 781577 - DNA, 120 bp, Artificial Sequence
  ENSG00000253767_56 (sequence is synthesized)
accaaatgtattgcagaaatgtgagtaatttaatccgatgctacaatctgatcattctgatctaatctgatcatttaataacactaaataaaaccttcatctcacattctttggctgttt

SEQ ID NO: 781578 - DNA, 120 bp, Artificial Sequence
  ENSG00000253767_57 (sequence is synthesized)
cttttaaaatatgggtttacggataaatcaaataaattcaaaacaaagtaataagcaaatgatttttttttctcagtaatctagtagagtattacatttagaagtaatctgtatctcagt

SEQ ID NO: 781579 - DNA, 120 bp, Artificial Sequence
  ENSG00000253767_58 (sequence is synthesized)
gcagtaactatttaggactgtaagcgccgctgttcacctactggaagacaaatgcaaccgaaaacactcagatctcacacctcacgaagacccgcagatgccacaaactaactgctggac

SEQ ID NO: 781580 - DNA, 120 bp, Artificial Sequence
  ENSG00000253767_59 (sequence is synthesized)
tgcagcgaaacccgacccctgtttggaggcactccaggtttccggaggattgtcatctccatagctgcggcaagaaactaaataagacccatttatgcacagtgaagattctgagaggat

SEQ ID NO: 781581 - DNA, 120 bp, Artificial Sequence
  ENSG00000253767_60 (sequence is synthesized)
agatagttgaaaataatttttaaggtgtatcacagagttttgggtttattttggtggtgttactataaaattgaactctaatagtcataggttattgtttcatttgcttttaaacgactt

SEQ ID NO: 781582 - DNA, 120 bp, Artificial Sequence
  ENSG00000253767_61 (sequence is synthesized)
ggaaaagattgttcaaccattttaagccttccagtattttattcctattatcactcattcacttaagaagtagctacccgtccatactggtaattttgctattgtttgtgtgtgtgtgtg

SEQ ID NO: 781583 - DNA, 120 bp, Artificial Sequence
  ENSG00000253767_62 (sequence is synthesized)
tgtgtgtgtgtgtgtgtgtgtgtatcccaaactagaacttcagaaaattatcaagaagtctaaagccttgttattagcttagcaaaagtaaaatatatctcagaatttttagggttatgt

SEQ ID NO: 781584 - DNA, 120 bp, Artificial Sequence
  ENSG00000253767_63 (sequence is synthesized)
ttagggttatgtttagcatttgaacctgtaactaggctcttgtagatttcttcactttaaacctcttttctgagccctgtttctgtaccagtgcccttcaaaactttaatacttcttacc

SEQ ID NO: 781585 - DNA, 120 bp, Artificial Sequence
  ENSG00000253767_64 (sequence is synthesized)
atccttcaaaacatgaacaaactttaaagatggatcttggtgggagatgagactggttactaaatattaagtatgtgagtcagtggtcacctgggctccatgcccatggagacatgaaat

SEQ ID NO: 781586 - DNA, 120 bp, Artificial Sequence
  ENSG00000253767_65 (sequence is synthesized)
ctaaagcctagaatgtccattgctcccccaaacaaaaaacaaaagcaaaaacattagatctgaattaaaatgtaattttaaactgttgaaagtgacttttgtaaaatatgtaagaacata

SEQ ID NO: 781587 - DNA, 120 bp, Artificial Sequence
  ENSG00000253767_66 (sequence is synthesized)
tttcaatacaattccaattagctgtttcggttgtgcattgatgtgaagtggtgagaatgttgatattaagaaccaatgtttcaggtacacaagttctaaataagctgatcaattcaatta

SEQ ID NO: 781588 - DNA, 86 bp, Artificial Sequence
  ENSG00000253767_67 (sequence is synthesized)
tcaggtacacaagttctaaataagctgatcaattcaattaaagttattcagtcttggctggacacagtgcctcatgtctgaccgct

SEQ ID NO: 781589 - DNA, 75 bp, Artificial Sequence
  ENSG00000253767_68 (sequence is synthesized)
ccccgggggtttgaacagaactagaccctgtctctaaaaaaactattattaggccgggtgcggtggctcacgcct

SEQ ID NO: 781590 - DNA, 120 bp, Artificial Sequence
  ENSG00000253797_0 (sequence is synthesized)
gcctttgctaaattgctgaataagaagatggttgagtcacctccttcgcttaaacttgtcctcattggaggttgtcgtaacaaagatgatgaacttagggtaaaccaactgagaaggctg

SEQ ID NO: 781591 - DNA, 120 bp, Artificial Sequence
  ENSG00000253797_1 (sequence is synthesized)
tctgaggatttaggagttcaagaatatgtggaatttaaaataaacattccatttgatgaattaaagaattatttgtctgaagcaacaattggtctgcataccatgtggaacgagcatttt

SEQ ID NO: 781592 - DNA, 120 bp, Artificial Sequence
  ENSG00000253797_2 (sequence is synthesized)
gggattggagttgtggagtgtatggcagctggcacaattatccttgcacacaattcggggggcccaaagcttgacattgtggttcctcacgaaggagatataactggctttctggctgag

SEQ ID NO: 781593 - DNA, 120 bp, Artificial Sequence
  ENSG00000253797_3 (sequence is synthesized)
agtgaagaagactatgctgaaactatcgctcacattctttccatgtctgcagaaaagagactccaaatcagaaaaagtgctcgtgcatctgtaagcagattctctgatcaggaatttgaa

SEQ ID NO: 781594 - DNA, 120 bp, Artificial Sequence
  ENSG00000253797_4 (sequence is synthesized)
gtgacattcctatcatctgtggaaaagttatttaagtaatgccatatctgtaaaattaaagatattttatataaactggttaaacaccttcatatgtaaatatttttctaaattcaatct

SEQ ID NO: 781595 - DNA, 120 bp, Artificial Sequence
  ENSG00000253797_5 (sequence is synthesized)
catttgtcaaatcattttactttagaaaacagacaaaatttccttttagaataaaaggaagtgttgaaaagaaaatggatgactagccttcggcttccattcttggtatacatgagagag

SEQ ID NO: 781596 - DNA, 120 bp, Artificial Sequence
  ENSG00000253797_6 (sequence is synthesized)
gctggctgctgagatgaatgtgaaccaggttgcagagaatctggctttgagccaccaggaagaactagtggatttgccaaaaaactaccccttgagtgaaaatgaagatgagggggacag

SEQ ID NO: 781597 - DNA, 120 bp, Artificial Sequence
  ENSG00000253797_7 (sequence is synthesized)
tgatggagagagaaagcatcaaaagcttctggaagcaatcatttcccttgatggaaagaataggcggaaattggctgagaggtctgaggctagtctgaaagtgtcagagttcagtgtcag

SEQ ID NO: 781598 - DNA, 120 bp, Artificial Sequence
  ENSG00000253797_8 (sequence is synthesized)
ttctgaaggatcaggagaaaagctgggccttgcagatctgcttgagcccgttaaaacttcatcttctttggccactgtaaaaaagcaactgaatagagtcaaatcaaagaaggtggtgga

SEQ ID NO: 781599 - DNA, 120 bp, Artificial Sequence
  ENSG00000253797_9 (sequence is synthesized)
gttacctcttaacaaagaaaaaattgaacagatccacagagaagtagcattcagtaaaacctcacaggtcctctccaaatgggaccctatcatcctgaagaaccagcaggcagagcagct

SEQ ID NO: 781600 - DNA, 120 bp, Artificial Sequence
  ENSG00000253797_10 (sequence is synthesized)
ggtttttcccctggggaaggagcagccagccattgctcccattgaacatgcgctcagtggctggaaggcaagaactcccctggagcaggaaatttttaacctcctccataagaacaagca

SEQ ID NO: 781601 - DNA, 120 bp, Artificial Sequence
  ENSG00000253797_11 (sequence is synthesized)
gccagtgacagatcctttactgactcccatggaaaaggcctctctccaagccatgagcctggaagaggcaaagatgcaccgagcagagcttcagagggctcgggctctgcagtcctacta

SEQ ID NO: 781602 - DNA, 120 bp, Artificial Sequence
  ENSG00000253797_12 (sequence is synthesized)
tgaggccaaggctcgaaaagagaagaaaatcaaaagtaaaaagtatcacaaagtcgtgaagaaaggaaaggccaagaaagccttaaaagagtttgagcagctacagaaggttaatccaac

SEQ ID NO: 781603 - DNA, 120 bp, Artificial Sequence
  ENSG00000253797_13 (sequence is synthesized)
tgtggcactggaagaaatggaaaaaattgaaaatgccagaatgatggaaagaatgagccttaagcaccaaaacagtgggaaatgggccaagtcaaaggcaattatggccaaatatgacct

SEQ ID NO: 781604 - DNA, 120 bp, Artificial Sequence
  ENSG00000253797_14 (sequence is synthesized)
ggaggctcgccaagctatgcaggaacagttggccaagaacaaagaactgacacagaaactccaggtagcctctgagagtgaggaagaggagggaggcacagaagtggaagaactccttgt

SEQ ID NO: 781605 - DNA, 120 bp, Artificial Sequence
  ENSG00000253797_15 (sequence is synthesized)
ccctcatgtagcgaatgaagtgcagatgaatgtggacggaccgaatccctggatgttcaggagctgcaccagtgacaccaaagaggctgcaacacaggaggaccctgagcaagtgccaga

SEQ ID NO: 781606 - DNA, 120 bp, Artificial Sequence
  ENSG00000253797_16 (sequence is synthesized)
gcttgcagctcatgaggtttctgcaagtgaggcagaagaaagaccagtggcagaggaagaaattttgttgagagaatttgaggaaaggcaatcccttagaaaaagatctgagctcaacca

SEQ ID NO: 781607 - DNA, 120 bp, Artificial Sequence
  ENSG00000253797_17 (sequence is synthesized)
ggatgctgagccagcaagcagtcaagaaacaaaagattctagcagccaggaggtgctgtccgaattgagggcactatctcagaaattgaaggaaaaacatcagtccaggaagcaaaaagc

SEQ ID NO: 781608 - DNA, 120 bp, Artificial Sequence
  ENSG00000253797_18 (sequence is synthesized)
aagttcagaggggactgttccccaggtccagagagaggaacctgccccagaagaagcggaacccctattgctacagaggtcagagagagtacaaactctggaagagctagaagagctggg

SEQ ID NO: 781609 - DNA, 120 bp, Artificial Sequence
  ENSG00000253797_19 (sequence is synthesized)
aaaagaagattgttttcaaaataaggagcttcccagacctgtgttagaaggacagcagtcagagaggaccccaaataatcggcctgatgcccctaaggagaagaaagagaaggagcaact

SEQ ID NO: 781610 - DNA, 120 bp, Artificial Sequence
  ENSG00000253797_20 (sequence is synthesized)
gatcaacctacagaacttcctgaccacacagtctccttccgtgaggtctttggcagttcccacaataatagaggagctggaagatgaagaggagagagaccaaaggcagatgataaagga

SEQ ID NO: 781611 - DNA, 120 bp, Artificial Sequence
  ENSG00000253797_21 (sequence is synthesized)
agcttttgctggggatgatgtcatcagagatttcttgaaagagaagagggaagctgtggaggcgagtaagccaaaggacgtggacctgacactacctggctggggcgagtggggtggtgt

SEQ ID NO: 781612 - DNA, 120 bp, Artificial Sequence
  ENSG00000253797_22 (sequence is synthesized)
gggcctaaagcccagtgccaagaaaagacgccagtttctcattaaagcccctgagggtcctccaagaaaagataagaatttgccaaatgtgattatcagtgagaagcgcaacatccacgc

SEQ ID NO: 781613 - DNA, 120 bp, Artificial Sequence; identical to SEQ ID NO: 781210
  ENSG00000253797_23 (sequence is synthesized)

SEQ ID NO: 781614 - DNA, 120 bp, Artificial Sequence; identical to SEQ ID NO: 781211
  ENSG00000253797_24 (sequence is synthesized)

SEQ ID NO: 781615 - DNA, 120 bp, Artificial Sequence; identical to SEQ ID NO: 781212
  ENSG00000253797_25 (sequence is synthesized)

SEQ ID NO: 781616 - DNA, 120 bp, Artificial Sequence; identical to SEQ ID NO: 781213
  ENSG00000253797_26 (sequence is synthesized)

SEQ ID NO: 781617 - DNA, 120 bp, Artificial Sequence; identical to SEQ ID NO: 781214
  ENSG00000253797_27 (sequence is synthesized)

SEQ ID NO: 781618 - DNA, 120 bp, Artificial Sequence; identical to SEQ ID NO: 781215
  ENSG00000253797_28 (sequence is synthesized)

SEQ ID NO: 781619 - DNA, 120 bp, Artificial Sequence; identical to SEQ ID NO: 781216
  ENSG00000253797_29 (sequence is synthesized)

SEQ ID NO: 781620 - DNA, 120 bp, Artificial Sequence; identical to SEQ ID NO: 781217
  ENSG00000253797_30 (sequence is synthesized)

SEQ ID NO: 781621 - DNA, 120 bp, Artificial Sequence; identical to SEQ ID NO: 781218
  ENSG00000253797_31 (sequence is synthesized)

SEQ ID NO: 781622 - DNA, 61 bp, Artificial Sequence; identical to SEQ ID NO: 781219
  ENSG00000253797_32 (sequence is synthesized)

SEQ ID NO: 781623 - DNA, 120 bp, Artificial Sequence; identical to SEQ ID NO: 781220
  ENSG00000253797_33 (sequence is synthesized)

SEQ ID NO: 781624 - DNA, 120 bp, Artificial Sequence; identical to SEQ ID NO: 781221
  ENSG00000253797_34 (sequence is synthesized)

SEQ ID NO: 781625 - DNA, 120 bp, Artificial Sequence; identical to SEQ ID NO: 781222
  ENSG00000253797_35 (sequence is synthesized)

SEQ ID NO: 781626 - DNA, 120 bp, Artificial Sequence; identical to SEQ ID NO: 781223
  ENSG00000253797_36 (sequence is synthesized)

SEQ ID NO: 781627 - DNA, 120 bp, Artificial Sequence; identical to SEQ ID NO: 781224
  ENSG00000253797_37 (sequence is synthesized)

SEQ ID NO: 781628 - DNA, 120 bp, Artificial Sequence; identical to SEQ ID NO: 781225
  ENSG00000253797_38 (sequence is synthesized)

SEQ ID NO: 781629 - DNA, 120 bp, Artificial Sequence; identical to SEQ ID NO: 781226
  ENSG00000253797_39 (sequence is synthesized)

SEQ ID NO: 781630 - DNA, 120 bp, Artificial Sequence; identical to SEQ ID NO: 781227
  ENSG00000253797_40 (sequence is synthesized)

SEQ ID NO: 781631 - DNA, 120 bp, Artificial Sequence; identical to SEQ ID NO: 781228
  ENSG00000253797_41 (sequence is synthesized)

SEQ ID NO: 781632 - DNA, 120 bp, Artificial Sequence; identical to SEQ ID NO: 781229
  ENSG00000253797_42 (sequence is synthesized)

SEQ ID NO: 781633 - DNA, 120 bp, Artificial Sequence; identical to SEQ ID NO: 781230
  ENSG00000253797_43 (sequence is synthesized)

SEQ ID NO: 781634 - DNA, 120 bp, Artificial Sequence; identical to SEQ ID NO: 781231
  ENSG00000253797_44 (sequence is synthesized)

SEQ ID NO: 781635 - DNA, 120 bp, Artificial Sequence
  ENSG00000253831_0 (sequence is synthesized)
gtccgagtcagccctgggcagcggggaggtccccagagggggctgggccctgtctgggtatggggaagcttgctgcctctggttcccttttctccccttcactggcaacctcttgtccct

SEQ ID NO: 781636 - DNA, 120 bp, Artificial Sequence
  ENSG00000253831_1 (sequence is synthesized)
tcccttttctctctttctttcctgaccctctcccttccttccttctttccctccatttttccttcctctttcactgtcctcccctctgcctccttccttcccttcctcttaagtggtgac

SEQ ID NO: 781637 - DNA, 120 bp, Artificial Sequence
  ENSG00000253831_2 (sequence is synthesized)
catttccccaaggcccagacacagcccatctcgccggagtggaccatgcactgcagctgcttggctgagggcatcccagccaaccccggcaactggatctcagggttggccttccctgat

SEQ ID NO: 781638 - DNA, 120 bp, Artificial Sequence
  ENSG00000253831_3 (sequence is synthesized)
tgggcctacaaagccgagtcgtccccaggctcccggcagatccagctgtggcacttcatcctggagctgctgcagaaggaagagttccgccatgtcatcgcctggcagcagggagagtac

SEQ ID NO: 781639 - DNA, 120 bp, Artificial Sequence
  ENSG00000253831_4 (sequence is synthesized)
ggggaatttgtcatcaaggatccagatgaggtggcccgcctctggggccgcaggaaatgcaaaccacagatgaattatgacaagctgagccgggccctcagatattactacaataagagg

SEQ ID NO: 781640 - DNA, 120 bp, Artificial Sequence
  ENSG00000253831_5 (sequence is synthesized)
atcctgcataagaccaaaggcaaaaggttcacatacaagttcaacttcagcaagctcatcgtagtcaactatcctttgtgggaagtgcgggcgccgccatccccccacttgctgctgggg

SEQ ID NO: 781641 - DNA, 120 bp, Artificial Sequence
  ENSG00000253831_6 (sequence is synthesized)
gcccctgccctgtgtcggccagcgctggtgcccgtgggtgtgcagagtgagctcctgcacagcatgctatttgcccatcaggccatggtggagcagctgacaggacagcagaccccccga

SEQ ID NO: 781642 - DNA, 120 bp, Artificial Sequence
  ENSG00000253831_7 (sequence is synthesized)
gggccaccagagacctctggggataagaaggggagcagcagcagcgtctaccgacttggctctgccccaggcccctgccggctgggcctttgctgccatttggggagcgtccaaggcgag

SEQ ID NO: 781643 - DNA, 120 bp, Artificial Sequence
  ENSG00000253831_8 (sequence is synthesized)
acctgtctctcggggcccttcttgcctcctctcccgtcagagcagcagctcccaggggcttttaagccagacatcctgctcccaggacctaggagcctcccaggggcctggcattttcca

SEQ ID NO: 781644 - DNA, 120 bp, Artificial Sequence
  ENSG00000253831_9 (sequence is synthesized)
gggcttcctctcttggcagggctgggacagggtgcgggtgagaggctttggctcttgtccctcaggcccgaggggctggaagtaaagcctgctcccatgatggaggcaaagggaggcctg

SEQ ID NO: 781645 - DNA, 120 bp, Artificial Sequence
  ENSG00000253831_10 (sequence is synthesized)
gatcccagggaggtcttctgcccagagacccgcagactcaaaactggggaggaaagccttacttcccccaatctggagaacctcaaagcagtgtggcccttggatcctccttaactagag

SEQ ID NO: 781646 - DNA, 120 bp, Artificial Sequence
  ENSG00000253831_11 (sequence is synthesized)
aggaaggtgggaagttggggaggagtcctccaaagtccatctctcctcttgcccaccgcctctgggttagccccttcccctggctggacatgggctgaaattgcaggatttgaaggggtg

SEQ ID NO: 781647 - DNA, 120 bp, Artificial Sequence
  ENSG00000253831_12 (sequence is synthesized)
gagttggacccaaggtggggagcattgcagggaaggtgtgaatgtggaaatgggaaaaaccaagacagggtgcccctcctctttcaccatattgctaagcagactaaggggacattccta

SEQ ID NO: 781648 - DNA, 120 bp, Artificial Sequence
  ENSG00000253831_13 (sequence is synthesized)
atctcaacttttcttcagggagacgagaataaagtttctataatttccatcctgcccacataagggggaaaattaagggtctagcctggggagaggacaggggtggttgtgttccctgag

SEQ ID NO: 781649 - DNA, 120 bp, Artificial Sequence
  ENSG00000253831_14 (sequence is synthesized)
tcttgtctggggcccatctccccattccaggctaaggtctccagtccctttctcacccctccatgcaacttctctcccatccctctgatttctgagaccctggaaacccctgtcccatgc

SEQ ID NO: 781650 - DNA, 120 bp, Artificial Sequence
  ENSG00000253831_15 (sequence is synthesized)
aggcacttcctcctctctccatttccccaggacccaggcaagtggggtggggagacactggccttctctgctctgtaatactccactgtgaccatgaataaaatgcccttgcaaactgtc

SEQ ID NO: 781651 - DNA, 120 bp, Artificial Sequence
  ENSG00000253831_16 (sequence is synthesized)
agacgcacacctgctaacagagacagaaagacacgcattcagactcccacacggaggcacacatggagagacgtctttctatagacccaggagtacaaagaagccttcacctgcacccac

SEQ ID NO: 781652 - DNA, 120 bp, Artificial Sequence
  ENSG00000253846_0 (sequence is synthesized)
atggccgctcaaaggaatcgctcaaaggaatcaaaggattgcagcgggctggtcctgctctgccttttcttcgggattccatgggaggctggagcccggcagatctcctactcaattcct

SEQ ID NO: 781653 - DNA, 120 bp, Artificial Sequence
  ENSG00000253846_1 (sequence is synthesized)
gaggaattagagaaaggctctttcgtgggcaacatctccaaggacttgggtctggcgccccgggagctggcggagcgcggagtccgcatagtctccagaggtaggacgcagcttttctct

SEQ ID NO: 781654 - DNA, 120 bp, Artificial Sequence
  ENSG00000253846_2 (sequence is synthesized)
ctgaacccgcgcagcggcagcttgatcaccgcgggcaggatagaccgggaggagctctgcgctcagagcgcgcggtgcgtggtgagttttaatatccttgtggaagacagggtgaaactt

SEQ ID NO: 781655 - DNA, 120 bp, Artificial Sequence
  ENSG00000253846_3 (sequence is synthesized)
tttgggatagaaatagaagtaactgatatcaatgacaatgctccaaaattccaagcagaaaatctagacgtaaaaattaatgaaaatgtcgctgcgggaatgcgttttcctctcccggaa

SEQ ID NO: 781656 - DNA, 120 bp, Artificial Sequence
  ENSG00000253846_4 (sequence is synthesized)
gctattgatccggatgtgggcgtgaactccctgcagagctatcagctcagccccaataagcacttctccctaagagttcagagccgtgccaatggcgtcaagtacccggagctggtactg

SEQ ID NO: 781657 - DNA, 120 bp, Artificial Sequence
  ENSG00000253846_5 (sequence is synthesized)
gagcactccctagatcgcgaggaagaggccattcaccacctggtcctcaccgcctccgacgggggtgaccctctccgatctggcactgtccttgtcagtgtgactgtcttcgatgcaaat

SEQ ID NO: 781658 - DNA, 120 bp, Artificial Sequence
  ENSG00000253846_6 (sequence is synthesized)
gacaacgcgccggtcttcaccttgccagaataccgagtgagtgttcctgagaatttgcctgtgggcactcagctgctgacagtcacagccaccgacagggacgaaggtgccaatggagaa

SEQ ID NO: 781659 - DNA, 120 bp, Artificial Sequence
  ENSG00000253846_7 (sequence is synthesized)
gtgacatattcattccgaaaattacctgacacgcaattgttgaagttccaactaaacaaatatactggagaaataaaaatatcagaaaatctagattatgaagaaaccggtttctatgaa

SEQ ID NO: 781660 - DNA, 120 bp, Artificial Sequence
  ENSG00000253846_8 (sequence is synthesized)
atagaaatacaagcagaagatggaggagcatatcttgcaactgcaaaagtgttgattacagtagaagatgtaaatgacaacagtccagagctgaccatcacgtctctatttagtccagtg

SEQ ID NO: 781661 - DNA, 120 bp, Artificial Sequence
  ENSG00000253846_9 (sequence is synthesized)
actgaagattcacctctgggaacagtcgtagcccttttaaatgtgcatgatttagactctgagcagaatggacaggtaacctgttccattttggcgtatctaccatttaaattagaaaag

SEQ ID NO: 781662 - DNA, 120 bp, Artificial Sequence
  ENSG00000253846_10 (sequence is synthesized)
tccattgacagttattacagattggtgatacacagagcccttgacagggaacaggtatcctcttacaatatcacagtgacagccacagatgggggaagtcctcctctatcaacggaagct

SEQ ID NO: 781663 - DNA, 120 bp, Artificial Sequence
  ENSG00000253846_11 (sequence is synthesized)
cactttatgctacaagtggcagatatcaatgacaacccacctaccttctctcaagtctcctactttacctatatcccagagaacaacgccaggggtgcctccatcttctcagtgacagcg

SEQ ID NO: 781664 - DNA, 120 bp, Artificial Sequence
  ENSG00000253846_12 (sequence is synthesized)
ctggacccggacagcaaagagaatgcccagattatttactccctggctgaagacaccatccagggggtacctctgtcctcatacatatccatcaactcagacactggcgtcctgtatgca

SEQ ID NO: 781665 - DNA, 120 bp, Artificial Sequence
  ENSG00000253846_13 (sequence is synthesized)
ctcagatccttcgactatgagcagtttcatgagctacagatgcaggtgacagccagcgacagcggggatcctccactcagcagcaacgtgtcgttgagcctgtttgtgctggaccagaac

SEQ ID NO: 781666 - DNA, 120 bp, Artificial Sequence
  ENSG00000253846_14 (sequence is synthesized)
accagaacgacaatgcgcccgagatcctgtaccccgccctccccacagacggttccacaggcgtggagctggcgccccgctccgcagagcccggctacctggtgaccaaggtggtggcgg

SEQ ID NO: 781667 - DNA, 120 bp, Artificial Sequence
  ENSG00000253846_15 (sequence is synthesized)
gactccggccagaacgcctggctgtcctaccgtctgctcaaggccagcgagccgggactcttcgcggtgggggagcacacgggcgaggtgcgcacggcgcgagccctgctggacagagac

SEQ ID NO: 781668 - DNA, 120 bp, Artificial Sequence
  ENSG00000253846_16 (sequence is synthesized)
gcgctcaagcaaagcctcgtagtggccgtccaggaccacggccagccccctctctccgccactgtcacgctcaccgtggccgtggccgacagcatcccccaagtcctggcggacctcggc

SEQ ID NO: 781669 - DNA, 120 bp, Artificial Sequence
  ENSG00000253846_17 (sequence is synthesized)
agcttcgagtctccagctaactctgaaacctcagacctcactctgtacctggtggtagcggtggccgcggtctcctgcgtcttcctggccttcgtcatcgtgctgctggcgcacaggctg

SEQ ID NO: 781670 - DNA, 120 bp, Artificial Sequence
  ENSG00000253846_18 (sequence is synthesized)
cggcgctggcacaagtcacgcctgctgcaggcttcaggaggcggcttgacaggtgtgtccggctcgcactttgtgggcgtggacggggttcgggctttcctgcagacctattcccacgag

SEQ ID NO: 781671 - DNA, 120 bp, Artificial Sequence
  ENSG00000253846_19 (sequence is synthesized)
gcggacacgctcatcagccaggagagctgtgagaaaaacgatcctttgtctttgttagatgattcgaagtttcctatagaggataccccattggttccacaagccccgcccaacacggac

SEQ ID NO: 781672 - DNA, 120 bp, Artificial Sequence; identical to SEQ ID NO: 773797
  ENSG00000253846_20 (sequence is synthesized)

SEQ ID NO: 781673 - DNA, 120 bp, Artificial Sequence; identical to SEQ ID NO: 773798
  ENSG00000253846_21 (sequence is synthesized)

SEQ ID NO: 781674 - DNA, 120 bp, Artificial Sequence; identical to SEQ ID NO: 773799
  ENSG00000253846_22 (sequence is synthesized)

SEQ ID NO: 781675 - DNA, 120 bp, Artificial Sequence; identical to SEQ ID NO: 773800
  ENSG00000253846_23 (sequence is synthesized)

SEQ ID NO: 781676 - DNA, 120 bp, Artificial Sequence; identical to SEQ ID NO: 773801
  ENSG00000253846_24 (sequence is synthesized)

SEQ ID NO: 781677 - DNA, 120 bp, Artificial Sequence; identical to SEQ ID NO: 773802
  ENSG00000253846_25 (sequence is synthesized)

SEQ ID NO: 781678 - DNA, 120 bp, Artificial Sequence; identical to SEQ ID NO: 773803
  ENSG00000253846_26 (sequence is synthesized)

SEQ ID NO: 781679 - DNA, 120 bp, Artificial Sequence; identical to SEQ ID NO: 773804
  ENSG00000253846_27 (sequence is synthesized)

SEQ ID NO: 781680 - DNA, 120 bp, Artificial Sequence; identical to SEQ ID NO: 773805
  ENSG00000253846_28 (sequence is synthesized)

SEQ ID NO: 781681 - DNA, 120 bp, Artificial Sequence; identical to SEQ ID NO: 773806
  ENSG00000253846_29 (sequence is synthesized)

SEQ ID NO: 781682 - DNA, 120 bp, Artificial Sequence; identical to SEQ ID NO: 773807
  ENSG00000253846_30 (sequence is synthesized)

SEQ ID NO: 781683 - DNA, 120 bp, Artificial Sequence; identical to SEQ ID NO: 773808
  ENSG00000253846_31 (sequence is synthesized)

SEQ ID NO: 781684 - DNA, 120 bp, Artificial Sequence; identical to SEQ ID NO: 773809
  ENSG00000253846_32 (sequence is synthesized)

SEQ ID NO: 781685 - DNA, 120 bp, Artificial Sequence; identical to SEQ ID NO: 773810
  ENSG00000253846_33 (sequence is synthesized)

SEQ ID NO: 781686 - DNA, 120 bp, Artificial Sequence; identical to SEQ ID NO: 773811
  ENSG00000253846_34 (sequence is synthesized)

SEQ ID NO: 781687 - DNA, 120 bp, Artificial Sequence; identical to SEQ ID NO: 773812
  ENSG00000253846_35 (sequence is synthesized)

SEQ ID NO: 781688 - DNA, 120 bp, Artificial Sequence; identical to SEQ ID NO: 773813
  ENSG00000253846_36 (sequence is synthesized)

SEQ ID NO: 781689 - DNA, 120 bp, Artificial Sequence; identical to SEQ ID NO: 773814
  ENSG00000253846_37 (sequence is synthesized)

SEQ ID NO: 781690 - DNA, 120 bp, Artificial Sequence
  ENSG00000253846_38 (sequence is synthesized)
aatccggattctcagggcttcaactacacaagccccacaaaccggctgctgggctgcagggaagctcactccagaatttaaagtgcccaggctacagagacaccctgaagccacagaaag

SEQ ID NO: 781691 - DNA, 120 bp, Artificial Sequence
  ENSG00000253846_39 (sequence is synthesized)
ttgttaaaaaaaaaaagattggtttttactttgaagtttgcggcatgatggtggaaagtgtaaatgctaaaacactgatgagtagaatttgatgtttattaaggtttttttttttttttt

SEQ ID NO: 781692 - DNA, 120 bp, Artificial Sequence
  ENSG00000253846_40 (sequence is synthesized)
ttttactttctggtaaaattcacctagtctcaatcaaggcctatatatcataaggctttgttatgattagctttgcagaaccttgtagtttatagtgttgttgagtacaatattgacaat

SEQ ID NO: 781693 - DNA, 120 bp, Artificial Sequence
  ENSG00000253846_41 (sequence is synthesized)
tcctaagacagacttccatacagaagtgcctgtcaatttatatttcctcctgggtggtcacatattgaaactccagccccttaagcaaccctcttgttctgaaggcaggtctggtaagaa

SEQ ID NO: 781694 - DNA, 120 bp, Artificial Sequence
  ENSG00000253846_42 (sequence is synthesized)
taggtaagtatcagaaagaaatcacctctggaaacacaacccaaatccaagaatactcaatgcagttcttcccaaggagaagggcaataggcctttttcaaactacattttatatatttt

SEQ ID NO: 781695 - DNA, 120 bp, Artificial Sequence
  ENSG00000253846_43 (sequence is synthesized)
tcaatctatactttgtggtgatagttgcagttgaatatactaagtttttcattaatattgaattaacaatttatttataacaatgtatgcttagatttttccagccctatttataactga

SEQ ID NO: 781696 - DNA, 120 bp, Artificial Sequence
  ENSG00000253846_44 (sequence is synthesized)
taacactgcagtatcctttttgcatacaattctctaatttcacactgctatgtggaagatatagcattttaatttaactttcattgctcaatagggatcctgaggaggctatagagggtg

SEQ ID NO: 781697 - DNA, 120 bp, Artificial Sequence
  ENSG00000253846_45 (sequence is synthesized)
aaattaagaatatttgggattctgcttttgtcttttttgttaaattttctagtgactaaggctgaaagtaaatatgggttgggaagacagataaatttgtacatgttcccgagaacagga

SEQ ID NO: 781698 - DNA, 120 bp, Artificial Sequence
  ENSG00000253846_46 (sequence is synthesized)
gcaagagatatatgacaaagctatttcagtggctctttaatgtataaggaggcaaacacctgaaactctgaaaactctgaaattgagaggcaaaataaacttagagtcaagaaagaaatg

SEQ ID NO: 781699 - DNA, 120 bp, Artificial Sequence
  ENSG00000253846_47 (sequence is synthesized)
ccatttctgcagatcagaatataaacaccaaccacagctgtaaaaaagaaaagaatatatgcaacgaagggaaattatataaacaaaggatcattggaggtactgatgagttcatttagt

SEQ ID NO: 781700 - DNA, 120 bp, Artificial Sequence
  ENSG00000253846_48 (sequence is synthesized)
tcaatgaaaatagtgacgtattaggtagatctcttaattttattactagtattctactaaatgtggtagtataaagtcaaaaagcattccgaagtttctcaagacccttataattccatg

SEQ ID NO: 781701 - DNA, 120 bp, Artificial Sequence
  ENSG00000253846_49 (sequence is synthesized)
atttttttcaggtcagtcaacatttgttgaatgataggtctgtggaaggaaagcacactctttagggtcatagttattaactattaaaccattgaaactattattttatatttgtgttaa

SEQ ID NO: 781702 - DNA, 120 bp, Artificial Sequence
  ENSG00000253846_50 (sequence is synthesized)
tgagagtcaaaattattgtgcattcatctcaaataattctattattttgaaaaatacaggttttttttttaaaaaaaactgctcttgacattgtagctattgtgagaaaatattttgatt

SEQ ID NO: 781703 - DNA, 120 bp, Artificial Sequence
  ENSG00000253846_51 (sequence is synthesized)
ataattatttaaaagcaatacaggacaccctggatgatggtaatgactagggcaatggttgcattccagtacttaagtatgaaataaggaattattactttctgggtgaatataggctag

SEQ ID NO: 781704 - DNA, 120 bp, Artificial Sequence
  ENSG00000253846_52 (sequence is synthesized)
aattgaagacaaaaaaatttgttgcttatcttcagtacttccagcttcatagataattactcttaaaaggaacaagaatgactgcctctggatggaggaattggatagcaatgggccgtg

SEQ ID NO: 781705 - DNA, 120 bp, Artificial Sequence
  ENSG00000253846_53 (sequence is synthesized)
ggataggagacctataaaccttcatgctatattattttgtgcctttttaaattttgaagaaaaaatattcatttattcaagatatatgtaaattcagtaaataaaaagatatgatagtta

SEQ ID NO: 781706 - DNA, 120 bp, Artificial Sequence
  ENSG00000253873_0 (sequence is synthesized)
accacacaaagcggaatgagatggatactcacagatcctgacactggagacttagaagtattttccttcgctttctgatatattttggatgtagtcggcctaggacttcatagatacata

SEQ ID NO: 781707 - DNA, 120 bp, Artificial Sequence
  ENSG00000253873_1 (sequence is synthesized)
agccgattcacaaccaaccagctcgagaaaccgcggaatatcggcttagagcctgccatggcgaatcggctacagcgcggggaccgcagtcggctgctgctgctgctgtgcattttcctg

SEQ ID NO: 781708 - DNA, 120 bp, Artificial Sequence
  ENSG00000253873_2 (sequence is synthesized)
gggacgctgcgggggttccgggccaggcagatccgatattcggtgccagaagagaccgaaaagggctccttcgtgggcaatatctccaaggacctggggctggagccccgggagctggcg

SEQ ID NO: 781709 - DNA, 120 bp, Artificial Sequence
  ENSG00000253873_3 (sequence is synthesized)
aagcgcggagtccgcatcgtctccagagggaagacacagcttttcgctgtgaatccgcgaagcggcagcttgatcacggcaggcaggatagaccgggaggagctctgtgagacggtgtcc

SEQ ID NO: 781710 - DNA, 120 bp, Artificial Sequence
  ENSG00000253873_4 (sequence is synthesized)
tcctgttttttaaatatggaacttctcgtggaagacaccttgaagatttacggagtggaggtggaaataatagatattaatgataacgcccccagcttccaggaggacgaagtggagata

SEQ ID NO: 781711 - DNA, 120 bp, Artificial Sequence
  ENSG00000253873_5 (sequence is synthesized)
aaagtcagtgagcacgcaattcctggggcgcgatttgctcttcctaatgctagggatccagatgtgggcgtgaactccctccagagctaccagctcagccctaataattacttttccttg

SEQ ID NO: 781712 - DNA, 120 bp, Artificial Sequence
  ENSG00000253873_6 (sequence is synthesized)
caactgcggggcagaacggatggggccaagaatccagagctagtactggagggaagcctggaccgagagaaagaggctgctcacctgctcctcctcacagctttagatggaggcgatccc

SEQ ID NO: 781713 - DNA, 120 bp, Artificial Sequence
  ENSG00000253873_7 (sequence is synthesized)
atccgaaagggcgcagttcccattcgtgtggtggtcctcgatgtaaatgatcacatcccaatgtttacacagtccgtatatcgcgtgagtgttccagaaaacatcagctccggaactcgg

SEQ ID NO: 781714 - DNA, 120 bp, Artificial Sequence
  ENSG00000253873_8 (sequence is synthesized)
gtgctgatggttaatgcaacggatccagacgagggaatcaacggggaagtaatgtattcatttcggaacatggaaagcaaggcttctgaaatattccaattggattcacaaactggagaa

SEQ ID NO: 781715 - DNA, 120 bp, Artificial Sequence
  ENSG00000253873_9 (sequence is synthesized)
gttcaagtacgggggtctctggattttgaaaaatatagattctatgagatggaaattcaaggccaagatggtggaggtctctttaccaccacgacgatgttgatcactgttgtggatgtg

SEQ ID NO: 781716 - DNA, 120 bp, Artificial Sequence
  ENSG00000253873_10 (sequence is synthesized)
aatgataacgctccagaaataactatcacctcttctattaattcaattctggaaaactctcctccaggtacagtgattgctcttctaaatgtgcaagatcaagattctggagaaaatggt

SEQ ID NO: 781717 - DNA, 120 bp, Artificial Sequence
  ENSG00000253873_11 (sequence is synthesized)
caagtctcctgttttattcctaaccacctgccttttaaattagaaaagacttatggaaattattacaaattgataacaagcagagtgctggacagggagttggtccagagctacaatata

SEQ ID NO: 781718 - DNA, 120 bp, Artificial Sequence
  ENSG00000253873_12 (sequence is synthesized)
acgttgacagccacagaccagggaagcccgcctttgtctgcagaaactcatgtctggctgaatgtggcagatgacaacgataaccctcccgtttttcctcactcctcttactctgcctac

SEQ ID NO: 781719 - DNA, 120 bp, Artificial Sequence
  ENSG00000253873_13 (sequence is synthesized)
attcccgaaaacaaccccaggggtgcctccatcttctcagtgaccgccctcgacccggacagcaaacagaatgccctggtcacttactctctgacggatgacactgtccagggggtgcct

SEQ ID NO: 781720 - DNA, 120 bp, Artificial Sequence
  ENSG00000253873_14 (sequence is synthesized)
ctgtcctcctatgtctctattaactccaacactggtgttctctatgccctacaatccttcgactatgagcagtttcgagacttagaactgagagtgatagcacgtgacagcggggacccg

SEQ ID NO: 781721 - DNA, 120 bp, Artificial Sequence
  ENSG00000253873_15 (sequence is synthesized)
cccctcagcagcaacgtgtcgctgagcctgttcgtgctggaccagaacgacaatgcgcccgagatcctgtaccctgccctccccacagacggctccactggcgtggagctggcgccccgc

SEQ ID NO: 781722 - DNA, 120 bp, Artificial Sequence
  ENSG00000253873_16 (sequence is synthesized)
tctgcggaacctggctacctggtgaccaaggtggttgcggtggacaaagattcaggccagaacgcctggctgtcctatcgcctgcttaaggccagcgagccgggactcttcgcggtgggg

SEQ ID NO: 781723 - DNA, 120 bp, Artificial Sequence
  ENSG00000253873_17 (sequence is synthesized)
gagcacacgggcgaggtgcgtacagcgcgggcactgctggacagagacgcgctcaagcagagcctcgtggtggccgtccaggaccacggccagccccctctctcggccaccgtcacgctc

SEQ ID NO: 781724 - DNA, 120 bp, Artificial Sequence
  ENSG00000253873_18 (sequence is synthesized)
accgtggctgtggccgacagcatccccgaagtcctggcggacctcggcagcctcgagtctctggctaactctgaaacctcagacctctcgctgtacttggtggtggcggtggccgcagtc

SEQ ID NO: 781725 - DNA, 120 bp, Artificial Sequence
  ENSG00000253873_19 (sequence is synthesized)
cacgtcacattttgtaggcgtggacggggtacaggctttcctgcaaacctattcccacgaggtctctctcattgcggactcgcagaagagtcacctgattttcccccagcccaactatgg

SEQ ID NO: 781726 - DNA, 120 bp, Artificial Sequence
  ENSG00000253873_20 (sequence is synthesized)
ggacacgctcatcagccaggagagctgtgagaaaagcgagccactcttgatagctgaagactcagctatcattttaggcaaatgtgacccgacaagtaatcagcaagccccgcccaacac

SEQ ID NO: 781727 - DNA, 120 bp, Artificial Sequence; identical to SEQ ID NO: 80682
  ENSG00000253873_21 (sequence is synthesized)

SEQ ID NO: 781728 - DNA, 120 bp, Artificial Sequence; identical to SEQ ID NO: 80683
  ENSG00000253873_22 (sequence is synthesized)

SEQ ID NO: 781729 - DNA, 120 bp, Artificial Sequence; identical to SEQ ID NO: 80684
  ENSG00000253873_23 (sequence is synthesized)

SEQ ID NO: 781730 - DNA, 120 bp, Artificial Sequence; identical to SEQ ID NO: 80685
  ENSG00000253873_24 (sequence is synthesized)

SEQ ID NO: 781731 - DNA, 120 bp, Artificial Sequence; identical to SEQ ID NO: 80686
  ENSG00000253873_25 (sequence is synthesized)

SEQ ID NO: 781732 - DNA, 120 bp, Artificial Sequence; identical to SEQ ID NO: 80687
  ENSG00000253873_26 (sequence is synthesized)

SEQ ID NO: 781733 - DNA, 120 bp, Artificial Sequence; identical to SEQ ID NO: 80688
  ENSG00000253873_27 (sequence is synthesized)

SEQ ID NO: 781734 - DNA, 120 bp, Artificial Sequence; identical to SEQ ID NO: 80689
  ENSG00000253873_28 (sequence is synthesized)

SEQ ID NO: 781735 - DNA, 120 bp, Artificial Sequence; identical to SEQ ID NO: 80690
  ENSG00000253873_29 (sequence is synthesized)

SEQ ID NO: 781736 - DNA, 120 bp, Artificial Sequence; identical to SEQ ID NO: 80691
  ENSG00000253873_30 (sequence is synthesized)

SEQ ID NO: 781737 - DNA, 120 bp, Artificial Sequence; identical to SEQ ID NO: 80692
  ENSG00000253873_31 (sequence is synthesized)

SEQ ID NO: 781738 - DNA, 120 bp, Artificial Sequence; identical to SEQ ID NO: 80693
  ENSG00000253873_32 (sequence is synthesized)

SEQ ID NO: 781739 - DNA, 120 bp, Artificial Sequence; identical to SEQ ID NO: 80694
  ENSG00000253873_33 (sequence is synthesized)

SEQ ID NO: 781740 - DNA, 120 bp, Artificial Sequence; identical to SEQ ID NO: 80695
  ENSG00000253873_34 (sequence is synthesized)

SEQ ID NO: 781741 - DNA, 120 bp, Artificial Sequence; identical to SEQ ID NO: 80696
  ENSG00000253873_35 (sequence is synthesized)

SEQ ID NO: 781742 - DNA, 120 bp, Artificial Sequence; identical to SEQ ID NO: 80697
  ENSG00000253873_36 (sequence is synthesized)

SEQ ID NO: 781743 - DNA, 120 bp, Artificial Sequence; identical to SEQ ID NO: 80698
  ENSG00000253873_37 (sequence is synthesized)

SEQ ID NO: 781744 - DNA, 120 bp, Artificial Sequence; identical to SEQ ID NO: 80699
  ENSG00000253873_38 (sequence is synthesized)

SEQ ID NO: 781745 - DNA, 120 bp, Artificial Sequence
  ENSG00000253873_39 (sequence is synthesized)
atgttttttgagcctgttatgaaaactgtttggggggggggtggggcggcatatatttagttcatatatatttagagcaatacatgtgagttttactttgcctttcatgagattacgata

SEQ ID NO: 781746 - DNA, 120 bp, Artificial Sequence
  ENSG00000253873_40 (sequence is synthesized)
atctttcagaacgtttttgtgaaagtcatttttcaatcttggcatattttcttttgatttcaaaggggccattcaactatgctggtttggtttgaagtaagttgaattttagtattattt

SEQ ID NO: 781747 - DNA, 120 bp, Artificial Sequence
  ENSG00000253873_41 (sequence is synthesized)
ttctattatcagtgtatgaggctctcaatttattatatatagatacaaattaatgattcacaaacactttttatttccatttcaattttgctgtgccttcactgatttgtagttatattc

SEQ ID NO: 781748 - DNA, 120 bp, Artificial Sequence
  ENSG00000253873_42 (sequence is synthesized)
caccattatttgctattactgctaatgttcaaattttgatcctgttgatttaatagcatgctccctctagctctccttctcatctatctatctatacacatgcacacacacttatacacg

SEQ ID NO: 781749 - DNA, 120 bp, Artificial Sequence
  ENSG00000253873_43 (sequence is synthesized)
taagcttttctctgagcaattttattttgattcttggtggctggtaatatgcttagatcctgttgactatttcaactttgtctcatttcttcatcctatcaacacagacatattgactgg

SEQ ID NO: 781750 - DNA, 120 bp, Artificial Sequence
  ENSG00000253873_44 (sequence is synthesized)
cttttaactactggatttccttgggagataaaatttagatcacattttttcttaagctctagatgtcttttccattactatggtgaagttacattgactgttctgaggaaataattgaat

SEQ ID NO: 781751 - DNA, 120 bp, Artificial Sequence
  ENSG00000253873_45 (sequence is synthesized)
tattgaactggtattatttccttttattcttttactttggtgtctgtgtttgtatgtatggaaggttttttaatgtagtaaatccatatatagaaataacttgattttgattcagtgctt

SEQ ID NO: 781752 - DNA, 120 bp, Artificial Sequence
  ENSG00000253873_46 (sequence is synthesized)
ctcaaaaacctattttcaaatgtgctaaagatgtctacagatttattcaaatagagtagtttgtgaatatataaatagattgaaggtatttggactttaattaaactgatttagctagta

SEQ ID NO: 781753 - DNA, 120 bp, Artificial Sequence
  ENSG00000253910_0 (sequence is synthesized)
atgaaagcgagctcagggaggtgcgggctggtgcggtggctgcaggtactgttgcccttcctgttgtctttgttccccggggctctcccagtccagatccgctattcaattccagaggag

SEQ ID NO: 781754 - DNA, 120 bp, Artificial Sequence
  ENSG00000253910_1 (sequence is synthesized)
ctggccaaaaactcggtcgtaggaaacctcgccaaggatctggggctcagcgtccgggacttgccagcccggaagctgcgggttagcgcggagaaggaatatttcacagtaaacccagaa

SEQ ID NO: 781755 - DNA, 120 bp, Artificial Sequence
  ENSG00000253910_2 (sequence is synthesized)
agcggagacttacttgtgagtgacagaatagaccgagaacagatatgcgggaagcagcctctgtgtgttctggatttcgatactgtcgctgaaaatccactaaatattttctacatagca

SEQ ID NO: 781756 - DNA, 120 bp, Artificial Sequence
  ENSG00000253910_3 (sequence is synthesized)
gtaattgtgcaggatataaatgataataccccgctattcaaacagactaagattaatttaaaaattggcgaatccactaagccaggtacaacatttccacttgacccagccctggattca

SEQ ID NO: 781757 - DNA, 120 bp, Artificial Sequence
  ENSG00000253910_4 (sequence is synthesized)
gatgttggtcctaactcactacaaagataccaccttaatgacaacgagtactttgatctcgctgagaaacagactccagatggtcgtaaatatcctgagttgattctaaaacactctctg

SEQ ID NO: 781758 - DNA, 120 bp, Artificial Sequence
  ENSG00000253910_5 (sequence is synthesized)
gacagagaagagcacagtttacatcaattggtcctcacagctgtggatggcggagacccacctcaaagtggcacgacccaaatccgaatcaaagtcacggatgccaacgataaccctcca

SEQ ID NO: 781759 - DNA, 120 bp, Artificial Sequence
  ENSG00000253910_6 (sequence is synthesized)
gtgttcagccaggacgtgtacagggtcaccctgagggaggacgtgccgccgggcttctttgtgcttcaagtgacagccaccgaccgggatgaaggcataaacgcagagatcacctactcc

SEQ ID NO: 781760 - DNA, 120 bp, Artificial Sequence
  ENSG00000253910_7 (sequence is synthesized)
tttcataatgtggacgaacaagtgaaacactttttcaacttaaatgaaaaaacaggagaaatcacgacaaaggatgatttggattttgagattgcaagtagttacactctgagtatcgaa

SEQ ID NO: 781761 - DNA, 120 bp, Artificial Sequence
  ENSG00000253910_8 (sequence is synthesized)
gcaaaagatcctggagatctagcagcccactgcagtatccaagttgaaattcttgatgacaacgattgtgcacctgaagttattgtgacttcagtatctactcccctaccggaggattcg

SEQ ID NO: 781762 - DNA, 120 bp, Artificial Sequence
  ENSG00000253910_9 (sequence is synthesized)
ccaccaggaacagtgatcgccttgataaaaacgagagacagagactctggagaaaatggagaagtttactgccaagtgttgggaaatgccaagtttattttgaaatcttcctcaaagaac

SEQ ID NO: 781763 - DNA, 120 bp, Artificial Sequence
  ENSG00000253910_10 (sequence is synthesized)
tattacaaactagtgacagacggcgctctggaccgggaggagatcccagaatacaatctcaccatcacagccaccgacgggggcaagccgcccctctcctccagcataattgtcaccctg

SEQ ID NO: 781764 - DNA, 120 bp, Artificial Sequence
  ENSG00000253910_11 (sequence is synthesized)
cacatctccgacgtcaacgataatgccccagttttccaacagacttcctacatggttcacgtggcagagaacaatcctcctggcgcctctatcgctcaaatcagtgcctctgaccctgac

SEQ ID NO: 781765 - DNA, 120 bp, Artificial Sequence
  ENSG00000253910_12 (sequence is synthesized)
ttgggccccagtggccaagtttcctactccatcgtagcgagcgacctgaagccgcgggagattttatcctacgtgtccgtgagcgcgcagagcggggtggtgttcgcgcagcgcgccttc

SEQ ID NO: 781766 - DNA, 120 bp, Artificial Sequence
  ENSG00000253910_13 (sequence is synthesized)
gatcatgagcagctgcgcgccttcgagctcacactgcaggcccgcgaccagggctcgcccgcgctcagcgccaacgtgagcctgcgcgtgttagtgggcgacctcaatgacaatgcgcca

SEQ ID NO: 781767 - DNA, 120 bp, Artificial Sequence
  ENSG00000253910_14 (sequence is synthesized)
acctcaatgacaatgcgccacgggtgctgtaccccgcgctggggcctgatggctccgccctcttcgatatggtgccacgcgccgcagagcccggctacctggtgaccaaggtggtggcgg

SEQ ID NO: 781768 - DNA, 120 bp, Artificial Sequence
  ENSG00000253910_15 (sequence is synthesized)
aacgcttggctgtcctaccacgtgctgcaggccagcgagcccgggctcttcagcctggggttgcgcacgggtgaggtgcgcacagcgcgtgccttgggcgacagggacgcggcccgccag

SEQ ID NO: 781769 - DNA, 120 bp, Artificial Sequence
  ENSG00000253910_16 (sequence is synthesized)
cgcctgctggtcgctgtgcgtgatggaggacagccgccactctccgctacggccacgctgcacctaatcttcgcggatagcctgcaagaggtattgccagacctcagcgaccgccgggag

SEQ ID NO: 781770 - DNA, 120 bp, Artificial Sequence
  ENSG00000253910_17 (sequence is synthesized)
ccctctgacccccaggcaaaactgcagttttacctggttgtggccttggccttgatctcagtgctcttcttcctcgcggtgattctggcaatctccctgcgcctgcgactctcttccagg

SEQ ID NO: 781771 - DNA, 120 bp, Artificial Sequence
  ENSG00000253910_18 (sequence is synthesized)
tcagatgcttgggactgttttcagcctggtctcagctccaagcctggacctggggttctccccaattacagtgagggtacattgccctattcctacaacctgtgtgttgcctcacaatca

SEQ ID NO: 781772 - DNA, 120 bp, Artificial Sequence
  ENSG00000253910_19 (sequence is synthesized)
gttcccgcgcaagatctcgtctgtgacaatgcctcttgggaacaaaatacaaatcatggagccgctggggtcccttttgcctcagatactattttgaagcaagccccgcccaacacggac

SEQ ID NO: 781773 - DNA, 120 bp, Artificial Sequence; identical to SEQ ID NO: 773797
  ENSG00000253910_20 (sequence is synthesized)

SEQ ID NO: 781774 - DNA, 120 bp, Artificial Sequence; identical to SEQ ID NO: 773798
  ENSG00000253910_21 (sequence is synthesized)

SEQ ID NO: 781775 - DNA, 120 bp, Artificial Sequence; identical to SEQ ID NO: 773799
  ENSG00000253910_22 (sequence is synthesized)

SEQ ID NO: 781776 - DNA, 120 bp, Artificial Sequence; identical to SEQ ID NO: 773800
  ENSG00000253910_23 (sequence is synthesized)

SEQ ID NO: 781777 - DNA, 120 bp, Artificial Sequence; identical to SEQ ID NO: 773801
  ENSG00000253910_24 (sequence is synthesized)

SEQ ID NO: 781778 - DNA, 120 bp, Artificial Sequence; identical to SEQ ID NO: 773802
  ENSG00000253910_25 (sequence is synthesized)

SEQ ID NO: 781779 - DNA, 120 bp, Artificial Sequence; identical to SEQ ID NO: 773803
  ENSG00000253910_26 (sequence is synthesized)

SEQ ID NO: 781780 - DNA, 120 bp, Artificial Sequence; identical to SEQ ID NO: 773804
  ENSG00000253910_27 (sequence is synthesized)

SEQ ID NO: 781781 - DNA, 120 bp, Artificial Sequence; identical to SEQ ID NO: 773805
  ENSG00000253910_28 (sequence is synthesized)

SEQ ID NO: 781782 - DNA, 120 bp, Artificial Sequence; identical to SEQ ID NO: 773806
  ENSG00000253910_29 (sequence is synthesized)

SEQ ID NO: 781783 - DNA, 120 bp, Artificial Sequence; identical to SEQ ID NO: 773807
  ENSG00000253910_30 (sequence is synthesized)

SEQ ID NO: 781784 - DNA, 120 bp, Artificial Sequence; identical to SEQ ID NO: 773808
  ENSG00000253910_31 (sequence is synthesized)

SEQ ID NO: 781785 - DNA, 120 bp, Artificial Sequence; identical to SEQ ID NO: 773809
  ENSG00000253910_32 (sequence is synthesized)

SEQ ID NO: 781786 - DNA, 120 bp, Artificial Sequence; identical to SEQ ID NO: 773810
  ENSG00000253910_33 (sequence is synthesized)

SEQ ID NO: 781787 - DNA, 120 bp, Artificial Sequence; identical to SEQ ID NO: 773811
  ENSG00000253910_34 (sequence is synthesized)

SEQ ID NO: 781788 - DNA, 120 bp, Artificial Sequence; identical to SEQ ID NO: 773812
  ENSG00000253910_35 (sequence is synthesized)

SEQ ID NO: 781789 - DNA, 120 bp, Artificial Sequence; identical to SEQ ID NO: 773813
  ENSG00000253910_36 (sequence is synthesized)

SEQ ID NO: 781790 - DNA, 120 bp, Artificial Sequence; identical to SEQ ID NO: 773814
  ENSG00000253910_37 (sequence is synthesized)

SEQ ID NO: 781791 - DNA, 120 bp, Artificial Sequence
  ENSG00000253953_0 (sequence is synthesized)
atggggagcggcgccggggagctgggccgggctgagaggctgccagtgctctttctcttcctgctgtctttgttctgcccggcgctctgtgagcagatccgctacaggattcccgaggaa

SEQ ID NO: 781792 - DNA, 120 bp, Artificial Sequence
  ENSG00000253953_1 (sequence is synthesized)
atgcccaagggctccgtagtggggaacctcgccacggacctggggttcagcgtccaggagttaccgactcgaaaactgcgcgtcagttcggagaagccttacttcaccgtgagcgcagag

SEQ ID NO: 781793 - DNA, 120 bp, Artificial Sequence
  ENSG00000253953_2 (sequence is synthesized)
agcggggagttgcttgtgagcagcaggctagacagggaggagatatgcgggaagaagccagcttgtgctctggaatttgaggctgttgctgaaaatccactgaacttttatcacgtgaat

SEQ ID NO: 781794 - DNA, 120 bp, Artificial Sequence
  ENSG00000253953_3 (sequence is synthesized)
gtggagatcgaggacattaatgaccacacgccaaaattcacgcaaaattcctttgagctgcaaataagtgagtctgcacagcctggcacacgatttatattaggatctgcccatgatgcg

SEQ ID NO: 781795 - DNA, 120 bp, Artificial Sequence
  ENSG00000253953_4 (sequence is synthesized)
gatattggtagcaacacactgcagaattaccaactcagtcccagtgatcatttctcactgataaataaagagaaatcagatggcagtaaataccctgagatggtattgaagacacctttg

SEQ ID NO: 781796 - DNA, 120 bp, Artificial Sequence
  ENSG00000253953_5 (sequence is synthesized)
gacagagaaaagcagaaatcctaccacttgactttgactgccttggactttggagctccacccctaagcagcactgcacagatacacgttctagtgactgatgccaatgataatgctcca

SEQ ID NO: 781797 - DNA, 120 bp, Artificial Sequence
  ENSG00000253953_6 (sequence is synthesized)
gtgttcagtcaagacgtatacagggtgagcctttcagaaaacgtgtacccggggaccacggtgctacaggtgactgccacggaccaggatgagggtgtcaatgccgagattactttctct

SEQ ID NO: 781798 - DNA, 120 bp, Artificial Sequence
  ENSG00000253953_7 (sequence is synthesized)
ttcagtgaagctagccagatcacccaatttgacctgaactctaacaccggggaaattactgttttaaatacattagattttgaagaagtcaaagaatattccatagttttggaagcaagg

SEQ ID NO: 781799 - DNA, 120 bp, Artificial Sequence
  ENSG00000253953_8 (sequence is synthesized)
gacggtggaggaatgattgcgcaatgcacagtggaggtagaagtcatagatgaaaatgacaacgccccagaagtgatattccagtctctacccaacctaattatggaggacgccgagctg

SEQ ID NO: 781800 - DNA, 120 bp, Artificial Sequence
  ENSG00000253953_9 (sequence is synthesized)
ggaacacatattgctttgctcaaagtccgtgacaaggattccagacacaatggagaagtgacttgtaaattggaaggtgatgttccatttaaaatattaacttcttcaagaaacacgtat

SEQ ID NO: 781801 - DNA, 120 bp, Artificial Sequence
  ENSG00000253953_10 (sequence is synthesized)
aaattagtgacagatgctgttctagaccgcgagcagaatccagagtacaatataaccgttacggcaacagatcggggcaagcctcccctctcctccagttccagcatcaccctgcacatt

SEQ ID NO: 781802 - DNA, 120 bp, Artificial Sequence
  ENSG00000253953_11 (sequence is synthesized)
ggtgatgtaaatgacaacgctccggttttctcacagtcttcctatatagtccacgtggccgagaacaacccgcctggagcctctatttcacaagtcagggcttctgatccggacttgggg

SEQ ID NO: 781803 - DNA, 120 bp, Artificial Sequence
  ENSG00000253953_12 (sequence is synthesized)
cccaacggccaagtctcttactgcatcatggccagtgacctggagcagcgggagctgtcatcctacgtgtccataagcgcggagagcggggtggtgttcgcgcagcgcgccttcgaccac

SEQ ID NO: 781804 - DNA, 120 bp, Artificial Sequence
  ENSG00000253953_13 (sequence is synthesized)
gagcagctgcgcgccttcgaactcacactgcaggcccgcgaccagggctcgccagcgctcagcgcgaacgtgagcctgcgcgtgttagtggacgaccgcaacgacaatgcgccacgggtg

SEQ ID NO: 781805 - DNA, 120 bp, Artificial Sequence
  ENSG00000253953_14 (sequence is synthesized)
ctgtaccccgcgctgggtcccgacggctctgcgctcttcgatatggtgccgcacgctgcagagcctggctacttggtgaccaaggtagtggcggtggacgcagactcaggacacaacgcc

SEQ ID NO: 781806 - DNA, 120 bp, Artificial Sequence
  ENSG00000253953_15 (sequence is synthesized)
tggctgtcctaccacgtgctgcaggctagcgagcccgggctcttcagcctggggctgcgcacgggcgaagtgcgcacagcgcgtgccttaggcgacagggacgccgtccgccagcgcctt

SEQ ID NO: 781807 - DNA, 120 bp, Artificial Sequence
  ENSG00000253953_16 (sequence is synthesized)
ctggtcgccgtgcgtgacggtggacagccaccactctcggccactgccacgttgcacctggtcttcgccgacagcttgcaggaggtgctgccggatatcactgaccgccccgacccctct

SEQ ID NO: 781808 - DNA, 120 bp, Artificial Sequence
  ENSG00000253953_17 (sequence is synthesized)
gacctccaggctgagctgcagttttacctagtggtggccttggccttgatctcagtgctcttcctcgtggccatgattctggccattgccttgcgcctgcgacgctcctccagccccgcc

SEQ ID NO: 781809 - DNA, 120 bp, Artificial Sequence
  ENSG00000253953_18 (sequence is synthesized)
tcctggagctgcttccagcctggtctctgtgttaaatccgaatccgtggttccccccaactacagcgaggggactttgccttattcctacaatctatgtgttgcacatacaggaaagacg

SEQ ID NO: 781810 - DNA, 120 bp, Artificial Sequence
  ENSG00000253953_19 (sequence is synthesized)
tgtagtgagcagttgagttcaggacaagacatactttgcggtgattcatctggggccttatttccactttgtaattccagtgaattgacttcccatcagcaagccccgcccaacacggac

SEQ ID NO: 781811 - DNA, 120 bp, Artificial Sequence; identical to SEQ ID NO: 773797
  ENSG00000253953_20 (sequence is synthesized)

SEQ ID NO: 781812 - DNA, 120 bp, Artificial Sequence; identical to SEQ ID NO: 773798
  ENSG00000253953_21 (sequence is synthesized)

SEQ ID NO: 781813 - DNA, 120 bp, Artificial Sequence; identical to SEQ ID NO: 773799
  ENSG00000253953_22 (sequence is synthesized)

SEQ ID NO: 781814 - DNA, 120 bp, Artificial Sequence; identical to SEQ ID NO: 773800
  ENSG00000253953_23 (sequence is synthesized)

SEQ ID NO: 781815 - DNA, 120 bp, Artificial Sequence; identical to SEQ ID NO: 773801
  ENSG00000253953_24 (sequence is synthesized)

SEQ ID NO: 781816 - DNA, 120 bp, Artificial Sequence; identical to SEQ ID NO: 773802
  ENSG00000253953_25 (sequence is synthesized)

SEQ ID NO: 781817 - DNA, 120 bp, Artificial Sequence; identical to SEQ ID NO: 773803
  ENSG00000253953_26 (sequence is synthesized)

SEQ ID NO: 781818 - DNA, 120 bp, Artificial Sequence; identical to SEQ ID NO: 773804
  ENSG00000253953_27 (sequence is synthesized)

SEQ ID NO: 781819 - DNA, 120 bp, Artificial Sequence; identical to SEQ ID NO: 773805
  ENSG00000253953_28 (sequence is synthesized)

SEQ ID NO: 781820 - DNA, 120 bp, Artificial Sequence; identical to SEQ ID NO: 773806
  ENSG00000253953_29 (sequence is synthesized)

SEQ ID NO: 781821 - DNA, 120 bp, Artificial Sequence; identical to SEQ ID NO: 773807
  ENSG00000253953_30 (sequence is synthesized)

SEQ ID NO: 781822 - DNA, 120 bp, Artificial Sequence; identical to SEQ ID NO: 773808
  ENSG00000253953_31 (sequence is synthesized)

SEQ ID NO: 781823 - DNA, 120 bp, Artificial Sequence; identical to SEQ ID NO: 773809
  ENSG00000253953_32 (sequence is synthesized)

SEQ ID NO: 781824 - DNA, 120 bp, Artificial Sequence; identical to SEQ ID NO: 773810
  ENSG00000253953_33 (sequence is synthesized)

SEQ ID NO: 781825 - DNA, 120 bp, Artificial Sequence; identical to SEQ ID NO: 773811
  ENSG00000253953_34 (sequence is synthesized)

SEQ ID NO: 781826 - DNA, 120 bp, Artificial Sequence; identical to SEQ ID NO: 773812
  ENSG00000253953_35 (sequence is synthesized)

SEQ ID NO: 781827 - DNA, 120 bp, Artificial Sequence; identical to SEQ ID NO: 773813
  ENSG00000253953_36 (sequence is synthesized)

SEQ ID NO: 781828 - DNA, 120 bp, Artificial Sequence; identical to SEQ ID NO: 773814
  ENSG00000253953_37 (sequence is synthesized)

SEQ ID NO: 781829 - DNA, 120 bp, Artificial Sequence
  ENSG00000253953_38 (sequence is synthesized)
agggcagccccagctcagactccccagcgccagcctttacaccgcttcctcctcggaaaaagaagaattttttcttgaactggaactgcaactaaagtccgttcggagatccaaaaatct

SEQ ID NO: 781830 - DNA, 120 bp, Artificial Sequence
  ENSG00000253953_39 (sequence is synthesized)
tgaattgacttcccatcaggtgagtttcctttaagtataatttaatgctcattgcctacccatttctccatattcacaagaaaatatacatatttgcaggaaaatatataatttttagat

SEQ ID NO: 781831 - DNA, 120 bp, Artificial Sequence
  ENSG00000253953_40 (sequence is synthesized)
gtcatggatcattttaggaaagttgtagtcagttaaaaagctgtcatatcattctacaaaggaggagtaaagtaggagcaattgtgtggcccaacatttgtttgttttttagccaagctt

SEQ ID NO: 781832 - DNA, 120 bp, Artificial Sequence
  ENSG00000253953_41 (sequence is synthesized)
agatttataaagcaatgagggtgtggttttaaccacaaagtgaaagtgttagacagttgttggctctctcctaaaaagtgaatgagatttttcctatacattttccttcttgttgactaa

SEQ ID NO: 781833 - DNA, 120 bp, Artificial Sequence
  ENSG00000253953_42 (sequence is synthesized)
tatatgatgaatacttttttcagcttggatataccataaatataaaaataataaagccaaagaatttaagctaaaattcaacacttttcttaactaatttaactggtatggtctccatag

SEQ ID NO: 781834 - DNA, 120 bp, Artificial Sequence
  ENSG00000253953_43 (sequence is synthesized)
tagtccactgttttgtttcctgtgttaacttcccttttgtttcaaaagctcttagaataaggagtcaactggatttttatgtccatggaccccttgtgattatatgcagtgtacgctgtg

SEQ ID NO: 781835 - DNA, 120 bp, Artificial Sequence
  ENSG00000253953_44 (sequence is synthesized)
tgtgcgtgtgtgtgtgtgtgtgtgtgagagagatccttttacttagaaaaaggtctactatgctcattagaagatcaaaagcagattctccttacttgtaacataggagtttcaggatta

SEQ ID NO: 781836 - DNA, 120 bp, Artificial Sequence
  ENSG00000253953_45 (sequence is synthesized)
atctgtattcaagctcattctatatccttcatcaaagaaaagacaatgttttgtgtctgttgtccctctcacacacagccctaatatataatgtgtaactgccttatctgcagccctaaa

SEQ ID NO: 781837 - DNA, 120 bp, Artificial Sequence
  ENSG00000253953_46 (sequence is synthesized)
ctaatatagctagaggtcttctaatcattctcctacctctaggaaagaaatatagtcttgaaaactgccaatctggtgtgcatacaaaatatatacaaaataccaaggaacattatatga

SEQ ID NO: 781838 - DNA, 120 bp, Artificial Sequence
  ENSG00000253953_47 (sequence is synthesized)
aaggaacattatatgagccttttgctaggtatatctaagcaactgcttcagttaatggccactttacaaattgctgaaagaaggaaacgtctttcgattcttttttttttcttttttttt

SEQ ID NO: 781839 - DNA, 120 bp, Artificial Sequence
  ENSG00000253953_48 (sequence is synthesized)
ctgtctgttactcaggctgtagtgcagtggcacaatgatagctccctccagcctcaaactcctgggctcaagcattccttctgcatcagcctcctgactagctggaactcaggctcatgc

SEQ ID NO: 781840 - DNA, 120 bp, Artificial Sequence
  ENSG00000253953_49 (sequence is synthesized)
caccagacctggctaatttttctgttttcagtagagaaaatattttctttcactaatttaactggtatggtttccattgtctacccagttttccatatgcataagaaaatatattcacag

SEQ ID NO: 781841 - DNA, 120 bp, Artificial Sequence
  ENSG00000253953_50 (sequence is synthesized)
gaaaatataaagttttcagatttcatgagtggttttaagaaagttttagtcagtgaaaaaactatcataccagtcttcaaaggaagggtgaaataagttcatctgctacgttgcccaggc

SEQ ID NO: 781842 - DNA, 120 bp, Artificial Sequence
  ENSG00000253953_51 (sequence is synthesized)
tggtcttgaagggaaacagacttttttgtagtcatacttatcctttggcttcttagtaagtattatatagtcattactttttgcagttttttagatcaaagtgttaatgtaggtaaagtt

SEQ ID NO: 781843 - DNA, 120 bp, Artificial Sequence
  ENSG00000253953_52 (sequence is synthesized)
aattttagaatatatgtaaaagtcaagtctgctttaaatttaatcatctctttggtgaaagggatgggatggagctttgctttttatcatatattcatctgtacctttcaagtattcaaa

SEQ ID NO: 781844 - DNA, 120 bp, Artificial Sequence
  ENSG00000253953_53 (sequence is synthesized)
tagaaaaatataaacaatgtaaataaaatagcaaaacaatgtaatatctcataaaactgcaatggtaaaagcatttatcctattgaaattccacaatttttatttgaaaatattatcgac

SEQ ID NO: 781845 - DNA, 120 bp, Artificial Sequence
  ENSG00000253953_54 (sequence is synthesized)
atgtaattcaagtggcatttagaagaataatttaaaagcaacaactctatagaaagcttgtaaaatgattaagtagtttaaaccaaataaaacaatttctgagtcagtcatctccagtag

SEQ ID NO: 781846 - DNA, 120 bp, Artificial Sequence
  ENSG00000253953_55 (sequence is synthesized)
gtctattttagtctcaagataaattcatttctggtgacaactgaagttcttagttatttgttagtatatattggagacatttacaataaagcttagagcacaatgggaaatgaaagtatc

SEQ ID NO: 781847 - DNA, 120 bp, Artificial Sequence
  ENSG00000253953_56 (sequence is synthesized)
atgttttttttaagaccaaatgtattgcagaaatgtgagtaatttaatccgatgctacaatctgatcattctgatctaatctgatcatttaataacactaaataaaaccttcatctcaca

SEQ ID NO: 781848 - DNA, 120 bp, Artificial Sequence
  ENSG00000253958_0 (sequence is synthesized)
aggcgtggcccagccgcccggctgcaaggtggggtgtccccgccgctcggatccccatctcacctgccgcgggcgaggtggccccgccgcttcctgcgctcacctcgggtccctccctcc

SEQ ID NO: 781849 - DNA, 120 bp, Artificial Sequence
  ENSG00000253958_1 (sequence is synthesized)
ctcccgggccaggtttggccgcggcagccgcccctgggcgcccgcgcccggacccgcggtttcggtcagacccgcccgcgggctggtttcgattagggccagtaggagggcggagcggcc

SEQ ID NO: 781850 - DNA, 120 bp, Artificial Sequence
  ENSG00000253958_2 (sequence is synthesized)
cgccaggagggaactagcctaagtggggacggtccccgtgcaggagacaaagagcgtccctggagcgatcagggctcaggagcccgacccggagcccggggcgtccgcgctgacttcggg

SEQ ID NO: 781851 - DNA, 120 bp, Artificial Sequence
  ENSG00000253958_3 (sequence is synthesized)
tccccggagcctggggcacggcagggagaagacgacggcggagaaggcgacagcggagaaggaaggcaggctgcaggggcgccgtcggcgcggcgggccgggatgcggacgccggtggtg

SEQ ID NO: 781852 - DNA, 120 bp, Artificial Sequence
  ENSG00000253958_4 (sequence is synthesized)
atgacgctgggcatggtgttggcgccctgcgggctcctgctcaacctgaccggcaccctggcgcccggctggcggctggtgaagggcttcctgaaccagccagtggacgtggagttgtac

SEQ ID NO: 781853 - DNA, 120 bp, Artificial Sequence
  ENSG00000253958_5 (sequence is synthesized)
cagggcctgtgggacatgtgtcgcgagcagagcagccgcgagcgcgagtgcggccagacggaccagtggggctacttcgaggcccagcccgtgctggtggcgcgggcactcatggtcacc

SEQ ID NO: 781854 - DNA, 120 bp, Artificial Sequence
  ENSG00000253958_6 (sequence is synthesized)
tcgctggccgccacggtcctggggcttctgctggcgtcgctgggcgtgcgctgctggcaggacgagcccaacttcgtgctggcagggctctcgggcgtcgtgctcttcgtcgctggcctc

SEQ ID NO: 781855 - DNA, 120 bp, Artificial Sequence
  ENSG00000253958_7 (sequence is synthesized)
ctcggcctcatcccggtgtcctggtacaaccacttcttgggggaccgcgacgtgctgcccgccccggccagcccggtcacggtgcaggtcagctacagcctggtcctgggctacctgggc

SEQ ID NO: 781856 - DNA, 120 bp, Artificial Sequence
  ENSG00000253958_8 (sequence is synthesized)
agctgcctcctgctgctgggcggcttctcgctggcgctcagcttcgcgccctggtgcgacgagcgttgtcgccgccgccgcaagggaccctccgccgggcctcgccgcagcagcgtcagc

SEQ ID NO: 781857 - DNA, 120 bp, Artificial Sequence
  ENSG00000253958_9 (sequence is synthesized)
accatccaagtggagtggcccgagcccgacctggcgcccgccatcaagtactacagcgacggccagcaccgaccgccgcctgcccagcaccgcaagcccaagcccaagcccaaggtcggc

SEQ ID NO: 781858 - DNA, 120 bp, Artificial Sequence
  ENSG00000253958_10 (sequence is synthesized)
ttccccatgccgcggccgcggcccaaggcctacaccaactcggtggacgtcctcgacggggaggggtgggagtcccaggacgctccctcgtgcagcacccacccctgcgacagctcgctg

SEQ ID NO: 781859 - DNA, 120 bp, Artificial Sequence
  ENSG00000253958_11 (sequence is synthesized)
ccctgcgactccgacctctagacgcttgtagagcctggggggcgccgggtggcaaaggactcacccccgcacaggcccgcctggcttcgagttggaacccggacacttgcccctcactgg

SEQ ID NO: 781860 - DNA, 120 bp, Artificial Sequence
  ENSG00000253958_12 (sequence is synthesized)
tgtggatggaaatctgcctttcgtgggaccaaacaggactccttggacgattagttcaggttgggtttggttttcttcttaaagagtttagttttcctctccagagggatcagggtcctc

SEQ ID NO: 781861 - DNA, 120 bp, Artificial Sequence
  ENSG00000253958_13 (sequence is synthesized)
ttagggagtgacgggcttttcatatatttttgctgaagaatatatggaaagggtggcatttgcgtcacgtggaccagggacagtgctgaaatcagcagtgctcagaaacaatttaacatg

SEQ ID NO: 781862 - DNA, 120 bp, Artificial Sequence
  ENSG00000253958_14 (sequence is synthesized)
ttgaaacgacaatattctaaaatactgatgaatcttgcatcaatataattattgggttttttttctttttcctgctgtataactccttgccatgcaaactctcaagaggccaatatattc

SEQ ID NO: 781863 - DNA, 120 bp, Artificial Sequence
  ENSG00000253958_15 (sequence is synthesized)
ctggccatgtttgaatgagcctcttaaaataaacttagagccatgcaaatgccagcagcttaatggatttcatggaatgaaataccgtgattaactcatagctacatatcattgcataaa

SEQ ID NO: 781864 - DNA, 120 bp, Artificial Sequence
  ENSG00000253958_16 (sequence is synthesized)
tgggatttatcttttttctcacttatttttgcggtgaaagtcgagggcatgcaagagtttctcttccagaagccaagaggagaacaaaggtcctaatgctgtactattccaccctttgga

SEQ ID NO: 781865 - DNA, 120 bp, Artificial Sequence
  ENSG00000253958_17 (sequence is synthesized)
cgcctcatccaggacgcagaggactctaggtttaacattttgtacaaaatggaacctgttaatcatattaaagcacatatgtatatatcttttatttataaataaaattttaaaacaata

SEQ ID NO: 781866 - DNA, 120 bp, Artificial Sequence
  ENSG00000254004_0 (sequence is synthesized)
aggagtgcgcaggcgcggaatctccgacttgccatggtcgtctttgtctgccggcctgcttccttgtatatccacaggagctgcaaaacctcttagagttctaagggcgctccctgaatt

SEQ ID NO: 781867 - DNA, 120 bp, Artificial Sequence
  ENSG00000254004_1 (sequence is synthesized)
ttgggatgctgctttgttccccaaccataacatccaagtccagtgtcatttttctgctcacaagtttaaagtcagcacttaaaagaacagcaacagatgattgagaaagaaatgtaaaga

SEQ ID NO: 781868 - DNA, 120 bp, Artificial Sequence
  ENSG00000254004_2 (sequence is synthesized)
aggttctctttgtgtgagtaagcaagaacctgaagaagcctgggaagtttataaacagataaagacgcaacatgaaagacttgtaagttaagtctcatctttctctgtgaaaagacagac

SEQ ID NO: 781869 - DNA, 120 bp, Artificial Sequence
  ENSG00000254004_3 (sequence is synthesized)
tgagggaaaatttaggaaacaaagtatttcctctgaacagtcattgattcttcaagactacccttctgtgtatggaactcagtttaaaagaatttgaaacctaatttatatacaatctat

SEQ ID NO: 781870 - DNA, 120 bp, Artificial Sequence
  ENSG00000254004_4 (sequence is synthesized)
acctaaatatgggagaagctatataagaaccattaagaatataaagagaatgttacattttatccctttttgtaatcatctcatctcagggtaatcaatgtgagaaaagtcttccatcat

SEQ ID NO: 781871 - DNA, 120 bp, Artificial Sequence
  ENSG00000254004_5 (sequence is synthesized)
aaatttaacttcattagatacctgagaattaatattgaaaatacaccatatgaatttagtgaatgtgggaaagctttcatccttattacatcttatttgatactagggaaatctcctgat

SEQ ID NO: 781872 - DNA, 120 bp, Artificial Sequence
  ENSG00000254004_6 (sequence is synthesized)
taaattcacatgcatgataggcatgttggaaagtcttcagcatgaatcagatctccttcagcatgatcaaattcatactggagagaaaccttatgaatgtaatgaatgtagaaaaacttt

SEQ ID NO: 781873 - DNA, 120 bp, Artificial Sequence
  ENSG00000254004_7 (sequence is synthesized)
tagcctgaagcaaaaccttgtagagcataagaaaatgcatactggagagaaatctcatgaatgcactgaatgtggtaaagtgtgctctcgagtctcatctcttactctacaccttagaag

SEQ ID NO: 781874 - DNA, 120 bp, Artificial Sequence
  ENSG00000254004_8 (sequence is synthesized)
tcacacaggaaagaaggcatataaatgtaataaatgtggaaaagccttcagccagaaggaaaacttcctttctcatcagaaacatcacactggagagaaaccttatgaatgtgaaaaagt

SEQ ID NO: 781875 - DNA, 120 bp, Artificial Sequence
  ENSG00000254004_9 (sequence is synthesized)
ttctattcagatgccaaccatcatcagacaccagaaaaatcatacaggaaccaaaccctatgcatgtaaggaatgtggcaaagcctttaacggcaaagcatatctcactgagcatgagaa

SEQ ID NO: 781876 - DNA, 120 bp, Artificial Sequence
  ENSG00000254004_10 (sequence is synthesized)
aattcatactggagaaaaaccatttgaatgtaatcagtgtggaagagccttcagccagaagcaatacctcattaaacatcagaacatccatactggaaagaagccctttaaatgtagtga

SEQ ID NO: 781877 - DNA, 120 bp, Artificial Sequence
  ENSG00000254004_11 (sequence is synthesized)
gtgtggaaaagcttttagccagaaggaaaacctcattatacatcagagaatccatactggagagaaaccttatgaatgtaaagggtgtgggaaagctttcattcagaagtcaagcctcat

SEQ ID NO: 781878 - DNA, 120 bp, Artificial Sequence
  ENSG00000254004_12 (sequence is synthesized)
tagacaccagagaagtcacacaggagagaaaccttatacgtgtaaggaatgtgggaaagccttcagtggcaagtcaaatctcacagagcatgagaaaattcatattggagagaaacccta

SEQ ID NO: 781879 - DNA, 120 bp, Artificial Sequence
  ENSG00000254004_13 (sequence is synthesized)
caaatgtaatgaatgtggaacaatcttcaggcagaagcaatacctcattaaacatcacaatattcatacaggagagaaaccctatgaatgtaataaatgtggaaaagccttctctcgaat

SEQ ID NO: 781880 - DNA, 120 bp, Artificial Sequence
  ENSG00000254004_14 (sequence is synthesized)
cacatcacttattgtacatgtgagaattcatacaggtgataagccttatgagtgtaaggtctgtgggaaagccttctgtcaaagctcatctcttactgtgcatatgagaagccatacagg

SEQ ID NO: 781881 - DNA, 120 bp, Artificial Sequence
  ENSG00000254004_15 (sequence is synthesized)
tgagaaaccctatggttgtaatgaatgtgggaaagccttttctcagttctcaacccttgctctgcacatgagaatccatactggtgaaaaaccttatcagtgtagtgaatgtgggaaagc

SEQ ID NO: 781882 - DNA, 120 bp, Artificial Sequence
  ENSG00000254004_16 (sequence is synthesized)
tttcagccaaaagtcacatcacattagacaccagagaattcatactcattaaagttctctatgaatgccttggatttagcaaaacgttcagcagattttacacttaatagtgtattggaa

SEQ ID NO: 781883 - DNA, 120 bp, Artificial Sequence
  ENSG00000254004_17 (sequence is synthesized)
aattcattttacattaaagtgacatgaatgtgggaagtccttcagcagcaattcaaaacttaaatactatgatgtttaataagtattatagtgtaaagaaaacccgtacccccaaaactc

SEQ ID NO: 781884 - DNA, 120 bp, Artificial Sequence
  ENSG00000254004_18 (sequence is synthesized)
ccacaacaagcattatcaatgctgtacttctaggagtatactcattaaagttaggatctagtcatggacactacttaatgtgttcctggaaggcctacagatgcattaagaaatagatat

SEQ ID NO: 781885 - DNA, 120 bp, Artificial Sequence
  ENSG00000254004_19 (sequence is synthesized)
gagatgtatgaggatttgaaattaagagacaaaattatcatttttgtgatgttttgctacatatatgaattgtaaaactagaatcatcaaaattatttgttgttgaagcagtcataaaac

SEQ ID NO: 781886 - DNA, 120 bp, Artificial Sequence
  ENSG00000254004_20 (sequence is synthesized)
tgagactgagacagaatattgaattcagaaatgtgtgcatgaatatatggggaattggtaattgatagaggcggtatcccagattggtggggaaatcatggattacttaaaaattaattg

SEQ ID NO: 781887 - DNA, 120 bp, Artificial Sequence
  ENSG00000254004_21 (sequence is synthesized)
ggggaaatcatggattacttaaaaattaattgactcttcatatggaaaaataatatctcccatcataatataaaatatttttcttatgaattcttaaagtactaaagactaaaatgcaaa

SEQ ID NO: 781888 - DNA, 120 bp, Artificial Sequence
  ENSG00000254004_22 (sequence is synthesized)
tgtttttaaaaccttagggcaggaaagaacttctaaaacattccagaatacccggtagttccactcttgagtatggtagtcccctattttctgcaagagatggactctaagacccccagt

SEQ ID NO: 781889 - DNA, 120 bp, Artificial Sequence
  ENSG00000254004_23 (sequence is synthesized)
ggatacctaaaacccagataggaccaaactctatgtctatgtttttttcttatatatacatacctatgataaaatttagtttacagattagacacagcaagagatttaaaacaataataa

SEQ ID NO: 781890 - DNA, 120 bp, Artificial Sequence
  ENSG00000254004_24 (sequence is synthesized)
acataatatggaacaattataacaatatactgtaatcataaaagttatgtgaatatgatctttctctcagaataccttattgtactgttctcaactatttatgaactgtggtgactacag

SEQ ID NO: 781891 - DNA, 120 bp, Artificial Sequence
  ENSG00000254004_25 (sequence is synthesized)
gtaactgaaaccatggaaagcaaagctgtggataagggggaactactatatatatgcatctacccaagaaacatgaacacagggagtcatgtactggtctatagctgtatagttcattgc

SEQ ID NO: 781892 - DNA, 120 bp, Artificial Sequence
  ENSG00000254004_26 (sequence is synthesized)
accatgagttatagtagccagaagttgggaaacaaatgctgtctcttgtgaaatagatgaataaaatgtgatagtaacatagtagagtactctctagcagttaagtgacaaattaagtct

SEQ ID NO: 781893 - DNA, 120 bp, Artificial Sequence
  ENSG00000254004_27 (sequence is synthesized)
atatattaacagaaatatttttaaaaaattagagtgaagaaaaatgatgaacatattgtaatgatgcttctgtgaatttgaataaaatcaacactaaccagccctagtactaagaattgg

SEQ ID NO: 781894 - DNA, 120 bp, Artificial Sequence
  ENSG00000254004_28 (sequence is synthesized)
ttatggataaattatgtaaaactaaagaatggattgaaaggatatgtatatactcagttcccaaaagtggagtggttacctctaggaagaaaggaggtggaagggaaatgttaccaagca

SEQ ID NO: 781895 - DNA, 120 bp, Artificial Sequence
  ENSG00000254004_29 (sequence is synthesized)
tggtagttaaaggatacttcaattttgtatctatttcttattaaaaagaaacattctaagtaaacataacgaaatattaattctgggtggtggtaatatttgtgttcattctatcattcg

SEQ ID NO: 781896 - DNA, 120 bp, Artificial Sequence
  ENSG00000254004_30 (sequence is synthesized)
tgctatttatttccttaaacttctgaaagttaaaaagtccagataggagtgaggaagctgtacatgaaacataatggacttacattcctagtcagatactaatattctgtagaagatatt

SEQ ID NO: 781897 - DNA, 120 bp, Artificial Sequence
  ENSG00000254004_31 (sequence is synthesized)
tctaaaatcttatctttaaaatatgaaataatttttaattggggtggcaacttaaattcaattaaaataactcatgtgtcacaagagtaaattttacataatctgtacgtagttctaatc

SEQ ID NO: 781898 - DNA, 120 bp, Artificial Sequence
  ENSG00000254004_32 (sequence is synthesized)
tgtatatagtcttggaggttatgatttgccacagattggttggatcacatacatttaaggatcatattattaaataatatatgcacagacatggagagaattagtttttactaaaacatt

SEQ ID NO: 781899 - DNA, 120 bp, Artificial Sequence
  ENSG00000254004_33 (sequence is synthesized)
tatcagaaattttaatactctgcataaccagtattagcattagaaattagccacttttaaaatgagaaaactgtgtcactcttcaatttttttataagccattgaggaaaacattaactc

SEQ ID NO: 781900 - DNA, 120 bp, Artificial Sequence
  ENSG00000254004_34 (sequence is synthesized)
ctggatttcagcttcacttttaacctgcagactaaatttctttctcaattatgtcagacacacccaagtcaatcccaacccccttgttaccttgggaagaccgtgctgaaaaaggagatc

SEQ ID NO: 781901 - DNA, 120 bp, Artificial Sequence
  ENSG00000254004_35 (sequence is synthesized)
ttccacctaaacagtgttctcttatttgaagcaaatctttttgagaatttgtttacttgatttctttccacaataaactgacagagaacgctactaatgatttttttttttttttgagac

SEQ ID NO: 781902 - DNA, 120 bp, Artificial Sequence
  ENSG00000254004_36 (sequence is synthesized)
aggcgtgagccaccgtgcccggcctgatgtttttgaatgattatgaaaatgggtatacagcattaaaaccttagactgattttaaatatattaatttcttttaaactcaatataatgtta

SEQ ID NO: 781903 - DNA, 120 bp, Artificial Sequence
  ENSG00000254004_37 (sequence is synthesized)
ttaaactcaatataatgttaatattactgtagcacttactagcatttctgaaggttggtcttgagataagattgaaaatgacagttgttgattttctgaggtaatatacccaaataaaat

SEQ ID NO: 781904 - DNA, 120 bp, Artificial Sequence
  ENSG00000254004_38 (sequence is synthesized)
atatgtatgtgtacatgaatctaaactgtcttcttctgttcctcattttgctttacttaaataatctttcatattttttaagtgttttgcccatgtgcttgggtagccttgaagtcacca

SEQ ID NO: 781905 - DNA, 120 bp, Artificial Sequence
  ENSG00000254004_39 (sequence is synthesized)
gaataactaggactcaaattcagaccaaaccaggactagctttttgtgccatgagttagccatggtcctggacccagcaaaaagaatgattatgatggtcagagtaagatgagcaattgc

SEQ ID NO: 781906 - DNA, 120 bp, Artificial Sequence
  ENSG00000254004_40 (sequence is synthesized)
aacataatattctctaatattgtatactgtaaatttattcagctgccctcgtttactcacagtttgcttatttgccaccataagaaatggtacaataaaaattcatgtaatcacccctta

SEQ ID NO: 781907 - DNA, 120 bp, Artificial Sequence
  ENSG00000254004_41 (sequence is synthesized)
aaagaaggttctctttgtgtgagtaagcaagaacctgagacaaggtcatactctgtcacctaggctggattgcaatggcatgatcatagcatactgcagcctcgaactcctgggctcaag

SEQ ID NO: 781908 - DNA, 120 bp, Artificial Sequence
  ENSG00000254004_42 (sequence is synthesized)
gatgattgagaaagaaatgtaaagaaggttctctttgtgtgagtaagcaagaacctgaaaataattcttccgggccgggtgcggtggctcatggctgtattcccagcactttgggaggcc

SEQ ID NO: 781909 - DNA, 120 bp, Artificial Sequence
  ENSG00000254087_0 (sequence is synthesized)
ccgcgccagcagcccctcgccgcgcgtccagcgttcccggccagcagcctccccatacgcaggtcctgctgggccgccccgtcgcgccccccactctgaactcaagtcaccgtggagctc

SEQ ID NO: 781910 - DNA, 120 bp, Artificial Sequence
  ENSG00000254087_1 (sequence is synthesized)
cgccgccccgaaactttcaccgcgagcgggaaatatgggatgtataaaatcaaaagggaaagacagcttgagtgacgatggagtagatttgaagactcaaccagtacgtaatactgaaag

SEQ ID NO: 781911 - DNA, 120 bp, Artificial Sequence
  ENSG00000254087_2 (sequence is synthesized)
aactatttatgtgagagatccaacgtccaataaacagcaaaggccagttccagaatctcagcttttacctggacagaggtttcaaactaaagatccagaggaacaaggagacattgtggt

SEQ ID NO: 781912 - DNA, 120 bp, Artificial Sequence
  ENSG00000254087_3 (sequence is synthesized)
agccttgtacccctatgatggcatccacccggacgacttgtctttcaagaaaggagagaagatgaaagtcctggaggagcatggagaatggtggaaagcaaagtcccttttaacaaaaaa

SEQ ID NO: 781913 - DNA, 120 bp, Artificial Sequence
  ENSG00000254087_4 (sequence is synthesized)
agaaggcttcatccccagcaactatgtggccaaactcaacaccttagaaacagaagagtggtttttcaaggatataaccaggaaggacgcagaaaggcagcttttggcaccaggaaatag

SEQ ID NO: 781914 - DNA, 120 bp, Artificial Sequence
  ENSG00000254087_5 (sequence is synthesized)
cgctggagctttccttattagagaaagtgaaacattaaaaggaagcttctctctgtctgtcagagactttgaccctgtgcatggtgatgttattaagcactacaaaattagaagtctgga

SEQ ID NO: 781915 - DNA, 120 bp, Artificial Sequence
  ENSG00000254087_6 (sequence is synthesized)
taatgggggctattacatctctccacgaatcacttttccctgtatcagcgacatgattaaacattaccaaaagcaggcagatggcttgtgcagaagattggagaaggcttgtattagtcc

SEQ ID NO: 781916 - DNA, 120 bp, Artificial Sequence
  ENSG00000254087_7 (sequence is synthesized)
caagccacagaagccatgggataaagatgcctgggagatcccccgggagtccatcaagttggtgaaaaggcttggcgctgggcagtttggggaagtctggatgggttactataacaacag

SEQ ID NO: 781917 - DNA, 120 bp, Artificial Sequence
  ENSG00000254087_8 (sequence is synthesized)
taccaaggtggctgtgaaaaccctgaagccaggaactatgtctgtgcaagccttcctggaagaagccaacctcatgaagaccctgcagcatgacaagctcgtgaggctctacgctgtggt

SEQ ID NO: 781918 - DNA, 120 bp, Artificial Sequence
  ENSG00000254087_9 (sequence is synthesized)
caccagggaggagcccatttacatcatcaccgagtacatggccaagggcagtttgctggatttcctgaagagcgatgaaggtggcaaagtgctgcttccaaagctcattgacttttctgc

SEQ ID NO: 781919 - DNA, 120 bp, Artificial Sequence
  ENSG00000254087_10 (sequence is synthesized)
tcagattgcagagggaatggcatacatcgagcggaagaactacattcaccgggacctgcgagcagctaatgttctggtctccgagtcactcatgtgcaaaattgcagattttggccttgc

SEQ ID NO: 781920 - DNA, 120 bp, Artificial Sequence
  ENSG00000254087_11 (sequence is synthesized)
tagagtaattgaagataatgagtacacagcaagggaaggtgctaagttccctattaagtggacggctccagaagcaatcaactttggatgtttcactattaagtctgatgtgtggtcctt

SEQ ID NO: 781921 - DNA, 120 bp, Artificial Sequence
  ENSG00000254087_12 (sequence is synthesized)
tggaatcctcctatacgaaattgtcacctatgggaaaattccctacccagggagaactaatgccgacgtgatgaccgccctgtcccagggctacaggatgccccgtgtggagaactgccc

SEQ ID NO: 781922 - DNA, 120 bp, Artificial Sequence
  ENSG00000254087_13 (sequence is synthesized)
agatgagctctatgacattatgaaaatgtgctggaaagaaaaggcagaagagagaccaacgtttgactacttacagagcgtcctggatgatttctacacagccacggaagggcaatacca

SEQ ID NO: 781923 - DNA, 120 bp, Artificial Sequence
  ENSG00000254087_14 (sequence is synthesized)
gcagcagccttagagcacagggagacccgtccatttggcaggggtggctgcctcatttagagaggaaaagtaaccatcactggttgcacttatgatttcatgtgcggggatcatctgccg

SEQ ID NO: 781924 - DNA, 120 bp, Artificial Sequence
  ENSG00000254087_15 (sequence is synthesized)
tgcctggatcctgaaatagaggctaaattactcaggaagaacaccctctaaatgggaaagtattctgtactcttagatggattctccactcagttgcaacttggacttgtcctcagcagc

SEQ ID NO: 781925 - DNA, 120 bp, Artificial Sequence
  ENSG00000254087_16 (sequence is synthesized)
tggtaatcttgctctgcttgacaacatctgagtgcagccgtttgagaagaaaacatctattctctccaaaaatgcacccaactagctctatgtttacaaatggacataggactcaaagtt

SEQ ID NO: 781926 - DNA, 120 bp, Artificial Sequence
  ENSG00000254087_17 (sequence is synthesized)
tcagagaccattgcaatgaatccccaataattgcagaactaaactcatttataaagctaaaataaccggatatatacatagcatgacatttctttgtgctttggcttacttgtttaaaaa

SEQ ID NO: 781927 - DNA, 120 bp, Artificial Sequence
  ENSG00000254087_18 (sequence is synthesized)
aaaaaaaaaactaatccaacctgttagattttgcaggtgaagtcagcagcttaaaaatgtctttcccagatttcaatgatttttttccccctacctcccaaaatctgagactgttaaaac

SEQ ID NO: 781928 - DNA, 120 bp, Artificial Sequence
  ENSG00000254087_19 (sequence is synthesized)
atttttcttctatgaacactgctcagacctgctagacatgccataggagtggcgtgcacatctctctctcttccagcaggaggagcccgtgagcacgcacagctgccctgtctgctcacc

SEQ ID NO: 781929 - DNA, 120 bp, Artificial Sequence
  ENSG00000254087_20 (sequence is synthesized)
cgaaggcaccgggctcacctggacctcccaggaaagggagaagagcctcagaaactgctctgtgtttagaaggaatatttttaagagtccagctttttcatttccacaatttcctatatc

SEQ ID NO: 781930 - DNA, 120 bp, Artificial Sequence
  ENSG00000254087_21 (sequence is synthesized)
cagatttgttttgacaatgtagtttggaagaactaagattctaatctctgaagaaccttatagggccttctaaaacataagagtttcctttgttgcttcaaatatttgaacattatgtta

SEQ ID NO: 781931 - DNA, 120 bp, Artificial Sequence
  ENSG00000254087_22 (sequence is synthesized)
aagatcaagtattaattttagttgtactctagaaagctaaagtgccacattcggggctatttttatgattcagcaatcttttctaaattgtgtagcatgtgtatgagactatttataccc

SEQ ID NO: 781932 - DNA, 120 bp, Artificial Sequence
  ENSG00000254087_23 (sequence is synthesized)
ctgtatcacatgatgtgtttcacttatgctgttgtgtatatacctaatatttctatttttgattttattttaatacacctcgtccaataacatctcaagctttttatttgcatttacatt

SEQ ID NO: 781933 - DNA, 120 bp, Artificial Sequence
  ENSG00000254087_24 (sequence is synthesized)
ttcagctgtggtcagtgtaaaaattggtcatcagctgggggcggggtggttagaagtgattcaacagagctacatgctttaaacttgcccaagttctacctccttcctttgaacatttca

SEQ ID NO: 781934 - DNA, 120 bp, Artificial Sequence
  ENSG00000254087_25 (sequence is synthesized)
gattggagaaccaaggagttgattgcctgaacacctgaacatccgtttatgggggccagatagaatttgttttcaaataggcttaacaggcatcattaaaatttcattctgtgtgttttg

SEQ ID NO: 781935 - DNA, 120 bp, Artificial Sequence
  ENSG00000254087_26 (sequence is synthesized)
tttaggcttgaggtgcttagaagatgggataaaatattctacttttttctaaattttaactttgtttcctatgtgatttttttaaatgtcctttctaaaatattctaaaattattgattc

SEQ ID NO: 781936 - DNA, 120 bp, Artificial Sequence
  ENSG00000254087_27 (sequence is synthesized)
acaagtgccatgttcagaactatagaatattactgttacataatgtctgcacagctggtcccttgattcagtggtaaggtttttgtgtacacccccctgcttgcattttatttcagaacc

SEQ ID NO: 781937 - DNA, 120 bp, Artificial Sequence
  ENSG00000254087_28 (sequence is synthesized)
acaagtattacccaatatgttacatggagaggaactataaagaatccctaaggcaaaaagaagtctctagaaaatgactagaggttttttttttagcataacaaatttatttaaagaaaa

SEQ ID NO: 781938 - DNA, 120 bp, Artificial Sequence
  ENSG00000254087_29 (sequence is synthesized)
ttattaaatttatcttcgccttgttttgcttctcccagttcctcctcttcttgccattttccacttgtctttccctcccaatcaagcctgtgatccttacctccatgtgggcccttcacc

SEQ ID NO: 781939 - DNA, 120 bp, Artificial Sequence
  ENSG00000254087_30 (sequence is synthesized)
agcttgggcctcatctctggtgtccagcatgtgtggaagtcacacgttcccttgatgaacagcacacacagtctccttacttagctataggtttccagcctccctgtgacagacaggcat

SEQ ID NO: 781940 - DNA, 120 bp, Artificial Sequence
  ENSG00000254087_31 (sequence is synthesized)
aatgaggggctgaataggtgtttgtagcattttcgggtatccagtggtgtgcaaaatggctcatgtcatcacacctcaggttattgtagagaactggaaagacagaatccatactcccta

SEQ ID NO: 781941 - DNA, 120 bp, Artificial Sequence
  ENSG00000254087_32 (sequence is synthesized)
gaatccatactccctaccgccaagattctgacttagctgttgtgcagcgggagatgtatgtcagtctattttaaaagcttctccagtcagctagacacagtggctcatgcctgtaatctc

SEQ ID NO: 781942 - DNA, 120 bp, Artificial Sequence
  ENSG00000254087_33 (sequence is synthesized)
caggaggatcgcttgagctcaggagttagacaccagcctgagcaatatagcaagtctctacaaaaaattttaaaaattagctaagtgtggtggcacatacctatggtcccagctactcag

SEQ ID NO: 781943 - DNA, 120 bp, Artificial Sequence
  ENSG00000254087_34 (sequence is synthesized)
aaaaaaacaaaaaaacccttccctggtgaatataatgtatgctcagtcttgagagtcaccatttggtttgacccatattacaaagcccagccttctttttcctcagatggtttcatttct

SEQ ID NO: 781944 - DNA, 120 bp, Artificial Sequence
  ENSG00000254087_35 (sequence is synthesized)
caaaggggagtggaagagaaggaaggaggaaaaaaacgtgccttccttcctggtgaacatgaagctcactgaacctaaaggagactcacaggctagaaaccagtgtccttagtagtaggg

SEQ ID NO: 781945 - DNA, 120 bp, Artificial Sequence
  ENSG00000254087_36 (sequence is synthesized)
gccacctggggcttccgtggcttctccaggcatacctcctgaggttccacagaatccccttgcagaaagtacttctgatgagccactgggaacgtgtactgtccaagcccccttctaggg

SEQ ID NO: 781946 - DNA, 120 bp, Artificial Sequence
  ENSG00000254087_37 (sequence is synthesized)
gaaattcactgccacagaagccagcagccctggctgtcccaagggtgcataaaaggataataactaaaaggagggaattaattttgttgcctacaccagggatagatcgagggcactgaa

SEQ ID NO: 781947 - DNA, 120 bp, Artificial Sequence
  ENSG00000254087_38 (sequence is synthesized)
gcctacaccagggatagatcgagggcactgaaagcatcataagtataaactcatctccacgtcagcttgtggagtctgctttctcgctctctcttttttttttttttttgacagagtctc

SEQ ID NO: 781948 - DNA, 78 bp, Artificial Sequence
  ENSG00000254087_39 (sequence is synthesized)
ggtgcgatctcagctcattgcaacctccccctctctggttggagcgattcacaccatctcgcctggctaatttttgta

SEQ ID NO: 781949 - DNA, 120 bp, Artificial Sequence
  ENSG00000254087_40 (sequence is synthesized)
cggggtctgctttctctttattccccgtcctctcacaaactacatccaggggcggtagctgctaaaaggactcaattctgcaacctcagcttctgacaccttcaaataaattaaatgctg

SEQ ID NO: 781950 - DNA, 120 bp, Artificial Sequence
  ENSG00000254087_41 (sequence is synthesized)
gtcctagggctcgctccccagctcttctgatgtcactgccaggttccacagccagttgtcggacatctcctgcttcctcagccaagaacacctctcagatgagatcaaaccgcccagctt

SEQ ID NO: 781951 - DNA, 120 bp, Artificial Sequence
  ENSG00000254087_42 (sequence is synthesized)
tcctcttagcatcttcctttattttccacttctggctggtggaagagagatcgtagttctctattccctacattttaactccacgaatattttagattaagtgaagtcttgctgttcttc

SEQ ID NO: 781952 - DNA, 120 bp, Artificial Sequence
  ENSG00000254087_43 (sequence is synthesized)
ctgatggaaatggtaattataaacatacaaagatacccatacacacattctttactcagggccctcttgtgctttggcaaatgataaaaattatctctaactcacacaacgaccctggaa

SEQ ID NO: 781953 - DNA, 120 bp, Artificial Sequence
  ENSG00000254087_44 (sequence is synthesized)
gatctggacaatgctatcactatttcacagctgagagatcgggagcatttaaagccacagaaggaatagattggcttcgcttcatattgtttccttgtgaaataaaaccagtgaaacacc

SEQ ID NO: 781954 - DNA, 120 bp, Artificial Sequence
  ENSG00000254087_45 (sequence is synthesized)
ggcagtgcttcagaattacacatcacatggggagcagcatgctcccactgtgccccagaagagtttcccggacagtgtccagagaatctgttcggaaatatgggatgtataaaatcaaaa

SEQ ID NO: 781955 - DNA, 120 bp, Artificial Sequence
  ENSG00000254087_46 (sequence is synthesized)
acactctccagccccggcagaacagaagctgcagccacgtggacacgtcacctctgcatccaggttttccctctacagtcttggcccctgggatcatagccttgctcactttctcctgtt

SEQ ID NO: 781956 - DNA, 120 bp, Artificial Sequence
  ENSG00000254093_0 (sequence is synthesized)
gtccgctgcagtccgccggcgagggagttacgcacgtcctgattctcctggagtctccagcccgcccagtggccgcagtcacccaggtccagaggcggcggtatcacaggctctccgaca

SEQ ID NO: 781957 - DNA, 120 bp, Artificial Sequence
  ENSG00000254093_1 (sequence is synthesized)
tgtctatgctggctgaacgtcggcggaagcagaagtgggctgtggatcctcagaacactgcctggagtaatgacgattccaagtttggccagcggatgctagagaagatggggtggtcta

SEQ ID NO: 781958 - DNA, 120 bp, Artificial Sequence
  ENSG00000254093_2 (sequence is synthesized)
aaggaaagggtttaggggctcaggagcaaggagccacagatcatattaaagttcaagtgaaaaataaccacctgggactcggagctaccatcaataatgaagacaactggattgcccatc

SEQ ID NO: 781959 - DNA, 120 bp, Artificial Sequence
  ENSG00000254093_3 (sequence is synthesized)
aggatgattttaaccagcttctggccgaactgaacacttgccatgggcaggaaaccacagattcctcggacaagaaggaaaagaaatcttttagccttgaggaaaagtccaaaatctcca

SEQ ID NO: 781960 - DNA, 120 bp, Artificial Sequence
  ENSG00000254093_4 (sequence is synthesized)
aaaaccgtgttcactatatgaaattcacaaaagggaaggatctgtcatctcggagcaaaacagatcttgactgcatttttgggaaaagacagagtaagaagactcccgagggcgatgcca

SEQ ID NO: 781961 - DNA, 120 bp, Artificial Sequence
  ENSG00000254093_5 (sequence is synthesized)
gtccctccactccagaggagaacgaaaccacgacaaccagcgccttcaccatccaggagtactttgccaagcggatggcagcactgaagaacaagccccaggttccagttccagggtctg

SEQ ID NO: 781962 - DNA, 120 bp, Artificial Sequence
  ENSG00000254093_6 (sequence is synthesized)
ggagggaaagcccgagagggccgaggcccaggagcgagtggccaagaagaagagcgcgccagcagaagagcagctcagaggcccctgctgggaccagagttccaaggcctctgctcagga

SEQ ID NO: 781963 - DNA, 120 bp, Artificial Sequence
  ENSG00000254093_7 (sequence is synthesized)
tgcaggggaccatgtgcagccgcctgagggccgggacttcaccctgaagcccaaaaagaggagagggaagaaaaagctgcaaaaaccagtagagatagcagaggacgctacactagaaga

SEQ ID NO: 781964 - DNA, 120 bp, Artificial Sequence
  ENSG00000254093_8 (sequence is synthesized)
aacgctagtgaaaaagaagaagaagaaagattccaaatgaatccttcccagccggggccttccgaccactcagctgtcagggcactgcgggggcagacacctctggcctgaagtcacagc

SEQ ID NO: 781965 - DNA, 120 bp, Artificial Sequence
  ENSG00000254093_9 (sequence is synthesized)
agagttcaccccagagcgcctgggcgcatcttgtggcatgcccatgggctgccgagtcctgccctctcgccacatttcccccaagttacattcccaggaggacctttttaatgttctcaa

SEQ ID NO: 781966 - DNA, 120 bp, Artificial Sequence
  ENSG00000254093_10 (sequence is synthesized)
tcgtggctctcagacacaaataaatttttttgtaaactctgagcccttcagcaagagagtttaattataatcattacaaatacatgcattcatgtaagtgtgcacacgtgtgtgtgcatg

SEQ ID NO: 781967 - DNA, 120 bp, Artificial Sequence
  ENSG00000254093_11 (sequence is synthesized)
tgcgcatctgtgtgtgtgtgtgtgtgtcactatctccgtttgctctcggttcccttcaataacaatgaatggtgctttcttctgaaagactcagcctaattaaaggattaagaggcaata

SEQ ID NO: 781968 - DNA, 120 bp, Artificial Sequence
  ENSG00000254093_12 (sequence is synthesized)
tccttgtcttacagaatttcccatgtcctgaattttgttgatttcaccttcccagtgggctttaatgtattcacttcgtaaagagaccgtacactgactcactttaaccacatagattac

SEQ ID NO: 781969 - DNA, 120 bp, Artificial Sequence
  ENSG00000254093_13 (sequence is synthesized)
catccctgctgaatccacatttatccttaatttcccttgtgtggctttttaccaaaagggcgatgccagtccctccactccagaggagaacgaaaccacgacaaccagcgccttcaccat

SEQ ID NO: 781970 - DNA, 120 bp, Artificial Sequence
  ENSG00000254093_14 (sequence is synthesized)
ggagactggaagaaacttatgctttggatcagtaagtgattttgatcccaaatcaaaaattgttgtgaccttatgatgataaattaggattggacataagtgtcaactttctatcattta

SEQ ID NO: 781971 - DNA, 120 bp, Artificial Sequence
  ENSG00000254093_15 (sequence is synthesized)
agctgccatgcttagcatctttcatagacattgcaactaggctacacgctttttccctttccatttattcttgactccagtagagcctctgctgatacctctacacttaaatggttcttg

SEQ ID NO: 781972 - DNA, 120 bp, Artificial Sequence
  ENSG00000254093_16 (sequence is synthesized)
caatcctggtttctacatttacttaagtgaactttgctaaaggctaaaaatttctgatacaagaatccatcatcaaaactttagacacatttgcaccttcattgatatagcttactgtct

SEQ ID NO: 781973 - DNA, 120 bp, Artificial Sequence
  ENSG00000254093_17 (sequence is synthesized)
ctaccagcttgacagttttccctttgactttcagatctgttttgaatctgtgtgttcacattttgacatcatgttttagaactgtgatctcgcatgtaccctctcttccttaatccctcc

SEQ ID NO: 781974 - DNA, 120 bp, Artificial Sequence
  ENSG00000254093_18 (sequence is synthesized)
gcagccccagtcgtcattcttctccagcctcccgcaccccagtcgtcattcttctccagcctcccgcaccccagtcgtcattcttctccagcctcccgcaccccagtcgtcattcttctc

SEQ ID NO: 781975 - DNA, 120 bp, Artificial Sequence
  ENSG00000254093_19 (sequence is synthesized)
cagcctcccgcaccccagttgtcattcttctccagcctcccgcaccccagtcgtctcttctccagcctcccgcaccccagtcgtctcttctccatgcagggcagagccctgcttcagcca

SEQ ID NO: 781976 - DNA, 120 bp, Artificial Sequence
  ENSG00000254093_20 (sequence is synthesized)
ctgtcatcacttgagctcactgactgggtttaggggctcaggagcaaggagccacagatcatattaaagttcaagtgaaaaataaccacctgggactcggagctaccatcaataatgaag

SEQ ID NO: 781977 - DNA, 120 bp, Artificial Sequence
  ENSG00000254093_21 (sequence is synthesized)
atatgaaattcacaaaaggaagaacagtcttactgaaaagcatcacattgtttttctagggaaggatctgtcatctcggagcaaaacagatcttgactgcatttttgggaaaagacagag

SEQ ID NO: 781978 - DNA, 120 bp, Artificial Sequence
  ENSG00000254093_22 (sequence is synthesized)
gtggctttttaccaaaaggtaaatggttcttgccatcacatagcttacagtgtaatctgaaagataataatattgtaaactctttcaaaatactaatgtcaaatagaagatatgtcagcc

SEQ ID NO: 781979 - DNA, 120 bp, Artificial Sequence
  ENSG00000254122_0 (sequence is synthesized)
ccagctcccacacagaggctcccggctgcgcagaccttgcccagcacaccagattgccagctccgagacccgggactcctcctgtcctgggccgaatgctcttttagcgcggtagagtgc

SEQ ID NO: 781980 - DNA, 120 bp, Artificial Sequence
  ENSG00000254122_1 (sequence is synthesized)
actttctccaactggaaaagcggggacccagcgagaacccgagcgaacgatgggagggagctgcgcgcagaggcgccgggccggcccgcggcaggtactatttcctttgctgctgccttt

SEQ ID NO: 781981 - DNA, 120 bp, Artificial Sequence
  ENSG00000254122_2 (sequence is synthesized)
gttctaccccacgctgtgtgagccgatccgctactcgattccggaggagctggccaagggctcggtggtggggaacctcgctaaggatctagggcttagtgtcctggatgtgtcggctcg

SEQ ID NO: 781982 - DNA, 120 bp, Artificial Sequence
  ENSG00000254122_3 (sequence is synthesized)
cgagctgcgagtgagcgcggagaagctgcacttcagcgtagacgcgcagagcggggacttacttgtgaaggaccgaatagaccgtgagcaaatatgcaaagagagaagaagatgtgagtt

SEQ ID NO: 781983 - DNA, 120 bp, Artificial Sequence
  ENSG00000254122_4 (sequence is synthesized)
gcaattggaagctgtggtggaaaatcctttaaatatttttcatgtcattgtggtgattgaggatgttaatgaccacgcccctcaattccggaaagatgaaataaacttagaaatcagtga

SEQ ID NO: 781984 - DNA, 120 bp, Artificial Sequence
  ENSG00000254122_5 (sequence is synthesized)
atccgtcagcctggggatgggaacaattcttgagtctgcagaagatcctgatattagtatgaattcgctgagcaaataccaactaagtcctaacgagtatttctcattggtggagaaaga

SEQ ID NO: 781985 - DNA, 120 bp, Artificial Sequence
  ENSG00000254122_6 (sequence is synthesized)
caatcctgatggtggcaaatatccagaattagtattgcagaagactctggaccgagaaacgcagagcgctcaccacttggtactgaccgccttagatggtggggaccctccccgaagcgg

SEQ ID NO: 781986 - DNA, 120 bp, Artificial Sequence
  ENSG00000254122_7 (sequence is synthesized)
tactgctcagataagaatcctggtaatagatgccaatgacaaccccccagtgttcagccaggacgtgtacagggttagccttcgggaagacgtgcctccaggcacctccatcctgagagt

SEQ ID NO: 781987 - DNA, 120 bp, Artificial Sequence
  ENSG00000254122_8 (sequence is synthesized)
gaaggccactgaccaggacgagggcatcaactcagagatcacttattccttctttggtgtggctgacaaagctcagcacgtgttctctctggattacactacaggaaacattctaactca

SEQ ID NO: 781988 - DNA, 120 bp, Artificial Sequence
  ENSG00000254122_9 (sequence is synthesized)
gcagcctttggattttgaagaagtagaaagatatacgataaacatagaagcaaaagaccgaggatctctctcaacacggtgtaaagtaattgtagaagttgtagacgaaaacgacaacag

SEQ ID NO: 781989 - DNA, 120 bp, Artificial Sequence
  ENSG00000254122_10 (sequence is synthesized)
cccagaaataatcatcacgtcactctctgatcagattatggaggattcccctccaggagtggttgttgccctcttcaaaacacgggaccaagactcaggggaaaatggggaagtcaggtg

SEQ ID NO: 781990 - DNA, 120 bp, Artificial Sequence
  ENSG00000254122_11 (sequence is synthesized)
tagcttaagtagaggtgttccatttaagattcattcttcttctaataattactacaagctagtaacagatgaggccctggatcgggagcagaccccagagtacaacgtcaccatcgcagc

SEQ ID NO: 781991 - DNA, 120 bp, Artificial Sequence
  ENSG00000254122_12 (sequence is synthesized)
cacagacaggggcaagcctccgttatcctccagcaaaaccataaccctgcacattactgacgtcaatgacaacgcgccggttttcggacagtcagcctacctggtccacgtgccagaaaa

SEQ ID NO: 781992 - DNA, 120 bp, Artificial Sequence
  ENSG00000254122_13 (sequence is synthesized)
caaccagccgggtgcctccatagcgcaagtcagtgcctctgacccagacttcgggctcaacggccgtgtctcctactctctcattgccagcgacctggagtcacgaacgctgtcgtccta

SEQ ID NO: 781993 - DNA, 120 bp, Artificial Sequence
  ENSG00000254122_14 (sequence is synthesized)
cgtgtccgtgagcgcgcagagcggggtggtgttcgcgcagcgcgccttcgaccacgagcagctgcgcaccttcgagctcacgctgcaggcccgcgaccagggctcgcccgcgctcagcgc

SEQ ID NO: 781994 - DNA, 120 bp, Artificial Sequence
  ENSG00000254122_15 (sequence is synthesized)
caatgtgagcctgcgcgtgttggtgggcgaccgtaacgacaacgcaccgcgggtgctgtaccctgcgctgggtcccgacggctccgcgctcttcgacacagtgccgcgggccgcgcagcc

SEQ ID NO: 781995 - DNA, 120 bp, Artificial Sequence
  ENSG00000254122_16 (sequence is synthesized)
aggctacctggtgaccaaggtggtggccgtggacgcggactcggggcacaatgcctggctgtcctaccacgtggtgcaggccagtgagcccgggctcttcagcctggggctgcgaacagg

SEQ ID NO: 781996 - DNA, 120 bp, Artificial Sequence
  ENSG00000254122_17 (sequence is synthesized)
cgaggtgcgcatggtgcgtgctttgggtgacaaggactcggtccgccagcgcctgctagtcgctgtaagagatggaggacagccacccctttcagccactgccacgctgcacctggtgtt

SEQ ID NO: 781997 - DNA, 120 bp, Artificial Sequence
  ENSG00000254122_18 (sequence is synthesized)
cgcagatagcttgcaagaggtactgccggatttcagcgaccatcccacaccctctgactcccaggctgagatgcagttttacctggtggtggccttggccttgatttctgtgctctttct

SEQ ID NO: 781998 - DNA, 120 bp, Artificial Sequence
  ENSG00000254122_19 (sequence is synthesized)
tccaagtccggacctgtgggtccccccaactacagtgagggaacgttgccctatgcctataatttttgtgtgcctggggatcaaatgaatccagaatttaattttttcacatctgttgat

SEQ ID NO: 781999 - DNA, 120 bp, Artificial Sequence
  ENSG00000254122_20 (sequence is synthesized)
cattgtccagccacacaagataacctcaacaaagatagcatgctactggctagcattttaactcccagcgttgaagcagataagaagattcttaaacagcaagccccgcccaacacggac

SEQ ID NO: 782000 - DNA, 120 bp, Artificial Sequence; identical to SEQ ID NO: 773797
  ENSG00000254122_21 (sequence is synthesized)

SEQ ID NO: 782001 - DNA, 120 bp, Artificial Sequence; identical to SEQ ID NO: 773798
  ENSG00000254122_22 (sequence is synthesized)

SEQ ID NO: 782002 - DNA, 120 bp, Artificial Sequence; identical to SEQ ID NO: 773799
  ENSG00000254122_23 (sequence is synthesized)

SEQ ID NO: 782003 - DNA, 120 bp, Artificial Sequence; identical to SEQ ID NO: 773800
  ENSG00000254122_24 (sequence is synthesized)

SEQ ID NO: 782004 - DNA, 120 bp, Artificial Sequence; identical to SEQ ID NO: 773801
  ENSG00000254122_25 (sequence is synthesized)

SEQ ID NO: 782005 - DNA, 120 bp, Artificial Sequence; identical to SEQ ID NO: 773802
  ENSG00000254122_26 (sequence is synthesized)

SEQ ID NO: 782006 - DNA, 120 bp, Artificial Sequence; identical to SEQ ID NO: 773803
  ENSG00000254122_27 (sequence is synthesized)

SEQ ID NO: 782007 - DNA, 120 bp, Artificial Sequence; identical to SEQ ID NO: 773804
  ENSG00000254122_28 (sequence is synthesized)

SEQ ID NO: 782008 - DNA, 120 bp, Artificial Sequence; identical to SEQ ID NO: 773805
  ENSG00000254122_29 (sequence is synthesized)

SEQ ID NO: 782009 - DNA, 120 bp, Artificial Sequence; identical to SEQ ID NO: 773806
  ENSG00000254122_30 (sequence is synthesized)

SEQ ID NO: 782010 - DNA, 120 bp, Artificial Sequence; identical to SEQ ID NO: 773807
  ENSG00000254122_31 (sequence is synthesized)

SEQ ID NO: 782011 - DNA, 120 bp, Artificial Sequence; identical to SEQ ID NO: 773808
  ENSG00000254122_32 (sequence is synthesized)

SEQ ID NO: 782012 - DNA, 120 bp, Artificial Sequence; identical to SEQ ID NO: 773809
  ENSG00000254122_33 (sequence is synthesized)

SEQ ID NO: 782013 - DNA, 120 bp, Artificial Sequence; identical to SEQ ID NO: 773810
  ENSG00000254122_34 (sequence is synthesized)

SEQ ID NO: 782014 - DNA, 120 bp, Artificial Sequence; identical to SEQ ID NO: 773811
  ENSG00000254122_35 (sequence is synthesized)

SEQ ID NO: 782015 - DNA, 120 bp, Artificial Sequence; identical to SEQ ID NO: 773812
  ENSG00000254122_36 (sequence is synthesized)

SEQ ID NO: 782016 - DNA, 120 bp, Artificial Sequence; identical to SEQ ID NO: 773813
  ENSG00000254122_37 (sequence is synthesized)

SEQ ID NO: 782017 - DNA, 120 bp, Artificial Sequence; identical to SEQ ID NO: 773814
  ENSG00000254122_38 (sequence is synthesized)

SEQ ID NO: 782018 - DNA, 120 bp, Artificial Sequence
  ENSG00000254122_39 (sequence is synthesized)
ttacaatatgccaatatattccaatatagtggtattattttaagattctagataacttcttcatagagttcgcaaaatataggtcaaatttatggttatcattattaaaacaaaagttta

SEQ ID NO: 782019 - DNA, 120 bp, Artificial Sequence
  ENSG00000254126_0 (sequence is synthesized)
acccaccccagccgcgactgtctccgccgagcccccggggccaggtgtcccgggcgcgccccgatgcggccgcggctgtggctcctcctggccgcgcagctgacagttctccatggcaac

SEQ ID NO: 782020 - DNA, 120 bp, Artificial Sequence
  ENSG00000254126_1 (sequence is synthesized)
tcagtcctccagcagacccctgcatacataaaggtgcaaaccaacaagatggtgatgctgtcctgcgaggctaaaatctccctcagtaacatgtgcatctactggctgagacagcgccag

SEQ ID NO: 782021 - DNA, 120 bp, Artificial Sequence
  ENSG00000254126_2 (sequence is synthesized)
gccccgagcagtgatagtcaccacgagttcctgaccctctgggattccgcaaaagggactatccacggtgaagaggtggaacaggagaagatagctgtgtttcgggatgcaagccggttc

SEQ ID NO: 782022 - DNA, 120 bp, Artificial Sequence
  ENSG00000254126_3 (sequence is synthesized)
attctcaatctcacaagcgtgaagccggaggacagtggcatctacttctgcatgatcgtcgggagccccgagctgaccttcgggaagggaactcagctgagtgtggttgatttccttccc

SEQ ID NO: 782023 - DNA, 120 bp, Artificial Sequence
  ENSG00000254126_4 (sequence is synthesized)
accactgcccagcccaccaagaagtccaccctcaagaagagagtgtgccggttacccaggccagagacccagaagggcccactttgtagccccgtcacccttggcctgctggtggctggc

SEQ ID NO: 782024 - DNA, 120 bp, Artificial Sequence
  ENSG00000254126_5 (sequence is synthesized)
gtcctggttctgctggtttccctgggagtggccatgcacctgtgctgccggcggaggagagcccggcttcgtttcatgaaacaattttacaaatgagcagagaatacggttttggtgtcc

SEQ ID NO: 782025 - DNA, 120 bp, Artificial Sequence
  ENSG00000254126_6 (sequence is synthesized)
tgctacaaaaagacatcggtcagtaacgagcacgatgtggaaaaatgagagaagggacacattcaaccctggagagttcaatggctgctgaagctgcctgcttttcactgctgcaaggcc

SEQ ID NO: 782026 - DNA, 120 bp, Artificial Sequence
  ENSG00000254126_7 (sequence is synthesized)
tttctgtgtgtgacgtgcatgggagcaacttgtttgtgggtcatcgggaatactagggagaaggtttcattgcccccagggcacttcacagagtgtgctggaggactgagtaagaaatgc

SEQ ID NO: 782027 - DNA, 120 bp, Artificial Sequence
  ENSG00000254126_8 (sequence is synthesized)
tgcccatgccaccgcttccggctcctgtgctttccctgagctgggacctttagtggtggccgtttagccaccatctttgcaagttgctttgccctggtagggcagtaacattgggtcctg

SEQ ID NO: 782028 - DNA, 120 bp, Artificial Sequence
  ENSG00000254126_9 (sequence is synthesized)
ggtctttcatggggtgatgctgggctggctccctcttggtcttcccaggctggggctgaccttcctcgcagagaggccaggtgcaggttgggaatgaggcttgctgagaggggctgtcca

SEQ ID NO: 782029 - DNA, 120 bp, Artificial Sequence
  ENSG00000254126_10 (sequence is synthesized)
gttcccagaagccatgtcagtctctgagggcttcctttggggccgggaacttgcgggtttgaggataggagttcacttcatcttcttagctccaatttctactcttaagtttctcagctc

SEQ ID NO: 782030 - DNA, 120 bp, Artificial Sequence
  ENSG00000254126_11 (sequence is synthesized)
ccatttctactctcccatggcttaatgcttctttcattttctgtttgttttatacaaatgtcttagttgtacaaataaagtcccaggttaaagataacaaacgggtcctgtgacataaac

SEQ ID NO: 782031 - DNA, 120 bp, Artificial Sequence
  ENSG00000254126_12 (sequence is synthesized)
gtacgaaagcccatctacagcaaagacatcagtgctcagtggaacagaaaccagaaggagaaaatttgtacatcctccttttgcacctgagatcctcatttgcccgacattgtaggtgtg

SEQ ID NO: 782032 - DNA, 120 bp, Artificial Sequence
  ENSG00000254126_13 (sequence is synthesized)
gagagtcctagagaggctaggaagcgcccagggcacccagagccaggctgcaggtgcctcaggcccctctcccagcccactcccaagctgaactagcacgtgttcatttctaccgcgggt

SEQ ID NO: 782033 - DNA, 120 bp, Artificial Sequence
  ENSG00000254126_14 (sequence is synthesized)
tgaaccgcagggatccctggcttcaagtcaggcaccaaacagaaggtaggaggcatgaggggttctgtcacatgtctcttcattttcttattgattcttagccttgacagttggagaagg

SEQ ID NO: 782034 - DNA, 120 bp, Artificial Sequence
  ENSG00000254126_15 (sequence is synthesized)
aaaaagcaaggagaaagtgctgagcaggagtggagagtgaagagcaggacctcgtgcctgggtttgaaaaagtgcctgagacccatcttagccgcccctacctgagctttagcagcctag

SEQ ID NO: 782035 - DNA, 120 bp, Artificial Sequence
  ENSG00000254126_16 (sequence is synthesized)
gagctattgcaccataaaacactgcaacctgaggctgcattaacagaagcaccacgtccaggtccagggagaatccagcctcacctgcttctcctggccagctcaaggaaggacattgac

SEQ ID NO: 782036 - DNA, 120 bp, Artificial Sequence
  ENSG00000254126_17 (sequence is synthesized)
aaatcaggttatgttcagttacctgtgacaaccacagaatgtaagaaatgttacaaaaaaaacaggaaaggaaagacgactctggggaaggggcagtgggaccttctcctggcatctggg

SEQ ID NO: 782037 - DNA, 120 bp, Artificial Sequence
  ENSG00000254126_18 (sequence is synthesized)
gtgcggccgcagcagaatgaggtgtggtgggtggagttagaaaggcatagatgcagtgttaccggaaggagggccttgagtgtaagttgtccaggtccttggcattttgaacaaagaact

SEQ ID NO: 782038 - DNA, 120 bp, Artificial Sequence
  ENSG00000254126_19 (sequence is synthesized)
gaacaaaacatacaaagtaataaaggaataaacgcagcaaaaggaagaatttattgaagtgagaaagcactccacatggtaggagtggaccctaagcagatagcccatgggcccaattgc

SEQ ID NO: 782039 - DNA, 120 bp, Artificial Sequence
  ENSG00000254126_20 (sequence is synthesized)
ttaatctgggtgaaggatttggtccatggctaatgaaaggctgaggtgaattgacgccctatgcggatgaagggatggcccgtgcttggtctgtggtcaatccagggcagtctccctttc

SEQ ID NO: 782040 - DNA, 120 bp, Artificial Sequence
  ENSG00000254126_21 (sequence is synthesized)
catctgagatgcagtggaagggggagggttgtagggagagtagcctttgatccttggttactcagtgtggggagatggggtttttccttttggtgtacgttaattggccttagatgccct

SEQ ID NO: 782041 - DNA, 120 bp, Artificial Sequence
  ENSG00000254126_22 (sequence is synthesized)
gcccccagacccaggtgttttccgtttgctccagctttgagaagtcagcacaaattggcctcagattccctgcccccagacgtaggtgtttctccttcattcagcacgaattggccttag

SEQ ID NO: 782042 - DNA, 120 bp, Artificial Sequence
  ENSG00000254126_23 (sequence is synthesized)
atgccctgcccccagacccaggtgttttccatttgatccagctttgagaagtcagcacaaattggcctcagattccctgcccccagacatagatgtttctccttgattcagcacgaattg

SEQ ID NO: 782043 - DNA, 120 bp, Artificial Sequence
  ENSG00000254126_24 (sequence is synthesized)
gccttagattccctggccccagaccctagactcctgcctcagcaagagttgttcaaaagaaacaaaagctctgcccatcagctctgaggacaagggacaggctgccttccaaggctgagg

SEQ ID NO: 782044 - DNA, 120 bp, Artificial Sequence
  ENSG00000254126_25 (sequence is synthesized)
ggaggggtgaaagaattggggtcagctggaccagactcctctagggttcgtgtttcaggtgggcccctcacccggcccatcacaaacaaataagagattaaggcctgcagtgcacgtggt

SEQ ID NO: 782045 - DNA, 120 bp, Artificial Sequence
  ENSG00000254126_26 (sequence is synthesized)
ctgccctccttgaaggctcacacccagtgcacagcggaagtaagaacaggccacaaggccccttgtcccactgcaggctttgaaatttgaccatctccctgctgctgtctttgcaattgc

SEQ ID NO: 782046 - DNA, 120 bp, Artificial Sequence
  ENSG00000254126_27 (sequence is synthesized)
atgtacttgttcacaagttctcatggggttgggctgggggcaggggtggtttgtgctcctccgtcagttttctgtgcagcaggcacctgccgaggcgggctcagctccggccacccaggg

SEQ ID NO: 782047 - DNA, 120 bp, Artificial Sequence
  ENSG00000254126_28 (sequence is synthesized)
agctggagcaggctgggctgccaatggtgggggctgcagtgagaaggtctgcacccagcacctgacctttgtttgaagaaggaactgagctgctactacactctatagggccattatgat

SEQ ID NO: 782048 - DNA, 120 bp, Artificial Sequence
  ENSG00000254126_29 (sequence is synthesized)
gaaatatgccccccaaactccatccagctatcttttgactagcagttccacttgttggcatttatctgaaagaaatacatcaaaaagtggcatgcacaaagaaatacgcatcagattgtt

SEQ ID NO: 782049 - DNA, 120 bp, Artificial Sequence
  ENSG00000254126_30 (sequence is synthesized)
ccttctagtgctgcttactagctaaaaatgggaaataatccaaatgtccatcaaaagggactggtcagataaattcagacacagtctaataagggggtttaggcggctgctaaggaatga

SEQ ID NO: 782050 - DNA, 120 bp, Artificial Sequence
  ENSG00000254126_31 (sequence is synthesized)
gctagatccatatatgctgatatcaaatgatggtcatgacaaatgcatatatttttaaaacatctgtatagattattcttaatacaatatatggcgcaatacgtagtcactgttaaaatt

SEQ ID NO: 782051 - DNA, 120 bp, Artificial Sequence
  ENSG00000254126_32 (sequence is synthesized)
caagcacagaagaaaacaagcaaaacaaatatatgttgttagaagttaggatacagttacccttggtccagtgatggtcattaggagggagcatgaggtttgaaggtgagcgtttctgct

SEQ ID NO: 782052 - DNA, 120 bp, Artificial Sequence
  ENSG00000254126_33 (sequence is synthesized)
tctcaatctgggaatcacttatatgagtgtgtttcattagtaaaagtcatcaagctgtacactcagatatgttgactttagagctatggatatagatgtaaattatacttcaagaaagag

SEQ ID NO: 782053 - DNA, 120 bp, Artificial Sequence
  ENSG00000254126_34 (sequence is synthesized)
agaaagagactttttaaaatccaagtacagaacattgtagaaccgtgtaaaattggtatttggaagtttcttcagcaagcacatgggattacagctcatgcctgtaatcccagtactttg

SEQ ID NO: 782054 - DNA, 120 bp, Artificial Sequence
  ENSG00000254126_35 (sequence is synthesized)
acacagaatgatcacttgagctcaggagtttgagagcagcctaggcaacatagcaagacctcgactctacaaaaaatttttaaatttttttctgggcatggtggtgcttgcctggagtcc

SEQ ID NO: 782055 - DNA, 89 bp, Artificial Sequence
  ENSG00000254126_36 (sequence is synthesized)
taaatttttttctgggcatggtggtgcttgcctggagtcccagctattagggaggatgaggtgggaggatctccgtgatcacgccactg

SEQ ID NO: 782056 - DNA, 120 bp, Artificial Sequence
  ENSG00000254126_37 (sequence is synthesized)
agacagaccttgtctcaaaaataaattttttctaaaaaaagtttcttgtttttttttcttcccatattttttaaaacataaaattgaaatctcgagaatataatacataaaatagagaat

SEQ ID NO: 782057 - DNA, 120 bp, Artificial Sequence
  ENSG00000254126_38 (sequence is synthesized)
atattgttctgcagatttgatcttttttctctaataataaatcaaggcctccgggtatatttgtttgtatatgtacaggaaaaggtctgtaaggatttactttcagctgttaattgcagt

SEQ ID NO: 782058 - DNA, 120 bp, Artificial Sequence
  ENSG00000254126_39 (sequence is synthesized)
gactctggggaatttccacttctgctttgtacagttccttgtgtgaatttttacatcatgtattacttttgtagttggggaaaaagcaattaaaagtttggaaaaaaagaacctctagcc

SEQ ID NO: 782059 - DNA, 120 bp, Artificial Sequence
  ENSG00000254126_40 (sequence is synthesized)
atccgctttggtcaagagcacgtgggtggcctgtgtgcaggcttatcatcaataattgcaggacttggtggagtatggttgaacaggtgctcagactgcatgcgtgtctagcgaggccat

SEQ ID NO: 782060 - DNA, 120 bp, Artificial Sequence
  ENSG00000254126_41 (sequence is synthesized)
cctgaagctgcatgggagttgtaaaaaagttaccaacaagtttttagttatttgaataggtttttgaatagatttggaatgtgggaagcagttgcagaaataaacgtcttaatgactaaa

SEQ ID NO: 782061 - DNA, 83 bp, Artificial Sequence
  ENSG00000254206_0 (sequence is synthesized)
actctggctgaccatcatcatcgtgggactgactttggtggaagtccttggttacatattattattgcgtttccgacaagtta

SEQ ID NO: 782062 - DNA, 60 bp, Artificial Sequence
  ENSG00000254206_1 (sequence is synthesized)
acctgctgagcatctgcgggttccgcttccaccgtcagcggatgataatctcaagacacc

SEQ ID NO: 782063 - DNA, 120 bp, Artificial Sequence
  ENSG00000254206_2 (sequence is synthesized)
atctcaagacacctcccttagctactcaggaggctgaggcagaaaaaccacgcaaacccaagaggcagagggcggctgagatggaaccacctcccgaacccaagaggcggagggtcggtg

SEQ ID NO: 782064 - DNA, 120 bp, Artificial Sequence; identical to SEQ ID NO: 724187
  ENSG00000254206_3 (sequence is synthesized)

SEQ ID NO: 782065 - DNA, 120 bp, Artificial Sequence
  ENSG00000254206_4 (sequence is synthesized)
ggcgccctgaaaggaccaggacatgcgggggcggtggatgctcttttggctcctctttgggctcctgctggaatttatcagccatcagtgcatccgtgttatcaatactctggctgacca

SEQ ID NO: 782066 - DNA, 120 bp, Artificial Sequence
  ENSG00000254221_0 (sequence is synthesized)
atgcagagagccagagaagccgaaatgatgaaaagtcaggtactgtttcccttcctgctgtctttgttctgcggggccatctcccagcagatccgatacacgattccagaggagctagcc

SEQ ID NO: 782067 - DNA, 120 bp, Artificial Sequence
  ENSG00000254221_1 (sequence is synthesized)
aacggctcacgggtggggaaacttgccaaggatctggggctcagtgtccgggagttgccaactcgaaaactgcgggttagtgcagaggattatttcaacgttagtttggagagcggggat

SEQ ID NO: 782068 - DNA, 120 bp, Artificial Sequence
  ENSG00000254221_2 (sequence is synthesized)
ttgttagtgaacggtaggatagatcgagagaagatttgcggaaggaaacttgagtgtgcactagaattcgaaacggtcgctgaaaacccaatgaatgttttccacgtggttgttgtaatc

SEQ ID NO: 782069 - DNA, 120 bp, Artificial Sequence
  ENSG00000254221_3 (sequence is synthesized)
caagatattaatgacaatgcaccacgtttcgttgcaaaaggcattgacttagaaatttgtgagtcagccttacccggggtaaaattctctctggattctgctcaagatgcagatgtggaa

SEQ ID NO: 782070 - DNA, 120 bp, Artificial Sequence
  ENSG00000254221_4 (sequence is synthesized)
ggcaattcactgaagttatacaccatcaaccccaatcaatacttctctctgtcaacgaaggaaagtcctgatggaagtaaatatccggtattactgctggaaaaacctctagacagggaa

SEQ ID NO: 782071 - DNA, 120 bp, Artificial Sequence
  ENSG00000254221_5 (sequence is synthesized)
catcagagctctcatcgcttaatcctgactgccatggatggcggggacccgcctctaagcggcaccacccatatctggatccgagttacggatgccaatgataatgctcccgtgtttagc

SEQ ID NO: 782072 - DNA, 120 bp, Artificial Sequence
  ENSG00000254221_6 (sequence is synthesized)
caggaggtatacagggttagcctccaagaaaacgtaccgtggggaacctccgtgctgcgggtgatggccacagaccaggatgagggcattaatgcagagatcacctatgccttcctcaat

SEQ ID NO: 782073 - DNA, 120 bp, Artificial Sequence
  ENSG00000254221_7 (sequence is synthesized)
tccccaataagtaccagcctcttcaatctcaatccaaatactggcgacatcacaaccaatggcacattggattttgaagagacaagtagatatgtgttgagtgtggaagctaaggatgga

SEQ ID NO: 782074 - DNA, 120 bp, Artificial Sequence
  ENSG00000254221_8 (sequence is synthesized)
ggagtacacacagctcactgtaatgttcaaatagaaattgttgacgagaatgacaatgccccagaggtgacattcatgtccttctctaaccagattccagaggattcagaccttggaact

SEQ ID NO: 782075 - DNA, 120 bp, Artificial Sequence
  ENSG00000254221_9 (sequence is synthesized)
gtaatagccctcataaaagtgcgagacaaggattctgggcaaaatggcatggtgacatgctatactcaggaagaagttcctttcaaattagaatccacctcgaagaattattacaagctg

SEQ ID NO: 782076 - DNA, 120 bp, Artificial Sequence
  ENSG00000254221_10 (sequence is synthesized)
gtgattgctggagccctaaaccgggagcagacagcagactacaacgtcacaatcatagccaccgacaagggcaaaccagccctttcctccaggacaagcatcaccctgcacatctccgac

SEQ ID NO: 782077 - DNA, 120 bp, Artificial Sequence
  ENSG00000254221_11 (sequence is synthesized)
atcaacgacaatgcacctgttttccatcaggcctcctatgtggtccacgtgtctgagaacaacccacctggcgcctccattgcacaagtaagcgcctccgacccggatttgggacccaac

SEQ ID NO: 782078 - DNA, 120 bp, Artificial Sequence
  ENSG00000254221_12 (sequence is synthesized)
ggcagagtctcctactctattctggccagtgacctggagccgcgggagctgttgtcctacgtgtccgtgagcccgcagagcggggtggtgttcgcgcagcgcgccttcgaccacgagcag

SEQ ID NO: 782079 - DNA, 120 bp, Artificial Sequence
  ENSG00000254221_13 (sequence is synthesized)
ctgcgcgccttcgagctcacactgcaggccagggaccagggctcccccgcgctcagcgccaacgtgagcctgcgcgtgttggtgggcgacctcaatgacaatgcgccacgggtgctgtac

SEQ ID NO: 782080 - DNA, 120 bp, Artificial Sequence; identical to SEQ ID NO: 781767
  ENSG00000254221_14 (sequence is synthesized)

SEQ ID NO: 782081 - DNA, 120 bp, Artificial Sequence
  ENSG00000254221_15 (sequence is synthesized)
tcctaccacgtgctgcaggccagcgagcccgggctcttcagcctggggttgcgcacgggtgaggtgcgcacagcgcgtgccttgggcgacagggacgcggcccgccagcgcctgctggtc

SEQ ID NO: 782082 - DNA, 120 bp, Artificial Sequence
  ENSG00000254221_16 (sequence is synthesized)
gctgtgcgtgatggaggacagccgccactctccgccaccgccacgctgcacctaatcttcgcggatagcctgcaagaggtattgccagacctcagcgaccgccctgagccctctgacccc

SEQ ID NO: 782083 - DNA, 120 bp, Artificial Sequence
  ENSG00000254221_17 (sequence is synthesized)
cagacggaactgcagttttacctggttgtggccttggccttgatctcagtgctctttctcctcgcggtgattctagcgatcgccctgcgcctgcgacgttcctccagcctcgacactgag

SEQ ID NO: 782084 - DNA, 120 bp, Artificial Sequence
  ENSG00000254221_18 (sequence is synthesized)
ggctgctttcaaaccggtctctgctccaagtctgggcccggggttcctcccaaccacagcgaggggactttgccctattcctacaatctatgtattgcctctcattctgcaaagacagag

SEQ ID NO: 782085 - DNA, 120 bp, Artificial Sequence
  ENSG00000254221_19 (sequence is synthesized)
gctccccctcaggatctgctgtgtgatgatccttctatggttgtatgtgccagtaatgaagatcacaaaatcgcttatgacccttctttgtcttcgcaccaagccccgcccaacacggac

SEQ ID NO: 782086 - DNA, 120 bp, Artificial Sequence; identical to SEQ ID NO: 773797
  ENSG00000254221_20 (sequence is synthesized)

SEQ ID NO: 782087 - DNA, 120 bp, Artificial Sequence; identical to SEQ ID NO: 773798
  ENSG00000254221_21 (sequence is synthesized)

SEQ ID NO: 782088 - DNA, 120 bp, Artificial Sequence; identical to SEQ ID NO: 773799
  ENSG00000254221_22 (sequence is synthesized)

SEQ ID NO: 782089 - DNA, 120 bp, Artificial Sequence; identical to SEQ ID NO: 773800
  ENSG00000254221_23 (sequence is synthesized)

SEQ ID NO: 782090 - DNA, 120 bp, Artificial Sequence; identical to SEQ ID NO: 773801
  ENSG00000254221_24 (sequence is synthesized)

SEQ ID NO: 782091 - DNA, 120 bp, Artificial Sequence; identical to SEQ ID NO: 773802
  ENSG00000254221_25 (sequence is synthesized)

SEQ ID NO: 782092 - DNA, 120 bp, Artificial Sequence; identical to SEQ ID NO: 773803
  ENSG00000254221_26 (sequence is synthesized)

SEQ ID NO: 782093 - DNA, 120 bp, Artificial Sequence; identical to SEQ ID NO: 773804
  ENSG00000254221_27 (sequence is synthesized)

SEQ ID NO: 782094 - DNA, 120 bp, Artificial Sequence; identical to SEQ ID NO: 773805
  ENSG00000254221_28 (sequence is synthesized)

SEQ ID NO: 782095 - DNA, 120 bp, Artificial Sequence; identical to SEQ ID NO: 773806
  ENSG00000254221_29 (sequence is synthesized)

SEQ ID NO: 782096 - DNA, 120 bp, Artificial Sequence; identical to SEQ ID NO: 773807
  ENSG00000254221_30 (sequence is synthesized)

SEQ ID NO: 782097 - DNA, 120 bp, Artificial Sequence; identical to SEQ ID NO: 773808
  ENSG00000254221_31 (sequence is synthesized)

SEQ ID NO: 782098 - DNA, 120 bp, Artificial Sequence; identical to SEQ ID NO: 773809
  ENSG00000254221_32 (sequence is synthesized)

SEQ ID NO: 782099 - DNA, 120 bp, Artificial Sequence; identical to SEQ ID NO: 773810
  ENSG00000254221_33 (sequence is synthesized)

SEQ ID NO: 782100 - DNA, 120 bp, Artificial Sequence; identical to SEQ ID NO: 773811
  ENSG00000254221_34 (sequence is synthesized)

SEQ ID NO: 782101 - DNA, 120 bp, Artificial Sequence; identical to SEQ ID NO: 773812
  ENSG00000254221_35 (sequence is synthesized)

SEQ ID NO: 782102 - DNA, 120 bp, Artificial Sequence; identical to SEQ ID NO: 773813
  ENSG00000254221_36 (sequence is synthesized)

SEQ ID NO: 782103 - DNA, 120 bp, Artificial Sequence; identical to SEQ ID NO: 773814
  ENSG00000254221_37 (sequence is synthesized)

SEQ ID NO: 782104 - DNA, 120 bp, Artificial Sequence
  ENSG00000254221_38 (sequence is synthesized)
ttcctgctttgtccggtgcactgagcacagacgctgctcctgttcaccctcgagcgcctaactaataagtcctaagctcaaatcacagaagtccagggtgctgccatttctttttgaaaa

SEQ ID NO: 782105 - DNA, 120 bp, Artificial Sequence
  ENSG00000254245_0 (sequence is synthesized)
cagactcagaagatccggggcggctgccaacctcacctcttagtcaaccagctgtttgacctgtgaattaggcccgtaaaagacttcgtttcttgagaaaataagattggagtccgtcgt

SEQ ID NO: 782106 - DNA, 120 bp, Artificial Sequence
  ENSG00000254245_1 (sequence is synthesized)
aggaaactggaaccgaattcagagaaagcgattcaccgaaaaggaaatgaccaattgcctgagtttccgaaatggcagaggactggccctgctgtgcgcgctcctggggacgctgtgcga

SEQ ID NO: 782107 - DNA, 120 bp, Artificial Sequence
  ENSG00000254245_2 (sequence is synthesized)
aacaggatccggtcagatccgctactcggtgtctgaggagctagataaaggttccttcgtgggcaacatcgctaacgacctggggctagagccccgggagctggcggagcgcggagtccg

SEQ ID NO: 782108 - DNA, 120 bp, Artificial Sequence
  ENSG00000254245_3 (sequence is synthesized)
catcgtctccagaggtaggacgcagcttttctctctgaatccgcaaagcggcagcttggtcaccgcggagaggatagaccgggaggagctctgcgctcagatcccgctgtgtctggtaaa

SEQ ID NO: 782109 - DNA, 120 bp, Artificial Sequence
  ENSG00000254245_4 (sequence is synthesized)
aattaacattctggttgaggataaattgaaaatttttgaagtagaaatagaaattaaagatattaatgataatgctcctaatttcccaacagaggaattggaaataaaaattggtgaact

SEQ ID NO: 782110 - DNA, 120 bp, Artificial Sequence
  ENSG00000254245_5 (sequence is synthesized)
aacggttcctggaacccgatttccaattaaaactgcttttgacccagatgtaggcattaactccctgcagaactacaagcttagccccaatgactacttctctctggctgtgaatagcgt

SEQ ID NO: 782111 - DNA, 120 bp, Artificial Sequence
  ENSG00000254245_6 (sequence is synthesized)
ctctgagggggccaagtatccagagctggtgctggagcgggccctggaccgtgagaaaaaagaaattcaccagcttgtcctggttgcctctgatggtggcgaccctgtccactctggcaa

SEQ ID NO: 782112 - DNA, 120 bp, Artificial Sequence
  ENSG00000254245_7 (sequence is synthesized)
cttgcacatccaagtgatagtcctggatgcaaatgacaacccaccaatgtttactcagcctgagtaccgtgtgagtgtttgggagaacgtgcctgtgggtacccggctgctcacggtgaa

SEQ ID NO: 782113 - DNA, 120 bp, Artificial Sequence
  ENSG00000254245_8 (sequence is synthesized)
tgccactgaccctgacgagggattcaatgctcaagtgtcttatattctagataaaatgcctgggaaaatcgctgagattttccatcttaactcagtgagtggagaagtatcaatattaaa

SEQ ID NO: 782114 - DNA, 120 bp, Artificial Sequence
  ENSG00000254245_9 (sequence is synthesized)
aagtctagattatgaggatgccatgttctatgaaattaaaattgaagcacaggatggaccaggtcttctttcaagagccaagattctagtcacggttctggatgtgaatgacaatgctcc

SEQ ID NO: 782115 - DNA, 120 bp, Artificial Sequence
  ENSG00000254245_10 (sequence is synthesized)
agaaattacaatcacgtctctcacaagctcagtcccagaagagggcaccgttggaagagaaattgctcttatcgacgtgcatgaccgagattctgggcagaatgggcaggttgaagtttt

SEQ ID NO: 782116 - DNA, 120 bp, Artificial Sequence
  ENSG00000254245_11 (sequence is synthesized)
tgtcctgggaaatctgccatttaagttagaaaaatcaatagatcaatattaccgcttagtgacggccacatccctggaccgcgaacaaatatcagaatataacattagtctgagagcctc

SEQ ID NO: 782117 - DNA, 120 bp, Artificial Sequence
  ENSG00000254245_12 (sequence is synthesized)
agatgggggaagcccgccactgtccacagaaactcacatcaccctgcatgtgattgacatcaatgacaacccacccaccttccctcatttatcctactccgcctacattccagaaaacaa

SEQ ID NO: 782118 - DNA, 120 bp, Artificial Sequence
  ENSG00000254245_13 (sequence is synthesized)
ccccagaggagcctccatcttctcagtgacagcccaggacccagatagcaacaacaacgcccgcatcacttatgcattgaccgaggacactctccagggggcgcccctgtcctccttcgt

SEQ ID NO: 782119 - DNA, 120 bp, Artificial Sequence
  ENSG00000254245_14 (sequence is synthesized)
ctctatcaactccaacactggcgtcctatacgcgctgagatccttcgactacgagcaatttagagacttaaagctactggtgacagccagcgacagcgggaaccctccactcagcagcaa

SEQ ID NO: 782120 - DNA, 120 bp, Artificial Sequence
  ENSG00000254245_15 (sequence is synthesized)
cgtgtcgctgaacctgttcgtgctggaccagaacgacaacgcgcccgagatcctgtaccccgccctccccacagacggttccactggcgtggagctggcgcctcgctccgcagagcccgg

SEQ ID NO: 782121 - DNA, 120 bp, Artificial Sequence
  ENSG00000254245_16 (sequence is synthesized)
ctggtgaccaaggtggtggcggtggacagagactcgggccagaacgcctggctgtcctaccgcctgctcaaggccagcgagccgggactcttctcggtgggtctgcacacgggcgaggtg

SEQ ID NO: 782122 - DNA, 120 bp, Artificial Sequence
  ENSG00000254245_17 (sequence is synthesized)
ggtgcgcacggcgcgagccctgctggacagagacgcgctcaagcagagcctcgtggtggccgtccaggaccacggccagccccctctctccgccactgtcacgctcaccgtggccgtggc

SEQ ID NO: 782123 - DNA, 120 bp, Artificial Sequence
  ENSG00000254245_18 (sequence is synthesized)
cgacaggatccccgacatcctggccgacctgggcagcctcgagccctccgccaaacccaacgattcggacctcactctgtacctggtggtggcggtggccgcggtctcctgcgtcttcct

SEQ ID NO: 782124 - DNA, 120 bp, Artificial Sequence
  ENSG00000254245_19 (sequence is synthesized)
cccggctcgcactttgtgggcgcggacggggttcgggctttcctgcagacctattcccacgaggtctccctcactgcggactcgcggaagagccacctgattttcccccagcccaactat

SEQ ID NO: 782125 - DNA, 120 bp, Artificial Sequence
  ENSG00000254245_20 (sequence is synthesized)
gcggacacgctcatcagccaggagagctgtgagaaaagcgagcctcttctgataactcaggatttacttgaaatgaaaggagattccaacctacttcagcaagccccgcccaacacggac

SEQ ID NO: 782126 - DNA, 120 bp, Artificial Sequence; identical to SEQ ID NO: 773797
  ENSG00000254245_21 (sequence is synthesized)

SEQ ID NO: 782127 - DNA, 120 bp, Artificial Sequence; identical to SEQ ID NO: 773798
  ENSG00000254245_22 (sequence is synthesized)

SEQ ID NO: 782128 - DNA, 120 bp, Artificial Sequence; identical to SEQ ID NO: 773799
  ENSG00000254245_23 (sequence is synthesized)

SEQ ID NO: 782129 - DNA, 120 bp, Artificial Sequence; identical to SEQ ID NO: 773800
  ENSG00000254245_24 (sequence is synthesized)

SEQ ID NO: 782130 - DNA, 120 bp, Artificial Sequence; identical to SEQ ID NO: 773801
  ENSG00000254245_25 (sequence is synthesized)

SEQ ID NO: 782131 - DNA, 120 bp, Artificial Sequence; identical to SEQ ID NO: 773802
  ENSG00000254245_26 (sequence is synthesized)

SEQ ID NO: 782132 - DNA, 120 bp, Artificial Sequence; identical to SEQ ID NO: 773803
  ENSG00000254245_27 (sequence is synthesized)

SEQ ID NO: 782133 - DNA, 120 bp, Artificial Sequence; identical to SEQ ID NO: 773804
  ENSG00000254245_28 (sequence is synthesized)

SEQ ID NO: 782134 - DNA, 120 bp, Artificial Sequence; identical to SEQ ID NO: 773805
  ENSG00000254245_29 (sequence is synthesized)

SEQ ID NO: 782135 - DNA, 120 bp, Artificial Sequence; identical to SEQ ID NO: 773806
  ENSG00000254245_30 (sequence is synthesized)

SEQ ID NO: 782136 - DNA, 120 bp, Artificial Sequence; identical to SEQ ID NO: 773807
  ENSG00000254245_31 (sequence is synthesized)

SEQ ID NO: 782137 - DNA, 120 bp, Artificial Sequence; identical to SEQ ID NO: 773808
  ENSG00000254245_32 (sequence is synthesized)

SEQ ID NO: 782138 - DNA, 120 bp, Artificial Sequence; identical to SEQ ID NO: 773809
  ENSG00000254245_33 (sequence is synthesized)

SEQ ID NO: 782139 - DNA, 120 bp, Artificial Sequence; identical to SEQ ID NO: 773810
  ENSG00000254245_34 (sequence is synthesized)

SEQ ID NO: 782140 - DNA, 120 bp, Artificial Sequence; identical to SEQ ID NO: 773811
  ENSG00000254245_35 (sequence is synthesized)

SEQ ID NO: 782141 - DNA, 120 bp, Artificial Sequence; identical to SEQ ID NO: 773812
  ENSG00000254245_36 (sequence is synthesized)

SEQ ID NO: 782142 - DNA, 120 bp, Artificial Sequence; identical to SEQ ID NO: 773813
  ENSG00000254245_37 (sequence is synthesized)

SEQ ID NO: 782143 - DNA, 120 bp, Artificial Sequence; identical to SEQ ID NO: 773814
  ENSG00000254245_38 (sequence is synthesized)

SEQ ID NO: 782144 - DNA, 120 bp, Artificial Sequence
  ENSG00000254402_0 (sequence is synthesized)
ctcccagcccggcgactgctcgggcccggccgccacctgcacggcgggggagccgctcgccgcgggagcgtcaggagggcacgcgtctgcggctgaaccgcggaagggccggtgaggaac

SEQ ID NO: 782145 - DNA, 120 bp, Artificial Sequence
  ENSG00000254402_1 (sequence is synthesized)
cgggcctcgggagatggccctgagggcccccgcactgctgccgctgctgctgctactactgccgctccgcgccgccggctgcccagcagcctgccgctgctacagcgccacggtggagtg

SEQ ID NO: 782146 - DNA, 120 bp, Artificial Sequence
  ENSG00000254402_2 (sequence is synthesized)
tggcgccctgcggttgcgcgtcgtcccgctgggaatcccgccagggacgcagacactgttcctgcaggacaacaacatcgcccgcctagagccgggagccctggcgccactcgccgctct

SEQ ID NO: 782147 - DNA, 120 bp, Artificial Sequence
  ENSG00000254402_3 (sequence is synthesized)
gcgccggctctacctgcacaacaacagcctgcgcgccctggaggccggcgccttccgcgcgcagccgcgcctgctggagctggcgctcactagcaaccggctgcgcggcttgcgcagcgg

SEQ ID NO: 782148 - DNA, 120 bp, Artificial Sequence
  ENSG00000254402_4 (sequence is synthesized)
cgccttcgtaggcctggcccagctgcgcgtgctctacctggcgggcaaccagctggcgcggctgctggatttcaccttcttgcacctgccgcgactgcaggagcttcacctgcaagaaaa

SEQ ID NO: 782149 - DNA, 120 bp, Artificial Sequence
  ENSG00000254402_5 (sequence is synthesized)
cagcattgagctgctggaggaccaggctctagcggggctgtcctccctagcactgctggacctcagcaggaaccagctgggcaccatcagccgagaggccctgcagcccctggccagtct

SEQ ID NO: 782150 - DNA, 120 bp, Artificial Sequence
  ENSG00000254402_6 (sequence is synthesized)
gcaagtcctgcgcctcacagagaacccatggcgctgtgactgcgccctgcactggctgggtgcctggatcaaggagggcggccagcggctgctcacctccagggacaggaagatcatgtg

SEQ ID NO: 782151 - DNA, 120 bp, Artificial Sequence
  ENSG00000254402_7 (sequence is synthesized)
gtgcagccgctggagctcacagccaacctgggtgaggacctgcgggttgcctgccaagcctccggctacccgcagccattggtgacctggagaaaggtgccccagcctcgcgagggccgg

SEQ ID NO: 782152 - DNA, 120 bp, Artificial Sequence
  ENSG00000254402_8 (sequence is synthesized)
ccgcgagcccaggcccagctagaaggcgggttgctgggcctgggcggacactcggcatccgacacgggcagcggcatgctcttcctcagcaacatcacgctggcgcacgccggtaagtac

SEQ ID NO: 782153 - DNA, 120 bp, Artificial Sequence
  ENSG00000254402_9 (sequence is synthesized)
gtaagtacgagtgcgaggcctccaacgccggcggcgctgcccgcgtgcccttccggctcctggtcaacgcgtcccggcagcagccgcagcagcccgcgcaaccgccgcctccggccgccc

SEQ ID NO: 782154 - DNA, 120 bp, Artificial Sequence
  ENSG00000254402_10 (sequence is synthesized)
gcgagccccggcccgaggcgggcagcatggccttccgcgccctgggcgtggccacacagacggccattgcggcggccatcgcgctgctggcgctcacggcgctgctcctggtcgccatga

SEQ ID NO: 782155 - DNA, 120 bp, Artificial Sequence
  ENSG00000254402_11 (sequence is synthesized)
atgatctgtcgccggcgccgcaggcgaaaaaaggcgcgggggcctccgggggagggagcgctgttcgtcaacgactacttggacggcccctgtacgttcgcacagctagaggagctccgc

SEQ ID NO: 782156 - DNA, 120 bp, Artificial Sequence
  ENSG00000254402_12 (sequence is synthesized)
gacgagcgcggccacgagatgttcgtcatcaaccgctccaagccgctcttcgccgagggtccggcggaggcgcccgctgactgcggcccggaacagggggcggggccgggactccgcgtg

SEQ ID NO: 782157 - DNA, 120 bp, Artificial Sequence
  ENSG00000254402_13 (sequence is synthesized)
cccccgccggtcgcctacgagatccactgctagggccgcgggcgcgcggatgacgtgggcgccggagattggccggtgcggcctcgcgcatgctccgtcagtaaaggtggaagccgcgca

SEQ ID NO: 782158 - DNA, 120 bp, Artificial Sequence
  ENSG00000254415_0 (sequence is synthesized)
agccggacctgggactgggctggggccctggcggatggagacatgctgcccctgctgctgctgcccctgctgtggggggggtccctgcaggagaagccagtgtacgagctgcaagtgcag

SEQ ID NO: 782159 - DNA, 120 bp, Artificial Sequence
  ENSG00000254415_1 (sequence is synthesized)
aagtcggtgacggtgcaggagggcctgtgcgtccttgtgccctgctccttctcttacccctggagatcctggtattcctctcccccactctacgtctactggttccgggacggggagatc

SEQ ID NO: 782160 - DNA, 120 bp, Artificial Sequence
  ENSG00000254415_2 (sequence is synthesized)
ccatactacgctgaggttgtggccacaaacaacccagacagaagagtgaagccagagacccagggccgattccgcctccttggggatgtccagaagaagaactgctccctgagcatcgga

SEQ ID NO: 782161 - DNA, 120 bp, Artificial Sequence
  ENSG00000254415_3 (sequence is synthesized)
gatgccagaatggaggacacgggaagctatttcttccgcgtggagagaggaagggatgtaaaatatagctaccaacagaataagctgaacttggaggtgacagccctgatagagaaaccc

SEQ ID NO: 782162 - DNA, 120 bp, Artificial Sequence
  ENSG00000254415_4 (sequence is synthesized)
gacatccactttctggagcctctggagtccggccgccccacaaggctgagctgcagccttccaggatcctgtgaagcgggaccacctctcacattctcctggacggggaatgccctcagc

SEQ ID NO: 782163 - DNA, 120 bp, Artificial Sequence
  ENSG00000254415_5 (sequence is synthesized)
cccctggaccccgagaccacccgctcctcggagctcaccctcacccccaggcccgaggaccatggcaccaacctcacctgtcaggtgaaacgccaaggagctcaggtgaccacggagaga

SEQ ID NO: 782164 - DNA, 120 bp, Artificial Sequence
  ENSG00000254415_6 (sequence is synthesized)
actgtccagctcaatgtctcctatgctccacagaacctcgccatcagcatcttcttcagaaatggcacaggcacagccctgcggatcctgagcaatggcatgtcggtgcccatccaggag

SEQ ID NO: 782165 - DNA, 120 bp, Artificial Sequence
  ENSG00000254415_7 (sequence is synthesized)
ggccagtccctgttcctcgcctgcacagttgacagcaacccccctgcctcactgagctggttccgggagggaaaagccctcaatccttcccagacctcaatgtctgggaccctggagctg

SEQ ID NO: 782166 - DNA, 120 bp, Artificial Sequence
  ENSG00000254415_8 (sequence is synthesized)
gtgtaactgagaaacagcagggctcctggcccctcgtcctcaccctgatcaggggggctctcatgggggctggcttcctcctcacctatggcctcacctggatctactataccaggtgtg

SEQ ID NO: 782167 - DNA, 120 bp, Artificial Sequence
  ENSG00000254415_9 (sequence is synthesized)
gaggcccccagcagagcagggctgagaggcctggctgagcccctcccgctcaagacagaactgaggtgtggacacttagccctgtgggacacatgcaggacatcactgtcagcttctttc

SEQ ID NO: 782168 - DNA, 120 bp, Artificial Sequence
  ENSG00000254415_10 (sequence is synthesized)
tggaagctcacatcccactgactacccctcttttccttcctgccccataccccttctacttattcccctctgcttgtgagtcttgccccaccacacctgcatccccatctgcaccccatc

SEQ ID NO: 782169 - DNA, 120 bp, Artificial Sequence
  ENSG00000254415_11 (sequence is synthesized)
ccctctccacctgcccttctcttccctctccatccaccatctccagccctgtgaagggaatgtactttcggtcttatacccccattacccattacccaaaagttaccttttttttttttt

SEQ ID NO: 782170 - DNA, 60 bp, Artificial Sequence
  ENSG00000254415_12 (sequence is synthesized)
ccattacccaaaagtttcagtggcacaatctccgttcactgcaacctccacctctggggt

SEQ ID NO: 782171 - DNA, 120 bp, Artificial Sequence
  ENSG00000254415_13 (sequence is synthesized)
aaagtgctggcattacaggtatgagccaccgtgcctggctgccaaaagttaccttcttaacacttgaatttctggtctcctcagcttccctatccatataggcacagagaggcagcattt

SEQ ID NO: 782172 - DNA, 120 bp, Artificial Sequence
  ENSG00000254415_14 (sequence is synthesized)
gaggcagcatttgttttccagttaaaactctacctcattgtgattattatccaatacaattgttacaaaataagtaaaacttttatgaaacaatacaacataactgattttactctttaa

SEQ ID NO: 782173 - DNA, 120 bp, Artificial Sequence
  ENSG00000254440_0 (sequence is synthesized)
gaccttaaatatatcgaggtggctaattgatgtataataatttacaaaattattcttctatgctacagagctacaattcaatttacagtagtaaatatgagggccttcttaaggaaccag

SEQ ID NO: 782174 - DNA, 120 bp, Artificial Sequence
  ENSG00000254440_1 (sequence is synthesized)
aaatatgaggatatgcacaatattattcacattttacagatcagaaaattgaggcacagattaagtaacttcccaaggctaccaggcattctagctccagaaactgtgctcttaccattc

SEQ ID NO: 782175 - DNA, 120 bp, Artificial Sequence
  ENSG00000254440_2 (sequence is synthesized)
tgctacaaggtatttcgaaaaaaagaaaaagtaaaaagaagtcaaaaggcaacagagttcattgattattccatagaacagtcacaccatgcaattctcacacccttgcagacacacttg

SEQ ID NO: 782176 - DNA, 120 bp, Artificial Sequence
  ENSG00000254440_3 (sequence is synthesized)
accatgaaaggttcctcaatgaaatgttcctcattatcttcagaagccatattattcacattgactttgcagttaactcagaccctaggtctggaatgctgtcttctctacttatccaaa

SEQ ID NO: 782177 - DNA, 120 bp, Artificial Sequence
  ENSG00000254440_4 (sequence is synthesized)
actatacatccacagatcatataaactctcagccctgctgcaaagcctttccagaaaaataaaaatggttgaaaaggcaattctgctaccaatgactgtttaagcccagccaagtaactg

SEQ ID NO: 782178 - DNA, 120 bp, Artificial Sequence
  ENSG00000254440_5 (sequence is synthesized)
aaccattccaacttcaatttacttatgaaaagaatttgatgatgtaggaggttatttcaattctaaaatacaaacccatgttgatctttctcaatcttgaactcatagattattatctat

SEQ ID NO: 782179 - DNA, 120 bp, Artificial Sequence
  ENSG00000254440_6 (sequence is synthesized)
tatctcaatttagtttgttatttatcctagtgggccattaaaaactaccacatgtgtttctgtctctccattagtcaataactaaactaacgagcaattagtaagccatgtgccagatgc

SEQ ID NO: 782180 - DNA, 120 bp, Artificial Sequence
  ENSG00000254440_7 (sequence is synthesized)
tccgctaggcaccagagggataaaaacaatacttatagtataccactaattttcgcttagtaactagtgaaatgttcaagtcatgcctgagtcaagagttgaggagacattacaatgtgt

SEQ ID NO: 782181 - DNA, 120 bp, Artificial Sequence
  ENSG00000254440_8 (sequence is synthesized)
aatggaaaccaaggaaagtgaaactttggataagtggggactagtgtatttatatatttaattgatttctgactctatcattggcctccaaacacagattgtgtttttctttggttttgt

SEQ ID NO: 782182 - DNA, 120 bp, Artificial Sequence
  ENSG00000254440_9 (sequence is synthesized)
tttcttcactatgggatcttctgtgcccagcacagtgcctgacacatagaaaacaatcaaatatttgctgaataaatgattaaaaaatcagagaactttcccattctgtttggatctata

SEQ ID NO: 782183 - DNA, 120 bp, Artificial Sequence
  ENSG00000254440_10 (sequence is synthesized)
aaacacttggaaatggtggtgctttaaaaagatattaatagataatatgaaaatctccatctcaaaaataatgcataaactatttaaaggaaaatcacatctccaggctttcaatgtttg

SEQ ID NO: 782184 - DNA, 120 bp, Artificial Sequence
  ENSG00000254440_11 (sequence is synthesized)
ttcattactttttcatatatttttaccatctgctgaaggcagtcatatcaaagggtaaagaaagatgggaggaaaactcagtaagaattatattagtctgtttgcaaagtagaaaaagat

SEQ ID NO: 782185 - DNA, 120 bp, Artificial Sequence
  ENSG00000254440_12 (sequence is synthesized)
tctcatcactcaaccttatgagcaggaagagggaaggctgtttgagaaccatttacttagcagaaccacatattttagacacttccctgcattaactgcacaaacaatatgtttgcaaac

SEQ ID NO: 782186 - DNA, 120 bp, Artificial Sequence
  ENSG00000254440_13 (sequence is synthesized)
ttgttagatcaacctccaacaacgacacattcaggagttaaatatttttcatcaaacattggatttttccttaacgctagagattgctacaaatcttctgaagggtctcaatggcttcag

SEQ ID NO: 782187 - DNA, 120 bp, Artificial Sequence
  ENSG00000254440_14 (sequence is synthesized)
gctaagaagagatttctccctgttataagcagcaagacaaattagccatttcactctcaaacttcactaatgatcacattctttccaaaaggaactctagaagaccaaatgccccgagtt

SEQ ID NO: 782188 - DNA, 120 bp, Artificial Sequence
  ENSG00000254440_15 (sequence is synthesized)
aagaacatcaaaactaaccatctgaagaaacttcccaagtgtaagactctgccattaaaacattaccgagaggggactcaaacagtctttcttcctttgtcgtgtttcttgctcccagac

SEQ ID NO: 782189 - DNA, 120 bp, Artificial Sequence
  ENSG00000254440_16 (sequence is synthesized)
caaggcactgacgacagtactgatacataatttaaaagcacactcccttccactttgtaataccagaactctaattggacaccctgaagcttaggactaccagccatacaaatagtaaac

SEQ ID NO: 782190 - DNA, 120 bp, Artificial Sequence
  ENSG00000254440_17 (sequence is synthesized)
ctaccagccatacaaatagtaaactctgtccacgattcactcatctgtgtattttctatagatgtttactaggcgtttgttatataaaaataccccggccaggcacggtggctcacgcct

SEQ ID NO: 782191 - DNA, 120 bp, Artificial Sequence
  ENSG00000254466_0 (sequence is synthesized)
cccattgaaactcccttaccaacagcaaaatcagccacttgacttctctgttgtccaataacattctctttccaattcataaattaagcatgagcctcagaggtttgaacataagtcaag

SEQ ID NO: 782192 - DNA, 120 bp, Artificial Sequence
  ENSG00000254466_1 (sequence is synthesized)
gacacaatggaaaaactttaaaagatatgattctttgaatctgacttttctctccaaaagcagagcaaagacactgcgatatttagcatagcaaagggcttaacttttaaacaagatttt

SEQ ID NO: 782193 - DNA, 120 bp, Artificial Sequence
  ENSG00000254466_2 (sequence is synthesized)
caagaattaatgccagtagtcttctgttatgcactatatctaatagcatcaaatttgtagttggagttttgggatcaaaggaactaggtatatcaaatgcttcagagttaaaataatcat

SEQ ID NO: 782194 - DNA, 120 bp, Artificial Sequence
  ENSG00000254466_3 (sequence is synthesized)
ctcaatgacagaaacaacaaagactaactgaaatctgaaaaacgtgaacaatgcaacaaactgcaaaaactacaaccgcatgggaagtttctgcactgcattctaggtgtttaggaagac

SEQ ID NO: 782195 - DNA, 120 bp, Artificial Sequence
  ENSG00000254466_4 (sequence is synthesized)
aacaaaataaatatcccagtgctttcacatgacatggtttaaaaccaaagagaataaagaggatgattgaatggagatggaaaactgcaccagggtaaaagaatttattttccttggcct

SEQ ID NO: 782196 - DNA, 120 bp, Artificial Sequence
  ENSG00000254466_5 (sequence is synthesized)
gacccagaatcgggaagtgagcttagtcttatttcttttcctactcttggtgtatgtgacaactttgctgggaaacctcctcatcatggtcactgttacctgtgaatctcgccttcacac

SEQ ID NO: 782197 - DNA, 120 bp, Artificial Sequence
  ENSG00000254466_6 (sequence is synthesized)
gcccatgtattttttgctccataatttatctattgccgatatctgcttctcttccatcacagtgcccaaggttctggtggaccttctgtctgaaagaaagaccatctccttcaatcattg

SEQ ID NO: 782198 - DNA, 120 bp, Artificial Sequence
  ENSG00000254466_7 (sequence is synthesized)
cttcactcagatgtttctattccaccttattggaggggtggatgtattttctctttcggtgatggcattggatcgatatgtggccatctccaagcccctgcactatgcgactatcatgag

SEQ ID NO: 782199 - DNA, 120 bp, Artificial Sequence
  ENSG00000254466_8 (sequence is synthesized)
tagagaccattgcattgggctcacagtggctgcctggttggggggctttgtccactccatcgtgcagatttccctgttgctcccactccctttctgcggacccaatgttcttgacacttt

SEQ ID NO: 782200 - DNA, 120 bp, Artificial Sequence
  ENSG00000254466_9 (sequence is synthesized)
ctactgtgatgtccaccgggtcctcaaactggcccatacagacattttcatacttgaactactaatgatttccaacaatggactgctcaccacactgtggtttttcctgctcctggtgtc

SEQ ID NO: 782201 - DNA, 120 bp, Artificial Sequence
  ENSG00000254466_10 (sequence is synthesized)
actgtggtgaccctgcatttcgtgccctgcatctatgtctatgcccggcccttcactgccctccccatggataaggccatctctgtcaccttcactgtcatctcccctctgctcaacccc

SEQ ID NO: 782202 - DNA, 120 bp, Artificial Sequence
  ENSG00000254466_11 (sequence is synthesized)
ttgatctacactctgaggaaccatgagatgaagtcagccatgaggagactgaagagaagacttgtgccttctgatagaaaatagaaaaaaaaatcctcagctcttcatcaccaaagatat

SEQ ID NO: 782203 - DNA, 120 bp, Artificial Sequence
  ENSG00000254466_12 (sequence is synthesized)
tatttattatttttcccatgaagtcatattcatatattcaaatatattgtcaaaccaactacacttagtaataattaatttttctatttatgttagtaagtaactgataagcttctggtc

SEQ ID NO: 782204 - DNA, 120 bp, Artificial Sequence
  ENSG00000254466_13 (sequence is synthesized)
ggtcagggagagattcacaccttctaattgaaaataaaccagagctccctcctctttaccaccaagattttgtttcatgatttttcttccatggactccaagttctgaaagtgttgcctg

SEQ ID NO: 782205 - DNA, 120 bp, Artificial Sequence
  ENSG00000254466_14 (sequence is synthesized)
agttctgaaagtgttgcctgctgaattgaatatatttatttagtgattgctaagtatttgttttattttcataagtaatacataaaattatatatatacctagcaaatgcatattatata

SEQ ID NO: 782206 - DNA, 120 bp, Artificial Sequence
  ENSG00000254466_15 (sequence is synthesized)
atttagttgacataaatattaataatttaaacagagcctttgtgattcagaaaagagagggaaaattgttagcaaatgtgtatatgattttgcagtccaattttaaagaaaaattaagcc

SEQ ID NO: 782207 - DNA, 120 bp, Artificial Sequence
  ENSG00000254466_16 (sequence is synthesized)
aaatgcacgcagacattatcattacctttctgctcctattacagtaaatgaaggtgtggggtgtatctgaaacacaatggagtttggggattgactttctgtataattttcataaggtaa

SEQ ID NO: 782208 - DNA, 120 bp, Artificial Sequence
  ENSG00000254466_17 (sequence is synthesized)
acgtatcctacatgatccttatgatgggcaaggtcattaccttgccctttcttgaaccccaagctcactggccaccctaccgcatttccttggcactctgtgcttagggttagcattgca

SEQ ID NO: 782209 - DNA, 120 bp, Artificial Sequence
  ENSG00000254466_18 (sequence is synthesized)
ctcaggactctattttgaaatttcctattttcttgtctctttctcttactgggcagtgacttccccaggagcagggattatgttttatttactgtcacagcagctaaaacatactaagac

SEQ ID NO: 782210 - DNA, 120 bp, Artificial Sequence
  ENSG00000254466_19 (sequence is synthesized)
ttcaacaatatgttgctgaataaatagctcaatgattgaatgttttcacttacttgatatactctgtggcctgtgagtttctacaaatgacaaaaacacattaagctactttaagctatg

SEQ ID NO: 782211 - DNA, 120 bp, Artificial Sequence
  ENSG00000254469_0 (sequence is synthesized)
aagtttaaattccgctccctccacgaaagagttgtagtgagtgaaaataaatattaaaacacacggaaatgtattttcctggctgcagcacctgccatcttgcctcggtaggactcattt

SEQ ID NO: 782212 - DNA, 120 bp, Artificial Sequence
  ENSG00000254469_1 (sequence is synthesized)
tcaaaaacagcagcttcttgaagccccagaacgcattcctgtgctacggaagacggaagagtagctctcggggtcagaaggcgaaggtcagaaggccgaattggcgggagaataggtttg

SEQ ID NO: 782213 - DNA, 120 bp, Artificial Sequence
  ENSG00000254469_2 (sequence is synthesized)
gtggtccgagatccgaggcaacggtggctcctcgaggtccacggtcccgggagtaatgtgaggattcttgcttttctggaagctaacacatagtcagtgccaaagtagtgacagaagaaa

SEQ ID NO: 782214 - DNA, 120 bp, Artificial Sequence
  ENSG00000254469_3 (sequence is synthesized)
tcttgagaggaagcatttttgtcttgtacttgaaacagctgctgggcccaccatggctcctgtgaagatcagccatgtggtatcattttcttctcaggatcccaagtatcctgtagagaa

SEQ ID NO: 782215 - DNA, 120 bp, Artificial Sequence
  ENSG00000254469_4 (sequence is synthesized)
cttgctaaacccagatagtccaaggagaccttggctcggctgccctcaggacaagagtgggcaattgaaagtagaactacagctggagagggcagtgcccactggctacattgatgtggg

SEQ ID NO: 782216 - DNA, 120 bp, Artificial Sequence
  ENSG00000254469_5 (sequence is synthesized)
taactgtggctgtgcgttcctgcaaattgatgtgggccattcttcctggcccctggacagacctttcataaccctgctccctgcaaccacgctaatgtctctaactgattcaaagcaggg

SEQ ID NO: 782217 - DNA, 120 bp, Artificial Sequence
  ENSG00000254469_6 (sequence is synthesized)
gaagaaccgctccggggtccgcatgtttaaagatggtaaagagggcaaaagcagaaaagatgggggtggtctttatgagaaacagagatgcagtactaaagaggactgtgagtgctatta

SEQ ID NO: 782218 - DNA, 120 bp, Artificial Sequence
  ENSG00000254469_7 (sequence is synthesized)
tgaggatgcatgctagctggggagatggagatttatgaactatttatatttatatataacttgtggttcggtagggcccaatatatagaacacacacacttattgattaatatatttttg

SEQ ID NO: 782219 - DNA, 65 bp, Artificial Sequence
  ENSG00000254469_8 (sequence is synthesized)
atatatagaacacacacacttattgattaatatattgacaagtggatcatctgaggtcaggagtt

SEQ ID NO: 782220 - DNA, 120 bp, Artificial Sequence
  ENSG00000254469_9 (sequence is synthesized)
tctgtctcaaataataataataataataacaataatatgtttttgtgggtataagtgtggatgtaggatagatgtttatgtaagtgatggaaggctacatagtggttatagttgtgtagc

SEQ ID NO: 782221 - DNA, 120 bp, Artificial Sequence
  ENSG00000254469_10 (sequence is synthesized)
tgatggaaggctacatagtggttatagttgtgtagcatataatgtttactgaatttatacaaatctctgttcactaggcactacagaaaaacataagatctgattcctagcctctaggga

SEQ ID NO: 782222 - DNA, 120 bp, Artificial Sequence
  ENSG00000254469_11 (sequence is synthesized)
tgtacagtctcataaggatttgtctgttttaagttggaagtatttgtaatgttgtaaaggaagagtgacattggaggggcatatgatttggagaaagtgaggtactgactggacagtgtt

SEQ ID NO: 782223 - DNA, 120 bp, Artificial Sequence
  ENSG00000254469_12 (sequence is synthesized)
aggaactaaagatgtggagggttggtgatatcggaatgtgataccgtgagcatgtagagcacgtggtggtgtgagggaggttgaggtcttatgatccaggaagggccaatatatatctca

SEQ ID NO: 782224 - DNA, 120 bp, Artificial Sequence
  ENSG00000254469_13 (sequence is synthesized)
tcagaaggccgaattggcgggagaataggtttggtggtccgagatccgaggcaacggtggctcctcgaggtccacggtcccggccggtgaactcgataccttgcaagcctgtagccccag

SEQ ID NO: 782225 - DNA, 120 bp, Artificial Sequence
  ENSG00000254469_14 (sequence is synthesized)
ctcacacgcctctgggcgtccgcctggatctgtctggtgaatggaactaggatggcctgtgagcccacagaacgtctagaaaagtcagctttacattgggaccaacagaaaattacaggg

SEQ ID NO: 782226 - DNA, 120 bp, Artificial Sequence
  ENSG00000254469_15 (sequence is synthesized)
cacttaatacggagaatattgtaaatactgtacacccatcaccctaaattgactactggcattatgatttatttgcttattttttaaaagctagataatacaataaaagttaaacttacc

SEQ ID NO: 782227 - DNA, 120 bp, Artificial Sequence
  ENSG00000254469_16 (sequence is synthesized)
tgttttttctactctcaagcctattaccctctcatcctctccagaagcaactattatgaattagaattagcttgtgttctcccagtccatttttaataattatatgtagccatgactata

SEQ ID NO: 782228 - DNA, 83 bp, Artificial Sequence
  ENSG00000254469_17 (sequence is synthesized)
atttcctggctccagcctcaggagagttatgggatcgacttcgcctgacctgctcccgacccttcacgcgtcatcagtccttt

SEQ ID NO: 782229 - DNA, 120 bp, Artificial Sequence
  ENSG00000254469_18 (sequence is synthesized)
cctgacctgctcccgacccttcacgcgtcatcagtcctttggcctggcctttctacgggtgtgttcttctctggactccttagatgactctgtggtgggtccctcagcccttctgagctc

SEQ ID NO: 782230 - DNA, 83 bp, Artificial Sequence
  ENSG00000254469_19 (sequence is synthesized)
accgtgtacatcactgaggccactgcacgctttctcggggaagatgacacatctgaaccgaggtaccctccaacgcctgttcc

SEQ ID NO: 782231 - DNA, 77 bp, Artificial Sequence
  ENSG00000254469_20 (sequence is synthesized)
aacaattttacggcagcagggaaatacatgttgatgttcctggtgaaggtgtcacagaaggttcccagaagaaatta

SEQ ID NO: 782232 - DNA, 67 bp, Artificial Sequence
  ENSG00000254469_21 (sequence is synthesized)
agaaaaccaaatacggcagcagggaaatacatgttgatgttcctggtgaaggtgtcacagaaggttc

SEQ ID NO: 782233 - DNA, 70 bp, Artificial Sequence
  ENSG00000254469_22 (sequence is synthesized)
aagccccagaacgcattcctgtgctacggaagacggaagagtagctctcggggtcagaaggcgagaagat

SEQ ID NO: 782234 - DNA, 120 bp, Artificial Sequence
  ENSG00000254469_23 (sequence is synthesized)
gtgctggagatcagacacattgctctactttatattttattgtctgtccctgaacttctttattaaatggccaatattgtatggtaaaatcgagagtatcatcagaaagaaaattaagaa

SEQ ID NO: 782235 - DNA, 120 bp, Artificial Sequence
  ENSG00000254469_24 (sequence is synthesized)
aaacaatcagaattagaaattagaggctcctctgcctatggaatagccattcttttattcctttgctttcttaataaactttgtctcacttaaaaataaaaagaaattagattttctgga

SEQ ID NO: 782236 - DNA, 120 bp, Artificial Sequence
  ENSG00000254469_25 (sequence is synthesized)
cttttgtccatcaatttgaatgatcttcagtttgcagcagatgctgaagtcagcacagtatctaattgcatgttcatcagcattgcacttcagtctgcaatgataatattctgaaggaca

SEQ ID NO: 782237 - DNA, 120 bp, Artificial Sequence
  ENSG00000254469_26 (sequence is synthesized)
ttcatcattagaagtgaagcttctggctttaaaaagagaagacaaattatatgacacaatattacttactttttatgtttaaatgtctgaaatgttttataataaattaaaagcattaca

SEQ ID NO: 782238 - DNA, 80 bp, Artificial Sequence
  ENSG00000254470_0 (sequence is synthesized)
gcccgttaccgccggcgccgggggccggggtggcgctgtggtttcggtgcgggccgcgggcgggagggaggcggcctaac

SEQ ID NO: 782239 - DNA, 120 bp, Artificial Sequence
  ENSG00000254470_1 (sequence is synthesized)
cgggagggaggcggcctaacgagctctcggcacgcaccctcccccgccctgctcctgtcctgtcccgcgagggccccggcgcccagctctggcgtcggccccgagagccctggtctcacc

SEQ ID NO: 782240 - DNA, 80 bp, Artificial Sequence
  ENSG00000254470_2 (sequence is synthesized)
tctgggggtgaccgcagcccctcggggtcggcagcgggccccgcgctcccggtggctgcggcctgagggtccctcttccc

SEQ ID NO: 782241 - DNA, 120 bp, Artificial Sequence
  ENSG00000254470_3 (sequence is synthesized)
tgcgcaggggcccgcgcgcctcaccatggggcccctgagccgggacgcctgggcccagcgcttgggggccttccgggccagcccgtctgccttcatggcaggtcccgagggggaggattt

SEQ ID NO: 782242 - DNA, 120 bp, Artificial Sequence
  ENSG00000254470_4 (sequence is synthesized)
gggtcgcgacctgctgagcgacctgagaagtgagaagctgagcgaacagaccaaggtttccctgctggccctgagcatggagtaccctgcgcagctgtggcccgacgcctctgcggccga

SEQ ID NO: 782243 - DNA, 120 bp, Artificial Sequence
  ENSG00000254470_5 (sequence is synthesized)
agtggccgccacctccctgttggacaccttggtcctcctacccccgcggccctcagctctccgtcggccactgctgctggcggccaccactgccctggcggcgggcggcgcgctgggccc

SEQ ID NO: 782244 - DNA, 120 bp, Artificial Sequence
  ENSG00000254470_6 (sequence is synthesized)
cacctcgggcgcctcctgccggctcctgcccctactgctcggcctggccgcgggtagcgatctggggcgaggctttgtccccgcctcggaacagcgccccttgcaggccacggcctgcga

SEQ ID NO: 782245 - DNA, 120 bp, Artificial Sequence
  ENSG00000254470_7 (sequence is synthesized)
gtgcctgcgagagctagagagctgcaagcccgggctgctggggggctccctggggttgctgcggggcctgctggggcaggaaggccctgtccagccactcagcctgttgctggccctcgc

SEQ ID NO: 782246 - DNA, 120 bp, Artificial Sequence
  ENSG00000254470_8 (sequence is synthesized)
tttgcgcaacaccttggtgctccagtcccgggttggggctggcctggggggactgctcacggataaggtctccccaactgggggtggtccctgggattggacactagtggaggagggcga

SEQ ID NO: 782247 - DNA, 120 bp, Artificial Sequence
  ENSG00000254470_9 (sequence is synthesized)
tggacgccttcagccccaggcacccagctggccggcagctgaggagggagagggggagcgtagccttacagcacgagagcacagccctgaggaggcgcgggagctgcgggctgcggtgat

SEQ ID NO: 782248 - DNA, 120 bp, Artificial Sequence
  ENSG00000254470_10 (sequence is synthesized)
ccagcttctggacacctcctatctgctcactcctgtggcccaggcccagctcctgtggctgctgggctgggccctgcggggtctgcagggacagccaccggcactcttcaagccgcagct

SEQ ID NO: 782249 - DNA, 120 bp, Artificial Sequence
  ENSG00000254470_11 (sequence is synthesized)
ggtacggctgctaggcacagcacagctgacactgttgcacgccatgcttgcgctcaaggcggcctttggtgaggccttgttcacagcccaggatgaagcgttgctgctccgccggctcac

SEQ ID NO: 782250 - DNA, 120 bp, Artificial Sequence
  ENSG00000254470_12 (sequence is synthesized)
cttggctgcccagcaccctgctctgcctccgcccacccatctcttttaccttcactgcgtcctgagcttccctgagaactggccgctgggccctgaaggtgaggaggctgccccactgct

SEQ ID NO: 782251 - DNA, 120 bp, Artificial Sequence
  ENSG00000254470_13 (sequence is synthesized)
gctagggccccagctatgccgtggtctcctgcccagtctcctgcatgacccaatggccctcctggcccgcctgcatttactgtgcctgctctgtgccgaggaggaagaagaggagaaagg

SEQ ID NO: 782252 - DNA, 120 bp, Artificial Sequence
  ENSG00000254470_14 (sequence is synthesized)
ccagcttccaagcccacggcactacctggaagagctgctggctggcttgcggcagcgggcagccctggatgggggcccccgggccttggccactctctgcttccaggcctcgtatctggt

SEQ ID NO: 782253 - DNA, 120 bp, Artificial Sequence
  ENSG00000254470_15 (sequence is synthesized)
ggcctgctgcctggctgggcaacctacggtgctgacccccttgatccacggactggcccagctgtaccaagcccggcccatgctggctccccactttgtggacctcttggatcaggtgga

SEQ ID NO: 782254 - DNA, 120 bp, Artificial Sequence
  ENSG00000254470_16 (sequence is synthesized)
ctctgagctgagggagcccctgaaggtggtgttgcggcaggtggtggtgtccaggccgggcagggatgaagctctttgctggcacctgcaaatgctggcaaaggtggcagatggagatgc

SEQ ID NO: 782255 - DNA, 120 bp, Artificial Sequence
  ENSG00000254470_17 (sequence is synthesized)
ccagagtgctaccctcaactttctacaggccgcggctgcccactgcacgaactgggacctacagcagggcctgctgcgggtctgccgggcgctgctgcgggcaggggtgaggggcggcct

SEQ ID NO: 782256 - DNA, 120 bp, Artificial Sequence
  ENSG00000254470_18 (sequence is synthesized)
ggtcgacttgctgcaggtgctggccaggcagctggaggaccctgatgggcgtgaccacgcccgcctctactacatcctgctggcacacctggcagcacccaagttgggggtggccctggg

SEQ ID NO: 782257 - DNA, 120 bp, Artificial Sequence
  ENSG00000254470_19 (sequence is synthesized)
cccctcgcttgccgcacctgcactggcctcttcactggtggccgagaaccagggctttgtggcagcactgatggtgcaggaggcaccggccctggtacggctgagcctggggtcccatcg

SEQ ID NO: 782258 - DNA, 120 bp, Artificial Sequence
  ENSG00000254470_20 (sequence is synthesized)
ggtcaagggcccactcccagtgttgaagctccagccggaggcgctggagcccatctactctctggagctgcgcttccgtgtggaaggacagctgtatgcacccctggaggctgtccatgt

SEQ ID NO: 782259 - DNA, 120 bp, Artificial Sequence
  ENSG00000254470_21 (sequence is synthesized)
gccctgcctgtgtcctggccgccctgcccgccctctgctcctgcctctgcagccccgatgcccggcccccgcacggctggatgtccatgccctttacaccacatccactggtctcacgtg

SEQ ID NO: 782260 - DNA, 120 bp, Artificial Sequence
  ENSG00000254470_22 (sequence is synthesized)
ccatgcccacttgccacccctgttcgtgaactttgccgacctctttctgcctttcccgcagcctccagagggggccgggctgggcttctttgaggagctctgggattcctgcctgccaga

SEQ ID NO: 782261 - DNA, 120 bp, Artificial Sequence
  ENSG00000254470_23 (sequence is synthesized)
gggtgctgagagtcgtgtgtggtgtccacttgggccacagggcctggagggcttggtgtcccgccacctggagccttttgtggtggtggcccagcctcctaccagctactgtgtagcaat

SEQ ID NO: 782262 - DNA, 120 bp, Artificial Sequence
  ENSG00000254470_24 (sequence is synthesized)
ccacctgcccccggactcaaagctgctgctgcggctggaggcggccctggcagatggagtgcctgtggccctgcggaccgatgactgggccgtgctgcccctggcgggggactacctccg

SEQ ID NO: 782263 - DNA, 120 bp, Artificial Sequence
  ENSG00000254470_25 (sequence is synthesized)
tgggctggcggctgctgtctgagccccgggagaccaggtgggggcaggactgtggcccttgtgggggccaaggcacactcctgtagctctgtcgccaaaaccctgcattccgcagtgccc

SEQ ID NO: 782264 - DNA, 120 bp, Artificial Sequence
  ENSG00000254470_26 (sequence is synthesized)
tcgctggcttgttttcttttgggccccggttgggagcaggctcctgggggtgagggtctgtctgagtctgtttttgctgctctagcaagatccctgagacggggtaagttataataaaca

SEQ ID NO: 782265 - DNA, 120 bp, Artificial Sequence
  ENSG00000254470_27 (sequence is synthesized)
gaaatgtattggctcagagctctggaggctgggaagtccatagtggagggcccagagcccagtgaggacccttctgcatcttcccatgacagaggacagagtgacaggagtgaggggaga

SEQ ID NO: 782266 - DNA, 120 bp, Artificial Sequence
  ENSG00000254470_28 (sequence is synthesized)
gagcgaacccactcccaagataacggcctgagtccacgcaggagggcagagccctcgtggcctgaccacctcttagggtctaatcttatactgttacagtggcaatcgcatttcaacgtg

SEQ ID NO: 782267 - DNA, 120 bp, Artificial Sequence
  ENSG00000254470_29 (sequence is synthesized)
ttcaaaccatagcagggtcataggccccaagaaggcttccagacagaacccggcactgtagagctacagagttccttctcacccagacacactagtgctctccagaatctctgcccagga

SEQ ID NO: 782268 - DNA, 120 bp, Artificial Sequence
  ENSG00000254470_30 (sequence is synthesized)
ggcaggggaaaaatctcctttctgcttcccagagagggtctggccttgcccaaggccactcagtgatttaggaagaaggctgaagctagagtgtggacctgacctgttggacagtacttt

SEQ ID NO: 782269 - DNA, 120 bp, Artificial Sequence
  ENSG00000254470_31 (sequence is synthesized)
tctttctttttttttcggggaggggttaaagacaggatctcactctggcgctctggagtgcagtggtgtgattagggatcattgcagactctgcctctcaggctcaggtgatcctcccat

SEQ ID NO: 782270 - DNA, 120 bp, Artificial Sequence
  ENSG00000254470_32 (sequence is synthesized)
ctcagcctgcctccgagtagctgggactacaggtgtgagtcaccactgtattttttgcagacaggatctccctgtttcctaggctggtctcgaactcctgggcttaaatgactcttctgc

SEQ ID NO: 782271 - DNA, 120 bp, Artificial Sequence
  ENSG00000254470_33 (sequence is synthesized)
ctcagcctcaccaaagtgttgggattactggtgtgagcccccacacctggccgagccagcgcttctcaactcccaaggtttgcaagctccctgccccagggagctcacgccaggcaggcc

SEQ ID NO: 782272 - DNA, 120 bp, Artificial Sequence
  ENSG00000254470_34 (sequence is synthesized)
agtgggcctaagccagaaacagaaagacagcagtggccaggtggagagcttcccaagctgtgccgattagagccagctctaggaagggcctgctaataaggtctagggtctgagaccaag

SEQ ID NO: 782273 - DNA, 120 bp, Artificial Sequence
  ENSG00000254470_35 (sequence is synthesized)
ttttttctaatctcagcccctaagaaacctaatttgtgcttaggaatcttcccaggtaagaagaactagttcctctagttgttgtttttttttcccaaacatgcaaacactgaggattga

SEQ ID NO: 782274 - DNA, 120 bp, Artificial Sequence
  ENSG00000254470_36 (sequence is synthesized)
gctgtgtggggtcagctgtgctgccaggcacatgtacgttgcctcatttcatccttgcaacagctctgcagggccccgcagatgaggaaatccgtaggcaggagcggttgagtgattttc

SEQ ID NO: 782275 - DNA, 120 bp, Artificial Sequence
  ENSG00000254470_37 (sequence is synthesized)
ctaaggtcacccagctgtttggtaatagtgttttgtcatctggtagcaggtttccattaccatgccatcagagcagacctcagccagggccacagaggtcccaaccgtctctgccctctt

SEQ ID NO: 782276 - DNA, 120 bp, Artificial Sequence
  ENSG00000254470_38 (sequence is synthesized)
ctgctgcccctgcctcatgggctcccagccacaggttccccatgggccagctttacgcctcctgatccttccgattggggcagactaggagaggaaagacgggcctgggctgggtgcggt

SEQ ID NO: 782277 - DNA, 120 bp, Artificial Sequence
  ENSG00000254470_39 (sequence is synthesized)
cctgtaatcccagcactttgagaggctgcggcgggtggatcacctgaggccaggtgtttgagatcagcctggccagcatggcgaaaccctgtgtctaataaaaatacaaaaattagccgg

SEQ ID NO: 782278 - DNA, 120 bp, Artificial Sequence
  ENSG00000254470_40 (sequence is synthesized)
gacagagcaaggctctgtctcaaaaaaagaaaaaaaagaaagggcctgggacagtggtactgttaataggtggagtcaggaggcctgtctcaaacttgagatgtggcaataacttgcttt

SEQ ID NO: 782279 - DNA, 120 bp, Artificial Sequence
  ENSG00000254470_41 (sequence is synthesized)
cttgctttgtcacctcggcaagtcatttccaaatcaggaaggggtcagtttcaggaaacagaaacttctccagctgtttttggcagaaggggatttaagggaatcagggtacttaaagta

SEQ ID NO: 782280 - DNA, 120 bp, Artificial Sequence
  ENSG00000254470_42 (sequence is synthesized)
catgggaaggctggagaagtcgcctccaggaagctcccactggagctgggatcagaacgtactgtcctgcctgccatcccctgtaagcacccaggaagctgggcttgggccctgggacat

SEQ ID NO: 782281 - DNA, 120 bp, Artificial Sequence
  ENSG00000254470_43 (sequence is synthesized)
ggggtgggactgccactcctgcctcctgacacccacaaagccagaagcgtggtgctgctgcagaaggactgaacatctccaaggctgggcccgcagagcaaacttccttggccctgtgtc

SEQ ID NO: 782282 - DNA, 120 bp, Artificial Sequence
  ENSG00000254470_44 (sequence is synthesized)
ctccatccatatccttcaaaggacacctcattagtggactccatttctctcttccacggaactccagtggcaagggaatccagaaacgttttctttttgcctggagatgctaatccttag

SEQ ID NO: 782283 - DNA, 120 bp, Artificial Sequence
  ENSG00000254470_45 (sequence is synthesized)
cctaagaataaggaaactggtccatgtaaggactgaccatcctttcacccatctgtctgcccacttgtgcatccatcccattttatccatccattcctccagttgtggacaccagatgac

SEQ ID NO: 782284 - DNA, 120 bp, Artificial Sequence
  ENSG00000254470_46 (sequence is synthesized)
tttcagctccccctaccccaaccagaactttgctgcaatggccattcttatatgcccctatggacccatgggacaattctctgggatacatgctaggagcagaattgctgaatcataggg

SEQ ID NO: 782285 - DNA, 120 bp, Artificial Sequence
  ENSG00000254470_47 (sequence is synthesized)
aatgcatgtgcttagcttggctaagcaatgttggagtaaaagcttttggttttgcatcttctcagcacttctagggaggcaccaaaagggaggatggcactgactgagcccacctgagat

SEQ ID NO: 782286 - DNA, 120 bp, Artificial Sequence
  ENSG00000254470_48 (sequence is synthesized)
agctcctagaccccagccctctgtgtcctcagaatcacacactgctgctcatcacttcagcttcccgaagatcatggcaatagcagcatgcctgtaactgtcccaagtacaaccaaaaat

SEQ ID NO: 782287 - DNA, 120 bp, Artificial Sequence
  ENSG00000254470_49 (sequence is synthesized)
tcttcctaaagagagggaaccaaagtcacacgggtcaccttgtccacctgtgtggacgttgctcatgttcacatacccttccttgcctccttcaaggcaggtctggccacaagcccagct

SEQ ID NO: 782288 - DNA, 69 bp, Artificial Sequence
  ENSG00000254470_50 (sequence is synthesized)
ccttgcctccttcaaggcaggtctggccacaagcccagctctggctaatgaaatgtgaagggagtcaag

SEQ ID NO: 782289 - DNA, 120 bp, Artificial Sequence
  ENSG00000254470_51 (sequence is synthesized)
ggaggttgcagtgaactgagattgggccactacactccagcctggatgacagagcaggactccgtctcaaaaaagaaaaaagaaatgtgaaggggtcagttttggggcaaaatatgtcat

SEQ ID NO: 782290 - DNA, 120 bp, Artificial Sequence
  ENSG00000254470_52 (sequence is synthesized)
tgccagtgctcaattttccagccctctcttcctctgccatgaccgttggggaagtacatgttgagatggaggtgctaaatagttgagtcataatctcacctggatacgctgtaacaaatg

SEQ ID NO: 782291 - DNA, 120 bp, Artificial Sequence
  ENSG00000254470_53 (sequence is synthesized)
ccctggattatcaaatcagttatgtaaactaaaaatcctaaaaccccaccgactgaacagatgccacctcgtggccgagggaatctcagaaaaaacttaaaacaattcctggccctgatg

SEQ ID NO: 782292 - DNA, 120 bp, Artificial Sequence
  ENSG00000254470_54 (sequence is synthesized)
ggttgggaggtcagatgcaacttgttataccccatccctttatggtttagacacagctgccgagcatgaatgaacaaaatagggatcatgagatggacagaacagacactgtggcaataa

SEQ ID NO: 782293 - DNA, 120 bp, Artificial Sequence
  ENSG00000254470_55 (sequence is synthesized)
gataccaaattgtaaacaggacctaaggccatgccaagcaagggttaagtcatgtagagcccaccttcatgccccgcctcccctgcccccaacttatgaataaactatgttctaactgca

SEQ ID NO: 782294 - DNA, 120 bp, Artificial Sequence
  ENSG00000254505_0 (sequence is synthesized)
atgtcgcggcggcgccctgaggacggattgggcaaggctggtccctgtgtgatgagacatcaccctcccaggagcaaggcggaagtctggaggacgctgaggggcggaggcgggagaggc

SEQ ID NO: 782295 - DNA, 120 bp, Artificial Sequence
  ENSG00000254505_1 (sequence is synthesized)
gagctcgcgatgagtggtctcggcaggctcttcgggaaggggaagaaggagaaagggccaacccctgaagaagcaatacagaaactgaaggagacagagaagatactgatcaagaaacag

SEQ ID NO: 782296 - DNA, 120 bp, Artificial Sequence
  ENSG00000254505_2 (sequence is synthesized)
gaatttttggagcagaagattcaacaggagctacaaacagccaagaagtatgggaccaagaataagagagctgccctacaggctttgcggaggaagaaaagattcgaacagcagctggca

SEQ ID NO: 782297 - DNA, 120 bp, Artificial Sequence
  ENSG00000254505_3 (sequence is synthesized)
cgtaccatggagcttgctgcccaaagcatgaagaaggcctaccaggacatggacattgacaaggtagatgaactgatgactgacatcacggaacaacaggaggtggcccagcagatctca

SEQ ID NO: 782298 - DNA, 120 bp, Artificial Sequence
  ENSG00000254505_4 (sequence is synthesized)
gatgccatttctcggcctatgggctttggagatgatgtggatgaggatgaactgctggaggagctagaggagctggagcaggaggaattggcccaggagttgttaaatgtgggcgacaag

SEQ ID NO: 782299 - DNA, 120 bp, Artificial Sequence
  ENSG00000254505_5 (sequence is synthesized)
gaagaagaaccctcagtcaaattgcctagtgtaccttctactcatctgccggcagggccagctcccaaagtggatgaagatgaagaagcactaaagcagttggctgagtgggtatcctga

SEQ ID NO: 782300 - DNA, 120 bp, Artificial Sequence
  ENSG00000254505_6 (sequence is synthesized)
atgtgagacattagactgcatcaggtttgccatctaaacttagggcaaccccaagtgcttgaacctataccaccccactttcctgagctctgtaaagagcatgaagttttcccactgacc

SEQ ID NO: 782301 - DNA, 120 bp, Artificial Sequence
  ENSG00000254505_7 (sequence is synthesized)
ccatacactgaggtgccatcacactgcacatttccttccggagaacaagcacgtactcaggtggagatagaactgtctttttacttaatagaaaatgatgtggcagctttaagaggagcg

SEQ ID NO: 782302 - DNA, 120 bp, Artificial Sequence
  ENSG00000254505_8 (sequence is synthesized)
tgccaagtgctgagctaaaggaggataactttttggggaagtcatgctgagggtggtagtgtgaccctgcctgaaaaaagggtctcttaccctcccagccctggctcaactctgaagaag

SEQ ID NO: 782303 - DNA, 120 bp, Artificial Sequence
  ENSG00000254505_9 (sequence is synthesized)
gatcttgctacagaaggagcccttgggctcccttctctttgatagcagttataatgcccttgttcccaataaaactgggcagatggaatcctagtgtctatactgccttgtctacccctg

SEQ ID NO: 782304 - DNA, 120 bp, Artificial Sequence
  ENSG00000254505_10 (sequence is synthesized)
accctgcaaggcaggaggggtttcattcatgtgagatgagaaagtcaagggggcattgttgcgtgatttcttagctatctatctcattctcagggacattgacaaggtagatgaactgat

SEQ ID NO: 782305 - DNA, 120 bp, Artificial Sequence
  ENSG00000254505_11 (sequence is synthesized)
ggagctacaaacagccaagaagtatgggaccaagaataagagagtttcagcgtgaggccattgagaatgccactaccaatgcagaagtccttcgtaccatggagcttgctgcccaaagca

SEQ ID NO: 782306 - DNA, 120 bp, Artificial Sequence
  ENSG00000254505_12 (sequence is synthesized)
cggaagtctggaggacgctgaggggcggaggcgggagaggcgagctcgcgatgagtggtctcggcaggctcttcgggaaggaaggagaaagggccaacccctgaagaagcaatacagaaa

SEQ ID NO: 782307 - DNA, 68 bp, Artificial Sequence
  ENSG00000254505_13 (sequence is synthesized)
gatgcactccagccttggtgacagagggagactccattctcaaaaaaaaaaaaaaaaattagggaaga

SEQ ID NO: 782308 - DNA, 120 bp, Artificial Sequence
  ENSG00000254505_14 (sequence is synthesized)
gagtggcttgctatcacactttaaactttaaagcctctcagaatgtgaatttgcagtatagatacttgtgatggctagacatccatctgccccttgcttcctataaaattctttcgctgc

SEQ ID NO: 782309 - DNA, 120 bp, Artificial Sequence
  ENSG00000254505_15 (sequence is synthesized)
gtttcctgctgtcttcagccattttcaaaaccttgttctataatactttgtgctgggcaagagggatctaaggtgaagaagaaagactgccttcttagcccggcgcgggggctcacgcct

SEQ ID NO: 782310 - DNA, 67 bp, Artificial Sequence
  ENSG00000254505_16 (sequence is synthesized)
gaaagactgccttcttagcccggcgcgggggctcacgcctgtactcgcaacactttgggaggccgac

SEQ ID NO: 782311 - DNA, 120 bp, Artificial Sequence
  ENSG00000254505_17 (sequence is synthesized)
agaaaaaaaaagaaaggcagctaggaatagtaaaaagaatattggttttagaactcatactgccacatcttgattcctgcacaatctcttattagttgtgatttttaacatctttgtggt

SEQ ID NO: 782312 - DNA, 120 bp, Artificial Sequence
  ENSG00000254505_18 (sequence is synthesized)
tgttttcacatttttaaagtgaagagatagcacgttcattgtagagatttggggattagcaataacacagtcaggtctctagcacatactatgtattcaatgattggtggctaatatttt

SEQ ID NO: 782313 - DNA, 120 bp, Artificial Sequence
  ENSG00000254521_0 (sequence is synthesized)
agttcctgagagaagaaccctgaggaacagacttacctcagcaaccctggcacctccaacccgacacatgctactgctgctgctactgctgccacccctgctctgtgggagagtgggggc

SEQ ID NO: 782314 - DNA, 120 bp, Artificial Sequence
  ENSG00000254521_1 (sequence is synthesized)
taaggaacagaaggattacctgctgacaatgcagaagtccgtgacggtgcaggagggcctgtgtgtctctgtgctttgctccttctcctacccccaaaatggctggactgcctccgatcc

SEQ ID NO: 782315 - DNA, 120 bp, Artificial Sequence
  ENSG00000254521_2 (sequence is synthesized)
agttcatggctactggttccgggcaggggaccatgtaagccggaacattccagtggccacaaacaacccagctcgagcagtgcaggaggagactcgggaccgattccacctccttgggga

SEQ ID NO: 782316 - DNA, 120 bp, Artificial Sequence
  ENSG00000254521_3 (sequence is synthesized)
cccacagaacaaggattgtaccctgagcatcagagacaccagagagagtgatgcagggacatacgtcttttgtgtagagagaggaaatatgaaatggaattataaatatgaccagctctc

SEQ ID NO: 782317 - DNA, 120 bp, Artificial Sequence
  ENSG00000254521_4 (sequence is synthesized)
tgtgaatgtgacagcgtcccaggacctactgtcaagatacaggctggaggtgccagagtcggtgactgtgcaggagggtctgtgtgtctctgtgccctgcagtgtcctttacccccatta

SEQ ID NO: 782318 - DNA, 120 bp, Artificial Sequence
  ENSG00000254521_5 (sequence is synthesized)
caactggactgcctctagccctgtttatggatcctggttcaaggaaggggccgatataccatgggatattccagtggccacaaacaccccaagtggaaaagtgcaagaggatacccacgg

SEQ ID NO: 782319 - DNA, 120 bp, Artificial Sequence
  ENSG00000254521_6 (sequence is synthesized)
tcgattcctcctccttggggacccacagaccaacaactgctccctgagcatcagagatgccaggaagggggattcagggaagtactacttccaggtggagagaggaagcaggaaatggaa

SEQ ID NO: 782320 - DNA, 120 bp, Artificial Sequence
  ENSG00000254521_7 (sequence is synthesized)
ctacatatatgacaagctctctgtgcatgtgacagccctgactcacatgcccaccttctccatcccggggaccctggagtctggccaccccaggaacctgacctgctctgtgccctgggc

SEQ ID NO: 782321 - DNA, 120 bp, Artificial Sequence
  ENSG00000254521_8 (sequence is synthesized)
ctgtgaacaggggacgccccccacgatcacctggatgggggcctccgtgtcctccctggaccccactatcactcgctcctcgatgctcagcctcatcccacagccccaggaccatggcac

SEQ ID NO: 782322 - DNA, 120 bp, Artificial Sequence
  ENSG00000254521_9 (sequence is synthesized)
ggagatggcacagcatccacaaccttgaggaatggctcggccctttcagtcctggagggccagtccctgcaccttgtctgtgctgtcgacagcaatccccctgccaggctgagctggacc

SEQ ID NO: 782323 - DNA, 120 bp, Artificial Sequence
  ENSG00000254521_10 (sequence is synthesized)
tgggggagcctgaccctgagcccctcacagtcctcgaaccttggggtgctggagctgcctcgagtgcatgtgaaggatgaaggggaattcacctgccgagctcagaaccctctaggctcc

SEQ ID NO: 782324 - DNA, 120 bp, Artificial Sequence
  ENSG00000254521_11 (sequence is synthesized)
cagcacatttccctgagcctctccctgcaaaacgagtacacaggcaaaatgaggcctatatcaggagtgacgctaggggcattcgggggagctggagccacagccctggtcttcctgtac

SEQ ID NO: 782325 - DNA, 120 bp, Artificial Sequence
  ENSG00000254521_12 (sequence is synthesized)
ttctgcatcatcttcgttgtagtgaggtcctgcaggaagaaatcggcaaggccagcagtgggcgtgggggatacaggcatggaggacgcaaacgctgtcaggggctcagcctctcaggga

SEQ ID NO: 782326 - DNA, 120 bp, Artificial Sequence
  ENSG00000254521_13 (sequence is synthesized)
cccctgattgaatccccggcagatgacagccccccacaccatgctccgccagccctggccaccccctccccagaggaaggagagatccagtatgcatccctcagcttccacaaagcgagg

SEQ ID NO: 782327 - DNA, 120 bp, Artificial Sequence
  ENSG00000254521_14 (sequence is synthesized)
cctcagtacccacaggaacaggaggccatcggctatgagtactccgagatcaacatccccaagtgagaaactgcagagactcaggcctgtttgagggctcacgacccctgcagcaaagaa

SEQ ID NO: 782328 - DNA, 120 bp, Artificial Sequence
  ENSG00000254521_15 (sequence is synthesized)
gcccgagactgattcctttagaattaacagccctccatgctgtgcaacaggacatcagaacttattcctcttgtcaaactgaaaatgcgtgcctgatgaccaaactctccctttctccat

SEQ ID NO: 782329 - DNA, 120 bp, Artificial Sequence
  ENSG00000254521_16 (sequence is synthesized)
ccaatcggtccacactccccgcccccggcctctggtacccaccattctcttctctacttctctgaggtcgactattttaggttccaaatatagtgagatcgtagagtgtttgtctctctg

SEQ ID NO: 782330 - DNA, 120 bp, Artificial Sequence
  ENSG00000254521_17 (sequence is synthesized)
tacctggcttatttcactcaacataatgttctctaggttcatccgtgttgttccaaataacagaataatgtattgaatatttcaaaatggctaaaagagaggagtttaaatgttgtcacc

SEQ ID NO: 782331 - DNA, 120 bp, Artificial Sequence
  ENSG00000254535_0 (sequence is synthesized)
acttggcagcgagtgcgcgggaagttcagcgcgcgagttccgggcttcccgcccgcccgcagacgaccgccgttctgttgccgcgtcctaggagggccagattggtggctgtggggactt

SEQ ID NO: 782332 - DNA, 120 bp, Artificial Sequence
  ENSG00000254535_1 (sequence is synthesized)
ttggatgagggtgttgcctgagctgggggagtcgtgtctgaactccattgcttggcctttgtgtggtgatcccgaggcctccacacttgaaccgggccaaagctgtgacctagtatcccc

SEQ ID NO: 782333 - DNA, 120 bp, Artificial Sequence
  ENSG00000254535_2 (sequence is synthesized)
ccacagggattgctcaaagaactccaggggacaaactcacagtggcaaggacaaggagatgaatgtagcagccaagtaccgcatggcctccctgtatgtgggtgacttacatgcagatgt

SEQ ID NO: 782334 - DNA, 120 bp, Artificial Sequence
  ENSG00000254535_3 (sequence is synthesized)
caccgaggacctgctgttcaggaagttcagcactgtggggcctgtgctgtccatccgcatttgcagggaccaggtcacccgccgctctctgggctatgcctacgtgaacttcttgcagct

SEQ ID NO: 782335 - DNA, 120 bp, Artificial Sequence
  ENSG00000254535_4 (sequence is synthesized)
ggctgatgcccagaaggcgctggacacaatgaactttgacatcataaaaggcaaatccatccgtctcatgtggtctcagcgcgatgcctacttgaggagatctggaattgggaacgtatt

SEQ ID NO: 782336 - DNA, 120 bp, Artificial Sequence
  ENSG00000254535_5 (sequence is synthesized)
catcaagaatctggacaaatctatcgataacaaaaccctttatgaacatttttcagcttttggaaagatcctttcctccaaggtgatgagtgatgatcaaggctccaagggctatgcatt

SEQ ID NO: 782337 - DNA, 120 bp, Artificial Sequence
  ENSG00000254535_6 (sequence is synthesized)
tgtgcactttcagaaccagagtgctgcagacagggccattgaggagatgaatggaaaactactcaagggctgcaaggtgtttgttggcagattcaaaaaccgaaaagatcgtgaagctga

SEQ ID NO: 782338 - DNA, 120 bp, Artificial Sequence
  ENSG00000254535_7 (sequence is synthesized)
actcagaagcaaagccagtgaattcaccaatgtttacataaaaaactttggaggtgacatggatgatgagagattgaaggacgttttcagcaaatatggcaaaactctgagtgttaaggt

SEQ ID NO: 782339 - DNA, 120 bp, Artificial Sequence
  ENSG00000254535_8 (sequence is synthesized)
gatgacagattccagtgggaaatccaaaggctttggctttgtgagttttgatagccatgaggctgccaagaaagctgttgaagaaatgaatggaagggacataaatgggcagctgatttt

SEQ ID NO: 782340 - DNA, 120 bp, Artificial Sequence
  ENSG00000254535_9 (sequence is synthesized)
tgtaggccgggctcaaaagaaagtcgagcgacaggctgagttaaagcaaatgtttgagcagctgaaaagggaacgaattcgtgggtgccagggggtaaaactctatattaagaaccttga

SEQ ID NO: 782341 - DNA, 120 bp, Artificial Sequence
  ENSG00000254535_10 (sequence is synthesized)
tgacaccatcgatgatgaaaaactacgaaacgaattttcttcatttggatcaattagcagagttaaggtaatgcaggaagaggggcagagcaaagggtttggcttgatctgcttctcctc

SEQ ID NO: 782342 - DNA, 120 bp, Artificial Sequence
  ENSG00000254535_11 (sequence is synthesized)
tcctgaggatgctactaaagcaatgactgagatgaatggccgcatcttgggctccaaacctcttagcattgccttggcccagagacactaggaaagaaaaacgtacctttccagctagta

SEQ ID NO: 782343 - DNA, 120 bp, Artificial Sequence
  ENSG00000254535_12 (sequence is synthesized)
tctgcagcaggtgggagaatgatagtgatctctgcctgaattgacctcagtaaatttcatattccacatgatgggtgcttagtttagtaaactttatgataaaacgttttttatacaaag

SEQ ID NO: 782344 - DNA, 120 bp, Artificial Sequence
  ENSG00000254535_13 (sequence is synthesized)
ccattttttttcttttgtggaaaaatagatggagcttagttcattttacagaggcacattttctaattttaatattgcacatttttcttattttgatatgttcatagcaataagtataaa

SEQ ID NO: 782345 - DNA, 120 bp, Artificial Sequence
  ENSG00000254535_14 (sequence is synthesized)
tttttacatttgaaccaaatgaaatgaggtaattatttgaatttattgcatatttattattttagtaatattgctagctttaatttcttctatgaaaatatgctcaaaatagttcttaca

SEQ ID NO: 782346 - DNA, 120 bp, Artificial Sequence
  ENSG00000254535_15 (sequence is synthesized)
ttcttacaactaaagattccaaagtatttttaccaacagaaattttctaatttttcatccaagttttgagaaatcaaacttttagaaatttatagtacgaatttaaagacctaatttcat

SEQ ID NO: 782347 - DNA, 120 bp, Artificial Sequence
  ENSG00000254535_16 (sequence is synthesized)
tttgaattaatgcttaaaatagtcagatatagttgaatttcttttaaatttatatcctgacatgcttgtttttcggatggtttaaattaagatgatggaagtttttaatgttgcctaaaa

SEQ ID NO: 782348 - DNA, 120 bp, Artificial Sequence
  ENSG00000254535_17 (sequence is synthesized)
actggctttatgtgttttgttctttccattagttgactataattcaggtacttactagttaatctaaattgtaacttgcactgtaaaaccttaacttctacattccttaagttataaatc

SEQ ID NO: 782349 - DNA, 120 bp, Artificial Sequence
  ENSG00000254535_18 (sequence is synthesized)
tgttatcaactcaggtgatccaaagttggcctggtcttaaatctcttcatacctatatggcttaatatattatcttaaatttttaccagatgctaatattatgaaaatcatacatacaga

SEQ ID NO: 782350 - DNA, 120 bp, Artificial Sequence
  ENSG00000254535_19 (sequence is synthesized)
ttatagaaattctgtttaaaaacttttaaaatctcttttatattgttttgtgtagtgattttctcttagggttcagaaaagtaagttcctctatttttatgtactcacatctccttttat

SEQ ID NO: 782351 - DNA, 120 bp, Artificial Sequence
  ENSG00000254535_20 (sequence is synthesized)
ttgattttctgatgaattgaagttacatcacttattctgttttctagcataatttttagtttagaaccattcccctattttccttgctctcctgcctttcatctatattcctcagctttt

SEQ ID NO: 782352 - DNA, 120 bp, Artificial Sequence
  ENSG00000254535_21 (sequence is synthesized)
taaaatactttctaaaggatttttttatgttggcttttaatatgtgctgcttcaaatccatttggaaatcgaggcaagagttatttaattacatttaaataattgctttacaaattctga

SEQ ID NO: 782353 - DNA, 120 bp, Artificial Sequence
  ENSG00000254535_22 (sequence is synthesized)
ttcataccaaaggtatctagcaagcaagtgcttttgtttttactgttttcatatttttacttggcttagttttttctcataactattattcacattctctatttcatatattactaatat

SEQ ID NO: 782354 - DNA, 120 bp, Artificial Sequence
  ENSG00000254535_23 (sequence is synthesized)
aaaagaaatagtaaaatattttttggcaatacctcagcttatgaatgagaaaaatttgttgccttttatttttatagaaattatatgtatattctttgcacattttctaaaatgaaaatc

SEQ ID NO: 782355 - DNA, 120 bp, Artificial Sequence
  ENSG00000254535_24 (sequence is synthesized)
ttttagtccataaaaaattatggacaatgaaaaaattaaaagaatttgcatataattgtattatgcaaaccaattccctattataatttgttacatatttttctatttttttctctctct

SEQ ID NO: 782356 - DNA, 120 bp, Artificial Sequence
  ENSG00000254535_25 (sequence is synthesized)
acatatatacacctaggtaatttaagaaaaataggataatattacaaatgttgtttgaaattgctttcttaaacaatatgctatggtcaacttttatgctcacaataattatttgtctta

SEQ ID NO: 782357 - DNA, 120 bp, Artificial Sequence
  ENSG00000254535_26 (sequence is synthesized)
taatctgagtgacttttatgttttgttcaatgactgtaccaaaatataactaatttcttattgataaacttcttgttgctagataatttcttccttttttcttcttcctctgtcataaat

SEQ ID NO: 782358 - DNA, 120 bp, Artificial Sequence
  ENSG00000254535_27 (sequence is synthesized)
aacttggagattaacatccttgcgaacttatatatgcaaatatatctattttcttaagaaaatgtttagaagtagaattaatggttaaaaaagaatcaattttaaaaagtaattttgata

SEQ ID NO: 782359 - DNA, 120 bp, Artificial Sequence
  ENSG00000254535_28 (sequence is synthesized)
aatattgcttaaatgctgtccagaatacttgtggcacttacatttccattgtcattgtaggagaatgcctatttccatatgctccaagaaacaagggttttttttaagctgttggtcaat

SEQ ID NO: 782360 - DNA, 120 bp, Artificial Sequence
  ENSG00000254535_29 (sequence is synthesized)
tcaacatgatatgtaaaacaaaccatttcatcattgctttatttcacttttgtaaattacaaaagttaaacagtatttgtgtactcactgaccatttgtattttcatacttataagttaa

SEQ ID NO: 782361 - DNA, 120 bp, Artificial Sequence
  ENSG00000254535_30 (sequence is synthesized)
tgtctcatgatcataatttattttcctgttggggtgttttttatttacatggatttttagatttctttgcatattatgactacattttagacttttccccctgatatttcactgtcttta

SEQ ID NO: 782362 - DNA, 120 bp, Artificial Sequence
  ENSG00000254535_31 (sequence is synthesized)
tagttttgaaggttattccaaaattgaatgttaagctggaaagttttagtattctactgaaatggctttgatgtcatgcttcaaaatattttgaacactttaaatacatatattcacaca

SEQ ID NO: 782363 - DNA, 120 bp, Artificial Sequence
  ENSG00000254535_32 (sequence is synthesized)
aatatatatacacccacacaatttatctgtattgtgtttatgactttcagattttcatattctcaatgcttctaactaaaattttggttcataaaaagtatcttatataaaacctatagt

SEQ ID NO: 782364 - DNA, 120 bp, Artificial Sequence
  ENSG00000254535_33 (sequence is synthesized)
aaatattttaaaaatgtgcttttccatttttaataacatgtattttggtaaatacttgattcagagagccaatgaattagagttggcatatgagtttcacatagattcttatactaggta

SEQ ID NO: 782365 - DNA, 120 bp, Artificial Sequence
  ENSG00000254535_34 (sequence is synthesized)
agtatttaccaaaacatgtatcagaagcagaaagttgttaaaaaggtttaccagacaacaagactggaaagtgtattaagtgtgcctggccttgacatcttgttctggataatctagtct

SEQ ID NO: 782366 - DNA, 120 bp, Artificial Sequence
  ENSG00000254535_35 (sequence is synthesized)
acatcttaatttaggaaagctaatctgtaaaactgttcaaatatttgaacaatatttgataatgcttacataatctttcaagataatatcaggaaacagagttctttcatgtatgtaagt

SEQ ID NO: 782367 - DNA, 120 bp, Artificial Sequence
  ENSG00000254535_36 (sequence is synthesized)
agttaataggacataacatcagatgtctagatgaattatagctatggcttaattacacaataatctgccttcttagtagaaattgcttatttccagcatttgctgtaaaaaaaaaaaaga

SEQ ID NO: 782368 - DNA, 120 bp, Artificial Sequence
  ENSG00000254535_37 (sequence is synthesized)
cagtcagtttacaaaaatatacaatcctatggatttaatttatttaaattttgttcattctaattttttttggtgcgtgataatagcaagttatcttagttgaaaatagagattcattca

SEQ ID NO: 782369 - DNA, 120 bp, Artificial Sequence
  ENSG00000254535_38 (sequence is synthesized)
ttaaagaatattaaatcttttgtgcccaagtgccttaataaataagtagaatcttaacttttctgataagcattccagtaaaagctaatgtacatagatatgccttgagccactgtttct

SEQ ID NO: 782370 - DNA, 120 bp, Artificial Sequence
  ENSG00000254535_39 (sequence is synthesized)
actttcacccttctctccacacatattgccacgtctgctgtgtagttacctgcttacatgtacagccatttcaataaatgtattcttttaacattttatcttttaaatttcaaataggaa

SEQ ID NO: 782371 - DNA, 120 bp, Artificial Sequence
  ENSG00000254535_40 (sequence is synthesized)
tttatagttggtaaaaataaaaattttaaagtgatttaatattgtcattttcatgttctcaatattgttatagatccactgagaaaatgtcaaataaaatctaatatttcaaaggtgaaa

SEQ ID NO: 782372 - DNA, 120 bp, Artificial Sequence
  ENSG00000254550_0 (sequence is synthesized)
atggcggaggacaggccgcagcagccgcagctggacatgccgctggtcctggaccagggcctgaccaggcagatgcggctacgcgtggagagcctgaagcagcgcggggagaagcgccag

SEQ ID NO: 782373 - DNA, 120 bp, Artificial Sequence
  ENSG00000254550_1 (sequence is synthesized)
gatggggagaagctgctgcagccagcggagtctgtgtaccgcctcaacttcacccagcagcagcggctacagttcgagcgctggaatgtcgtgctggacaagccgggcaaggtcaccatc

SEQ ID NO: 782374 - DNA, 120 bp, Artificial Sequence
  ENSG00000254550_2 (sequence is synthesized)
cagaactggacgcctgacctcaccaacctcatgacacgccagctgctggaccccactgccatcttctggcgcaaggaggactcggatgccatagattggaatgaggccgacgccctggag

SEQ ID NO: 782375 - DNA, 120 bp, Artificial Sequence
  ENSG00000254550_3 (sequence is synthesized)
tttggggagcgcctgtcggacctggccaagatccgcaaggtcatgtacttcctcgtcacctttggcgagggtgtggagcccgccaacctcaaggcctccgtggtttttaaccagctctga

SEQ ID NO: 782376 - DNA, 120 bp, Artificial Sequence
  ENSG00000254585_0 (sequence is synthesized)
acttcctattcagcattcagcagggagggagcctctgaacagccacgtaggcattctcttctctctggaggaaaaggcccagcagctgtccgaggaaaagacccaccagctgtcagcaaa

SEQ ID NO: 782377 - DNA, 120 bp, Artificial Sequence
  ENSG00000254585_1 (sequence is synthesized)
gggacatgtcgcagctaagtaagaatctgggtgactcgagtcctccggcggaggccccgaagccgcctgtctatagccgccctacggttctgatgcgggccccgcccgcttcctcccggg

SEQ ID NO: 782378 - DNA, 120 bp, Artificial Sequence
  ENSG00000254585_2 (sequence is synthesized)
ctccgccagtcccttgggatccacctccaattgacttgcaggcttcattggccgcttggcaggcacctcagcctgcctgggaggccccacagggccagctgcccgccccggtggttccga

SEQ ID NO: 782379 - DNA, 120 bp, Artificial Sequence
  ENSG00000254585_3 (sequence is synthesized)
tgacccagcctcctgccctagggggcccgatagtcccggctcccccgctggggggcccgatgggtaagcctccgactcccggggtcctgatggtgcatcctccacctccgggagccccga

SEQ ID NO: 782380 - DNA, 120 bp, Artificial Sequence
  ENSG00000254585_4 (sequence is synthesized)
tggcccagcctccgaccccgggagtcctgatggtgcatccttcagctcccggagctcccatggcccatcctcctcctccggggaccccaatgtcccaccctccccctccggggaccccaa

SEQ ID NO: 782381 - DNA, 120 bp, Artificial Sequence
  ENSG00000254585_5 (sequence is synthesized)
tggcccatcctcctcctccggggaccccgatggcccatcctcctcctccggggaccccgatggtgcatcctcctcctccggggaccccgatggctcatcctccccctccggggacaccga

SEQ ID NO: 782382 - DNA, 120 bp, Artificial Sequence
  ENSG00000254585_6 (sequence is synthesized)
tggctcatcctccccctccggggacaccgatggctcatcctccacctccggggacaccgatggctcatcctccccctccgggtacaccgatggcccagcctccagctccgggagtcctga

SEQ ID NO: 782383 - DNA, 120 bp, Artificial Sequence
  ENSG00000254585_7 (sequence is synthesized)
tggcccagcctctgactccgggagtcctgatggtccagcctgctgctccgggagcaccgatggtccagccgcctccagcagccatgatgacccagcctcagccttcaggagcaccgatgg

SEQ ID NO: 782384 - DNA, 120 bp, Artificial Sequence
  ENSG00000254585_8 (sequence is synthesized)
ccaagcctccaggtccaggagtcctgatgattcatcctccaggtgcgagagctccgatgacccagcctccagcttcaggagcaccgatggcacagccggcggccccacctgcacagccga

SEQ ID NO: 782385 - DNA, 120 bp, Artificial Sequence
  ENSG00000254585_9 (sequence is synthesized)
tggccccacctgcacagccgatggcttcttgggccccgcaggctcagcctctgatcctgcaaatccagtctcaagttataagggctcctccgcaggttccccagggcccgcaggcacccc

SEQ ID NO: 782386 - DNA, 120 bp, Artificial Sequence
  ENSG00000254585_10 (sequence is synthesized)
cagcgcagctagccacacccccgggctggcaggcgacctcgccaggatggcaggccacgcagcaaggctggcaggccactcccctgacttggcagaccacgcaggtcacctggcaggcac

SEQ ID NO: 782387 - DNA, 120 bp, Artificial Sequence
  ENSG00000254585_11 (sequence is synthesized)
cagaccacgcaggtcacctggcaggcaccagccgttacctggcaggtgccgccgcccatgcgccaggggcccccgcccatccgccctggcccaccacccatccgccctggcccaccaccg

SEQ ID NO: 782388 - DNA, 120 bp, Artificial Sequence
  ENSG00000254585_12 (sequence is synthesized)
aggccccaccggtgatccgccaggccccacccgtgatccgccaggccccacccgtgatccgccaggcccccgctgtgatccgccaggccccacctgtgatccgccaggccccacctgtga

SEQ ID NO: 782389 - DNA, 120 bp, Artificial Sequence
  ENSG00000254585_13 (sequence is synthesized)
tccgccaggctccacctgtgatccgccaggccccgccgctgatccgccaggcgccgccgcccatccgacctgccccacaggtcctggccacccagccaccgctctggcaggccctgccac

SEQ ID NO: 782390 - DNA, 120 bp, Artificial Sequence
  ENSG00000254585_14 (sequence is synthesized)
gctctggcaggccctgccacccccacctccactgcggcaggccccgcaggctaggctgccggccccgcaggtgcaggcggcgccgcaggtgcctacggccccacctgctacgcaggtacc

SEQ ID NO: 782391 - DNA, 120 bp, Artificial Sequence
  ENSG00000254585_15 (sequence is synthesized)
cgcaggtgccccagcctgtgctgccggccccgctgtctgccccactgtctgccccgcaggctgtgcactgcccttccatcatctggcaggcccccaaaggtcagcccccggtgccacacg

SEQ ID NO: 782392 - DNA, 120 bp, Artificial Sequence
  ENSG00000254585_16 (sequence is synthesized)
agattccaacgtcaatggaattccaggaggtgcagcagacacaggcgctggcctggcaggcccagaaggcccccactcacatctggcagcccctgcctgcccaggaggcccagaggcagg

SEQ ID NO: 782393 - DNA, 120 bp, Artificial Sequence
  ENSG00000254585_17 (sequence is synthesized)
acactgccgctccagccttcctggcaggcaccgcctgcagtcttgcaggcccagcccggacccccggtagcagcggcaaattttcccctgggctccgctaaatcattgatgactccatca

SEQ ID NO: 782394 - DNA, 120 bp, Artificial Sequence
  ENSG00000254585_18 (sequence is synthesized)
ggagaatgcagggcctcttctatagaccgcaggggctcctctaaagagcgcaggacctcctcgaaggagcgcagggccccttcaaaagaccgcatgatctttgctgccaccttctgtgct

SEQ ID NO: 782395 - DNA, 120 bp, Artificial Sequence
  ENSG00000254585_19 (sequence is synthesized)
cccaaggcagtgtcagctgcgcgagcacacctgccagctgcctggaaaaacctgcctgccacaccggagacctttgctccctcctcaagtgtcttcccagctacctcccagtttcagcct

SEQ ID NO: 782396 - DNA, 120 bp, Artificial Sequence
  ENSG00000254585_20 (sequence is synthesized)
gcctctctgaatgcctttaaaggcccctctgctgcctcagagaccccaaagtcactgccatatgctctgcaggatccctttgcctgtgtagaggccctgcctgcagttccatgggtccca

SEQ ID NO: 782397 - DNA, 120 bp, Artificial Sequence
  ENSG00000254585_21 (sequence is synthesized)
cagcccaatatgaatgcctcaaaggcatcgcaggcagtgcccaccttcctgatggctacagcagctgccccccaggcaactgccaccactcaagaggcctccaagacctccgtcgagccg

SEQ ID NO: 782398 - DNA, 120 bp, Artificial Sequence
  ENSG00000254585_22 (sequence is synthesized)
ccacgccgctccggcaaggccacccggaagaagaagcatctggaagcccaagaggacagccgtggccacacgctagcctttcatgactggcagggcccaaggccctgggagaatctaaat

SEQ ID NO: 782399 - DNA, 120 bp, Artificial Sequence
  ENSG00000254585_23 (sequence is synthesized)
ctgagtgactgggaggtccaaagccctatccaggtctcgggtgactgggagcacccaaacaccccccgtggcctgagtggttgggagggccctagcacctccaggatcctgagtggctgg

SEQ ID NO: 782400 - DNA, 120 bp, Artificial Sequence
  ENSG00000254585_24 (sequence is synthesized)
gaagggcccagcgcatcctgggccctgagtgcctgggagggcccgagcacctccagggccctgggtctctctgaaagcccagggagctctctgcccgtagttgtgtctgaggtcgcaagt

SEQ ID NO: 782401 - DNA, 120 bp, Artificial Sequence
  ENSG00000254585_25 (sequence is synthesized)
gtctctccgggatccagtgccacccaggataattccaaggtggaggcacagcccttgtctcccttggatgagagggcaaatgcgttggtgcagttcctcttagtcaaggaccaagccaag

SEQ ID NO: 782402 - DNA, 120 bp, Artificial Sequence
  ENSG00000254585_26 (sequence is synthesized)
gtgcctgtccagcgctcggagatggtgaaagtcatcctccgagagtataaagatgagtgcttagatatcatcaaccgtgccaacaataagctggagtgtgcctttggttatcaattgaaa

SEQ ID NO: 782403 - DNA, 120 bp, Artificial Sequence
  ENSG00000254585_27 (sequence is synthesized)
gaaattgataccaaaaaccacgcctatattatcatcaacaagctgggctaccatacagggaatttggtggcatcctatttagacaggcccaagtttggccttctgatggtggtcttgagc

SEQ ID NO: 782404 - DNA, 120 bp, Artificial Sequence
  ENSG00000254585_28 (sequence is synthesized)
ctcatctttatgaaaggcaactgtgtcagggaggatctgatctttaattttctgttcaagttagggttggatgtccgggagacaaacggtctctttggaaatactaagaagctcatcacc

SEQ ID NO: 782405 - DNA, 120 bp, Artificial Sequence
  ENSG00000254585_29 (sequence is synthesized)
gaagtgtttgtcaggcagaagtacctagagtacaggcgaatcccttacactgagcccgcagagtatgagttcctctggggccctcgagcattcctggaaaccagcaagatgcttgtcctg

SEQ ID NO: 782406 - DNA, 120 bp, Artificial Sequence
  ENSG00000254585_30 (sequence is synthesized)
aggtttttggccaagctccataagaaagatccacagagctggccattccattaccttgaagcgctcgcagagtgtgagtgggaagacacagatgaggatgaacctgacaccggtgacagt

SEQ ID NO: 782407 - DNA, 120 bp, Artificial Sequence
  ENSG00000254585_31 (sequence is synthesized)
gcccacggccccaccagcaggccccctccccgctaataggtgtagcagagatctcgctcctgtgtttccctggccagaggccactgacagggtggggggacatttttgttcctggtgttt

SEQ ID NO: 782408 - DNA, 120 bp, Artificial Sequence
  ENSG00000254585_32 (sequence is synthesized)
gtgttccagttccacgagtgtacgtttggattttcaacttggtttcgtatctgccaaagctttgtacattttttatgtggtgttgatttcaatcggctactgttctgttctgtattttgg

SEQ ID NO: 782409 - DNA, 120 bp, Artificial Sequence
  ENSG00000254585_33 (sequence is synthesized)
catctgtgtttttaagtgagatctgtggttctctgttttgtgttttaattgttatgttttggtatcagctttgtgctggctttgtgaaatgaattgagaagctatccatctcatttctgg

SEQ ID NO: 782410 - DNA, 120 bp, Artificial Sequence
  ENSG00000254585_34 (sequence is synthesized)
tatagttcatgtagcattgtaatcggttgttctttgaacgttcaaatgactcatcagtaaaaactgtctacagagaagtaaatatctatatctatatatataaatatactttcagcataa

SEQ ID NO: 782411 - DNA, 120 bp, Artificial Sequence
  ENSG00000254598_0 (sequence is synthesized)
ccgctgccgcttccaccacagtgtgaagaaaacaggtctgaaacaaggtcttacccccaagctgcttctgaacacagtgactgccagatctccaaacatcaagtccagctttgtccgcca

SEQ ID NO: 782412 - DNA, 120 bp, Artificial Sequence
  ENSG00000254598_1 (sequence is synthesized)
acctgtctgacatgtcgggacccgtgccaagcagggccagagtttacacagatgttaatacacacagacctcgagaatactgggattacgagtcacatgtggtggaatggggaaatcaag

SEQ ID NO: 782413 - DNA, 120 bp, Artificial Sequence
  ENSG00000254598_2 (sequence is synthesized)
atgactaccagctggttcgaaaattaggccgaggtaaatacagtgaagtatttgaagccatcaacatcacaaataatgaaaaagttgttgttaaaattctcaagccagtaaaaaagaaga

SEQ ID NO: 782414 - DNA, 120 bp, Artificial Sequence
  ENSG00000254598_3 (sequence is synthesized)
aaattaagcgtgaaataaagattttggagaatttgagaggaggtcccaacatcatcacactggcagacattgtaaaagaccctgtgtcacgaacccccgccttggtttttgaacacgtaa

SEQ ID NO: 782415 - DNA, 120 bp, Artificial Sequence
  ENSG00000254598_4 (sequence is synthesized)
acaacacagacttcaagcaattgtaccagacgttaacagactatgatattcgattttacatgtatgagattctgaaggccctggattattgtcacagcatgggaattatgcacagagatg

SEQ ID NO: 782416 - DNA, 120 bp, Artificial Sequence
  ENSG00000254598_5 (sequence is synthesized)
ttcccgatacttcaaaggtcctgagctacttgtagactatcagatgtacgattatagtttggatatgtggagattgggttgtatgctggcaagtatgatctttcggaaggagccattttt

SEQ ID NO: 782417 - DNA, 120 bp, Artificial Sequence
  ENSG00000254598_6 (sequence is synthesized)
ccatggacgtgacaattatgatcagttggtgaggatagccaagtttctggggacagaagatttatatggctatattgacaaatacaacattgaattagatccacgtttcaatgatatctt

SEQ ID NO: 782418 - DNA, 120 bp, Artificial Sequence
  ENSG00000254598_7 (sequence is synthesized)
gggcagacactctcgaaagcgatgggaacgctttgtccacagtgaaaatcagcaccttgtcagccctgaggccttggatttcctggacaaactgctgcgatatgaccaccagtcacggct

SEQ ID NO: 782419 - DNA, 120 bp, Artificial Sequence
  ENSG00000254598_8 (sequence is synthesized)
tactgcaagagaggccatggagcacccctatttctacactgttgtgaaggaccaggctcgaatgggttcatctagcatgccagggggcagtacgcccgtcagcagcgccaatgtgatgtc

SEQ ID NO: 782420 - DNA, 120 bp, Artificial Sequence
  ENSG00000254598_9 (sequence is synthesized)
agggatttcttcagtgccaactccttcaccccttggacctctggcaggctcaccagtgattgctgctgccaacccccttgggatgcctgttccagctgccactggcgctcagcagtaacg

SEQ ID NO: 782421 - DNA, 120 bp, Artificial Sequence
  ENSG00000254636_0 (sequence is synthesized)
ctggctgagtgagatggcagctggcttggcaaggggacagcacctttgtcaccacattatgtccctgtaccctacatgctgcgcctatacccaggaccgatggtaactgaggcggagggg

SEQ ID NO: 782422 - DNA, 120 bp, Artificial Sequence
  ENSG00000254636_1 (sequence is synthesized)
aaaggagggcctgagatggcaagtctgtcctcctcggtggttcctgtgtccttcatttccactctgcgagagtctgtgctggaccctggagttggtggagaaggagccagtgacaagcag

SEQ ID NO: 782423 - DNA, 120 bp, Artificial Sequence
  ENSG00000254636_2 (sequence is synthesized)
aggagcaaactgtctttatcacactccatgatcccagctgctaaaatccacactgagctctgcttaccagccttcttctctcctgctggaacccagaggaggttccagcagcctcagcac

SEQ ID NO: 782424 - DNA, 120 bp, Artificial Sequence
  ENSG00000254636_3 (sequence is synthesized)
agccaaaaatccttaggaggacagagggagtccctcacaacctagactggtccccttccctccagctgcctcaactgtccacaggactctcttcccacctgcggccacactgtgcaacct

SEQ ID NO: 782425 - DNA, 120 bp, Artificial Sequence
  ENSG00000254636_4 (sequence is synthesized)
ggaatttccccacctgggcggactcatcacgtcatcaccaattggatgcatcttctgctctgtgcagctggtgaaatctttctcaacccttgagatgcagcccaatcttctcctaacatc

SEQ ID NO: 782426 - DNA, 120 bp, Artificial Sequence
  ENSG00000254636_5 (sequence is synthesized)
tggattcctctctgtcactgcattccctcctgtcatcctgcctttgttttcttgccctcctttctctcccgggtgataggcattaactaaaattaaataaaaattcagatcatccttgca

SEQ ID NO: 782427 - DNA, 120 bp, Artificial Sequence
  ENSG00000254647_0 (sequence is synthesized)
ccagcagccctcagccctccaggacaggctgcatcagaagaggccatcaagcaggtctgttccaagggcctttgcgtcagatcactgtccttctgccatggccctgtggatgcgcctcct

SEQ ID NO: 782428 - DNA, 120 bp, Artificial Sequence
  ENSG00000254647_1 (sequence is synthesized)
gcccctgctggcgctgctggccctctggggacctgacccagccgcagcctttgtgaaccaacacctgtgcggctcacacctggtggaagctctctacctagtgtgcggggaacgaggctt

SEQ ID NO: 782429 - DNA, 120 bp, Artificial Sequence
  ENSG00000254647_2 (sequence is synthesized)
gggaggcagaggacctgcaggtggggcaggtggagctgggcgggggccctggtgcaggcagcctgcagcccttggccctggaggggtccctgcagaagcgtggcattgtggaacaatgct

SEQ ID NO: 782430 - DNA, 120 bp, Artificial Sequence
  ENSG00000254647_3 (sequence is synthesized)
gtaccagcatctgctccctctaccagctggagaactactgcaactagacgcagcccgcaggcagccccacacccgccgcctcctgcaccgagagagatggaataaagcccttgaaccagc

SEQ ID NO: 782431 - DNA, 120 bp, Artificial Sequence
  ENSG00000254647_4 (sequence is synthesized)
aaattgcagcctcagcccccagccatctgccgacccccccaccccaggccctaatgggccaggcggcaggggttgagaggtaggggagatgggctctgagactataaagccagcgggggc

SEQ ID NO: 782432 - DNA, 120 bp, Artificial Sequence
  ENSG00000254647_5 (sequence is synthesized)
tccaggacaggctgcatcagaagaggccatcaagcaggtctgttccaagggcctttgcgtcaggtgggctcaggattccagggtggctggaccccaggccccagctctgcagcagggagg

SEQ ID NO: 782433 - DNA, 120 bp, Artificial Sequence
  ENSG00000254647_6 (sequence is synthesized)
acgtggctgggctcgtgaagcatgtgggggtgagcccaggggccccaaggcagggcacctggccttcagcctgcctcagccctgcctgtctcccagatcactgtccttctgccatggccc

SEQ ID NO: 782434 - DNA, 120 bp, Artificial Sequence
  ENSG00000254647_7 (sequence is synthesized)
gacctgcagggcagcctgcagcccttggccctggaggggtccctgcagaagcgtggcattgtggaacaatgctgtaccagcatctgctccctctaccagctggagaactactgcaactag

SEQ ID NO: 782435 - DNA, 120 bp, Artificial Sequence
  ENSG00000254647_8 (sequence is synthesized)
agacccgccgggaggcagaggacctgcaggctggagaactactgcaactagacgcagcccgcaggcagccccacacccgccgcctcctgcaccgagagagatggaataaagcccttgaac

SEQ ID NO: 782436 - DNA, 120 bp, Artificial Sequence
  ENSG00000254656_0 (sequence is synthesized)
gactggacgccatcacaaccttaccaatcttcagaatacactcctttccatccgacgaaatgatagaaccctctgaagactcatttgagacgatgatggagcataagaatccatcatcaa

SEQ ID NO: 782437 - DNA, 120 bp, Artificial Sequence
  ENSG00000254656_1 (sequence is synthesized)
aacaaatggagtcctccgagggctcatccaacaccaccgaggcgacgtcgggcagtggagtgcggggagaggcagggccagccagcggcccagcccaggaaaagaaggagccccccagtg

SEQ ID NO: 782438 - DNA, 120 bp, Artificial Sequence
  ENSG00000254656_2 (sequence is synthesized)
gcccactccaggaaatggaagagctgcccactgatctactccaagacatggaggagccatccagtggcccacgtaaggaaatagaggatccacccaatgacctactccaagacctggagg

SEQ ID NO: 782439 - DNA, 120 bp, Artificial Sequence
  ENSG00000254656_3 (sequence is synthesized)
agtcatgcaacggttcacaccaggcaaggggggatccactcagtggagcatctgataggatgaaagaagcatcagtcaacccatcgggagcccgagaagaacaagaggctcacactgacc

SEQ ID NO: 782440 - DNA, 120 bp, Artificial Sequence
  ENSG00000254656_4 (sequence is synthesized)
tgaaggaatcgggaagggaggagactcctcaagagcaaaaccagaccgagcactcaaccgcagaacttatggccatggtgaggtccatcatctcgctgtacttccgaatgcaagacctca

SEQ ID NO: 782441 - DNA, 120 bp, Artificial Sequence
  ENSG00000254656_5 (sequence is synthesized)
aagagcaacagagagtagcagaagagatcttgatcaaagggatcaatgcaggccaactgcccgccccaaagcacttctctggcgatcgcagagaattccacgagttcatcgtactctgcc

SEQ ID NO: 782442 - DNA, 120 bp, Artificial Sequence
  ENSG00000254656_6 (sequence is synthesized)
aactgaccttacagagctacccaagaatgttctataacgaccgtctgagagttggctatgtcatcaatcacctgtccggcttggcattagaatgggccaaagctctactgcaggaaaaca

SEQ ID NO: 782443 - DNA, 120 bp, Artificial Sequence
  ENSG00000254656_7 (sequence is synthesized)
gccccctgatcggagacttcccagccttcctggaggccatgtccgaagtgtttgagtaccgccaggcactgcgtgtggcagaagaggccatgttcaccatcaggcagggcggccgctctg

SEQ ID NO: 782444 - DNA, 120 bp, Artificial Sequence
  ENSG00000254656_8 (sequence is synthesized)
ccactgagtacatcgatgagttccagagcctggtacccatcttgggctggccagatgaagtcctgcaggcccacttgtgccaggggctcaacgaggagatcaggcactatctattccggg

SEQ ID NO: 782445 - DNA, 120 bp, Artificial Sequence
  ENSG00000254656_9 (sequence is synthesized)
tccctcagccggattccctagacagtctgattgtgctcatcctgcaaatagaagagaagctggcagagagaagagctatgctcaggctgccccccgaggcccgcccccggaacctgacct

SEQ ID NO: 782446 - DNA, 120 bp, Artificial Sequence
  ENSG00000254656_10 (sequence is synthesized)
ggatcgactcacctgctccagagaggtggatggtcagcagctggttgcccagcgaagtccatccggacatcaatcgcgcccacctcttcctgctgctcatggtgagagtgaacccctacc

SEQ ID NO: 782447 - DNA, 120 bp, Artificial Sequence
  ENSG00000254656_11 (sequence is synthesized)
acagcgtcgcggtccaggccctggtggattcgggagctgacggcaacttcatggatgagaagttcgcccaagagcactacgtcgagctctacgagaagccgtacccacagccggtccaat

SEQ ID NO: 782448 - DNA, 120 bp, Artificial Sequence
  ENSG00000254656_12 (sequence is synthesized)
ccgtggacggctcgctgattggcaacgagcctgtctggctctacacggagcccctggtgtgtatccaccagaaccaccaggagtccatcgaatttgacatcgtaccttcaccgaacttct

SEQ ID NO: 782449 - DNA, 120 bp, Artificial Sequence
  ENSG00000254656_13 (sequence is synthesized)
ctgtggtcctaggcatccgctggctccgagtccacgcccccgaagtcgactggatcaaaggccgctgcaccttccactctccctactgcctgaagaactgcttccgcccgcccccgccat

SEQ ID NO: 782450 - DNA, 120 bp, Artificial Sequence
  ENSG00000254656_14 (sequence is synthesized)
gcattgccctagagaggcacggcatgagcctgctacccggactgccacacccatactcagacctggccgacgtgtttaacccgaaggaagcagatgatgagacttccgaccagccaagct

SEQ ID NO: 782451 - DNA, 120 bp, Artificial Sequence
  ENSG00000254656_15 (sequence is synthesized)
cagacggatccgatgatctttctgaatcagagccctctgagcttcagcaggctggagacagtgatcacagcgagaccttttacgagtgtccctccaccgcgccttgggaacctgtgggtg

SEQ ID NO: 782452 - DNA, 120 bp, Artificial Sequence
  ENSG00000254656_16 (sequence is synthesized)
ccaggatgcaagaaagagccaggctacaggaggaatactgggacctgcaggacatgctgaccaacagacaggactacatacagatgattccggaactgtttgaccagttacacggagccg

SEQ ID NO: 782453 - DNA, 120 bp, Artificial Sequence
  ENSG00000254656_17 (sequence is synthesized)
agctaccagccgtttgcgctctccccagaccctatcatacctcagaacgtgattcacttcatcctaaaggacatgctagggttctttgtgctttcttatggccaggaagtcctgatctac

SEQ ID NO: 782454 - DNA, 120 bp, Artificial Sequence
  ENSG00000254656_18 (sequence is synthesized)
tcaatgagtcaggaggagcacctccaccacgtccgccaagtcctggtccgcttccgccatcacaacgtctactgctccctggacaagagccagttccaccgccaaaccgtggaattcctg

SEQ ID NO: 782455 - DNA, 120 bp, Artificial Sequence
  ENSG00000254656_19 (sequence is synthesized)
ggcttcgtcgtcacccccaaaggggtgaaactgaacaagaacgtcatgaccatcataacagggtaccctacccctggctccaagctatctctgcgaaacttcatcgaattcgtcttcccc

SEQ ID NO: 782456 - DNA, 120 bp, Artificial Sequence
  ENSG00000254656_20 (sequence is synthesized)
taccgccacttcgtggagcgcttcagcatcatcgcagagcccctggtgcggcagctgctgagctcctaccagttctactggggagtcgaggagcaagaggccttcgagtgcctgaagagg

SEQ ID NO: 782457 - DNA, 120 bp, Artificial Sequence
  ENSG00000254656_21 (sequence is synthesized)
gctttccgcaaggcgcctctcctccaccaccccaagccccagaacccattctacttggaaaccggcgtcaccggcacggccctgcacgcctccctgatccaaatcgacgaccaaaccggc

SEQ ID NO: 782458 - DNA, 120 bp, Artificial Sequence
  ENSG00000254656_22 (sequence is synthesized)
aagagagcctgctgcgctttctactcccgcaacatctcccctatcgaggttgagtactctcaagcggagatgaagattcttccaatacgggctgccttcatggtgtggtgccgctacctg

SEQ ID NO: 782459 - DNA, 120 bp, Artificial Sequence
  ENSG00000254656_23 (sequence is synthesized)
gagaacaccgaggagcccatcatgatccttctcaacacagaggatctagcctctctgaataatgacaggctcaccgtacttctccccgggcattgggtcttcttcttctcccacttcaac

SEQ ID NO: 782460 - DNA, 120 bp, Artificial Sequence
  ENSG00000254656_24 (sequence is synthesized)
tttgacgtcatggagctgccagaacaagacggcggccgagctctgccacctgtgagaaacctccggtggaggagagccttccagaggaacactgccgccaggcaaaccctgctgctggcc

SEQ ID NO: 782461 - DNA, 120 bp, Artificial Sequence
  ENSG00000254656_25 (sequence is synthesized)
tcaaggggattccccagggatccatcgacggaatccggggaagaagagaatgaagaacaggatgagctcaatgaacagatcctacggcaagagctgctggccatgatacccatcgaccag

SEQ ID NO: 782462 - DNA, 120 bp, Artificial Sequence
  ENSG00000254656_26 (sequence is synthesized)
atcctcaacagcttcctcgcccacttcagcatggcccagatcagggccgtcattctgcacttcttccgaggcctcctgtactggaagaacaccctagccctggcagccatcctcgtgcta

SEQ ID NO: 782463 - DNA, 120 bp, Artificial Sequence
  ENSG00000254656_27 (sequence is synthesized)
ctgcgcgtgaggcaatgcctctcgctgcggccggcacccgccatgcgggtggctcggccccagccccagcgctccctacgactcatcctggattcgtccctcatcgcaggcagcagcatc

SEQ ID NO: 782464 - DNA, 120 bp, Artificial Sequence
  ENSG00000254656_28 (sequence is synthesized)
acgacagccatcacccagctgctcacccagatgcccgctctcgtaggtgcaaacaccatcccagcccaggagctggctgagctgttcctgggccctggccgctggcagcgaaatgctctg

SEQ ID NO: 782465 - DNA, 120 bp, Artificial Sequence
  ENSG00000254656_29 (sequence is synthesized)
cactcccaggcccaccgaggcctgcagttcacccctggcttctggctgacgctgtgtgagttcttcggtgtcagagtcaccccccaggagggccacctccctgccctgcgtcagaaccgc

SEQ ID NO: 782466 - DNA, 120 bp, Artificial Sequence
  ENSG00000254656_30 (sequence is synthesized)
tacctggagctgcacgtcgttggtgatgaggatgtcgtcttgcgagaagccctgcaagacgacctgcaacgttaccgtcagtgtggcctgcatgacggcctgcaagacacctcgcaggac

SEQ ID NO: 782467 - DNA, 120 bp, Artificial Sequence
  ENSG00000254656_31 (sequence is synthesized)
aagcaggacaacgacgtgcaggaggccccacccagccacacagcagccacccacccaccccgcccacgccacctgatggatccccaggtcctggaattccttggtagccgcctgctccac

SEQ ID NO: 782468 - DNA, 120 bp, Artificial Sequence
  ENSG00000254656_32 (sequence is synthesized)
atccacagtgcagatggccagctgcacctgctcagccgggagcaggcagccagggccctgagccagttcctgaccctgatctacaggcgggccctgcccatccccgcctgggagagccag

SEQ ID NO: 782469 - DNA, 120 bp, Artificial Sequence
  ENSG00000254656_33 (sequence is synthesized)
cccagggagcaggcaaggctagaagagctgcctgatgaggacgaagatgctaacctcgactgaagacgcctccctgtctccagcaaagagtcccctctatttctcaccccaacacctccc

SEQ ID NO: 782470 - DNA, 120 bp, Artificial Sequence
  ENSG00000254656_34 (sequence is synthesized)
acacccccccagcactcggcacagcctcgctgagcagccttcagcagcagggtgtggtggggagcctcggagagtctggggttccatcctggcccagcctcacaccagctgagagacgac

SEQ ID NO: 782471 - DNA, 120 bp, Artificial Sequence
  ENSG00000254656_35 (sequence is synthesized)
cgactgagcttcgaggacaggaagccaccggcatcactaagccaccggcatcacttcatccccagcctcacgcttgggactgggcccggggaagcaagcagcgaggatcgagtggcacag

SEQ ID NO: 782472 - DNA, 120 bp, Artificial Sequence
  ENSG00000254656_36 (sequence is synthesized)
aagaggaacccacttgtgaagggcaacaacttcttcaactcatcaaccagcaatgccacctgtgctaacggactacccagtcctcagagacccagcgccagccctgggctacgagttctc

SEQ ID NO: 782473 - DNA, 120 bp, Artificial Sequence
  ENSG00000254656_37 (sequence is synthesized)
cgttctccaggtcccaagcccatgcccgggagtgacatccatgagggagaaagcagtggtgagcaggaagtgaccccatgacgcgtggccagatgaagaagcaggcacagcaggcgcagc

SEQ ID NO: 782474 - DNA, 120 bp, Artificial Sequence
  ENSG00000254656_38 (sequence is synthesized)
caagcaagcaggtgacggggccccccacccggcctggtgatggccaccctgggacactgacctcgggtgctccactgacttcttctacctccactgccggtgctcctgctcccctgagct

SEQ ID NO: 782475 - DNA, 120 bp, Artificial Sequence
  ENSG00000254656_39 (sequence is synthesized)
cccgcccccgccccccaacccccatcccccaacctcccgacatctgatgatgtggtgcctccctcacccccatcacaccctgcaagcaaacccacccccacccccaccacatctgcttca

SEQ ID NO: 782476 - DNA, 120 bp, Artificial Sequence
  ENSG00000254656_40 (sequence is synthesized)
gcttttttgaccccgccttcctcttgccctgagctctggacttacctggacaaagccgctctttggggcatccggacgtaccagtgccacttaccagacttgcacagcaaagagggcccc

SEQ ID NO: 782477 - DNA, 120 bp, Artificial Sequence
  ENSG00000254656_41 (sequence is synthesized)
tgcatgccttggggcgcctttccctcccaacactgaacactggacagtgcaggggtgcaggggcccctcatacagggatggagtcccagaaggcacacagacacccaggggaccatgccg

SEQ ID NO: 782478 - DNA, 120 bp, Artificial Sequence
  ENSG00000254656_42 (sequence is synthesized)
agtcacagagaggctctggccacaccaccgctttgcaaggggagtagacccttccccaccccccgagctttctcaccccccaatctttttgcactcctcaaataaagcaaactaaaagac

SEQ ID NO: 782479 - DNA, 120 bp, Artificial Sequence
  ENSG00000254685_0 (sequence is synthesized)
aaccgggcggaggcgcaccccagggcgcatgcgtgctgtgcggcgcggtctcagggaaggtggggctatggcagctgctagggaccctccggaagtatcgctgcgagaagccacccagcg

SEQ ID NO: 782480 - DNA, 120 bp, Artificial Sequence
  ENSG00000254685_1 (sequence is synthesized)
aaaattgcggaggttttccgagctaagaggcaaacttgtagcacgtggagaattctgggacatagttgcaataacagcggctgatgaaaaacaggaacttgcttacaaccaacagctgtc

SEQ ID NO: 782481 - DNA, 120 bp, Artificial Sequence
  ENSG00000254685_2 (sequence is synthesized)
agaaaagctgaaaagaaaggagttaccccttggagttcaatatcacgtttttgtggatcctgctggagccaaaattggaaatggaggatcaacactttgtgcccttcaatgtttggaaaa

SEQ ID NO: 782482 - DNA, 120 bp, Artificial Sequence
  ENSG00000254685_3 (sequence is synthesized)
gctatatggagataaatggaattcttttaccatcttattaattcactctggtggctacagtcaacgacttccaaatgcaagtgctctgggaaaaattttcactgctttacctcttggtaa

SEQ ID NO: 782483 - DNA, 120 bp, Artificial Sequence
  ENSG00000254685_4 (sequence is synthesized)
ccccatttatcagatgctagaattaaaactagccatgtacattgatttccccttaaatatgaatcctggaattctggttacctgtgcagatgatattgaactttatagtattggagaatt

SEQ ID NO: 782484 - DNA, 120 bp, Artificial Sequence
  ENSG00000254685_5 (sequence is synthesized)
tgagtttattaggtttgacaaacctggctttactgctttagctcatccttctagtttgacgataggtaccacacatggagtatttgtcttagatccttttgatgatttaaaacatagaga

SEQ ID NO: 782485 - DNA, 120 bp, Artificial Sequence
  ENSG00000254685_6 (sequence is synthesized)
ccttgaatacaggtcttgccatcgtttccttcataagcccagcatagaaaagatgtatcagtttaatgctgtgtgtagacctggaaatttttgtcaacaggactttgctgggggtgacat

SEQ ID NO: 782486 - DNA, 120 bp, Artificial Sequence
  ENSG00000254685_7 (sequence is synthesized)
tgccgatcttaaattagactctgactatgtctacacagatagcctattttatatggatcataaatcagcaaaaatgttacttgctttttatgaaaaaataggcacactgagctgtgaaat

SEQ ID NO: 782487 - DNA, 120 bp, Artificial Sequence
  ENSG00000254685_8 (sequence is synthesized)
agatgcctatggtgactttctgcaggctttgggacctggagcaactgtggagtacaccagaaacacatcaaatgtcattaaagaagagtcagagttggtagaaatgaggcagagaatatt

SEQ ID NO: 782488 - DNA, 120 bp, Artificial Sequence
  ENSG00000254685_9 (sequence is synthesized)
tcatcttcttaaaggaacatcactaaatgttgttgttcttaataactccaaattttatcacattggaacaaccgaagaatatttgttttactttacctcagataacagtttaaagtcaga

SEQ ID NO: 782489 - DNA, 120 bp, Artificial Sequence
  ENSG00000254685_10 (sequence is synthesized)
gctcggcttacagtccataacttttagtatctttccagatataccagaatgctctggcaaaacatcctgtatcattcaaagcatactggattcaagatgttctgtggcacctggctcagt

SEQ ID NO: 782490 - DNA, 120 bp, Artificial Sequence
  ENSG00000254685_11 (sequence is synthesized)
tgtggagtattccagattggggcctgatgtttcagttggggaaaactgcattattagtggttcttacatcctaacaaaagctgccctccccgcacattcttttgtatgttccttaagctt

SEQ ID NO: 782491 - DNA, 120 bp, Artificial Sequence
  ENSG00000254685_12 (sequence is synthesized)
aaagatgaatagatgcttaaagtatgcaactatggcatttggagtgcaagacaacttgaaaaagagtgtgaaaacattgtcagatataaagttacttcaattctttggagtctgtttcct

SEQ ID NO: 782492 - DNA, 120 bp, Artificial Sequence
  ENSG00000254685_13 (sequence is synthesized)
tttggaatcttaaagttacagaggaactgttctctggtaacaagacatgtctgagtttgtggactgcacgcattttcccagtttgttcttctttgagtgactcagttataacatccctaa

SEQ ID NO: 782493 - DNA, 120 bp, Artificial Sequence
  ENSG00000254685_14 (sequence is synthesized)
agatgttaaatgctgttaagaacaagtcagcattcagcctgaatagctataagttgctgtccattgaagaaatgcttatctacaaagatgtagaagatatgataacttacagggaacaaa

SEQ ID NO: 782494 - DNA, 120 bp, Artificial Sequence
  ENSG00000254685_15 (sequence is synthesized)
tttttctagaaatcagtttaaaaagcagtttgatgtagagatattttaaatattgtacactttgcctttttgagtaacattccagagataggtattttttgtaggctgtttcactgaact

SEQ ID NO: 782495 - DNA, 120 bp, Artificial Sequence
  ENSG00000254685_16 (sequence is synthesized)
cagttaatgaaaactgtattaacataattgttgtagcataatattaatagtgcaaaagtacatataagtcattttgatgaaaaatattccaagactaagttgagaaaagagatactattt

SEQ ID NO: 782496 - DNA, 120 bp, Artificial Sequence
  ENSG00000254685_17 (sequence is synthesized)
tggatgtgtatcagtatttttgtttttaataatgattgatttgtggagcattgttttttcacataattagttttaaaggtaattttctaagcatacctttggaatttttccatctttttt

SEQ ID NO: 782497 - DNA, 120 bp, Artificial Sequence
  ENSG00000254685_18 (sequence is synthesized)
gaggcttttggtccagtgaagttctaagtattcactggcacttctctcctcaactgtaattctatttttaataataaaaatggcatactgtagggtcttcagagtagtgtaggaatactg

SEQ ID NO: 782498 - DNA, 120 bp, Artificial Sequence
  ENSG00000254685_19 (sequence is synthesized)
tagaaatactttttcagaaacgaatccatagctgacaaattcactcagtgcccaatatattgtgattattttcgttgataaagaactagatacaaagacctctgaaattgatgataaaat

SEQ ID NO: 782499 - DNA, 120 bp, Artificial Sequence
  ENSG00000254685_20 (sequence is synthesized)
ttgtatctcattaattttatcaaaatgaaactaaaagtacatatgtattatacacttgaacatgtgtttgtatatctttaaaattttcctttatgttccattccataggaaaacacacat

SEQ ID NO: 782500 - DNA, 120 bp, Artificial Sequence
  ENSG00000254685_21 (sequence is synthesized)
atgcacacaaaactcagttatctgtggggaaagtggtagtaataattgagattcatcaataatcatataatttcactatagacattacttgcattatctcctatcagtccttctaacaaa

SEQ ID NO: 782501 - DNA, 120 bp, Artificial Sequence
  ENSG00000254685_22 (sequence is synthesized)
acttcaattaccagatgaactgactttagttttcatcttattttttgtccacatgctggtgatgctgagaaacaataattggcccaaatgcagacatcaagaagcaggcaggaaaatgga

SEQ ID NO: 782502 - DNA, 120 bp, Artificial Sequence
  ENSG00000254685_23 (sequence is synthesized)
aaaactgagataatacacaggtgataaacagtttcgagaaaataaaaattggctagaatctcaagttatgtgtttctatattggtataagcatataagtgaaaagtcttataagtgtaat

SEQ ID NO: 782503 - DNA, 120 bp, Artificial Sequence
  ENSG00000254685_24 (sequence is synthesized)
agagaaaagatttgtcagtgtgtttttttaaatgaaataactagtctgtgctactttatgtcaatataaaaattggtaaactagaagtaacttgtccacaaccctcagttatgatactta

SEQ ID NO: 782504 - DNA, 120 bp, Artificial Sequence
  ENSG00000254685_25 (sequence is synthesized)
tgtgcgtgtttttttttccaaagtttttcccaaggagaagatacaaatatatggtagctattgtttaaaaatgattgatttacttgcagatttttcagaggatgttatgtctttgtcatt

SEQ ID NO: 782505 - DNA, 120 bp, Artificial Sequence
  ENSG00000254685_26 (sequence is synthesized)
cattaaatgttcaaaattgtagttttaccaaatctgaagtgccatcagttataagaatcaccattattttatgttccattaagaaaaacacaataaaacatgacactgctttttttgtta

SEQ ID NO: 782506 - DNA, 120 bp, Artificial Sequence
  ENSG00000254685_27 (sequence is synthesized)
ttaagagaataaaagtattcttgaaaatcaaaaggaaaaattctaaaaagcagtacatcagacttgtgtcccaagcaggaaattagaaacacagtggaagatgatgtaagagctaatttt

SEQ ID NO: 782507 - DNA, 120 bp, Artificial Sequence
  ENSG00000254685_28 (sequence is synthesized)
tcctccatatgtggaaaacatacatgtacacacacacacacggatggaagatccgagatattagaaataagaaaagagatcaagaaaaatatatttagttgtcctctagaaggctcccat

SEQ ID NO: 782508 - DNA, 120 bp, Artificial Sequence
  ENSG00000254685_29 (sequence is synthesized)
ctttgtccttctggattcagagtatagaaaccatgattattttaagaaactctgagaggagaaagagctggtgcattatttcctaaagtgtagccctgggagattgcaagtcttttaaag

SEQ ID NO: 782509 - DNA, 120 bp, Artificial Sequence
  ENSG00000254685_30 (sequence is synthesized)
aaagctatccagtatggtcttcaagataaggaagaagagattaagcaggaaggtccctggacaaaacaaagactttccaaactgagaaaatgggggtcacagaagtgcttagagaaagct

SEQ ID NO: 782510 - DNA, 120 bp, Artificial Sequence
  ENSG00000254685_31 (sequence is synthesized)
ggtggaactgaagatgtctggttttcaaacaaggagaatgtagagtgtatggaccaaggtaaccagatgccactgcagtatagcaagtatcaacagctgtggtaggcatgtactgataag

SEQ ID NO: 782511 - DNA, 120 bp, Artificial Sequence
  ENSG00000254726_0 (sequence is synthesized)
aaaagagtttgagcgctggaaggggctgggctctattgggggccactgagcgccgctcccggactggggctcggtgcgggagcctaacgggggcgcctggacagcgggggctagagactc

SEQ ID NO: 782512 - DNA, 120 bp, Artificial Sequence
  ENSG00000254726_1 (sequence is synthesized)
ccaggtccgaggcgggaggggtgggggcagagatcctgcagccccccgccccccgtcacccccggagaggagaggagatctgctttcttggttttgcttctctttccccccacccccacc

SEQ ID NO: 782513 - DNA, 120 bp, Artificial Sequence
  ENSG00000254726_2 (sequence is synthesized)
ccgggggctggggcgaggggagtcgggttacagggtgtttggggaggggggcttagggggagggtctatctttctatctcgctttcttcccccctccccagttctttgttcccccctccc

SEQ ID NO: 782514 - DNA, 120 bp, Artificial Sequence
  ENSG00000254726_3 (sequence is synthesized)
cacacaccccctcctctcctctcccctcccctcctctctcctcttttcccttccaccacctctctctctctctctccctctctctctcccccagcttttgtttcgccatgcctagtctag

SEQ ID NO: 782515 - DNA, 120 bp, Artificial Sequence
  ENSG00000254726_4 (sequence is synthesized)
tggtatctggaataatggaaagaaatgggggctttggagaactaggatgtttcgggggaagcgctaaggaccgagggctgctggaagacgagcgcgcccttcagctggctctcgatcaac

SEQ ID NO: 782516 - DNA, 120 bp, Artificial Sequence
  ENSG00000254726_5 (sequence is synthesized)
aagacgagcgcgcccttcagctggctctcgatcaactctgcctcctgggtttgggggagccccccgcccccacggcgggcgaggacgggggaggtggggggggcggcgcccccgcgcagc

SEQ ID NO: 782517 - DNA, 120 bp, Artificial Sequence
  ENSG00000254726_6 (sequence is synthesized)
cccccggccgccccgacggcggcccccgcagcgcagacgccccagccccccaccgcccccaaaggggcgagcgacgccaagctctgcgctctctacaaagaggccgagctgcgcctgaag

SEQ ID NO: 782518 - DNA, 120 bp, Artificial Sequence
  ENSG00000254726_7 (sequence is synthesized)
gcctgaagggcagcagcaacaccacggagtgtgttcccgtgcccacctccgagcacgtggccgagatcgtgggcaggcaaggctgcaagattaaggccttgagggccaagaccaacacct

SEQ ID NO: 782519 - DNA, 120 bp, Artificial Sequence
  ENSG00000254726_8 (sequence is synthesized)
acatcaagacaccggtgaggggcgaggaaccagtgttcatggtgacagggcgacgggaggacgtggccacagcccggcgggaaatcatctcagcagcggagcacttctccatgatccgtg

SEQ ID NO: 782520 - DNA, 120 bp, Artificial Sequence
  ENSG00000254726_9 (sequence is synthesized)
cctcccgcaacaagtcaggcgccgcctttggtgtggctcctgctctgcccggccaggtgaccatccgtgtgcgggtgccctaccgcgtggtggggctggtggtgggccccaaaggggcaa

SEQ ID NO: 782521 - DNA, 120 bp, Artificial Sequence
  ENSG00000254726_10 (sequence is synthesized)
ccatcaagcgcatccagcagcaaaccaacacatacattatcacaccaagccgtgaccgcgaccccgtgttcgagatcacgggtgccccaggcaacgtggagcgtgcgcgcgaggagatcg

SEQ ID NO: 782522 - DNA, 120 bp, Artificial Sequence
  ENSG00000254726_11 (sequence is synthesized)
agacgcacatcgcggtgcgcactggcaagatcctcgagtacaacaatgaaaacgacttcctggcggggagccccgacgcagcaatcgatagccgctactccgacgcctggcgggtgcacc

SEQ ID NO: 782523 - DNA, 120 bp, Artificial Sequence
  ENSG00000254726_12 (sequence is synthesized)
agcccggctgcaagcccctctccaccttccggcagaacagcctgggctgcatcggcgagtgcggagtggactctggctttgaggccccacgcctgggtgagcagggcggggactttggct

SEQ ID NO: 782524 - DNA, 120 bp, Artificial Sequence
  ENSG00000254726_13 (sequence is synthesized)
acggcgggtacctctttccgggctatggcgtgggcaagcaggatgtgtactacggcgtggccgagactagccccccgctgtgggcgggccaggagaacgccacgcccacctccgtgctct

SEQ ID NO: 782525 - DNA, 120 bp, Artificial Sequence
  ENSG00000254726_14 (sequence is synthesized)
tctcctctgcctcctcctcctcctcctcttccgccaaggcccgcgctgggcccccgggcgcacaccgctcccctgccacttccgcgggacccgagctggccggactcccgaggcgccccc

SEQ ID NO: 782526 - DNA, 120 bp, Artificial Sequence
  ENSG00000254726_15 (sequence is synthesized)
cgggagagccgctccagggcttctctaaacttggtgggggcggcctgcggagccccggcggcgggcgggattgcatggtctgctttgagagcgaagtgactgccgcccttgtgccctgcg

SEQ ID NO: 782527 - DNA, 120 bp, Artificial Sequence
  ENSG00000254726_16 (sequence is synthesized)
gacacaacctgttctgcatggagtgtgcagtacgcatctgcgagaggacggacccagagtgtcccgtctgccacatcacagccacgcaagccatccgaatattctcctaagccccgtgcc

SEQ ID NO: 782528 - DNA, 120 bp, Artificial Sequence
  ENSG00000254726_17 (sequence is synthesized)
ccatgcctccggggcccactccactgggcccaccctggacctgttttccactaaagccttttggaaagcggtgatttgaggggcaaggtgcttagagatactcgctcgctggggaagggg

SEQ ID NO: 782529 - DNA, 120 bp, Artificial Sequence
  ENSG00000254726_18 (sequence is synthesized)
ggagggaggcagtggtggctggagggtgcgccactttcagagcctctggtcaccctgtcctggaaagattgggagggggccagactgaaaattttactagagttacaactctgatacctc

SEQ ID NO: 782530 - DNA, 120 bp, Artificial Sequence
  ENSG00000254726_19 (sequence is synthesized)
aacacacccttaaatctggaagcagctaagagaaacttttgttttgccagaggtggccactaaggcattctgacgccctctgcccacctcccccgctgtgtgtcactccaccccttcttc

SEQ ID NO: 782531 - DNA, 120 bp, Artificial Sequence
  ENSG00000254726_20 (sequence is synthesized)
cgaggagggggtgggtaaaagggagagggagaattaccacctgtatctagaggtgctctttgcaatccctaagccctctggtcctgacctccgacctcctaacatgaccctttacctccc

SEQ ID NO: 782532 - DNA, 120 bp, Artificial Sequence
  ENSG00000254726_21 (sequence is synthesized)
accccacccccatatcctgtttgggaaactgtcaccagtttccagcagtgtaagggagttggagtcctatcagaagttgcatagatcttctaggggttggggagagaagcatgtcaatcg

SEQ ID NO: 782533 - DNA, 120 bp, Artificial Sequence
  ENSG00000254726_22 (sequence is synthesized)
tttctgtggctgaaaggctcagaagccatctgtccccacaaagctgggctagaggaatctggagaggagtcctcctctctgcccctgtcccctgcagtgtttcccttcactctctccgcc

SEQ ID NO: 782534 - DNA, 120 bp, Artificial Sequence
  ENSG00000254726_23 (sequence is synthesized)
tatcttcccttcctttgggatcttccctttcctcaactctttcctttccctccagctctttgctttgctttcttttggtggctgtcactcccagctctgtcttgttccttgtctttgtct

SEQ ID NO: 782535 - DNA, 120 bp, Artificial Sequence
  ENSG00000254726_24 (sequence is synthesized)
ttcttcccttccccctgcccctgcccctaccagcccagctttggggacaccatccttctggggagaagtagggggaggaatatttggatggtccctccattcctcttcaggcatctggag

SEQ ID NO: 782536 - DNA, 120 bp, Artificial Sequence
  ENSG00000254726_25 (sequence is synthesized)
gccctctcccccactcctccaaagaaacatctcaaattattgatggaatgtatccccattctcagtgaaaatgtgaggaggggactaatactggggtaaagggtcaaacccccaccttca

SEQ ID NO: 782537 - DNA, 120 bp, Artificial Sequence
  ENSG00000254726_26 (sequence is synthesized)
tcactatgggcattatatttagggagtagttcttgggctggattttctggttgtggaagtgggggcgccagagtagtgtgtctgctatttaaaggagcaggaaagggcgtgaggcaggag

SEQ ID NO: 782538 - DNA, 120 bp, Artificial Sequence
  ENSG00000254726_27 (sequence is synthesized)
agcttgaatcctccatgcaaatcatggagtctgtgtcccacctgatgtggttgaggagaagccaggtcttcaaagaggggtcagcctggggcaaagcaggactggggggaggtgggcagc

SEQ ID NO: 782539 - DNA, 120 bp, Artificial Sequence
  ENSG00000254726_28 (sequence is synthesized)
agggcctattctgagaatcacatattgttacaggccttgcaccccctttgctgcttccctcctgctcatttggggctgccaccagctctccaccctcctggttccgctggccgggccaag

SEQ ID NO: 782540 - DNA, 120 bp, Artificial Sequence
  ENSG00000254726_29 (sequence is synthesized)
agaggatggagggatgggagtcccaggagatccttgtaaatagtggggtgggactgttctgagtgatcacccgagcacttaaagctccagagtcccattcttcctggatggagcaggtgg

SEQ ID NO: 782541 - DNA, 120 bp, Artificial Sequence
  ENSG00000254726_30 (sequence is synthesized)
aggtgcagaggggatttcctcctctccttcctcctgtcgagaattaacacctctccacagccttcccctccagaacaccagccagggaggggtggggaaggaggtcacagccaagaaaac

SEQ ID NO: 782542 - DNA, 120 bp, Artificial Sequence
  ENSG00000254726_31 (sequence is synthesized)
tgccctgtgacgacttccctccttcccgcctatgtgagccatcctgagatgtctgtacaatagaaaccaaaccaaatgggcaccctcggttgccggggggcaggtggggaggggggtggg

SEQ ID NO: 782543 - DNA, 120 bp, Artificial Sequence
  ENSG00000254726_32 (sequence is synthesized)
aagaagggatgtctgtctgtcgtccccctccccctctccactctttacccacaaaggcagaagactgttacactagggggctcagcaaattcaatcccacccttaccaattgagccaaac

SEQ ID NO: 782544 - DNA, 120 bp, Artificial Sequence
  ENSG00000254726_33 (sequence is synthesized)
ctagaaacaaacacaaaacacgaatagtgagagacaaaatagaggagagaaagagagcatgagagggagcgagacaggcgaccaacacagaggagagaaaacaaaaatagcaaaaaaaaa

SEQ ID NO: 782545 - DNA, 120 bp, Artificial Sequence
  ENSG00000254726_34 (sequence is synthesized)
aaaaaaaagcagttctttataatttaatattctattttaataaaggcgtttattaccatataaatgtagcaaagaacctgggctaatatgaaaaaaaaagactttttattaggtaattta

SEQ ID NO: 782546 - DNA, 120 bp, Artificial Sequence
  ENSG00000254726_35 (sequence is synthesized)
atgaaaaggatattttattttatgataaagtgatccttaaaaaaataaaaaaactttagaaggtttagaatatatgtagggagagaagaagaaaaaaatacatttgtattcagagttaaa

SEQ ID NO: 782547 - DNA, 120 bp, Artificial Sequence
  ENSG00000254726_36 (sequence is synthesized)
taaatcttaaaaaaaaaaagtgtttttaatatatgtttgggtttacgttgcttttttcccccactttttttttggggaggaatgtcatttgcttttcttgggggagcatcccgggggtga

SEQ ID NO: 782548 - DNA, 120 bp, Artificial Sequence
  ENSG00000254726_37 (sequence is synthesized)
atggtggagagaggagctgggggaacccggtccctcctgggacccttccagtagattggatttcactccatggactcctcctcccctctccccctccccctcaggggagccggcagagcc

SEQ ID NO: 782549 - DNA, 120 bp, Artificial Sequence
  ENSG00000254726_38 (sequence is synthesized)
aaacaaagaaagggattaacaagaaaggaagaagctgtaggactaaggactgaggatcctggggtgtcccccaccactttcccctgccctgtcgcaggggcaagtgaggagggggaatcc

SEQ ID NO: 782550 - DNA, 120 bp, Artificial Sequence
  ENSG00000254726_39 (sequence is synthesized)
agaattaaggcctagcaggcctataggaaccctcagagatgtgtgagatttaagagatctagatttttttttaaccaaaaacaagagagaaagagaagaaaaagagaaaccgaggggttt

SEQ ID NO: 782551 - DNA, 120 bp, Artificial Sequence
  ENSG00000254726_40 (sequence is synthesized)
ttattaataataataattcaaatttatttcatataatcctagagagagaaagaaacaattactagttacttagtagacaatattaagatagcttaaagtttagtagcattgagggcccct

SEQ ID NO: 782552 - DNA, 120 bp, Artificial Sequence
  ENSG00000254726_41 (sequence is synthesized)
ttaaagtttagtagcattgagggcccctgggtccagtagaatgtataaaagttgtaaggaaaagataaatagaggagggaagtggctgagtccaccctgagttgcccaatcttcagatac

SEQ ID NO: 782553 - DNA, 120 bp, Artificial Sequence
  ENSG00000254726_42 (sequence is synthesized)
cagggttggatcaggttgctagtttaagattgggagcttccagtctgctggggttgattctgagaatccttggatttttaaattgtaggacaaagaaatgaggggttcatttcccagggt

SEQ ID NO: 782554 - DNA, 120 bp, Artificial Sequence
  ENSG00000254726_43 (sequence is synthesized)
cttggaaaggatgcacactgatcatctcaataagacaggggctgggttgggggcagcagaggaggccaagcacattcacctgcacccctagtacctgggcagcccatactccaatgtggt

SEQ ID NO: 782555 - DNA, 120 bp, Artificial Sequence
  ENSG00000254726_44 (sequence is synthesized)
atgtcccctcctggggctcccagctcaaaccctcccatgcctgcttcccccaggcctaactgaggaagtccttcttgaagtgtgacctcggtccacttctctacagattgatttaagagc

SEQ ID NO: 782556 - DNA, 120 bp, Artificial Sequence
  ENSG00000254726_45 (sequence is synthesized)
ctgggaagtcattccacaaacagacacacatgcacacacgcttctcaccttcagagcttcaagagcactgaggcgatcagtcccctacccctgttcccatccagctttccacttagcttt

SEQ ID NO: 782557 - DNA, 120 bp, Artificial Sequence
  ENSG00000254726_46 (sequence is synthesized)
gacctccatggcagcagtagcagtaacaatctcagtaattgttctttaaagctgactcgttcttcacctacttgcaaagtgctttcttgtctcataaaagttagattccaagaaggactt

SEQ ID NO: 782558 - DNA, 120 bp, Artificial Sequence
  ENSG00000254726_47 (sequence is synthesized)
cccacggagtggagtggaaacactgtccttgaaggcctgggagaaaggcatccccatgggcacagaggctggggaaaggcacagggactttgggtgaccctaaccctgaccctctgctcc

SEQ ID NO: 782559 - DNA, 120 bp, Artificial Sequence
  ENSG00000254726_48 (sequence is synthesized)
agttcacctccatctatatgtgttcaggtaggggtcatctactgtaccctggcctgggaacacattgccctccccacacaaaactggagggcttggcttctgcgtgtgagaaatcaacat

SEQ ID NO: 782560 - DNA, 120 bp, Artificial Sequence
  ENSG00000254726_49 (sequence is synthesized)
ttttaaagcacttgccttctaccaaccccagcttgcaatcactgggccttcccctcctatccaaggggttggaggggccccttggctctccttttggcaggaggagcctgcttcattaca

SEQ ID NO: 782561 - DNA, 120 bp, Artificial Sequence
  ENSG00000254726_50 (sequence is synthesized)
ccaatgactctgccatccccctccctggccctagaccccaaacacatctccctctacccaatttactcttctcgccccacctagggacagattccccctgctctttttgtcctagaaacc

SEQ ID NO: 782562 - DNA, 120 bp, Artificial Sequence
  ENSG00000254726_51 (sequence is synthesized)
ccgctagtttgggatggtagcgtctggggtggggagggcttccccttccccactcgagggtgcgggtggggaagggggggtgggtggagacagccctggggcagggaggatggtctctcc

SEQ ID NO: 782563 - DNA, 120 bp, Artificial Sequence
  ENSG00000254726_52 (sequence is synthesized)
actgtagaaagtagagtaggattgtggtcagacttaatttgaggcatctagtgaagacacgtacaaatccaccaaggaaaaagatttcaaaagcaaaataaaagcgggaaataaaacaga

SEQ ID NO: 782564 - DNA, 120 bp, Artificial Sequence
  ENSG00000254726_53 (sequence is synthesized)
cccaagaataatcaagtcaaagtgatgttgcacaaaatgcagagaaaccaagaagggggagggttaatgtattaaatgtgctattaagaacttaattttattaaaagtactattacttaa

SEQ ID NO: 782565 - DNA, 120 bp, Artificial Sequence
  ENSG00000254737_0 (sequence is synthesized)
atgtccaacgccagcctcgtgacagcattcatcctcacaggccttccccatgccccagggctggacgccctcctctttggaatcttcctggtggtttacgtgctcactgtgctggggaac

SEQ ID NO: 782566 - DNA, 120 bp, Artificial Sequence; identical to SEQ ID NO: 647896
  ENSG00000254737_1 (sequence is synthesized)

SEQ ID NO: 782567 - DNA, 120 bp, Artificial Sequence; identical to SEQ ID NO: 771649
  ENSG00000254737_2 (sequence is synthesized)

SEQ ID NO: 782568 - DNA, 120 bp, Artificial Sequence; identical to SEQ ID NO: 647898
  ENSG00000254737_3 (sequence is synthesized)

SEQ ID NO: 782569 - DNA, 120 bp, Artificial Sequence
  ENSG00000254737_4 (sequence is synthesized)
gccaacgtgatggtcatctttgtggacattgggatagtggcctcaggctgctttgtcctgatagtgctgtcctatgtgtccatcgtctgttccatcctgcggatccgcacctcagatggg

SEQ ID NO: 782570 - DNA, 120 bp, Artificial Sequence
  ENSG00000254737_5 (sequence is synthesized)
aggcgcagagcctttcagacctgtgcctcccactgtattgtggtcctttgcttctttgttccctgtgttgtcatttatctgaggccaggctccatggatgccatggatggagttgtggcc

SEQ ID NO: 782571 - DNA, 120 bp, Artificial Sequence
  ENSG00000254737_6 (sequence is synthesized)
attttctacactgtgctgacgccccttctcaaccctgttgtgtacaccctgagaaacaaggaggtgaagaaagctgtgttgaaacttagagacaaagtagcacatcctcagaggaaataa

SEQ ID NO: 782572 - DNA, 120 bp, Artificial Sequence
  ENSG00000254737_7 (sequence is synthesized)
ccggttgtttgagtgatatcttgcaaactagtgcctatacgtagtgggtagaaagtgaaaaattgggggaaaaagttagatgagttttactactgagaagaatcacatactgcaagaaca

SEQ ID NO: 782573 - DNA, 120 bp, Artificial Sequence
  ENSG00000254737_8 (sequence is synthesized)
ttttgctacagtaaactggacagagattcttttcctgaatttgaagaagtaagctgtcatgtcatcgaaggccaggtgaggaggattttaggacatagggtgacctctgtaaaatgagat

SEQ ID NO: 782574 - DNA, 120 bp, Artificial Sequence
  ENSG00000254737_9 (sequence is synthesized)
tgatatgtcctgccaaaaaccagcaaaaaaacagagacctctgcccaaaaactgcaagaatgggatactgccaacacctgcaatagacttggaagaggactgtggtcctcccatgagatt

SEQ ID NO: 782575 - DNA, 120 bp, Artificial Sequence
  ENSG00000254737_10 (sequence is synthesized)
aatctaatttagttattcatgtgaaattgattatatgtatagttctcagtgttaaactttattccaaaacacctgcacagttataattcttccacagattgtctaagacagttttaacct

SEQ ID NO: 782576 - DNA, 120 bp, Artificial Sequence
  ENSG00000254737_11 (sequence is synthesized)
cacagctagacttatatttatgatgaacatgattatattctgaattattgactcatttctcatcaataggtttatattaagtttaaaacatattttaatcaaatctcagggatagatgat

SEQ ID NO: 782577 - DNA, 120 bp, Artificial Sequence
  ENSG00000254737_12 (sequence is synthesized)
taattcatgtttataaattgataaacggtttttgtgttttgtttgatttcatatacacataaacttaagaatttaccatcatggagacatagttcaaaaccagcaacaaatattattcaa

SEQ ID NO: 782578 - DNA, 120 bp, Artificial Sequence
  ENSG00000254737_13 (sequence is synthesized)
ctaattgtggctgttcaaatttgtttttggttttaacgtatctatatatttgtatgtgtatatactattccaaacatgtatacaaaagaaagtacatgacatttagcatatttaacatat

SEQ ID NO: 782579 - DNA, 120 bp, Artificial Sequence
  ENSG00000254737_14 (sequence is synthesized)
atttatgtatgtgtatgtatttgcctatttacatatatatctgaaaacatttctagaaacactattttaattggcaagaatagctagctattaatatttaaaatattaccaatgaatcaa

SEQ ID NO: 782580 - DNA, 120 bp, Artificial Sequence
  ENSG00000254737_15 (sequence is synthesized)
ccaatgaatcaattagaaattgtatactcacagaatagattactatccagcaatgataacgaatgatctaacaactacatatataattgtttacgcactttatacatttgcacccatttt

SEQ ID NO: 782581 - DNA, 120 bp, Artificial Sequence
  ENSG00000254737_16 (sequence is synthesized)
taatgtttgttaagatccaatataaaaaattaaatctcttaaatatctagattacttggggctgttttgtctcctagttcacttggcaatgtctggaaatattcttgcttgtcacaggca

SEQ ID NO: 782582 - DNA, 120 bp, Artificial Sequence
  ENSG00000254737_17 (sequence is synthesized)
ctggcgtctattggctataggtcaggagtgttaaacattccacaatgcacaggagagaccctcacaacaaaacttaccatggccaaatgccgatagtgctgaggatgagaacccggagct

SEQ ID NO: 782583 - DNA, 120 bp, Artificial Sequence
  ENSG00000254737_18 (sequence is synthesized)
gaatttaattttaagcgacatgtgtaagaccacgacaatagaaataaaatattttcagataaatataaaatttgctgaatgaatctaggattataaagtgcacatggagactcatatttt

SEQ ID NO: 782584 - DNA, 120 bp, Artificial Sequence
  ENSG00000254737_19 (sequence is synthesized)
taaaatgccaattccattcaaattgatctatagatttgatgctattccaagtaaaatcccagcgtttgattttgcagctatggacatgtggatcttaaagtgcggattgaaatggaatga

SEQ ID NO: 782585 - DNA, 120 bp, Artificial Sequence
  ENSG00000254737_20 (sequence is synthesized)
gtcccaaaatggtcaagaatctcttgaagaaataaaggataactgaaagattgacaacactagttatcacaacttatggcaaagctctagtaactcagagagtgttgcatttgtatgaga

SEQ ID NO: 782586 - DNA, 120 bp, Artificial Sequence
  ENSG00000254737_21 (sequence is synthesized)
ctagacaaatagaaaaacggaactgaatacagagtaaagaaatagactgatacatattcgtatgacaaagatgacactgcaaagcaataaagcatgattgctttcttgaataaattattt

SEQ ID NO: 782587 - DNA, 120 bp, Artificial Sequence
  ENSG00000254737_22 (sequence is synthesized)
tggggtatctgggtattcagaataaaaaaaattagtctcgatcctatttcatactatacacataaaaaactcaattatagtagataagagatataaatgtggtggactgtatgacacttc

SEQ ID NO: 782588 - DNA, 120 bp, Artificial Sequence
  ENSG00000254737_23 (sequence is synthesized)
atgtggtggactgtatgacacttctttaggtaagacactttttagtgatgcaaaaccttcttggaaaaaaattaattaaaatacttttttaaatttattttttattattatactttaagt

SEQ ID NO: 782589 - DNA, 79 bp, Artificial Sequence
  ENSG00000254737_24 (sequence is synthesized)
ttattatactttaagttctggcatacatgtgcacaacgtgcaggtttgttatgtagcaggttacattaggtatttcccc

SEQ ID NO: 782590 - DNA, 78 bp, Artificial Sequence
  ENSG00000254737_25 (sequence is synthesized)
gttttctcttcttgtgttactttgctggaagatattagtttccagtttcatcaatgtccctacaaagaacatgaactc

SEQ ID NO: 782591 - DNA, 69 bp, Artificial Sequence
  ENSG00000254737_26 (sequence is synthesized)
tggttttctcttcttgtgttactttgctggaagatattagtttccagtttcatcaatgtccctacaaag

SEQ ID NO: 782592 - DNA, 120 bp, Artificial Sequence
  ENSG00000254737_27 (sequence is synthesized)
ccggttgtttgagtgatatcttgcaaactagtgcctatacgtagtgggtagaaagtgaaaaattgggggaaaaagttagatgagttttactactgagaagaatcacatactgcaagaggg

SEQ ID NO: 782593 - DNA, 120 bp, Artificial Sequence
  ENSG00000254772_0 (sequence is synthesized)
actttgcggcagcgccgagaaccccaccccctttctttgcggaatcaccatggcggctgggaccctgtacacgtatcctgaaaactggagggccttcaaggctctcatcgctgctcagta

SEQ ID NO: 782594 - DNA, 120 bp, Artificial Sequence
  ENSG00000254772_1 (sequence is synthesized)
cagcggggctcaggtccgcgtgctctccgcaccaccccacttccattttggccaaaccaaccgcacccctgaatttctccgcaaatttcctgccggcaaggtcccagcatttgagggtga

SEQ ID NO: 782595 - DNA, 120 bp, Artificial Sequence
  ENSG00000254772_2 (sequence is synthesized)
tgatggattctgtgtgtttgagagcaacgccattgcctactatgtgagcaatgaggagctgcggggaagtactccagaggcagcagcccaggtggtgcagtgggtgagctttgctgattc

SEQ ID NO: 782596 - DNA, 120 bp, Artificial Sequence
  ENSG00000254772_3 (sequence is synthesized)
cgatatagtgcccccagccagtacctgggtgttccccaccttgggcatcatgcaccacaacaaacaggccactgagaatgcaaaggaggaagtgaggcgaattctggggctgctggatgc

SEQ ID NO: 782597 - DNA, 120 bp, Artificial Sequence
  ENSG00000254772_4 (sequence is synthesized)
ttacttgaagacgaggacttttctggtgggcgaacgagtgacattggctgacatcacagttgtctgcaccctgttgtggctctataagcaggttctagagccttctttccgccaggcctt

SEQ ID NO: 782598 - DNA, 120 bp, Artificial Sequence
  ENSG00000254772_5 (sequence is synthesized)
tcccaataccaaccgctggttcctcacctgcattaaccagccccagttccgggctgtcttgggcgaagtgaaactgtgtgagaagatggcccagtttgatgctaaaaagtttgcagagac

SEQ ID NO: 782599 - DNA, 120 bp, Artificial Sequence
  ENSG00000254772_6 (sequence is synthesized)
taaaaaggacacaccacggaaagagaagggttcacgggaagagaagcagaagccccaggctgagcggaaggaggagaaaaaggcggctgcccctgctcctgaggaggagatggatgaatg

SEQ ID NO: 782600 - DNA, 120 bp, Artificial Sequence
  ENSG00000254772_7 (sequence is synthesized)
tgagcaggcgctggctgctgagcccaaggccaaggaccccttcgctcacctgcccaagagtacctttgtgttggatgaatttaagcgcaagtactccaatgaggacacactctctgtggc

SEQ ID NO: 782601 - DNA, 120 bp, Artificial Sequence
  ENSG00000254772_8 (sequence is synthesized)
actgccatatttctgggagcactttgataaggacggctggtccctgtggtactcagagtatcgcttccctgaagaactcactcagaccttcatgagctgcaatctcatcactggaatgtt

SEQ ID NO: 782602 - DNA, 120 bp, Artificial Sequence
  ENSG00000254772_9 (sequence is synthesized)
ccagcgactggacaagctgaggaagaatgccttcgccagtgtcatcctttttggaaccaacaatagcagctccatttctggagtctgggtcttccgaggccaggagcttgcctttccgct

SEQ ID NO: 782603 - DNA, 120 bp, Artificial Sequence
  ENSG00000254772_10 (sequence is synthesized)
gagtccagattggcaggtggactacgagtcatacacatggcggaaactggatcctggcagcgaggagacccagacgctggttcgagagtacttttcctgggagggggccttccagcatgt

SEQ ID NO: 782604 - DNA, 120 bp, Artificial Sequence
  ENSG00000254772_11 (sequence is synthesized)
gggcaaagccttcaatcagggcaagatcttcaagtgaacatctcttgccatcacctagctgcctgcacctgcccttcagggagatgggggtcattaaaggaaactgaacattgaaccctt

SEQ ID NO: 782605 - DNA, 120 bp, Artificial Sequence
  ENSG00000254772_12 (sequence is synthesized)
tttctttgcggaatcaccatggcggctggggtaagtttgctggctctggtggttcgggtcatcctatccaccgccatcctttgcccgagtggggccagtcggcgccagaggagttctgag

SEQ ID NO: 782606 - DNA, 120 bp, Artificial Sequence
  ENSG00000254772_13 (sequence is synthesized)
gttgagtggggaactgattcgggggtctacagactgtactgctggagagtagggttcctagggcctggaggggaactgaggctggggctctcggaggccagaggtggaagggtctgggga

SEQ ID NO: 782607 - DNA, 120 bp, Artificial Sequence
  ENSG00000254772_14 (sequence is synthesized)
agaggagaaaagagatgccgggtctgggccgtccgaagcctgagaaaggggttcggctctgttgccgctttgaggcgtggtatctgggcaggttgacgaacttctgtgtccgttttgtgg

SEQ ID NO: 782608 - DNA, 120 bp, Artificial Sequence
  ENSG00000254772_15 (sequence is synthesized)
agtaacacaggggacaggttgaagaggagggtctttgtaggcaggtccggctggcacggttaaaggtcgtctctcagggaggtttgggagcgagaggattctccggacagtgaagtcaga

SEQ ID NO: 782609 - DNA, 120 bp, Artificial Sequence
  ENSG00000254772_16 (sequence is synthesized)
ccaattggactccgctggccggcataatagagaagcccaacgccggggaactcgctgcgggacaggaccggagggatgatattcgcgacacggaaagaaaggctttttgagagagaggag

SEQ ID NO: 782610 - DNA, 120 bp, Artificial Sequence
  ENSG00000254772_17 (sequence is synthesized)
ttgatttaagaagacggcatgccatcccctatctctggctagtctgaggggaactagaaatctctcgatcgtcgtgcgtgccttagagacaggacgatgcttttgaagcggtgagcagct

SEQ ID NO: 782611 - DNA, 120 bp, Artificial Sequence
  ENSG00000254772_18 (sequence is synthesized)
gagcagtagagtaggcaggcgctcggaaccatcaatgaatgaagcgagggctccgggaagggaggagagtatgtttgtaggcagatggagtctgatggagctagaagttctggatttctt

SEQ ID NO: 782612 - DNA, 120 bp, Artificial Sequence
  ENSG00000254772_19 (sequence is synthesized)
ggagatagatttgagaggaagagaatacttccagaggtgtccttagggaaggtcaaatctgtcaacaagctttatttagcagttggtgtgtagttctgttcttggtatttcggaggattc

SEQ ID NO: 782613 - DNA, 120 bp, Artificial Sequence
  ENSG00000254772_20 (sequence is synthesized)
tgattacatatgacaagtactaaaggacttggttcaccagaggaagtaaaagggtgagttgaatacattgggattattcaggaaagtcatcctggagagtggcattaaggactgggaccc

SEQ ID NO: 782614 - DNA, 120 bp, Artificial Sequence
  ENSG00000254772_21 (sequence is synthesized)
agtcaagagctccaatgcgcaggcccgagctttttccgcgctggccagcaggccccacccacccagttctttttccaattcagcgccactggataccgaactgtcaccctgtacacgtat

SEQ ID NO: 782615 - DNA, 120 bp, Artificial Sequence
  ENSG00000254827_0 (sequence is synthesized)
ctggcacgatggagaactgcatgaagaggcagcggagtgctgtctgtccccacccttccccgcccggcctccaactggtgggaactggattttgcggctgcagaggacttccccaaattt

SEQ ID NO: 782616 - DNA, 120 bp, Artificial Sequence
  ENSG00000254827_1 (sequence is synthesized)
tgccacattaacagctgactgcacatctgagccccgaggcaatgcggtgtgcagagggtgcttggtggttctctcctgatggccccgcagggtctgcagcctccatctggccagcagagg

SEQ ID NO: 782617 - DNA, 120 bp, Artificial Sequence
  ENSG00000254827_2 (sequence is synthesized)
acttgtgtgcaagataactggaaaatgtctttctgtgtgctccgaggagaatgcaaaggctggtggatgtagtgcctttcctctactgctctctcagctgggggcaagaatgacaggacg

SEQ ID NO: 782618 - DNA, 120 bp, Artificial Sequence
  ENSG00000254827_3 (sequence is synthesized)
tgaacatgcacacaagggcccggaactcacgacccccgacagcggtctcccccgcccccccaaccccgcgcttgcaggatttagggcactagcacagcacagtccaccccttgggactag

SEQ ID NO: 782619 - DNA, 120 bp, Artificial Sequence
  ENSG00000254827_4 (sequence is synthesized)
caccccctccgcagttctgctctctgcagcaacatagagtacaaatattgttccttttgtttcttttttccctttggatacatttttaattacaaaaatagagcttgattgttgcaccta

SEQ ID NO: 782620 - DNA, 120 bp, Artificial Sequence
  ENSG00000254827_5 (sequence is synthesized)
catggcttcctgggcctaccctcgttctgctactcatggaccagtgtgtttgcctctggaagcctctgtctcctcggctgtaaagcgggcctacgacattgaccgaccacccatgaggtt

SEQ ID NO: 782621 - DNA, 120 bp, Artificial Sequence
  ENSG00000254827_6 (sequence is synthesized)
gaggtgaagcagggcctcaggtagccagggaactggttgagcagaggaaatcggagagacctttttttttgtcatgaacaggctcagtgtgaatgggggaacttcctggttctgagggaa

SEQ ID NO: 782622 - DNA, 120 bp, Artificial Sequence
  ENSG00000254827_7 (sequence is synthesized)
tgtgggaaaattgccctttaggctgggtgaagaagaaagcaagtggaaccctggcacccctggacttcctcctccagaggaagcggctttggttgtgggccagcgagcctgtgcgtcccc

SEQ ID NO: 782623 - DNA, 120 bp, Artificial Sequence
  ENSG00000254827_8 (sequence is synthesized)
agccccagggcattcaccgcttcagagaagcaaggcgacagttctgccggatgagaggatccaggctgactggaggaaggaagggctttggctcatctgggctcaggtttgggagaggtg

SEQ ID NO: 782624 - DNA, 120 bp, Artificial Sequence
  ENSG00000254827_9 (sequence is synthesized)
cctcctctcagagcctggaactcccagcccccagctcctggggtgccttcctccaggtgtgtccctggcttgggctggggggacacagccccgctcctgggacgtgcaggtttaaaatgc

SEQ ID NO: 782625 - DNA, 120 bp, Artificial Sequence
  ENSG00000254827_10 (sequence is synthesized)
tattgggtaccatctttgatcgaattcagagtgacagacttagagcaggtcacctctcagcttctaacgaggccaagacggaggaatccccacagcactgggtttgactctgtaattaag

SEQ ID NO: 782626 - DNA, 120 bp, Artificial Sequence
  ENSG00000254827_11 (sequence is synthesized)
ctggtaaagtggaaaaataaaagtaggaaacctaagtggaaaccaaaccagaaagccaggcagcccgggagttctgagccctgcttccttccagctgtgcggcctcagcggctgacgcgg

SEQ ID NO: 782627 - DNA, 120 bp, Artificial Sequence
  ENSG00000254827_12 (sequence is synthesized)
tctctgctgctcttctataacacaggatgatggcagctacaccctctgagtggtgtcaccaaggccaatgagtcctgatggttggagtgtgggtatccgggggcctctaggtcactaccc

SEQ ID NO: 782628 - DNA, 120 bp, Artificial Sequence
  ENSG00000254827_13 (sequence is synthesized)
actctagccctttgctcctagtctctggggaggtggcagcataggggcatggagcagactagactttgcctctttctgcccccaggccagttgatatgagccctgcttgaggggttcgca

SEQ ID NO: 782629 - DNA, 120 bp, Artificial Sequence
  ENSG00000254827_14 (sequence is synthesized)
gggcctggggagccttcttcagcttctctttgttttcctaagatgaaaattgtgacatctgggcttgttgcgggaaatttgtaaattgtgcacagagaagaatatgaaattgcacataaa

SEQ ID NO: 782630 - DNA, 120 bp, Artificial Sequence
  ENSG00000254834_0 (sequence is synthesized)
tgccaaatctggatcagagagaatcctcacattctttgtcactttcagttttcaagaaataagaagatgttgtccccaaaccacaccatagtgacagaattcattctcttaggactgaca

SEQ ID NO: 782631 - DNA, 120 bp, Artificial Sequence
  ENSG00000254834_1 (sequence is synthesized)
gacgacccagtgctagagaagatcctgtttggggtgttcctggcgatctacctaatcacactggcaggcaacctgtgcatgatcctgctgatcaggaccaattcccaactgcaaacaccc

SEQ ID NO: 782632 - DNA, 120 bp, Artificial Sequence
  ENSG00000254834_2 (sequence is synthesized)
atgtatttcttccttggtcacctctcctttgtagacatttgctattcttccaatgttactccaaatatgctgcacaatttcctctcagaacagaagaccatctcctacgctggatgcttc

SEQ ID NO: 782633 - DNA, 120 bp, Artificial Sequence
  ENSG00000254834_3 (sequence is synthesized)
acacagtgtcttctcttcatcgccctagtgatcactgagttttacttccttgcttcaatggcattggatcgctatgtagccatttgcagccctttacattacagttccaggatgtccaag

SEQ ID NO: 782634 - DNA, 120 bp, Artificial Sequence
  ENSG00000254834_4 (sequence is synthesized)
tggctcccttgaaatcaatcatttctactgcgctgatcctcctcttatcatgctggcctgctctgacacccgtgtcaaaaagatggcaatgtttgtagttgcaggctttactctctcaag

SEQ ID NO: 782635 - DNA, 120 bp, Artificial Sequence
  ENSG00000254834_5 (sequence is synthesized)
ctctctcttcatcattcttctgtcctatcttttcatttttgcagcgatcttcaggatccgttctgctgaaggcaggcacaaagccttttctacgtgtgcttcccacctgacaatagtcac

SEQ ID NO: 782636 - DNA, 120 bp, Artificial Sequence
  ENSG00000254834_6 (sequence is synthesized)
tttgttttatggaaccctcttctgcatgtacgtaaggcctccatcagagaagtctgtagaggagtccaaaataattgcagtcttttatacttttttgagcccaatgctgaacccattgat

SEQ ID NO: 782637 - DNA, 120 bp, Artificial Sequence
  ENSG00000254834_7 (sequence is synthesized)
ctatagcctacggaacagagatgtaatccttgccatacaacaaatgattaggggaaaatccttttgtaaaattgcagtttaggcctgtgtttatttgtaatccctaagtgcctgtggggt

SEQ ID NO: 782638 - DNA, 84 bp, Artificial Sequence; identical to SEQ ID NO: 656958
  ENSG00000254852_0 (sequence is synthesized)

SEQ ID NO: 782639 - DNA, 79 bp, Artificial Sequence; identical to SEQ ID NO: 765925
  ENSG00000254852_1 (sequence is synthesized)

SEQ ID NO: 782640 - DNA, 120 bp, Artificial Sequence; identical to SEQ ID NO: 765926
  ENSG00000254852_2 (sequence is synthesized)

SEQ ID NO: 782641 - DNA, 120 bp, Artificial Sequence
  ENSG00000254852_3 (sequence is synthesized)
aggaagaccgccaaagaacatctgaggaaactaagcatgaaagaacgtgagcacggagaaaaggagaggcaggtgtcagaggcagaggaaaacgggaaattggatatgaaagaaatacac

SEQ ID NO: 782642 - DNA, 80 bp, Artificial Sequence
  ENSG00000254852_4 (sequence is synthesized)
acacacctacatggaaatgtttcaacgtgcgcaagcgttgcggcggcgggcagaggactactacagatgcaaagaatggc

SEQ ID NO: 782643 - DNA, 120 bp, Artificial Sequence
  ENSG00000254858_0 (sequence is synthesized)
gactcgcgactggtcggcgcggcgaaagcagagcggcgcgccggttccttggttcctgagggcgatggcgcggggtggctggcgccggctacgccgcctgttatccgcggggcagcttct

SEQ ID NO: 782644 - DNA, 120 bp, Artificial Sequence
  ENSG00000254858_1 (sequence is synthesized)
attccagggccgcgcgctgctcgtcactaacacgctgggctgcggcgcgctcatggcggccggtgatggcgtgcgccagtcctgggagatccgcgcccggcccggccaggttttcgaccc

SEQ ID NO: 782645 - DNA, 120 bp, Artificial Sequence
  ENSG00000254858_2 (sequence is synthesized)
acggcgctccgcgagcatgtttgcggtgggctgcagcatgggtcccttcctgcactactggtacttgtcgctggaccgcctattccctgcgtctggcctccgaggcttcccaaatgtcct

SEQ ID NO: 782646 - DNA, 120 bp, Artificial Sequence
  ENSG00000254858_3 (sequence is synthesized)
caagaaggtcctcgtggatcagctggtagcctctccattgctgggcgtctggtacttcttgggccttggctgcctggagggtcagacagtgggtgagagctgccaggagctgcgggagaa

SEQ ID NO: 782647 - DNA, 120 bp, Artificial Sequence
  ENSG00000254858_4 (sequence is synthesized)
gttctgggaattctacaaggcagactggtgcgtgtggcctgctgcgcagttcgtgaacttcctcttcgtgcccccccaatttcgagtcacctacatcaacggcctgacgctgggctggga

SEQ ID NO: 782648 - DNA, 120 bp, Artificial Sequence
  ENSG00000254858_5 (sequence is synthesized)
cacgtacctgtcctacttgaagtaccggagcccagttcctctgacacccccaggctgtgtggccctggacacccgagcagactgaactgtctgcttcctggaccagatgcaagactgtct

SEQ ID NO: 782649 - DNA, 120 bp, Artificial Sequence
  ENSG00000254858_6 (sequence is synthesized)
ctgacagaaggggaatgggctcctgcagcaagctcgggtcttgagccacgtcccagcaccacttcagctccggagcattgggctgagccgccctttccaagctcacttctgggactgagt

SEQ ID NO: 782650 - DNA, 120 bp, Artificial Sequence
  ENSG00000254858_7 (sequence is synthesized)
ttcctcaaccggaacacacccatgaagatggatgatcatcccctagcccttctcagcaggaacctcatgcgacctgtgaccaagatgtcccatcctcagcacagggcccactctgccaac

SEQ ID NO: 782651 - DNA, 120 bp, Artificial Sequence
  ENSG00000254858_8 (sequence is synthesized)
cagtctcaagcaccagcccctcaacactgccatccacctggctctgggccaagccaccaatccagagctccctcaggtcctgggactaaggcggggacatgactgatcccctcagagcag

SEQ ID NO: 782652 - DNA, 120 bp, Artificial Sequence
  ENSG00000254858_9 (sequence is synthesized)
gctcaggcctggagtcggcccccaaaagtttcacatagggccaggcagcctctgtgtttctttccctggtcctgaactgtggaaatgccattaaactctctctataatgtaactgaaact

SEQ ID NO: 782653 - DNA, 120 bp, Artificial Sequence
  ENSG00000254858_10 (sequence is synthesized)
taatgtaactgaaactgctggctgggcgcagtggctcccacctgtaatctcagcccttcccgaggctgaggtggaaggattgctcgaggccaggtgttcgagaccagcctgggcaacata

SEQ ID NO: 782654 - DNA, 120 bp, Artificial Sequence
  ENSG00000254858_11 (sequence is synthesized)
atttatattgaaaaataaaaataacaaaagaaaatgctgtggatgatcaaaaccagggtgggcaggacccggtgctcacagggacacacatggatggtccattcgctttattgggtgcgt

SEQ ID NO: 782655 - DNA, 120 bp, Artificial Sequence
  ENSG00000254858_12 (sequence is synthesized)
gtagtgttgtcatgacatctcctaaggaactggggggcacgtttgacactcatgaggtcagaacaggtctggtgggcggggggggggggggtcccagggtggtgaatacccacagcacac

SEQ ID NO: 782656 - DNA, 120 bp, Artificial Sequence
  ENSG00000254858_13 (sequence is synthesized)
agcctcctaagcctaggctttgcctctcataggtcgggaggggtggagccagctttgtgttaagaaggatgcagaggtgcatttccaatttgccccctgtttgggtcgccctggactagg

SEQ ID NO: 782657 - DNA, 120 bp, Artificial Sequence
  ENSG00000254858_14 (sequence is synthesized)
gtccttcaccccgggcgacctttgatcccgacacccgactgcgggccgtgacccctgacccgtggcctcagtcccccgcaggacccttgccctgaccgcgcctctccccgggtgtctgtc

SEQ ID NO: 782658 - DNA, 120 bp, Artificial Sequence
  ENSG00000254858_15 (sequence is synthesized)
tccccgcagctctgggtctccatcacctcccaacccccggaggtctctgcccactacccaggagcctctggagccgcgcctcctggtggggcttgtagtggaagaatgcacgggtgggct

SEQ ID NO: 782659 - DNA, 120 bp, Artificial Sequence
  ENSG00000254858_16 (sequence is synthesized)
cttccggttttcccggtgaggctgaggctccgggatggcattgggcttacccaggccttagccagggagggagagagggaatggactgaggaacttgccggcccgacccagccccctgac

SEQ ID NO: 782660 - DNA, 120 bp, Artificial Sequence
  ENSG00000254901_0 (sequence is synthesized)
ggtgccgtttcccggttcgctcggccgcggtcgctatggaggagccggagatgcagctcaaggggaagaaagtcacggacaagttcactgagagcgtctacgtcctggccaacgagccat

SEQ ID NO: 782661 - DNA, 120 bp, Artificial Sequence
  ENSG00000254901_1 (sequence is synthesized)
ccgtggccctgtaccggctgcaggagcatgtgcgtcgctccctccccgagctggcccagcacaaggcagacatgcagcgttgggaggagcagagccagggagccatctacactgtggagt

SEQ ID NO: 782662 - DNA, 120 bp, Artificial Sequence
  ENSG00000254901_2 (sequence is synthesized)
acgcctgcagcgccgtgaagaacctggtggacagcagcgtctacttccgcagcgtggagggtctgctcaaacaggccatcagcatccgggaccatatgaatgccagtgcccagggccaca

SEQ ID NO: 782663 - DNA, 120 bp, Artificial Sequence
  ENSG00000254901_3 (sequence is synthesized)
tgccagtgcccagggccacagcccggaggaaccacccccgccctcctcagcctgatcctggaagagactcggggccccccagcctccgccaacccagagacggggtttcaccatgttggc

SEQ ID NO: 782664 - DNA, 120 bp, Artificial Sequence
  ENSG00000254901_4 (sequence is synthesized)
ataggtgtgagccaccgcacccagccttggttctccctttcttcatctggataaggaaggctggactgcaccttctctacaggctgagttggacattcgcagatctaccctcccaacctg

SEQ ID NO: 782665 - DNA, 120 bp, Artificial Sequence
  ENSG00000254901_5 (sequence is synthesized)
cctcccaacctgcattctgcctcaagcagcaacgcccaccccaggctcaggccacatggagaagccacccctagttccagtggtggatgtggcacctcggcctggccaatcagagctccc

SEQ ID NO: 782666 - DNA, 120 bp, Artificial Sequence
  ENSG00000254901_6 (sequence is synthesized)
ttgtcctaggttcctagtgattggtttgagatggacacgtgacccaatgagcgacctttcctgggagttctaccaggagcatcaggaaggttgagctgggtgtatgggaaccaggccggg

SEQ ID NO: 782667 - DNA, 120 bp, Artificial Sequence
  ENSG00000254901_7 (sequence is synthesized)
gcgaggggttccggggggacctgagaacattgtgtggagccctggatccaactgtacctgacactagccaatttcatttcttcagtttcatggacccctaaattatgatttttgccaaaa

SEQ ID NO: 782668 - DNA, 120 bp, Artificial Sequence
  ENSG00000254901_8 (sequence is synthesized)
gaaaagggggttcagaaagggagagagttcttccccctctcctgcctgggtgtcgctccaccagcctcctggccgtcgcgccccctcctcactgcgccacccccgggtgtgcctccttcc

SEQ ID NO: 782669 - DNA, 120 bp, Artificial Sequence
  ENSG00000254901_9 (sequence is synthesized)
ctgcgtctcacacagcccctttcttgtccgcaaagactgaggagcggggagggcgggccctctgacaccggaacaggagccgtgcggcgtccggtttcagcagggaaggcttaggcgggc

SEQ ID NO: 782670 - DNA, 120 bp, Artificial Sequence
  ENSG00000254901_10 (sequence is synthesized)
gcctctctctctgctctgaactaaccaacccgcccgcttggcagccaggcaggcacctgcttgtctaaccacttggggtttctcactgggcttgtgggatgatttcggaggtggcaggtg

SEQ ID NO: 782671 - DNA, 120 bp, Artificial Sequence
  ENSG00000254901_11 (sequence is synthesized)
gaggggtgtctgcaggtccagaatgttccaccctgctgctcagggaccatgtcagcccatctctcccactctctctccaccaccttcctctctcttttccaggccataggccccatgcta

SEQ ID NO: 782672 - DNA, 120 bp, Artificial Sequence
  ENSG00000254901_12 (sequence is synthesized)
gtcccagagatttccaccccccaagacagagaagggagcccacatttcctctatcctaccacgtgccagcagcctgctttacccgtgcacagtctctcaggcagagcccggcatgggcaa

SEQ ID NO: 782673 - DNA, 120 bp, Artificial Sequence
  ENSG00000254901_13 (sequence is synthesized)
ttacccacctatctctgggacctccccacccatctactgcctacctgctgtgtgaccgagcaaattcactaccctctctggtctctgcatttactttctgtaaaggtggctctcaggtga

SEQ ID NO: 782674 - DNA, 120 bp, Artificial Sequence
  ENSG00000254901_14 (sequence is synthesized)
ccaagagggtgcagggcacagtgacggatgtgctttggagcagtcggctattgctgcataacacagcatcccaaaacagtggtttacagccccagtaattaacctactcatgattctgca

SEQ ID NO: 782675 - DNA, 120 bp, Artificial Sequence
  ENSG00000254901_15 (sequence is synthesized)
ctttgggctgggctcagctgggtggttctgctgctgtccctggggctcacccatgtggtgctcatgggagctcagctgcacctgcatagtcagggggtcccttggccaggactgttggca

SEQ ID NO: 782676 - DNA, 120 bp, Artificial Sequence
  ENSG00000254901_16 (sequence is synthesized)
gcaggggtcagattttcctcatggcctctccagcaggccagcccgggtttctcctggtggctgggagccaggagagcggctcccatgcagagtgctggtttcacatttgtgggtggccca

SEQ ID NO: 782677 - DNA, 120 bp, Artificial Sequence
  ENSG00000254901_17 (sequence is synthesized)
caggaccagatgggagaggaccgcacaagtgcagcgtgagctgtgggaggtgtggctgaccacgcttagagagtgtggtgccaggaaagatctgatgtgtcaccattctatatctgtgat

SEQ ID NO: 782678 - DNA, 120 bp, Artificial Sequence
  ENSG00000254901_18 (sequence is synthesized)
gggcagacgcaggcaggtcaaaggggccctggggacttaccgagcccctgcctattggccaggcactgtgattgtcctcggtgccatgtgccatggaagccctctcagaggtcgagggga

SEQ ID NO: 782679 - DNA, 120 bp, Artificial Sequence
  ENSG00000254901_19 (sequence is synthesized)
ggcaggtggagacagagcctctgtaggcctttcaagctgtagccccagagcccagaggcagccgaattcatgtgtgcagtcagagagcacttagtgggcactgtagtcaatcagtgagcg

SEQ ID NO: 782680 - DNA, 120 bp, Artificial Sequence
  ENSG00000254901_20 (sequence is synthesized)
cttactggacaccacaggcagcaagcatttactgagtacctctggcagttgatgcatacttcctgagtacctgttcatagcaggcttagctctggatgtggggtggtgaggaatcccaca

SEQ ID NO: 782681 - DNA, 120 bp, Artificial Sequence
  ENSG00000254901_21 (sequence is synthesized)
ggctgaggggtggcctgggagctttccagggggcctgaagcaggaggggctgcctgagtgggtcagcagcccagcccagtgccctacgcagccctgcccacacccccaacccagcctctg

SEQ ID NO: 782682 - DNA, 120 bp, Artificial Sequence
  ENSG00000254901_22 (sequence is synthesized)
tctccccagtcccatcccccacaccctggtccctcctactttgtgcctcgaggacactgccccgctgccctcctcacttcccagcgtctgctgtcccctccgctgctgctgcccggcagg

SEQ ID NO: 782683 - DNA, 120 bp, Artificial Sequence
  ENSG00000254901_23 (sequence is synthesized)
ccggcaggattgctctgtgtctcatccacgtttgtccctgcagagttcctcgcctctccctggaaccgccagcctcatgccgcatctcagaggctttttttttctctctttttttttttt

SEQ ID NO: 782684 - DNA, 81 bp, Artificial Sequence
  ENSG00000254901_24 (sequence is synthesized)
ggtggtgcgatctcggttcagtgtaacctctgcctgtcaggttcaagcgattatcccgcttcagcctcccgagtagctggg

SEQ ID NO: 782685 - DNA, 120 bp, Artificial Sequence
  ENSG00000254901_25 (sequence is synthesized)
acgcggggcgtctggaacttaaaggggcagcgtaccttggccgtcccgttccacaacaaggtcccttctgcggtctcaaaggcttataagcaagggcgggggcagagggctaaagaaggg

SEQ ID NO: 782686 - DNA, 120 bp, Artificial Sequence
  ENSG00000254901_26 (sequence is synthesized)
gaaaactgtctctttccttttgtcctggtgtctggtgacctcctcttgtcctgtggcatctataacctgagttcagtcacttaataccgaggtcctgcgctctgctgtgtgcctggccct

SEQ ID NO: 782687 - DNA, 120 bp, Artificial Sequence
  ENSG00000254901_27 (sequence is synthesized)
gggctgggcactggggacatagcagtgaccgagacagacaggctcacaaggagacatacgacaaccaggtaaacatggcagacaagagcatgtcagatgcgctgtgaagaacactgcggg

SEQ ID NO: 782688 - DNA, 120 bp, Artificial Sequence
  ENSG00000254901_28 (sequence is synthesized)
gcccctcctaggaggtggcatgagttacatgcagacagagacgatccgggggcagacggagttccatgtggggcagtggtgagggcagacgctctggggctgggatccctgggagtgttc

SEQ ID NO: 782689 - DNA, 120 bp, Artificial Sequence
  ENSG00000254901_29 (sequence is synthesized)
gagaagcaccgagaaggcttctgtggctggagccggccagctgggggagatggggccagggagatggcaggggcctctccctgtcccaggacccagagccaagggaggctttaagcccag

SEQ ID NO: 782690 - DNA, 120 bp, Artificial Sequence
  ENSG00000254901_30 (sequence is synthesized)
gaccaggggtctgaaaacgaaaagcactcacagtccttgaacattggaaagagaatttttgaagagtagcccttctttttgtttttgttggcattctaagttaataaacacgcttatgaa

SEQ ID NO: 782691 - DNA, 120 bp, Artificial Sequence
  ENSG00000254901_31 (sequence is synthesized)
ataggcatgagccactgcgcccggcctcagaggctttcattcccacttttcccccaaaactgcgcctctttggggtcatcagtgaccttcgcagggtcaagtcatccccctctcctgtcc

SEQ ID NO: 782692 - DNA, 120 bp, Artificial Sequence
  ENSG00000254901_32 (sequence is synthesized)
caggaccttaagcactgccctgttttacagaagaggaaactgaggccccgagaggtaaggcagccagctcagggtcatcgcccacgcccagaaatgccaggattcccacccggacctctg

SEQ ID NO: 782693 - DNA, 120 bp, Artificial Sequence
  ENSG00000254901_33 (sequence is synthesized)
accaccaagctccaccttagtctggcccggggtcatccctcaggtgctgcctcatgccttgggtctgtctctcagaccaccctggcccttgcccctgctccccagcctgactgaagctgg

SEQ ID NO: 782694 - DNA, 120 bp, Artificial Sequence
  ENSG00000254901_34 (sequence is synthesized)
gccaggcagagactgaagactgaacgagtgtggccagcattcctcctgcacctgcccggagcctccaggcccagccgtccatgttcccagaagtccagaagtggctttgctgctcctgga

SEQ ID NO: 782695 - DNA, 120 bp, Artificial Sequence
  ENSG00000254901_35 (sequence is synthesized)
ctctcactggccccccatcgacccttggaccaataactgccatcaaaataatcctgattatgcacctatcaagtccctggccctgggctaaagtcttcacaggggtcatctcatttcatc

SEQ ID NO: 782696 - DNA, 120 bp, Artificial Sequence
  ENSG00000254901_36 (sequence is synthesized)
taaagtcttcacaggggtcatctcatttcatcctcagccccaaaaggcaggtctcacccccaaatacatatggacaaaaagaggctctgccgggtgtgatggcgggcacctgtaatccca

SEQ ID NO: 782697 - DNA, 120 bp, Artificial Sequence
  ENSG00000254901_37 (sequence is synthesized)
agatggcgccactgcactccagcctgcgcgacagagcgagacttcgcacccgccgccccccaaccaaaaaaaaaaagggcacagtcagagaagagcagagcccggcttggtttggtccca

SEQ ID NO: 782698 - DNA, 120 bp, Artificial Sequence
  ENSG00000254901_38 (sequence is synthesized)
agaagagcagagcccggcttggtttggtcccagccctgcctgcctctgatgtgctgtgtgacataggcctggtgctggccctctctgggtctccctttctttcttcctttcttttctttt

SEQ ID NO: 782699 - DNA, 120 bp, Artificial Sequence
  ENSG00000254986_0 (sequence is synthesized)
aggaagtgagtttgcgaacggagcagctgctgcagtgatggttctcagcagggcccatggcggacacccagtacatcctgcccaatgacatcggcgtgtctagcctggactgccgtgagg

SEQ ID NO: 782700 - DNA, 120 bp, Artificial Sequence
  ENSG00000254986_1 (sequence is synthesized)
ccttccgcctgctgtcacccacagagcgcctctatgcctaccacctgtcccgtgccgcctggtacggaggcctggctgtgctgcttcagacctcccctgaggccccctacatctatgctc

SEQ ID NO: 782701 - DNA, 120 bp, Artificial Sequence
  ENSG00000254986_2 (sequence is synthesized)
tgctcagccgcctcttccgcgcccaggaccccgaccagctgcgccaacatgccctggctgaaggccttaccgaggaggagtatcaggcgttcctggtctatgccgcgggtgtttactcca

SEQ ID NO: 782702 - DNA, 120 bp, Artificial Sequence
  ENSG00000254986_3 (sequence is synthesized)
acatgggcaactacaagtcctttggtgacaccaagtttgttcccaacttgcccaaggaaaagctggaacgggtgatcctagggagtgaggctgctcagcagcacccagaagaagtcaggg

SEQ ID NO: 782703 - DNA, 120 bp, Artificial Sequence
  ENSG00000254986_4 (sequence is synthesized)
gcctctggcagacctgcggggagcttatgttctctctggagccaaggcttcgacacctcggactggggaaggagggaatcaccacctatttctctgggaattgtaccatggaagatgcca

SEQ ID NO: 782704 - DNA, 120 bp, Artificial Sequence
  ENSG00000254986_5 (sequence is synthesized)
aattggcccaggactttctggactcacagaacctcagtgcctacaacacccggctcttcaaagaggtcgatggagaagggaagccctactacgaggtgcggctggcttctgtgcttggct

SEQ ID NO: 782705 - DNA, 120 bp, Artificial Sequence
  ENSG00000254986_6 (sequence is synthesized)
cagagccttccctggactctgaggtgacttccaagctgaagagctatgaattccggggaagccctttccaggtgacccggggggactacgcgcccatcctccagaaggtggtggagcagc

SEQ ID NO: 782706 - DNA, 120 bp, Artificial Sequence
  ENSG00000254986_7 (sequence is synthesized)
tggagaaagccaaggcctatgcagccaacagccaccaggggcagatgctggcccagtatatagagagcttcacccagggctccatcgaggcccacaagaggggctcccgcttctggatcc

SEQ ID NO: 782707 - DNA, 120 bp, Artificial Sequence
  ENSG00000254986_8 (sequence is synthesized)
aggacaaaggccccatcgtggagagttacatcgggttcatcgagagctaccgcgacccctttggttcccgaggagaatttgaaggtttcgtagctgtggtgaacaaggccatgagtgcca

SEQ ID NO: 782708 - DNA, 120 bp, Artificial Sequence
  ENSG00000254986_9 (sequence is synthesized)
agtttgagcggctggtggcgagcgcagagcagctgctgaaggagctgccctggcccccaacctttgagaaggacaagttcctcacccctgacttcacctccctggatgttctcaccttcg

SEQ ID NO: 782709 - DNA, 120 bp, Artificial Sequence
  ENSG00000254986_10 (sequence is synthesized)
ctggctccggcatccctgccggcatcaacatccccaactacgatgatctgaggcagacggaaggctttaagaacgtgtcgctggggaatgtgctggctgtggcctacgccacgcagcggg

SEQ ID NO: 782710 - DNA, 120 bp, Artificial Sequence
  ENSG00000254986_11 (sequence is synthesized)
tgtacatcctctggaaggggccctccttcgatgtgcaggtgggcctgcacgagctgctgggccatggcagtggcaagctcttcgtacaggacgaaaaaggagcattcaactttgaccagg

SEQ ID NO: 782711 - DNA, 120 bp, Artificial Sequence
  ENSG00000254986_12 (sequence is synthesized)
aaacagtgatcaacccagagacgggcgagcagattcagagctggtatcggagcggggagacctgggatagcaagttcagcaccatcgcctccagctacgaagagtgccgggctgagagcg

SEQ ID NO: 782712 - DNA, 120 bp, Artificial Sequence
  ENSG00000254986_13 (sequence is synthesized)
tgggtctctacctctgtctccacccgcaagtgctggagatctttggctttgagggggctgatgcggaggacgtgatctacgtgaactggctcaacatggttcgggccgggctgctcgctc

SEQ ID NO: 782713 - DNA, 120 bp, Artificial Sequence
  ENSG00000254986_14 (sequence is synthesized)
tggagttctacacacctgaggccttcaactggcgacaggcccatatgcaggcccggtttgtgatcctgagagtcttgctggaggctggcgagggactcgttaccatcactcccaccacag

SEQ ID NO: 782714 - DNA, 120 bp, Artificial Sequence
  ENSG00000254986_15 (sequence is synthesized)
gctccgatgggcgcccagatgcccgggtccgcctcgaccgcagcaagatccggtctgtgggcaagcctgctctagagcgcttcctgcggagacttcaggtgctgaagtccacaggggatg

SEQ ID NO: 782715 - DNA, 120 bp, Artificial Sequence
  ENSG00000254986_16 (sequence is synthesized)
tggccggagggcgggccctgtacgaggggtatgcaacagtcactgatgcgccccccgagtgcttcctcaccctcagggacacggtgctgctgcgtaaggaatctcggaagctcattgttc

SEQ ID NO: 782716 - DNA, 120 bp, Artificial Sequence
  ENSG00000254986_17 (sequence is synthesized)
agcccaacactcgccttgaaggctcagacgtgcagcttctggaatacgaggcgtcagctgctggcctcatccgatccttctctgagcgtttcccagaggatggacccgagttggaggaga

SEQ ID NO: 782717 - DNA, 120 bp, Artificial Sequence
  ENSG00000254986_18 (sequence is synthesized)
tcctcacacagctggccacagccgatgcccgattctggaagggccccagtgaggccccatctggccaagcttgaggaagatgtgtggccttgcccccaattccatcagaccaaggctgca

SEQ ID NO: 782718 - DNA, 120 bp, Artificial Sequence
  ENSG00000254986_19 (sequence is synthesized)
agtggccctccattcgtgtgtgtatttaggggctggggagggggaggggcaggagcttggaccttggtactacctcagctgagggtggtgacacaaccccttccatttgtcagcactttc

SEQ ID NO: 782719 - DNA, 120 bp, Artificial Sequence
  ENSG00000254986_20 (sequence is synthesized)
cagcctgccaattgcttcccctctgtgatctcatttcatctgcactgccatacgtggagtgagcaagacagggcttaccatcctgtctaccagatgaggaaatggcagttctgagaagtc

SEQ ID NO: 782720 - DNA, 120 bp, Artificial Sequence
  ENSG00000254986_21 (sequence is synthesized)
actggtctagatcccgcaggtggcacgtgacagctagggttcaaaacgttctcaccaaatccaatgctcctcacatattaattttataaccagacaaataaatattagagacaaccacca

SEQ ID NO: 782721 - DNA, 120 bp, Artificial Sequence
  ENSG00000254986_22 (sequence is synthesized)
attactcctattgtgtaggttcccacctgcaagagtgctgtcgggtcctctgaggtgaaaccccaaaggaaagcgggatcgggactgggggagggggattcccaagtccctgacacccgc

SEQ ID NO: 782722 - DNA, 120 bp, Artificial Sequence
  ENSG00000254986_23 (sequence is synthesized)
gccgtctcggcctgggcttggtgacctcgtcagtcccgtctgccgggactaggccgcggccaggccgggcacagcggtacccggtccggcgcgtgtgcggcctgctgacaaaaggccgag

SEQ ID NO: 782723 - DNA, 120 bp, Artificial Sequence
  ENSG00000254986_24 (sequence is synthesized)
cccgcagggccaatccgcgcgccaccccgtagcgcctgggggcgggagcgggcgagccgagaagctcgtcttggcgcgtctattggctggtactgacgcccatccggaccccgaggccag

SEQ ID NO: 782724 - DNA, 120 bp, Artificial Sequence
  ENSG00000254986_25 (sequence is synthesized)
gcagttggccaaggggggcggggttcgcagagccccaatgaatgggggagccggaagcaggaagtgagtttgcgaacggagcagctgctgcagcagggcccatggcggacacccagtaca

SEQ ID NO: 782725 - DNA, 76 bp, Artificial Sequence
  ENSG00000254986_26 (sequence is synthesized)
aggagtatgttggcccactgcaaacctccacctcccaggttcaagcacttctcatgcctcagcctcccaagtagct

SEQ ID NO: 782726 - DNA, 120 bp, Artificial Sequence
  ENSG00000254986_27 (sequence is synthesized)
tgacccaggcccagggagaaggggcaggcggcccaggggcctgagggagagacgggtttgtgcagctgcatctttcctgtccaggtcctgacccagtagggcccaggcctgggtcactgc

SEQ ID NO: 782727 - DNA, 120 bp, Artificial Sequence
  ENSG00000254986_28 (sequence is synthesized)
gcctgggaggagagcacacacctgttggggctcagggatgacccaggcccagggagaaggggcaggcggcccaggggcctgagggagagacgggtttcgtagctgtggtgaacaaggcca

SEQ ID NO: 782728 - DNA, 120 bp, Artificial Sequence
  ENSG00000254986_29 (sequence is synthesized)
tacaatagtattcccttccacatgggcttttgggaggattaaatgagatcataagagttcagagccaggtatgcaattggtatggggtaaacaacagctgtgatgacagtgatggttctc

SEQ ID NO: 782729 - DNA, 120 bp, Artificial Sequence
  ENSG00000254986_30 (sequence is synthesized)
gagaatgccccgggttggggaatccccgggttccaacggggctgtcagaccttcagtaaattgttgccctttccaagcctcagtttccctatctgtaaaatgggctttcttctggttgtg

SEQ ID NO: 782730 - DNA, 120 bp, Artificial Sequence
  ENSG00000254986_31 (sequence is synthesized)
aacttctgtggcttccctggtggagcacagggagcgagcaggagaatggagggccaaggaaaaggcatttagagggatgagaatgggacagtttcaagcaaaatcatttattgctgtgga

SEQ ID NO: 782731 - DNA, 120 bp, Artificial Sequence
  ENSG00000254986_32 (sequence is synthesized)
ccagagacgggcgagcaggtgagggaggcctcagcagagccccagggtactgggagggtgggcacaggtggggcagtggccaccttaagcccgacagtggagctccttttccagattcag

SEQ ID NO: 782732 - DNA, 120 bp, Artificial Sequence
  ENSG00000254997_0 (sequence is synthesized)
atgaattccacaaggaaatcatctcaggaggaagggctcatacttggatccagaaaatatcaacatagccaaagaaaaacaatcaagacatacctccaggagctgtgtaacagcaaccgg

SEQ ID NO: 782733 - DNA, 120 bp, Artificial Sequence
  ENSG00000254997_1 (sequence is synthesized)
aaagagaaacaatggtgtgttcctatgtgggatataaagagccggggctcagggggctccacacctgcacctccttctcacctgctcctctacctgctccaccctcaatccaccagaacc

SEQ ID NO: 782734 - DNA, 120 bp, Artificial Sequence
  ENSG00000254997_2 (sequence is synthesized)
atgggctgctgtggctgctccggaggctgtggctccagctgtggaggctgtgactccagctgtgggagctgtggctctggctgcaggggctgtggccccagctgctgtgcacccgtctac

SEQ ID NO: 782735 - DNA, 120 bp, Artificial Sequence
  ENSG00000254997_3 (sequence is synthesized)
tgctgcaagcccgtgtgctgctgtgttccagcctgttcctgctctagctgtggcaagcggggctgtggctcctgtgggggctccaagggaggctgtggttcttgtggctgctcccagtgc

SEQ ID NO: 782736 - DNA, 120 bp, Artificial Sequence
  ENSG00000254997_4 (sequence is synthesized)
cagctgctgcaagccctactgctcccagtgcagctgctgtaagccctgttgctcctcctcgggtcgtgggtcatcctgctgccaatccagctgctgcaagccctgctgctcatcctcagg

SEQ ID NO: 782737 - DNA, 120 bp, Artificial Sequence
  ENSG00000254997_5 (sequence is synthesized)
ctgtgggtcatcctgctgccagtccagctgctgcaagccctgctgctcccagtccagatgctgtgtccctgtgtgctaccagtgcaagatctgaggctctagtgggaaacctcaggtagc

SEQ ID NO: 782738 - DNA, 120 bp, Artificial Sequence
  ENSG00000254997_6 (sequence is synthesized)
tcctgaagatctgtgctttccaacaagtgactacccttgaagcacatccccttctggatctgaaaagagcccttggctcagggcgtctttttccagcccctgaggaaatggaatgaacca

SEQ ID NO: 782739 - DNA, 120 bp, Artificial Sequence
  ENSG00000254997_7 (sequence is synthesized)
ctccctgcccattccctataagaatatcccaagacccaggcaattttgcccctctttcccacatgcccccatatgtctgagccaaactgcactgggggctgccctcatgccaagcaagag

SEQ ID NO: 782740 - DNA, 120 bp, Artificial Sequence
  ENSG00000254997_8 (sequence is synthesized)
cctggaattccccttcttgataattccatgggagacagcaaacccttctttcctttgcctgccaggagcttcacgacatttgcagatggatgtcctgcaacccaaatgatcacatgtatc

SEQ ID NO: 782741 - DNA, 120 bp, Artificial Sequence
  ENSG00000254999_0 (sequence is synthesized)
gcagtcgctcttcctcaggcggcggccatggcgggacaggaggatccggtgcagcgggagattcaccaggactgggctaaccgggagtacattgagataatcaccagcagcatcaagaaa

SEQ ID NO: 782742 - DNA, 120 bp, Artificial Sequence
  ENSG00000254999_1 (sequence is synthesized)
atcgcagactttctcaactcgttcgatatgtcttgtcgttcaagacttgcaacactaaacgagaaattgacagcccttgaacggagaatagagtacattgaagctcgggtgacaaaaggt

SEQ ID NO: 782743 - DNA, 120 bp, Artificial Sequence
  ENSG00000254999_2 (sequence is synthesized)
gagacactcacctagaacagtgccgtgctgctgctgggaagttgctttacacaacacaggccacatgggaaaggccccagcagccttcagctccttcctttctccttaaagagcaacagg

SEQ ID NO: 782744 - DNA, 120 bp, Artificial Sequence
  ENSG00000254999_3 (sequence is synthesized)
gcttattcttgtttttcttttttcaaaagtgtggcctttgggctctgccatctggggtgtggtgtggtatgtgggaagaagttcagaggaaccgttggaaacgacgttaggcattttacc

SEQ ID NO: 782745 - DNA, 120 bp, Artificial Sequence
  ENSG00000254999_4 (sequence is synthesized)
tttgtgaaggtcctcctcacctctatctttctttctctctctctcaaactttccttaaagttctcattgcctttgcactgcttctgtgaacagtctttgtctcctccccacctttggtgg

SEQ ID NO: 782746 - DNA, 120 bp, Artificial Sequence
  ENSG00000254999_5 (sequence is synthesized)
gaagtgcggggcagtcctggtcaagacactcatgccctggcaatgtggctgccagagaatgttgttgctaacccaccagtttcttgttgatttggagaggtcaaggccaggcccccactt

SEQ ID NO: 782747 - DNA, 120 bp, Artificial Sequence
  ENSG00000254999_6 (sequence is synthesized)
ggcttgaagggacattttcagacttttctttctgtcacttggagtgtctatgcctctcatatttccctaataaactcctcaactttttatctgactgctgtgattatggtggggagagga

SEQ ID NO: 782748 - DNA, 120 bp, Artificial Sequence
  ENSG00000254999_7 (sequence is synthesized)
gctagagatgggttcacttattgcacagaaatgtaatacatggcgttattattctaacataaaactttcagatgtagctgtttgattcaaagcctaggtggcttaccagcccaagtcccc

SEQ ID NO: 782749 - DNA, 120 bp, Artificial Sequence
  ENSG00000254999_8 (sequence is synthesized)
atgtttggactttcagctgactagctcatcttgggaatcatttggtcattcagcacatttaccaagtatttactatgtaggcatgttaaactccaataaaacatacagcattgaatcaga

SEQ ID NO: 782750 - DNA, 120 bp, Artificial Sequence
  ENSG00000255009_0 (sequence is synthesized)
atggctttgcctagaagccaaggccattggtccaacaaagacatcttgaggttactggaatgcatggagaataatcgcccatctgatgacaacagcacgtttagctcaactcagtcacac

SEQ ID NO: 782751 - DNA, 120 bp, Artificial Sequence
  ENSG00000255009_1 (sequence is synthesized)
atggactggggaaaagtagcttttaaaaacttttctggtgaaatgtgcagactcaaatggttagagatttcttgcaacttgagaaaattcggcactttgaaagaattagtcctggaagct

SEQ ID NO: 782752 - DNA, 120 bp, Artificial Sequence
  ENSG00000255009_2 (sequence is synthesized)
aagaaatgtgttaaaaagatgaacaaaagccaaaaatacaggaacggtccagactttccaaagaggccccttactgcttacaatcgcttcttcaaggagagttggccccagtactcccaa

SEQ ID NO: 782753 - DNA, 120 bp, Artificial Sequence
  ENSG00000255009_3 (sequence is synthesized)
atgtaccctgggatgagaagccaggaactgaccaaaatcctgtcaaagaaatacagggaactcccagagcagatgaaacagaaatatattcaggatttccggaaggaaaagcaagaattt

SEQ ID NO: 782754 - DNA, 120 bp, Artificial Sequence
  ENSG00000255009_4 (sequence is synthesized)
tttcagaaaaatattgaagaagtgaggtctcttccaaaaacggatcgatttttcaagaaggtaaaatttcatggagagcctcagaaaccccccatgaatggataccacaagtttcaccaa

SEQ ID NO: 782755 - DNA, 120 bp, Artificial Sequence
  ENSG00000255009_5 (sequence is synthesized)
gattcctggtcaagtaaagagatgcaacatttgtcagtgagggagcgcatggtagagattggcagacgctggcagcgcatcccgcagagccagaaggatcattttaagagccaggctgag

SEQ ID NO: 782756 - DNA, 120 bp, Artificial Sequence
  ENSG00000255009_6 (sequence is synthesized)
gagctgcagaagcaatacaaggtgaaattggatctctggctcaagactttgtcacctgaaaattatgctgcatacaaagaatcgacctatgctaagggtaagaatatggccatgacagga

SEQ ID NO: 782757 - DNA, 120 bp, Artificial Sequence
  ENSG00000255009_7 (sequence is synthesized)
ggcccggaccccaggttgaaacaagcagatccacagtcctcatcagcaaagggtctgcaagaagggtttggggaggggcaagggctccaggctgcaggaacagattcatcacagactatt

SEQ ID NO: 782758 - DNA, 120 bp, Artificial Sequence
  ENSG00000255009_8 (sequence is synthesized)
tgggtaaactgtcatgtctccatggaaccagaagagaacaggaagaaagatagagaaaaggaagaaagcagtaactcttcagactgcagcagtggagaagaaatagaagttgatgtctga

SEQ ID NO: 782759 - DNA, 120 bp, Artificial Sequence
  ENSG00000255012_0 (sequence is synthesized)
atgttctccccaaaccacaccatagtgacagaattcattctcttgggactgacagacgacccagtgctagagaagatcctgtttggggtattccttgcgatctacctaatcacactggca

SEQ ID NO: 782760 - DNA, 120 bp, Artificial Sequence
  ENSG00000255012_1 (sequence is synthesized)
ggcaacctgtgcatgatcctgctgatcaggaccaattcccacctgcaaacacccatgtatttcttccttggccacctctcctttgtagacatttgctattcttccaatgttactccaaat

SEQ ID NO: 782761 - DNA, 120 bp, Artificial Sequence
  ENSG00000255012_2 (sequence is synthesized)
atgctgcacaatttcctctcagaacagaagaccatctcctacgctggatgcttcacacagtgtcttctcttcatcgccctggtgatcactgagttttacatccttgcttcaatggcattg

SEQ ID NO: 782762 - DNA, 120 bp, Artificial Sequence
  ENSG00000255012_3 (sequence is synthesized)
ttctctcagtcactgctaacctttcacttatccttctgtggctcccttgaaatcaatcatttctactgcgctgatcctcctcttatcatgctggcctgctctgacacccgtgtcaaaaag

SEQ ID NO: 782763 - DNA, 120 bp, Artificial Sequence
  ENSG00000255012_4 (sequence is synthesized)
atggcaatgtttgtagttgcaggctttaatctctcaagctctctcttcatcattcttctgtcctatcttttcatttttgcagcgatcttcaggatccgttctgctgaaggcaggcacaaa

SEQ ID NO: 782764 - DNA, 120 bp, Artificial Sequence
  ENSG00000255012_5 (sequence is synthesized)
gccttttctacgtgtgcttcccacctgacaatagtcactttgttttatggaaccctcttctgcatgtacgtaaggcctccatcagagaagtctgtagaggagtccaaaataactgcagtc

SEQ ID NO: 782765 - DNA, 120 bp, Artificial Sequence
  ENSG00000255012_6 (sequence is synthesized)
ttttatacttttttgagcccaatgctgaacccattgatctatagcctacggaacacagatgtaatccttgccatgcaacaaatgattaggggaaaatcctttcataaaattgcagtttag

SEQ ID NO: 782766 - DNA, 120 bp, Artificial Sequence
  ENSG00000255012_7 (sequence is synthesized)
gactgtcagtaaccactttactttcttatccaaatgaaaaccttgaagattgatttcttagaaataaaagccttaatgttgagaaatttaaaatgttttatttgtcagaaattctatgaa

SEQ ID NO: 782767 - DNA, 120 bp, Artificial Sequence
  ENSG00000255012_8 (sequence is synthesized)
aataaattttttagtatctaataattctatatgaaaatactatgtttacttacttggggggtgggtaaatttttaactaacttaggctgagagaaattctgaaaattcatctcctttgaa

SEQ ID NO: 782768 - DNA, 120 bp, Artificial Sequence
  ENSG00000255012_9 (sequence is synthesized)
tatgatggtccacagagccataatgaggttcaagatagggtggataattttacactttttaaaaaatgaaattatttctacttcaatatggtgtcttgaacaatagctcagctacctttg

SEQ ID NO: 782769 - DNA, 120 bp, Artificial Sequence
  ENSG00000255012_10 (sequence is synthesized)
tgcttattgtaatcaatgtgcaaaaaatataaatatatgggtcactgatacgttaaatttgctgtaagtgttccccaaacccatcttgtaaatatcttgagaagcttcttttttgttcat

SEQ ID NO: 782770 - DNA, 120 bp, Artificial Sequence
  ENSG00000255012_11 (sequence is synthesized)
atgataatactggttatcgtccttgattctgaaaatcaactctcaacacctttttatgagtttccaagtgtatggatccaattctatcatcaaactactttaactgcattccagttatgt

SEQ ID NO: 782771 - DNA, 120 bp, Artificial Sequence
  ENSG00000255012_12 (sequence is synthesized)
tttccagtgccgtacctctgacttaggactaattcagtaggagtcaatagggtctattaactgccctgtgcatacccacaaatgtcttgaaacagtatacaaataaataggggtgtatat

SEQ ID NO: 782772 - DNA, 120 bp, Artificial Sequence
  ENSG00000255012_13 (sequence is synthesized)
atgtttctggaggaaatactcagtgtttattttgcttcatgaagctttctgtggcccattatttttaaaataagggtgttctagtagttcttgaagctgctatagagaaaatcaatctca

SEQ ID NO: 782773 - DNA, 120 bp, Artificial Sequence
  ENSG00000255012_14 (sequence is synthesized)
gagaggctacctaaggagacacattaatccatgcattattagtcaaccagatgactgcatattgatacatatgtatttagccctaataaattgcctcatatgtttggcattttaatattt

SEQ ID NO: 782774 - DNA, 120 bp, Artificial Sequence
  ENSG00000255012_15 (sequence is synthesized)
aatattaagcagatgacttgcagtttttgtaaaatgggggcatattcttgagtctcatttgattaagtctgtttctagccaaatcctctttcagaaacagtatctgaaaaagaaggaagg

SEQ ID NO: 782775 - DNA, 120 bp, Artificial Sequence
  ENSG00000255012_16 (sequence is synthesized)
caaatttcggtgacaagaatttaacaattacattttagcactgtttgtttttgtatttgcttggttttggcaatgatggtgggacaacagaggaaggtcatctgcagagacaacaatgaa

SEQ ID NO: 782776 - DNA, 120 bp, Artificial Sequence
  ENSG00000255012_17 (sequence is synthesized)
gcagaaaagctgggaattgagtgacacagagtcctcacttcctttttgagggccagcatcatttcatcggtggggtatttctttattttatgagaaatttccatctattaggcaaagcat

SEQ ID NO: 782777 - DNA, 120 bp, Artificial Sequence
  ENSG00000255012_18 (sequence is synthesized)
tgtattccatttctggcaagcagaatggtctcatatccagatttgaaaccctatttgaaaattggattttagaatgagtgcaaaaaatactctatatttggcctaaataactgtacgatt

SEQ ID NO: 782778 - DNA, 120 bp, Artificial Sequence
  ENSG00000255012_19 (sequence is synthesized)
ccatttattttctagttatgagaattgctctggcttgcagcaaccatttttaaactttgacatccttttagtcaaaatgactgacctgtttctaattgatttttaataaaatattttatt

SEQ ID NO: 782779 - DNA, 120 bp, Artificial Sequence
  ENSG00000255012_20 (sequence is synthesized)
tatttctatttgtgatttaattttttccttctgcatgtctttgggtaaaagtcacctcagaaattctttggagataggatagaacataaatcgacatgaataaaagtaattataagagtt

SEQ ID NO: 782780 - DNA, 120 bp, Artificial Sequence
  ENSG00000255012_21 (sequence is synthesized)
gcagtcacagtgtagtgctgattttaggaacactttattttaatcttcataaatgaaataatgagagaattattatctccatttacaacattggagcctgaggcacggagagattaaatt

SEQ ID NO: 782781 - DNA, 120 bp, Artificial Sequence
  ENSG00000255012_22 (sequence is synthesized)
tcttgcccaaagtcatttggccactcagtaggacaaaagcaggtttcttggtttcaaattctctctctttctaattcatactgtagttgttattaaagaaattctcaaaacactgcaaat

SEQ ID NO: 782782 - DNA, 120 bp, Artificial Sequence
  ENSG00000255012_23 (sequence is synthesized)
gcttggtggaatgttggagattatgaattgatgagattattgctatagatgaaatagtggttattatgtgatagttatatgtatcctaagaatagctaatgagaatttcccttgaaaatt

SEQ ID NO: 782783 - DNA, 120 bp, Artificial Sequence
  ENSG00000255012_24 (sequence is synthesized)
ccggttaacataatttataggcattataattaaaattgtcttaacgtccatgtgaagggagaaaattttgatatacagaagacatatatgctatttaggctgcattttattaatatattt

SEQ ID NO: 782784 - DNA, 120 bp, Artificial Sequence
  ENSG00000255012_25 (sequence is synthesized)
tcccagtcgcaaaggcatacatattcatattaattaattaccaggtacagacaaatatgagggagtaaaatttatgagggatctgtcctgtgacaaaggatacattttctttatattttg

SEQ ID NO: 782785 - DNA, 120 bp, Artificial Sequence
  ENSG00000255012_26 (sequence is synthesized)
ttacatttcttctcaataagtttatatgcgtacatgttactaaaatgcatcaagcaaatgtgaaatcacttatcatatacaaatttgaacactgattttcacttgatataatgtatgcac

SEQ ID NO: 782786 - DNA, 120 bp, Artificial Sequence
  ENSG00000255012_27 (sequence is synthesized)
gcacctttatatagattaaatatttctgatgaacatcatgttgaatgtcatataatagttagatcatatgaccttaatacaataataatacatatcaattgtagaaaactgactgaacca

SEQ ID NO: 782787 - DNA, 120 bp, Artificial Sequence
  ENSG00000255012_28 (sequence is synthesized)
gacatacataagacatagaagcaacatttacttataatcacctacctgaagagagctgaactcagcattcacttgtgttttattccatttgattatcttgcaaaccatgattccatcata

SEQ ID NO: 782788 - DNA, 120 bp, Artificial Sequence
  ENSG00000255012_29 (sequence is synthesized)
tcaatgtatcttagtgtttttatgactgatgtatctgtgcatctctaattgttccttttgtgtatgttcccagaagtggaactgctgaattaaatgttttcaatgcttttgaaactcctg

SEQ ID NO: 782789 - DNA, 120 bp, Artificial Sequence
  ENSG00000255012_30 (sequence is synthesized)
ctaaatttttctatgggtaaatttttctccagaaagcttctagcaacttaaacctgtactagtaatatttgagaataatcatttcactataactctatcagtagtaggagctcttgttta

SEQ ID NO: 782790 - DNA, 120 bp, Artificial Sequence
  ENSG00000255012_31 (sequence is synthesized)
tggttatttgcttctttgatgtctcaagggaagtcttagaaaataattctgttctaataagcacagaataaaaattgaagcatatattgaacaaatgaaggctacacataaggttgataa

SEQ ID NO: 782791 - DNA, 120 bp, Artificial Sequence
  ENSG00000255012_32 (sequence is synthesized)
tttctcttcatgctattgctgataatttcttgcatgaataatgtttgtatttctatttggaaaaatgtgaccttttgcttattgctgttatgtaagttttcctcatcctaaaattgaaaa

SEQ ID NO: 782792 - DNA, 120 bp, Artificial Sequence
  ENSG00000255072_0 (sequence is synthesized)
gctgcactagcacagccagcctttgcttttacagcctgctcttgcctattaccataccagtgtatgtattcttccacctttggacttggatgggtattaaactcttcaggcataattgat

SEQ ID NO: 782793 - DNA, 120 bp, Artificial Sequence
  ENSG00000255112_0 (sequence is synthesized)
caaaacaaaggagcggcggccgggagcggacttaccttaccttctctgccttcggcgcgcttctcagccgggccgccgacccaaaggagccgtccgactatgtctaacatggagaaacac

SEQ ID NO: 782794 - DNA, 120 bp, Artificial Sequence
  ENSG00000255112_1 (sequence is synthesized)
ctgttcaacctgaagttcgcggccaaagaactgagtaggagtgccaaaaaatgcgataaggaggaaaaggccgaaaaggccaaaattaaaaaggccattcagaagggcaacatggaagtt

SEQ ID NO: 782795 - DNA, 120 bp, Artificial Sequence
  ENSG00000255112_2 (sequence is synthesized)
gcgaggatacacgccgaaaatgccatccgccagaagaaccaggcggtgaatttcttgagaatgagtgcgcgagtcgatgcagtggctgccagggtccagacggcggtgacgatgggcaag

SEQ ID NO: 782796 - DNA, 120 bp, Artificial Sequence
  ENSG00000255112_3 (sequence is synthesized)
gtgaccaagtcgatggctggtgtggttaagtcgatggatgcgacattgaagaccatgaatctggagaagatttctgctttgatggacaaattcgagcaccagtttgagactctggacgtc

SEQ ID NO: 782797 - DNA, 120 bp, Artificial Sequence
  ENSG00000255112_4 (sequence is synthesized)
cagacgcagcaaatggaagacacgatgagcagcacgacgacgctcaccactccccagaaccaagtggatatgctgctccaggaaatggcagatgaggcgggcctcgacctcaacatggag

SEQ ID NO: 782798 - DNA, 120 bp, Artificial Sequence
  ENSG00000255112_5 (sequence is synthesized)
ctgccgcagggccagaccggctccgtgggcacgagcgtggcttcggcggagcaggatgaactgtctcagagactggcccgccttcgggatcaagtgtgacggcagaacccgctctgaggt

SEQ ID NO: 782799 - DNA, 120 bp, Artificial Sequence
  ENSG00000255112_6 (sequence is synthesized)
ttcctggccatagccaccctttgaaatgctctctgtgtgttagagagatactataccctagaaactctgaacacgccagaatgctgaaatgcccttctacctttgggtttacagccccct

SEQ ID NO: 782800 - DNA, 120 bp, Artificial Sequence
  ENSG00000255112_7 (sequence is synthesized)
ccacataaattaagaaattcagtatttctgcactcttagctggattctaaagttctgtatagctcgtaatgatggtatttttatagcagccttttaacagaactagttaatttcgtgtat

SEQ ID NO: 782801 - DNA, 120 bp, Artificial Sequence
  ENSG00000255112_8 (sequence is synthesized)
atgaatctttctcgaagatctggtcaaaactgtattcagtttcctgcccagaatgatcagattgaaggtggttggtttttattattatttagtgtgattgatagtatctagaatggcagg

SEQ ID NO: 782802 - DNA, 120 bp, Artificial Sequence
  ENSG00000255112_9 (sequence is synthesized)
tggtgcataaaagttaaagagaggggaaagattacttagtttggttatacagttataaacaccatgcagtgtattcggtggactgtgctatttctgtttatcctttgggttttggttttt

SEQ ID NO: 782803 - DNA, 120 bp, Artificial Sequence
  ENSG00000255112_10 (sequence is synthesized)
gttttttttttttttgccttcacagtgagactgcaaatgattgttctcataacgtatattattaataaatgtggtcctataatttatactgaaattaccttaggatatttttgcataata

SEQ ID NO: 782804 - DNA, 120 bp, Artificial Sequence
  ENSG00000255112_11 (sequence is synthesized)
ctctcttactgcttacattctataaatttttcacgtgataattgtctttgcgtaactgggaaaaatgccgaataacttcctttattatctggaaaaattaaatttgttcatttatatttt

SEQ ID NO: 782805 - DNA, 120 bp, Artificial Sequence
  ENSG00000255112_12 (sequence is synthesized)
agtgtgacatttgacagtgtctttcaaacgaacttctctaacaagtttatagttattttcctgtttcaacactattagaagtcttataaattatgctaattagcatggcagtcatgttac

SEQ ID NO: 782806 - DNA, 120 bp, Artificial Sequence
  ENSG00000255112_13 (sequence is synthesized)
acactcttaacattgccaaagaactgttgatttcgtttgagaaaaccctaggactgtgtgtgtgtaggttttgttttgattttaacaaccaaaaatagaaataaaattagaactgcgttt

SEQ ID NO: 782807 - DNA, 120 bp, Artificial Sequence
  ENSG00000255112_14 (sequence is synthesized)
taagttctaatttgcatttattaatttgtccaaaagcaagaactcttggaaatccttgaaaatataagctggaatgttttacttagccatgcaagtcatttatgtatacatccagccagc

SEQ ID NO: 782808 - DNA, 120 bp, Artificial Sequence
  ENSG00000255112_15 (sequence is synthesized)
tggaaatctgagaagtaaagaggtaggactggaaggaaggagaaagcttgagtctttaaggctagagcccagctgtgctgcctgccatcttctcaggaatggcagtgcgtattttctggc

SEQ ID NO: 782809 - DNA, 120 bp, Artificial Sequence
  ENSG00000255112_16 (sequence is synthesized)
tgaaaagtaaagcatgtatccaccgctttctcatagcctcgaaacatggagaaaagcaacttgcttttgccttggcaagcatgctaacctaagttaattcaagttttttttaacttaccc

SEQ ID NO: 782810 - DNA, 120 bp, Artificial Sequence
  ENSG00000255112_17 (sequence is synthesized)
tttccttcactggaagatttttccataagagaattccattgtttcagaaaataattataggggcccttccaagttctttgaaagattcataaccaactattcactattataacatgtttc

SEQ ID NO: 782811 - DNA, 120 bp, Artificial Sequence
  ENSG00000255112_18 (sequence is synthesized)
ccagtgtaaatgagtaaggaaaaaaaaagtgtaacaggtgcgtgcagatgaggagtgaccctcatatttaagttattttatatttgactggacattgttcagaagtgtgctttaagggac

SEQ ID NO: 782812 - DNA, 120 bp, Artificial Sequence
  ENSG00000255112_19 (sequence is synthesized)
acttgttagttgtctgcccagcatctctcaagaatatccctcctgtcctccacatggttgtgcagggccatgtgtgaagacagcatgagtcttaacccctcttttattttatttttgaga

SEQ ID NO: 782813 - DNA, 120 bp, Artificial Sequence
  ENSG00000255112_20 (sequence is synthesized)
aggcatgagccactgcacctggccttaacccctctttagattggaaaaaataattacaactttaaaaatagcttagtgttgaaccctttggtaaactaaagacccttttataatgcacat

SEQ ID NO: 782814 - DNA, 120 bp, Artificial Sequence
  ENSG00000255112_21 (sequence is synthesized)
cttttataatgcacatattcccaacaaaattaatatattttgtgagattaaacaatgcttgtatatgcttgaactttcttaaaatatgtccatgtcatactattatgaatgtacattttt

SEQ ID NO: 782815 - DNA, 120 bp, Artificial Sequence
  ENSG00000255112_22 (sequence is synthesized)
atgagtcataaatattattttcaaaagcactacaggcccatgaattacttcctcacttttgcagttgattactgaaatgtaaatcacaagaatttgtcaattaaatcattttaaactgca

SEQ ID NO: 782816 - DNA, 120 bp, Artificial Sequence
  ENSG00000255150_0 (sequence is synthesized)
atgggcgggcgtcctcggctctaactgccgccactttccacacgctgggagggccgttacctcagagatacccgtggccggcatgttggttgaaaaagcttcccggaagggagacgaaga

SEQ ID NO: 782817 - DNA, 120 bp, Artificial Sequence
  ENSG00000255150_1 (sequence is synthesized)
gaaaggagaggagcagctcgtgatcatccccggtagcgagtacgcggcgaagtaggcggcggcggagggagcgctgatgaagatggatgtgtcagtgagggccgcgggctgctccgacga

SEQ ID NO: 782818 - DNA, 120 bp, Artificial Sequence
  ENSG00000255150_2 (sequence is synthesized)
cctcagctctggggaggccgacgtagacccaaagctcctggagctcaccgctgacgaggagaagtgccgcagcatccgcaggcagtaccggcagctcatgtactgcgtgcggcagaaccg

SEQ ID NO: 782819 - DNA, 120 bp, Artificial Sequence
  ENSG00000255150_3 (sequence is synthesized)
ggaggacatcgtgagctcggcgaacaactccttaaccgaggctctggaggaagccaacgtcctctttgatggcgtgagccgaaccagagaagcagccctcgacgcccggtttcttgttat

SEQ ID NO: 782820 - DNA, 120 bp, Artificial Sequence
  ENSG00000255150_4 (sequence is synthesized)
ggcttctgatttgggtaaagaaaaggcaaagcagttaaactcagatatgaacttctttaatcagttagcattttgtgactttctgtttctgttcgtgggtctgaattggatggaaggcga

SEQ ID NO: 782821 - DNA, 120 bp, Artificial Sequence
  ENSG00000255150_5 (sequence is synthesized)
tcctgacaagttgagtgattgtgatgatagcatagctctttccttctggaaggcaatagaaaaggaagcaacatcctggatggtaaaagctgagacattccattttgtttttggttcatt

SEQ ID NO: 782822 - DNA, 120 bp, Artificial Sequence
  ENSG00000255150_6 (sequence is synthesized)
ccgacttgaacaccagaaaaaagttcgcaagatggaagaaaatggcaacatgcctacaaagttgcagaagttggacctgagtagttatccagaagcgacagaaaaaaacgtagaaaggat

SEQ ID NO: 782823 - DNA, 120 bp, Artificial Sequence
  ENSG00000255150_7 (sequence is synthesized)
tttgggattgttgcaaacctactttcgaaagtatcctgatactcctgtgtcctattttgagtttgtgattgatccaaactctttttctcgtactgtggagaatatattttatgtttcttt

SEQ ID NO: 782824 - DNA, 120 bp, Artificial Sequence
  ENSG00000255150_8 (sequence is synthesized)
tattgtaagagatggttttgcaagaataaggcttgatgaagacaggctgccaatattagagccgatgaatgttaaccaaatgggtgagggaaatgattccagttgccatggcaggaaaca

SEQ ID NO: 782825 - DNA, 120 bp, Artificial Sequence
  ENSG00000255150_9 (sequence is synthesized)
gggagttatatctttgactttacaggagtggaaaaacattgtggcagcttttgaaatttctgaggctatgattacatactcctcatactaaagatttcttagtatagcatcctttttgtg

SEQ ID NO: 782826 - DNA, 120 bp, Artificial Sequence
  ENSG00000255150_10 (sequence is synthesized)
ttttttttctgaagttagatggagagtaaaatgtaaactgaagcacatattgtatctcttgtaaagtgaaaaagtattttcaagaacatcagacattgttttactgtgcagcatattttt

SEQ ID NO: 782827 - DNA, 120 bp, Artificial Sequence
  ENSG00000255150_11 (sequence is synthesized)
cttagtaatttataaggtcatgatcttctgttattaaaacaaattcactggcatatttatgggaacgttttattgaatgccctttaagactattaataaaaacaagttttggataccaaa

SEQ ID NO: 782828 - DNA, 120 bp, Artificial Sequence
  ENSG00000255151_0 (sequence is synthesized)
atgattctattgaataattccgagcggctgctggccctattcaaatctttagcaaggagcattcctgagtccctgaaggtgtatggctctctgtttcacatcaatcacgggaaccccttc

SEQ ID NO: 782829 - DNA, 120 bp, Artificial Sequence
  ENSG00000255151_1 (sequence is synthesized)
aacatggaagtgttggtggactcctggcccgagtatcagatggttattatccgacctcaaaaacaggagatgactgatgacatggattcatacactaatgtatatcgtgtattctccaaa

SEQ ID NO: 782830 - DNA, 120 bp, Artificial Sequence
  ENSG00000255151_2 (sequence is synthesized)
gaccctcaaaaatcacaagaagttttgaaaaattctgagatcataaactggaaacagaaactccaaatccaaggttttcaagaaagtttaggtgaggggataagagcagctgcattttca

SEQ ID NO: 782831 - DNA, 120 bp, Artificial Sequence
  ENSG00000255151_3 (sequence is synthesized)
accaataaaagcaagcttggaagctgggctgagacaggccacccagatgacgaattggagagcgagactccgaactttaagtatgcccagctgaatgtgtcttattctgggctggtaaat

SEQ ID NO: 782832 - DNA, 120 bp, Artificial Sequence
  ENSG00000255151_4 (sequence is synthesized)
gacaactggaagctagggatgaataagaggagcctgcgttacatcaagcgctgcctaggagccctgccagcagcctgtatgctgggcccagagggggtcccggtctcatgggtaaccatg

SEQ ID NO: 782833 - DNA, 120 bp, Artificial Sequence
  ENSG00000255151_5 (sequence is synthesized)
gacccttcttgtgaaataggaatgggctacagtgtggaaaaataccgaaggagaggcaatgggacacggctgatcatgcgatgcatgaagtatctgtgtcagaagaatattccattttac

SEQ ID NO: 782834 - DNA, 120 bp, Artificial Sequence
  ENSG00000255151_6 (sequence is synthesized)
ggctctgtgctggaagaaaatcaaggcgtcatcagaaagactagtgcactaggtttccttgaggcctcctgtcagtggcaccaatggaactgctacccacagaatcttgttccattgtag

SEQ ID NO: 782835 - DNA, 120 bp, Artificial Sequence
  ENSG00000255154_0 (sequence is synthesized)
gtcctctccgaccccgggcgctgagggcctctgtacggcgccgcgtagggtctcggccgcagaacgtggccgagaggcccgggcgagacttcgggaccgtgtcctgagcgctctccatgc

SEQ ID NO: 782836 - DNA, 120 bp, Artificial Sequence
  ENSG00000255154_1 (sequence is synthesized)
gcccggcgcgagagaatttcaagattgtggagttggactgaatgctgcacagttcaaacagctgcttatttcggctgtgaaggacctgtttggggaggttgatgccgccttacctttgga

SEQ ID NO: 782837 - DNA, 120 bp, Artificial Sequence
  ENSG00000255154_2 (sequence is synthesized)
catcctaacctatgaagagaagaccttgtcagccatcttgagaatatgtagcagtggtcttgtcaaattgtggagctctttgaccctgttaggatcctataaaggcaaaaaatgtgcttt

SEQ ID NO: 782838 - DNA, 120 bp, Artificial Sequence
  ENSG00000255154_3 (sequence is synthesized)
ccgggtgattcaggtttctccatttcttcttgcattatctggtaatagtagggaactagtattggattgaatgaatagtcttccattttggaaacgttcatccactctcatatttatttt

SEQ ID NO: 782839 - DNA, 120 bp, Artificial Sequence
  ENSG00000255154_4 (sequence is synthesized)
ttggtgcctgcatgtttgaagactgaagcaggctaaaagctcttgatgaaatttgagggtgctgaagatgttcccactaatttccagccatcacctttggtggggtgggcttcggaggac

SEQ ID NO: 782840 - DNA, 120 bp, Artificial Sequence
  ENSG00000255154_5 (sequence is synthesized)
agtctgtctgaacctgccagtgctgaccctgcagcactttcagcatatgcacatcaaagttggagaccgcgctgaacttaggagggccttcacacagactgatgtggctaccttctcaga

SEQ ID NO: 782841 - DNA, 120 bp, Artificial Sequence
  ENSG00000255154_6 (sequence is synthesized)
caattgtacatggagttttgatcaacggacttatctcagctctcctaggaactaaaatgccagggccaggctgtgtatttctttcccaggaaattagctttccagcccctttatatattg

SEQ ID NO: 782842 - DNA, 120 bp, Artificial Sequence
  ENSG00000255154_7 (sequence is synthesized)
gagaagttgttttagcttctgcagaagtgaaaaagctgaagcggttcattgctattattgcagtgtcatgttctgtaatagaaagtaaaaagactgttatggaaggctgggttaaagtta

SEQ ID NO: 782843 - DNA, 120 bp, Artificial Sequence
  ENSG00000255154_8 (sequence is synthesized)
tggttccagaagcttccaaatcctgaaatagatgttttaaagatgcaacctcaaacaccaatgctgttgttaaagagcctatggggaattgctgctctttaccaaagaatggttgatagg

SEQ ID NO: 782844 - DNA, 120 bp, Artificial Sequence
  ENSG00000255154_9 (sequence is synthesized)
cccagaagcccatcttagttaggggaagggagcaggaagagggttgttcaaatgcccactttccagtttggccttatgcttcatgcagacttgagtgtatgcaggatttcattatctgcc

SEQ ID NO: 782845 - DNA, 81 bp, Artificial Sequence
  ENSG00000255154_10 (sequence is synthesized)
tcatgcagacttgagtgtatgcaggatttcattatctgcctgggttttttgtttgttttttgttttttaattcaagaagta

SEQ ID NO: 782846 - DNA, 120 bp, Artificial Sequence
  ENSG00000255154_11 (sequence is synthesized)
gggcgggacgaggagaagccaaacgtaaagacaccaggagtttctcgggcccagctgtggctgctgccggggagccccaagccttggcgggtccttgcggcgaataggagtctggtcagg

SEQ ID NO: 782847 - DNA, 120 bp, Artificial Sequence
  ENSG00000255154_12 (sequence is synthesized)
cttgcggcgaataggagtctggtcaggcgtcaggctagtccgacgaagagtgggtaggtggaagccttccaaagagcggcggttgtctgggagccgtctcagttggccgcgacccgggcg

SEQ ID NO: 782848 - DNA, 120 bp, Artificial Sequence
  ENSG00000255154_13 (sequence is synthesized)
tggtgaatatatttaataccagtctgtacaaaataatttcccaggtatcctctcctttaatgtcagaacagcctgcagagggcagtgctgtcatttgtaagtctttttttttttttttaa

SEQ ID NO: 782849 - DNA, 120 bp, Artificial Sequence
  ENSG00000255181_0 (sequence is synthesized)
atggcgcccaagaaaaagcgcgggccgagcgcagggagccagccaggtggtgcggcggccgcgggtgccgagcagccgctatcggagcgcgcgcagtacctgcaacgcgaacacgcgctg

SEQ ID NO: 782850 - DNA, 120 bp, Artificial Sequence
  ENSG00000255181_1 (sequence is synthesized)
ctctcggagcagctggacacctgcgaggagagcgttgaccaggtgctgcgagagaacgccttcctggaccgcgaggcgctgcgcctgcgcgaggagaaccggctctacgccagctacgtg

SEQ ID NO: 782851 - DNA, 120 bp, Artificial Sequence
  ENSG00000255181_2 (sequence is synthesized)
agcgcgcgcgcccagcgctgcgccaaagccatcgtccggctggacgagcagaaccgcgtggacctagcgcagatccactggcagcgggcggaactggcctcgctctaccacgggcgcgag

SEQ ID NO: 782852 - DNA, 120 bp, Artificial Sequence
  ENSG00000255181_3 (sequence is synthesized)
gacggggtgcgcgcgcagctgttggagatggaggcgcgcgcggcacagatggcacagcaggtgcaagagctgcagccctacaaggtgctgcagctggagcagctggcccggatccgggcg

SEQ ID NO: 782853 - DNA, 120 bp, Artificial Sequence
  ENSG00000255181_4 (sequence is synthesized)
ctggagcgcgagctgctgcatatgcgcgtggagcacacgcagctgctccaccgcgtgaagcggcgcttcctggaggacaaggcggccttcgagcgcgaggcgcgtcagcgcgtgcagtca

SEQ ID NO: 782854 - DNA, 120 bp, Artificial Sequence
  ENSG00000255181_5 (sequence is synthesized)
ctggcgcggcgcgcggagcgggaggcggtgcgcgcgcttgtggcgcacacgcaggccatcaaagcggacaacggacgcctgcggcaggagctgctgctgctgctccgccggacccagctg

SEQ ID NO: 782855 - DNA, 120 bp, Artificial Sequence
  ENSG00000255181_6 (sequence is synthesized)
ctgcaccacacgcggcgccagctgctggaacagcgcgagcaactgcaccgcgagcacgaggacacgcgggacctggcgcgtgtgcacggctggctgcgcaggggccccggaggcccgccg

SEQ ID NO: 782856 - DNA, 120 bp, Artificial Sequence
  ENSG00000255181_7 (sequence is synthesized)
ctctgggagcggccggccttctcccagcccacctcgcgccccgggtcattagccgcccccataagcccgtcgcgcgcggcctcccagaccccgtctgtggtaccgtcgcgcgcggccccc

SEQ ID NO: 782857 - DNA, 120 bp, Artificial Sequence
  ENSG00000255181_8 (sequence is synthesized)
cgggcctcgtccgtggtcccgtcgcgcgaggcttcccgggtcccctcgttggtgctatcgagcatggactccagggtcccatcgctggccacttcaaaggtgggatcccggatgccatcc

SEQ ID NO: 782858 - DNA, 120 bp, Artificial Sequence
  ENSG00000255181_9 (sequence is synthesized)
ctgaccgcttcgcgcgcaggctcccgggccctgtcgctggtgcagtcactcgagggctctgggatctcttcggggtcctcaccgagggtgtcctcacaggacactctccgctccacgaag

SEQ ID NO: 782859 - DNA, 120 bp, Artificial Sequence
  ENSG00000255181_10 (sequence is synthesized)
tctggccccaagcttctctctggcctgtcccgggatcgggatccggctcttctccccccacagtcggaggacagcgtgaacgctgaagctgcggcagaagcctccccgggtagagcctga

SEQ ID NO: 782860 - DNA, 120 bp, Artificial Sequence
  ENSG00000255192_0 (sequence is synthesized)
atgagtgtggatccagcttgtccccaaagcttgccttgctttgaagaatccgactgtaaagaatcttcacctatgcctgtgatttgtgggcctgaagaaaactatccatccttgcaaatg

SEQ ID NO: 782861 - DNA, 120 bp, Artificial Sequence
  ENSG00000255192_1 (sequence is synthesized)
tcttctgctgagatgcctcacacagagactgtctctcctcttccttcctccatggatctgcttattcaggacagccctgattcttccaccagtcccaaaggcaaacaacccacttctgca

SEQ ID NO: 782862 - DNA, 120 bp, Artificial Sequence
  ENSG00000255192_2 (sequence is synthesized)
gagaatagtgtcgcaaaaaaggaagacaaggtcccggtcaagaaacagaagaccagaactgtgttctcttccacccagctgtgtgtactcaatgatagatttcagagacagaaatacctc

SEQ ID NO: 782863 - DNA, 120 bp, Artificial Sequence
  ENSG00000255192_3 (sequence is synthesized)
agaatgaaatctaagaggtggcagaaaaacaactggccgaagaatagcaatggtgtgacgcagaaggcctcagcacctacctaccccagcctctactcttcctaccaccagggatgcctg

SEQ ID NO: 782864 - DNA, 120 bp, Artificial Sequence
  ENSG00000255192_4 (sequence is synthesized)
gtgaacccgactgggaaccttccaatgtggagcaaccagacctggaacaattcaacctggagcaaccagacccagaacatccagtcctggagcaaccactcctggaacactcagacctgg

SEQ ID NO: 782865 - DNA, 120 bp, Artificial Sequence
  ENSG00000255192_5 (sequence is synthesized)
tgcacccaatcctggaacaatcaggcctggaacagtcccttctataactgtggagaggaatctctgcagtcctgcatgcacttccagccaaattctcctgccagtgacttggaggctgcc

SEQ ID NO: 782866 - DNA, 120 bp, Artificial Sequence
  ENSG00000255192_6 (sequence is synthesized)
ttggaagctgctggggaaggccttaatgtaatacagcagaccactaggtattttagtactccacaaaccatggatttattcctaaactactccatgaacatgcaacctgaagacgtgtga

SEQ ID NO: 782867 - DNA, 120 bp, Artificial Sequence
  ENSG00000255221_0 (sequence is synthesized)
gggaggagagaaaagccatggccgacaaggtcctgaaggagaagagaaagcagtttatccgttcagtgggcgaaggtacaataaatggcttactgggtgaattattggagacaagggtgc

SEQ ID NO: 782868 - DNA, 120 bp, Artificial Sequence
  ENSG00000255221_1 (sequence is synthesized)
aatttgcatcacatacatttgtgaagaagacagtcacctggcagggacgctgggactctcagcaggtccaacatctggaaatcaccttactacacaagattctcaaatagtacttccttc

SEQ ID NO: 782869 - DNA, 120 bp, Artificial Sequence
  ENSG00000255221_2 (sequence is synthesized)
ctaggttcaactttcatttgagcagccagatgataaagcacagatgcccagcactgaaagagttacttcgacaagacgtttctatctcttcccagtacattaaaataaggaagctgtatg

SEQ ID NO: 782870 - DNA, 120 bp, Artificial Sequence
  ENSG00000255221_3 (sequence is synthesized)
acagccctgctatgcctacatcctcaggctcaggaggaagcatcaagctttgctccctagacgaagctaaaaggatatggaaagaaaagttgacagagatttatccaataatgggcaagt

SEQ ID NO: 782871 - DNA, 120 bp, Artificial Sequence
  ENSG00000255221_4 (sequence is synthesized)
ggtacaaggtggatgagaaaagaaatctcactgcttcggaaatgactacagagttggaggtattttctctgcaccaagagcacaaggcctctggtctcatggtattcgggaaggcatttg

SEQ ID NO: 782872 - DNA, 120 bp, Artificial Sequence
  ENSG00000255221_5 (sequence is synthesized)
tgggaagaaatactctgagcaagtcccagatgtattacaactcaatgaaatctttaaaacgttgaatagcaagaactgcccaagtttgaaggacaaacccaaggtgataatcatccaggc

SEQ ID NO: 782873 - DNA, 120 bp, Artificial Sequence
  ENSG00000255221_6 (sequence is synthesized)
ctgccatgttgagaaccatggtgtggtgttggtaaaagattcagtaccggcctctgaaaatatatctttaccaactccgggagattttgaggatgatgctattaatcaagtacacataga

SEQ ID NO: 782874 - DNA, 120 bp, Artificial Sequence
  ENSG00000255221_7 (sequence is synthesized)
gaaggattttattgctttctgctcttccacattagataatgtttgctggagacatcctgcaaagggctctttttgttatgagtcattgaacaactgcaagaatattcctgttcctgtgat

SEQ ID NO: 782875 - DNA, 120 bp, Artificial Sequence
  ENSG00000255221_8 (sequence is synthesized)
gtggaggaaattttccacaaggttcaactttcatttgagcagccagatgataaagcacagatgcccagcactgaaagagttacttcgacaagacgtttctatctcttcccagtacattaa

SEQ ID NO: 782876 - DNA, 120 bp, Artificial Sequence
  ENSG00000255223_0 (sequence is synthesized)
gcttgaagagcaaactgtcaggaaatgtccaacacaaatggcagtgcaatcacagaattcattttacttgggctcacagattgcccggaactccagtctctgctttttgtgctgtttctg

SEQ ID NO: 782877 - DNA, 120 bp, Artificial Sequence
  ENSG00000255223_1 (sequence is synthesized)
gttgtttacctcgtcaccctgctaggcaacctgggcatgataatgttaatgagactggactctcgccttcacacgcccatgtacttcttcctcactaacttagcctttgtggatttgtgc

SEQ ID NO: 782878 - DNA, 120 bp, Artificial Sequence
  ENSG00000255223_2 (sequence is synthesized)
tatacatcaaatgcaaccccgcagatgtcgactaatatcgtatctgagaagaccatttcctttgctggttgctttacacagtgctacattttcattgcccttctactcactgagttttac

SEQ ID NO: 782879 - DNA, 120 bp, Artificial Sequence
  ENSG00000255223_3 (sequence is synthesized)
atgctggcagcaatggcctatgaccgctatgtggccatatatgaccctctgcgctacagtgtgaaaacgtccaggagagtttgcatctgcttggccacatttccctatgtctatggcttc

SEQ ID NO: 782880 - DNA, 120 bp, Artificial Sequence
  ENSG00000255223_4 (sequence is synthesized)
atcaaccacttctactgtgctgacccgccgctcattaagctttcttgttctgatacttatgtcaaagagcatgccatgttcatatctgctggcttcaacctctccagctccctcaccatc

SEQ ID NO: 782881 - DNA, 120 bp, Artificial Sequence
  ENSG00000255223_5 (sequence is synthesized)
gtcttggtgtcctatgccttcattcttgctgccatcctccggatcaaatcagcagagggaaggcacaaggcattctccacctgtggttcccatatgatggctgtcaccctgttttatggg

SEQ ID NO: 782882 - DNA, 120 bp, Artificial Sequence
  ENSG00000255223_6 (sequence is synthesized)
actctcttttgcatgtatataagaccaccaacagataagactgttgaggaatctaaaataatagctgtcttttacacctttgtgagtccggtacttaatccattgatctacagtctgagg

SEQ ID NO: 782883 - DNA, 120 bp, Artificial Sequence
  ENSG00000255223_7 (sequence is synthesized)
aataaagatgtgaagcaggccttgaagaatgtcctgagatgaaatattgtcatgaccatggtgatgcctttgtttcctaataaacattaaatcgaaatctttggctcacatgtcctagcg

SEQ ID NO: 782884 - DNA, 120 bp, Artificial Sequence
  ENSG00000255251_0 (sequence is synthesized)
catttgaccggtcccaggccaggacacactcttccatgctctggctgtgctgtgctagaggctgataatttttctccaggtagagtaaaagatcaaggcacgaactatatagatttacag

SEQ ID NO: 782885 - DNA, 120 bp, Artificial Sequence
  ENSG00000255251_1 (sequence is synthesized)
aaaataggccaaagattgagatttttttgacacaagcaagtccagagaacttttaccatgtatggttaccggcgcttaagaagccccagagattcccagacagaaccgcagaatgacaat

SEQ ID NO: 782886 - DNA, 120 bp, Artificial Sequence
  ENSG00000255251_2 (sequence is synthesized)
gaaggagagaccagtttggctaccacacaaatgaatccacccaaacgtcgccaagtggagcagggtcccagtacaggtgcaaaaaaaccctcaatttcaggagctccacacctgaattca

SEQ ID NO: 782887 - DNA, 120 bp, Artificial Sequence
  ENSG00000255251_3 (sequence is synthesized)
taccagtccctggaacttccccagaatcagcaggattctggcactgaggagctcatgatagtcctggaacaagggacagaagtgaggttgagcctggaagaggtcatcctcatcttggcc

SEQ ID NO: 782888 - DNA, 120 bp, Artificial Sequence
  ENSG00000255251_4 (sequence is synthesized)
ccagagacagtgctgcagctgaccctggagaacacagtccttgtgattgtccctgagcatgtcctgaggtcagaagatggcctgcagtcccctgtgcagatccagtacatcataccttcc

SEQ ID NO: 782889 - DNA, 120 bp, Artificial Sequence
  ENSG00000255251_5 (sequence is synthesized)
gttgatgacttcagcttggagttccatgctcaagatggagacatctcagacatgagaagagagaatgtgcctttttcacctgcagaagaagggaaggcagcacccctgtatcagcagccc

SEQ ID NO: 782890 - DNA, 120 bp, Artificial Sequence
  ENSG00000255251_6 (sequence is synthesized)
gctgggatcagcccttctttcctagtaaccccattgtgcattccacgctgtcgggcagccttcccccaatgctaccctctaccacccacacctagtcctgtgggacgccctagaccagcc

SEQ ID NO: 782891 - DNA, 120 bp, Artificial Sequence
  ENSG00000255251_7 (sequence is synthesized)
gactccagtttcagcctgcatggtatggagctcttgtgcacctcctccctcagacctatgcccccttcaccaagtcctggtccccaggtctatcacagggttcaccataggcctcccagc

SEQ ID NO: 782892 - DNA, 120 bp, Artificial Sequence
  ENSG00000255251_8 (sequence is synthesized)
agggcacggagatgtctctttaggaagtgatttaacccaagagccaccccctgcattgataggtcagagattgtccagatccttagtcagtgcattctctgaaatgtggagagaaagtaa

SEQ ID NO: 782893 - DNA, 120 bp, Artificial Sequence
  ENSG00000255251_9 (sequence is synthesized)
tttgaccacttgcttgccctttgctgttccccatcatcaaccactgtcttcaacagcggagggtcccagatgctgcagggagggggagaactgcagggagttcaaataaaacattcacat

SEQ ID NO: 782894 - DNA, 120 bp, Artificial Sequence
  ENSG00000255251_10 (sequence is synthesized)
ttcacttcacacacactgtcccttagactttctcttcctatttaagcacatacatccaaccacactcaatcaaatccctgactgctccatgtgagagttctgcttccagcatgacgtggt

SEQ ID NO: 782895 - DNA, 120 bp, Artificial Sequence
  ENSG00000255251_11 (sequence is synthesized)
ctgaaagttcatctgaagacagctgctcactcccgggggctaacaccgccccttgcatgctgatgtccttgtagtcattggtctgatgccacaataaataattcctaaggctgatgctct

SEQ ID NO: 782896 - DNA, 120 bp, Artificial Sequence
  ENSG00000255251_12 (sequence is synthesized)
atttctgccctgagactctcccctttttctccaagctgtgccccattccttgtcttagtccaggttccctacactccccaggccaatgcttttgaataaatcttgacgtcattgaatgaa

SEQ ID NO: 782897 - DNA, 120 bp, Artificial Sequence
  ENSG00000255274_0 (sequence is synthesized)
tgctgtcctatataatccatggaacaaccctgagaaattgtccccattttacagaaaaggcagctgctatggcttcggagcaactcagagagaatgaacccagatacaaggcagctcttg

SEQ ID NO: 782898 - DNA, 120 bp, Artificial Sequence
  ENSG00000255274_1 (sequence is synthesized)
tttttaaatggagtgaagcttaagtggctgcagagaagccacaaagtgtgctgcagagaagccaccagcctggagaaacctgcatccctccccaaaaccaacggcaagcagctgtgtcct

SEQ ID NO: 782899 - DNA, 120 bp, Artificial Sequence
  ENSG00000255274_2 (sequence is synthesized)
ctccacttgcagctggaataggcagtttgatgcctttgctgcgctggcaacagggctctctctcttggatgtctcagccatgacaggtgaggactccatcagcaccttgggcctgatcct

SEQ ID NO: 782900 - DNA, 120 bp, Artificial Sequence
  ENSG00000255274_3 (sequence is synthesized)
tggcgtggggctcttgctgctgctcgtgtccatcctcggctacagcctggccaagtggtaccagcgcgggtactgctgggaggggcctaattttgtcttcaacttatatcaaatccggaa

SEQ ID NO: 782901 - DNA, 120 bp, Artificial Sequence
  ENSG00000255274_4 (sequence is synthesized)
cctgaaggatctggagatgggtccacccttcaccatcagtggtcacatcagcagcacagatggtggctacatgaagttctccaacgggctagtctgatgcagagacagcaacttgtgaag

SEQ ID NO: 782902 - DNA, 120 bp, Artificial Sequence
  ENSG00000255274_5 (sequence is synthesized)
ccctggggaggtgagttggagttgggagagctgccgagtgagcctgatgtccaaatgagaagactgaggcccagaactgacatgacagtttcatgtggagagaacagaaagtggctgagc

SEQ ID NO: 782903 - DNA, 120 bp, Artificial Sequence
  ENSG00000255274_6 (sequence is synthesized)
attctttctactccctggggctgttgcctcttcctctttgcctttggagcatttccagaccaacaagcttgctgcggcagtccatccggccattcgcatattatagcataccatgtgcgg

SEQ ID NO: 782904 - DNA, 120 bp, Artificial Sequence
  ENSG00000255274_7 (sequence is synthesized)
ggtgtccctggagctgtcagtgctgcagaagcagttggaagtggagtcagtgagtctttcaattctttcaaaaagttgattgtgaaggatgggagagaaggtggtgctggccagtaagtt

SEQ ID NO: 782905 - DNA, 120 bp, Artificial Sequence
  ENSG00000255274_8 (sequence is synthesized)
ttcagaacctttgtcttgtcttccccaaggaggcctcccagaaagcgccagctgggccaaatgcccgctctccacacgccatcgacccctgtgcacatccccatgacagcccatacagtc

SEQ ID NO: 782906 - DNA, 120 bp, Artificial Sequence
  ENSG00000255274_9 (sequence is synthesized)
ggtgcctcccgtcctcctggcctgacaaagtctcgtctgcagtgcccactgcctgccatctgcttactgcccagctcctccagttctgggggagcccatgcagctctgtgcactgcatca

SEQ ID NO: 782907 - DNA, 120 bp, Artificial Sequence
  ENSG00000255274_10 (sequence is synthesized)
ggaggactgcggtatggagattagactgagggagcaggagtggatgcagaggagcaggacagagcctcatggtggtccaggggagaggtgaagatgaatttgaccagatgacagtgggag

SEQ ID NO: 782908 - DNA, 120 bp, Artificial Sequence
  ENSG00000255274_11 (sequence is synthesized)
gtggtgacaagtgattggattcaccatctatctggaaggtagagctgataggacttactaaggagtttgatggggcagaaagggctgactcctggatttttggcctgaactaggggaaag

SEQ ID NO: 782909 - DNA, 120 bp, Artificial Sequence
  ENSG00000255274_12 (sequence is synthesized)
gtggtgccatttatcaggtggggaagactaggggaggaaggagtgtcaggggaatcatgagctctgttgtagacactataattttgagatgtatgctggacggagctgctgatgaggcag

SEQ ID NO: 782910 - DNA, 120 bp, Artificial Sequence
  ENSG00000255274_13 (sequence is synthesized)
ctggatagagttctggagagaaaccctgtttggacatttggaagccaccagcatccagataacacttaaaggtgtggactgggtgataacaagtagggggcagtgaggagaaaaaggact

SEQ ID NO: 782911 - DNA, 120 bp, Artificial Sequence
  ENSG00000255274_14 (sequence is synthesized)
ccttaaagaggtgactcagtgtgtgctggaatcacctgcaatgtggtcgctataagttgtttccctagcaggtccttgggaaccggtattcagaaattctgggccttggggagcagctta

SEQ ID NO: 782912 - DNA, 120 bp, Artificial Sequence
  ENSG00000255274_15 (sequence is synthesized)
ggaagacaaatactcccatgtaattctgatagaggcaatcttctgagaaactctgccttaggggacaggtagaggggatgtggggaggtggagggcaagggtcacttccagggctggggt

SEQ ID NO: 782913 - DNA, 120 bp, Artificial Sequence
  ENSG00000255274_16 (sequence is synthesized)
gaccagatagtaggattctgaagaatgttcctgttctctccagggtcactgtgaggtcttaatctccaccacgcccttctgccccatgtgggtagaggtagacaggtgtggcaccctaca

SEQ ID NO: 782914 - DNA, 120 bp, Artificial Sequence
  ENSG00000255274_17 (sequence is synthesized)
cccaggcctttgcagatcatgtactagtctgtacccctccctgagcctctcagctctacagattagacaacttactaaagggagccctcagctgcacccttgatgatgggctgtgattga

SEQ ID NO: 782915 - DNA, 120 bp, Artificial Sequence
  ENSG00000255274_18 (sequence is synthesized)
ccaaggagccccagtgaggctcctggctgggctctgcaagacagatgccaaacacagccgtggctcctgtgactcgatgagttgaagggatggcagcctgcttttcctcaaggcaggaag

SEQ ID NO: 782916 - DNA, 120 bp, Artificial Sequence
  ENSG00000255274_19 (sequence is synthesized)
tcatcgcgtgaatattctaactgtattggctgcaggggtttggggatcttctccaagccggcgtccttaccttcacactaagggctatgagctcattcactctcacatgggaatccctaa

SEQ ID NO: 782917 - DNA, 120 bp, Artificial Sequence
  ENSG00000255274_20 (sequence is synthesized)
ccctgagcctcacagatccaggccagccttgccaattgctgaaagaccttttcttggatgacttgtcattattaagccagaactcatcatctcccctctccctccacacctctgtctccc

SEQ ID NO: 782918 - DNA, 120 bp, Artificial Sequence
  ENSG00000255274_21 (sequence is synthesized)
ttccatgtccatatttcgcttttctcatcatcgggttcaagtgtgactagcacttctgagacctccttctttcactccagcctgttgccccatcttgataatgcttcctttaaaatgtct

SEQ ID NO: 782919 - DNA, 120 bp, Artificial Sequence
  ENSG00000255274_22 (sequence is synthesized)
ttgagtctgtccctttctctctgttcccactgcccctgctcaatactgtcatttgattagactattgtataagcctctcttatgaactgaatatttttgtcttccccaaattcatgttga

SEQ ID NO: 782920 - DNA, 120 bp, Artificial Sequence
  ENSG00000255274_23 (sequence is synthesized)
agctgtcactcccaatgtgacggtatttggaggtaaagcctctgggaggtaattggtttagatgaggtcatgaggatggggcctccatgatgggattagtgcccttgtaagaaagtggaa

SEQ ID NO: 782921 - DNA, 120 bp, Artificial Sequence
  ENSG00000255274_24 (sequence is synthesized)
gagagaccagagttctttatctccaccgtgtaaggccacagcaagaaggaggccgtctccaagccaggaagagagccctcccagggaactcactcagctggcaccttgatcctgcacttc

SEQ ID NO: 782922 - DNA, 120 bp, Artificial Sequence
  ENSG00000255274_25 (sequence is synthesized)
cccacctccagaactgtgagagataaatgtctgttgtttaagccacccagtccatggtgttttgttatagtagcccagcctaagacagcctcctaccctgtttctctgcctcctgcctca

SEQ ID NO: 782923 - DNA, 120 bp, Artificial Sequence
  ENSG00000255274_26 (sequence is synthesized)
tccttcatgtggaatactagtttctttcacatcacttatcactgattgtagtaatacgtttgttgtgtttatttgcttggtgtttatcttcataaccagatgacaggctccatgaagcca

SEQ ID NO: 782924 - DNA, 120 bp, Artificial Sequence
  ENSG00000255274_27 (sequence is synthesized)
cacttgtttggttcaccactctgtacccagggctgcacaccatgtccaacacataacaagtgcttcgtaatgttttttgacaaaatgaaatgctgactacaataaaagtctccagccagg

SEQ ID NO: 782925 - DNA, 120 bp, Artificial Sequence
  ENSG00000255274_28 (sequence is synthesized)
ctggcaacagggctctctctcttggatgtctcagccatgacagagacttctcacatcggagcagtgtcatgggatgatatttactgtgaataggaagtcccacgccccccaggttataac

SEQ ID NO: 782926 - DNA, 120 bp, Artificial Sequence
  ENSG00000255274_29 (sequence is synthesized)
cttgaagatgttctcaatcacacactctggcctctgcagaacctaatgttgggagacggggtgtcgccatttgcccaggctggtctcggactcctggcctcaagagatcctcctgtctca

SEQ ID NO: 782927 - DNA, 120 bp, Artificial Sequence
  ENSG00000255274_30 (sequence is synthesized)
gcctcccaaagcactaggattactggcatgggccaccatgcctggccgatgctggtttcttctcctcgcctcccctcaggtggtgaggactccatcagcaccttgggcctgatccttggc

SEQ ID NO: 782928 - DNA, 120 bp, Artificial Sequence
  ENSG00000255274_31 (sequence is synthesized)
ctggcaacagggctctctctcttggatgtctcagccatgacagttggcagagaccttccacacattctgcactctgagatgtgtctatgaggctgctcatgttccaagtaagagagactt

SEQ ID NO: 782929 - DNA, 120 bp, Artificial Sequence
  ENSG00000255298_0 (sequence is synthesized)
tcagttaattgaaccggagttaaatgatcatatataaacaagggatcactttcctacaaaaggagaataacaatacaattcacctaaataccatgttttttctctcccctgcagaaactc

SEQ ID NO: 782930 - DNA, 120 bp, Artificial Sequence
  ENSG00000255298_1 (sequence is synthesized)
atcaaagaatggcagcagaaaaccattcttttgtgactaagtttattctggttgggctaacagagaagtcagagctacagctgcccctcttcctcgtcttcctgggaatctatgtagtca

SEQ ID NO: 782931 - DNA, 120 bp, Artificial Sequence
  ENSG00000255298_2 (sequence is synthesized)
cagtgctggggaacctgggcatgatcacactgattgggctcagttctcacctgcacacacctatgtactgtttcctcagcagtctgtccttcattgacttctgccattccactgtcatta

SEQ ID NO: 782932 - DNA, 120 bp, Artificial Sequence
  ENSG00000255298_3 (sequence is synthesized)
cccctaagatgctggtgaactttgtgacagagaagaacatcatctcctaccctgaatgcatgactcagctctacttcttcctcgtttttgctattgcagagtgtcacatgttggctgcaa

SEQ ID NO: 782933 - DNA, 120 bp, Artificial Sequence
  ENSG00000255298_4 (sequence is synthesized)
tctgattttagtggtgtatgtaataggcctgatttgtgcgtcagctcatataggctgtatgtttagggttcaattctgcaaatttgatgtgatcaaccattatttctgtgatcttatttc

SEQ ID NO: 782934 - DNA, 120 bp, Artificial Sequence
  ENSG00000255298_5 (sequence is synthesized)
tatcttgaagctctcctgttctagtacttacattaatgagttactgattttaatctttagtggaattaacatccttgtccccagcctgaccatcctcagctcttacatcttcatcattgc

SEQ ID NO: 782935 - DNA, 120 bp, Artificial Sequence
  ENSG00000255298_6 (sequence is synthesized)
cagcatcctccgcattcgctacactgagggcaggtccaaagccttcagcacttgcagctcccacatctcggctgtttctgttttctttgggtctgcagcattcatgtacctgcagccatc

SEQ ID NO: 782936 - DNA, 120 bp, Artificial Sequence
  ENSG00000255298_7 (sequence is synthesized)
atctgtcagctccatggaccaggggaaagtgtcctctgtgttttatactattgttgtgcccatgctgaaccccctgatctacagcctgaggaataaagatgtccacgttgccctgaagaa

SEQ ID NO: 782937 - DNA, 120 bp, Artificial Sequence
  ENSG00000255298_8 (sequence is synthesized)
aacgctagggaaaagaacattcttatgaacagaagtacaatgaaaaagattgcattagatctaagtttttggctatgatattgtatgaaatgatgtctttcactttagtgcatctgtcaa

SEQ ID NO: 782938 - DNA, 120 bp, Artificial Sequence
  ENSG00000255298_9 (sequence is synthesized)
aggccactgtaaaaggggaggatgtgtgctagagctagagaaacacaactgaaaagtgacaactggagatgctgatcagcggtgcagattgatttcaaaagtgagtgagatgtcttgtgc

SEQ ID NO: 782939 - DNA, 120 bp, Artificial Sequence
  ENSG00000255298_10 (sequence is synthesized)
tttgcagtctcaggactaaagactacagaacgctggcttggtacctatgacttccaacagcagcattagtgccattctccaagtcaaagacagcaagttgcaaataaaatttggaactga

SEQ ID NO: 782940 - DNA, 120 bp, Artificial Sequence
  ENSG00000255298_11 (sequence is synthesized)
ggattttactgacgttatgtcttatgcacatggtctatttcatgccatttccctctcattttttctctcataaggattacgaagacatgatattttcttagaagaaataataagattgac

SEQ ID NO: 782941 - DNA, 120 bp, Artificial Sequence
  ENSG00000255298_12 (sequence is synthesized)
atagtgaaatagtggcataacctgataatgccagttacattcccttcccccttttctttcatgtaattgattaaaacatactcctcaacataataaaaacactatcttctggtgataaaa

SEQ ID NO: 782942 - DNA, 120 bp, Artificial Sequence
  ENSG00000255302_0 (sequence is synthesized)
gtcttgctggaagctttttcctagaggttgagcggtttgcacaatgtcggaaatggctgagttgtccgagctgtatgaagagagcagtgacctgcagatggatgtgatgcctggcgaggg

SEQ ID NO: 782943 - DNA, 120 bp, Artificial Sequence
  ENSG00000255302_1 (sequence is synthesized)
tgaccttccgcagatggaggtaggcagcgggagccgggagctatccctgcgtccctcccgcagcggggcccaacagctcgaggaggaaggcccaatggaggaggaggaggcccagccaat

SEQ ID NO: 782944 - DNA, 120 bp, Artificial Sequence
  ENSG00000255302_2 (sequence is synthesized)
ggcggcgccagaggggaaacggagccttgctaacgggcccaacgctggggagcagccaggccaggtggcgggcgcagacttcgagagcgaggacgagggcgaggaatttgatgactggga

SEQ ID NO: 782945 - DNA, 120 bp, Artificial Sequence
  ENSG00000255302_3 (sequence is synthesized)
ggacgactacgactatcccgaagaggagcagctcagtggtgccggctacagagtatcagccgctcttgaagaagccgacaagatgtttctgagaacaagagaaccagccctggatggcgg

SEQ ID NO: 782946 - DNA, 120 bp, Artificial Sequence
  ENSG00000255302_4 (sequence is synthesized)
gtttcagatgcattatgagaagaccccgtttgatcagttagcttttatcgaagagcttttttcactgatggttgtcaatcgtctgaccgaagaactcggctgtgatgagattattgatag

SEQ ID NO: 782947 - DNA, 120 bp, Artificial Sequence
  ENSG00000255302_5 (sequence is synthesized)
agagtagttagatgctgttaaaagaggaggaaactacttgaggagggacccaactttccgctatcttttgggttcattccaaatagttttgtgccattgaaaaacttgaccttcaaaaaa

SEQ ID NO: 782948 - DNA, 120 bp, Artificial Sequence
  ENSG00000255302_6 (sequence is synthesized)
atttgtttttcagaatagaacacaataggacagtgactgcacagttgtgaaaaaggaagagaatcattaaagaaaaagaaaaaagattttaagaccgttgaaatcaattatcaagaacgt

SEQ ID NO: 782949 - DNA, 120 bp, Artificial Sequence
  ENSG00000255302_7 (sequence is synthesized)
cctaaaacacctatggctttgactttgttattgatccagattattttccttgcattggggaaaatatctttcatatttgtttgctgtaaagatggttttgcaagaataagtcatgaccaa

SEQ ID NO: 782950 - DNA, 120 bp, Artificial Sequence
  ENSG00000255302_8 (sequence is synthesized)
gacaaactgccaatacaaaagcccactgatactaattatataatgagaaaaaaatgtatccaactaggacacatatcttttgagttatttggactgaaagcttaagaaaacttggaaaat

SEQ ID NO: 782951 - DNA, 120 bp, Artificial Sequence
  ENSG00000255302_9 (sequence is synthesized)
tctattttgtgatctagtcaagccacagttatcaaaggctacattttcagtgtaagataaatggatgagtaaactcaaatatgtatcacgtgtgctttgtatcttaagatgtgtttccaa

SEQ ID NO: 782952 - DNA, 120 bp, Artificial Sequence
  ENSG00000255302_10 (sequence is synthesized)
gagcatctgaaattttgtttgtacatgtatcttgatcatttataaagccactgtgatctataaatcaagaaaatccattgtcataaccatttttaaaagtcaaaaattaagacatcctta

SEQ ID NO: 782953 - DNA, 120 bp, Artificial Sequence
  ENSG00000255302_11 (sequence is synthesized)
attaaaaagtttcaaatctagacactaaatgtgtgtgaatgtacaaagaaaacaaaccattgcttatgctgttatatactagagaaattttgttttgcttgctgttttaacttgacagat

SEQ ID NO: 782954 - DNA, 120 bp, Artificial Sequence
  ENSG00000255302_12 (sequence is synthesized)
gaaggactttagttgaacttcatattgtaagaactgttaataaaagttgtcaagtaaaaagcgctatatctaaaaagactttatgaacagttattctatcaacttttaaaggttttaaac

SEQ ID NO: 782955 - DNA, 120 bp, Artificial Sequence
  ENSG00000255302_13 (sequence is synthesized)
ctgcccagaaattaccttggtatctgaagtttccctctgtctcctcctctaattaagcttgttatttgtcatgcaccagcattggagataataaaatttcttgttctgtgtattttgttt

SEQ ID NO: 782956 - DNA, 120 bp, Artificial Sequence
  ENSG00000255302_14 (sequence is synthesized)
ggctaatagtattgcatacatactttctctgtatactactttctattgtatgtgttaaccagtattaagggaaaatgatccagcttcagctatctaattcacaaattaatttctggaaat

SEQ ID NO: 782957 - DNA, 120 bp, Artificial Sequence
  ENSG00000255302_15 (sequence is synthesized)
taaactttgtaaattaagtttttgcctataagaatttgctggtctgggaaaacctgccctatcaatgagtatgttgccgtggttaccttactaagatgctgaagttctaggagagtaatg

SEQ ID NO: 782958 - DNA, 120 bp, Artificial Sequence
  ENSG00000255302_16 (sequence is synthesized)
attacatcagaaggctaggttcagcaaaataagtgtatcagcaggttttatcatgatcagtaaaaatgttccaaatgcttctgctccattatagcagtaaagaacgaatatccaatgcaa

SEQ ID NO: 782959 - DNA, 120 bp, Artificial Sequence
  ENSG00000255307_0 (sequence is synthesized)
ttcgggagtgctttctgtttctatcactttcagtagactcatcagcttctaagtcattatagagaggaccataaagtgcatcatgagtcacaccaatgttaccatcttccatcctgcagt

SEQ ID NO: 782960 - DNA, 120 bp, Artificial Sequence
  ENSG00000255307_1 (sequence is synthesized)
ttttgtccttcctggcatccctgggttggaggcttatcacatttggctgtcaatacctctttgcctcatttacatcactgcagtcctgggaaacagcatcctgatagtggttattgtcat

SEQ ID NO: 782961 - DNA, 120 bp, Artificial Sequence
  ENSG00000255307_2 (sequence is synthesized)
ggaacgtaaccttcatgtgcccatgtatttcttcctctcaatgctggccgtcatggacatcctgctgtctaccaccactgtgcccaaggccctagccatcttttggcttcaagcacataa

SEQ ID NO: 782962 - DNA, 120 bp, Artificial Sequence
  ENSG00000255307_3 (sequence is synthesized)
cattgcttttgatgcctgtgtcacccaaggcttctttgtccatatgatgtttgtgggggagtcagctatcctgttagccatggcctttgatcgctttgtggccatttgtgccccactgag

SEQ ID NO: 782963 - DNA, 120 bp, Artificial Sequence
  ENSG00000255307_4 (sequence is synthesized)
ccaacattgttcctcactcctactgtgagcatattggagtggctcgtttagcctgtgctgacatcactgttaacatttggtatggcttctcagtgcccattgtcatggtcatcttggatg

SEQ ID NO: 782964 - DNA, 120 bp, Artificial Sequence
  ENSG00000255307_5 (sequence is synthesized)
ttatcctcatcgctgtgtcttactcactgatcctccgagcagtgtttcgtttgccctcccaggatgctcggcacaaggccctcagcacttgtggctcccacctctgtgtcatccttatgt

SEQ ID NO: 782965 - DNA, 120 bp, Artificial Sequence
  ENSG00000255307_6 (sequence is synthesized)
tttatgttccatccttctttaccttattgacccatcattttgggcgtaatattcctcaacatgtccatatcttgctggccaatctttatgtggcagtgccaccaatgctgaaccccattg

SEQ ID NO: 782966 - DNA, 120 bp, Artificial Sequence
  ENSG00000255307_7 (sequence is synthesized)
tctatggtgtgaagactaagcagatacgtgagggtgtagcccaccggttctttgacatcaagacttggtgctgtacctcccctctgggctcatgaatcttcatgtccagctccttcaagg

SEQ ID NO: 782967 - DNA, 120 bp, Artificial Sequence
  ENSG00000255346_0 (sequence is synthesized)
agtctttctgggacctgtgatctagaagacaggagaagatgaacacatctggagacccagcccagacgggccctgaaggctgtagaggcaccatgagtgccgaggaggatgccaggtggc

SEQ ID NO: 782968 - DNA, 120 bp, Artificial Sequence
  ENSG00000255346_1 (sequence is synthesized)
tccggtgggtgactcagcagtttaagaccattgcaggagaagatggggagatcagcctgcaagaattcaaagcagctctgcatgtgaaagagtccttctttgcagagcgattctttgccc

SEQ ID NO: 782969 - DNA, 120 bp, Artificial Sequence
  ENSG00000255346_2 (sequence is synthesized)
tatttgactccgatagaagtggcaccatcaccctccaggagctgcaggaggcactgaccctgctcatccatggcagccccatggacaaactcaaattcctcttccaggtgtatgacatcg

SEQ ID NO: 782970 - DNA, 120 bp, Artificial Sequence
  ENSG00000255346_3 (sequence is synthesized)
atggcagtggctccattgacccggatgagctgcgcactgtgctgcagtcgtgtctgcgcgagagcgccatctcgctgcctgacgagaagctggaccagctgacgctggcgctcttcgaat

SEQ ID NO: 782971 - DNA, 120 bp, Artificial Sequence
  ENSG00000255346_4 (sequence is synthesized)
cggccgacgcggacggcaacggggccatcaccttcgaggagctccgggacgagctgcagcgcttccccggagtcatggagaacctgaccatcagcgctgcccactggctgacggcccccg

SEQ ID NO: 782972 - DNA, 120 bp, Artificial Sequence
  ENSG00000255346_5 (sequence is synthesized)
ccccccgcccacgcccgcgccggccgcgccagctgacccgcgcctactggcacaaccaccgcagccagctgttctgcctggccacctatgcaggcctccacgtgctgctcttcgggctgg

SEQ ID NO: 782973 - DNA, 120 bp, Artificial Sequence
  ENSG00000255346_6 (sequence is synthesized)
cggccagcgcgcaccgggacctcggcgccagcgtcatggtggccaagggctgcggccagtgcctcaacttcgactgcagcttcatcgcggtgctgatgctcagacgctgcctcacctggc

SEQ ID NO: 782974 - DNA, 120 bp, Artificial Sequence
  ENSG00000255346_7 (sequence is synthesized)
tgcgggccacgtggctggctcaagtcctaccactggaccagaacatccagttccaccagcttatgggctacgtggtagtggggctgtccctcgtgcacaccgtggctcacactgtgaact

SEQ ID NO: 782975 - DNA, 120 bp, Artificial Sequence
  ENSG00000255346_8 (sequence is synthesized)
ttgtactccaggctcaggcggaggccagccctttccagttctgggagctgctgctcaccacgaggcctggcattggctgggtacacggttcggcctccccgacaggtgtcgctctgctgc

SEQ ID NO: 782976 - DNA, 120 bp, Artificial Sequence
  ENSG00000255346_9 (sequence is synthesized)
tcctcatgttcatctgctccagttcctgcatccgcaggagtggccactttgaggtgttctattggactcacctgtcctacctcctcgtgtggcttctgctcatctttcatgggcccaact

SEQ ID NO: 782977 - DNA, 120 bp, Artificial Sequence
  ENSG00000255346_10 (sequence is synthesized)
tctggaagtggctgctggtgcctggaatcttgtttttcctggagaaggccatcggactggcagtgtcccgcatggcagccgtgtgcatcatggaagtcaacctcctcccctccaaggtca

SEQ ID NO: 782978 - DNA, 120 bp, Artificial Sequence
  ENSG00000255346_11 (sequence is synthesized)
ctcatctcctcatcaagcggccccctttttttcactatagacctggtgactacttgtatctgaacatccccaccattgctcgctatgagtggcaccccttcaccatcagcagtgctcctg

SEQ ID NO: 782979 - DNA, 120 bp, Artificial Sequence
  ENSG00000255346_12 (sequence is synthesized)
agcagaaagacactatctggctgcacattcggtcccaaggccagtggacaaacaggctgtatgagtccttcaaggcatcagacccactgggccgtggttctaagaggctgtcgaggagtg

SEQ ID NO: 782980 - DNA, 120 bp, Artificial Sequence
  ENSG00000255346_13 (sequence is synthesized)
tgacaatgagaaagagtcaaaggtcgtccaagggctctgagatacttttggagaaacacaaattctgtaacatcaagtgctacatcgatgggccttatgggacccccacccgcaggatct

SEQ ID NO: 782981 - DNA, 120 bp, Artificial Sequence
  ENSG00000255346_14 (sequence is synthesized)
ttgcctctgagcatgccgtgctcatcggggcaggcatcggcatcaccccctttgcttccattctgcagagtatcatgtacaggcaccagaaaagaaagcatacttgccccagctgccagc

SEQ ID NO: 782982 - DNA, 120 bp, Artificial Sequence
  ENSG00000255346_15 (sequence is synthesized)
actcctggatcgaaggtgtccaagacaacatgaagctccataaggtggactttatctggatcaacagagaccagcggtctttcgagtggtttgtgagcctgctgactaaactggagatgg

SEQ ID NO: 782983 - DNA, 120 bp, Artificial Sequence
  ENSG00000255346_16 (sequence is synthesized)
accaggccgaggaggctcaatacggccgcttcctggagctgcatatgtacatgacatctgcactgggcaagaatgacatgaaggccattggcctgcagatggcccttgacctcctggcca

SEQ ID NO: 782984 - DNA, 120 bp, Artificial Sequence
  ENSG00000255346_17 (sequence is synthesized)
acaaggagaagaaagactccatcacggggctgcagacgcgcacccagcctgggcggcctgactggagcaaggtgttccagaaagtggctgctgagaagaagggcaaggtgcaggtcttct

SEQ ID NO: 782985 - DNA, 120 bp, Artificial Sequence
  ENSG00000255346_18 (sequence is synthesized)
tctgtggctccccagctctggccaaggtgctgaagggccattgtgagaagttcggcttcagatttttccaagagaatttctagcctcacctctccaagctctgccccaagtccacaccat

SEQ ID NO: 782986 - DNA, 120 bp, Artificial Sequence
  ENSG00000255346_19 (sequence is synthesized)
gttgctgggtgtcccagggcctgaggcaggacggtactccgctgacaccttccctttcggccttgaggttcccagcctggtggccccaggacgttccggtcgcatggcagagtgctacgg

SEQ ID NO: 782987 - DNA, 120 bp, Artificial Sequence
  ENSG00000255346_20 (sequence is synthesized)
acgacgcctatgaagcccttagtccttctagttgcgcttttgctatggccttcgtctgtgccggcttatccgaggtctcaatccattgcgcccaggctggtatgcagtcatgttgtatct

SEQ ID NO: 782988 - DNA, 120 bp, Artificial Sequence
  ENSG00000255346_21 (sequence is synthesized)
cagcaggagacccaggctctacccgagctctgtgggaatgtgggcacgtccttcccatgctttcagcctggatgactgcgaaggtcactcctaactctgcctcctgcaccagagcgggaa

SEQ ID NO: 782989 - DNA, 120 bp, Artificial Sequence
  ENSG00000255346_22 (sequence is synthesized)
atagcacaggctccttcaggcctgttctggggtctgcttccttcaccttccagaaggaaaggcattgacttggacagggctgtctgactgtctaccacgctctaagtcctgaggaagaca

SEQ ID NO: 782990 - DNA, 120 bp, Artificial Sequence
  ENSG00000255346_23 (sequence is synthesized)
gcagggatgggtgtacagtgtataggcctacgtgctctccatccctgtctcctgggcacccacggcacacaccccagggatgcgaattgggtccttgttttcactagctctgcactgtaa

SEQ ID NO: 782991 - DNA, 120 bp, Artificial Sequence
  ENSG00000255346_24 (sequence is synthesized)
cacctagagctctccccagactggtgctgagagcacaggatgtggaaagagcactggagtgggagccacttagacctggcttccagcccaggagatgtctttctatatataaagggggtt

SEQ ID NO: 782992 - DNA, 120 bp, Artificial Sequence
  ENSG00000255346_25 (sequence is synthesized)
ctgaagccctggggacatcccctggtagcaggggagaccagcgtcaccccccatctctcttctctgatgccctcttgtgcacagtgctacatcgatgggccttatgggacccccacccgc

SEQ ID NO: 782993 - DNA, 120 bp, Artificial Sequence
  ENSG00000255346_26 (sequence is synthesized)
acccaataagacaaagcctagggaccccctaatcctgctcaacagagagaacaggagaccccaaggggcagatgaacttcctctagaacccaggggaagggacagtgccttgttcagtct

SEQ ID NO: 782994 - DNA, 120 bp, Artificial Sequence
  ENSG00000255346_27 (sequence is synthesized)
gctgtagattctggggtttctgtgaaagtgagggaaccagaggctggtcacgggagcttgggggtggggttcgagggggcagagggcaaccactcctccaaacattttccgacggagcct

SEQ ID NO: 782995 - DNA, 120 bp, Artificial Sequence
  ENSG00000255346_28 (sequence is synthesized)
tcccccacatccatggtcccaaacctgcccaatcatcacagtcatttggaagcttatttctccggcatcttataaaattgttcaaacctacaaaaagtgagaagaatcatacagtgaaca

SEQ ID NO: 782996 - DNA, 120 bp, Artificial Sequence
  ENSG00000255346_29 (sequence is synthesized)
gtgttacctactttctagactcctcagttaataatttgctctgtttatcacatattatccatcagttcctcctccctctttccatctgtcaatttatctgattttttggatgcattttca

SEQ ID NO: 782997 - DNA, 120 bp, Artificial Sequence
  ENSG00000255346_30 (sequence is synthesized)
agttaggtgcaaatatctcagcacaccttgctacttggaggagccttcttcaaatgcacattccttggtcccactaccagaaattctgattctgatgatctgggaatgaaacctgaaata

SEQ ID NO: 782998 - DNA, 120 bp, Artificial Sequence
  ENSG00000255346_31 (sequence is synthesized)
tgtattttccaccaaatccatttgcatagggagaaataagcagcatctttccctgcccctccttgtgtctttgtctccccatctccctctctcctggcgcgtccctcagagcctctctgg

SEQ ID NO: 782999 - DNA, 120 bp, Artificial Sequence
  ENSG00000255346_32 (sequence is synthesized)
gctctgtatgctggcctcttccttctctctgtgtgctgagtcgcttgagaaacaggatggagacagcctctttgtgtgcctctctctgtcgtggaaaggccaagtgcctggggatgaagc

SEQ ID NO: 783000 - DNA, 120 bp, Artificial Sequence
  ENSG00000255346_33 (sequence is synthesized)
gggctaagcctggaagctcagctcagccacactctggctgtgtggccctggaagcttccccatgtctgttattttcatctgtgaaataagctgatgccatccgtcagtcacagttgctgt

SEQ ID NO: 783001 - DNA, 120 bp, Artificial Sequence
  ENSG00000255346_34 (sequence is synthesized)
gaggtgacatgagacgccaagtgctcaagacattccacctcagttcagctccttgctgctccaggctttcgtgcatctacatcatttctctttatcctggctccctctgtctctgttttc

SEQ ID NO: 783002 - DNA, 120 bp, Artificial Sequence
  ENSG00000255346_35 (sequence is synthesized)
cagcctctgtttgcgtctgtccctgtctgggcaggagggaacagcagaggcagcaaaggctctctcagcacatactgtggggaggagcggccctgggcagaggacagggtgggcctcacc

SEQ ID NO: 783003 - DNA, 120 bp, Artificial Sequence
  ENSG00000255346_36 (sequence is synthesized)
tcctccatctgagctggacatttccatctgtgccacaccatgagctcctgtgagccccacatttcctgggcatcctccaccttgcagtcagtcctgataggttctcttcttgacagtgta

SEQ ID NO: 783004 - DNA, 120 bp, Artificial Sequence
  ENSG00000255346_37 (sequence is synthesized)
aagcacccttccccaaggctgccatcatggggttggaaccaggcactttccaatgggattgtagctggcacctttcttttccatgggttggaagtccatggttgcaaagggggaggtaaa

SEQ ID NO: 783005 - DNA, 120 bp, Artificial Sequence
  ENSG00000255346_38 (sequence is synthesized)
gaagccggatcataacctggatgatgatgtcccttatctaaggtggggctgggatgcagcagtaggggtgggtgtgacctgcaggggatgagccagttgggtggatggaagaatgaaggt

SEQ ID NO: 783006 - DNA, 120 bp, Artificial Sequence
  ENSG00000255346_39 (sequence is synthesized)
aaggggaaggcaaaacataccctgaggactgggacagagcaggatgggagtgaggatgtcatctttaagatgtgaggaggaacgggaagaagaatacgagaggaggagtggggcctgcag

SEQ ID NO: 783007 - DNA, 120 bp, Artificial Sequence
  ENSG00000255346_40 (sequence is synthesized)
tcaaggagaggctaattcggtttgggtgggtggaaagcggggctcgtgcttgcaccaagcctccatctccctggactgggagtcagcaaggccaggagacctggtgttggggccttccaa

SEQ ID NO: 783008 - DNA, 120 bp, Artificial Sequence
  ENSG00000255346_41 (sequence is synthesized)
ccagatcgtgtttaatttccagcaagcctggggaggcacacaactcaccagggaaactcacacctggagttttaccagcctgaggccacacactcttggaacctctttccctctgttgag

SEQ ID NO: 783009 - DNA, 120 bp, Artificial Sequence
  ENSG00000255346_42 (sequence is synthesized)
tctgtactttcccctcttcatcaggcttgggaaggcttggacaaaacgctctctggggcacagaaggaaactaaagagggtgttctgacttaaggttggaggatgtaaacaggctgtgcc

SEQ ID NO: 783010 - DNA, 120 bp, Artificial Sequence
  ENSG00000255346_43 (sequence is synthesized)
aaatcatttggaaacgtggcagaatctgtttagcacaggatgtctcacacatgcactcaatgcacacacacacatgcatgtcaccgttttggattctttcccatctctgtctacaccgcc

SEQ ID NO: 783011 - DNA, 120 bp, Artificial Sequence
  ENSG00000255346_44 (sequence is synthesized)
ttaacacatttgagccctgccctcagtcctttgccctctcgtaacagatttccaccaggctcccacccgcatatacaaatagtcagctgttcgtttaggacttaataatatagtgggtgg

SEQ ID NO: 783012 - DNA, 120 bp, Artificial Sequence
  ENSG00000255346_45 (sequence is synthesized)
gagcaggtggaaggacttggacatacgattctaaaatccgtgaatgcccacatgtgtgacgaccatatgcccgtgtcctgaggttttctctccagacagattccagttgcccacgagagg

SEQ ID NO: 783013 - DNA, 120 bp, Artificial Sequence
  ENSG00000255346_46 (sequence is synthesized)
gcgctgcagaatcacggatctcaagcgggtttgtttcccaggaagtgagactggtccgtgagtggcagttaatcaaagggaaaggggctgggaagacaacgccctgttccaaagctcccc

SEQ ID NO: 783014 - DNA, 120 bp, Artificial Sequence
  ENSG00000255346_47 (sequence is synthesized)
actagaggcaaaacctccaggctccatctctgtgaagtcaagagacttcatgttcaaggtcagtttctctagctggcagcttctcactgccgctgccttcccccagaaactctaccctcc

SEQ ID NO: 783015 - DNA, 120 bp, Artificial Sequence
  ENSG00000255346_48 (sequence is synthesized)
ccatacccagtgtccagttctgggctttcctcttttctgcttgcaacaaaatgtccatcggtgaggtcaagttgaactgaacaggcctggcttggggagagttcacaggtccaggttctg

SEQ ID NO: 783016 - DNA, 120 bp, Artificial Sequence
  ENSG00000255346_49 (sequence is synthesized)
tctgcctcggtggacatgtcatcgaaggcagcaggaccacacatgtgagtgtacagcacgcatggtctgaccatctggatgtttcccagatgtgcagatgggcatcatcggccatcaaca

SEQ ID NO: 783017 - DNA, 120 bp, Artificial Sequence
  ENSG00000255346_50 (sequence is synthesized)
ggaaaatgcatccggatgactggctgacttttcttctctcaccagatgttgccaatgctgtagaaacatctgggcccacgacagataaggctgacacatgcaaagagaagagagaaggag

SEQ ID NO: 783018 - DNA, 120 bp, Artificial Sequence
  ENSG00000255346_51 (sequence is synthesized)
caaggccagttatcggcacgtgtgcccatcctcccccatgaagctgcaaactccccaaggccagacatggggacccaaagcctagcacagagtgtagaccagatgtcggttcctcccagg

SEQ ID NO: 783019 - DNA, 120 bp, Artificial Sequence
  ENSG00000255346_52 (sequence is synthesized)
gcaaggggttacttaaatggaattatccttacaaagagtcttttgcacctaattgtcacttgtaatttggggaacaaaagcacaaacacaagcccactgaaccactttgccaggtgccat

SEQ ID NO: 783020 - DNA, 120 bp, Artificial Sequence
  ENSG00000255346_53 (sequence is synthesized)
tgcactgttctgtgaggacagcgctgacggagacagcaggcattcctgaaatgaccaatcaggcagggccctcctggacgagcggcacaagtgcaggctattaatacactgagctggggc

SEQ ID NO: 783021 - DNA, 120 bp, Artificial Sequence
  ENSG00000255346_54 (sequence is synthesized)
attcgtgggaggggagggggcatgggcaacatggagagtcaccaggctggcagacaaggttgaaggtagggagggatgaggaacattagccgagactggctctgggccaacctgttggag

SEQ ID NO: 783022 - DNA, 120 bp, Artificial Sequence
  ENSG00000255346_55 (sequence is synthesized)
acacagtggacaaacctttgccctctgggaggcagggcactgagtcctacacttgcctctgccacagtctgctgtgtgaccttgggtgtatcatttgacctctctgagttctcactttct

SEQ ID NO: 783023 - DNA, 120 bp, Artificial Sequence
  ENSG00000255346_56 (sequence is synthesized)
tattataaagtgaacagatcaagtatgtatgcgtttaagcacttgtcatttctaaaaggatacatgaaagtatatttatctgtgtgctctggggagtgggaatggagggatacaatgaag

SEQ ID NO: 783024 - DNA, 120 bp, Artificial Sequence
  ENSG00000255346_57 (sequence is synthesized)
gaaaggattttgtgtttttgtttttgttttactttttgcccttctgtaaagtttaagtttttattaatattatagttttattttaaaaagaaaccccaaataggatgtcatgtaaaagaa

SEQ ID NO: 783025 - DNA, 120 bp, Artificial Sequence
  ENSG00000255346_58 (sequence is synthesized)
aagaaaaaacaagtaccaagtgtttgatataatcctatttataacacagaaaataaatgacatatgtatatcatgtggggataaatagataaaaatacacggaaagacagttagaagcca

SEQ ID NO: 783026 - DNA, 120 bp, Artificial Sequence
  ENSG00000255346_59 (sequence is synthesized)
gccttaatctgtcttgggcccagacagcccttatctgttgggggcccagatgtgtctacagcattgttaacatctggtgaaaggagaaaagtcagccagccatcctgatgcgttttcttg

SEQ ID NO: 783027 - DNA, 120 bp, Artificial Sequence
  ENSG00000255346_60 (sequence is synthesized)
ctgatggccgatgatgcccaaatgctaagcagttcgcagtggttaactgtggaggaggcaaaggaggacttgaatgttttcctcttatctgtttcctgtatttgtgtgttacctgagtaa

SEQ ID NO: 783028 - DNA, 120 bp, Artificial Sequence
  ENSG00000255346_61 (sequence is synthesized)
ggtttcacttcctgtattactcatgtgatattttactttttaatttatgtacttttgtatggcttgtatctattttttaagagtaaaacaaaatgcagagattatctgcagtgttgtcta

SEQ ID NO: 783029 - DNA, 120 bp, Artificial Sequence
  ENSG00000255346_62 (sequence is synthesized)
agatcctgaatattgatttggtatcaagtgaaagtatttcgggcctaagccaggggactggccctccccgtcaggggtcactccgtgggctcttcaataagggaggctcctatagtgccc

SEQ ID NO: 783030 - DNA, 120 bp, Artificial Sequence
  ENSG00000255346_63 (sequence is synthesized)
attatcaatatgctgctggccctgaatggcctaagtattaaaataaaatgccctgtctaggcccaaaactagtccagaaggactgtggaggccgtgggcatacacgtgaaattgtgtgca

SEQ ID NO: 783031 - DNA, 120 bp, Artificial Sequence
  ENSG00000255346_64 (sequence is synthesized)
caggggctaagcccagcaccagcccagcctgggagttgagatgcctcagggcacactgtctgtgctaaacaaatactcatattaaccagccttcctgacagattgatgcatctttttatg

SEQ ID NO: 783032 - DNA, 120 bp, Artificial Sequence
  ENSG00000255346_65 (sequence is synthesized)
atctgtctttacaatatgatgactctctccttttaaaaataagattaattcagacaagacatttattttatgaggaaattcatcccagggggaaaaatactcaacctgaatggcagaaat

SEQ ID NO: 783033 - DNA, 120 bp, Artificial Sequence
  ENSG00000255346_66 (sequence is synthesized)
ggctggaaagagacttgactctcaaggaagcttccagcctccaaccttagccacccagccatggccccaaaagggctgccctaatactactcagggacaaatgggccctcttaaactacc

SEQ ID NO: 783034 - DNA, 120 bp, Artificial Sequence
  ENSG00000255346_67 (sequence is synthesized)
ctagctgtgtgagtgtagcctgctggagaaacaaagaaagacaggtagtgagttttagtgtggcagggaagaaaaggatgcattttttggtaaaggaaaaaaaaattctgagatttaccc

SEQ ID NO: 783035 - DNA, 120 bp, Artificial Sequence
  ENSG00000255346_68 (sequence is synthesized)
aaatttggctggacatgagtttataaatacagattaagcttgtctttaaataaccctaaagaatgttcaagaacagtgaatgatttgtctctgtgtccccagtgactagaatagcgtcac

SEQ ID NO: 783036 - DNA, 120 bp, Artificial Sequence
  ENSG00000255346_69 (sequence is synthesized)
cacctagtaggtgcttggcgtgtttcatgaatgtttccactgctatggtctgtttcagctggtgaccccatgaggtacccttggctcctctatctcccccatcttcctccttcagccaat

SEQ ID NO: 783037 - DNA, 120 bp, Artificial Sequence
  ENSG00000255346_70 (sequence is synthesized)
catcaagcctgtcaacatggcattctaaatgcttctcaagcacatttccttccccactggccctgccttggttcagtccttaaattgcctattgcctgaattggtgcatcagagacaggc

SEQ ID NO: 783038 - DNA, 120 bp, Artificial Sequence
  ENSG00000255346_71 (sequence is synthesized)
tggagaaaggaagaccagttagccagaaaggaagcttggaagaccacccagctaactggtcttcctttctccagcctggctctgatccatcctccacacactgctgtgggtctgactgca

SEQ ID NO: 783039 - DNA, 120 bp, Artificial Sequence
  ENSG00000255346_72 (sequence is synthesized)
caccttctttttggaggactctcctattatagccatcaaactcctgagtctgctacacaaggcccccccaacataagccctagatgaagatctgctaccattacagccagtattacctgg

SEQ ID NO: 783040 - DNA, 120 bp, Artificial Sequence
  ENSG00000255346_73 (sequence is synthesized)
cccttgcctacctctcaggtcttggcaatgtccaccttgctttttttactttaaatagcatcatttcgtgctcccccaggacactgtgcagcttcgcacctccaagcctttgcttctgca

SEQ ID NO: 783041 - DNA, 120 bp, Artificial Sequence
  ENSG00000255346_74 (sequence is synthesized)
tcgcctgacacttggagcacccttctccactttcagattgagacttcggaacactttatcatcagcctatctgtaaagacttccttgctggtccctcccatcgcagaataaacagcctgc

SEQ ID NO: 783042 - DNA, 120 bp, Artificial Sequence
  ENSG00000255346_75 (sequence is synthesized)
ggggagatcagtgggcctcagtgagaactggccatttcaccttggcaggcctggaggtgccatcccggcctcctgagcccagcctgggactggtttctccaggtgaggctgacacttcct

SEQ ID NO: 783043 - DNA, 120 bp, Artificial Sequence
  ENSG00000255346_76 (sequence is synthesized)
ttcctcacatctctctcccagtccccagtctctctgtctaatccctgcccccctttctggggcagcagggagaaaaggagggactctggcacaggagacaaatgccttctattcaactta

SEQ ID NO: 783044 - DNA, 120 bp, Artificial Sequence
  ENSG00000255346_77 (sequence is synthesized)
ccagaggccagaacctttttctgatcttttctatgtctgaaaaagaaaatctctgttgttttttccttttcctcatagtataagctcactatgaacattttagacaatacagagtggtat

SEQ ID NO: 783045 - DNA, 120 bp, Artificial Sequence
  ENSG00000255346_78 (sequence is synthesized)
aaaaaagaatacaaaaatcacccgtaacattttgctatattgccttctaactggttgcacatacacacgccacacacctttttttttttaacaaaatgggattaaaaaatgaatcccatt

SEQ ID NO: 783046 - DNA, 120 bp, Artificial Sequence
  ENSG00000255346_79 (sequence is synthesized)
ttttaatgggatttttcacttacaaaaatgaactttttcacttacaaaaatgaacattttgaaatgtaaaaatatattgctttacagtgtcatttttattgtggtaaaatatacataatg

SEQ ID NO: 783047 - DNA, 120 bp, Artificial Sequence
  ENSG00000255346_80 (sequence is synthesized)
taaaatttgccatcttaaccatttttaagtgtacaggtcagtggcattaattaagtacattcacattgctgtgccaccatcaccaccctccatctccagaaccttttcatccttccattg

SEQ ID NO: 783048 - DNA, 120 bp, Artificial Sequence
  ENSG00000255346_81 (sequence is synthesized)
aaactccttgcccactgaacactgaatccccatgcctcctcccctagtccctggcaaccaccattctattcatacattctgtctctaagaatctgacttctctaggcacctcatctaagt

SEQ ID NO: 783049 - DNA, 120 bp, Artificial Sequence
  ENSG00000255346_82 (sequence is synthesized)
gggattatacaatatttgtcattttgtatctggcttatgtcacttagtatagtatcctcaagcttcatctgtgtcatagcatgtgacagaattttattccttttaaggctgaataatatt

SEQ ID NO: 783050 - DNA, 120 bp, Artificial Sequence
  ENSG00000255346_83 (sequence is synthesized)
ccattgtaggtatatgccatattttgtttatccattcaccaattagtggacatttgggctgtttctacgttttaactatcgtgattaatgctgctatgaacattggtgcacagatatctg

SEQ ID NO: 783051 - DNA, 120 bp, Artificial Sequence
  ENSG00000255346_84 (sequence is synthesized)
ggtgcacagatatctgtttgagttcctgctttcaattcttccgggtatatatccagaaggggaattgctggatgacatggtaattctggtaattctatttttaattttttgaggaactgc

SEQ ID NO: 783052 - DNA, 120 bp, Artificial Sequence
  ENSG00000255346_85 (sequence is synthesized)
tttccacagtggctgcattattttacattcctaccagtaatgtacaggtggtccaagttctccacattcttgctaacacttgtaattttctgcttttttttttttttctgagatggagtc

SEQ ID NO: 783053 - DNA, 120 bp, Artificial Sequence
  ENSG00000255346_86 (sequence is synthesized)
gcgtgagccactgtgctcagccttatattctgctttttgataatagccatcctaatgggtgtgaagtggtaactcactgtacttatagtgtcatttttagtggctgcattatactccact

SEQ ID NO: 783054 - DNA, 120 bp, Artificial Sequence
  ENSG00000255346_87 (sequence is synthesized)
gtatgtatcatgcagcatcgtgtagtatttaagactctaagcacaagctacctaagttcaaatctcagttccatcacttattatatgatcttagactagttacttaacttctctgtacct

SEQ ID NO: 783055 - DNA, 120 bp, Artificial Sequence
  ENSG00000255346_88 (sequence is synthesized)
caatttatttatcaaataggaattatgataataatatttcatactcatggggttgagatgaaggttaaattagttaacttacgcgcgacggggagccatcaaagtgtgttgagcaaggga

SEQ ID NO: 783056 - DNA, 120 bp, Artificial Sequence
  ENSG00000255346_89 (sequence is synthesized)
ttcgcagggatggacctgcattctgaaaagcttttcttcagcaatgttcattttgctgccctggtgccagagggcggaaaacaggtagctggcttcacccagggatgggatattcttaga

SEQ ID NO: 783057 - DNA, 120 bp, Artificial Sequence
  ENSG00000255346_90 (sequence is synthesized)
gtcagtagaatggaaggttagagggagaaggaaggagaatgtgcacatgagaattattgtgagggaggaccctggatttgaaattggccaacagagagattaaagcagatagaagaggcc

SEQ ID NO: 783058 - DNA, 120 bp, Artificial Sequence
  ENSG00000255346_91 (sequence is synthesized)
atgaaggggccagggggagactggtcctctggatgagtccagaaacctgctgtcatcttggctgttgactaggaaagcagaacaggcggtgtgactggagagtggtataatatactctaa

SEQ ID NO: 783059 - DNA, 120 bp, Artificial Sequence
  ENSG00000255346_92 (sequence is synthesized)
ttgattctgcatcgtaatgtgatttgggccggaatgatgatcacaacaccaatgagaatttccatgtatatgcaatttccttctcccagatactgcgttaggtgttttaccattatcgag

SEQ ID NO: 783060 - DNA, 120 bp, Artificial Sequence
  ENSG00000255346_93 (sequence is synthesized)
tttccttgagctagttctgagagggagaaatgattactctcattttagagatgagcaaagtgaggtccactaccccagaggacttagagcccactattgcacagttaaggaggggcagga

SEQ ID NO: 783061 - DNA, 120 bp, Artificial Sequence
  ENSG00000255346_94 (sequence is synthesized)
gcaggatgccacactgggtgtgtccatatccaaagcaggccaagaaatcattaatcacgggctctgctgctcaggaagaataaaatacagaaaaatctcatctctgttggtagttttggc

SEQ ID NO: 783062 - DNA, 120 bp, Artificial Sequence
  ENSG00000255346_95 (sequence is synthesized)
ttccttatcccatcactttcaaccacccatgtttacataaggccacactgctgggctggaatgcctagctgtggcccctctcaagacaacatgataaacagagcatttgctccaagttga

SEQ ID NO: 783063 - DNA, 120 bp, Artificial Sequence
  ENSG00000255346_96 (sequence is synthesized)
acaacaaggcacactccctcagcgctaacccacatacagtgtgcctttggataactgaggctgtgggcacaccgccccttatagattaagtaagcaggtgtattttctgggcagatagtc

SEQ ID NO: 783064 - DNA, 120 bp, Artificial Sequence
  ENSG00000255346_97 (sequence is synthesized)
ttggaagttgagtagtacttagggagttaccgattctggagacaggcaaccactgaagccaaagattctccacccgtggggaggtgtccattgctgttgagctaggcagtcgggaacatg

SEQ ID NO: 783065 - DNA, 120 bp, Artificial Sequence
  ENSG00000255346_98 (sequence is synthesized)
gaaggtttctgagctgagggtgacatttggtccttcagttgcatggtctatacccccaaggaaagctgactggcagaaagctggaggtgggtaaacagaagaggcccaccacttcttgca

SEQ ID NO: 783066 - DNA, 120 bp, Artificial Sequence
  ENSG00000255359_0 (sequence is synthesized)
atttggtccaggacaggcagtaggcgtcagggggcgccctaaggctccacggcatgtgcctgtattgctgggacatcgagccttcccaagtcaaccctgaaggaccaagacaacatcatc

SEQ ID NO: 783067 - DNA, 120 bp, Artificial Sequence
  ENSG00000255359_1 (sequence is synthesized)
cttcagaggtcactgagcggcagcttgcaaataaacgtattcagaatatgcaacacctaaagaaagagaagaggagactgaataaaaggttttcaaggccttctcctattccagaaccag

SEQ ID NO: 783068 - DNA, 120 bp, Artificial Sequence
  ENSG00000255359_2 (sequence is synthesized)
gactcctatggtcatcttgataaagcaggagtctatttgaaggaaaccatgctccagacagaaatatgtggattgtgaacatcaagtgacatatcatgaattgatcatccacaaaataaa

SEQ ID NO: 783069 - DNA, 120 bp, Artificial Sequence
  ENSG00000255359_3 (sequence is synthesized)
tccaccatttcggaaaaataaacacagtgcaagtatttaatatccaagctacaggctctagaattttattaaatgccatctctcactaccatatttttctttcctgtggtaaacttgaaa

SEQ ID NO: 783070 - DNA, 120 bp, Artificial Sequence
  ENSG00000255359_4 (sequence is synthesized)
tttgctgcttttcaacaaataataatgaatatgtataggtagacttttgaaaaatattattctcatttaaatttttgcaaatgttttatgacatatttagatgtttagaagtatgttata

SEQ ID NO: 783071 - DNA, 120 bp, Artificial Sequence
  ENSG00000255359_5 (sequence is synthesized)
ataatagaacaccagatttcctctgctgtatatttataatgacttccatttaaacaaaatgtttaaatactttaaacagtcctaggagactgttattataactaactcctgtattttgtg

SEQ ID NO: 783072 - DNA, 120 bp, Artificial Sequence
  ENSG00000255359_6 (sequence is synthesized)
ttgctattgcagataagccatagtgtaattaaaatttccatttaaggtaaaatttgaatattgaattaaaattttacttttaggtatgaaataaattataattattgctgactctctaaa

SEQ ID NO: 783073 - DNA, 120 bp, Artificial Sequence
  ENSG00000255359_7 (sequence is synthesized)
tatgtgaaccgtttgcagtggtggtgtttaccttttttattgacacaaaccaaaaatgtaatcagaatgttacctttatatgttacaaaaaagtatgatttttctttcattttaattttt

SEQ ID NO: 783074 - DNA, 120 bp, Artificial Sequence
  ENSG00000255374_0 (sequence is synthesized)
tcagcgagaccacgaacccacctgcaggaaccaattccggacacaacaccagcatttaaaaaaattttttttgtctgttcagacatgataacttttctacccatcattttttccagtctg

SEQ ID NO: 783075 - DNA, 120 bp, Artificial Sequence
  ENSG00000255374_1 (sequence is synthesized)
gtagtggttacatttgttattggaaattttgctaatggcttcatagcactggtaaattccattgagtggttcaagagacaaaagatctcctttgctgaccaaattctcactgctctggcg

SEQ ID NO: 783076 - DNA, 120 bp, Artificial Sequence
  ENSG00000255374_2 (sequence is synthesized)
gtctccagagttggtttgctctgggtattattattaaactggtattcaactgtgttgaatccagcttttaatagtgtagaagtaagaactactgcttataatatctgggcagtgatcaac

SEQ ID NO: 783077 - DNA, 120 bp, Artificial Sequence
  ENSG00000255374_3 (sequence is synthesized)
catttcagcaactggcttgctactaccctcagcatattttatttgctcaagattgccaatttctccaactttatttttcttcacttaaagaggagagttaagagtgtcattctggtgatg

SEQ ID NO: 783078 - DNA, 120 bp, Artificial Sequence
  ENSG00000255374_4 (sequence is synthesized)
caaaagaatttgaaggaaacatgacttggaagatcaaattgaagagtgcaatgtacttttcaaatatgactgtaaccatggtagcaaacttagtacccttcactctgaccctactatctt

SEQ ID NO: 783079 - DNA, 120 bp, Artificial Sequence
  ENSG00000255374_5 (sequence is synthesized)
ttatgctgttaatctgttctttgtgtaaacatctcaagaagatgcagctccatggtaaaggatctcaagatcccagcaccaaggtccacataaaagctttgcaaactgtgatctccttcc

SEQ ID NO: 783080 - DNA, 120 bp, Artificial Sequence
  ENSG00000255374_6 (sequence is synthesized)
tcttgttatgtgccatttactttctgtccataatgatatcagtttggagttttggaagtctggaaaacaaacctgtcttcatgttctgcaaagctattagattcagctatccttcaatcc

SEQ ID NO: 783081 - DNA, 120 bp, Artificial Sequence
  ENSG00000255374_7 (sequence is synthesized)
acccattcatcctgatttggggaaacaagaagctaaagcagacttttctttcagttttttggcaaatgaggtactgggtgaaaggagagaagacttcatctccatagattcacgagaggg

SEQ ID NO: 783082 - DNA, 120 bp, Artificial Sequence; identical to SEQ ID NO: 782884
  ENSG00000255378_0 (sequence is synthesized)

SEQ ID NO: 783083 - DNA, 120 bp, Artificial Sequence; identical to SEQ ID NO: 782885
  ENSG00000255378_1 (sequence is synthesized)

SEQ ID NO: 783084 - DNA, 120 bp, Artificial Sequence; identical to SEQ ID NO: 782886
  ENSG00000255378_2 (sequence is synthesized)

SEQ ID NO: 783085 - DNA, 120 bp, Artificial Sequence; identical to SEQ ID NO: 782887
  ENSG00000255378_3 (sequence is synthesized)

SEQ ID NO: 783086 - DNA, 120 bp, Artificial Sequence; identical to SEQ ID NO: 782888
  ENSG00000255378_4 (sequence is synthesized)

SEQ ID NO: 783087 - DNA, 120 bp, Artificial Sequence; identical to SEQ ID NO: 782889
  ENSG00000255378_5 (sequence is synthesized)

SEQ ID NO: 783088 - DNA, 120 bp, Artificial Sequence; identical to SEQ ID NO: 782890
  ENSG00000255378_6 (sequence is synthesized)

SEQ ID NO: 783089 - DNA, 120 bp, Artificial Sequence; identical to SEQ ID NO: 782891
  ENSG00000255378_7 (sequence is synthesized)

SEQ ID NO: 783090 - DNA, 120 bp, Artificial Sequence; identical to SEQ ID NO: 782892
  ENSG00000255378_8 (sequence is synthesized)

SEQ ID NO: 783091 - DNA, 120 bp, Artificial Sequence; identical to SEQ ID NO: 782893
  ENSG00000255378_9 (sequence is synthesized)

SEQ ID NO: 783092 - DNA, 120 bp, Artificial Sequence; identical to SEQ ID NO: 782894
  ENSG00000255378_10 (sequence is synthesized)

SEQ ID NO: 783093 - DNA, 120 bp, Artificial Sequence; identical to SEQ ID NO: 782895
  ENSG00000255378_11 (sequence is synthesized)

SEQ ID NO: 783094 - DNA, 120 bp, Artificial Sequence; identical to SEQ ID NO: 782896
  ENSG00000255378_12 (sequence is synthesized)

SEQ ID NO: 783095 - DNA, 120 bp, Artificial Sequence
  ENSG00000255393_0 (sequence is synthesized)
ctcccaggttgcctatggcacaggtgaagtgttgcagctactgccagctgatgggccatgttttgagaagatgctaaggggtttccctgggctgccccagcagagggtaattgcagacag

SEQ ID NO: 783096 - DNA, 120 bp, Artificial Sequence
  ENSG00000255393_1 (sequence is synthesized)
ctgaatgtggccaaaggtttataagcactcaaggaacccccagctccttgccatttcttgttttctatgttgtgtcttggagtctggagcaatgaagacctctgtgctcttagcaataac

SEQ ID NO: 783097 - DNA, 120 bp, Artificial Sequence
  ENSG00000255393_2 (sequence is synthesized)
tgcaatgtgctctgatgattggttgttagtcagaatgaaaataaggccttttgataagaacacagacattagaattggcgacatacacctgagagataactgtcctgtaacaagactgtt

SEQ ID NO: 783098 - DNA, 120 bp, Artificial Sequence
  ENSG00000255393_3 (sequence is synthesized)
tacaaaccaaggttgcatactacctatgaatttccagtggtttgctttgtgaagaggcttaaattcccctctgtgatgcattttggaatgagtgggtttgatgcccacaccttgaaagaa

SEQ ID NO: 783099 - DNA, 120 bp, Artificial Sequence
  ENSG00000255393_4 (sequence is synthesized)
atccctcaaaaaacaaaaggacaagagtcaccaactcccacacaaagtaaaacatggacacttaattttaacagtgttaataaggagcaactatccaagaagtcactgtatcaataatgc

SEQ ID NO: 783100 - DNA, 120 bp, Artificial Sequence
  ENSG00000255393_5 (sequence is synthesized)
ctgtgttataacaccctctcctccctaaagcaagggaacaagtgatacatcttgtctgaaaaccagtttcatcaatactgttgatgtgtctgtacaaagatgagtagcaacatctgttac

SEQ ID NO: 783101 - DNA, 120 bp, Artificial Sequence
  ENSG00000255393_6 (sequence is synthesized)
cagtttcactacattttggagttttgaataacatatctataccatgatatttatactttttaatgagttaattttaagtgaaattgccattctaactctgaaatcaagctcatacataat

SEQ ID NO: 783102 - DNA, 120 bp, Artificial Sequence
  ENSG00000255393_7 (sequence is synthesized)
tgacaataaatgtgggaatccccatgggaacaggcttgtggtctaacatattaacccctcaatgacagcctggccctgcaagctttgctttttaagataaatatatctatccttgggata

SEQ ID NO: 783103 - DNA, 120 bp, Artificial Sequence
  ENSG00000255393_8 (sequence is synthesized)
caaacagaaaatacataggctacagctcctttcttagtctgaataaaaggagggacttgatagtaattacaattcccgtttcgacatggaccaagaaggacattgtaccatagtcctgct

SEQ ID NO: 783104 - DNA, 120 bp, Artificial Sequence
  ENSG00000255393_9 (sequence is synthesized)
ctgaagaggcaagaggtttataaacacctgcagagacctacttcctgtgattccttggtttaagatctgtggcaatgaagatctctggagttttaggagggctcctcatactttttgcct

SEQ ID NO: 783105 - DNA, 120 bp, Artificial Sequence
  ENSG00000255393_10 (sequence is synthesized)
cgactcatgctcttgaaaatagttacaactagagaaattgatggtgtaaaattatacattacaaaagaagaagagctgaaaggtatagtactaaacaaccattaacagacatttgaagaa

SEQ ID NO: 783106 - DNA, 120 bp, Artificial Sequence
  ENSG00000255393_11 (sequence is synthesized)
cgcgacacagatgttcagtggacaaagaagacactgtttagattgcagcaatgactgagttgactactgatggcctagatcactgtctgattggtattagggccagccacgttatgtacc

SEQ ID NO: 783107 - DNA, 120 bp, Artificial Sequence
  ENSG00000255398_0 (sequence is synthesized)
accatacagacacacgccactttgctggagcattcactaggcgaggcgctccatcggactcactagctgcactcatgaatcggcaccatctgcaggatcactttctggaaatagacaaga

SEQ ID NO: 783108 - DNA, 120 bp, Artificial Sequence
  ENSG00000255398_1 (sequence is synthesized)
agaactgctgtgtgttccgagatgacttcattgccaaggtgttgccgccggtgttggggctggagtttatctttgggcttctgggcaatggccttgccctgtggattttctgtttccacc

SEQ ID NO: 783109 - DNA, 120 bp, Artificial Sequence
  ENSG00000255398_2 (sequence is synthesized)
tcaagtcctggaaatccagccggattttcctgttcaacctggcagtagctgactttctactgatcatctgcctgccgttcgtgatggactactatgtgcggcgttcagactggaagtttg

SEQ ID NO: 783110 - DNA, 120 bp, Artificial Sequence
  ENSG00000255398_3 (sequence is synthesized)
gggacatcccttgccggctggtgctcttcatgtttgccatgaaccgccagggcagcatcatattcctcacggtggtggcggtagacaggtatttccgggtggtccatccccaccacgccc

SEQ ID NO: 783111 - DNA, 120 bp, Artificial Sequence
  ENSG00000255398_4 (sequence is synthesized)
tgaacaagatctccaattggacagcagccatcatctcttgccttctgtggggcatcactgttggcctaacagtccacctcctgaagaagaagttgctgatccagaatggcactgcaaatg

SEQ ID NO: 783112 - DNA, 120 bp, Artificial Sequence
  ENSG00000255398_5 (sequence is synthesized)
tgtgcatcagcttcagcatctgccataccttccggtggcacgaagctatgttcctcctggagttcttcctgcccctgggcatcatcctgttctgctcagccagaattatctggagcctgc

SEQ ID NO: 783113 - DNA, 120 bp, Artificial Sequence
  ENSG00000255398_6 (sequence is synthesized)
ggcagagacaaatggaccggcatgccaagatcaagagagccatcaccttcatcatggtggtggccatcgtctttgtcatctgcttccttcccagcgtggttgtgcggatccacatcttct

SEQ ID NO: 783114 - DNA, 120 bp, Artificial Sequence; identical to SEQ ID NO: 648761
  ENSG00000255398_7 (sequence is synthesized)

SEQ ID NO: 783115 - DNA, 120 bp, Artificial Sequence
  ENSG00000255398_8 (sequence is synthesized)
tcccaacttcttctccactttgatcaaccgctgcctccagaggaagataacaggtgagccagataataaccgcagcacgagcgtcgagctcacaggggaccccaacaaaaccagaggcgc

SEQ ID NO: 783116 - DNA, 120 bp, Artificial Sequence
  ENSG00000255398_9 (sequence is synthesized)
tccagaggcgttaatcgccaactccggtgagccatggagcccctcttatctgggcccaacctcaaataaccattccaagaagggacattgtcaccaagaaccagcatctctggagaaaca

SEQ ID NO: 783117 - DNA, 120 bp, Artificial Sequence
  ENSG00000255398_10 (sequence is synthesized)
gttgggctgttgcatcgagtaatgtcactggactcggcctaagatttcctggaacttccagattcagagaatctgatttagggaaactgtggcagatgagtgggagactggttgcaaggt

SEQ ID NO: 783118 - DNA, 120 bp, Artificial Sequence
  ENSG00000255398_11 (sequence is synthesized)
gtgaccgcaggaatcctggaggaacagagagtaaagcttctaggcatctgaaacttgcttcatctctgacgctcgcaggactgaagatgggcaaattgtaggcgtttctgctgagcagag

SEQ ID NO: 783119 - DNA, 120 bp, Artificial Sequence
  ENSG00000255398_12 (sequence is synthesized)
ttggagccagagatctacttgtgacttgttggccttcttcccacatctgcctcagactggagggggctcagctcctggggtgatatctagcctgcttgtgagctctagcagggataagga

SEQ ID NO: 783120 - DNA, 120 bp, Artificial Sequence
  ENSG00000255398_13 (sequence is synthesized)
gagctgagattggagggaattgtgttgttcctggaggaagcccaggcatcattaaacaagccagtaggtcacctggcttccgtggaccaattcatctttcagacaatctttagcagaaat

SEQ ID NO: 783121 - DNA, 120 bp, Artificial Sequence
  ENSG00000255398_14 (sequence is synthesized)
ggactcagggaagagactcacatgctttggttagtatctgtgtttccggtgggtgtaataggggattagccccagaagggactgagctaaacagtgttattatgggaaaggaaatggcat

SEQ ID NO: 783122 - DNA, 120 bp, Artificial Sequence
  ENSG00000255398_15 (sequence is synthesized)
tgctgctttcaaccagcgactaatgcaatccattcctctcttgtttatagtaatctaagggttgaacagttaaaacggcttcaggatagaaagctgtttcccacctgtttgcttttacca

SEQ ID NO: 783123 - DNA, 120 bp, Artificial Sequence
  ENSG00000255398_16 (sequence is synthesized)
ttaaaagggaaacgtgcctctgccccacgggtagaggggtgcacgttcctcctggttccttcgcttgtgtttctgtacttaccaaaaatctaccatttcaataaattttgataggagaca

SEQ ID NO: 783124 - DNA, 120 bp, Artificial Sequence
  ENSG00000255408_0 (sequence is synthesized)
attacgtattcagatactgctttgcttcatcctctctaaaatttaacaccgaggagtttaagaaatgaagataaggaactcgaattatttttaaactttggatcaatgtaaaggcaatct

SEQ ID NO: 783125 - DNA, 120 bp, Artificial Sequence
  ENSG00000255408_1 (sequence is synthesized)
aatatttggaaaatacttgcaatgttgttctcctggcgagaagatcctggagcccagtgcctgctgctttctcttctgctcctcgcagcctcggaggtggggagcggccagctccactac

SEQ ID NO: 783126 - DNA, 120 bp, Artificial Sequence
  ENSG00000255408_2 (sequence is synthesized)
tccgtctctgaggaggccaagcatggcaccttcgtgggccgcatcgcgcaggacctggggctggagctggcggagctggtgccgcgcctgttccgggtggcgtccaaaagacacggggac

SEQ ID NO: 783127 - DNA, 120 bp, Artificial Sequence
  ENSG00000255408_3 (sequence is synthesized)
ggcattttgtttgtgaattctcggatagaccgcgaggaactgtgcgggcggagcgcggagtgcagcatccacctggaggtgatcgtggacaggccgctgcaggttttccatgtggaggtg

SEQ ID NO: 783128 - DNA, 120 bp, Artificial Sequence
  ENSG00000255408_4 (sequence is synthesized)
ctgcaggttttccatgtggaggtggaagtgaaggacattaatgacaacgcgccagtttttccaatggctgtaaagaatctgtttatttccgaatcccgacagcctggctctcggttttcg

SEQ ID NO: 783129 - DNA, 120 bp, Artificial Sequence
  ENSG00000255408_5 (sequence is synthesized)
ctagagggcgcatcagatgcagatatcggaacaaattcgttgttgacttacagtcttgattccactgaatattttaccttggacgttaaaagaaatgatgaggaaattaaatcccttgga

SEQ ID NO: 783130 - DNA, 120 bp, Artificial Sequence
  ENSG00000255408_6 (sequence is synthesized)
ctcgtgttgaaaaaaaatttaaatcgagaggacactcctaagcattatttactaataacagcaattgatggtgggaaaccagagctcactggcacgactcaactaaagatcactgtttta

SEQ ID NO: 783131 - DNA, 120 bp, Artificial Sequence
  ENSG00000255408_7 (sequence is synthesized)
gatgtaaacgacaacgccccagcgtttgagaggacgatctataaagtcagattactcgaaaatgcaccaaatggtaccctagtggtgaccgttaacgccaccgatttggatgaaggagta

SEQ ID NO: 783132 - DNA, 120 bp, Artificial Sequence
  ENSG00000255408_8 (sequence is synthesized)
aataaggatatcgcgtattctttcaatacggacatgtcagcagatattctgtcaaaattccatttagatccagtcaatggacaaatcagtgtaaagggtaacatagatttcgaggaaagt

SEQ ID NO: 783133 - DNA, 120 bp, Artificial Sequence
  ENSG00000255408_9 (sequence is synthesized)
aagtcatatgaaatccaggtagaagccacggataaaggaaatcccccaatgtcagatcactgcacagttctactcgaaattgtggacatcaatgataatgtacctgagttagttattcaa

SEQ ID NO: 783134 - DNA, 120 bp, Artificial Sequence
  ENSG00000255408_10 (sequence is synthesized)
tcactatctttacctgtattagaagactctccacttagcacagtcatcgctctgatcagcgtgtccgaccgcgactcaggagtcaatggacaggtcacctgctcgctgacgccccacgtc

SEQ ID NO: 783135 - DNA, 120 bp, Artificial Sequence
  ENSG00000255408_11 (sequence is synthesized)
cccttcaagctggtgtccaccttcaagaattactactcattggtgctggacagccctctggaccgcgagagcgtgtcggcctatgagctggtggtgactgctcgggacgggggctcgcct

SEQ ID NO: 783136 - DNA, 120 bp, Artificial Sequence
  ENSG00000255408_12 (sequence is synthesized)
tcactgtgggccacggccagcgtgtccgtggaggtggccgacgtgaacgacaatgcgccggcattctcgcagtccgagtacacggtgttcgtgaaggagaacaacccgccgggctgccac

SEQ ID NO: 783137 - DNA, 120 bp, Artificial Sequence
  ENSG00000255408_13 (sequence is synthesized)
atcttcacggtgtctgcgcgggacgcggacgcgcaggagaacgccctggtgtcctactcgctggtggaacggcgggtgggggagcgcgcgctgtcgagctacgtgtcggtacacgcggag

SEQ ID NO: 783138 - DNA, 120 bp, Artificial Sequence
  ENSG00000255408_14 (sequence is synthesized)
ggagagcggcaaggtgtacgcgctgcagccgctggaccacgaggagctagagctgctgcagttccaggtgagtgcgcgcgatgcgggcgtgccgcctctgggcagcaacgtgacgctgca

SEQ ID NO: 783139 - DNA, 120 bp, Artificial Sequence
  ENSG00000255408_15 (sequence is synthesized)
ttcgtgctggacgagaacgacaacgcgccggcactgctgatgcctcgggtgggtggcatcggtggcgcagtgagcgagctggtgccgcggtcagtgggtgcgggccacgtggtagcgaag

SEQ ID NO: 783140 - DNA, 120 bp, Artificial Sequence
  ENSG00000255408_16 (sequence is synthesized)
gtgcgcgcagtggatgcagactcaggctacaacgcgtggctttcgtatgagctgcagcctgggaccggcggtgcgcgcatcccgtttcgcgtggggctgtacacgggagagatcagcacg

SEQ ID NO: 783141 - DNA, 120 bp, Artificial Sequence
  ENSG00000255408_17 (sequence is synthesized)
acccgtgccctggacgaggtggacgccccgcgccatcgcctactggtgctggtgaaggaccacggtgaaccctcattgaccgccacggccactgtgctggtgtcgctggtggagagtggc

SEQ ID NO: 783142 - DNA, 120 bp, Artificial Sequence
  ENSG00000255408_18 (sequence is synthesized)
caggcacccaaggcctcgtcccaggcgtccgctggcgccacgggcccggaagctgcactggtggatgtcaacgtgtacttgatcgtcgccatctgcgcggtgtccagtctgttggtgctc

SEQ ID NO: 783143 - DNA, 120 bp, Artificial Sequence
  ENSG00000255408_19 (sequence is synthesized)
acactgctgctatatactgctctgcggtgctccgcgccgccaaccgaaggcgactgtgggccgggcaagcccacgctggtgtgctccagcgcggtggggagctggtcatactcgcagcag

SEQ ID NO: 783144 - DNA, 120 bp, Artificial Sequence
  ENSG00000255408_20 (sequence is synthesized)
aggcagcagagggtgtgctctggagaggggttgcccaagaccgacctcatggcttttagccctagccttcctccttgtccaattagccgggatagagaggagaaacaggatgtggacgtt

SEQ ID NO: 783145 - DNA, 120 bp, Artificial Sequence
  ENSG00000255408_21 (sequence is synthesized)
gatctctcagccaaaccacgacagcccaaccctgactggcgttactctgcctccctgagagcaggcatgcacagctctgtgcacctagaggaggctggcattctacgggctggtccagga

SEQ ID NO: 783146 - DNA, 120 bp, Artificial Sequence; identical to SEQ ID NO: 772619
  ENSG00000255408_22 (sequence is synthesized)

SEQ ID NO: 783147 - DNA, 120 bp, Artificial Sequence; identical to SEQ ID NO: 80633
  ENSG00000255408_23 (sequence is synthesized)

SEQ ID NO: 783148 - DNA, 120 bp, Artificial Sequence; identical to SEQ ID NO: 80634
  ENSG00000255408_24 (sequence is synthesized)

SEQ ID NO: 783149 - DNA, 120 bp, Artificial Sequence; identical to SEQ ID NO: 80635
  ENSG00000255408_25 (sequence is synthesized)

SEQ ID NO: 783150 - DNA, 120 bp, Artificial Sequence; identical to SEQ ID NO: 80636
  ENSG00000255408_26 (sequence is synthesized)

SEQ ID NO: 783151 - DNA, 120 bp, Artificial Sequence; identical to SEQ ID NO: 80637
  ENSG00000255408_27 (sequence is synthesized)

SEQ ID NO: 783152 - DNA, 120 bp, Artificial Sequence; identical to SEQ ID NO: 80638
  ENSG00000255408_28 (sequence is synthesized)

SEQ ID NO: 783153 - DNA, 120 bp, Artificial Sequence; identical to SEQ ID NO: 80639
  ENSG00000255408_29 (sequence is synthesized)

SEQ ID NO: 783154 - DNA, 120 bp, Artificial Sequence; identical to SEQ ID NO: 80640
  ENSG00000255408_30 (sequence is synthesized)

SEQ ID NO: 783155 - DNA, 120 bp, Artificial Sequence; identical to SEQ ID NO: 80641
  ENSG00000255408_31 (sequence is synthesized)

SEQ ID NO: 783156 - DNA, 120 bp, Artificial Sequence; identical to SEQ ID NO: 80642
  ENSG00000255408_32 (sequence is synthesized)

SEQ ID NO: 783157 - DNA, 120 bp, Artificial Sequence; identical to SEQ ID NO: 80643
  ENSG00000255408_33 (sequence is synthesized)

SEQ ID NO: 783158 - DNA, 120 bp, Artificial Sequence; identical to SEQ ID NO: 80644
  ENSG00000255408_34 (sequence is synthesized)

SEQ ID NO: 783159 - DNA, 120 bp, Artificial Sequence; identical to SEQ ID NO: 80645
  ENSG00000255408_35 (sequence is synthesized)

SEQ ID NO: 783160 - DNA, 120 bp, Artificial Sequence; identical to SEQ ID NO: 80646
  ENSG00000255408_36 (sequence is synthesized)

SEQ ID NO: 783161 - DNA, 120 bp, Artificial Sequence; identical to SEQ ID NO: 80647
  ENSG00000255408_37 (sequence is synthesized)

SEQ ID NO: 783162 - DNA, 120 bp, Artificial Sequence; identical to SEQ ID NO: 80648
  ENSG00000255408_38 (sequence is synthesized)

SEQ ID NO: 783163 - DNA, 120 bp, Artificial Sequence; identical to SEQ ID NO: 80649
  ENSG00000255408_39 (sequence is synthesized)

SEQ ID NO: 783164 - DNA, 120 bp, Artificial Sequence; identical to SEQ ID NO: 80650
  ENSG00000255408_40 (sequence is synthesized)

SEQ ID NO: 783165 - DNA, 120 bp, Artificial Sequence; identical to SEQ ID NO: 80651
  ENSG00000255408_41 (sequence is synthesized)

SEQ ID NO: 783166 - DNA, 120 bp, Artificial Sequence; identical to SEQ ID NO: 80652
  ENSG00000255408_42 (sequence is synthesized)

SEQ ID NO: 783167 - DNA, 120 bp, Artificial Sequence; identical to SEQ ID NO: 80653
  ENSG00000255408_43 (sequence is synthesized)

SEQ ID NO: 783168 - DNA, 120 bp, Artificial Sequence; identical to SEQ ID NO: 80654
  ENSG00000255408_44 (sequence is synthesized)

SEQ ID NO: 783169 - DNA, 120 bp, Artificial Sequence
  ENSG00000255408_45 (sequence is synthesized)
ctcagccaaagtgagtaatttttatttattctttccaaaatgtctttgtttttcattcctcaatgtttccactcctctggaaatacattaatagttaagtatgaattatgtgattcataa

SEQ ID NO: 783170 - DNA, 120 bp, Artificial Sequence
  ENSG00000255408_46 (sequence is synthesized)
ttagacttttccagttttgtggttttgtggttaaaacggtaagatttttgttgctaatttttgaaccaaatcagcagtaagttatgatatccacacttgtaattttgttttgttattagg

SEQ ID NO: 783171 - DNA, 120 bp, Artificial Sequence
  ENSG00000255408_47 (sequence is synthesized)
tgcagtagtagaattattttattgctaaatgcctgggtataagacaaatattttttcttagatgaattgcattatttagagaatctgacttcgacttgttttatacttatccctatacaa

SEQ ID NO: 783172 - DNA, 120 bp, Artificial Sequence
  ENSG00000255408_48 (sequence is synthesized)
tgcttcttcaatatcttttgccacttttcatttggacttcctactacctgttagtacaaatgttacttgctcattttatgagttcacctaatgcttataactccctattgattatgcttt

SEQ ID NO: 783173 - DNA, 120 bp, Artificial Sequence
  ENSG00000255408_49 (sequence is synthesized)
tccaccttcagtttcaaaaattagatcattacacctgttgtcttttatggaacctcttttattctcttattcacttgtttggagtctcaatccttattttttacttgaatatgattcatt

SEQ ID NO: 783174 - DNA, 120 bp, Artificial Sequence
  ENSG00000255408_50 (sequence is synthesized)
ttaggccttgtgctctaatttggcaataccgtttattgtttcttgatttcccagttgggaaaaaaatcgagaataacaattgcatttagaattgcatctttgttcatctttagtttatca

SEQ ID NO: 783175 - DNA, 120 bp, Artificial Sequence
  ENSG00000255408_51 (sequence is synthesized)
agaatgttttaaatcttgttaaaaataattttcaatctgaacaatatcttgaaaataattatggtatctaattttaaaactatccctactagcaaaactttttattcattagtgtctttt

SEQ ID NO: 783176 - DNA, 120 bp, Artificial Sequence
  ENSG00000255408_52 (sequence is synthesized)
tgtcttttgcataccatactaaggatgctaatatgaaataagtttgataagccaatgttataatgttattactggttaacttctctgaatagcatcctgcctattaatgtgtgccatgca

SEQ ID NO: 783177 - DNA, 120 bp, Artificial Sequence
  ENSG00000255408_53 (sequence is synthesized)
ataagtagaaaactccaaataaccagaaccaaatgaaattgaaggtagacttttttctaatcactacccctacatatttggttatctcctctagcaattagttggactcccatttaagtt

SEQ ID NO: 783178 - DNA, 120 bp, Artificial Sequence
  ENSG00000255408_54 (sequence is synthesized)
tccctaccactggagagaaatagtaaccaactgaaacctggttaatactcattgacagtgtgggaggtctaacacgtaaaatagatatttttcttgactcctctccttcccctcacttcc

SEQ ID NO: 783179 - DNA, 120 bp, Artificial Sequence
  ENSG00000255408_55 (sequence is synthesized)
attttctttatttccttttttggcactatcctttgttgctcccttgtccatgaagtagtagccatagtgtgtccatctcaggtcagtattttaaaaatttagttctgttatcagcttctt

SEQ ID NO: 783180 - DNA, 120 bp, Artificial Sequence
  ENSG00000255408_56 (sequence is synthesized)
gaatataatagagtcagccaaagtacttgtcttcccagatatggaacttcaatcttcaaatccagcttgcctcttgaaactattgtctaacaagactcttggcaaagacattttgaagac

SEQ ID NO: 783181 - DNA, 120 bp, Artificial Sequence; identical to SEQ ID NO: 746158
  ENSG00000255408_57 (sequence is synthesized)

SEQ ID NO: 783182 - DNA, 120 bp, Artificial Sequence; identical to SEQ ID NO: 746159
  ENSG00000255408_58 (sequence is synthesized)

SEQ ID NO: 783183 - DNA, 120 bp, Artificial Sequence; identical to SEQ ID NO: 746160
  ENSG00000255408_59 (sequence is synthesized)

SEQ ID NO: 783184 - DNA, 120 bp, Artificial Sequence; identical to SEQ ID NO: 746161
  ENSG00000255408_60 (sequence is synthesized)

SEQ ID NO: 783185 - DNA, 120 bp, Artificial Sequence
  ENSG00000255423_0 (sequence is synthesized)
gaaaggcagggaggggaggttgtcccctgctgagaaccattggtttaaggttaatctggctctgctttcatagactactctgttacccaggctggagtgcggtgatgagtgatcatagct

SEQ ID NO: 783186 - DNA, 120 bp, Artificial Sequence
  ENSG00000255423_1 (sequence is synthesized)
ggccttccaaagtgctgagattacagatgtgaaccaccacacccagcccagtcaatttgtttttagaatgttcccaagaatatagttatgttgctaaataagatactaaaataatcccat

SEQ ID NO: 783187 - DNA, 120 bp, Artificial Sequence
  ENSG00000255423_2 (sequence is synthesized)
gttatgttgctaaataagatactaaaataatcccatactatatttcttgacagaaaaactattaaaatgtatacatgataaaaatttcttttatgaagcaaaatatgttttgttttgctc

SEQ ID NO: 783188 - DNA, 120 bp, Artificial Sequence
  ENSG00000255423_3 (sequence is synthesized)
atgaacgtgaggtattttggaaaaatggtaaagaagtgcagagtcaagtcatagcgactaataatgggttattttcttaaattgtatgcttatgttaattctcacagtctttttgtttgg

SEQ ID NO: 783189 - DNA, 120 bp, Artificial Sequence
  ENSG00000255423_4 (sequence is synthesized)
gtctgtgacagatcttacaaaagatcttttagacctatgattcttaacaaaattaaagaattaagtcggaaccaattttccacaatgtctcatctaagaaaggactcacagcccagcagc

SEQ ID NO: 783190 - DNA, 120 bp, Artificial Sequence
  ENSG00000255423_5 (sequence is synthesized)
ccaggagatgacgcaatggacaggagtgggctccctgaccttcaaggaagatttgagctatctgggaaaaacagacagtatccactggatgcattggaaccccaacccagcattggggat

SEQ ID NO: 783191 - DNA, 120 bp, Artificial Sequence
  ENSG00000255423_6 (sequence is synthesized)
attactgagtgttggtgtgagcaagaggtctaatactgtggttgggaatgagaacgaggaaaggggtactccttatgctagcagattcaaagatatgcctaactttattgcccttgagaa

SEQ ID NO: 783192 - DNA, 120 bp, Artificial Sequence
  ENSG00000255423_7 (sequence is synthesized)
gtcatcagttctccgccactgctgtgaccttttgataggcattgcggctggatcaagtgataagatttgcaccagcagtctccaagttcagagacgattcaaggcaatgatggcatctat

SEQ ID NO: 783193 - DNA, 120 bp, Artificial Sequence
  ENSG00000255423_8 (sequence is synthesized)
tggaagactttcacatggtgagagtgctgatctgctaatcagctgcaatgcagaatcagccataggttggatcagctcaagaccatgggttggagaattaatgttcacacttctatttgg

SEQ ID NO: 783194 - DNA, 120 bp, Artificial Sequence
  ENSG00000255423_9 (sequence is synthesized)
agactttgaatcccctctacacaagctacgcaagtcaagttagttgccaagaaagcacagatgacaacctattaatgctgtgagaatgtttctagatcagtgcatggatggctccattgc

SEQ ID NO: 783195 - DNA, 120 bp, Artificial Sequence
  ENSG00000255423_10 (sequence is synthesized)
tctacgggccattgtgtctgagatcccagtctttgaggagaaaaaaaacaatggttaaaaaggcattggggaaatattttgagtttgggggtgtactttgccaccccattattggggagc

SEQ ID NO: 783196 - DNA, 120 bp, Artificial Sequence
  ENSG00000255423_11 (sequence is synthesized)
tgtcaccacgaatgttcccaaacttagcaacagcggcaaactactgggccaagatgagcaaccccacatttttgggatttaaagctcctgatgttataccaggatcaaccatcacactcc

SEQ ID NO: 783197 - DNA, 120 bp, Artificial Sequence
  ENSG00000255423_12 (sequence is synthesized)
ctttgcttcaaatggcatctaccccgtaagatcttgaggggggagtgttgggtggaatcatagatccatgcactcctaacatgaactaattctcattatttaaaaaaaaaaaaaaaaaaa

SEQ ID NO: 783198 - DNA, 120 bp, Artificial Sequence
  ENSG00000255501_0 (sequence is synthesized)
attgcaagtgtaacacacattgcaagtgccaacgtgaggagccatggctgaccaactcttgcgtaaaaagagaagaatttttatccattcagtgggtgcaggcacaataaatgccttgct

SEQ ID NO: 783199 - DNA, 120 bp, Artificial Sequence
  ENSG00000255501_1 (sequence is synthesized)
ggattgcctattagaggatgaagttattagccaggaagacatgaacaaagtgagagatgaaaatgacactgtcatggataaggctcgagtcttgattgaccttgttactggaaaaggacc

SEQ ID NO: 783200 - DNA, 120 bp, Artificial Sequence
  ENSG00000255501_2 (sequence is synthesized)
tcagagacttcccagagcttcttccaagggagaagatattctcgtgaaagaaaaaaacaaaacaaaacaacagtgcttttttcaaacctgattaatttcatcaatttccaataaatcttt

SEQ ID NO: 783201 - DNA, 120 bp, Artificial Sequence
  ENSG00000255501_3 (sequence is synthesized)
cattctctcatattactttcttcttattctttctctcctcataccaacagaggataattcatcaataataatgaaggtcatgatgattgtaatgtaattaagaaagtccctccctttccc

SEQ ID NO: 783202 - DNA, 120 bp, Artificial Sequence
  ENSG00000255501_4 (sequence is synthesized)
ttcctttctgtttagttcctttgcaatcctgtagagacatgtacagcttactttggtgcttttagcactgagagtctgctgtgatgggaataaaatgaagtcccagctcagaattttaaa

SEQ ID NO: 783203 - DNA, 120 bp, Artificial Sequence
  ENSG00000255501_5 (sequence is synthesized)
aaaacacctaagtaaaaccattcttgaaaggacacatgaacaaattgaaccagtcagaggggaaagatcaggatgatgaagtgactcagaaatcagattccattatgacattagtctctg

SEQ ID NO: 783204 - DNA, 120 bp, Artificial Sequence
  ENSG00000255501_6 (sequence is synthesized)
cttgttcctccttccagtggattgcatatccagataatgttgaacttgggagccttcatgctttgatcagtaaaatcttgaatgaatggaagttgacataagctaaaggaatcatcttac

SEQ ID NO: 783205 - DNA, 120 bp, Artificial Sequence
  ENSG00000255501_7 (sequence is synthesized)
accatgacaaaatggagtaaggctggatccccaaatctccaatgtaacaagcctggaacacttatgtgtagaatgctcagactattagttgagagaaaaataaaattccattttgttcaa

SEQ ID NO: 783206 - DNA, 120 bp, Artificial Sequence
  ENSG00000255501_8 (sequence is synthesized)
agtttcccaggtcactcagtgagcatatgtaggtaatgctagaatcagaaggaagtacgtggagtaaatgcaaaggtataagaccgttccttgggattactgtacttgtggagagaaatg

SEQ ID NO: 783207 - DNA, 120 bp, Artificial Sequence
  ENSG00000255501_9 (sequence is synthesized)
tttaaatgattgttaccctgttggtaaattgagagggaaattgtgtcatgttcattatttgaggaatctttgtgcttccaacagaccaactcttgcgtaaaaagagaagaatttttatcc

SEQ ID NO: 783208 - DNA, 120 bp, Artificial Sequence
  ENSG00000255501_10 (sequence is synthesized)
agaggcagggtgggaagatgcccagacttgcacagcgtttttgaaggaacagataaaggccaggaagaatctgggatcctactgaccaactcttgcgtaaaaagagaagaatttttatcc

SEQ ID NO: 783209 - DNA, 80 bp, Artificial Sequence
  ENSG00000255501_11 (sequence is synthesized)
ggtccactaattcttttaaactctgtaaggcatttttttttcctgtttaaatatatatcgacattagatagctttggctg

SEQ ID NO: 783210 - DNA, 120 bp, Artificial Sequence
  ENSG00000255501_12 (sequence is synthesized)
tcctgtttaaatatatatcgacattagatagctttggctgtggcaaagaggacctgctattgtaggtctgtgggctggcagtgactgggcggggctcatctgagattggcggggctcggc

SEQ ID NO: 783211 - DNA, 120 bp, Artificial Sequence
  ENSG00000255501_13 (sequence is synthesized)
tctgtgccatgtactgtctcattccggaacatggacggaaggcggggtcgctgttgggcatgctgttctcaggagggcaagcaaagctctggggcactgcttctgaaagcctctgctcac

SEQ ID NO: 783212 - DNA, 120 bp, Artificial Sequence
  ENSG00000255501_14 (sequence is synthesized)
aatcggcagctgacacctgcagacaatctccactgttgcaagatgtccctcttcatggagagctgcctgaagctgagaagggtgcgacggacctgaaggctgcacagcgccgggtcttac

SEQ ID NO: 783213 - DNA, 120 bp, Artificial Sequence
  ENSG00000255501_15 (sequence is synthesized)
ccaaggctcaaggtgaccgctgcctggtttctgctggtgtttattcaaagcccaagggctctccagtcagcaagtggtgaatctagtcagacatgtgtcctacgcttcagggcaatgagc

SEQ ID NO: 783214 - DNA, 120 bp, Artificial Sequence
  ENSG00000255501_16 (sequence is synthesized)
ggataagaggatccagggtaaaactccacacagatgtaccacacctaacctcctctgcatagacccctacttccaaccaactcttgcgtaaaaagagaagaatttttatccattcagtgg

SEQ ID NO: 783215 - DNA, 120 bp, Artificial Sequence
  ENSG00000255524_0 (sequence is synthesized)
gaggcagaatagaatctaaacagtgtagaatctaaacagaatagaatctaaacatgcattgatttgacaagtgtttattgagcacctgccatgaacaaggccttgtgtgattaaataggg

SEQ ID NO: 783216 - DNA, 68 bp, Artificial Sequence
  ENSG00000255524_1 (sequence is synthesized)
cttttctgaagcccctatgcactttttttcttaattgtctaataggttggcactcatcatgagcccct

SEQ ID NO: 783217 - DNA, 70 bp, Artificial Sequence
  ENSG00000255524_2 (sequence is synthesized)
ccagctcaccaaggagctgcagcagcagtctggctgtctatcgtcatcgtgagactgactttggtgtagg

SEQ ID NO: 783218 - DNA, 70 bp, Artificial Sequence
  ENSG00000255524_3 (sequence is synthesized)
tggataatttgataattatcattattgggtttctgagatgttacacatttaacattctcttctgcacaag

SEQ ID NO: 783219 - DNA, 78 bp, Artificial Sequence
  ENSG00000255524_4 (sequence is synthesized)
ttgataattatcattattgggtttctgagatgttacacatttaacattctcttctgcacaagttgcctttgtgtgtct

SEQ ID NO: 783220 - DNA, 77 bp, Artificial Sequence; identical to SEQ ID NO: 711856
  ENSG00000255524_5 (sequence is synthesized)

SEQ ID NO: 783221 - DNA, 77 bp, Artificial Sequence; identical to SEQ ID NO: 711857
  ENSG00000255524_6 (sequence is synthesized)

SEQ ID NO: 783222 - DNA, 120 bp, Artificial Sequence; identical to SEQ ID NO: 711858
  ENSG00000255524_7 (sequence is synthesized)

SEQ ID NO: 783223 - DNA, 120 bp, Artificial Sequence; identical to SEQ ID NO: 711859
  ENSG00000255524_8 (sequence is synthesized)

SEQ ID NO: 783224 - DNA, 73 bp, Artificial Sequence
  ENSG00000255524_9 (sequence is synthesized)
ggcggcgctctttgcaactgggtaagtttgtttgttttccttgcttttgaacatagtctgccaggtcaggaca

SEQ ID NO: 783225 - DNA, 75 bp, Artificial Sequence
  ENSG00000255524_10 (sequence is synthesized)
gtcccatccctgttggtaaccgtgttgttcaaagtgtcagaggttccatatttgtaatagcaaatgggccctgac

SEQ ID NO: 783226 - DNA, 120 bp, Artificial Sequence
  ENSG00000255529_0 (sequence is synthesized)
gttcttccgggaaaatggcgactcccgctcgtgccccggagtcaccgccgtccgcggatccggcgctagtagcggggcctgccgaggaagccgagtgcccgccgccgcgccagcctcagc

SEQ ID NO: 783227 - DNA, 120 bp, Artificial Sequence
  ENSG00000255529_1 (sequence is synthesized)
ccgcgcagaatgtgctcgctgccccgcggcttcgagccccaagctcccgaggacttggcgcagcggagtttggtggagctgcgggaaatgttgaagcgccaggagagacttttgcgcaac

SEQ ID NO: 783228 - DNA, 120 bp, Artificial Sequence
  ENSG00000255529_2 (sequence is synthesized)
gaaaaattcatttgcaaattgcccgacaaaggtaaaaagatctttgactcttttgccaaactgaaagctgccattgcagaatgtgaagaagttagaagaaaaagtgaactgtttaaccct

SEQ ID NO: 783229 - DNA, 120 bp, Artificial Sequence
  ENSG00000255529_3 (sequence is synthesized)
gttagtttagactgtaagctaaggcaaaaagcaattgcagaagttgatgtgggtacagataaggcccagaattctgacccgatacttgatacttcatcactagttcctggatgttcctct

SEQ ID NO: 783230 - DNA, 120 bp, Artificial Sequence
  ENSG00000255529_4 (sequence is synthesized)
gtagataacatcaagtcatctcaaacctcacaaaaccagggacttggacgtcctactcttgaaggtgatgaagagacttcagaggttgagtacacagtgaataagggcccagcttccagc

SEQ ID NO: 783231 - DNA, 120 bp, Artificial Sequence
  ENSG00000255529_5 (sequence is synthesized)
aatagagacagggtaccaccttcatctgaagctagtgagcatcacccgcggcatcgtgtttcaagtcaagcggaagatacttccagcagctttgacaacctgtttattgacaggttacag

SEQ ID NO: 783232 - DNA, 120 bp, Artificial Sequence
  ENSG00000255529_6 (sequence is synthesized)
aggatcaccattgcggaccaaggtgaacaacagtcagaagaaaacgcaagtactaagaacttgacaggcctttccagtgggactgagaagaaacctcattacatggaagtgctagaaatg

SEQ ID NO: 783233 - DNA, 120 bp, Artificial Sequence
  ENSG00000255529_7 (sequence is synthesized)
cgagccaaaaacccagtgccccagctgcgtaaatttaaaaccaatgtgttaccttttcgacaaaatgattcatctagtcattgccagaagagtgggtctcctatttcctcagaagagcgg

SEQ ID NO: 783234 - DNA, 120 bp, Artificial Sequence
  ENSG00000255529_8 (sequence is synthesized)
cggcgcagggataagcagcatcttgatgacatcacagcagctcggcttctaccacttcaccatatgcccacgcagctgctctccatagaagaatccttggcacttcagaaacagcagaaa

SEQ ID NO: 783235 - DNA, 120 bp, Artificial Sequence
  ENSG00000255529_9 (sequence is synthesized)
cagaattatgaggagatgcaagcaaagctcgcagcgcaaaaattagctgaaagactgaatattaaaatgcggagttataatccagaaggggagtcttcagggagataccgagaagtaagg

SEQ ID NO: 783236 - DNA, 120 bp, Artificial Sequence
  ENSG00000255529_10 (sequence is synthesized)
gatgaagatgacgattggtcctctgatgaattctgaagataatctcctaaatcactgacgttgagatgtcatcatcttacatcagactttctaactagtatcaagatcagtgtcagatat

SEQ ID NO: 783237 - DNA, 120 bp, Artificial Sequence
  ENSG00000255529_11 (sequence is synthesized)
tgttgagggaagtaattttataaagttacacaaaggtagttataaaaaaagcccagtttgtctttcagaaggtgactttcatgtgcttgaaaagtttaatatttgaatattgtgtttaac

SEQ ID NO: 783238 - DNA, 120 bp, Artificial Sequence
  ENSG00000255529_12 (sequence is synthesized)
cacatggtattaaaattttgcaatatattgtgtattggtctgatattttagtatatagtagaacatactttttttttctttaagccaaatgaaaagaggtaactttgcttttttcctttt

SEQ ID NO: 783239 - DNA, 120 bp, Artificial Sequence
  ENSG00000255529_13 (sequence is synthesized)
tcttacctatcaaatagcatttattacatgtctttcagtgaaatacttagttgttccaggcacctaaaatcaattaggaagacatagttcccttcttttttgggtaatgaagggagcagt

SEQ ID NO: 783240 - DNA, 120 bp, Artificial Sequence
  ENSG00000255529_14 (sequence is synthesized)
ctaaagaattgtatgcatgtttgcatggggttattgagacattggatgtgaaatacctaggaagacatgtatggagaatgcttaacaaatgctcttctcctttttctgtcttcccttagg

SEQ ID NO: 783241 - DNA, 120 bp, Artificial Sequence
  ENSG00000255529_15 (sequence is synthesized)
aagaacgttatctctcttctgattaggaaggacttcccttttgagtagatgctggaaagtggaggttttttttgttggtttgtttgtttggttttgtgtttttttttgagatggggtctt

SEQ ID NO: 783242 - DNA, 120 bp, Artificial Sequence
  ENSG00000255529_16 (sequence is synthesized)
agtggcaggatctcggctcactgcaatctaggtggaggtctttttaaataacctcatgttacttcaggcaaatctggtacaggagaagcccaagctaactgagctgggtgaaggcttgtg

SEQ ID NO: 783243 - DNA, 120 bp, Artificial Sequence
  ENSG00000255529_17 (sequence is synthesized)
cttgagttccttgctgtcacagatgataggttcatgtacacaacattaatgtttgataaggaaagcattttttttttgttaaaattgaattgtcagtactttacttttttccccccaaat

SEQ ID NO: 783244 - DNA, 120 bp, Artificial Sequence
  ENSG00000255529_18 (sequence is synthesized)
aggtatatatagactgcagaagcttcagtcccatatataaacgttcatgtcattttagaggattatatggttgtctccagagaaattaacttacattatcaaaaaattctttgtctaata

SEQ ID NO: 783245 - DNA, 120 bp, Artificial Sequence
  ENSG00000255529_19 (sequence is synthesized)
tattggagtctttaaaagtgttgaagaataaaatattaattagaacaacttcaaatgctaaggtgatgttttaccgggacttaattaaatacaactttttcctttcgaaaaagactgttc

SEQ ID NO: 783246 - DNA, 120 bp, Artificial Sequence
  ENSG00000255529_20 (sequence is synthesized)
acatttgcttccaggtgtaattattgctttcattccttacccccctcaagcaaatgtgaaaagtatactgacctaagattctcattagttttagttcttaaaacgaatagtaaatgattt

SEQ ID NO: 783247 - DNA, 120 bp, Artificial Sequence
  ENSG00000255529_21 (sequence is synthesized)
cacagcgtaaaatttgatgttatttctggaagctggatgatatggaagagttcatgtgcctggacacacagttccctgtaatcctgccatctagggagataaactctgttaacattttga

SEQ ID NO: 783248 - DNA, 120 bp, Artificial Sequence
  ENSG00000255529_22 (sequence is synthesized)
tgttgtgtttttgcttatttttctatgcatagttatgcatttatattctcaaaaatgaaatcataatgtacattgctttgtagtctgctctatatattgtcaatatgttcccatattaaa

SEQ ID NO: 783249 - DNA, 120 bp, Artificial Sequence
  ENSG00000255529_23 (sequence is synthesized)
tattttgctttttagacagctgtaggatattttatttcatgggtataccataactttaagatttatttcctattcagcaatttgattatgtattataatgtaatctgtaaatagtgatat

SEQ ID NO: 783250 - DNA, 120 bp, Artificial Sequence
  ENSG00000255529_24 (sequence is synthesized)
gattaacatcttaatcacatccatagaaaatgacttatttccagaagataccgctctaaaaatgaaattgttaggtgaaagtgtttttgagaatttttatatatattactcactgcagag

SEQ ID NO: 783251 - DNA, 120 bp, Artificial Sequence
  ENSG00000255529_25 (sequence is synthesized)
atcatgttcatttacattcccattagcaatatatccaatgctcagaattgaaaattactacttaaaatctttgcaaattgaataattacagaaaagggctacatttaaaatttgtatttg

SEQ ID NO: 783252 - DNA, 120 bp, Artificial Sequence
  ENSG00000255529_26 (sequence is synthesized)
tttttcttacttagtgaaggttgtgttttttttcatattcattggccatgctatattcattcttttgagaattgctcattcatattttttctgttgcttgcttggagaatttgctctttt

SEQ ID NO: 783253 - DNA, 120 bp, Artificial Sequence
  ENSG00000255529_27 (sequence is synthesized)
tttggcatataagttcttaagaatgtccgtcctttgtcatatattgtaactttttttagccttatttgtcatttaacatagtttgtggtatttcagtatagaagttgttttctttaggag

SEQ ID NO: 783254 - DNA, 120 bp, Artificial Sequence
  ENSG00000255529_28 (sequence is synthesized)
tctacctttgtgtatgtgcttgaaagtatttttgtaatccaagaatggataaatgtccttattttcttctagtattttcttatttcacttttacacctatctttaaaaggaatttaaatt

SEQ ID NO: 783255 - DNA, 120 bp, Artificial Sequence
  ENSG00000255529_29 (sequence is synthesized)
ttgtttatatacattaactaaatcagtacaagtttggggtgaaaaggaaatttttaatccatctcaaatgtatttggttatattatataaggtagggatttgattttatttcgaagaatt

SEQ ID NO: 783256 - DNA, 120 bp, Artificial Sequence
  ENSG00000255529_30 (sequence is synthesized)
taccaattggttcagtatgtgaaaccaccatttcccctctgattagtaatgctatttttatagaatattaaattcttatgtgtcttttgtgtcttaggccaatttctgggccttctgggt

SEQ ID NO: 783257 - DNA, 120 bp, Artificial Sequence
  ENSG00000255529_31 (sequence is synthesized)
tttttctacactgtcaataattatcgctttaattggtgttaatatttggtagtacacaggttctcccttgttcttttaaattttgtgaaatataacttacaaataagtacttaaaacaga

SEQ ID NO: 783258 - DNA, 120 bp, Artificial Sequence
  ENSG00000255529_32 (sequence is synthesized)
gcttaatgggtaaagcaacagctgtgtaatcacaaactagatgcagaggaggtcttgccagcactccaaaatctctgtgtgtcccctcttgacactcactgtttcccccagagctaacta

SEQ ID NO: 783259 - DNA, 120 bp, Artificial Sequence
  ENSG00000255529_33 (sequence is synthesized)
tcctgacgtatggtaattctccctctgtccttttaagaattattttaccagttatgtgtataacaatatggtttacattttgctcacttttgacttatataaaaatagaataatactata

SEQ ID NO: 783260 - DNA, 120 bp, Artificial Sequence
  ENSG00000255529_34 (sequence is synthesized)
agccttggctggtcttgcctttccttcctgttcccactgccgccatgttggttcagtctcctgtcactcacaacaagatgaacagcaatgttctcttctctgtctccttgatggaacaga

SEQ ID NO: 783261 - DNA, 120 bp, Artificial Sequence
  ENSG00000255529_35 (sequence is synthesized)
tgccttcctcgttgtttggacttgagtcagtcccggcaaatgtttaagtggcctggcctggagagctaagagagtgctagaagggagactgctgtccccacaatggctgcagccccattc

SEQ ID NO: 783262 - DNA, 120 bp, Artificial Sequence
  ENSG00000255529_36 (sequence is synthesized)
cctgggtgaacattccaggatcctgacattctgtggaaattgatgagtgcttgctcaaaggtcgatgatgtgctacagatggcatcacctgttagagacagagctttctcaagaggagct

SEQ ID NO: 783263 - DNA, 120 bp, Artificial Sequence
  ENSG00000255529_37 (sequence is synthesized)
ttgatttcctttacttcccgaactgctatttcacagtctctcagtagatgtcagcagcacagcaaacatctcactgcccatcatggaagcaggttggttcaaaaacttttccaattaaag

SEQ ID NO: 783264 - DNA, 120 bp, Artificial Sequence
  ENSG00000255529_38 (sequence is synthesized)
tggctcttcttaccaaactctgattgtttggagcagtttgaccatcatttagccaggaagacaccagaaggatggcgtgctgagagtgctagaagggagactgctgtccccacaatggct

SEQ ID NO: 783265 - DNA, 120 bp, Artificial Sequence
  ENSG00000255529_39 (sequence is synthesized)
agctgggtatctttccaaggccttgacactgggaggtgatgagtcacggttggctctaaagcccaagctcttttcttcacaccttgatgccgtctagcctgtccatggaccaattagagc

SEQ ID NO: 783266 - DNA, 120 bp, Artificial Sequence
  ENSG00000255529_40 (sequence is synthesized)
cagtgaccaacaggtatatcaaaatgacatccctcctggatggcacatcctccccagacagcctgcccattccctggctctgacaggctagcaaatccctgataacctcggaatgcctca

SEQ ID NO: 783267 - DNA, 120 bp, Artificial Sequence
  ENSG00000255529_41 (sequence is synthesized)
agttgtgtcaatgaagggcattgagactttgatgttggacagatgccccatgatggatgggcactggctgatacagtttcccacggtgactcagaagtgcgaaggagaaaggagggctga

SEQ ID NO: 783268 - DNA, 120 bp, Artificial Sequence
  ENSG00000255529_42 (sequence is synthesized)
ggtgccagctccaggcaggccaggcaccccagatgtcagcacctgcccgactgcctctgacataccctcagacataccttttggcatgtggagccccaggtgcctttcttcatgtccaga

SEQ ID NO: 783269 - DNA, 120 bp, Artificial Sequence
  ENSG00000255529_43 (sequence is synthesized)
taggaagactcatcttaaggggtgtggcagcaactgagcatgtgtaccaccacctgagctgtagttcttgtttctgtaagagaaaatgctcccacattatcctactacactctagacctc

SEQ ID NO: 783270 - DNA, 120 bp, Artificial Sequence
  ENSG00000255529_44 (sequence is synthesized)
aaaggtgaggcagagcgtgagtcaagggatctgaaatgaaagcagttgtagtgaaaagcccatgaaatatagcgctcaagggtagctgagtcttgcaggctgtaatttatgctgtttcct

SEQ ID NO: 783271 - DNA, 120 bp, Artificial Sequence
  ENSG00000255529_45 (sequence is synthesized)
gctttgagaatgtatcccaaccttttggttactagaaagcctcaatttgaatagtaaaagacctgaattctgggtcctctaacttctcttcatgtgtggctcagtctaacctgtagttta

SEQ ID NO: 783272 - DNA, 120 bp, Artificial Sequence
  ENSG00000255529_46 (sequence is synthesized)
agactcagacaccatgccttccaggaagccttccttgatgtctccaattctacattaattcctccagtatgagcttccacagtaacttaatcttaccctgaggtgtctatatcaaactgc

SEQ ID NO: 783273 - DNA, 120 bp, Artificial Sequence
  ENSG00000255529_47 (sequence is synthesized)
ttcctcacttgagggaaggcaccaggtcttgtttacatttttgctctatatcactacaacacaagagagaatgtgataaaggttgtaacagacccagaaaaaccactctaggagctctga

SEQ ID NO: 783274 - DNA, 120 bp, Artificial Sequence
  ENSG00000255529_48 (sequence is synthesized)
gtaacagacccagaaaaaccactctaggagctctgagaagggtagttcatgtaaatacacacacatatacatatagttcatgtaaatatatgtatgtatacacacacacacacacacaca

SEQ ID NO: 783275 - DNA, 120 bp, Artificial Sequence
  ENSG00000255529_49 (sequence is synthesized)
gttttcagattcaagatgctgtaaaatttgtattgatgattgcttttctttctatcccttgtaatttctacacttacagctcattgttcttctcatagcattaaagtcttcagcatctgg

SEQ ID NO: 783276 - DNA, 120 bp, Artificial Sequence
  ENSG00000255529_50 (sequence is synthesized)
cgggcgagtggacggagggcttgctgcggcagagccgtgcctcttcctggccaggcacgtatgcctgcgaggatagctcggattgaacggctacctggcgttgcagggagttagtagccc

SEQ ID NO: 783277 - DNA, 120 bp, Artificial Sequence
  ENSG00000255552_0 (sequence is synthesized)
atgggcacctccagcatcttcctctgcgtgctgttcctctgtggggcactgggtctcaccatgtcccctgcccggggaaggctccgctgctacatctgtggcttcaccaaaccctgccac

SEQ ID NO: 783278 - DNA, 120 bp, Artificial Sequence
  ENSG00000255552_1 (sequence is synthesized)
cgatgaagcttgtggcatcagtattggcacttcaggaaaaagctgcctctcaagggcccagtgccctctgccaggctatgccacctactggctgcactcctacactctgtggcaccactg

SEQ ID NO: 783279 - DNA, 120 bp, Artificial Sequence
  ENSG00000255552_2 (sequence is synthesized)
ctgcgagcaggacctgtgcaacatagccgcttccccacagcagctcaccagcctcctcgcctccctgcccctctttgtggccagcttcgctgggagaggacacctcctccactagcttcc

SEQ ID NO: 783280 - DNA, 120 bp, Artificial Sequence
  ENSG00000255552_3 (sequence is synthesized)
cctgttcccaccgagtgtcgggacgatgaagcttgtggcatcagtattggcacttcaggtaggactctggtccaatggcccttctccaggaggctccctacctccatccatccggccttt

SEQ ID NO: 783281 - DNA, 120 bp, Artificial Sequence
  ENSG00000255552_4 (sequence is synthesized)
agagacaacatgctgagagagcagaggagaccctccaggcaagggcagactccttgcaggggcaggctgggggcccccgctgcctgctgggtcaggctggtgaatctggtcatggttccg

SEQ ID NO: 783282 - DNA, 120 bp, Artificial Sequence
  ENSG00000255552_5 (sequence is synthesized)
ccccccagattcactccctaggtgtgtttgtttactggttcctcactgtcttgctcaaatgctccaactctacaaatcccgggatctcggggtgcagatcacctctcccagattcctgag

SEQ ID NO: 783283 - DNA, 120 bp, Artificial Sequence
  ENSG00000255552_6 (sequence is synthesized)
gtattggcacttcagatgcccattgctgatgccccgtgtcagcccaggtcactggcaaggcaggcattttgatgacactgtggatctcaggcaaggggatcaaaggagcatcaggtatgg

SEQ ID NO: 783284 - DNA, 120 bp, Artificial Sequence
  ENSG00000255552_7 (sequence is synthesized)
taaggaggagagtcttgctaggaaagactaatgtggtaggtcgggaactcaggatggagggcttgggggactatgaagagtacctttaataaaaggtctatctaggagtccagtaatact

SEQ ID NO: 783285 - DNA, 63 bp, Artificial Sequence
  ENSG00000255552_8 (sequence is synthesized)
gcagatctctaagagcaaactgtagctgcttggtgggttgggctggagctggaacctggacca

SEQ ID NO: 783286 - DNA, 120 bp, Artificial Sequence
  ENSG00000255561_0 (sequence is synthesized)
acagagaacgcgagccgggagtccgtggaggccatggcccctcggcgcctcctgttggttggggaggggaatttctccttcgccgccgctctgagcgaaaccctggatcagagcactcaa

SEQ ID NO: 783287 - DNA, 120 bp, Artificial Sequence
  ENSG00000255561_1 (sequence is synthesized)
cttaccgccacctgcctccagcgcccggccgagttggctcgggatccactggcctgggagaatctgcagtgcctgcgcgagcgaggtatcgatgtacgtttcggtgtggactgcacccag

SEQ ID NO: 783288 - DNA, 120 bp, Artificial Sequence
  ENSG00000255561_2 (sequence is synthesized)
ctggcagatgtctttgaactgcacgagagagaatttgatcaaatttatttcatcttcccgcattgtggacgcaaagctggcgtagctaagaacagggaactgcttgccaaatttttccaa

SEQ ID NO: 783289 - DNA, 120 bp, Artificial Sequence
  ENSG00000255561_3 (sequence is synthesized)
agctgtgcagacgttcttgcagaggaaggagaagtccacgtggcattatgtagaggacaaggtggaactcctgcggataagccccagagagaatggcacaacagttggcaagtggttgcc

SEQ ID NO: 783290 - DNA, 120 bp, Artificial Sequence
  ENSG00000255561_4 (sequence is synthesized)
atggcagccctgggggggctcattttaagcgacgtgtatccattcagctgtaaggctgtggcagggtacaagtgcactggatataggagtcaagataagtcctttcatgtagaaggtgct

SEQ ID NO: 783291 - DNA, 120 bp, Artificial Sequence
  ENSG00000255561_5 (sequence is synthesized)
ttgaaccatatcttcaccaggagcttaccttttgaaggttctcaacccagaatcttcaggatcaaactgggtaaccagtggttttcctttccagaaccagaagcacttgtaggaaagttg

SEQ ID NO: 783292 - DNA, 120 bp, Artificial Sequence
  ENSG00000255561_6 (sequence is synthesized)
aacaggggtttcctggaagcaccttcatgtcatcctatcaaaaccataaatgagaaactcattgctgaattaggcaaagttttcccgctaaaaaggctgaagtgttcctaccctttgctg

SEQ ID NO: 783293 - DNA, 120 bp, Artificial Sequence
  ENSG00000255561_7 (sequence is synthesized)
ccacaggaaggtaccagtgttcttcctttctggaattgtgactttctgtcagctgctttttggattagtctccatgaagataactcaaattctgagtccctgactggtgggacatcacaa

SEQ ID NO: 783294 - DNA, 120 bp, Artificial Sequence
  ENSG00000255561_8 (sequence is synthesized)
gatgtggaagactttctagtgtcattttcagaacttagccttctcaagaatcctggaagagatggtaaagaagaagcttgtgaaggaacctgtggccaggccaagatctgccttagacct

SEQ ID NO: 783295 - DNA, 120 bp, Artificial Sequence
  ENSG00000255561_9 (sequence is synthesized)
tctctcctagtgcatgttcaggatgtcatcgaagtaccagacttcctctcaggttctctgcacatcctcagtggacctgtctttcagaagtgccacattttgcctttcacaatgccagca

SEQ ID NO: 783296 - DNA, 120 bp, Artificial Sequence
  ENSG00000255561_10 (sequence is synthesized)
tttcatgaaactttatttatccttggggttaatcaaaatctgaaggatggctgtcttcaatcactgctggatcatctgaagggcattctagatagcctgctgacccagacattgccggag

SEQ ID NO: 783297 - DNA, 120 bp, Artificial Sequence
  ENSG00000255561_11 (sequence is synthesized)
cagtttagtcaaatttgtccttcagtcaaatggaaaggattatatgattcgtgtgaagactcataattttagcccagattgtactgaggatctaattattgggtctgttatcacatctgc

SEQ ID NO: 783298 - DNA, 120 bp, Artificial Sequence
  ENSG00000255561_12 (sequence is synthesized)
cactagtgttatacataaagaccagtgttttgtgtttgtgtctatgaacttggacttattagccatgcttgtctggtgtatctctgactggagaatgttgtggacgtttgataaccgttt

SEQ ID NO: 783299 - DNA, 120 bp, Artificial Sequence
  ENSG00000255561_13 (sequence is synthesized)
cctgaaaaattttgtccctggcaaaatagaaccctttaaaagtcattctctgtatcctccatgttatgtgcatgatgttagtttttggatagatcagaagaaaggatttgatgaactaga

SEQ ID NO: 783300 - DNA, 120 bp, Artificial Sequence
  ENSG00000255561_14 (sequence is synthesized)
gtttcacactgtggcccgagcagtgtctcaggacactattatatccatacagtttcttagccgtttccagcatccaaagactcaacaggtcagtctctgctatagattgacctaccagac

SEQ ID NO: 783301 - DNA, 120 bp, Artificial Sequence
  ENSG00000255561_15 (sequence is synthesized)
ctgtgacaaggccctcacccagcagcaagtagcatcaatgcagtcccagtttaggaaggagattcaacaacacctatatgttatacctcggtagtttggtaaatccttttctgcagtgtg

SEQ ID NO: 783302 - DNA, 120 bp, Artificial Sequence
  ENSG00000255561_16 (sequence is synthesized)
atccttcattgcgggggatgtggaggaaaattaccaacttgcaaccagtagtcctttctggatttttgtttttgtaaaatcttttactttgtgaccatagctactgttcgttgatctttt

SEQ ID NO: 783303 - DNA, 70 bp, Artificial Sequence
  ENSG00000255561_17 (sequence is synthesized)
cgttgagggagtgcagtggcagtggcatgatatcagctcactataagctccacctcccaggttcatgcca

SEQ ID NO: 783304 - DNA, 120 bp, Artificial Sequence
  ENSG00000255561_18 (sequence is synthesized)
ggattatagatgtgagccaccgcgcccggcctactgttagttgatcttaaagataccttgactctattactgaaacttatagattataatgtgattggtgacatttggagttgtgtaata

SEQ ID NO: 783305 - DNA, 120 bp, Artificial Sequence
  ENSG00000255561_19 (sequence is synthesized)
tataatgtgattggtgacatttggagttgtgtaatattttggtcccgagaagtgactaaaacaataaacaaaacagcatcttgtactttagatgctctattgttgaacaggcagtagaac

SEQ ID NO: 783306 - DNA, 120 bp, Artificial Sequence
  ENSG00000255561_20 (sequence is synthesized)
ttaagtgtctcatcaaatataaatatgttttccacactgtcaattactcttcccttaactttgttgtatcatttcattaaatcaccttatgagagtagtttttggcatcagactaacatt

SEQ ID NO: 783307 - DNA, 120 bp, Artificial Sequence
  ENSG00000255561_21 (sequence is synthesized)
tattagcttgggaaattgcaaatattccacattaattttggtattattattataatcatcaccattttaattctgtggttgaaagtcatggaacgaataaagtgtcagatttagggttaa

SEQ ID NO: 783308 - DNA, 120 bp, Artificial Sequence
  ENSG00000255561_22 (sequence is synthesized)
atactggagatctaggtgtaactgtctctagggctggaatgacagacatcaccatccactcagttgtccaagccagaagcctggggcttatctttgactctgacttgtctttaattttca

SEQ ID NO: 783309 - DNA, 120 bp, Artificial Sequence
  ENSG00000255561_23 (sequence is synthesized)
tccagtcactaagtcttgttgatttttgaatcagactgccaccctccattcccattgccaaatttcaattcaaatcactgtcagctttgtctccattattgcagttgcctcttgttttat

SEQ ID NO: 783310 - DNA, 120 bp, Artificial Sequence
  ENSG00000255561_24 (sequence is synthesized)
cctgccatgccatcagccttgttcctctccaaacctttctccacaggaaaggagaatttttcaaagtgaaagtataattgtatcatcttcttatttaaaatctttcagtggctttccacc

SEQ ID NO: 783311 - DNA, 120 bp, Artificial Sequence
  ENSG00000255561_25 (sequence is synthesized)
gttttcagagtaagattcagtctgttaaaatggcttacaacagaacagagaaccaaatacagcatgttcttgttaccggaaggggtcctgatccagaccccaagagacacaagaaataat

SEQ ID NO: 783312 - DNA, 120 bp, Artificial Sequence
  ENSG00000255561_26 (sequence is synthesized)
agaactcgcctcacccccctgcgctagtgactgcttgtgacctcatgcaggtgtgatgaagtcgctcaaggccatgcttgggctaaagacactttgatcttcccgagggggtgaaagggc

SEQ ID NO: 783313 - DNA, 120 bp, Artificial Sequence
  ENSG00000255561_27 (sequence is synthesized)
gaggtgacaggaaagtgcgcgtcttgcttttgcactcatagttatcatccaccggggagtcggtacaccggctcgtctagacaaccaggcgccatgggtgcgtcatcaactagtgacggg

SEQ ID NO: 783314 - DNA, 120 bp, Artificial Sequence
  ENSG00000255569_0 (sequence is synthesized)
cttctgcagactacagtggctcaggaaccggggatgcagtgccaggctcatggtatcctgcagcagatgtggggagctttccttctctatgtttccatgaagatgggaggcactgcagga

SEQ ID NO: 783315 - DNA, 120 bp, Artificial Sequence
  ENSG00000255569_1 (sequence is synthesized)
tgtggaaggagccattgtccagataaactgcacgtaccagacatctgggttttatgggctgtcctggtaccagcaacatgatggcggagcacccacatttctttcttacaatgctctgga

SEQ ID NO: 783316 - DNA, 120 bp, Artificial Sequence
  ENSG00000255569_2 (sequence is synthesized)
tggtttggaggagacaggtcgtttttcttcattccttagtcgctctgatagttatggttacctccttctacaggagctccagatgaaagactctgcctcttacttctgcgctgtgagaga

SEQ ID NO: 783317 - DNA, 120 bp, Artificial Sequence
  ENSG00000255582_0 (sequence is synthesized)
ggcatcaatcatccgacaaaagcattcacttacaacatcattgtgctgtgtttctcttgtcaaacgtcaccattcatcttagcagactacaaaaagacatgggaaagaccaaaaacacat

SEQ ID NO: 783318 - DNA, 120 bp, Artificial Sequence
  ENSG00000255582_1 (sequence is synthesized)
cgctggatgccgtggtgacagatttcattcttctgggtttgtctcaccccccaaatctaagaagcctcctcttcctggtcttcttcatcatttacatcctcactcagctggggaacctgc

SEQ ID NO: 783319 - DNA, 120 bp, Artificial Sequence
  ENSG00000255582_2 (sequence is synthesized)
tcattctgctcaccatgtgggctgacccgaagctctgtgctcgccccatgtacattcttctgggagtgctctcattcctggacatgtggctctcctcagtcaccgttcctctgcttattt

SEQ ID NO: 783320 - DNA, 120 bp, Artificial Sequence
  ENSG00000255582_3 (sequence is synthesized)
tggattttactccttccatcaaggctatcccgtttggtggctgtgtggctcaactgtatttctttcacttcctgggcagcacccagtgcttcctctacaccttgatggcctatgacaggt

SEQ ID NO: 783321 - DNA, 120 bp, Artificial Sequence
  ENSG00000255582_4 (sequence is synthesized)
ctacccagtgctcatgaatgggaggttatgcacagtccttgtggctggagcttgggtcgccggctccatgcatgggtctatccaggccaccttgaccttccgcctgccctactgtgggcc

SEQ ID NO: 783322 - DNA, 120 bp, Artificial Sequence
  ENSG00000255582_5 (sequence is synthesized)
caatcaggtggattactttatctgtgacatccccgcagtattgagactggcctgtgctgacacaactgtcaatgagcttgtgacctttgtggacgtcggggtagtggccgccagttgctt

SEQ ID NO: 783323 - DNA, 120 bp, Artificial Sequence
  ENSG00000255582_6 (sequence is synthesized)
catgttaattctgctctcgtatgccaacatagtaaatgccatcctgaagatacgcaccactgatgggaggcgccgggccttctccacctgtggctcccacctaatcgtggtcacagtcta

SEQ ID NO: 783324 - DNA, 120 bp, Artificial Sequence
  ENSG00000255582_7 (sequence is synthesized)
ctatgtcccctgtattttcatctaccttagggctggctccaaagaccccctggatggggcagcggctgtgttttacactgttgtcactccattactgaaccccctcatctatacactgag

SEQ ID NO: 783325 - DNA, 120 bp, Artificial Sequence
  ENSG00000255582_8 (sequence is synthesized)
gaaccaggaagtgaagtctgccctgaagaggataacagcaggttgaaggactgaatgaaaataagtaactacatctgcatcattatcactgccactctcttcagctactgctgcatgtga

SEQ ID NO: 783326 - DNA, 120 bp, Artificial Sequence
  ENSG00000255587_0 (sequence is synthesized)
ctagagctcgtgggctccgcagggcagcagtcaccctaccaccaggtcccagagcccagggctgtgtgttccactgggagcctttgagagggccaacgcaccatggagactggacagaga

SEQ ID NO: 783327 - DNA, 120 bp, Artificial Sequence
  ENSG00000255587_1 (sequence is synthesized)
acatctcgaaaagtccggaagctgggctccaaccggcggcggcagacaagagagccagctgatggtgaaggcgctgcagtggccccagagccagagtcttggtcctctcaggcagcggca

SEQ ID NO: 783328 - DNA, 120 bp, Artificial Sequence
  ENSG00000255587_2 (sequence is synthesized)
gaactgcaggccttcttccaggactgtggtgccaaggagaggggctttgtcacccgcgaggacctggcggtggccaagttcagcttcctgggcagcaaggaagagtcagagatgatcttc

SEQ ID NO: 783329 - DNA, 120 bp, Artificial Sequence
  ENSG00000255587_3 (sequence is synthesized)
gactgggtggatgtggagcggaagggacacctgtcccttgaagaattcagctctggactcaaaaacatctttggctccagccagagcccccacaggctccgcagaaggaagccactgccc

SEQ ID NO: 783330 - DNA, 120 bp, Artificial Sequence
  ENSG00000255587_4 (sequence is synthesized)
tctaagcgggtatctgctaccaccagcttcccagctctggaggaggcggatgctgaggagaaggaggcgttccttgccttcatggagcagctggggactggacacttacttcccaagcag

SEQ ID NO: 783331 - DNA, 120 bp, Artificial Sequence
  ENSG00000255587_5 (sequence is synthesized)
atggaaatctggcaactgtgggggcagctgcggcaggaggagccccagctggcaggcaacctggcaggctttctggccaagatgaccagccgcctgcaggaggcccaggcggacaaggag

SEQ ID NO: 783332 - DNA, 120 bp, Artificial Sequence
  ENSG00000255587_6 (sequence is synthesized)
gccctggagctgaccctgaggaagcgtgactctgaccaccaccgcgaggtccagcagctctatgaggagatggagcagcagatccgccaggagaagcagcagctgcaggctgagagcgac

SEQ ID NO: 783333 - DNA, 120 bp, Artificial Sequence
  ENSG00000255587_7 (sequence is synthesized)
tctcggggcctggccctcacctcccagatgcaggacgtcctagaggccaaggagcgcgaggtgcagcgactagctgagggccagagggagctggaggcccagctctcccacctcaggagc

SEQ ID NO: 783334 - DNA, 120 bp, Artificial Sequence
  ENSG00000255587_8 (sequence is synthesized)
acacatcaggaggctgcctcagagaaccagcagctgcaggaggccaagcgtgacctggctgggcggctggaggaggtgcgggggcagctgcaggtgaccagggggcgcctggacgccgcc

SEQ ID NO: 783335 - DNA, 120 bp, Artificial Sequence
  ENSG00000255587_9 (sequence is synthesized)
aggggccgggtgtcctggcaggtggaggagaaactgagttttcctggagcgggtgagaagaccccagaccctcaggctgcctcccctgaggaggcccccctgcctgggctatttggggac

SEQ ID NO: 783336 - DNA, 120 bp, Artificial Sequence
  ENSG00000255587_10 (sequence is synthesized)
aacgatgactgggaccagctactgagcaactttggcagccctccgcacggagccctgcagctctgctggagcccgcccccgaccccaagagccacctcaggcccccagacaccccgtgtg

SEQ ID NO: 783337 - DNA, 120 bp, Artificial Sequence
  ENSG00000255587_11 (sequence is synthesized)
gtcaggcagatctccatctcggagccacaggcttttctatttggtcaggagccatcttcagatccagatggggctccaaggaccccacctggggtgactttcagcgccaaggacaataaa

SEQ ID NO: 783338 - DNA, 120 bp, Artificial Sequence
  ENSG00000255587_12 (sequence is synthesized)
ggagtggacccacatgagcaggacattagagcagagcagcctgttgaaccgcacgacccggaccccaaccaggagccagggtccacacccgagggccgcctcctctggggtctctcagga

SEQ ID NO: 783339 - DNA, 120 bp, Artificial Sequence
  ENSG00000255587_13 (sequence is synthesized)
agcctggtggcacctgcattcaaagtgctcattcctttggaggatgggccccctccccctgcgaactctccccctccccaggccccagctgggtccagcaaacagatccaggcctcagac

SEQ ID NO: 783340 - DNA, 120 bp, Artificial Sequence
  ENSG00000255587_14 (sequence is synthesized)
ccagatgacaagggccctgggtcttgggctcctcccagcggggctcagcctggggctggagcaggaccccaggaacccacacaaacccctcccaccatgactgagcgggaaacccagccc

SEQ ID NO: 783341 - DNA, 120 bp, Artificial Sequence
  ENSG00000255587_15 (sequence is synthesized)
ggaccctcacccacaactgccctcacaggagtgggcccagccaagccgcccaggcagagagatgccctccagcaggacctgcatgccactggctctgagccaagactggggacccagagg

SEQ ID NO: 783342 - DNA, 120 bp, Artificial Sequence
  ENSG00000255587_16 (sequence is synthesized)
gctagagccctcaccctggggccagctgagcccttccagggcctggaatttgtgggtccggtgcccacagagaggctggagcagggccaggcgggcccagcggtgcaggagggccttcct

SEQ ID NO: 783343 - DNA, 120 bp, Artificial Sequence
  ENSG00000255587_17 (sequence is synthesized)
ccaccaggagctggaagaggaacccaggtctgaggaaggaaaacaagagggcagaggtgggcaggacctcagttcagagcagtcagagcagtcggttgaggctcacggcctagaaactgc

SEQ ID NO: 783344 - DNA, 120 bp, Artificial Sequence
  ENSG00000255587_18 (sequence is synthesized)
gcattcggaactcccccagcaagactctctgcttgtttctctcccatctgccacaccacaggctcaggtggaagcagaaggccccactcctggaaaatcggcacctccaaggggctctcc

SEQ ID NO: 783345 - DNA, 120 bp, Artificial Sequence
  ENSG00000255587_19 (sequence is synthesized)
tcccaggggggctcagcctggggctggagcaggaccccaggaacccacgcaaacccctcccaccatggctgagcaggaagcccaacccaggccatccctcacgactgctcacgcagaaga

SEQ ID NO: 783346 - DNA, 120 bp, Artificial Sequence
  ENSG00000255587_20 (sequence is synthesized)
acaaggcccgcctcactccagggaaccaagggcagagagcaggcttgaagatccaggaatggactccagggaagctgggctgaccccatccccgggagaccccatggctggagggggacc

SEQ ID NO: 783347 - DNA, 120 bp, Artificial Sequence
  ENSG00000255587_21 (sequence is synthesized)
ccaggccaaccctgattacctcttccatgtcatctttctgggagactccaacgtgggcaaaacatccttcctgcacctgctgcaccagaattctttcgccaccggattgacagctaccgt

SEQ ID NO: 783348 - DNA, 120 bp, Artificial Sequence
  ENSG00000255587_22 (sequence is synthesized)
gggagtagattttcgggtcaaaaccttgctggtggacaacaagtgctttgtgctgcagctctgggacacagctggccaagagaggtaccacagtatgacgcgacagctgctccgcaaggc

SEQ ID NO: 783349 - DNA, 120 bp, Artificial Sequence
  ENSG00000255587_23 (sequence is synthesized)
tgacggggtggtgctcatgtacgacatcacctcccaggagagctttgcccacgtgcgctactggctagactgtctccaggatgcagggtcggatggggtggtcatccttctcctgggaaa

SEQ ID NO: 783350 - DNA, 120 bp, Artificial Sequence
  ENSG00000255587_24 (sequence is synthesized)
caagatggactgtgaggaggaacggcaagtgtccgtggaagctgggcagcaactggcccaggaactgggggtctattttggggagtgcagtgccgccttgggtcacaacatcctggagcc

SEQ ID NO: 783351 - DNA, 120 bp, Artificial Sequence
  ENSG00000255587_25 (sequence is synthesized)
tgtagtaaacctggccaggtcactcaggatgcaagaagaaggcctgaaggactcgctggtgaaggtggcccccaagaggccgcccaagagattcggctgttgctcctgatcacctgtcct

SEQ ID NO: 783352 - DNA, 120 bp, Artificial Sequence
  ENSG00000255587_26 (sequence is synthesized)
gtcctgggtaggatggacacccatggggtttcctgtccctcagctcctgtcctttgttcctggacagcaacgacacagaggaccagcttggaggttcaggaaaacccttctcaactcagg

SEQ ID NO: 783353 - DNA, 120 bp, Artificial Sequence
  ENSG00000255587_27 (sequence is synthesized)
actcggatcccagagcagggccgcatcacctctgcctttcacactccaaaggagggctttgctgagtgaacaaggcttgaggggcaggggtatggcaaaactctccaaacaaagaaagtc

SEQ ID NO: 783354 - DNA, 120 bp, Artificial Sequence
  ENSG00000255587_28 (sequence is synthesized)
tagaaaaacgacttaaggaaaatacaccaaaatattggccgcacatctgtgggtgtaaaattttagggagaatgtggggggggggtgttactttccattttacacatatttgtattttca

SEQ ID NO: 783355 - DNA, 120 bp, Artificial Sequence
  ENSG00000255587_29 (sequence is synthesized)
gattttcaacaataacagtattcaatacataatcagaaaaaagagatgtggaggaggaggagagaaacttcccaaggagctcccttgggtgctgctggctcctaattagtgtaacctgtt

SEQ ID NO: 783356 - DNA, 120 bp, Artificial Sequence
  ENSG00000255587_30 (sequence is synthesized)
aatcacatgttgctcggtgttagagcggtccctctgtgctctgcttggcagggcgctgttggcctggtctccctcgctatttctatttgcaagcatgggctttcttcccagcagaatctg

SEQ ID NO: 783357 - DNA, 120 bp, Artificial Sequence
  ENSG00000255587_31 (sequence is synthesized)
gttcctgggaagagtaatgttccaaaggcctctgatatgcctcgatgccctcctgtcttccagagccccaacctcactccctttccccaccatacaaaacacacctcccaggggtcacat

SEQ ID NO: 783358 - DNA, 120 bp, Artificial Sequence
  ENSG00000255587_32 (sequence is synthesized)
ttgggggtcccgccccctgctccaatgccatggtgtccccaagcacagggctttggcctgagttgtcagtctctggatgcatttgaggggcagctagggtgtggctggggggtccaagca

SEQ ID NO: 783359 - DNA, 120 bp, Artificial Sequence
  ENSG00000255587_33 (sequence is synthesized)
gctggggagccgagactcagaatcattcacacacttctatttggagcttttgtggaagtttccagaattccataatattcacctcctgaatggtggctgccccttatcagctagggctgg

SEQ ID NO: 783360 - DNA, 120 bp, Artificial Sequence
  ENSG00000255587_34 (sequence is synthesized)
ggtttccagtgccctcggagagcttgctttagagtcttggagagacggccatggtcttcgtttgtatgtctgtcacatcttaccatcatcacaaattgaatatacaacatgtgccaggca

SEQ ID NO: 783361 - DNA, 120 bp, Artificial Sequence
  ENSG00000255690_0 (sequence is synthesized)
cccgcccgccgacgcgcacccggagaaacagttttatacagaaatgcaacaagtagtacccggggtctgcagagcgccccgcgccgcctgacttggccgggcgaagcccgcctgcagaga

SEQ ID NO: 783362 - DNA, 120 bp, Artificial Sequence
  ENSG00000255690_1 (sequence is synthesized)
cccgggccggcctccggacaaaggacggaggaggggctggacggcgctgcgaagtccgaaagaggccatttagcgactctggccaggctaaggggaatgcagaggagacacagagccggc

SEQ ID NO: 783363 - DNA, 120 bp, Artificial Sequence
  ENSG00000255690_2 (sequence is synthesized)
gggccaagaggacgatccggccgctgcacgcagggcgggaggcgatggaggctgcccgcgccttgcgcctcctgctcgtggtgtgcggctgcctcgcgctcccgccgctggccgagcccg

SEQ ID NO: 783364 - DNA, 120 bp, Artificial Sequence
  ENSG00000255690_3 (sequence is synthesized)
tgtgcccggagcgctgcgactgccagcatccccagcatctcctgtgcaccaacagggggctccgcgtagtgcccaagaccagctcgctgccgagcccccacgacgtgctcacctacagcc

SEQ ID NO: 783365 - DNA, 120 bp, Artificial Sequence
  ENSG00000255690_4 (sequence is synthesized)
tcggcggcaacttcataaccaacatcacggccttcgacttccaccgtctggggcagctcagacggctggacctgcagtacaaccagatccgctctctgcaccccaagaccttcgagaagc

SEQ ID NO: 783366 - DNA, 120 bp, Artificial Sequence
  ENSG00000255690_5 (sequence is synthesized)
tctcgcggctggaagagctgtacctggggaacaacctcttgcaggcgctcgccccgggcacgctggccccgctgcgcaagctgcgcatcctctacgccaacgggaacgagatcagccgcc

SEQ ID NO: 783367 - DNA, 120 bp, Artificial Sequence
  ENSG00000255690_6 (sequence is synthesized)
taagccgcggctccttcgagggcctggagagtctagtcaagctgcggctggacgggaacgccctgggggcgctgccggacgcggtcttcgctcccttgggcaacctgctctacctacatc

SEQ ID NO: 783368 - DNA, 120 bp, Artificial Sequence
  ENSG00000255690_7 (sequence is synthesized)
tggagtccaaccggatccgctttctgggcaagaacgccttcgcccagctaggcaagctgcgcttcctcaacctctctgccaacgagctacagccctccctgcgccacgcggccaccttcg

SEQ ID NO: 783369 - DNA, 120 bp, Artificial Sequence
  ENSG00000255690_8 (sequence is synthesized)
caccgctgcgctccctctcctccctcatcctctcggccaacaacctgcagcacctcgggccgcgcatcttccagcacctgccacgtctcggcctgctctcgctcaggggcaaccagctca

SEQ ID NO: 783370 - DNA, 120 bp, Artificial Sequence
  ENSG00000255690_9 (sequence is synthesized)
cgcacctcgcgcctgaggccttttggggcttggaggccctgcgcgagctgcgcctggagggtaatcggctgagccagctgccaactgcgctgctggagcctctgcacagcctggaggcgc

SEQ ID NO: 783371 - DNA, 120 bp, Artificial Sequence
  ENSG00000255690_10 (sequence is synthesized)
tggacctgagcggcaatgagctgtccgccctgcacccggccaccttcggccacctgggccggctgcgcgagctcagcctgcgcaacaacgcgctcagcgccctatccggggacatcttcg

SEQ ID NO: 783372 - DNA, 120 bp, Artificial Sequence
  ENSG00000255690_11 (sequence is synthesized)
ccgccagcccagccctttatcggctggatctagacggcaacggctggacctgcgactgccggctgcgaggcctgaagcgctggatgggcgactggcactcgcagggccggctcctcactg

SEQ ID NO: 783373 - DNA, 120 bp, Artificial Sequence
  ENSG00000255690_12 (sequence is synthesized)
tcttcgtgcagtgtcgccaccccccggccctgcgaggcaaatacctggattacctggatgaccagcagctgcaaaatggatcctgcgcggatccctcgccctcagcttccctgaccgctg

SEQ ID NO: 783374 - DNA, 120 bp, Artificial Sequence
  ENSG00000255690_13 (sequence is synthesized)
accgcaggcggcagcccctacccacggccgcaggggaggagatgacgccacctgcaggtctcgcggaggagctgccgccgcagccgcagctccagcagcaggggcgatttctagctgggg

SEQ ID NO: 783375 - DNA, 120 bp, Artificial Sequence
  ENSG00000255690_14 (sequence is synthesized)
gatggggccgccagggagctggtaggcaaccgcagcgccctaaggctgagtcggcggggcccgggcctccagcagcccagcccctccgtcgctgccgccgcgggcccggctccacagtcc

SEQ ID NO: 783376 - DNA, 120 bp, Artificial Sequence
  ENSG00000255690_15 (sequence is synthesized)
cacagtccctagacctgcacaagaagccccagcggggccgtccgactcgggcagatcccgccctcgcggagcccaccccaacggcctctcctggctctgcgccatcgcccgccggcgacc

SEQ ID NO: 783377 - DNA, 120 bp, Artificial Sequence
  ENSG00000255690_16 (sequence is synthesized)
cctggcagcgcgcgacgaagcatcgtctgggcacggagcaccaggagcgtgccgcccagtccgacggtggggccgggctgccgccgctggtgtccgacccatgcgacttcaacaagttca

SEQ ID NO: 783378 - DNA, 120 bp, Artificial Sequence
  ENSG00000255690_17 (sequence is synthesized)
ttctgtgcaacctgacggtggaggcggtgggcgcagacagcgcctcggtgcgctgggccgtgcgcgagcaccgcagtccccggccgctgggcggcgcgcgcttccgcctgctctttgacc

SEQ ID NO: 783379 - DNA, 120 bp, Artificial Sequence
  ENSG00000255690_18 (sequence is synthesized)
gctttggccagcagcccaagttccaccgcttcgtctacctgcctgagagcagcgactcggccacgctgcgcgagctgcgcggggacaccccctacctggtgtgcgtggagggcgtgcttg

SEQ ID NO: 783380 - DNA, 120 bp, Artificial Sequence
  ENSG00000255690_19 (sequence is synthesized)
ggggccgtgtctgccctgtggctccccgggaccactgcgcggggctggtcaccctaccggaggccgggagccggggcggcgtcgactaccagctgctgaccttggccctgctgacggtca

SEQ ID NO: 783381 - DNA, 120 bp, Artificial Sequence
  ENSG00000255690_20 (sequence is synthesized)
aggaaactgcgggctaggcggaagggcggggccccggtccacgttcggcacatgtactccacccgacggcccctgcgctccatgggcaccggcgtgtccgccgacttctcgggattccag

SEQ ID NO: 783382 - DNA, 120 bp, Artificial Sequence
  ENSG00000255690_21 (sequence is synthesized)
tcgcaccggccacgcaccaccgtgtgcgcgctcagtgaggcggacctcatcgaattcccctgcgaccgcttcatggacagtgcgggcggcggcgcgggcggcagcctgagacgggaggac

SEQ ID NO: 783383 - DNA, 120 bp, Artificial Sequence
  ENSG00000255690_22 (sequence is synthesized)
cgtctcctgcagcgatttgccgactaggtccagggcatatagagaccatctcattggccctaaggagccgcctctccgtgaggcccaccagcccacctcaggggaagtgccgttttgtgc

SEQ ID NO: 783384 - DNA, 120 bp, Artificial Sequence
  ENSG00000255690_23 (sequence is synthesized)
acttgccagagaggccggtggggacagagggccaattcgggcaccatcccccaattcccaatactcgagaagtaaatggatggtacttggtggtcagagccagagtaggggacaaatgga

SEQ ID NO: 783385 - DNA, 120 bp, Artificial Sequence
  ENSG00000255690_24 (sequence is synthesized)
tggtgggatgctgaggtcggaggcttcgcttggaggctttgacacagctatgcgaatggcttttgtagcactgcaatgcagaagccaggctttgggggtagaaagggggtgcttgtgccc

SEQ ID NO: 783386 - DNA, 120 bp, Artificial Sequence
  ENSG00000255690_25 (sequence is synthesized)
ccaacatggccagaaatatttgggtgcatgctttttgtttgctcagtgtcaaacagagaagttttgtttctatttaaggaaggaacttattaccattacaaaggaggcttggccagggac

SEQ ID NO: 783387 - DNA, 120 bp, Artificial Sequence
  ENSG00000255690_26 (sequence is synthesized)
tccactggtttggtgatctctgccaagaagggggatgtaaacaggtggtaaagtttaacatacccgccaaggaactcgtttatgttggctgatagagcattcaggataccttaaagttta

SEQ ID NO: 783388 - DNA, 120 bp, Artificial Sequence
  ENSG00000255690_27 (sequence is synthesized)
ataagagacgcatttttttttttcaaaaatgtgaaaagctctgacatttaacgaactgaccaatagactcaaggactgttttagttggactgggccattttattatgttccttttaatat

SEQ ID NO: 783389 - DNA, 120 bp, Artificial Sequence
  ENSG00000255690_28 (sequence is synthesized)
taacagtacaagagcgcttgctgacttcgaggataactaagattacatactttctcaggagaaggctgcatgcaagacttctctgtcagggttgctcctgtggcttttttaattttattt

SEQ ID NO: 783390 - DNA, 120 bp, Artificial Sequence
  ENSG00000255690_29 (sequence is synthesized)
ttttaaacctatatatggaaaaggaaatttcaatgccagatttgataaaagaatgtgatgtatatgtagctgatgacccactggggaacaccagtgttccagttcacttaccacatctgt

SEQ ID NO: 783391 - DNA, 120 bp, Artificial Sequence
  ENSG00000255690_30 (sequence is synthesized)
gacagtgtgtttagattggaataaatgtgatgcattacttcttatgtttttatcagtgacatggttgactgtgccctaattctcttgagttgcagttaagcaatgaaggttatttcctaa

SEQ ID NO: 783392 - DNA, 120 bp, Artificial Sequence
  ENSG00000255690_31 (sequence is synthesized)
tagggaagcaaaaggtgattgtcaattgatagtttaatgtttgaccacattagtgtctttatatgaaatagtagaggggaagaaattatagaaaacaaatgtgaaaaaaatacaccagtg

SEQ ID NO: 783393 - DNA, 120 bp, Artificial Sequence
  ENSG00000255690_32 (sequence is synthesized)
ggtatctgttctactaaaaccagaagattgttatgagtacttaaacctcactgtgaaataatgatatattttgcaattaatccctccccaactgagtgtcttactgtgttattaaatctt

SEQ ID NO: 783394 - DNA, 120 bp, Artificial Sequence
  ENSG00000255690_33 (sequence is synthesized)
atcttttagttaatagttgcagtatttcttttaaatgtttttgttttaaacttaggggtaggatcctttatttgttcagttgtttccaactatttgggatactttcattccctgctattt

SEQ ID NO: 783395 - DNA, 120 bp, Artificial Sequence
  ENSG00000255690_34 (sequence is synthesized)
atgaagtacatgtttatcactaagtgtagtggtttggtttacattaataattttatgtgtggtctaaaaatgcagtcactaagagaatgtacactgtggttatggtcacagtggttatgg

SEQ ID NO: 783396 - DNA, 120 bp, Artificial Sequence
  ENSG00000255690_35 (sequence is synthesized)
atttattggcagtggagtaccatggaggtcactgcaatggtgctaaggctgacagtggaatcttctgtttagggccttaagcccctgagggtcctggtgactcagggaatccatcacagc

SEQ ID NO: 783397 - DNA, 120 bp, Artificial Sequence
  ENSG00000255690_36 (sequence is synthesized)
cccgggtctttcaccccagttcactccttttatgtttggcctagattgacccatgcctgccctcttctcaacagctgagtagggaaccagccatctgaatgagctgatcgttgtttatgt

SEQ ID NO: 783398 - DNA, 120 bp, Artificial Sequence
  ENSG00000255690_37 (sequence is synthesized)
tcaaatgagtaaatgtccagaccacttaaaactacagctgcttttctggcagtctcgtctgcggggccaaaacttaataaaccacaggaaatagactgtcattcttagtttgctgccagg

SEQ ID NO: 783399 - DNA, 120 bp, Artificial Sequence
  ENSG00000255690_38 (sequence is synthesized)
gcttattttagattgagagcatactggtacatgagagcagtagtgttgtttgctcttattttcaaccagggagctatctggcaccttttgtgctcctggcttttttcaatcatagcacta

SEQ ID NO: 783400 - DNA, 120 bp, Artificial Sequence
  ENSG00000255690_39 (sequence is synthesized)
ttgcatctcctagctatttcttttgcccagcagggtaatattgagtcccattgcaagtatggacaaggcctctggttctcctcaccacccaccttttcagccatagaacatcactgaaaa

SEQ ID NO: 783401 - DNA, 120 bp, Artificial Sequence
  ENSG00000255690_40 (sequence is synthesized)
tgcctaatgcctggatctgtgttctactttagtttcactgggaagtctttcagtgggagatgaataaatgttatacattgttatgtccagttatgtcaataaacccactaatagagataa

SEQ ID NO: 783402 - DNA, 120 bp, Artificial Sequence
  ENSG00000255713_0 (sequence is synthesized)
ggaaaacaacaaagcacagaattcgccctatgagacttagagggaggatgctcacagcaaaggacatcaacggtgtatggagaaaacaccatggaaacagggaacctcacgtgggtatca

SEQ ID NO: 783403 - DNA, 120 bp, Artificial Sequence
  ENSG00000255713_1 (sequence is synthesized)
gactttgtcttcctggggctctcgcagactcgggagctccagcgtttcctgtttctaatgttcctgtttgtctacatcaccactgttatgggaaacatccttatcatcatcacagtgacc

SEQ ID NO: 783404 - DNA, 120 bp, Artificial Sequence
  ENSG00000255713_2 (sequence is synthesized)
tctgattcccagctccacacacccatgtactttctgctccgaaacctggctgtcctagacctctgtttctcttcagtcactgctcccaaaatgctagtggacctcctctctgagaagaaa

SEQ ID NO: 783405 - DNA, 120 bp, Artificial Sequence
  ENSG00000255713_3 (sequence is synthesized)
accatctcttaccagggctgcatgggtcagatcttcttcttccactttttgggaggtgccatggtcttcttcctctcagtgatggcctttgaccgcctcattgccatctcccggcccctc

SEQ ID NO: 783406 - DNA, 120 bp, Artificial Sequence
  ENSG00000255713_4 (sequence is synthesized)
cgctatgtcaccgtcatgaacactcagctctgggtggggctggtggtagccacctgggtgggaggctttgtccactctattgtccagctggctctgatgctcccactgcccttctgtggc

SEQ ID NO: 783407 - DNA, 120 bp, Artificial Sequence
  ENSG00000255713_5 (sequence is synthesized)
cccaacattttggataacttctactgtgatgttccccaagtactgagacttgcctgcactgacacctcactgctggagttcctcaagatctccaacagtgggctgctggatgtcgtctgg

SEQ ID NO: 783408 - DNA, 120 bp, Artificial Sequence
  ENSG00000255713_6 (sequence is synthesized)
tccatgatcttcgttccaagcatttacctctatgcccggcccttcactccattccctatggacaagcttgtgtccatcggccacacagtcatgacccccatgctcaaccccatgatctat

SEQ ID NO: 783409 - DNA, 120 bp, Artificial Sequence
  ENSG00000255713_7 (sequence is synthesized)
accctgaggaaccaggacatgcaggcagcagtgagaagattagggagacaccggctggtttgagagtgacaatggtaggtttcttctctttggctttgttttccctttgtgaagtggaga

SEQ ID NO: 783410 - DNA, 120 bp, Artificial Sequence
  ENSG00000255713_8 (sequence is synthesized)
gggagctactacctttgctctcttcatagtgtgttgaggttcatcatagcagggaatgaattttgaaactaagcaacttcgtgttttaggaaaaaagaaagtatcctctttggtggttaa

SEQ ID NO: 783411 - DNA, 120 bp, Artificial Sequence
  ENSG00000255713_9 (sequence is synthesized)
ggtttgtgataaagagttttaacacactcgcaacaatgagaattgttcacatggcccctgaaaaccacaccttccttttcaccttcttggtggacagtttcctgttgacagcatttcccc

SEQ ID NO: 783412 - DNA, 120 bp, Artificial Sequence
  ENSG00000255713_10 (sequence is synthesized)
tgtgcgaacatttctattttccgtattttgagctctcttcccaatatttccttttggtgtgagtctgggttgttgggaacagcacagaatttggagtcttaagctctaaattagaggccc

SEQ ID NO: 783413 - DNA, 120 bp, Artificial Sequence
  ENSG00000255713_11 (sequence is synthesized)
tgacccatcattgaccaaactgatgacttcgagtaagccacccagcttttcttggcctcatgatttctccctcaccaatttgcttaaattagtatgtgcccctaaaatattctatgtttg

SEQ ID NO: 783414 - DNA, 120 bp, Artificial Sequence
  ENSG00000255713_12 (sequence is synthesized)
cactatatgaatctttgaaaggcaggttgtatatacttctggatggcgttaagatttcaggaatgtatattccagcacccacttgtaaacgatccagagacaagacagcacctagtataa

SEQ ID NO: 783415 - DNA, 120 bp, Artificial Sequence
  ENSG00000255713_13 (sequence is synthesized)
tggtctacacataaggatgctcatcatatgggcctaaaaccttggttctgagcccctgagccctgaaagggaaagtagtgacttcatgtatctgtgtctgtggttcattttcttcaggtg

SEQ ID NO: 783416 - DNA, 120 bp, Artificial Sequence
  ENSG00000255713_14 (sequence is synthesized)
tgattgtattttattttcaaatatgaaattattatgagtattcaagctttttctctctatatttacattttaatataatatacaaattttgaataaaagatcatgggcaatgcatgcaca

SEQ ID NO: 783417 - DNA, 120 bp, Artificial Sequence
  ENSG00000255713_15 (sequence is synthesized)
ataaaagatcatgggcaatgcatgcacattatgaaacttatgtcattatgtataaatgctcatgtatacactactcgattcaagaaccagaagttaccaataacttgccttcacctgtat

SEQ ID NO: 783418 - DNA, 120 bp, Artificial Sequence
  ENSG00000255804_0 (sequence is synthesized)
cagtgtaaaaatccaacatgtaccttccagctgtctacaacacaagtgcatgctcgtcggacaagaggtcacagctaaggcaacaatccacatgagttgggaagggctcatttcacctgt

SEQ ID NO: 783419 - DNA, 120 bp, Artificial Sequence
  ENSG00000255804_1 (sequence is synthesized)
caaacactgctgctctcatgtggaatgcactgtggctttttggtcaagataattaccgtggaagatcctaggtggcagcaaatcccaggtgaacagactgagccgtggaggtggcataag

SEQ ID NO: 783420 - DNA, 120 bp, Artificial Sequence
  ENSG00000255804_2 (sequence is synthesized)
gcaaccctagccgaggagaattgagccaggcccaccaggcccatgggtaactggactgcagcggtgactgagtttgttctgctggggttttccctgagcagggaggtggagctgctgctc

SEQ ID NO: 783421 - DNA, 120 bp, Artificial Sequence
  ENSG00000255804_3 (sequence is synthesized)
ctggtgctcctgctgcccacgttcctgctgactcttctggggaacctgctcatcatctccactgtgctgtcctgctcccgcctccacacccccatgtacttcttcttgtgcaacctctct

SEQ ID NO: 783422 - DNA, 120 bp, Artificial Sequence
  ENSG00000255804_4 (sequence is synthesized)
atcctggacatcctcttcacctcagtcatctctccaaaagtgttggccaacttaggatctagggataaaaccatctcctttgccggatgtatcacccagtgctatttctactttttcttg

SEQ ID NO: 783423 - DNA, 120 bp, Artificial Sequence
  ENSG00000255804_5 (sequence is synthesized)
ggcacagttgagttcctcctgctgacggtcatgtcctatgaccgttatgccaccatctgctgccccctgcggtacaccaccatcatgagaccttctgtctgcattgggaccgttgtattc

SEQ ID NO: 783424 - DNA, 120 bp, Artificial Sequence
  ENSG00000255804_6 (sequence is synthesized)
tcttgggtgggaggcttcctgtctgtgctctttccaaccatcctcatctcccagctgcccttctgtggctccaatatcattaaccacttcttctgtgacagtggacccttgctggccctg

SEQ ID NO: 783425 - DNA, 120 bp, Artificial Sequence
  ENSG00000255804_7 (sequence is synthesized)
gcctgtgcagacaccactgccatcgagctgatggattttatgctttcttccatggtcatcctctgctgcatagtcctcgtggcctattcctatacgtacatcatcttgaccatagtgcgc

SEQ ID NO: 783426 - DNA, 120 bp, Artificial Sequence
  ENSG00000255804_8 (sequence is synthesized)
attccttctgcaagtggaaggaagaaggcctttaatacctgtgcttcccacctgaccatagtcatcatttctagtggcatcactgtgtttatctatgtgactccctcccagaaagaatat

SEQ ID NO: 783427 - DNA, 120 bp, Artificial Sequence
  ENSG00000255804_9 (sequence is synthesized)
ctggagatcaacaagatccctttggttctgagcagtgtggtgactccattcctcaacccctttatatatactctgaggaatgacacagtgcagggagtcctcagggatgtgtgggtcagg

SEQ ID NO: 783428 - DNA, 120 bp, Artificial Sequence
  ENSG00000255804_10 (sequence is synthesized)
gttcgaggagtttttgaaaagaggatgagggcagtgctgagaagcagattatcctccaacaaagaccaccaaggaagggcttgctcttctccaccatgtgtctattctgtaaagctccag

SEQ ID NO: 783429 - DNA, 120 bp, Artificial Sequence
  ENSG00000255804_11 (sequence is synthesized)
tgttagaaagagaggagctgccttagtgaaagagtgagctagctaaggaattctgaatagtctatagtggaaagactgactgcggagacagagacttgaacgctggccttggttttcact

SEQ ID NO: 783430 - DNA, 120 bp, Artificial Sequence
  ENSG00000255804_12 (sequence is synthesized)
ttaatctgtgaccgcagctgtgtcaccagccattctgactctcagtactctcagctgaagtgcaacagggctggacttgatgatctctaagccccatccacactgaatattgtaagaatg

SEQ ID NO: 783431 - DNA, 120 bp, Artificial Sequence
  ENSG00000255804_13 (sequence is synthesized)
gaagggccatgcagcctatttcctcctaaagtcctaacatgtttggccccatttctttatggatcccgaacacaactgttctatcggcttgacacgaagtccttcctgaacttctctgca

SEQ ID NO: 783432 - DNA, 120 bp, Artificial Sequence
  ENSG00000255804_14 (sequence is synthesized)
cggaccctctttctttccatcctctgcaggatctttttagaaataaccttcattattctctaatccactatcatatccatttttttttcgggcatttgcaatgattgtgttgggtgcatg

SEQ ID NO: 783433 - DNA, 120 bp, Artificial Sequence
  ENSG00000255804_15 (sequence is synthesized)
tcatctgtgttatttaataatattgctttctgtaatagaacatgttcataatatccaatatgctcatgtcgttatgtaagacatggccctgttcccctagccactaatgattgatccatg

SEQ ID NO: 783434 - DNA, 120 bp, Artificial Sequence
  ENSG00000255804_16 (sequence is synthesized)
gatggataatctgactgaaggcataacccatcacctgcagggacacttgcacacctaagagactggccagtgacctatgacctgtgtggcttggctggaccagaggagctgtgtaaacag

SEQ ID NO: 783435 - DNA, 120 bp, Artificial Sequence
  ENSG00000255804_17 (sequence is synthesized)
ttggtggctggagtggccactttgggtgccaggtgcaagctgatgaataattagaggaaaccagtctgcccctcagagagaatgcagttgatgtatagagaaaaacagagaagagagaga

SEQ ID NO: 783436 - DNA, 120 bp, Artificial Sequence
  ENSG00000255804_18 (sequence is synthesized)
tgacagcccactcacaacacaaaggcacaacacaaagagccctcttctctcatgacttcctagggctggagctggtagaattttgattcctattcctggatttgatgtgttttgcctgta

SEQ ID NO: 783437 - DNA, 120 bp, Artificial Sequence
  ENSG00000255804_19 (sequence is synthesized)
cctgtaaatgaaatccctttttattgagctatcttgagaaggtcttagattcttgtgaccaaaaagcagcttgactacaaagttcattatctctccacaaggcatagcttctcccctttt

SEQ ID NO: 783438 - DNA, 78 bp, Artificial Sequence
  ENSG00000255804_20 (sequence is synthesized)
agttcattatctctccacaaggcatagcttctccccttttctggctccatacacctggaaagaatctgttttgttttt

SEQ ID NO: 783439 - DNA, 81 bp, Artificial Sequence
  ENSG00000255804_21 (sequence is synthesized)
agccaagaatctgtttttaactgcattcctagtctgaattcttggtgcccaaacactgtctgggatgcttacttggaccca

SEQ ID NO: 783440 - DNA, 120 bp, Artificial Sequence
  ENSG00000255804_22 (sequence is synthesized)
ttggtgcccaaacactgtctgggatgcttacttggacccactctgggcctgtggttcagctcagtgcaaaccagcttttcaatatcatcagaatctctgaggtttaatttcttgtcttgc

SEQ ID NO: 783441 - DNA, 120 bp, Artificial Sequence
  ENSG00000255804_23 (sequence is synthesized)
ttggccgccagtgctgcagcatccactttgctaaattaacccctatgctctgcgtggaactggtcagaaggacacatgcatacctaaggaactgctgcagagttctgtggacataaatga

SEQ ID NO: 783442 - DNA, 120 bp, Artificial Sequence
  ENSG00000255804_24 (sequence is synthesized)
agactacttaaatgagcacagatgccacttattcagagctagctatatcaggggagtcagccaccatcacttgcatttggcagagagtcaaaggcaggcaggggagtggaaagcttcata

SEQ ID NO: 783443 - DNA, 120 bp, Artificial Sequence
  ENSG00000255804_25 (sequence is synthesized)
gtagaaaaaaagggaaaggcccgagtattccctgactggaggattttggcatggggaagctggaggtgagctaactagtgttgcgggaagtcaggcaccccaaacggagggaccggctga

SEQ ID NO: 783444 - DNA, 78 bp, Artificial Sequence
  ENSG00000255804_26 (sequence is synthesized)
acagcaattgttcagggaataagagagacaaccttaaactctgaccgctggtgagccgggggaatatcactgaattct

SEQ ID NO: 783445 - DNA, 120 bp, Artificial Sequence
  ENSG00000255804_27 (sequence is synthesized)
ggaacatccctgggaaagagagtacgcgcctgggagtgtagtcctatagacggcccccctgggcgtgcccgtcttttatggtctgtagactgtaggggtcaaatagaccccagtctccca

SEQ ID NO: 783446 - DNA, 120 bp, Artificial Sequence
  ENSG00000255804_28 (sequence is synthesized)
accctggtcctgtggtcctgtgatctcgccatgcctccctttgccttgtgatattctattactttgtaaagtacgtgacctctgtgacccacacctattcgtacactccctccccttttg

SEQ ID NO: 783447 - DNA, 62 bp, Artificial Sequence
  ENSG00000255804_29 (sequence is synthesized)
gggggcatcatggaacctagtgacatgtgatgtctcccccggctgcccagctttaaaatttc

SEQ ID NO: 783448 - DNA, 120 bp, Artificial Sequence
  ENSG00000255823_0 (sequence is synthesized)
caaacctagccccaaacccattccaccttactaccgaacagctttaaccaaatcatttacccaaataaagtataggcgatagaaattgtaaatcggcgcaatagatatagtaccgcaagg

SEQ ID NO: 783449 - DNA, 120 bp, Artificial Sequence
  ENSG00000255823_1 (sequence is synthesized)
gaaagatgaaaaattgcaaccaagcataatacagcaaggactaatccctgtaccttctgcataatgaattaactagaaataactttgcaaagagaaccaaagctaagacccccgaaacca

SEQ ID NO: 783450 - DNA, 120 bp, Artificial Sequence
  ENSG00000255823_2 (sequence is synthesized)
gacgagctacctaagaacagctaaaagagcacacccgtctatgtagcaaaatagtgggaagattcgtaggtagaggcgacaaacctaccgagtctggtgatagctggttgtccaagacag

SEQ ID NO: 783451 - DNA, 120 bp, Artificial Sequence
  ENSG00000255823_3 (sequence is synthesized)
aatcttagttcaactttaaatttacccacagaaccctccaaatccccctgtaaatttaactgttagtccaaagaggaacagctctttggacactaggaaaaaaccttgtaaagagagtaa

SEQ ID NO: 783452 - DNA, 120 bp, Artificial Sequence
  ENSG00000255823_4 (sequence is synthesized)
aaaatttaatacccacagtaggcctaaaagcagccaccaattaagaaagcgttcaagctcgacacctgtcatctaaaaaatcccaaacacataactgaactccttgcacccaattggacc

SEQ ID NO: 783453 - DNA, 120 bp, Artificial Sequence
  ENSG00000255823_5 (sequence is synthesized)
gacaattaacagcccaatatctataaccaaccaacaagccattattacccccactgttaacccaacacaggcatgcccacaaggaaaggttaaaaaaagtaaaaggaactcggcaaatct

SEQ ID NO: 783454 - DNA, 120 bp, Artificial Sequence
  ENSG00000255823_6 (sequence is synthesized)
ttaccaaaaacatcacctctagcattctcagtattagaggcaccgcctgcccagtgacatgcgtttaacggccgcggtaccctaactgtgcaaaggtagcataatcacttgttccttaaa

SEQ ID NO: 783455 - DNA, 120 bp, Artificial Sequence
  ENSG00000255823_7 (sequence is synthesized)
ttgttccttaaatagggacttgtatgaatggctccacgagggttcagctgtctcttactttcaaccagtgaaattgacctgcccgtgaagaggcgggcatagtataacaagacgagaaga

SEQ ID NO: 783456 - DNA, 120 bp, Artificial Sequence
  ENSG00000255823_8 (sequence is synthesized)
ccctatggagctttaattcattaacgcaaacaacacttaacaagtccacaggccctaaactatcaaacctgcgtgaaaaatttcggttggggcgacctcggagcacaatccgacctccga

SEQ ID NO: 783457 - DNA, 120 bp, Artificial Sequence
  ENSG00000255823_9 (sequence is synthesized)
gcaacacatgccgagacttcaccagtcaaagcgaattaccacgtttaattgatccaataacttgaccaacggaacaagttaccctagggataacagcgcaatcctattctagagtccata

SEQ ID NO: 783458 - DNA, 120 bp, Artificial Sequence
  ENSG00000255833_0 (sequence is synthesized)
aagaatgcaacaaaactgaagtatgttctgccacgttcctgaactgcagccataggagccctcccagccctacccaaaccagcctactccctctcaagagctcacagctgcaggactaga

SEQ ID NO: 783459 - DNA, 120 bp, Artificial Sequence
  ENSG00000255833_1 (sequence is synthesized)
gccagatgtgccccggcaataaggacttcttccatggagaagcccctcaccgtcctgcgagtgagcctgtaccatcccacgctgggcccatctgcctttgccaatgtcccaccacggctg

SEQ ID NO: 783460 - DNA, 120 bp, Artificial Sequence
  ENSG00000255833_2 (sequence is synthesized)
cagcatgataccagccctctgcttctcggacgggggcaggacgcccacctccagctgcagctccctcgcctctcccgccgtcacctgtccctggagccctacctggagaaaggcagtgcc

SEQ ID NO: 783461 - DNA, 120 bp, Artificial Sequence
  ENSG00000255833_3 (sequence is synthesized)
ctgctggccttctgcctcaaggccctgagccgcaagggctgtgtgtgggtcaatgggctgacgctgaggtacctggagcaggtccccctgagcaccgtcaacagggtctccttctcaggc

SEQ ID NO: 783462 - DNA, 120 bp, Artificial Sequence
  ENSG00000255833_4 (sequence is synthesized)
atccagatgctggttcgcgtagaagaaggcacatccctggaggcttttgtctgctatttccatgtcagcccttcacccctgatttacagacctgaggctgaggaaactgacgaatgggaa

SEQ ID NO: 783463 - DNA, 120 bp, Artificial Sequence
  ENSG00000255833_5 (sequence is synthesized)
ggcatctcccaggggcagcctccccctggttcagggtagcagatccaggttgcctggggtttctccacggcccttcccagacttgggacagccctctccagccaagacctggaggaggaa

SEQ ID NO: 783464 - DNA, 120 bp, Artificial Sequence
  ENSG00000255833_6 (sequence is synthesized)
cagaaatacagctccagagggaacccccagacagtgcactctgctagccctgccactagagcaagcctttgctagatgaaacaggatttgaaatacttgagctgcatcatgcaaggttga

SEQ ID NO: 783465 - DNA, 120 bp, Artificial Sequence
  ENSG00000255833_7 (sequence is synthesized)
caagcaaaacccactggctgccttgctcataatgaaccaattctgcaaacaccgaacaaacagcccaggggggagaagcaccctctgtggccagagctatgcaatgtaatgggaacatca

SEQ ID NO: 783466 - DNA, 120 bp, Artificial Sequence
  ENSG00000255833_8 (sequence is synthesized)
tatacttttagaggccctgaggggttctggggagcctctctcagcatttccacacatttctccctgttgtctgactaggagttactttatgtggttcattttgtgtgctgcttaagagca

SEQ ID NO: 783467 - DNA, 120 bp, Artificial Sequence
  ENSG00000255833_9 (sequence is synthesized)
ggagtttgaggttgcaccaggaatgcgtggacacatgtaacaattacatttgtggtagcttggggttaccttcagctttcaaatacccacaggcacgcggggcttaggaaagcctgagtg

SEQ ID NO: 783468 - DNA, 120 bp, Artificial Sequence
  ENSG00000255833_10 (sequence is synthesized)
taataaactgcaagtatttcattaagctggcatacccaataggattccctgatccccagatgggccacatgcacgccacgctgtcatgcagacgtgggggtgggaaatatagacgaggtg

SEQ ID NO: 783469 - DNA, 120 bp, Artificial Sequence
  ENSG00000255833_11 (sequence is synthesized)
taagaggaaattggaaaggtgggactcacatttctggaaaggatgcaggcagggctcagggtttcctgaggatgggagctgggagctgggcctgcctggaaattcattgtcccccttatc

SEQ ID NO: 783470 - DNA, 120 bp, Artificial Sequence
  ENSG00000255833_12 (sequence is synthesized)
atcctcatcctcacactccgcattctctgtcacttctggatcaaggccttggttgacttgagggcaaggtctttagggaatgaggggatggggtgggggtttgtgtaagaactcagccca

SEQ ID NO: 783471 - DNA, 120 bp, Artificial Sequence
  ENSG00000255833_13 (sequence is synthesized)
gcagttatttcgctcagggtgagtcacacaccaatgggggtgggggaattccttccaaataagggactcgttaggagccaggtacgccaagggcaggaggattttctcggtgaacaaggg

SEQ ID NO: 783472 - DNA, 120 bp, Artificial Sequence
  ENSG00000255833_14 (sequence is synthesized)
cagcagctatttgccacgccatgctgagaaggggagagtgtggtttagaaacaacgttcactagtgtgatgcagggagggatctacatggtcaccatgatcccagaccccactctccagg

SEQ ID NO: 783473 - DNA, 120 bp, Artificial Sequence
  ENSG00000255833_15 (sequence is synthesized)
gaatctgaggcaccaagggcacagccctgttcccctggctgactcgaatctctgggtctgtagctgtcaacaatttctgttttctgcccaaaaggatgatcgttttgcacccagggcaag

SEQ ID NO: 783474 - DNA, 120 bp, Artificial Sequence
  ENSG00000255833_16 (sequence is synthesized)
ctacaaggaggtccaacttcactcacaggccctgagcatcttctccatcaggaaaacagaggtgggcaagacccaggcttgccctggtgtgggaagcttcctctccaatagggatgaagc

SEQ ID NO: 783475 - DNA, 120 bp, Artificial Sequence
  ENSG00000255833_17 (sequence is synthesized)
aaaaacactcagatcacagccacaaggcagggagagcagggctgctaggaaggggctctctgatgctgtgaatgaccccttgggacccccaaagcagttcctcattcattcagcaaacct

SEQ ID NO: 783476 - DNA, 120 bp, Artificial Sequence
  ENSG00000255833_18 (sequence is synthesized)
tcaccaagcacccaccttgtgccagatctgtgcaaagccacggaactgaaccagaagtgaataaggcaaactccctcagggagtttaccttgcactcaggaaagtcaagcattcaggagt

SEQ ID NO: 783477 - DNA, 120 bp, Artificial Sequence
  ENSG00000255833_19 (sequence is synthesized)
gcattacttatttgatcactactatgattagtgctatagtcattgtatttttctctctcctccagctgggctcacattctcttgttaagtggccttgcctgttgagtgcctaccatgtgc

SEQ ID NO: 783478 - DNA, 120 bp, Artificial Sequence
  ENSG00000255833_20 (sequence is synthesized)
ttagcactctgctaggtgctgtgtgtattaactgcacttaacagataaggaaactgagacttggaaaggttacatatcttgcccaacatcacaccatcagtagctatgcgatttgggcaa

SEQ ID NO: 783479 - DNA, 120 bp, Artificial Sequence
  ENSG00000255833_21 (sequence is synthesized)
gtgatttagtctgctcttgcctctatttctcccgctggaaaatgggtaagataatagtactacctgctagagttacgagggtcttagaaggtgacacctgtaaagcattcaatcagtgcc

SEQ ID NO: 783480 - DNA, 120 bp, Artificial Sequence
  ENSG00000255833_22 (sequence is synthesized)
cagcacacacttaataagggttagctactatcatgagacctgagagaggagggctcaccatccacacggagctaaggaagactcacaccccagtaagctggctccagaacccaagggctt

SEQ ID NO: 783481 - DNA, 120 bp, Artificial Sequence
  ENSG00000255833_23 (sequence is synthesized)
acctgtgctctgtgattccccaactagggatttagttgtagccacggacctggtaggcaacagggaggggattttaatctgctccttgcatcagaaggtccaataggcagggttagtata

SEQ ID NO: 783482 - DNA, 120 bp, Artificial Sequence
  ENSG00000255833_24 (sequence is synthesized)
cattacggagcagcaacccacatacagaactcgagaagccacggcctggagactgtacctggacaccaaagactggagagaggagctggtggggaaaccccagagttcccagggtgccac

SEQ ID NO: 783483 - DNA, 120 bp, Artificial Sequence
  ENSG00000255833_25 (sequence is synthesized)
tccccagctccaccagagaactttgggaatgagctgctgcccctgagtgcccctctccagggcctcagtgagggtctctaccctccagggaggaacaaaaccttgccagctggggtcctg

SEQ ID NO: 783484 - DNA, 120 bp, Artificial Sequence
  ENSG00000255833_26 (sequence is synthesized)
cgagagggggcagttcaattcctccacaggggactctgcaactccaatctttcgagtgaagcatctgcgaggccctcagggacccaggatgaactgcatagcagcagaaggaagacaggc

SEQ ID NO: 783485 - DNA, 120 bp, Artificial Sequence
  ENSG00000255833_27 (sequence is synthesized)
cagaccaggcgggagggagcccggaaacatctggtttgtagtttcagactctacccgttcacagttcacacagtctcaccgggaaactcacaccttgccctgtaccaagtttttaaggca

SEQ ID NO: 783486 - DNA, 120 bp, Artificial Sequence
  ENSG00000255833_28 (sequence is synthesized)
gttaagctctgcccatccgagacttcatttttcttgagtagaaaatcactgaaatcatcagatccatggcacccaccttcactttctcctaacagctggaaccgtcaggctggcttcagg

SEQ ID NO: 783487 - DNA, 120 bp, Artificial Sequence
  ENSG00000255833_29 (sequence is synthesized)
gcctggtcttcgcacttgatatcactatccctcacctgctcagacagccagagcaggcgggtgagttcctcccaacaacctccactgcattctctcagctcccaccgcagggcagcccac

SEQ ID NO: 783488 - DNA, 120 bp, Artificial Sequence
  ENSG00000255833_30 (sequence is synthesized)
gtgcctgagtgaacatgtgtgcgtgtgcacacacgcaagtatgcacagacatacactaaacacgaacatacagtgcacatgaacgctgctcccagctagggccctctggtcagactgctg

SEQ ID NO: 783489 - DNA, 120 bp, Artificial Sequence
  ENSG00000255833_31 (sequence is synthesized)
cctgggttagaattcttgtccccacccccacttactatagttctgtgatcctggacaagtaactgaatctctccgtgccacagtttcttcttgtagaaaacgggaaagttcacagtactt

SEQ ID NO: 783490 - DNA, 120 bp, Artificial Sequence
  ENSG00000255833_32 (sequence is synthesized)
acctccttagagtcattgtgaaggtcagtttgaggcatcacaaatttaaggcacccagacataagggtcaacagggttagctatcactgtccagtttggtgggaggaactgaatgcatgt

SEQ ID NO: 783491 - DNA, 120 bp, Artificial Sequence
  ENSG00000255833_33 (sequence is synthesized)
aggcacatggacccagtctacactcaggcacaaaaggagctacattagttacattcaggcataccccagagcactacaattctctgagacattgtctggaaatctagaaatcatctcctt

SEQ ID NO: 783492 - DNA, 120 bp, Artificial Sequence
  ENSG00000255833_34 (sequence is synthesized)
gccctttaaggtattttaaccctcgcattcctctgcttttccaagaatgtgaatcttgccaagctgtccgtgagagacacgggctcccctcgagggagacttgcaaatgctccataaaca

SEQ ID NO: 783493 - DNA, 120 bp, Artificial Sequence
  ENSG00000255833_35 (sequence is synthesized)
gccacagtgtggggctctgccatgaggaagtcacagcagacacgctagacagcatagtcctggatgcaacctggaggaagggaggcccatggtggagcactcactccgtgcctgtctgcc

SEQ ID NO: 783494 - DNA, 120 bp, Artificial Sequence
  ENSG00000255833_36 (sequence is synthesized)
cggtgagacctcaagttccttgcagacaaaggccatgggttgttggctcttgtgttcccggtggcctttccagagctgaacagaggacagatgcacagacgggggggctctggtggtcaa

SEQ ID NO: 783495 - DNA, 120 bp, Artificial Sequence
  ENSG00000255833_37 (sequence is synthesized)
ggcagcagtccccttggatactaaagtctgagccaggcccctcaggcccggcatgggcagtgcgaggcccatagtggtgggaagccagttggccagctggggtgagaaggccgcgaagcc

SEQ ID NO: 783496 - DNA, 120 bp, Artificial Sequence
  ENSG00000255833_38 (sequence is synthesized)
atgggcagacaggaagtggaggtgaatgtctctgcctcctgtaggcctcagcagggacagcacagaccctctggctggggcagcgcagaccctctagctggggcagaacaaggctggtgc

SEQ ID NO: 783497 - DNA, 120 bp, Artificial Sequence
  ENSG00000255833_39 (sequence is synthesized)
ttccttctagtccttgagactttgtagctctaactcaagcagaaccctggggttttgggattctgtgtggtgactgctgaggaaggtttatggatttgacagggtgcatgtcacagagag

SEQ ID NO: 783498 - DNA, 120 bp, Artificial Sequence
  ENSG00000255833_40 (sequence is synthesized)
acagttctcagtcagcacttcctgtcccctgcagaggctcataggggacagcccctgccaaggagaccctggaggggctctgaggatagcaatcagaggttgggctggctggactgagcc

SEQ ID NO: 783499 - DNA, 120 bp, Artificial Sequence
  ENSG00000255833_41 (sequence is synthesized)
caggcctgttgcccaccaagtctccataggttctagtctgacccctctctccacccctgggctatgcaggccagcccgtgcagaccacccccgacgcgtccacttgcaacacccgcctca

SEQ ID NO: 783500 - DNA, 120 bp, Artificial Sequence
  ENSG00000255833_42 (sequence is synthesized)
ctgtgccaacactccatccacacaggaaaggactgagaacgtgatgcttaacccaaaggagtgagtttcataggatgggtggctttaacagtttcacagcaggacactgagggaatattt

SEQ ID NO: 783501 - DNA, 120 bp, Artificial Sequence
  ENSG00000255833_43 (sequence is synthesized)
ccctatcccttcaaatggacggtcactacagaaacgtgtagagcaagactttgtcaaggggctgtttccaggtctcccggtgtctaaatagcagagctggaatgggaactgagaaccgat

SEQ ID NO: 783502 - DNA, 120 bp, Artificial Sequence
  ENSG00000255833_44 (sequence is synthesized)
tctttccacaaccgcccactgagcagcaaggctgcagccagcaaagaggtgcggaggcaagcaagctccatgtggtggggacagcgcattgcgacctccaccacccctgcagtgggctgc

SEQ ID NO: 783503 - DNA, 120 bp, Artificial Sequence
  ENSG00000255833_45 (sequence is synthesized)
cagctgagccacctgtcttccactgtatctactgtacgaacttctccagctctgctctgttttctcttcctcagcatccaccccgtgacacgtagtggtggctgatgtcgccacagtacc

SEQ ID NO: 783504 - DNA, 120 bp, Artificial Sequence
  ENSG00000255833_46 (sequence is synthesized)
atgaggttaacaggtcctccctccagcttccctcatggtggcagcctaacctgcattgcagccgttcaccggacaccgcaccagaccctcaaaacccatccaagactgtgggaggagtaa

SEQ ID NO: 783505 - DNA, 120 bp, Artificial Sequence
  ENSG00000255833_47 (sequence is synthesized)
acaacccagcccagttaagaggagatgccgaatttaatgaaccctatttgaattgcagggctgtgattcctcttacctttaacgtgaactcacaggcggattaaagtgaaataaaaccta

SEQ ID NO: 783506 - DNA, 120 bp, Artificial Sequence
  ENSG00000255837_0 (sequence is synthesized)
atgatgagttttctacacattgttttttccattctagtagtggttgcatttattcttggaaattttgccaatggctttatagcactgataaatttcattgcctgggtcaagagacaaaag

SEQ ID NO: 783507 - DNA, 120 bp, Artificial Sequence
  ENSG00000255837_1 (sequence is synthesized)
atctcctcagctgatcaaattattgctgctctggcagtctccagagttggtttgctctgggtaatattattacattggtattcaactgtgttgaatccaacttcatctaatttaaaagta

SEQ ID NO: 783508 - DNA, 120 bp, Artificial Sequence
  ENSG00000255837_2 (sequence is synthesized)
ataatttttatttctaatgcctgggcagtaaccaatcatttcagcatctggcttgctactagcctcagcatattttatttgctcaagatcgtcaatttctccagacttatttttcatcac

SEQ ID NO: 783509 - DNA, 120 bp, Artificial Sequence
  ENSG00000255837_3 (sequence is synthesized)
ttaaaaaggaaggctaagagtgtagttctggtgatagtgttggggtctttgttctttttggtttgtcaccttgtgatgaaacacacgtatataaatgtgtggacagaagaatgtgaagga

SEQ ID NO: 783510 - DNA, 120 bp, Artificial Sequence
  ENSG00000255837_4 (sequence is synthesized)
aacgtaacttggaagatcaaactgaggaatgcaatgcacctttccaacttgactgtagccatgctagcaaacttgataccattcactctgaccctgatatcttttctgctgttaatctac

SEQ ID NO: 783511 - DNA, 120 bp, Artificial Sequence
  ENSG00000255837_5 (sequence is synthesized)
ccaagatccacataaaagctctgcaaactgtgacctccttcctcatattacttgccatttactttctgtgtctaatcatatcgttttggaattttaagatgcgaccaaaagaaattgtct

SEQ ID NO: 783512 - DNA, 120 bp, Artificial Sequence
  ENSG00000255837_6 (sequence is synthesized)
taatgctttgccaagcttttggaatcatatatccatcattccactcattcattctgatttgggggaacaagacgctaaagcagacctttctttcagttttgtggcaggtgacttgctggg

SEQ ID NO: 783513 - DNA, 120 bp, Artificial Sequence
  ENSG00000255837_7 (sequence is synthesized)
caaaaggacagaaccagtcaactccatagattcacaagaggtgcattgtgtgttttctagcagaaaacaaattgatggtgtctggaacattttatatttcccacaagtttttccgtagtc

SEQ ID NO: 783514 - DNA, 120 bp, Artificial Sequence
  ENSG00000255837_8 (sequence is synthesized)
tatgtatttgagtaatttccaaaagttgacatagaaaagtcttttacctaagtttattatataaaagtatatatatataatatacatttgcgtgtgtgtgtatgtctgaatgtatatgaa

SEQ ID NO: 783515 - DNA, 120 bp, Artificial Sequence
  ENSG00000255837_9 (sequence is synthesized)
aatttaatatttaccataacatacctttaatcaacttttcatataaactgttcagttataccaaagtaggataagaaatttctcagaattatgaacccatgtgtatttcacacatttttt

SEQ ID NO: 783516 - DNA, 120 bp, Artificial Sequence
  ENSG00000255837_10 (sequence is synthesized)
tatatgatatttcatttgaggaatttatgatctctatttataattaagaactgacagcttatatcagaaaatcattgctgtttttcgttgtaaaatcattgctgtttttcgttgtaattt

SEQ ID NO: 783517 - DNA, 120 bp, Artificial Sequence
  ENSG00000255855_0 (sequence is synthesized)
atgaagtctgtgcactccagtccccagaacacgagtcataccatcatgacgttttacccaaccatggaagaatttgcagatttcaacacatatgttgcttacatggagtcccaaggcgca

SEQ ID NO: 783518 - DNA, 120 bp, Artificial Sequence
  ENSG00000255855_1 (sequence is synthesized)
caccgagctggcctcgccaaggtaattccacccaaggaatggaaagccagacagatgtatgatgatattgaagacatcttaatagccactcccctccagcaggtgacctctgggcaggga

SEQ ID NO: 783519 - DNA, 120 bp, Artificial Sequence
  ENSG00000255855_2 (sequence is synthesized)
ggtgtgtttactcaataccataaaaagaagaaagccatgagggtggggcagtatcgccacttggcaaacagtaaaaaatatcagactccgccacaccagaattttgcagatttggagcaa

SEQ ID NO: 783520 - DNA, 120 bp, Artificial Sequence
  ENSG00000255855_3 (sequence is synthesized)
cgatactggaagagccaccccggtaatccaccaatttatggtgctgatatcagcggctccttatttgaagaaagcactaaacaatggaacctaggacacctgggaacaattctggacctg

SEQ ID NO: 783521 - DNA, 120 bp, Artificial Sequence
  ENSG00000255855_4 (sequence is synthesized)
ttggagcaggaatgtggggttgtcatcgagggtgtcaacacaccctacctgtactttggcatgtggaagaccacgtttgcttggcacacggaggacatggacctttacagcatcaactac

SEQ ID NO: 783522 - DNA, 120 bp, Artificial Sequence
  ENSG00000255855_5 (sequence is synthesized)
ctgcactttggggagcccaaaacttggtacgtggtgcccccagaacatggtcagcgcctggaatgcctggccagggagctcttcccaggcaattcccggggctgtgagggcttcctgcgg

SEQ ID NO: 783523 - DNA, 120 bp, Artificial Sequence
  ENSG00000255855_6 (sequence is synthesized)
cacaaggtggccctcatctcgcctacagttctcaaaaagaatgggatccccttcaatcgcatgactcaggaggctggggagttcatggtgacttttccctatggctaccatgctggcttc

SEQ ID NO: 783524 - DNA, 120 bp, Artificial Sequence
  ENSG00000255855_7 (sequence is synthesized)
gccttcgtgcgcatcctgcaacccgagagctatgagctctggaaacacaggcaagacttgactgttgtggattacatggagcccagggttgcagaaagccaagagccgagcaactggagg

SEQ ID NO: 783525 - DNA, 120 bp, Artificial Sequence
  ENSG00000255855_8 (sequence is synthesized)
gaggacatagcacttaggagagctgctctgggcctgaggcatctccggaaccacataaccagctgtcccacacggactgtggccccaaggctctgttacaacccaaagggcggtggtacc

SEQ ID NO: 783526 - DNA, 120 bp, Artificial Sequence
  ENSG00000255855_9 (sequence is synthesized)
gatgctgtgcctggatctgcaatccaagccctggagacgtcagcctgggttcttcccccttccactggaaggtggggtccttgtcgtggctgtggtcgtggtcgaggtcgtggtcgaggc

SEQ ID NO: 783527 - DNA, 120 bp, Artificial Sequence
  ENSG00000255855_10 (sequence is synthesized)
cgtggtcgtcgtcctcgagaactggggactgaggagacaactgttcagtctgcagctaagaggcgcctctcagtggggacagggagcagagctccaggccgcaaacctcagctccagttc

SEQ ID NO: 783528 - DNA, 120 bp, Artificial Sequence
  ENSG00000255855_11 (sequence is synthesized)
gccgatgaagctttgacagacaaacccgcacctttgagcggtggccttccgcattttgcaaaggcttctggctgctgttgtgcccctgatcttcaacccctggggcccccactggatcct

SEQ ID NO: 783529 - DNA, 120 bp, Artificial Sequence
  ENSG00000255855_12 (sequence is synthesized)
gatgaacccatgcaccctggcccctgcctgctatccctcgacagcactgctagtagtcttcctcttgttgtccctatgactcctcccagtgtcactgtgcctttgattacattgtccagg

SEQ ID NO: 783530 - DNA, 120 bp, Artificial Sequence
  ENSG00000255855_13 (sequence is synthesized)
gacactggtggagactggaaatccccggtgaatctggccaaggttgtagcaatggaccattcttatgcctctagggttccggtcccaactaagttttccaggatctcctgggcccctgac

SEQ ID NO: 783531 - DNA, 120 bp, Artificial Sequence
  ENSG00000255855_14 (sequence is synthesized)
tcatctgctggggctaaagccagacagagatacgccactgaatttggagatattttcctccaatgcatgatcaatcctctggacccatggccattgaatatggtgtcaaatgtcaagtga

SEQ ID NO: 783532 - DNA, 120 bp, Artificial Sequence
  ENSG00000255974_0 (sequence is synthesized)
atctatcatcccactaccaccatgctggcctcagggatgcttctggtggccttgctggtctgcctgactgtaatggtcttgatgtctgtttggcagcagaggaagagcaaggggaagctg

SEQ ID NO: 783533 - DNA, 120 bp, Artificial Sequence
  ENSG00000255974_1 (sequence is synthesized)
cctccgggacccaccccattgcccttcattggaaactacctgcagctgaacacagagcagatgtacaactccctcatgaagatcagtgagcgctatggccccgtgttcaccattcacttg

SEQ ID NO: 783534 - DNA, 120 bp, Artificial Sequence
  ENSG00000255974_2 (sequence is synthesized)
gggccccggcgggtcgtggtgctgtgtggacatgatgccgtcagggaggctctggtggaccaggctgaggagttcagcgggcgaggcgagcaagccaccttcgactgggtcttcaaaggc

SEQ ID NO: 783535 - DNA, 120 bp, Artificial Sequence
  ENSG00000255974_3 (sequence is synthesized)
tatggcgtggtattcagcaacggggagcgcgccaagcagctccggcgcttctccatcgccaccctgcgggacttcggggtgggcaagcgaggcatcgaggagcgcatccaggaggaggcg

SEQ ID NO: 783536 - DNA, 120 bp, Artificial Sequence
  ENSG00000255974_4 (sequence is synthesized)
ggcttcctcatcgacgccctccggggcactggcggcgccaatatcgatcccaccttcttcctgagccgcacagtctccaatgtcatcagctccattgtctttggggaccgctttgactat

SEQ ID NO: 783537 - DNA, 120 bp, Artificial Sequence
  ENSG00000255974_5 (sequence is synthesized)
aaggacaaagagttcctgtcactgttgcgcatgatgctaggaatcttccagttcacgtcaacctccacggggcagctctatgagatgttctcttcggtgatgaaacacctgccaggacca

SEQ ID NO: 783538 - DNA, 120 bp, Artificial Sequence
  ENSG00000255974_6 (sequence is synthesized)
cagcaacaggcctttcagttgctgcaagggctggaggacttcatagccaagaaggtggagcacaaccagcgcacgctggatcccaattccccacgggacttcattgactcctttctcatc

SEQ ID NO: 783539 - DNA, 120 bp, Artificial Sequence
  ENSG00000255974_7 (sequence is synthesized)
gggggcaccgagaccgtcagcaccaccctgcgctatggcttcttgctgctcatgaagcacccagaggtggaggccaaggtccatgaggagattgacagagtgatcggcaagaaccggcag

SEQ ID NO: 783540 - DNA, 120 bp, Artificial Sequence
  ENSG00000255974_8 (sequence is synthesized)
cccaagtttgaggaccgggccaagatgccctacatggaggcagtgatccacgagatccaaagatttggagacgtgatccccatgagtttggcccgcagagtcaaaaaggacaccaagttt

SEQ ID NO: 783541 - DNA, 120 bp, Artificial Sequence
  ENSG00000255974_9 (sequence is synthesized)
cgggatttcttcctccctaagggcaccgaagtgtaccctatgctgggctctgtgctgagagaccccagtttcttctccaacccccaggacttcaatccccagcacttcctgaatgagaag

SEQ ID NO: 783542 - DNA, 120 bp, Artificial Sequence
  ENSG00000255974_10 (sequence is synthesized)
gggcagtttaagaagagtgatgcttttgtgcccttttccatcggaaagcggaactgtttcggagaaggcctggccagaatggagctctttctcttcttcaccaccgtcatgcagaacttc

SEQ ID NO: 783543 - DNA, 120 bp, Artificial Sequence
  ENSG00000255974_11 (sequence is synthesized)
cgcctcaagtcctcccagtcacctaaggacattgacgtgtcccccaaacacgtgggctttgccacgatcccacgaaactacaccatgagcttcctgccccgctgagcgagggctgtgccg

SEQ ID NO: 783544 - DNA, 120 bp, Artificial Sequence
  ENSG00000255974_12 (sequence is synthesized)
gtgcaggtctggtgggcggggccagggaaagggcagggccaagaccgggcttgggagaggggcgcagctaagactgggggcaggatggcggaaaggaaggggcgtggtggctagagggaa

SEQ ID NO: 783545 - DNA, 120 bp, Artificial Sequence
  ENSG00000255974_13 (sequence is synthesized)
gagaagaaacagaagcggctcagttcaccttgataaggtgcttccgagctgggatgagaggaaggaaacccttacattatgctatgaagagtagtaataatagcagctcttatttcctga

SEQ ID NO: 783546 - DNA, 120 bp, Artificial Sequence
  ENSG00000255974_14 (sequence is synthesized)
cccaccccccagactacggggacttccagcccctctctgtgtccccagcatcccacccacattagaagctttctagaccctgtcccactccctcaatcagtcaaaaaagacttccccaac

SEQ ID NO: 783547 - DNA, 120 bp, Artificial Sequence
  ENSG00000255974_15 (sequence is synthesized)
caccacatccgttccacctttccacttagacactcctgagtcctgcatctctccagactctttgtgtcaggagaatcaaacacatgttcccaaacttcctatcttaagaaacagaagccc

SEQ ID NO: 783548 - DNA, 120 bp, Artificial Sequence
  ENSG00000255974_16 (sequence is synthesized)
cctttccattcggccttttgtcatagggacagaaatctcaggtcccccaaactcctgcctagaaggacatggaccccatgtctcccaaacttcctgtttcagagatgtgaaccttctatc

SEQ ID NO: 783549 - DNA, 120 bp, Artificial Sequence
  ENSG00000256029_0 (sequence is synthesized)
ctcaaagaggaggcccagaaacgccgtgagcgcatcgatgagatcaagaggaaaaagcttgaagagctgagttccttagttaccaggacaagaggatcaaccatggcagccttccccatc

SEQ ID NO: 783550 - DNA, 120 bp, Artificial Sequence
  ENSG00000256029_1 (sequence is synthesized)
ctgcaggtatctgatacagccacttatgagtgccgggtgaagaagaccaccatggccacccggaaggtcattgtcactgtccaagcacgacctgcagtgcccatgtgctggacagagggc

SEQ ID NO: 783551 - DNA, 120 bp, Artificial Sequence
  ENSG00000256029_2 (sequence is synthesized)
ctcaaagaggaggcccagaaacgccgtgagcgcatcgatgagatcaagaggaaaaagcttgaagagctgagcactgctgtctgctgtgcggatcaacggggatggacaggaggtcctgta

SEQ ID NO: 783552 - DNA, 120 bp, Artificial Sequence
  ENSG00000256029_3 (sequence is synthesized)
ccctgaggactatggtcccaatgggctggacatcgagtggatgcaggtcaactcagaccccgcccaccaccgagagaacgtgttccttagttaccaggacaagaggatcaaccatggcag

SEQ ID NO: 783553 - DNA, 120 bp, Artificial Sequence
  ENSG00000256029_4 (sequence is synthesized)
ggccaagatcagtgggcaccattacccctatcgagctgggtcttacacctcccagcacagctaccactcagagctgtcctaccaggagtccttccacagctccataaaccaaggcctgaa

SEQ ID NO: 783554 - DNA, 120 bp, Artificial Sequence
  ENSG00000256029_5 (sequence is synthesized)
caatggggacctggtgttgaaggatatctccagagcagatgatgggctgtatcagtgcacagtggccaacaacgtgggctacagtgtttgtgtggtggaggtgaaggtctcagactcccg

SEQ ID NO: 783555 - DNA, 120 bp, Artificial Sequence
  ENSG00000256029_6 (sequence is synthesized)
gcgtataggcgtgatcatcggcatcgtcctgggctctctgctcgcgctgggctgcctggccgtaggcatctgggggctcgtctgctgctgctgcgggggctccggggctggcggcgcccg

SEQ ID NO: 783556 - DNA, 120 bp, Artificial Sequence
  ENSG00000256029_7 (sequence is synthesized)
cggtgccttcggctacggcaacggcggcggggtcggcggaggggcctgcggcgacttggctagtgagatcagagaggacgccgtggcgcccgggtgcaaggccagcgggcgcggcagccg

SEQ ID NO: 783557 - DNA, 120 bp, Artificial Sequence
  ENSG00000256029_8 (sequence is synthesized)
cgtcacccacctcctggggtacccgacgcagaacgtcagccgctccctgcgccgcaagtacgcgcctcccccctgcggcggccccgaggacgtggccctggcgccctgcaccgccgccgc

SEQ ID NO: 783558 - DNA, 120 bp, Artificial Sequence
  ENSG00000256029_9 (sequence is synthesized)
cgcctgcgaagcgggcccctccccggtctacgtcaaggtcaagagcgcggagccggctgactgcgccgaggggccggtgcagtgcaagaacggcctcttggtctccagcccacactgtga

SEQ ID NO: 783559 - DNA, 120 bp, Artificial Sequence
  ENSG00000256029_10 (sequence is synthesized)
agagccttgtgcccacagctgtgcacatcctgggcttcctccacaccttgtccataaactgcccctcagctaccttcagacccaggatacagacgcagcctccagaagaataaatgctcc

SEQ ID NO: 783560 - DNA, 120 bp, Artificial Sequence
  ENSG00000256029_11 (sequence is synthesized)
attagcagctggctggagctggctgaggctctggctggtgactctggcctctggtgtagacttccctcaggtgagtgcatggatgagagctctaccttctcctgactgcccaggcctcag

SEQ ID NO: 783561 - DNA, 120 bp, Artificial Sequence
  ENSG00000256029_12 (sequence is synthesized)
gacaacaggtaagccaagaggctcaggccttcccctgcacttcttgtccttctgctgggagtggccaggcctgtggtcagtccttccaccatctgcctctctcatgtcctcatgcggagg

SEQ ID NO: 783562 - DNA, 120 bp, Artificial Sequence
  ENSG00000256029_13 (sequence is synthesized)
catccctacgtgtggggatctgtgctcagtgctcaggaggcatccagcaccctgggtgtctgtggattgttagggattttctgggactgttaggctgtcaggttgttatcaatgaggggc

SEQ ID NO: 783563 - DNA, 120 bp, Artificial Sequence
  ENSG00000256029_14 (sequence is synthesized)
aggagggatcccagggtatttctgagcatcgaagagagaggtccaggctaccaactggttgtgtcttctttgctggggggtgggagcgggggtagtggctccctggtctgggagcaggac

SEQ ID NO: 783564 - DNA, 120 bp, Artificial Sequence
  ENSG00000256029_15 (sequence is synthesized)
tgcagtgagtatgctggagctctgagctcctgcagttaagccaactgaaggtgggcgtatggttgagtggttaactgcaggtgggcatatggttgagtgggtcagccagcagacagagct

SEQ ID NO: 783565 - DNA, 120 bp, Artificial Sequence
  ENSG00000256029_16 (sequence is synthesized)
ccgacctcttcattttctctctggttagacagagtttaaatggctttacctgactttggaagactcctgaggagtctaagcaggtccagccagtgggtacaggcttgaagaccaacaggg

SEQ ID NO: 783566 - DNA, 120 bp, Artificial Sequence
  ENSG00000256029_17 (sequence is synthesized)
tgggctggcagatgagacagtatcagcatctcagtccaggcgtcccagccaggaccaccctaaccaccaccaggaggatggaaccagcccctagcccttgtgagtggctctcccttttct

SEQ ID NO: 783567 - DNA, 120 bp, Artificial Sequence
  ENSG00000256029_18 (sequence is synthesized)
gtaccatctcaagggaaacctgaagacaagctaccagcatgagatgtcctggtgttcagggaacacagttaaacaaaagtgtgatgctgctgtgggaaagcctgccccaggacaccacca

SEQ ID NO: 783568 - DNA, 120 bp, Artificial Sequence
  ENSG00000256029_19 (sequence is synthesized)
taccatgctgtcttcagttcctgccagctgaagttttattcccaggcaatgctttctccttttaccgtttcccgtggggacctgactggctgtctttggggactgaggtcttacaggcca

SEQ ID NO: 783569 - DNA, 120 bp, Artificial Sequence
  ENSG00000256029_20 (sequence is synthesized)
ggaggtgcctttgagctcatgctaggggctgtgtgcctgtgaactcactggaatcctttgttgacacattgctttcttaccagtctgtgagctctttgagggcagggcttgtgatgctac

SEQ ID NO: 783570 - DNA, 120 bp, Artificial Sequence
  ENSG00000256029_21 (sequence is synthesized)
tatttagtaattcctgtatcccagttggtgctgacacatagtaggtgcatagtaagtgcttactgaatgaatggatgggtgcatttcctgttctacagatacctgttcaaactttgtttt

SEQ ID NO: 783571 - DNA, 120 bp, Artificial Sequence
  ENSG00000256029_22 (sequence is synthesized)
gtactttattttgttaacccagttaatgcttctgacaagaagttctacagctcctccccaccccatcaaagaggagggcccttggcctcaaataggccaatcaggctctgttggtgggga

SEQ ID NO: 783572 - DNA, 120 bp, Artificial Sequence
  ENSG00000256029_23 (sequence is synthesized)
gttgaatcttcagtgagcaactggggaagagaaaacagaacagaactattttcggaggccccgaggcctgcatcctcaaggctacctggctttgtcttttctgaggctcggtcaacattt

SEQ ID NO: 783573 - DNA, 120 bp, Artificial Sequence
  ENSG00000256029_24 (sequence is synthesized)
tccttggttctctgagttactcacatctttctaatacatttcctcttttactttagttaaaaccagagttggtttctgttgcttgcctccaaagaaccctgactgatataagtgttttcc

SEQ ID NO: 783574 - DNA, 120 bp, Artificial Sequence
  ENSG00000256029_25 (sequence is synthesized)
tgttatttttaaatcttctaaagtattgctctgagatggtttctgcttaagcagattcattgaaacagtttacttcatatttggatttttccatttgtcagaacattcttccttggtagt

SEQ ID NO: 783575 - DNA, 120 bp, Artificial Sequence
  ENSG00000256029_26 (sequence is synthesized)
gtggtgcagtagaagggactggactgatttagataatctaaaggtaattctgactgtgccactaattatgtaatttcagaggagtaacattctctttggatttcagtttccacatgagaa

SEQ ID NO: 783576 - DNA, 120 bp, Artificial Sequence
  ENSG00000256029_27 (sequence is synthesized)
ataaaaaaacttgaactgagtaaccacagatttccttccagctttaagatcctattattcatatgagtcaatatctgccttttagtgatatgctccattggccccagttacatggtctgg

SEQ ID NO: 783577 - DNA, 120 bp, Artificial Sequence
  ENSG00000256029_28 (sequence is synthesized)
gcttatgtgataacccttcaaatatttgagaacctatgctcctgcgagtgttttgttctaggcccaacataaccagtttctgtaatcatttctcatatggtaaggtttttagacttttca

SEQ ID NO: 783578 - DNA, 120 bp, Artificial Sequence
  ENSG00000256029_29 (sequence is synthesized)
ccattctggtcattctcttccagacactccagtttttcagtgtcttcctgaaagtgtggcttcgagacctggacctggactagtcatgctgtgggagtctccccactacttacccgtgtg

SEQ ID NO: 783579 - DNA, 120 bp, Artificial Sequence
  ENSG00000256029_30 (sequence is synthesized)
ctcagcctgcccctcctggcacataatgttgactaaggcacagcccaaggggaggcagccaccataactttcctagatctagggatagttattttttgtcattttagaggcccttccttc

SEQ ID NO: 783580 - DNA, 120 bp, Artificial Sequence
  ENSG00000256029_31 (sequence is synthesized)
tgaacaggtgctagttcttaatacacatggaagaaagatttgctacaggtgtcattaatgtttgcagcagtttttttttttttttttaattgagacggagtctcactctgttgcccgggc

SEQ ID NO: 783581 - DNA, 120 bp, Artificial Sequence
  ENSG00000256029_32 (sequence is synthesized)
tgaagtgcagtggcacaatctcagctcatgcagcagtttttttaaaaatgaggcactgaatgttcatgtctccattgatgagaaaaatgtcctctctaacccttttcttatgctattccc

SEQ ID NO: 783582 - DNA, 120 bp, Artificial Sequence
  ENSG00000256029_33 (sequence is synthesized)
ctttcctattctctctgatatcatgtttcatgagccctttgccctagcagctcttgtatttgtcttttgtacaggagaacagatgcaaaaactattgctcaaggaaaataaagtgaaaac

SEQ ID NO: 783583 - DNA, 120 bp, Artificial Sequence
  ENSG00000256029_34 (sequence is synthesized)
gaggaaaagcaaaagaagatctggagagggctctcacctgaccacaagcatcctggagcaatgaggtagagggtgttctgggaggagtctgatatctggactctcgaggggttctttctg

SEQ ID NO: 783584 - DNA, 120 bp, Artificial Sequence
  ENSG00000256029_35 (sequence is synthesized)
tcattgtaactccaacaaaggggcattccgacgaagtcccatatgatgtggccccaggccatctctctgtactcttgtccttcccctctctctcccttgtttggatccagcccctctggc

SEQ ID NO: 783585 - DNA, 120 bp, Artificial Sequence
  ENSG00000256029_36 (sequence is synthesized)
ctccactctcttctttgcaaacaccaaccatgctgccattttagggccgttgcattttctggtctctttgtctggaacactctgtcactgcatgctcactcctccacttcactgggcctc

SEQ ID NO: 783586 - DNA, 120 bp, Artificial Sequence
  ENSG00000256029_37 (sequence is synthesized)
tgttcaaatgtcaccccattgagggtgtcatctgattgctttatctaagacagaccctgtctccccaacagattgttctctagccctttactctgccttgtctttaacagaaactaacaa

SEQ ID NO: 783587 - DNA, 120 bp, Artificial Sequence
  ENSG00000256029_38 (sequence is synthesized)
catctgacatatgcttacttgtttatttatattatccagaccataaactctcaaaggcaagggtttcgcttgactactgattcccaagtgccaagaaatgtacccagcacatgcagcgcc

SEQ ID NO: 783588 - DNA, 120 bp, Artificial Sequence
  ENSG00000256029_39 (sequence is synthesized)
ctcaatcaatatttgttgtggtgtgacttacaaagcatcagtctcaatgctcattagcacaaaattggtctcacagaagcactttgtgtttttttggtggagggttaattagtccactag

SEQ ID NO: 783589 - DNA, 120 bp, Artificial Sequence
  ENSG00000256029_40 (sequence is synthesized)
ttgacaagtgagtcattaaggatgggaactttattagagcagtgtggatctgttcaacaaggccctggtgcaccacgctacaaaccactgtcgaaatgaggttgctaagagtcaccttgt

SEQ ID NO: 783590 - DNA, 120 bp, Artificial Sequence
  ENSG00000256029_41 (sequence is synthesized)
ggagggagagctgcaggtcccatctcatccagagctgctttgatctgaggtggggccctggagatgaacgaaagaaaggtggggagtgctgtgtattttttccccacaaatccaccaggg

SEQ ID NO: 783591 - DNA, 120 bp, Artificial Sequence
  ENSG00000256029_42 (sequence is synthesized)
ctcattgtcagatcctgggctttcctttccacatcatttttagggactgaggccagttttgcatgattcagtgaccaggcatgtggcctgactgtaggtggcaggtggggatggtgcaag

SEQ ID NO: 783592 - DNA, 120 bp, Artificial Sequence
  ENSG00000256029_43 (sequence is synthesized)
ctgacaggttgagtggccatggaccctgttcaggtaatcttgggggaaggtgataggagagaagtgggtgtgggaaagggatgagaatttgataaagccaggttaccaacagggaacctc

SEQ ID NO: 783593 - DNA, 120 bp, Artificial Sequence
  ENSG00000256029_44 (sequence is synthesized)
tgagcaggccaggcagggaggatctgggaacaatcgagtggaagagtggtgatgtggatctggaggccagctgtgctgatcctttgtccaaggtgaagtgattgcccaggaactggggag

SEQ ID NO: 783594 - DNA, 120 bp, Artificial Sequence
  ENSG00000256029_45 (sequence is synthesized)
aagagggaaggtccttggacagggctgacatcctaggtggggagattgaagccaccctgggaaaatagtacttcaaacccacccctgtttcttcaatacctctttcctcgctgttatcaa

SEQ ID NO: 783595 - DNA, 120 bp, Artificial Sequence
  ENSG00000256029_46 (sequence is synthesized)
gactggattgaggccccagaaaaaatccagttacacctgggtgagagaaactgtgaaccttatcagctaataatccccgaaggtaagtttagctccttaagtgtttttccagtagtgatc

SEQ ID NO: 783596 - DNA, 120 bp, Artificial Sequence
  ENSG00000256029_47 (sequence is synthesized)
aatactccagagcttttctagacagaatcattcaggggcagaatgtattttcctaagatggccacaataaaaagtttgatggagtcagagtgacctctacagtcctgctgttgggctgtg

SEQ ID NO: 783597 - DNA, 120 bp, Artificial Sequence
  ENSG00000256029_48 (sequence is synthesized)
gggtctttgtcccctccccttgaactaaggtaagtcttctgcatttgcatttgaaaatgaatgtggcagattctagagtgcctcagtaccctttctctccataatgttccttctgcatag

SEQ ID NO: 783598 - DNA, 120 bp, Artificial Sequence
  ENSG00000256029_49 (sequence is synthesized)
cgttttatggttcttcactctctcagtttcaggcaggaagactcatcctgagctgagctgcttttcttgaagttgtgcaagaacgtcctgttggctggggcaaattcagtatttcttttc

SEQ ID NO: 783599 - DNA, 120 bp, Artificial Sequence
  ENSG00000256029_50 (sequence is synthesized)
ctggccactgtgctggagcgtgaggaaagactctccaccctcactcccagatcctgcaggaggcgtgagagcggatggagatggtgaggatgtctattaatatggtgtttcctgcaaaac

SEQ ID NO: 783600 - DNA, 120 bp, Artificial Sequence
  ENSG00000256029_51 (sequence is synthesized)
ggtgcccatctcaaccatgggttgtcaaccatcctcggtgtctacaactgcaatttacctttgagggcccatgaactctgattacctgaaagtccttaggccagaaagagaaacccctgt

SEQ ID NO: 783601 - DNA, 120 bp, Artificial Sequence
  ENSG00000256029_52 (sequence is synthesized)
cccccacctctcactttcacctatttctagaccttttcttacagcaatgccttggccctcaggaagcatcagatctcaaactgcagggtctggggctgaagctgatgctggcatgggtga

SEQ ID NO: 783602 - DNA, 120 bp, Artificial Sequence
  ENSG00000256029_53 (sequence is synthesized)
ctcagagttcctctattagttcaaatatgtaatatcttttagagcctaggactcaggctggaggcaattccttggtgccagttggttaatactttatgaatagtggtgggggagggaatg

SEQ ID NO: 783603 - DNA, 120 bp, Artificial Sequence
  ENSG00000256029_54 (sequence is synthesized)
ccttggactattaatgtccccatggatctggatcctggagaacttccagtgtcctggatggaatgttctgcttggctcatcttgcccagagaagagccaggatatgagaagatgggagag

SEQ ID NO: 783604 - DNA, 120 bp, Artificial Sequence
  ENSG00000256029_55 (sequence is synthesized)
ggaagggggaggtgtgaaacgtgctggtgcttcctgtcctcgtggtgtgatggctgcccaggctgctccttcgaggcaggacaggattcccatgggagatatgaggaccatggtgatttc

SEQ ID NO: 783605 - DNA, 120 bp, Artificial Sequence
  ENSG00000256029_56 (sequence is synthesized)
caggcaccagttatgtcccagagcatcgtgtgcctgtgcagtggggttactgatagtccaggcatcagttcatattgtcctttatggcagatcctgcacaagggggttctctgtctctgg

SEQ ID NO: 783606 - DNA, 120 bp, Artificial Sequence
  ENSG00000256029_57 (sequence is synthesized)
acccactctgtcagcatggacatcctttttctttttccctggtaaggacatcagaaagaaagttacccctccagtgtttggagtcttggaatccttggcctgcctgcaggcctctgaatc

SEQ ID NO: 783607 - DNA, 120 bp, Artificial Sequence
  ENSG00000256029_58 (sequence is synthesized)
ctcagtgtgttagcccaaggtcaccttaggtaaaggaacatttctcctggtcttccaacaccctggaaagggaggctcttcaagaataggaaattcttcctagtatctaaccttggcctg

SEQ ID NO: 783608 - DNA, 120 bp, Artificial Sequence
  ENSG00000256029_59 (sequence is synthesized)
caactatgccatacatttaattgtagaaggtatggaaagttaggactgtggtggacccagttaaatcactggacagaagccatgaggcagagccagaaccagcttctggactccctgcat

SEQ ID NO: 783609 - DNA, 120 bp, Artificial Sequence
  ENSG00000256029_60 (sequence is synthesized)
ggagctttctactatcccaggttgttgggtcccttctcagtggccaaagatgctattttatgagccttgaggacatgacactaagtgaaaaaagcctggccaaagggccacatagtgtat

SEQ ID NO: 783610 - DNA, 120 bp, Artificial Sequence
  ENSG00000256029_61 (sequence is synthesized)
agttctatttatatgaaatgtccaggaaagacaaaagcatagaggcagaaagcagactagtgctgtgggaggaatgggggatttgggaggtgatggctaaggggttatggggttttgggg

SEQ ID NO: 783611 - DNA, 120 bp, Artificial Sequence
  ENSG00000256029_62 (sequence is synthesized)
gaggtaatagaaatgttttaaaattggttgtgaaggtggatgcccaactctgcgaatacactaaaaggcatcgaattgtatactttaaataggtgaattgtatgctatgtgaattatatc

SEQ ID NO: 783612 - DNA, 120 bp, Artificial Sequence
  ENSG00000256029_63 (sequence is synthesized)
taagagccaagggcagcttggccactttgagcctggctctgtctcttggctgggccctggcttacaattgtctgcctccttgcagcacgacctgcagtgcccatgtgctggacagagggc

SEQ ID NO: 783613 - DNA, 120 bp, Artificial Sequence
  ENSG00000256029_64 (sequence is synthesized)
gaaaagcaccttcttctgggcctgcgaaacatcagaaagggattgcaggggcctggagggggctgcctgcagggctctccagatacgcgtggacaagccctgtctggaggatggggatgc

SEQ ID NO: 783614 - DNA, 120 bp, Artificial Sequence
  ENSG00000256029_65 (sequence is synthesized)
aaaaactattgctcaaggaaaataaagtgaaaacgaggaaaagcaaaagaagatctggagagggctctcacctgaccacaagcatcctggagcaatgagtttcaggcaggaagactcatc

SEQ ID NO: 783615 - DNA, 120 bp, Artificial Sequence
  ENSG00000256043_0 (sequence is synthesized)
tggctgccgtggctgctgtggctgctgtgccggggcggcggcgatgcggactcccgcgcccccttcaccccgacctggccgcggagccgcgagcgtgaagccgccgccttccgggaaagt

SEQ ID NO: 783616 - DNA, 120 bp, Artificial Sequence
  ENSG00000256043_1 (sequence is synthesized)
gcggagccgcgagcgtgaagccgccgccttccgggaaagtcttaatagacatcgatacttgaattctttatttcccagtgaaaactccaccgccttctatggaataaatcagttttccta

SEQ ID NO: 783617 - DNA, 120 bp, Artificial Sequence
  ENSG00000256043_2 (sequence is synthesized)
tttgtttcctgaagagtttaaagccatttatttaagaagcaaaccttccaagtttcccagatactcagcagaagtacatatgtccatccccaatgtgtctttgccgttaagatttgactg

SEQ ID NO: 783618 - DNA, 120 bp, Artificial Sequence
  ENSG00000256043_3 (sequence is synthesized)
gagggacaagcaggttgtgacacaagtgagaaaccagcagatgtgtggaggatgctgggccttcagcgtggtgggggcagtggaatctgcttatgcaataaaggggaagcccctggaaga

SEQ ID NO: 783619 - DNA, 120 bp, Artificial Sequence
  ENSG00000256043_4 (sequence is synthesized)
cctaagtgtccagcaggtcattgactgttcgtataataattatggctgcaatggaggctctactctcaatgctttgaactggttaaacaagatgcaagtaaaactggtgaaagattcaga

SEQ ID NO: 783620 - DNA, 120 bp, Artificial Sequence
  ENSG00000256043_5 (sequence is synthesized)
atatccttttaaagcacaaaatggtctgtgccattacttttctggttcacattctggattttcaatcaaaggttattctgcatatgacttcagtgaccaagaagatgaaatggcaaaagc

SEQ ID NO: 783621 - DNA, 120 bp, Artificial Sequence
  ENSG00000256043_6 (sequence is synthesized)
acttcttacctttggccctttggtagtcatagtagatgcagtgagctggcaagattatctgggaggcattatacagcatcactgctctagtggagaagcaaatcatgcagttctcataac

SEQ ID NO: 783622 - DNA, 120 bp, Artificial Sequence
  ENSG00000256043_7 (sequence is synthesized)
tgggtttgataaaacaggaagcactccatattggattgtgcggaattcctggggaagttcttggggagtagatggttatgcccatgtcaaaatgggaagtaatgtttgtggtattgcaga

SEQ ID NO: 783623 - DNA, 120 bp, Artificial Sequence
  ENSG00000256043_8 (sequence is synthesized)
ttccgtttcttctatatttgtgtgacatgttgggcagatcaagagacagctacaaaaatgaaggttttcataatgcaatgtaacatagtacttcaaagtattattcaacttcaagtttca

SEQ ID NO: 783624 - DNA, 120 bp, Artificial Sequence
  ENSG00000256043_9 (sequence is synthesized)
gcaactacctacaaaagattctaaggcctagtagtatttaaactaagtttcagaatgttcccttcttgtagagagatggacaaccaaagtcagtgggacaaactccagcacagaagcctg

SEQ ID NO: 783625 - DNA, 120 bp, Artificial Sequence
  ENSG00000256043_10 (sequence is synthesized)
cgaggaagcctatggaatagtttcctgtcctgagacgaaattcagattaggagatattttaggcccctgcaactggggaaggctactgtttgtttttgtttgcttattatttatttgttt

SEQ ID NO: 783626 - DNA, 120 bp, Artificial Sequence
  ENSG00000256043_11 (sequence is synthesized)
gtttattgtgagatatttcaggtgggatcaaagaggtcataagaatttattttcttttgtggggtgtaactactagctttagattacccctatacacaagaatggccaacctaaaattat

SEQ ID NO: 783627 - DNA, 120 bp, Artificial Sequence
  ENSG00000256043_12 (sequence is synthesized)
attagcagccctctgagatggcgtatctatcggaaggatttcaaacaccaattgctttacctgaacaaatggtgcttaccctttgaacagcagagtgaccacgtagaaggaaggaaaagg

SEQ ID NO: 783628 - DNA, 120 bp, Artificial Sequence
  ENSG00000256043_13 (sequence is synthesized)
gcaaaatcgcttcagttaaactgaaattaaatgaacaataaggcaactatataagtaacttctagtagcattgcctgagagacaaattattgtttgataattttcattgtgaataggaat

SEQ ID NO: 783629 - DNA, 120 bp, Artificial Sequence
  ENSG00000256043_14 (sequence is synthesized)
ccaatagatcatattgcttactttgttctttttatactatagaataatattttgttctctagtatatcaaaataccaaaatattatctcatattttctccctctttctcttactctttac

SEQ ID NO: 783630 - DNA, 120 bp, Artificial Sequence
  ENSG00000256043_15 (sequence is synthesized)
caagttttcctggtggcttggcttccctgactaaagaattaagtctcatttttactttccatttctattttcttaccacttggttggctccctttgtctctgtacctttaccaacattag

SEQ ID NO: 783631 - DNA, 120 bp, Artificial Sequence
  ENSG00000256043_16 (sequence is synthesized)
gatctcacctctttcttcctcccttaattcataagcaccactcctatcaaagtcccatctcttaaccctgggtatcaaacaaactgtgagttttccagaatctgtttcccagttttcccc

SEQ ID NO: 783632 - DNA, 120 bp, Artificial Sequence
  ENSG00000256043_17 (sequence is synthesized)
tcagctttcctggtctcccatccgaactgcttctttgtgcacctcttgttctttctcttggctcccagtcttgattcctgtgatcactcttgcatcactaattgcacaagtgatttcagg

SEQ ID NO: 783633 - DNA, 120 bp, Artificial Sequence
  ENSG00000256043_18 (sequence is synthesized)
tgcaattctgattagcctgcgtccacacagtgatcgatgatcctatgtgcctagaaaggacactgtgtgctgctcatgacctgcaacaggaaaaaagccatttcttgttagcagtgtaag

SEQ ID NO: 783634 - DNA, 120 bp, Artificial Sequence
  ENSG00000256043_19 (sequence is synthesized)
aaccttagagcaaaggagttgaccttctgattgaatataagcacaaccatattaaatgaatcaatacaagaaaattatttctgatactatgtatgtacatatttcttctctaaaatgtat

SEQ ID NO: 783635 - DNA, 120 bp, Artificial Sequence
  ENSG00000256043_20 (sequence is synthesized)
cattcttttctaatgtatatgatctaacaaaaatgaaacatgaaatgcagtagcaaccactaaaaaaaaaaattcaaggacatctaactttttctctcacttttgccctttgtttatcct

SEQ ID NO: 783636 - DNA, 120 bp, Artificial Sequence
  ENSG00000256043_21 (sequence is synthesized)
tccctgtgattagataaacaaaataaaaaacaaaatgctgtatttctcttcttacgccagtcagaaccaatccgaaaagaatgtgtgttgactcaggtttggagttatttcaggaagaca

SEQ ID NO: 783637 - DNA, 120 bp, Artificial Sequence
  ENSG00000256043_22 (sequence is synthesized)
gatattgaccttttaattgataaatattcttattatcctggaatgccagaaaagaactatgtcctgcttgtctagtttgtattcgctgactttctatgtgatatagatgcatttgtaata

SEQ ID NO: 783638 - DNA, 120 bp, Artificial Sequence
  ENSG00000256043_23 (sequence is synthesized)
ctctttttcaagtgctaaaggatttctaaaatttcaaactgattaatatgtttctgctgttctggattttgatgacatttacaataaaacaacctacatttgactttggtttaaaaagaa

SEQ ID NO: 783639 - DNA, 120 bp, Artificial Sequence
  ENSG00000256045_0 (sequence is synthesized)
aaaagcaatcaccaattaagaaagcgtttaagctcaacatctatcttaaattctagtcactctactgaactcctaacatcacattggactaatctattacttaatagaagcaataatgtt

SEQ ID NO: 783640 - DNA, 120 bp, Artificial Sequence
  ENSG00000256045_1 (sequence is synthesized)
aatataagtaatatgaaaacattctccattgcataagcttacatcagactggaataacccactgacagttagcctaatattaataaacgatataataagctctttattatttacactgtt

SEQ ID NO: 783641 - DNA, 120 bp, Artificial Sequence
  ENSG00000256045_2 (sequence is synthesized)
aagctctttattatttacactgttaacccaacacaggtatgctctaaggaaagaatacaaaaagtaaaaggaactccgcaaattttaccccgcctgtttaccaaaaacatcacctctagc

SEQ ID NO: 783642 - DNA, 120 bp, Artificial Sequence
  ENSG00000256045_3 (sequence is synthesized)
tgcccagtgacatacgttcaatggccgcagtatcctgactgtgcaaaggtagcataatcacttgttccttaaataggaacttgtatgaatgaccacacgagggttcagctgtctcctact

SEQ ID NO: 783643 - DNA, 120 bp, Artificial Sequence
  ENSG00000256045_4 (sequence is synthesized)
caaataaaaacttaagcctacaggccctagcctactatccctgcattaaaatttttggttggggtgacctcagagcataattcaacctccgagcaacctaaactaagactgcactagcct

SEQ ID NO: 783644 - DNA, 120 bp, Artificial Sequence
  ENSG00000256045_5 (sequence is synthesized)
aagcaagttaatatatattgacccgataatttgatcaacggagtaagttaccctagggataacagcgcaatcctattctagagtccatatcaacaatagggtttacaatctcgatgttgg

SEQ ID NO: 783645 - DNA, 120 bp, Artificial Sequence
  ENSG00000256045_6 (sequence is synthesized)
atcaggacatcctaatggtgtcaccgctattaggggttcgtttgttcaacaattaaagtcctacgtgatgtgagttcagaccagagtaatccaggtcggtttctatctatttaacatttc

SEQ ID NO: 783646 - DNA, 120 bp, Artificial Sequence
  ENSG00000256045_7 (sequence is synthesized)
ccctagtatgaaaggacaagagaaatagggcccacttcataaagtgccctcgctccacagatgatgctatctcaatctaacaaatcatcacataccctacccaagaacagggtttgttaa

SEQ ID NO: 783647 - DNA, 120 bp, Artificial Sequence
  ENSG00000256053_0 (sequence is synthesized)
aatgctgccgtgcgccgcgggagccagggggcgtggggccatggtggtcttgcgggcggggaagaagacctttctcccccctctctgccgcgccttcgcctgccgcggctgtcaactcgc

SEQ ID NO: 783648 - DNA, 120 bp, Artificial Sequence
  ENSG00000256053_1 (sequence is synthesized)
tccggagcgcggcgccgagcgcagggatacggcgcccagcggggtctcaagattctgccctccaagaaagtcttgccatgattggataggacccccagataaatattcaaaccttcgacc

SEQ ID NO: 783649 - DNA, 120 bp, Artificial Sequence
  ENSG00000256053_2 (sequence is synthesized)
tgttcacttttacatacctgaaaatgaatctccattggaacaaaagcttagaaaattaagacaagaaacacaagaatggaatcaacagttctgggcaaaccagaatttgacttttagtaa

SEQ ID NO: 783650 - DNA, 120 bp, Artificial Sequence
  ENSG00000256053_3 (sequence is synthesized)
ggaaaaagaagaatttattcactcaagactaaaaactaaaggcctgggcctgagaactgaatcaggtcagaaagcaacattgaatgcagaagaaatggcggacttctacaaggaattttt

SEQ ID NO: 783651 - DNA, 120 bp, Artificial Sequence
  ENSG00000256053_4 (sequence is synthesized)
aagtaaaaattttcagaagcacatgtattataacagagattggtacaagcgcaattttgccatcaccttcttcatgggaaaagtggccctggaaaggatttggaacaagcttaaacagaa

SEQ ID NO: 783652 - DNA, 120 bp, Artificial Sequence
  ENSG00000256053_5 (sequence is synthesized)
acaaaagaagaggagcaactaggagtccactctgacccagccagagtccaggtttccacaggaagcagatggagctcctttcacaggggctctgagaaaaactggagctgatctcaagaa

SEQ ID NO: 783653 - DNA, 120 bp, Artificial Sequence
  ENSG00000256053_6 (sequence is synthesized)
gccccacatcttcctaaggggccccatggcctgtttgggggcagggtaggtcctggggcactgtgggccgcctgcctgctgatgtgggctctaggccagcttgttgtcacgtacgtggtg

SEQ ID NO: 783654 - DNA, 120 bp, Artificial Sequence
  ENSG00000256053_7 (sequence is synthesized)
tgtcacgtacgtggtgtgaaataaagcccaagcactgggtgcccgtttcctgtgtttcgaattataccaattcaaaacagaactatttaaaaatattggccaggcacggtggctcacacc

SEQ ID NO: 783655 - DNA, 74 bp, Artificial Sequence
  ENSG00000256053_8 (sequence is synthesized)
gaggcagaccaaacgagactctgtatcaaaaaataataataattaataaagttttactggaaaaaagaagtctg

SEQ ID NO: 783656 - DNA, 120 bp, Artificial Sequence
  ENSG00000256053_9 (sequence is synthesized)
aataattaataaagttttactggaaaaaagaagtctgctgacgggaatgatgtggaagctgactgccaagcgatcggtgtgctggccgtggagtcagcaccaccctcactgtgagtcgtc

SEQ ID NO: 783657 - DNA, 120 bp, Artificial Sequence
  ENSG00000256053_10 (sequence is synthesized)
agctggtgggtcctcacaggctgcgtcctgaatgcagtgcggtgtgaggacatgaaagcaaatgcaattttattgcatgccaaaaagtttaacttgattcttggtgttaactatgttagt

SEQ ID NO: 783658 - DNA, 120 bp, Artificial Sequence
  ENSG00000256053_11 (sequence is synthesized)
agattcttcaatgctataagcaaattaacaagaaacagcagcactattttcctcttttcttaaacacgaaggttaaatggccaggcatggtgactcatacctgtaatcccaacaatttgg

SEQ ID NO: 783659 - DNA, 120 bp, Artificial Sequence
  ENSG00000256053_12 (sequence is synthesized)
gaggccaaggcaagcaaatcacttgagctcaggagttcgaaccagtttgggcaacatggcgaaaccctgcctctacaaaacatgcaaaaattagctgggcatggtagcatgcgcctgtag

SEQ ID NO: 783660 - DNA, 120 bp, Artificial Sequence
  ENSG00000256053_13 (sequence is synthesized)
tcccagctactcgggaggctgagcttcgaggattgattgagccagtgaggtccaggctgcactaagccaagatcctaccactaggcaacagagccagaccctgtctcaaataaaaattta

SEQ ID NO: 783661 - DNA, 76 bp, Artificial Sequence
  ENSG00000256053_14 (sequence is synthesized)
ctaggcaacagagccagaccctgtctcaaataaaaatttaaaaaaataataaaaatggccaaggtgggcggatcac

SEQ ID NO: 783662 - DNA, 120 bp, Artificial Sequence
  ENSG00000256053_15 (sequence is synthesized)
accctgtctacaaaaattagccaggcatgatggagggtgcctttagtcccagctctttgggaagctgaggcgggagaatagcatgaaccagggaggtggagggtgcctgtaatcccagct

SEQ ID NO: 783663 - DNA, 120 bp, Artificial Sequence
  ENSG00000256053_16 (sequence is synthesized)
cagagcaatactcccgtctcaaaaaaaaaaaaattaaatgattgtgatatgtgttacttttggtcacaaataaattgtaattaagattattctggccaggtgcggtggctcacgcctata

SEQ ID NO: 783664 - DNA, 120 bp, Artificial Sequence
  ENSG00000256053_17 (sequence is synthesized)
gaaaccatggaaagaaaaaccatggatggaggggacagctgtgctgccgccatctcccttacacagtcagaaagcaacattgaatgcagaagaaatggcggacttctacaaggaattttt

SEQ ID NO: 783665 - DNA, 120 bp, Artificial Sequence
  ENSG00000256053_18 (sequence is synthesized)
ttccagaatgacagctggtgtccgcaagaacagcaggaactcatcagcatttggaagtgagactgggtggatgtgcagtcccggaaaaagaggcggagatttatgtctggtggcggggag

SEQ ID NO: 783666 - DNA, 120 bp, Artificial Sequence
  ENSG00000256053_19 (sequence is synthesized)
cccgtgtgttcagcagcttctggaaggaattgatagatggaagctgctagaggcgttgctgacagcctctccttgaggccagactccagagctggaacctggtagaagccttagtctcct

SEQ ID NO: 783667 - DNA, 120 bp, Artificial Sequence
  ENSG00000256053_20 (sequence is synthesized)
cctgagaactgaatcaggtggttatgatggatgaccaacctctgacctttgactttcgtactgaggtctcagcctttgcagcttctccctccaaagcagcttttcttctgattcctgatc

SEQ ID NO: 783668 - DNA, 120 bp, Artificial Sequence
  ENSG00000256053_21 (sequence is synthesized)
tcagttcagtgctcaaaatagcctctccttattttctcctggtgtcagtgttaggcctgaataacatctcatgctgttcgttaaacagatgtctgctgccaaaaagttgttctgatagaa

SEQ ID NO: 783669 - DNA, 120 bp, Artificial Sequence
  ENSG00000256053_22 (sequence is synthesized)
aatccaaaatcatcgaccccaaaagccaagtctgtcattgggctaaagtgccattcctactaatcctttgcctcacctgattcatttggaataaagggccaggagcttgagtcaccccca

SEQ ID NO: 783670 - DNA, 63 bp, Artificial Sequence
  ENSG00000256053_23 (sequence is synthesized)
taaggaaaaagaagaatttattcactcaagactaaaaactaaaggcctgggcctgagaactga

SEQ ID NO: 783671 - DNA, 66 bp, Artificial Sequence
  ENSG00000256053_24 (sequence is synthesized)
gctgctccggaggctcagtcaggagaatcgcttgaacgtggggagaacaaaactccatctcaaaaa

SEQ ID NO: 783672 - DNA, 120 bp, Artificial Sequence
  ENSG00000256053_25 (sequence is synthesized)
aaaaaaaaaaaaaaaaaaacgggttttagctggttacagataataatgacctgtatttacaggtgaaattaataggacatgatatctgagatttgctttaaaatatttgtaggctggata

SEQ ID NO: 783673 - DNA, 120 bp, Artificial Sequence
  ENSG00000256053_26 (sequence is synthesized)
ggaagacaaacccgggcctcggggccactccctgttctgcacagccgcctcaggcctttgtccaggtgctctcgcgtcctatcccgaacagtcccgcagccccgaggctcccgcatcaac

SEQ ID NO: 783674 - DNA, 120 bp, Artificial Sequence
  ENSG00000256053_27 (sequence is synthesized)
gccctcagtcggatgggactgagggtgccgccgccaccacgccggggactgttgacagccagaacctttaagcgtaacagagtcacctggcaagtcagaaagcaacattgaatgcagaag

SEQ ID NO: 783675 - DNA, 120 bp, Artificial Sequence
  ENSG00000256060_0 (sequence is synthesized)
gtacgcagaggcggtagtgacacaggcacaactgacagtggcagaagctcagctgacaaggactggggacggcggtgtccttgtcttgcctttgtcgcccccgcccctctcttccctggc

SEQ ID NO: 783676 - DNA, 120 bp, Artificial Sequence
  ENSG00000256060_1 (sequence is synthesized)
tggacttgcggagtccccgccgaagaacccgaggagccatatattgaagaccatgtctggaagcttctactttgtaattgttggtcaccatgataatccagtttttgaaatggagttttt

SEQ ID NO: 783677 - DNA, 120 bp, Artificial Sequence
  ENSG00000256060_2 (sequence is synthesized)
gccagctgggaaggcagaatccaaagacgaccatcgtcatctgaaccagttcatagctcatgctgctctcgacctcgtagatgagaacatgtggctgtcgaacaacatgtacttgaaaac

SEQ ID NO: 783678 - DNA, 120 bp, Artificial Sequence
  ENSG00000256060_3 (sequence is synthesized)
tgtgtcagcatttgtcaccgcggggcatatgaggtttattatgcttcatgacataagacaagaagatggaataaagaacttctttactgatgtttatgatttatatataaaattttcaat

SEQ ID NO: 783679 - DNA, 120 bp, Artificial Sequence
  ENSG00000256060_4 (sequence is synthesized)
gaatccattttatgaacccaattctcctattcgatcaagtgcatttgacagaaaagttcagtttcttgggaagaaacaccttttaagctgaatggagaaaattccaaaataaattatatc

SEQ ID NO: 783680 - DNA, 120 bp, Artificial Sequence
  ENSG00000256060_5 (sequence is synthesized)
accacaatggtgtatactcaggaatgtgtacattgtaaattacttgattaaatagcctggaaatcttttgtgtattctcagcttatctaaacttaatgaaatttcttttatatttaaaaa

SEQ ID NO: 783681 - DNA, 120 bp, Artificial Sequence
  ENSG00000256060_6 (sequence is synthesized)
ccgccgaagaacccgaggtgggtgccccgtcccaggcccccccccacctccgcccgacccctccttccagtgctgaagcccatagaaggggccctgcaggtcaggccccttgtctcgaag

SEQ ID NO: 783682 - DNA, 120 bp, Artificial Sequence
  ENSG00000256060_7 (sequence is synthesized)
agaggggcgttcctgtgtggggtccccgtatcagctggtttgatgcagcctcagagctcccttcggggatctcaggttcagagcatggaggtgctgccaagtgggccgcgtcggggagcc

SEQ ID NO: 783683 - DNA, 120 bp, Artificial Sequence
  ENSG00000256060_8 (sequence is synthesized)
cggagtgtgggttgtttctgcgggaaagagagggttttgtgaattttctcttggaatggcagcctgagcagccggtataaccatggaaggttgtcaagggaagaccagtgggaggggcag

SEQ ID NO: 783684 - DNA, 120 bp, Artificial Sequence
  ENSG00000256060_9 (sequence is synthesized)
gtccagagttagaacgagcaggatggggaattgacacagagagacccagaagaggccactgcagtggatcccagaggctgcaccagagccgtggtataagagggacaatgtgatgggatt

SEQ ID NO: 783685 - DNA, 120 bp, Artificial Sequence
  ENSG00000256060_10 (sequence is synthesized)
ctggatagacctggaagatagagccaacaggttttcctgccgtatcagatatgtctgtgagcaaaaatagggagtgaagggtcatttttttttttttgcccgaacatctgaaagaatgaa

SEQ ID NO: 783686 - DNA, 120 bp, Artificial Sequence
  ENSG00000256060_11 (sequence is synthesized)
gttggggaagtcagcagcatgagaagtaggtttcatggagaagatcatgggttggagtttggccagtgtgattctcaggcgtctcaagttgaaaatgtcacatgggtagggggacagaaa

SEQ ID NO: 783687 - DNA, 120 bp, Artificial Sequence
  ENSG00000256060_12 (sequence is synthesized)
cagcctgggcgacagagcgagattccgtgtcaaaaaaaggtgcggagcgcgggtctcttccgcggaaactgacattgcgtttccgttgtcggcctcccgctgcaggagccatatattgaa

SEQ ID NO: 783688 - DNA, 120 bp, Artificial Sequence
  ENSG00000256061_0 (sequence is synthesized)
tcctctcctattatgcaaacccacaccatggatccagcagactactctggccccagcatgctgctccttgggatgatgggagaagggggaaacctgtgttttctcttggttttagggtat

SEQ ID NO: 783689 - DNA, 120 bp, Artificial Sequence
  ENSG00000256061_1 (sequence is synthesized)
gggtctacttctttgaacattcgctcagatcgtaaggtaaccccaagaatcggcatcactctctggtctgggcgcctggatagtcacgcatggagtccgcgaggtgctggcgccggagca

SEQ ID NO: 783690 - DNA, 120 bp, Artificial Sequence
  ENSG00000256061_2 (sequence is synthesized)
cgctgggaacgccgggctcccggccggcctgacccggaagggctggcgcatggtaaccccagcttccctagcaaccaagcaggcgcaagaagcaaccagccgcgctatccgctcccgttg

SEQ ID NO: 783691 - DNA, 120 bp, Artificial Sequence
  ENSG00000256061_3 (sequence is synthesized)
ctaccggaatgcctcttcaggttagcgattacagctggcagcagacgaagactgcggtctttctgtctctgcccctcaaaggcgtgtgcgtcagagacacggacgtgttctgcacggaaa

SEQ ID NO: 783692 - DNA, 120 bp, Artificial Sequence
  ENSG00000256061_4 (sequence is synthesized)
actatctgaaggtcaactttcctccatttttatttgaggcatttctttatgctcccatagacgatgagagcagcaaagcaaagattgggaatgacaccattgtcttcaccttgtataaaa

SEQ ID NO: 783693 - DNA, 120 bp, Artificial Sequence
  ENSG00000256061_5 (sequence is synthesized)
aagaagcggccatgtgggagaccctttctgtgacgggtgttgacaaagagatgatgcaaagaattagagaaaaatctattttacaagcacaagagagagcaaaagaagctacagaagcaa

SEQ ID NO: 783694 - DNA, 120 bp, Artificial Sequence
  ENSG00000256061_6 (sequence is synthesized)
aagctgcagcaaagcgggaagatcaaaaatacgcactaagtgtcatgatgaagattgaagaagaagagaggaaaaaaatagaagatatgaaagaaaatgaacggataaaagccactaaag

SEQ ID NO: 783695 - DNA, 120 bp, Artificial Sequence
  ENSG00000256061_7 (sequence is synthesized)
cattggaagcctggaaagaatatcaaagaaaagctgaggagcaaaaaaaaattcagagagaagagaaattatgtcaaaaagaaaagcaaattaaagaagaaagaaaaaaaataaaatata

SEQ ID NO: 783696 - DNA, 120 bp, Artificial Sequence
  ENSG00000256061_8 (sequence is synthesized)
gaagttaaaggaagacagtattcctgctcctcgctctgttggcagtattaaaatcaactttacccctcgagtattcccaacagctcttcgtgaatcacaagtagcagaagaggaggagtg

SEQ ID NO: 783697 - DNA, 120 bp, Artificial Sequence
  ENSG00000256061_9 (sequence is synthesized)
gctacacaaacaagctgaggcacgaagagcaatgaatactgacatagctgaactttgcgatttaaaagaagaagaaaagaacccagaatggttgaaggataaaggaaacaaattgtttgc

SEQ ID NO: 783698 - DNA, 120 bp, Artificial Sequence
  ENSG00000256061_10 (sequence is synthesized)
aacggaaaactatttggcagctatcaatgcatataatttagccataagactaaataataagatgccactattgtatttgaaccgggctgcttgccacctaaaactaaaaaacttacacaa

SEQ ID NO: 783699 - DNA, 120 bp, Artificial Sequence
  ENSG00000256061_11 (sequence is synthesized)
ggctattgaagattcttctaaggcactggaattattgatgccacctgttacagacaatgctaatgcaagaatgaaggcacatgtacgacgtggaacagcattctgtcaactagaattgta

SEQ ID NO: 783700 - DNA, 120 bp, Artificial Sequence
  ENSG00000256061_12 (sequence is synthesized)
tgtagaaggcctacaggattatgaagcggcacttaagattgatccatccaacaaaattgtacaaattgatgctgagaagattcggaatgtaattcaaggaacagaactaaaatcttaatg

SEQ ID NO: 783701 - DNA, 120 bp, Artificial Sequence
  ENSG00000256061_13 (sequence is synthesized)
actattagaagtaactaagtattgttataagttttttaaaaacaactggaggcatctttgtacatattatggccagttgtacagaatcgctttctgtttagtactttagttctgttgagg

SEQ ID NO: 783702 - DNA, 120 bp, Artificial Sequence
  ENSG00000256061_14 (sequence is synthesized)
gtactttagttctgttgagggcaaaatattataaatctatagaaaataaactgtttgacttgaatcatttctgaataagtaaatctaaataagaatctattttaattccttatttcttca

SEQ ID NO: 783703 - DNA, 120 bp, Artificial Sequence
  ENSG00000256061_15 (sequence is synthesized)
tttttgtgttactgaattaagcttgcccttgtaacaaaatatgttttggtatagttaccaggacacttactgattaatttttaacaaggtagaattttaaaataaaagatttataaataa

SEQ ID NO: 783704 - DNA, 120 bp, Artificial Sequence
  ENSG00000256061_16 (sequence is synthesized)
aagtgtcatgatgaaggtaagttgcagaatgacaggcaagtcctctaaagagataatagtagactatgtgaggatagtgagttccagctgctggacttcctcagcattttcttcatactt

SEQ ID NO: 783705 - DNA, 120 bp, Artificial Sequence
  ENSG00000256061_17 (sequence is synthesized)
ctcaatgtatgatcttccagaaacagttctgaaacctacaggtttcctcagcacaggggaaagctttataggtggaaggtggaggccctgtgacttgcgcagaaaagtaccactgtaatt

SEQ ID NO: 783706 - DNA, 120 bp, Artificial Sequence
  ENSG00000256061_18 (sequence is synthesized)
tacttttatgggcacctaagcaggttgcccagggcaacttgtagattttgttgttgttgttgttaatactatctccttcagtcactgagaactcttttttatttttttattttttgagat

SEQ ID NO: 783707 - DNA, 120 bp, Artificial Sequence
  ENSG00000256087_0 (sequence is synthesized)
gcattccgctctccatggaaacgcggctgaccgtctctggaggtttagagggggagggagttgggcgaggggcccagaagtggaagaagtttagggaagtaagttcagcttttaagaggt

SEQ ID NO: 783708 - DNA, 120 bp, Artificial Sequence
  ENSG00000256087_1 (sequence is synthesized)
cgcggcgattccaaggagagtcagtccacaggtcctggctaccctgggaagagacaagaagtaaatgaagaaagaggaagattccaggacctagatatgatttctgtggacacccttcac

SEQ ID NO: 783709 - DNA, 120 bp, Artificial Sequence
  ENSG00000256087_2 (sequence is synthesized)
tggtgactgaagtttctaaatagaaatttaaggcagatccagaggagacaaagacagagtatcccaggtgctggccatttcccacaacagaagaaaatgatcaatgcccaggaattgctg

SEQ ID NO: 783710 - DNA, 120 bp, Artificial Sequence
  ENSG00000256087_3 (sequence is synthesized)
acactggaggatgttactgtggagttcacctgggaggagtggcagctcctgggcccttttcagaaggatttgtaccgggatgtgatgttggagatctacagcaacctgctatcaatgggt

SEQ ID NO: 783711 - DNA, 120 bp, Artificial Sequence
  ENSG00000256087_4 (sequence is synthesized)
tatcaagtcagcaaaccagatgcactctccaagttggaacgaggagaagaaccatggacaatggaagatgaaaggcacagtcgaatctgtccagaaaacaacgaagttgatgatcatctg

SEQ ID NO: 783712 - DNA, 120 bp, Artificial Sequence
  ENSG00000256087_5 (sequence is synthesized)
caggatcacttggaaaatcaaaggatgctgaagagtgtggaacaataccatgaacataatgcatttggaaatactgcctctcaaaccaaaagcctttgtcttttcagggaaaatcatgat

SEQ ID NO: 783713 - DNA, 120 bp, Artificial Sequence
  ENSG00000256087_6 (sequence is synthesized)
acatttgagttatatataaaaactttgaaatcaaatttaagtttagtcaaccagaacaaaagctgtgaaattaacaactctactaaatttagtggagatgggaaatcatttcttcatggt

SEQ ID NO: 783714 - DNA, 120 bp, Artificial Sequence
  ENSG00000256087_7 (sequence is synthesized)
aactatgaagaactttattctgcagctaaattctctgtaagtacaaaagccaatagcactaaatcccaagtcagtaagcatcagagaactcatgaaatagaaaaaaaccacgtatgcagt

SEQ ID NO: 783715 - DNA, 120 bp, Artificial Sequence
  ENSG00000256087_8 (sequence is synthesized)
gaatgtgggaaagcgtttgtcaagaagtctcagctcactgatcatgagagagttcatacaggagaaaaaccttatggatgtactttgtgtgcaaaagtgttctccagaaagtccaggcta

SEQ ID NO: 783716 - DNA, 120 bp, Artificial Sequence
  ENSG00000256087_9 (sequence is synthesized)
aatgaacatcaaagaattcataaaagagagaaatcttttatatgcagtgaatgtggaaaagtcttcactatgaagagccgtctgattgaacatcagcgaactcatactggagagaaaccc

SEQ ID NO: 783717 - DNA, 120 bp, Artificial Sequence
  ENSG00000256087_10 (sequence is synthesized)
tacatatgcaatgaatgtggaaaaggcttcccaggcaagcgtaatctcattgtacatcagcgaaatcatactggagagaaatcctatatatgtagtgaatgtggaaaaggcttcactggg

SEQ ID NO: 783718 - DNA, 120 bp, Artificial Sequence
  ENSG00000256087_11 (sequence is synthesized)
aagagcatgcttattatacatcagcgaactcatacaggagagaagccctacatctgtagtgaatgtgggaaaggcttcaccacaaaacactatgtcatcatacatcaacgaaatcataca

SEQ ID NO: 783719 - DNA, 120 bp, Artificial Sequence
  ENSG00000256087_12 (sequence is synthesized)
ggagagaaaccatatatatgcaatgaatgtgggaaaggcttcaccatgaagagccgtatgatcgaacatcaacgaactcatacaggagagaaaccctacatatgcagtgaatgtggaaaa

SEQ ID NO: 783720 - DNA, 120 bp, Artificial Sequence
  ENSG00000256087_13 (sequence is synthesized)
ggctttcccaggaagagtaatcttattgtacatcagagaaatcatacagtagagaagtcatatctatgtagtgaatgtggaaaaggttttactgtgaaaagcatgctcatcatacatcag

SEQ ID NO: 783721 - DNA, 120 bp, Artificial Sequence
  ENSG00000256087_14 (sequence is synthesized)
cgaactcatacaggagagaagccctacacatgcagtgaatgtgggaaaggcttccccttgaagagtcggctgattgtacatcagcgaactcatactggagagaaaccttacaggtgcagt

SEQ ID NO: 783722 - DNA, 120 bp, Artificial Sequence
  ENSG00000256087_15 (sequence is synthesized)
gaatgtgggaaaggtttcattgtgaatagcggactgatgttacatcagcgaactcatactggagagaaaccgtacatatgcaatgaatgtggaaaaggttttgcctttaagagcaatctt

SEQ ID NO: 783723 - DNA, 120 bp, Artificial Sequence
  ENSG00000256087_16 (sequence is synthesized)
gttgtacaccagcgaactcatactggagagaaaccctttatgtgcagtgaatgtggaaaaggcttcaccatgaaacgctatctcattgtacatcagcaaattcatacagaagagaaatct

SEQ ID NO: 783724 - DNA, 120 bp, Artificial Sequence
  ENSG00000256087_17 (sequence is synthesized)
tgtatatgtagtgaatgtggaagaggctttgccaaggaaacagagcttgctttacataagcaagttcatactggagaaaaaccttatggatgtaatgaatgtggtaaaggcttcactatg

SEQ ID NO: 783725 - DNA, 120 bp, Artificial Sequence
  ENSG00000256087_18 (sequence is synthesized)
aagagccgtctaattgttcatcaacgaactcatacaggagagaaaccctttgtatgcagtgaatgtagaaaagccttctcctcaaagagaaatctcattgtacatcagcgaactcataat

SEQ ID NO: 783726 - DNA, 120 bp, Artificial Sequence
  ENSG00000256087_19 (sequence is synthesized)
tcacagtatagattttctacatgtgtactgagtatgaaaaatcatatttcaaaatccagtgttattcactaggatgaatgctatcaatgtcagaaaggcttcaacatgaattcaggctct

SEQ ID NO: 783727 - DNA, 120 bp, Artificial Sequence
  ENSG00000256087_20 (sequence is synthesized)
gaattctttgatgtaccaatgtatagaaaattactcatctgagagagagtctgtggattgggggtaacctttcatttgtcaaccttcattaaaactatgacaacgtccacatgacaaatg

SEQ ID NO: 783728 - DNA, 120 bp, Artificial Sequence
  ENSG00000256087_21 (sequence is synthesized)
tgtaaggtacatagtccttttgcagagaatctgaactgattacatacaaacaaattcatgcagagagaaaaccacgttagtaatgtgaactgattaaacagcagtgtgctcctagcatac

SEQ ID NO: 783729 - DNA, 120 bp, Artificial Sequence
  ENSG00000256087_22 (sequence is synthesized)
atgcatataggcagtgtagagcagcctgttgctagattttcacccttggaagacaatgcaatttccaggagcgaattttaatgaatgcagagaatgcactagtgccttcggtgattaatt

SEQ ID NO: 783730 - DNA, 120 bp, Artificial Sequence
  ENSG00000256087_23 (sequence is synthesized)
acctcatattttatgtcacaataaacatgtaggaaataaacttgatacatccaatgcagaaaagtcttgaaaattttctaagtaactatgtcttgaaaagtatttactgagataaatctt

SEQ ID NO: 783731 - DNA, 120 bp, Artificial Sequence
  ENSG00000256087_24 (sequence is synthesized)
acaaaggagtaggctaggaaagccttctatgggaagaaagaccctatctcttcagtgatcataatagatcatcaatgaacttacacatactagcagcattatcatgggaaagcctttgcc

SEQ ID NO: 783732 - DNA, 120 bp, Artificial Sequence
  ENSG00000256087_25 (sequence is synthesized)
cagaaataaaaccttaacagttggcagatatatttcatactggagaacaagtttcagatggcagtgaatacacgaggatttcagtgatacatgctgcctcatcatcattacttcatacag

SEQ ID NO: 783733 - DNA, 120 bp, Artificial Sequence
  ENSG00000256087_26 (sequence is synthesized)
tcatacagaaataaaacttatatgaagagtaactttaaaaaggatcaggaaattcatgaagtaaaaaagtctcatgaaaatgatacataatgccgggcatggtggcttgcacctgtaatc

SEQ ID NO: 783734 - DNA, 67 bp, Artificial Sequence
  ENSG00000256087_27 (sequence is synthesized)
aaaatacaaaattagccgagcatggtggctcacgcttgtaatcccagctactctggaggctaagcca

SEQ ID NO: 783735 - DNA, 120 bp, Artificial Sequence
  ENSG00000256087_28 (sequence is synthesized)
cctcaaaaaaaaaaaaaaaaaaccatatttgaggactgtcacaaatctaaactcatgatacacttgatatctattctgtgacagcataccttgcatcatattatcaatgattccataatt

SEQ ID NO: 783736 - DNA, 120 bp, Artificial Sequence
  ENSG00000256087_29 (sequence is synthesized)
gtaaagcgggctgttcttatcactgattaaattttaatcctatatataacacaggtgttttctgtgccaatctggtgttatttattagttcttacatattataggccccaaatttatttt

SEQ ID NO: 783737 - DNA, 120 bp, Artificial Sequence
  ENSG00000256087_30 (sequence is synthesized)
tttcaatttactgataaatgtaattcagtatatttggatgtgtttatccaagttactaggtaccattatgtagtttacaaaaatgccttaaatgttatttttctaaaatttgttttgaaa

SEQ ID NO: 783738 - DNA, 120 bp, Artificial Sequence
  ENSG00000256087_31 (sequence is synthesized)
taattctagattcacaagagattacaaaatatacaaaagtttcctgagtattctttgcttagcatcatcaatgttatcttacataaccataataataaaaaccacggagttctgctcttg

SEQ ID NO: 783739 - DNA, 120 bp, Artificial Sequence
  ENSG00000256087_32 (sequence is synthesized)
acataaccataataataaaaaccacggagttctgctcttgttgcccaggttggagtgtaatagcacgatcttggctcactgcaaccccgcctcccaggttcaagagattttcctgcctca

SEQ ID NO: 783740 - DNA, 61 bp, Artificial Sequence
  ENSG00000256087_33 (sequence is synthesized)
cccacgaccacccttgaactctcgaccccgggcggtccacccgcctcagcctcccaaagtg

SEQ ID NO: 783741 - DNA, 120 bp, Artificial Sequence
  ENSG00000256087_34 (sequence is synthesized)
gcatgagccaccacgcctggcctcctcttgctacctctttatactcacactgtcctcccaatatgacccatggtagccactgatcccattaccctaattttgttatttcaagaatgctat

SEQ ID NO: 783742 - DNA, 120 bp, Artificial Sequence
  ENSG00000256087_35 (sequence is synthesized)
taaaatggaatcgtaaggtacgcaagctttgagatagggctttgttcactcagcaaattacccttaagatctatccaagttgttaggtgtctaaatagttttaatttttgttactgagtt

SEQ ID NO: 783743 - DNA, 120 bp, Artificial Sequence
  ENSG00000256087_36 (sequence is synthesized)
agtattcttttaaatggatgcaccagggtttgtgtatccattcactgttgatggacatttgggttgtttccagtgttttgctgttataaataaagatgctgtgactatttgtgtacccga

SEQ ID NO: 783744 - DNA, 120 bp, Artificial Sequence
  ENSG00000256087_37 (sequence is synthesized)
gtgagaagcagcaagatgcgtaagtaatattatagtcagtgaaagaaggctctgtgggtgtctgaggacacagaagcagtgcctacattaggaatgggaatcgttttccctccacaagaa

SEQ ID NO: 783745 - DNA, 120 bp, Artificial Sequence
  ENSG00000256087_38 (sequence is synthesized)
acttttaaagaggtgtgagagtaacattgtataaaggaaaaaatgtagtttctcaccatccatatggcctgatttaaaaaactgatatgagaattacctactgcttaggcatgatgctat

SEQ ID NO: 783746 - DNA, 120 bp, Artificial Sequence
  ENSG00000256087_39 (sequence is synthesized)
gtggattctcctttgtgacctcccctttcatcttcatgttacttccacacttcaccgaagaaaggcatttggcctacattgagggtcttgtgtttccttggtttgagagaaccaaataaa

SEQ ID NO: 783747 - DNA, 120 bp, Artificial Sequence
  ENSG00000256087_40 (sequence is synthesized)
aaggccacgtcgctatgagtgtgtttcagtctacctggattaaacgtttgcttctcttcgtctaccttgattaaacgtgcacttcgcagtcctcggttctccatacccgtgacctgggga

SEQ ID NO: 783748 - DNA, 120 bp, Artificial Sequence
  ENSG00000256087_41 (sequence is synthesized)
tcgctacggaccttaaaatacccgcaacagccccttcgtcccaaagtcaagaacagagccaggtggttcttctcttctaaagacatttccatgggccagttccaccgcaagcttctcaga

SEQ ID NO: 783749 - DNA, 120 bp, Artificial Sequence
  ENSG00000256087_42 (sequence is synthesized)
gagaatatgttctgccgtacggacaccgaacgtcccctaagatggccgcccccatgatgctctcccctaagggctctggctccgttacctgcaacgcaccgctcgcttattttttgttct

SEQ ID NO: 783750 - DNA, 120 bp, Artificial Sequence
  ENSG00000256087_43 (sequence is synthesized)
atacggcttctaaaacgcttcgcatttacaatagtgactgaggtgcccagaggtgactttaattttccattgagctgagacgtcacagccatcataaccgctaagaagggatgccgcgcc

SEQ ID NO: 783751 - DNA, 120 bp, Artificial Sequence
  ENSG00000256087_44 (sequence is synthesized)
tttgtggtaataatgggttctggcctttgagaagtttgcgccgttcactgtcccctgcgaggagaagactaacttatttctgttccgtgtctgttcagaggactttacccccacgccgtg

SEQ ID NO: 783752 - DNA, 120 bp, Artificial Sequence
  ENSG00000256087_45 (sequence is synthesized)
tctgcctgtgtgaactcaagcctctgataagctctccattttctgccagggctgaggtgtctggaaatcggacagtttaagaggcctccgtccaccgcgtctcccggccgctgtgccttc

SEQ ID NO: 783753 - DNA, 120 bp, Artificial Sequence
  ENSG00000256087_46 (sequence is synthesized)
tgtacgtcacgtactcaaagatggccgcccccagagcggcgaggcgacgccggcgcggacgcgtctcctcctgaggaaaagccggaaggccgcattccgctctccatggaaacgcggctg

SEQ ID NO: 783754 - DNA, 120 bp, Artificial Sequence
  ENSG00000256162_0 (sequence is synthesized)
actgagacatgctgagcaaaggccggagccccagaagaaaacaagtacagactcagaggaaagctgccctggtcctgagtgtgactcccatggtccccgtggggtctgtgtggttggcaa

SEQ ID NO: 783755 - DNA, 120 bp, Artificial Sequence
  ENSG00000256162_1 (sequence is synthesized)
tgagctctgtgctgtcagctttcatgagggagctccctggctggttcctgttctttggggtcttcctccccgtgactttgctgctgctcctcctcatcgcctacttcaggatcaaactga

SEQ ID NO: 783756 - DNA, 120 bp, Artificial Sequence
  ENSG00000256162_2 (sequence is synthesized)
ttgaggttaatgaagaactgtcccagaactgtgatcgccaacataatcccaaggatggctcttccctgtaccagagaatgaaatggacgtgaagttggggactttccaataactaaagca

SEQ ID NO: 783757 - DNA, 120 bp, Artificial Sequence
  ENSG00000256162_3 (sequence is synthesized)
caatgagtttctactggtcagcaagcaatggccaacagttcagctaataaagtaggttgataaactagaaccatagcaaaatagaaagaatactaagatactcattctgaaccatactga

SEQ ID NO: 783758 - DNA, 120 bp, Artificial Sequence
  ENSG00000256162_4 (sequence is synthesized)
aaagtggcagctattatctaaggggacttctcagagactcagtataacagcagctcttgaaaagtaccaagaatggatttcctgggtatatacactggacacattgtaactttttaactt

SEQ ID NO: 783759 - DNA, 120 bp, Artificial Sequence
  ENSG00000256162_5 (sequence is synthesized)
ttattgtgactgtgtctgctctaaacggcatatttaaaaaataaaattctgcagcatcttactacataatcccataggaacccctattattccgattttagaggtgaagaaaccttggta

SEQ ID NO: 783760 - DNA, 120 bp, Artificial Sequence
  ENSG00000256162_6 (sequence is synthesized)
gagatccaatgaatagcaaaagatgaatgccttggagagagctcagtagattccatatgcaagaatatttccacgttcttcttgcagttcagcaactcttaagtgacacagttcaggtat

SEQ ID NO: 783761 - DNA, 120 bp, Artificial Sequence
  ENSG00000256162_7 (sequence is synthesized)
catttttggacctgactttgcttctctccttttcctgattgctttcacaaatcattattgtcacaaatatgcacaaaacaagtggagtatccccacactaggtatggatcacccacaaat

SEQ ID NO: 783762 - DNA, 120 bp, Artificial Sequence
  ENSG00000256162_8 (sequence is synthesized)
gtagctttcagcatgatgcgacctggaaatgttggcaatttggtaatgggaaaaggaaagggcagaatgttcacataattcctgaggaggagaatacaagtctttgcctgtaataccaaa

SEQ ID NO: 783763 - DNA, 120 bp, Artificial Sequence
  ENSG00000256162_9 (sequence is synthesized)
atacagggagctatatctaactatgcggataagtcaacatttcactacagttctttttcagtgggagccccaaagagacaacataggtaattgaaaagaaacttaattctaggggtagtt

SEQ ID NO: 783764 - DNA, 120 bp, Artificial Sequence
  ENSG00000256162_10 (sequence is synthesized)
acattaacaggctgagtgatccactttataaaacataatgaatggggtcacctgtaagaaatgcacctgtttcagtagtggcttacagtcatactaaaggttgtgtggatgacccaaagc

SEQ ID NO: 783765 - DNA, 120 bp, Artificial Sequence
  ENSG00000256162_11 (sequence is synthesized)
aaaaatataccatcagtgctggatttttactgcttcttcccctcagccccaccctaaaattcttgatacccattccgtgagtagtttccatttgcacttcttgcataatataaaacttat

SEQ ID NO: 783766 - DNA, 120 bp, Artificial Sequence
  ENSG00000256162_12 (sequence is synthesized)
tgctagaataaagacactcacttctgcattttactgcacttgattacaatgaaaatgtctgccggggttttcagactgaactaattcagagtaacagtgctcttgccatatggaaggaat

SEQ ID NO: 783767 - DNA, 120 bp, Artificial Sequence
  ENSG00000256162_13 (sequence is synthesized)
aacaatattctttcagttttgggagagatctctttttagcccctgggggaaatcagcttatgtaaaaatgctttctttaacagaaagtgtgaaaggacagatcgtattcctatctcaggc

SEQ ID NO: 783768 - DNA, 120 bp, Artificial Sequence
  ENSG00000256162_14 (sequence is synthesized)
agctgccagccacatttgtggctcagctatcaaggtttgctccatcttcctccaataatgggcacttcagaaggccagttccagctctggtgggtgctggtccaccatctcagctattgt

SEQ ID NO: 783769 - DNA, 120 bp, Artificial Sequence
  ENSG00000256162_15 (sequence is synthesized)
gataacacatgagctctatatagacatgttttcagcaccaagcactaccaagtactttagaacaaggcctgtttcttttctgccatccaatgagagcagagaatctccaatgaaactgac

SEQ ID NO: 783770 - DNA, 120 bp, Artificial Sequence
  ENSG00000256162_16 (sequence is synthesized)
tagatttatgaatgttttttatatgtagagaggggcagaaacatgttcattttcccatgaaggaacaagtcccaagggtttatcatctgcctgaaggcactgctaacgaatttgtcaaat

SEQ ID NO: 783771 - DNA, 120 bp, Artificial Sequence
  ENSG00000256162_17 (sequence is synthesized)
cctttatccagcacagctttaccaagcagctgcacagtcaggcctttgcacttctcattctcataggtccagtttaagatctcattcagtcctgaactgcttcggtcctttgcattcctg

SEQ ID NO: 783772 - DNA, 120 bp, Artificial Sequence
  ENSG00000256162_18 (sequence is synthesized)
ctgtcttggcctccacctagaccaagtcggcagtctccctacattaccctacattcagctgcatcctatgctccaaggcctttcaccaggggccagaaatgctcccacaaccctcaatgg

SEQ ID NO: 783773 - DNA, 120 bp, Artificial Sequence
  ENSG00000256162_19 (sequence is synthesized)
tctcactacaacagttccgaatcttattccaaatgctatagtatctgaaacggttcaccaatagggataatgtttctccaactggagaccttcaataaaacacttcaataggtgctttaa

SEQ ID NO: 783774 - DNA, 120 bp, Artificial Sequence
  ENSG00000256188_0 (sequence is synthesized)
gtcgctaaagacaaatgatggagaggttacacaaggaaaaattgcaaacactggaagtgaacatgtccttgtttgcatactagcaaatgagaattcaggtttcatgtcaatttcagtatg

SEQ ID NO: 783775 - DNA, 120 bp, Artificial Sequence
  ENSG00000256188_1 (sequence is synthesized)
aataattccagcctataacaagaacagatggtgaatgagtcagttaatttgaattgttttgaaaataagaatgttttccataaagagagcattgaacttatccattagcatgccatggtg

SEQ ID NO: 783776 - DNA, 120 bp, Artificial Sequence
  ENSG00000256188_2 (sequence is synthesized)
atttctgacttgacactggtcacagcaattaaaagtaaaaagaatgtcacagcacatacacaaatcaggtgcatatagaatttaaggtcaggatattcaagcaatcacaaccagtgatat

SEQ ID NO: 783777 - DNA, 120 bp, Artificial Sequence
  ENSG00000256188_3 (sequence is synthesized)
tacaccagcattttaaaaatttctttttgtctgttcagacatgataacttttctgcccatcattttttccattctaatagtggttatatttgttattggaaattttgctaatggcttcat

SEQ ID NO: 783778 - DNA, 120 bp, Artificial Sequence
  ENSG00000256188_4 (sequence is synthesized)
agcattggtaaattccattgagtgggtcaagagacaaaagatctcctttgttgaccaaattctcactgctctggcggtctccagagttggtttgctctgggtgttattactacattggta

SEQ ID NO: 783779 - DNA, 120 bp, Artificial Sequence
  ENSG00000256188_5 (sequence is synthesized)
tgcaactcagttgaatccagctttttatagtgtagaagtaagaattactgcttataatgtctgggcagtaaccaaccatttcagcagctggcttgctactagcctcagcatgttttattt

SEQ ID NO: 783780 - DNA, 120 bp, Artificial Sequence
  ENSG00000256188_6 (sequence is synthesized)
gctcaggattgccaatttctccaaccttatttttcttcgcataaagaggagagttaagagtgttgttctggtgatactgttggggcctttgctatttttggtttgtcatctttttgtgat

SEQ ID NO: 783781 - DNA, 120 bp, Artificial Sequence
  ENSG00000256188_7 (sequence is synthesized)
gatgagactgtatggacaaaagaatatgaaggaaacgtgacttggaagatcaaattgaggagtgcaatgtaccattcaaatatgactctaaccatgctagcaaactttgtacccctcact

SEQ ID NO: 783782 - DNA, 120 bp, Artificial Sequence
  ENSG00000256188_8 (sequence is synthesized)
ctgaccctgatatcttttctgctgttaatctgttctctgtgtaaacatctcaagaagatgcagctccatggcaaaggatctcaagatcccagcaccaaggtccacataaaagctttgcaa

SEQ ID NO: 783783 - DNA, 120 bp, Artificial Sequence
  ENSG00000256188_9 (sequence is synthesized)
actgtgacctcctttcttctgttatgtgccatttactttctgtccatgatcatatcagtttgtaattttgggaggctggaaaagcaacctgtcttcatgttctgccaagctattatattc

SEQ ID NO: 783784 - DNA, 120 bp, Artificial Sequence
  ENSG00000256188_10 (sequence is synthesized)
agctatccttcaacccacccattcatcctgattttgggaaacaagaagctaaagcagatttttctttcagttttgcggcatgtgaggtactgggtgaaagacagaagccttcgtctccat

SEQ ID NO: 783785 - DNA, 120 bp, Artificial Sequence
  ENSG00000256188_11 (sequence is synthesized)
agattcacaagaggggcattgtgtgtcttctagcagaaaacaaactggtggtgtatgaaacattttatatttcttactgggttttctgtaatatatgtatatgaataatttccacatgta

SEQ ID NO: 783786 - DNA, 120 bp, Artificial Sequence
  ENSG00000256188_12 (sequence is synthesized)
tacctagaaaagtcttttacctaaagttagtctagaaaagtacatatatatagatgtgtgtgtgtgtgtgtgtgtgtatgaaaaactgaagaacattgacaataacatgctttttattgt

SEQ ID NO: 783787 - DNA, 120 bp, Artificial Sequence
  ENSG00000256188_13 (sequence is synthesized)
ttgttttttcacaaaaactgccaaattatagaaaatatgacaaaaattcctcaattatgaagccatgtttatttcatacatgtattttatatttcatttgtagaatttatatctatttat

SEQ ID NO: 783788 - DNA, 120 bp, Artificial Sequence
  ENSG00000256222_0 (sequence is synthesized)
cccaaaagcagccactaattaagaaagcatttaagctcaatatctaactatcttaaattctaaccagtctactgaactcctaacatcacattggactaatctattacttaatagaagcag

SEQ ID NO: 783789 - DNA, 120 bp, Artificial Sequence
  ENSG00000256222_1 (sequence is synthesized)
taatgttaatgtaagtaagatgaagacattctccattgcataagcttacatcagacgggagtaacccactgacagttaacatcccaatattaataaatgatataataaacaccgtattat

SEQ ID NO: 783790 - DNA, 120 bp, Artificial Sequence
  ENSG00000256222_2 (sequence is synthesized)
acaccgtattatttgcactgttaacccaacacaggcatgctctaaggaaacattacaaaaaaataaaaggaactcagcaaatcttaccccgcctgtttaccaaaaacatcacctctagca

SEQ ID NO: 783791 - DNA, 120 bp, Artificial Sequence
  ENSG00000256222_3 (sequence is synthesized)
gaggcactatctgcccagtgacatatattcaacagctgtggtatcctgaccgtgcgaaggtagcataatcacttgttctctaaatagggacttgaatgaatggccacacgaaggttcagc

SEQ ID NO: 783792 - DNA, 120 bp, Artificial Sequence
  ENSG00000256222_4 (sequence is synthesized)
tcaatgcaaataaaaactccaacaagcctacaggccctagcctcctatccctgcattaaaaattttggttggggtgacctcggagcataattcaacctcctaacaacctaagaccacaca

SEQ ID NO: 783793 - DNA, 120 bp, Artificial Sequence
  ENSG00000256222_5 (sequence is synthesized)
agtctaagtgagttattacacatcgacccaataatttgataaacggagtaagttaccctagggataacagcgcaatcctatactagagtccatatcgacaatagagtttacgacctcgat

SEQ ID NO: 783794 - DNA, 120 bp, Artificial Sequence
  ENSG00000256222_6 (sequence is synthesized)
gttggatcaggacatcctaatggtgtagccgctattaagagtttgtttgttcaatgattaaagtcctatgtgatctcagttcagaccagagtaatccaggtcggtttctacctacttaac

SEQ ID NO: 783795 - DNA, 120 bp, Artificial Sequence
  ENSG00000256222_7 (sequence is synthesized)
attcctcctactacgaaaggacaagagaaatagggcccacttcataaagtgccctcactccatagatgatgccatcccagtctcttaaatcatcacacatcctacccaagaacagggttt

SEQ ID NO: 783796 - DNA, 120 bp, Artificial Sequence
  ENSG00000256223_0 (sequence is synthesized)
agactcacctctgacgccgctcttcgcgctccgctggtgaatggagtcgcgttctctgttttgctgttgctgctgcctttgtgacgggatcgctttctcccatcgaaccttctagttgct

SEQ ID NO: 783797 - DNA, 120 bp, Artificial Sequence
  ENSG00000256223_1 (sequence is synthesized)
tattgcagctttgtctcctcagcactctgctgtcactcaaggaagtatcatcaagaacaaggagggcatggatgctaagtcactaactgcctggtcccggacactggtgaccttcaagga

SEQ ID NO: 783798 - DNA, 120 bp, Artificial Sequence
  ENSG00000256223_2 (sequence is synthesized)
tgtatttgtggacttcaccagggaggagtggaagctgctggacactgctcagcagatcgtgtacagaaatgtgatgctggagaactataagaacctggtttccttgggttatcagcttac

SEQ ID NO: 783799 - DNA, 120 bp, Artificial Sequence
  ENSG00000256223_3 (sequence is synthesized)
taagccagatgtgatcctccggttggagaagggagaagagccctggctggtggagagagaaattcaccaagagacccatcctgattcagagactgcatttgaaatcaaatcatcagtttc

SEQ ID NO: 783800 - DNA, 120 bp, Artificial Sequence
  ENSG00000256223_4 (sequence is synthesized)
cagcaggagcatttttaaagataagcaatcctgtgacattaaaatggaaggaatggcaaggaatgatctctggtatttgtcattagaagaagtctggaaatgtagagaccagttagacaa

SEQ ID NO: 783801 - DNA, 120 bp, Artificial Sequence
  ENSG00000256223_5 (sequence is synthesized)
gtatcaggaaaacccagagagacatttgaggcaagtggcattcacccaaaagaaagtacttactcaggagagagtctctgaaagtggtaaatatgggggaaactgtcttcttcctgctca

SEQ ID NO: 783802 - DNA, 120 bp, Artificial Sequence
  ENSG00000256223_6 (sequence is synthesized)
gctagtactgagagagtatttccataaacgtgactcacatactaaaagtttaaaacatgatttagttcttaatggtcatcaggacagttgtgcaagtaacagtaatgaatgtggtcaaac

SEQ ID NO: 783803 - DNA, 120 bp, Artificial Sequence
  ENSG00000256223_7 (sequence is synthesized)
tttctgtcaaaacattcaccttattcagtttgcaagaactcacacaggtgataaatcctacaaatgccctgataatgacaactctcttactcatggttcatctcttggtatatcaaaggg

SEQ ID NO: 783804 - DNA, 120 bp, Artificial Sequence
  ENSG00000256223_8 (sequence is synthesized)
catacatagagagaaaccctatgaatgtaaggaatgtggaaaattcttcagctggcgctctaatcttactaggcatcagcttattcatactggagaaaaaccctatgagtgtaaagaatg

SEQ ID NO: 783805 - DNA, 120 bp, Artificial Sequence
  ENSG00000256223_9 (sequence is synthesized)
tggaaagtctttcagccggagttctcacctcattggacatcaaaagacccatactggtgaggaaccctatgaatgtaaagaatgtggaaaatccttcagctggttctctcaccttgttac

SEQ ID NO: 783806 - DNA, 120 bp, Artificial Sequence
  ENSG00000256223_10 (sequence is synthesized)
tcatcagagaactcatacaggagacaaactgtacacatgtaatcagtgtgggaaatcttttgttcatagctctaggcttattagacaccagaggacacatactggagagaaaccctatga

SEQ ID NO: 783807 - DNA, 120 bp, Artificial Sequence
  ENSG00000256223_11 (sequence is synthesized)
atgtcctgaatgtgggaaatctttcagacagagcacacatctcattctgcatcagagaacccatgtgagagtgaggccctatgaatgcaatgaatgtggaaagtcttacagccagagatc

SEQ ID NO: 783808 - DNA, 120 bp, Artificial Sequence
  ENSG00000256223_12 (sequence is synthesized)
tcaccttgttgtgcatcatagaattcacactggactaaaaccttttgagtgtaaggattgtggaaaatgttttagtcgaagctctcacctttattcacatcaaagaacccacactggaga

SEQ ID NO: 783809 - DNA, 120 bp, Artificial Sequence
  ENSG00000256223_13 (sequence is synthesized)
gaaaccatatgagtgtcatgattgtggaaaatctttcagccagagttctgcccttattgtgcatcagaggatacacactggagagaaaccatatgaatgctgtcagtgtgggaaagcctt

SEQ ID NO: 783810 - DNA, 120 bp, Artificial Sequence
  ENSG00000256223_14 (sequence is synthesized)
catccggaagaatgacctcattaagcaccagagaattcatgttggagaagagacctataaatgtaatcaatgtggcattatcttcagccagaactctccatttatagttcatcaaatagc

SEQ ID NO: 783811 - DNA, 120 bp, Artificial Sequence
  ENSG00000256223_15 (sequence is synthesized)
tcacactggagagcagttcttaacatgcaatcaatgtgggacagcgcttgttaatacctctaaccttattggataccagacaaatcatattagagaaaatgcttactaataaatatggga

SEQ ID NO: 783812 - DNA, 120 bp, Artificial Sequence
  ENSG00000256223_16 (sequence is synthesized)
atttttcacaaagagcaatgactttattttgcattggagaactcctggagataagctgtacaaattgaatctatgtggaaatgctttcagtcttgttactatcctattgcacattagaga

SEQ ID NO: 783813 - DNA, 120 bp, Artificial Sequence
  ENSG00000256223_17 (sequence is synthesized)
attggtcctggaagggaaagaaaccacagattttatttcagtacacaaatccatcagattttcttcttttcatgaattcctacagaagtaattggcctgagagcattcttgaccaagtct

SEQ ID NO: 783814 - DNA, 120 bp, Artificial Sequence
  ENSG00000256223_18 (sequence is synthesized)
tatagggagagttgttgctgagaattaagaaatgatacagttaatgcaacaaaagatggaaaataatatttcagtcaatatgtcattgttttcttgactatgtctctcttctgggacatt

SEQ ID NO: 783815 - DNA, 120 bp, Artificial Sequence
  ENSG00000256223_19 (sequence is synthesized)
tagtagtgtttggtatgttttatgtgtctggtagaaaccatattttggttaacagcaagaaaaatgcttataatgtagtacaattaaaaacaacacatctccactaccagtgctaaccca

SEQ ID NO: 783816 - DNA, 120 bp, Artificial Sequence
  ENSG00000256223_20 (sequence is synthesized)
tttttaagtacatttgcatgtgggcaagaattgaaagtatacagataattgaacagaattgatttgttagataaggagattttgactgagttttatagtctgtttaatgttgctgtaata

SEQ ID NO: 783817 - DNA, 120 bp, Artificial Sequence
  ENSG00000256223_21 (sequence is synthesized)
attattttaagaaacttttaaatattgtaagaggatatctagtttctctattctaccatcaaagaagcttttgagtaccacctgttaatgagctttcctattctaaattgttttgggtca

SEQ ID NO: 783818 - DNA, 120 bp, Artificial Sequence
  ENSG00000256223_22 (sequence is synthesized)
cagagttccactttttccactcttattagcactgcaaaagctcctgagaatttaaaaacacagtaattctctggatgttaggacctaggggaacattgggcatttgaacatatcagggag

SEQ ID NO: 783819 - DNA, 120 bp, Artificial Sequence
  ENSG00000256223_23 (sequence is synthesized)
ggtccccattttagtgggaacaagtatttaaacaatatttagagcaagtgtcctcatgtgataaacagagcacagtccaaagataccctctttctcaaggtagtcttttatctttataaa

SEQ ID NO: 783820 - DNA, 120 bp, Artificial Sequence
  ENSG00000256223_24 (sequence is synthesized)
gaaagattagtgtttaagagcgtagacttgagctagactacccaggttgaaaccccactagctgggtgatcttgaacatgctgcttagcttctctgtgccaaacttactgatatcctcat

SEQ ID NO: 783821 - DNA, 120 bp, Artificial Sequence
  ENSG00000256223_25 (sequence is synthesized)
ctgtaaattagcgataataatagtacttacctggtaggattatggtgagtattaaatgagtaaatggaaacagcttagaatagtgcctgacatatattatgttctctgtagttactggct

SEQ ID NO: 783822 - DNA, 120 bp, Artificial Sequence
  ENSG00000256223_26 (sequence is synthesized)
gtgattattaataatattgccgcaccctaatatctgttatttaattgaaatctgcttgtgtgcttataagaatttactgagttctcacttcccttacagtcatacatggtttttcccttt

SEQ ID NO: 783823 - DNA, 120 bp, Artificial Sequence
  ENSG00000256223_27 (sequence is synthesized)
tgcctaaatcagaactcaacagcctgggaaaatcactgacaaatagtggatataggtttcatttctgaggatcaataaacagcttgtaatgttgtatacacatttattctgtttgtacaa

SEQ ID NO: 783824 - DNA, 120 bp, Artificial Sequence
  ENSG00000256223_28 (sequence is synthesized)
aggttttccattctatggagaggatcccagtcttcagattctctggtaagttaataacccacaaaagattcaggaagaggatctattttaattttctctttcattctataaatcagtctg

SEQ ID NO: 783825 - DNA, 120 bp, Artificial Sequence
  ENSG00000256223_29 (sequence is synthesized)
ttgtatatagggactgaccatgattctccattttctggcataaatattagctgctcaatgattgattgttgaatgatagatgaagtattgctgaagccaaccagagatcttgatctctct

SEQ ID NO: 783826 - DNA, 120 bp, Artificial Sequence
  ENSG00000256223_30 (sequence is synthesized)
ctgaggaaaaaacctagaaatgatggttagaatcaggagacttgagaactacgaggaacatggcagcctctagctcatacttgtcgttgtacaattgagatcaagtgaattggccccggt

SEQ ID NO: 783827 - DNA, 120 bp, Artificial Sequence
  ENSG00000256223_31 (sequence is synthesized)
ctcacattttcagtgaagtcagactcagaactaggtcctgggtttcatgtttcctgctgctcttctcactgtgtacacaccatgcccacatacaacatacctatcagaaatggttttcat

SEQ ID NO: 783828 - DNA, 120 bp, Artificial Sequence
  ENSG00000256223_32 (sequence is synthesized)
taagggagtagaatagtcacttaactggggctcttaacattgctaataacctgtggctcaatttcctcaactgtataatgaggttactactagtatctacctcaaagcgttgtcatgtgg

SEQ ID NO: 783829 - DNA, 120 bp, Artificial Sequence
  ENSG00000256223_33 (sequence is synthesized)
attgagatgatatgtatgaatcacataaaagagtgcctggcacatagtaggtgccattaataatattactattgttaacaccttaagggtctaacttgtaatgaagacagaaatatgtat

SEQ ID NO: 783830 - DNA, 120 bp, Artificial Sequence
  ENSG00000256223_34 (sequence is synthesized)
gaggatgatcactgaaatatttatgacagtgcataatttgcaaaataaaaaatgtacactagcataatatttgtggcatatccgtgtaatggaagattatgcaggcattaaaatatgtac

SEQ ID NO: 783831 - DNA, 120 bp, Artificial Sequence
  ENSG00000256223_35 (sequence is synthesized)
acaaaaagtttggtaaaggaaaaatgctgtcatgtgttacaaaagcatgataaataattgttaatatggaataagctcaaatatgtcaaaataaatgtaaaaaatgagtgttgcccaaaa

SEQ ID NO: 783832 - DNA, 120 bp, Artificial Sequence
  ENSG00000256223_36 (sequence is synthesized)
tattgcaggtatatacgaaagtgctgaattttgtgtttgcatcgtcatcaggcgcgtgttgagccctttagtaatgtagcagtgtattagcttcgtatttctaggtagacggtaatttcg

SEQ ID NO: 783833 - DNA, 120 bp, Artificial Sequence
  ENSG00000256223_37 (sequence is synthesized)
tcaatgaaaaaatttaacggtgatcgtcaccccttgcctcagtcactttctgtccctcgcgcggccccggcgttcacggcggacgttcttgttctgtggagaataacggctgcacctgga

SEQ ID NO: 783834 - DNA, 120 bp, Artificial Sequence
  ENSG00000256223_38 (sequence is synthesized)
cactttcaagctcactcttcttggcagaattcagttccttgtggctgcaggactgaggtccctgcttcctagctggctttcagctggtgctgctctttgctgctggagcctgccatgttc

SEQ ID NO: 783835 - DNA, 120 bp, Artificial Sequence
  ENSG00000256223_39 (sequence is synthesized)
ctcacactgcattccatcttcaagccagtaatggtgcgtcacatttttcttgggcttctatctctgacttccgttctgtgaccagctggagacaacacttgtttttttaatctgtaaagt

SEQ ID NO: 783836 - DNA, 120 bp, Artificial Sequence
  ENSG00000256223_40 (sequence is synthesized)
gagactatttgattaggtcaggtttggtatttttttccgcaaaaaaaaaatttgtaatggtaggtaggatcattcagttttaaatcttcaaatgtggtgtggaactccagagattaaggg

SEQ ID NO: 783837 - DNA, 120 bp, Artificial Sequence
  ENSG00000256223_41 (sequence is synthesized)
ggtaaaaatgcaatttatgtagctcttctcttcctaatcttggggagcttcgggcactgtagatttgcttatagaatatctctgatgttcctctgtatagtgggtgtttgtgtcataccc

SEQ ID NO: 783838 - DNA, 120 bp, Artificial Sequence
  ENSG00000256229_0 (sequence is synthesized)
gtctctcgctgcatctggagctctaggtcgcctcttcgctactctgtgtcctctgctcctagaggcccaccctctgtggccctgtgtcctgtaggtattgggagatccacagccaagatg

SEQ ID NO: 783839 - DNA, 120 bp, Artificial Sequence
  ENSG00000256229_1 (sequence is synthesized)
cctgtgtcctgtaggtattgggagatccacagccaagatgccgggaccccttagaagcctagaaatggaatcattgcaatttagagatgtggctgtagaattctctctggaggagtggca

SEQ ID NO: 783840 - DNA, 120 bp, Artificial Sequence
  ENSG00000256229_2 (sequence is synthesized)
atgttagagaactacagacacctggtcttccttggtattattgtctctaagccagacctgatcacctgtctggagcaaggaataaaacctctgactatgaagagacatgagatgattgcc

SEQ ID NO: 783841 - DNA, 120 bp, Artificial Sequence
  ENSG00000256229_3 (sequence is synthesized)
aaacccccagttgtgtgttctcattttgcccaagacctttggccagagcagagcataaaagattcttaccaaaaagtgatactgagaaaatttgaaaaatgtggacatggcaatttacac

SEQ ID NO: 783842 - DNA, 120 bp, Artificial Sequence
  ENSG00000256229_4 (sequence is synthesized)
tttaaaaaaggctgtgaaagtgtggatgagtgtaagttacacaaaagaggttataatggacttaaccaatgtttgacaactacccagagcaaaatatttcaatgtggtaaatatgtgaaa

SEQ ID NO: 783843 - DNA, 120 bp, Artificial Sequence
  ENSG00000256229_5 (sequence is synthesized)
gtctttcatcaattttcaaattcaaagagacataaaagaagacatactgaaaaaaaacctttgaaatatatagaaggtgacaaagcttttaaccagtcctcaacccatactacacataaa

SEQ ID NO: 783844 - DNA, 88 bp, Artificial Sequence
  ENSG00000256229_6 (sequence is synthesized)
ttgatactggagagaaaccaccggtcctcacaccttactacacataagataactcatactagagagaaaccctacaaatgtgaagaat

SEQ ID NO: 783845 - DNA, 120 bp, Artificial Sequence
  ENSG00000256229_7 (sequence is synthesized)
gaatgtggcaaagtctttaagtacttctctagctttactacacataagaaaattcatagtggagagaaaccctacatttgtgaagaatgtggcaaagcctttatgtacccctataccctt

SEQ ID NO: 783846 - DNA, 120 bp, Artificial Sequence
  ENSG00000256229_8 (sequence is synthesized)
ccttactacacataagataatccatactggagagcaaccctacaaatgtaaagaatgtgacaaagcttttaaccatcctgcaactctttcttcacataagaaaattcatactggagagaa

SEQ ID NO: 783847 - DNA, 120 bp, Artificial Sequence
  ENSG00000256229_9 (sequence is synthesized)
ttcatactggagagaaaccgtacacgtgtgataaatgtggcaaagcctttatttcatcctcgatccttagtaaacatgagaagattcatacgggagagaaaccctacaaatgtgaagaat

SEQ ID NO: 783848 - DNA, 60 bp, Artificial Sequence
  ENSG00000256229_10 (sequence is synthesized)
atggtctgcaggcctccataaacataggagaactcatactggagagaaaccctacaaatg

SEQ ID NO: 783849 - DNA, 73 bp, Artificial Sequence
  ENSG00000256229_11 (sequence is synthesized)
taggagaatatactacatcctcaaatctaactgaacataagacaactcatactggagagaaaccttacaaatg

SEQ ID NO: 783850 - DNA, 120 bp, Artificial Sequence
  ENSG00000256229_12 (sequence is synthesized)
gcttttaactggtcctcagaccttaataaacataagagaattcatattggacagaaaccaagaacgtgacaaaggattattttattattattatttttttgagaggtaattctgctgttg

SEQ ID NO: 783851 - DNA, 120 bp, Artificial Sequence
  ENSG00000256229_13 (sequence is synthesized)
tttcccaggctggagtgcaatggcataattttggctcaccacaacctccaccttctgggttcaagtaactctccttagtagctaggattacagggctgcaccaccacacctggctaattt

SEQ ID NO: 783852 - DNA, 80 bp, Artificial Sequence
  ENSG00000256229_14 (sequence is synthesized)
tctccatgttggtcaggctggtctcaatctcctaacctcaggtggtctgcctgctttgcctggctgacaaagctttttaa

SEQ ID NO: 783853 - DNA, 120 bp, Artificial Sequence
  ENSG00000256229_15 (sequence is synthesized)
gtgttggggttacaggcatgagccactgtgcctggctgacaaagctttttaaggaagttctcaacccttattacacataattcatactggacagaaaccctacaagtgtgaagaatgtgg

SEQ ID NO: 783854 - DNA, 74 bp, Artificial Sequence
  ENSG00000256229_16 (sequence is synthesized)
atttattttttgagatgcagtttcactcttgtgacccgggctgtagtgcaatggcatgatcttggcttactgtg

SEQ ID NO: 783855 - DNA, 72 bp, Artificial Sequence
  ENSG00000256229_17 (sequence is synthesized)
ttcctaaagtgctgggatgacaggcatgagcctcaattcccagccataagctcttaattcttaagagacatg

SEQ ID NO: 783856 - DNA, 120 bp, Artificial Sequence
  ENSG00000256229_18 (sequence is synthesized)
tcaattcccagccataagctcttaattcttaagagacatggcgataattcatggtgaagaggaactttacaaacctgaaagatgtgacagtgcttttcccaacacctccaacttttctat

SEQ ID NO: 783857 - DNA, 120 bp, Artificial Sequence
  ENSG00000256229_19 (sequence is synthesized)
gcataaaaaaaattatactacaccatagaaatgtatgaaatgtgacaaagcctttatatggttgccacactttattgtaggtaattcatacttccaaaatacctacaagtatgaagaatg

SEQ ID NO: 783858 - DNA, 120 bp, Artificial Sequence
  ENSG00000256229_20 (sequence is synthesized)
tggcaaaacttttaatcagtgcttacaccgtatttcacaggaaagctattatccttgagaaaaattgtacaaatataaagaatatggaaaagccattaatgtccatcacatcttactcaa

SEQ ID NO: 783859 - DNA, 120 bp, Artificial Sequence
  ENSG00000256229_21 (sequence is synthesized)
cagaagaaggttcataaaagagcaattactgtgacaaaaatctttcagaaaatataagcctttaaggtgaagaagagtattgattctgaagacaagcattacaaatataaagaggtttgt

SEQ ID NO: 783860 - DNA, 120 bp, Artificial Sequence
  ENSG00000256229_22 (sequence is synthesized)
agtacctttgcttgtattacagatcttattgcccgcgttttgtattagaaggaaaccctaaagcggttgccaaactttgtgcaacatcagggaatgtatattgaagaagattcctgcaaa

SEQ ID NO: 783861 - DNA, 75 bp, Artificial Sequence
  ENSG00000256229_23 (sequence is synthesized)
gcaacatcagggaatgtatattgaagaagattcctgcaaatgtaatgagtttggaaacacttcttagataaatta

SEQ ID NO: 783862 - DNA, 120 bp, Artificial Sequence
  ENSG00000256229_24 (sequence is synthesized)
gggaggccaaggtgggaggatcacctgatgtcgggagtttgagatcagactgaccaaaacggagaaacccagtctctactgaaaatataaaattagccatgcatggtggcacatgcctgt

SEQ ID NO: 783863 - DNA, 120 bp, Artificial Sequence
  ENSG00000256229_25 (sequence is synthesized)
ctgggcaataagagtgaaactctgtctccaggaaaaaaaaaaatttatttgtgtataactttaaaagcagatttttggaagcattgtaattacattaaaagtatacttgttccagctgcg

SEQ ID NO: 783864 - DNA, 71 bp, Artificial Sequence
  ENSG00000256229_26 (sequence is synthesized)
ttgtgtataactttaaaagcagatttttggaagcattgtaattacattaaaagtatacttgttccagctgc

SEQ ID NO: 783865 - DNA, 82 bp, Artificial Sequence
  ENSG00000256229_27 (sequence is synthesized)
tgtatttgtttccttaaaaaaatttttctgaaaagtgggtaatgacataatacagctttcaaattactttatgctgttattt

SEQ ID NO: 783866 - DNA, 120 bp, Artificial Sequence
  ENSG00000256229_28 (sequence is synthesized)
tgacataatacagctttcaaattactttatgctgttattttattcttattgtattcacatgtgaaagcatgtgatcaatttttgctgcatcagagatattagagatagttttttattaat

SEQ ID NO: 783867 - DNA, 120 bp, Artificial Sequence
  ENSG00000256229_29 (sequence is synthesized)
tgggcatttatgaccttttctataaaagtaaggacattaaaatgtaagatgcatgatgaaaatataagtggagaggctctttgtagttaacctatatgaagtaatgtataaggtaggtca

SEQ ID NO: 783868 - DNA, 120 bp, Artificial Sequence
  ENSG00000256229_30 (sequence is synthesized)
ctcccatctgtaatcccaggattttgggaggccaacacaggaggatccctggagcccaaaagtttgagaccagcctgggaaagatatggagacccctctttataaaaataatttaataat

SEQ ID NO: 783869 - DNA, 120 bp, Artificial Sequence
  ENSG00000256229_31 (sequence is synthesized)
tgccaggcatggtggtatgcagctgtggtacctgctacttgggagatggagggggagtcaaaattgtgccactacactccagcttgaatgacagagtgagaccctgtctccaaaaaacaa

SEQ ID NO: 783870 - DNA, 120 bp, Artificial Sequence
  ENSG00000256229_32 (sequence is synthesized)
aaaaaagctgttcatttcaggcatgttaagtatattctcattgttatgtaaaatacttctagacactttacatcttgtaaaactaaaactcaatacccattaaataacaactgctcattt

SEQ ID NO: 783871 - DNA, 120 bp, Artificial Sequence
  ENSG00000256235_0 (sequence is synthesized)
acactactgggctccaagactgctcaaggtctcactgatagtcaaggcttgtgctcctttttttcagaagagtaagattaaagaaaaccactgtgaattaaaaagtgtgggtgccaacat

SEQ ID NO: 783872 - DNA, 120 bp, Artificial Sequence
  ENSG00000256235_1 (sequence is synthesized)
gggacgggagtcccccctcactccatggatgacatagagggggcagaagattacagaattggcattgtcctgcgtggaagctgggccacccacagtggcgtgggaagcctctcagatgct

SEQ ID NO: 783873 - DNA, 120 bp, Artificial Sequence
  ENSG00000256235_2 (sequence is synthesized)
ggattctaatgggctcttgatcaccttggattgggctatttcattgttatcacaaaataaacaggatgctccaagtcatgttatggcagagaaccaaccagcttcacactggtcctctaa

SEQ ID NO: 783874 - DNA, 120 bp, Artificial Sequence
  ENSG00000256235_3 (sequence is synthesized)
accaatcctcacaacaggactgggagacaggtgttacctttcccactttacagagaatgaaacagagtggcaaagcctccgaaggaccctacacttcggacatcgcaaagcaggatctga

SEQ ID NO: 783875 - DNA, 120 bp, Artificial Sequence
  ENSG00000256235_4 (sequence is synthesized)
gtcccggctcctctgtccaaacctacttgctaggctttctttcccatgtctactctatagctggaaaggtcgtggaggacacattttaggccaaccctctcggtttacaatccagagagg

SEQ ID NO: 783876 - DNA, 120 bp, Artificial Sequence
  ENSG00000256235_5 (sequence is synthesized)
ggagaccctcagaagccaagcgacatgtccacggctacgcggcgagtgtgtggcaacgtggaaggggagcccgagacgccctggtctctcccttctctcgcaggttcctttctccccgaa

SEQ ID NO: 783877 - DNA, 120 bp, Artificial Sequence
  ENSG00000256235_6 (sequence is synthesized)
cgcagcccgcaggggacgctggaggaggagctgagctggagttgccggggccccgggaccgggcgttccgggggcggtccccagcagccgcgcattccagagccagcagcgcgtcctggc

SEQ ID NO: 783878 - DNA, 120 bp, Artificial Sequence
  ENSG00000256235_7 (sequence is synthesized)
cgctcctgcgctctcccgcctcccggggctcggaggagccggggcacgttccaggagctgcctagggctgaggttccaggcctgggggtcgcttccagctgccagatcccgtgcagtcct

SEQ ID NO: 783879 - DNA, 120 bp, Artificial Sequence
  ENSG00000256235_8 (sequence is synthesized)
ggggaccctgagaagcaccgagccatccctgacccaggaactttccgcagactcgccgccatctgggagtgaagcaacatggatgcagtcagccaagtccccatggaagtcgtgcttccc

SEQ ID NO: 783880 - DNA, 120 bp, Artificial Sequence
  ENSG00000256235_9 (sequence is synthesized)
tcatcatgacctcgttgttgctgtgcccagccactgcagtaatcatctatcgcatgcggactcatccgatccttagtggggctgtttgagagcctcccaagagggccgggtgagggatga

SEQ ID NO: 783881 - DNA, 120 bp, Artificial Sequence
  ENSG00000256235_10 (sequence is synthesized)
ggacaggcatcctatccccagcctcttcctgtcttcagaaaagcagcaggagggactttggggcatggacctgagttctggttttgattctgccacgagccagctgtgtgaatttggtca

SEQ ID NO: 783882 - DNA, 120 bp, Artificial Sequence
  ENSG00000256235_11 (sequence is synthesized)
agggacctaactctctgagttccaggttccttatctttcaaatggggatggtgatccctgccctttctacctcatagggatgtgagaaccacctgacttagtggatgtgaaagctgtttg

SEQ ID NO: 783883 - DNA, 120 bp, Artificial Sequence
  ENSG00000256235_12 (sequence is synthesized)
tgatcagtaaagctaccacagatataagggtgttatgctgaatcctgagaagctttcaagaaccagagaacctgattgctgatgatggccttaaaggtggtgagggagatactgggggca

SEQ ID NO: 783884 - DNA, 120 bp, Artificial Sequence
  ENSG00000256235_13 (sequence is synthesized)
gagcagactttgccagtgcccctcaggtcaaaccaagccaagagcaccctgtccccattccaaggggccagcagcactttggcccaaagtattttctttaaggtgccattccttcatgtt

SEQ ID NO: 783885 - DNA, 120 bp, Artificial Sequence
  ENSG00000256235_14 (sequence is synthesized)
ttctcagtttggagggtgatgggtagagctttccagaaccttctccattccagaatctctgcccctgtgtaatctgaaggaaggctgtgccatctttgggcactgccaagggagttgggg

SEQ ID NO: 783886 - DNA, 120 bp, Artificial Sequence
  ENSG00000256235_15 (sequence is synthesized)
tgatgggcttctttctgcactggagtctcacatctgttagctttgacactcaagcaatgttggaaaatgcagggtgactgagttccctgcccagctttcgggatctctggcccccatccc

SEQ ID NO: 783887 - DNA, 120 bp, Artificial Sequence
  ENSG00000256235_16 (sequence is synthesized)
cttgtgtgtgtccctctgcccagctcctgctgtaattagctccacgtgtacccccttcactccctcccaccagctctgcagccagcctatggcaattatattttaagaggtgttcccagg

SEQ ID NO: 783888 - DNA, 120 bp, Artificial Sequence
  ENSG00000256235_17 (sequence is synthesized)
acttttgggacctactaaaacaatgatggttattttagatgtgatgatttatatttatgtagagatatttctggaccactcaagctcttcgataccaaaatcaggagcatcttgggattt

SEQ ID NO: 783889 - DNA, 120 bp, Artificial Sequence
  ENSG00000256235_18 (sequence is synthesized)
attaaattatgtaagaagatagcacagatatcgggatattattgtgtgaaaatgctgcttttactttgatgtgatctcattgatgtacacaaccaagttccaataaagtgctagaatgtg

SEQ ID NO: 783890 - DNA, 120 bp, Artificial Sequence
  ENSG00000256235_19 (sequence is synthesized)
gagccatccctgacccaggaactttccgcagactcgccgccatctgggtccccagctcctgagcacatggagtcagaactcgaatttgagcttatcggcccaagcaaatcaacaagtggg

SEQ ID NO: 783891 - DNA, 120 bp, Artificial Sequence
  ENSG00000256269_0 (sequence is synthesized)
aagtgacgcgaggctctgcggagaccaggagtcagactgtaggacgacctcgggtcccacgtgtccccggtactcgccggccggagcccccggcttcccggggccgggggaccttagcgg

SEQ ID NO: 783892 - DNA, 120 bp, Artificial Sequence
  ENSG00000256269_1 (sequence is synthesized)
cacccacacacagcctactttccaagcggagccatgtctggtaacggcaatgcggctgcaacggcggaagaaaacagcccaaagatgagagtgattcgcgtgggtacccgcaagagccag

SEQ ID NO: 783893 - DNA, 120 bp, Artificial Sequence
  ENSG00000256269_2 (sequence is synthesized)
cttgctcgcatacagacggacagtgtggtggcaacattgaaagcctcgtaccctggcctgcagtttgaaatcattgctatgtccaccacaggggacaagattcttgatactgcactctct

SEQ ID NO: 783894 - DNA, 120 bp, Artificial Sequence
  ENSG00000256269_3 (sequence is synthesized)
aagattggagagaaaagcctgtttaccaaggagcttgaacatgccctggagaagaatgaagtggacctggttgttcactccttgaaggacctgcccactgtgcttcctcctggcttcacc

SEQ ID NO: 783895 - DNA, 120 bp, Artificial Sequence
  ENSG00000256269_4 (sequence is synthesized)
atcggagccatctgcaagcgggaaaaccctcatgatgctgttgtctttcacccaaaatttgttgggaagaccctagaaaccctgccagagaagagtgtggtgggaaccagctccctgcga

SEQ ID NO: 783896 - DNA, 120 bp, Artificial Sequence
  ENSG00000256269_5 (sequence is synthesized)
agagcagcccagctgcagagaaagttcccgcatctggagttcaggagtattcggggaaacctcaacacccggcttcggaagctggacgagcagcaggagttcagtgccatcatcctggca

SEQ ID NO: 783897 - DNA, 120 bp, Artificial Sequence
  ENSG00000256269_6 (sequence is synthesized)
catgtatgctgtgggccagggggccttgggcgtggaagtgcgagccaaggaccaggacatcttggatctggtgggtgtgctgcacgatcccgagactctgcttcgctgcatcgctgaaag

SEQ ID NO: 783898 - DNA, 120 bp, Artificial Sequence
  ENSG00000256269_7 (sequence is synthesized)
ggccttcctgaggcacctggaaggaggctgcagtgtgccagtagccgtgcatacagctatgaaggatgggcaactgtacctgactggaggagtctggagtctagacggctcagatagcat

SEQ ID NO: 783899 - DNA, 120 bp, Artificial Sequence
  ENSG00000256269_8 (sequence is synthesized)
acaagagaccatgcaggctaccatccatgtccctgcccagcatgaagatggccctgaggatgacccacagttggtaggcatcactgctcgtaacattccacgagggccccagttggctgc

SEQ ID NO: 783900 - DNA, 120 bp, Artificial Sequence
  ENSG00000256269_9 (sequence is synthesized)
ccagaacttgggcatcagcctggccaacttgttgctgagcaaaggagccaaaaacatcctggatgttgcacggcagcttaacgatgcccattaactggtttgtggggcacagatgcctgg

SEQ ID NO: 783901 - DNA, 120 bp, Artificial Sequence
  ENSG00000256269_10 (sequence is synthesized)
gttgctgctgtccagtgcctacatcccgggcctcagtgccccattctcactgctatctggggagtgattaccccgggagactgaactgcagggttcaagccttccagggatttgcctcac

SEQ ID NO: 783902 - DNA, 120 bp, Artificial Sequence
  ENSG00000256269_11 (sequence is synthesized)
cttggggccttgatgactgccttgcctcctcagtatgtgggggcttcatctctttagagaagtccaagcaacagcctttgaatgtaaccaatcctactaataaaccagttctgaaggtgt

SEQ ID NO: 783903 - DNA, 120 bp, Artificial Sequence
  ENSG00000256269_12 (sequence is synthesized)
agtgtcctggttactgcagcggcagcaacagcaggtcctactatcgcctccctctagtctctgcttctctggatccctgaggagggcagaaggaagaaaacagcccaaagatgagagtga

SEQ ID NO: 783904 - DNA, 120 bp, Artificial Sequence
  ENSG00000256269_13 (sequence is synthesized)
ggttactgcagcggcagcaacagcaggtcctactatcgcctccctctagtctctgcttctctggatccctgaggagggcagaagtgattctggttcttggacaaggtgttgaggaacact

SEQ ID NO: 783905 - DNA, 120 bp, Artificial Sequence
  ENSG00000256269_14 (sequence is synthesized)
tgtaagtcaaggaccatctgtcttcacttcttgaccaccccacctctaacaccgtaggctgggaagattgtgaatcagaggccagactctaggctttcatggagaaaatttacaaaaaaa

SEQ ID NO: 783906 - DNA, 120 bp, Artificial Sequence
  ENSG00000256269_15 (sequence is synthesized)
actaccttcctcacagggttgttgtgaagatgaaatgagctgacatatggaaagtacttttagagcagtgtctggcatgtaatcctgcaccctgaggaatgcatgtatgctgtgggccag

SEQ ID NO: 783907 - DNA, 120 bp, Artificial Sequence
  ENSG00000256269_16 (sequence is synthesized)
aggagtggaagctaatgggaagcccagtaccccgagaggagagaacacaacatttctggctttgcctatagctaaagcccgtcccgctgccccgagattccttctgggctgctcccagtt

SEQ ID NO: 783908 - DNA, 120 bp, Artificial Sequence
  ENSG00000256269_17 (sequence is synthesized)
gccatgtctggtaacggcaatgcggctgcaacggcgtcattccagagccctggactaggagtaggaagatctgaattgtggccccaactctctttcggttattagctctgtgaccctagg

SEQ ID NO: 783909 - DNA, 120 bp, Artificial Sequence
  ENSG00000256269_18 (sequence is synthesized)
ggccagtagctcggttgccctccggaaggaatggggaaatcagagagcggtgatactgggttaagagtggaaggattgtttggaacggaactccggtccctgcgggcatctgggtgggat

SEQ ID NO: 783910 - DNA, 120 bp, Artificial Sequence
  ENSG00000256269_19 (sequence is synthesized)
tcccatcaggcctgggatgcacggctctagatttagtgacccagaccaagaacgttcgtctacacagacggggtcctttcattcgaggctgggctgaggcggatgcagatacggcccctt

SEQ ID NO: 783911 - DNA, 120 bp, Artificial Sequence
  ENSG00000256269_20 (sequence is synthesized)
tgggaagacacgttccacttttgattcataggagagagtatcagccaagcctccgaactgcacacaaacgtcttagaagtgcgccttctttttgtgttatagtggtctcccagccacagc

SEQ ID NO: 783912 - DNA, 120 bp, Artificial Sequence
  ENSG00000256269_21 (sequence is synthesized)
caacgctccaagtccccagctgtgacacacctactgaattactaccgtgggtgggaggccgccgtgggcctttccattacgagcctgcttgccgagccctgggcttgtgcacagacaaac

SEQ ID NO: 783913 - DNA, 120 bp, Artificial Sequence
  ENSG00000256269_22 (sequence is synthesized)
tgcagagctggtggaggccactgccaggccgagataagaaagagatggggagctgctaatctccccctgtccagcctgttggtgagggctgggatctttgctcttgcagtcattccagag

SEQ ID NO: 783914 - DNA, 120 bp, Artificial Sequence
  ENSG00000256269_23 (sequence is synthesized)
gaggaatgcatgtatgctgtgggccaggtacacttgaccagggaagccacatggtgacatatgccttccctttgttctcaaccaagaagcttgtctcacaaccttctgcatctgcttccc

SEQ ID NO: 783915 - DNA, 120 bp, Artificial Sequence
  ENSG00000256269_24 (sequence is synthesized)
tctggtcttcctgctcgattgtatatactcagagggcaggaaccagggattatgtgcctctgtccccatcatgaatcgtagcacagcgctaggctcagtaaatgctgatcaataatgagc

SEQ ID NO: 783916 - DNA, 120 bp, Artificial Sequence
  ENSG00000256269_25 (sequence is synthesized)
gctcagtgtcctggttactgcagcggcagcaacagcaggtcctactatcgcctccctctagtctctgcttctctggatccctgaggagggcagaagccagtgattctggttcttggacaa

SEQ ID NO: 783917 - DNA, 120 bp, Artificial Sequence
  ENSG00000256269_26 (sequence is synthesized)
gaaatcaattggagagaaaagcctgtttaccaaggagcttgaacatgccctggagaagaatgaagtggacctggttgttcactccttgaaggacctgcccactgtgcttcctcctggctt

SEQ ID NO: 783918 - DNA, 120 bp, Artificial Sequence
  ENSG00000256269_27 (sequence is synthesized)
cctctgcttcagggttatctcctctgccctgaggagtgttgactggtggcagaaaactcaagaaataccagtgagttggcaatcgagagagaatagaggtgatctgaacttaaatctctt

SEQ ID NO: 783919 - DNA, 120 bp, Artificial Sequence
  ENSG00000256269_28 (sequence is synthesized)
cagaatagcattctcagggaggggcagaccttgggatgctaccggtccaaaaggcgctggggagcaagtagatagaggtggtcccatgctttgcgccattggttggggaaagatcaggcc

SEQ ID NO: 783920 - DNA, 120 bp, Artificial Sequence
  ENSG00000256269_29 (sequence is synthesized)
tgctaactcattcttgttgaatgttgtgtatggataggaccaggtctgggcccacagttgccttttcagtgatgtcctcaggtctgtggtcacagggtggtgttaagagcccttgcagct

SEQ ID NO: 783921 - DNA, 120 bp, Artificial Sequence
  ENSG00000256269_30 (sequence is synthesized)
gactgtggcatttcttcctgtgcatcccaggtttctaggtagtcccctctcagactgtgctgaggcaactgttttcttccccagctgtacctgactggaggagtctggagtctagacggc

SEQ ID NO: 783922 - DNA, 120 bp, Artificial Sequence
  ENSG00000256269_31 (sequence is synthesized)
ccctatcctctccccagctcatctgcatctcctttctgccttacagtcatccccaatttaggatttttagactttatgattgtgtgaaagcgatatacgttcagtagaaactgtacttag

SEQ ID NO: 783923 - DNA, 120 bp, Artificial Sequence
  ENSG00000256269_32 (sequence is synthesized)
tacccatacagccattctgttttttactttcagtacagtattcattacatgagatattcactttattgtaaaacaggcttggtgtcagatgattttgtccaactataataggctaatctt

SEQ ID NO: 783924 - DNA, 120 bp, Artificial Sequence
  ENSG00000256269_33 (sequence is synthesized)
cggagccatgtctggtaacggcaatgcggctgcaacggcggtgagtgctgagccggtgaccagcacactttgggcttctggacgagccgtgcagcgattggccccaggttgccatcctca

SEQ ID NO: 783925 - DNA, 120 bp, Artificial Sequence
  ENSG00000256269_34 (sequence is synthesized)
agtgtcctggttactgcagcggcagcaacagcaggtcctactatcgcctccctctagtctctgcttctctggatccctgaggagggcagaaggtactgaggaaggttaaagggaccagcc

SEQ ID NO: 783926 - DNA, 120 bp, Artificial Sequence
  ENSG00000256269_35 (sequence is synthesized)
ttggagtatttccccactctgagactcagctggccacaggccaggttctgaagttcctttcttccaagccagtgattctggttcttggacaaggtgttgaggaacactagaaacagaggg

SEQ ID NO: 783927 - DNA, 120 bp, Artificial Sequence
  ENSG00000256269_36 (sequence is synthesized)
ggcaggtagggcctgcccctatcctctccccagctcatctgcatctcctttctgccttacagtcatccccaatttaggatttttagactttatgattgtgtgaaagcgatatacgttcag

SEQ ID NO: 783928 - DNA, 120 bp, Artificial Sequence
  ENSG00000256294_0 (sequence is synthesized)
agtggagtagcgggccacttccgctccgttactgtgaggttgctgcagttttgtccctggtagtttgggtcagttccgcgagacccttctgaatttcctggacctacgcattggatcctt

SEQ ID NO: 783929 - DNA, 120 bp, Artificial Sequence
  ENSG00000256294_1 (sequence is synthesized)
aacgaactggtgatcgaattaggggaaaagaaacctcgtcggagagcagaggcaggattctgctttcccttggactgtatcactcaggactctgaatattccctgaaataggaggaaaaa

SEQ ID NO: 783930 - DNA, 120 bp, Artificial Sequence
  ENSG00000256294_2 (sequence is synthesized)
tgaccacgttgaaggaggcagtgaccttcaaggacgtggctgtggtcttcactgaggaagagctgaggctgctggaccttgcccagaggaaactgtaccgagaagtgatgctggagaact

SEQ ID NO: 783931 - DNA, 120 bp, Artificial Sequence
  ENSG00000256294_3 (sequence is synthesized)
tcaggaacctgctctcagtggggcatcaatcactccacagagatactttccacttcctaaaggaagaaaagttttggatgatggagacagcaacccaaagagaagggaatttaggaggca

SEQ ID NO: 783932 - DNA, 120 bp, Artificial Sequence
  ENSG00000256294_4 (sequence is synthesized)
agatccaaatggagatggagactgtttcagaatcaggaacacatgaaggcttgttcagtcatcaaacctgggaacaaatttcaagtgacttaaccaggtttcaagactccatggtaaaca

SEQ ID NO: 783933 - DNA, 120 bp, Artificial Sequence
  ENSG00000256294_5 (sequence is synthesized)
gctttcagttctccaaacaagatgatatgccctgccaggttgatgcaggactatctataattcacgtaagacagaaaccttctgagggtaggacgtgtaaaaagtcctttagtgatgtct

SEQ ID NO: 783934 - DNA, 120 bp, Artificial Sequence
  ENSG00000256294_6 (sequence is synthesized)
ccgtccttgatcttcatcaacaactacagtcaagagagaagtctcatacatgtgatgaatgtggaaagagtttctgttatagctcagctcttcgtattcatcagagagttcacatggggg

SEQ ID NO: 783935 - DNA, 120 bp, Artificial Sequence
  ENSG00000256294_7 (sequence is synthesized)
agaaactctataattgtgatgtgtgtggtaaggaattcaatcagagctcacatctgcaaattcatcagagaatccacactggagagaaaccattcaaatgtgagcagtgtgggaaaggct

SEQ ID NO: 783936 - DNA, 120 bp, Artificial Sequence
  ENSG00000256294_8 (sequence is synthesized)
ttagtcgtagatcaggactttatgttcatcgtaaattacacacaggagtgaaacctcatatttgtgagaaatgtgggaaggccttcattcatgattcccagcttcaggaacatcaaagaa

SEQ ID NO: 783937 - DNA, 120 bp, Artificial Sequence
  ENSG00000256294_9 (sequence is synthesized)
tccatactggggagaagccattcaaatgtgatatatgttgtaagagcttccgtagtagagcaaatcttaataggcattccatggttcacatgcgagagaaaccattcagatgtgatacat

SEQ ID NO: 783938 - DNA, 120 bp, Artificial Sequence
  ENSG00000256294_10 (sequence is synthesized)
gtggtaagagctttggtctgaaatcagcacttaatagtcatcgcatggtccacacaggagagaaacggtacaaatgtgaggaatgtggaaaacgcttcatttataggcaagatctttata

SEQ ID NO: 783939 - DNA, 120 bp, Artificial Sequence
  ENSG00000256294_11 (sequence is synthesized)
agcatcagatagaccacacaggggagaagccatataattgtaaagaatgtggaaagagcttcagatgggcctcaggtctttcaagacatgtgcgagtccacagtggagagacaacattca

SEQ ID NO: 783940 - DNA, 120 bp, Artificial Sequence
  ENSG00000256294_12 (sequence is synthesized)
aatgtgaagaatgtgggaagggattttatacaaattcacaacgttattctcaccagagagcgcacagtggagaaaagccatatagatgtgaggagtgtgggaagggctacaaaaggaggt

SEQ ID NO: 783941 - DNA, 120 bp, Artificial Sequence
  ENSG00000256294_13 (sequence is synthesized)
tggatcttgactttcatcagagggtccacagaggagagaaaccctataattgtaaggaatgtgggaagagctttggctgggcctcgtgtcttttgaatcatcagagaatccacagtggag

SEQ ID NO: 783942 - DNA, 120 bp, Artificial Sequence
  ENSG00000256294_14 (sequence is synthesized)
aaaaaccatttaaatgtgaagaatgtgggaaaagatttactcagaattcacaactttatacccatcgtagagtccacagtggagaaaaaccattcaaatgtgaagagtgtgggaaaagat

SEQ ID NO: 783943 - DNA, 120 bp, Artificial Sequence
  ENSG00000256294_15 (sequence is synthesized)
ttactcagaattcacaactttattctcatcgcagagtccacactggagtaaagccatacaaatgtgaagagtgtgggaagggcttcaacagtaagtttaatcttgacatgcaccagaggg

SEQ ID NO: 783944 - DNA, 120 bp, Artificial Sequence
  ENSG00000256294_16 (sequence is synthesized)
tccacaccggagagagaccttataattgtaaagaatgtgggaagagctttagccgggcctcaagtattttgaatcataagagactccatggtgatgaaaagccattcaaatgtgaagagt

SEQ ID NO: 783945 - DNA, 120 bp, Artificial Sequence
  ENSG00000256294_17 (sequence is synthesized)
gtgggaagagatttactgagaattcacagcttcattcccatcagagggttcacactggggaaaagccatacaaatgtgagaagtgtggaaagagcttcagatgggcctcaactcatctaa

SEQ ID NO: 783946 - DNA, 120 bp, Artificial Sequence
  ENSG00000256294_18 (sequence is synthesized)
gagactccacagtagagaaaaactacttcaatgtgaggactgtgggaagagcattgtgcacagttcatgccttaaagaccaacaaagagaccaaagtggagagaaaacatctaaatgtga

SEQ ID NO: 783947 - DNA, 120 bp, Artificial Sequence
  ENSG00000256294_19 (sequence is synthesized)
ggactgtgggaagcgctacaagaggcgcttgaatcttgatacgcttttgtcattatttttaaatgacacataactgttgtactcatttatggggtacagtgtgatagttaatgcaagtat

SEQ ID NO: 783948 - DNA, 120 bp, Artificial Sequence
  ENSG00000256294_20 (sequence is synthesized)
acaatgtgtaatgatcaaatcagtgtaattaacatacctatcacctcaaacatttatcatttatttatgttgggaacccttaaaattcactgtcctagctatttgaaaataatacgttgt

SEQ ID NO: 783949 - DNA, 120 bp, Artificial Sequence
  ENSG00000256294_21 (sequence is synthesized)
taattactgtcaccctgtagtggtgtaaaacactagaacttattcctcctacctgcctgtatttctgtattcattaaccaacctttggctaccaccctgcctcctcacctctaagaacta

SEQ ID NO: 783950 - DNA, 120 bp, Artificial Sequence
  ENSG00000256294_22 (sequence is synthesized)
ctattctactctctacttctatgaagttaactttttgagcttccacatatgtgtgagaacatgtggtatgtatctttctgtgcctggcatatatcacttaatataatgccctgtaagtct

SEQ ID NO: 783951 - DNA, 120 bp, Artificial Sequence
  ENSG00000256294_23 (sequence is synthesized)
cattcactttgctgtgagtgatagaattttgttgtttttcatggctaaatagtactctgatgtgtatatttgccccattttctttattcattcatccagtggacacttaggttgattaca

SEQ ID NO: 783952 - DNA, 120 bp, Artificial Sequence
  ENSG00000256294_24 (sequence is synthesized)
taccttggcctatttcttggctatcgtgaatggtgctgcaataaacatgggggggtggagataacactttaacatactgatttccttttctttggatatgtaccaagtatcatataatag

SEQ ID NO: 783953 - DNA, 120 bp, Artificial Sequence
  ENSG00000256294_25 (sequence is synthesized)
tatgacatgactcaaaattaaggaataagattgtggaaattggttttcaaaaaaaaattctctagtttgaatatagagaaaaattggtgagtgtcttcagctgtcctcatacataatgca

SEQ ID NO: 783954 - DNA, 120 bp, Artificial Sequence
  ENSG00000256294_26 (sequence is synthesized)
tgtgagctcgctttaagcataagtgaaggagtggaaaaatcctggagatagaaatcaaggggtatacatgtggatgtaaaaaatcaacaaagattcttttaagaaaaggtgtgtatgggt

SEQ ID NO: 783955 - DNA, 120 bp, Artificial Sequence
  ENSG00000256294_27 (sequence is synthesized)
agggaacaatagcatgacagcagtgcggcctctaacagtctggaaccagttaggacaaagagcaggattgagcgccattccattcatagacaccgtggtgatattttgagtacattaggt

SEQ ID NO: 783956 - DNA, 120 bp, Artificial Sequence
  ENSG00000256294_28 (sequence is synthesized)
taaaaggctttcttcagcaaaatctatctctagagatagatttgatttttataatcaaatctactagagatagatttgatttttataatcaaatctaccagagatagatttgatttttat

SEQ ID NO: 783957 - DNA, 120 bp, Artificial Sequence
  ENSG00000256294_29 (sequence is synthesized)
aatcaaatctactagagatagatttgatttttataatcaaatctactagagatagatttgatttttatacttaatgttctagactgtatcttttcaggatgctaggtactttatgaagat

SEQ ID NO: 783958 - DNA, 120 bp, Artificial Sequence
  ENSG00000256294_30 (sequence is synthesized)
ccatgctgtctcaatttgcatagtgggttggaggtccctaagacaatctctccagattctatgatttgctaagaggactcagaatatagttgtactcatgactatattatagtgacagga

SEQ ID NO: 783959 - DNA, 120 bp, Artificial Sequence
  ENSG00000256294_31 (sequence is synthesized)
tacaaataatcagcaaagggaaaaggttcttgtataatatctggagggaatcagatgtaaatttgtaaagatcctttgtgcatggagtaacaggtctcaattcctccagtattgaattgt

SEQ ID NO: 783960 - DNA, 120 bp, Artificial Sequence
  ENSG00000256294_32 (sequence is synthesized)
gactgtacttgtgaaatgtctacaatggaaattaattatcaacccgtaccaaaggttcttattggaactaatcatgtaggtaccatccctctggtacatatcaagattctagactccaag

SEQ ID NO: 783961 - DNA, 120 bp, Artificial Sequence
  ENSG00000256294_33 (sequence is synthesized)
aaggggagcaagtgttcagaataacttgaaccatgcctaccagttatggaatggtggcaaccctctcaaactccgtgtttcctaacaccagctaaaggccagtcttataagcagtccttt

SEQ ID NO: 783962 - DNA, 120 bp, Artificial Sequence
  ENSG00000256294_34 (sequence is synthesized)
ctaagatttgcagtctcaggcctgttatattaactttttgtgcacatagtactagaaaactgttggctcagtcttctttttgttttgtgtgttttggtttttaactgtcaccgataccag

SEQ ID NO: 783963 - DNA, 120 bp, Artificial Sequence
  ENSG00000256294_35 (sequence is synthesized)
aatagctcatctccaaggtaactgtaacagaacactcagcagattaaacagaaaatacttgcttattataattattaaaagtttggtagggtctatgtctgctctctggtgtgtcctgga

SEQ ID NO: 783964 - DNA, 120 bp, Artificial Sequence
  ENSG00000256294_36 (sequence is synthesized)
tcatcaacttggttacaacatggtgttaacatgtgggactgattgtgtttcttgttaatatttctgtttctcccaaccacgctgaatattaaatacctagttctatatctagtaccctga

SEQ ID NO: 783965 - DNA, 120 bp, Artificial Sequence
  ENSG00000256294_37 (sequence is synthesized)
taatttccaaataagattccattgtatggataggccacaatttgtctatccatgtacgcataggagggagtttgttggtgtgcagttttgggttactatgaatgatgctgttgggaacat

SEQ ID NO: 783966 - DNA, 120 bp, Artificial Sequence
  ENSG00000256294_38 (sequence is synthesized)
tcatgtgttaatttacaatacacattcgtgttggtggatggcatccctggccacactttcatgtctctttttctgccttccctggtactttccaggcaggattctgctttcccttggact

SEQ ID NO: 783967 - DNA, 120 bp, Artificial Sequence
  ENSG00000256294_39 (sequence is synthesized)
aattaggggaaaagaaacctcgtcggagagcagaggaaggcgagggttgcatccacttccaggaggggagaggagcatttaacttttatggggcacggcgaccacggtcagagtgtttca

SEQ ID NO: 783968 - DNA, 120 bp, Artificial Sequence
  ENSG00000256294_40 (sequence is synthesized)
atgcaaataggcttcccagttgattggcccatcttgccagcttcttactgtgcacgtggctgacaaagagaagggaagatggagccgccatctttaacatgattggcacaactgctggca

SEQ ID NO: 783969 - DNA, 120 bp, Artificial Sequence
  ENSG00000256294_41 (sequence is synthesized)
cttatttataagggatgatgttttaattatatccatgtactaatgtgcaccagtaggtacacacttacttactaatgtttcctaagattcagccattgaaaattaactttccatttgatt

SEQ ID NO: 783970 - DNA, 120 bp, Artificial Sequence
  ENSG00000256294_42 (sequence is synthesized)
gatttacttaattcagaatgtggtaatatcctgaccaagattttcaatgttttatgaccatgagccatagtaagaaatacatctttcatcatcaccaggatgaaaatattttgtgcatgt

SEQ ID NO: 783971 - DNA, 120 bp, Artificial Sequence
  ENSG00000256294_43 (sequence is synthesized)
agatgtgtatgagtacctttagtaggcatttcatataatggcacctttcctgtttgtcacgatgctatgataatttctattctggttctttttcctaaatgctttttagaaggtttcaga

SEQ ID NO: 783972 - DNA, 120 bp, Artificial Sequence
  ENSG00000256294_44 (sequence is synthesized)
tttattttacagctcactaagagtctgtagtgtttattttgaaaatgggtataaaggtctgtttctttacatcatattttttctgctatctgttttcaatgagacagtccaataacttca

SEQ ID NO: 783973 - DNA, 120 bp, Artificial Sequence
  ENSG00000256294_45 (sequence is synthesized)
catggaaccaatcagggcatgaccccttaggcgttcttttcatcccaggtgatcttaccaactttcattgtctcatcaggatcatccccctttgtgtatttctgtcaggtccagcctttc

SEQ ID NO: 783974 - DNA, 120 bp, Artificial Sequence
  ENSG00000256294_46 (sequence is synthesized)
agattcccatcaaaactgaaggtttctgatccttttctatttcaggtaaccaagttattgttcatatcagtacagacaaatgagattatacatgttctgcaaaaattcttgtacaggaat

SEQ ID NO: 783975 - DNA, 120 bp, Artificial Sequence
  ENSG00000256294_47 (sequence is synthesized)
actctgaaaatgtagacataaatactcctaggtatttgatatttagtattgtgaagagcttaaccaattgcaaagtttaaagtgacagctcacagaagactgctgtcactgcataccaat

SEQ ID NO: 783976 - DNA, 120 bp, Artificial Sequence
  ENSG00000256294_48 (sequence is synthesized)
gacaaattcagtggtttccccaaattattttcatgttccatattcttaaaattatgggtttttataggggaaagatgcatattacaattaggagaaaaatcaagtaagacagagtccagg

SEQ ID NO: 783977 - DNA, 120 bp, Artificial Sequence
  ENSG00000256294_49 (sequence is synthesized)
gaagtatcaaatgagaactttttattgtactctccccatgaaatcaggatgcattacatccccaagattaaggtgtgacattagacgggaggagagcctatcagggaagctttcctgagc

SEQ ID NO: 783978 - DNA, 120 bp, Artificial Sequence
  ENSG00000256294_50 (sequence is synthesized)
ttgactgattccacatgacctaaagcctcaccataaatcacattgttggtctttctcacatagtgagcaccacattctcctcataggtgtggccacccataatcctaaatcgtagaatta

SEQ ID NO: 783979 - DNA, 120 bp, Artificial Sequence
  ENSG00000256294_51 (sequence is synthesized)
caccgtccagagtgacttactagacctactacctccaggcaaacaaagacactctcctagggcatgacattttaaggactgagagattgcctctcagatgctgaggacatcacccaggcc

SEQ ID NO: 783980 - DNA, 120 bp, Artificial Sequence
  ENSG00000256294_52 (sequence is synthesized)
tctttgtgacttaggataatttctttacttcataaggatatacaatacaaactaaaatatacaaagttttgacgatgttatggcttctccttaaagttcacatttgattcatatttcact

SEQ ID NO: 783981 - DNA, 120 bp, Artificial Sequence
  ENSG00000256294_53 (sequence is synthesized)
gtttacataatttattagttacataatttaccatgcaaggttttatttctaccaagtatttcacatatgacacgtggtgtggttctgaattggtctcatgcaaaccagagtccatagtgt

SEQ ID NO: 783982 - DNA, 62 bp, Artificial Sequence
  ENSG00000256294_54 (sequence is synthesized)
ggttctgaattggtctcatgcaaaccagagtccatagtgtacctggaaaacacaagtatcac

SEQ ID NO: 783983 - DNA, 88 bp, Artificial Sequence
  ENSG00000256294_55 (sequence is synthesized)
aagaccagccttgtgtaaaaattagctagttatggtggtatgtgcctgtagtcctagctactcaggaggcagaggtgggaggatcact

SEQ ID NO: 783984 - DNA, 89 bp, Artificial Sequence
  ENSG00000256294_56 (sequence is synthesized)
ggaggtcaaggctgcagcgagccatgattgtgtccactctctttaaaaaaggaaaatacagggctgggcgcagtggcttacacctgtaa

SEQ ID NO: 783985 - DNA, 61 bp, Artificial Sequence
  ENSG00000256294_57 (sequence is synthesized)
atcctggctaacacagtgaaaacccatctggaggaggctgaggcgggagaatggtgtgaac

SEQ ID NO: 783986 - DNA, 60 bp, Artificial Sequence
  ENSG00000256294_58 (sequence is synthesized)
ggtggcgggcgcctatagtcccagctactgaggaggctgaggcgggagaatggtgtgaac

SEQ ID NO: 783987 - DNA, 87 bp, Artificial Sequence
  ENSG00000256374_0 (sequence is synthesized)
atggtcaactccgtcgtcttttttgaaatcaccagggatggcaagcccttgggccgcatctccatcaaactgtttgcagacaagatt

SEQ ID NO: 783988 - DNA, 71 bp, Artificial Sequence
  ENSG00000256374_1 (sequence is synthesized)
taatggcaccggtgacaagtccatctatggggagaaatttgatgatgagaacctcatccgaaagcatacag

SEQ ID NO: 783989 - DNA, 67 bp, Artificial Sequence
  ENSG00000256374_2 (sequence is synthesized)
caccggtgacaagtccatctatggggagaaatttgatgatgagaacctcatccgaaagcatacaggt

SEQ ID NO: 783990 - DNA, 120 bp, Artificial Sequence
  ENSG00000256374_3 (sequence is synthesized)
ctgagtggttggatggcaagcatgtggcgtttggcaaggtgaaagaacgtgtgaatattgtggaagccacggagcactttgggtacaggaatagcaagaccagcaagaagatcaccattg

SEQ ID NO: 783991 - DNA, 120 bp, Artificial Sequence
  ENSG00000256394_0 (sequence is synthesized)
attgatgaaaattgggttaccctgaggactcttgcttaactgaaatcacaaatggagcagacagaaaaatcaaaagtatatgctgagaacggactcttagaaaagataaagctttgcctt

SEQ ID NO: 783992 - DNA, 120 bp, Artificial Sequence
  ENSG00000256394_1 (sequence is synthesized)
tcaaagaaaccactgccatctcccactgagcgaaagaagtttgaccatgactttgccatctccacttcctttcatgggatacacaatattgttcagaaccggagcaaaattcgcagggtg

SEQ ID NO: 783993 - DNA, 120 bp, Artificial Sequence
  ENSG00000256394_2 (sequence is synthesized)
ctctggttggtggtggttctgggctcagtctcacttgtgacatggcagatctacattcgcttgctcaactacttcacatggccaaccacaacgtccattgaggttcaatatgtggaaaag

SEQ ID NO: 783994 - DNA, 120 bp, Artificial Sequence
  ENSG00000256394_3 (sequence is synthesized)
atggagttcccagctgtgacattttgtaatttgaacaggttccaaacagatgctgtagccaaatttggtgttatttttttcttatggcacattgtatccaaagtcctccatcttcaagaa

SEQ ID NO: 783995 - DNA, 120 bp, Artificial Sequence
  ENSG00000256394_4 (sequence is synthesized)
attactgccaattccactggctctagagaggctactgattttgctgcaagtcaccaaaacttcagcattgtggaatttatcaggaacaaaggtttttatctcaacaatagcactttgttg

SEQ ID NO: 783996 - DNA, 120 bp, Artificial Sequence
  ENSG00000256394_5 (sequence is synthesized)
gactgtgagttttttggaaagccatgtagcccaaaggattttgcacatgtcttcactgaatatggaaattgttttacttttaatcatggtgaaactctccaagcaaagagaaaagtgagt

SEQ ID NO: 783997 - DNA, 120 bp, Artificial Sequence
  ENSG00000256394_6 (sequence is synthesized)
gtctctggaagaggtttgagcttactcttcaatgtgaatcaggaggcattcactgataacccagcccttggtttcgttgatgctgggatcatctttgttatccattcaccaaagaaggtg

SEQ ID NO: 783998 - DNA, 120 bp, Artificial Sequence
  ENSG00000256394_7 (sequence is synthesized)
taggcttgttgtcacctgtgggaatgcacgcaagggtaaccatccgccaagtgaagacagttcatcaagaatacccttggggagaatgcaatcctaacatcaagctgcagaattttagca

SEQ ID NO: 783999 - DNA, 120 bp, Artificial Sequence
  ENSG00000256394_8 (sequence is synthesized)
gctacagcacttctggttgcttgaaggaatgcaaagcccagcacataaaaaagcaatgtggatgtgtgccttttcttcttcctggatatgggatagaatgtgacctacaaaagtacttca

SEQ ID NO: 784000 - DNA, 120 bp, Artificial Sequence
  ENSG00000256394_9 (sequence is synthesized)
gctgtgtttctcctgtacttgaccacattgaatttaaggatttatgtacagtaggaacacataactctagctgccccgtttcttgtgaagaaatagaatacccggccactatttcttatt

SEQ ID NO: 784001 - DNA, 120 bp, Artificial Sequence
  ENSG00000256394_10 (sequence is synthesized)
cctcttttccaagtcaaaaagctttgaaatatctttccaagaagttgaatcaaagccggaaatacatcagggagaatcttgtaaaaattgaaattaactatagtgacctaaactataaga

SEQ ID NO: 784002 - DNA, 120 bp, Artificial Sequence
  ENSG00000256394_11 (sequence is synthesized)
taacccagcagcaaaaggcggtgagtgtgtctgagttacttgcagatcttggtggtcagctgggtctattttgtggggccagtctgatcacgatcatagaaattattgaatatctattca

SEQ ID NO: 784003 - DNA, 120 bp, Artificial Sequence
  ENSG00000256394_12 (sequence is synthesized)
ccaatttctactggatatgcattttctttttgctgaagatatctgaaatgacccagtggactcctccacctcagaatcatctgggaaataaaaataggatagaggagtgttaatggtcac

SEQ ID NO: 784004 - DNA, 120 bp, Artificial Sequence
  ENSG00000256394_13 (sequence is synthesized)
ttagaataaaatagtttccttttcatgataccttcagatttatcttgactaattcattgttacgtcacttttctatagttttgagagttcgataaaagccattaaagatatgtatctctt

SEQ ID NO: 784005 - DNA, 120 bp, Artificial Sequence
  ENSG00000256436_0 (sequence is synthesized)
cgaacccacctgcaggaaccaactccggacacaacaccagcattaaaacaatttttttttgtctgttcagacatgacaacttttatacccatcattttttccagtgtggtagtggttcta

SEQ ID NO: 784006 - DNA, 120 bp, Artificial Sequence
  ENSG00000256436_1 (sequence is synthesized)
tttgttattggaaattttgctaatggcttcatagcattggtaaattccattgagcgggtcaagagacaaaagatctcttttgctgaccagattctcactgctctggcggtctccagagtt

SEQ ID NO: 784007 - DNA, 120 bp, Artificial Sequence
  ENSG00000256436_2 (sequence is synthesized)
ggtttgctctgggtattattattaaattggtattcaactgtgtttaatccagctttttatagtgtagaagtaagaactactgcttataatgtctgggcagtaaccggccatttcagcaac

SEQ ID NO: 784008 - DNA, 120 bp, Artificial Sequence
  ENSG00000256436_3 (sequence is synthesized)
tggcttgctactagcctcagcatattttatttgctcaagattgccaatttctccaaccttatttttcttcacttaaagaggagagttaagagtgtcattctggtgatgctgttggggcct

SEQ ID NO: 784009 - DNA, 120 bp, Artificial Sequence
  ENSG00000256436_4 (sequence is synthesized)
aatatgaaggaaacttgacttggaagatcaaattgaggagtgcagtgtacctttcagatgcgactgtaaccacgctaggaaacttagtgcccttcactctgaccctgctatgttttttgc

SEQ ID NO: 784010 - DNA, 120 bp, Artificial Sequence
  ENSG00000256436_5 (sequence is synthesized)
tgttaatctgttctctgtgtaaacatctcaagaagatgcagctccatggtaaaggatctcaagatcccagcaccaaggtccacataaaagctttgcaaactgtgatctttttcctcttgt

SEQ ID NO: 784011 - DNA, 120 bp, Artificial Sequence
  ENSG00000256436_6 (sequence is synthesized)
tatgtgccgtttactttctgtccataatgatatcagtttggagttttgggagtctggaaaacaaacctgtcttcatgttctgcaaagctattagattcagctatccttcaatccacccat

SEQ ID NO: 784012 - DNA, 120 bp, Artificial Sequence
  ENSG00000256436_7 (sequence is synthesized)
tcatcctgatttggggaaacaagaagctaaagcagacttttctttcagttttgcggcaagtgaggtactgggtgaaaggagagaagccttcatctccatagattcatgagaggggcattg

SEQ ID NO: 784013 - DNA, 120 bp, Artificial Sequence
  ENSG00000256453_0 (sequence is synthesized)
ataaagagggtacgagggggccagctggagagccatgcagtccaagcgggattgtgagctgtggtgtgagagggtgaatccagagaacaaggcggcgctggaggcgtgggtcagggagac

SEQ ID NO: 784014 - DNA, 120 bp, Artificial Sequence
  ENSG00000256453_1 (sequence is synthesized)
aggcatccgcctggtgcaggtgaacgggcagaggaagtatggcgggccacccccaggctgggtgggcagcccgccgccagctgggtcagaggtgttcatcgggcggctgcctcaggacgt

SEQ ID NO: 784015 - DNA, 120 bp, Artificial Sequence
  ENSG00000256453_2 (sequence is synthesized)
gtacgagcaccagcttatcccgctgttccagcgcgtgggccgcctctacgagttccgcctgatgatgaccttcagcggcctgaaccgcggcttcgcctatgcccgctacagctcgaggcg

SEQ ID NO: 784016 - DNA, 120 bp, Artificial Sequence
  ENSG00000256453_3 (sequence is synthesized)
cggcgcgcaggccgccatcgccacgctgcacaaccatccgctgcggccgtcctgcccgctgctcgtgtgccgcagcaccgagaagtgtgagctgagcgttgacggcctgccgccgaatct

SEQ ID NO: 784017 - DNA, 120 bp, Artificial Sequence
  ENSG00000256453_4 (sequence is synthesized)
gacccgcagcgcgctgctgctcgcgctgcagccgctgggtcccggcttgcaggaggcgcggctgctgcccagccccggaccggcgcccgggcagatcgctctgctcaaattcagctcgca

SEQ ID NO: 784018 - DNA, 120 bp, Artificial Sequence
  ENSG00000256453_5 (sequence is synthesized)
ccgggccgctgccatggccaaaaaggccctggtggaagggcagtcacacctctgtggagagcaggtggctgtggagtggctcaagccagacctgaagcagcgacttcgccagcagcttgt

SEQ ID NO: 784019 - DNA, 120 bp, Artificial Sequence
  ENSG00000256453_6 (sequence is synthesized)
gccagttggctttggcaagggacaagttagggttccaaggggctcgggctaccctgcagttgctgtgccaacgaatgaagctgggcagccctgtgttcctcaccaagtgtttgggcatag

SEQ ID NO: 784020 - DNA, 120 bp, Artificial Sequence
  ENSG00000256453_7 (sequence is synthesized)
gacctgctggctggcaccgcttctggtaccaggtggtgattcctgggcatccggtgcccttcagcggcctcatctgggttgtgctgaccctagatggccgggatgggcatgaggtggcca

SEQ ID NO: 784021 - DNA, 120 bp, Artificial Sequence
  ENSG00000256453_8 (sequence is synthesized)
aggatgctgtgtctgtacggctgctgcaggcactcagtgagtctggggccaacctcctgtggtctgctggggctgaggcaggtaccatggttaaacagtgactccattctttctccacag

SEQ ID NO: 784022 - DNA, 120 bp, Artificial Sequence
  ENSG00000256453_9 (sequence is synthesized)
gcaccctgaatgggcatgcagagcctgtgtcaggccccatcccagcaggcctgggtggccactttctgacccccaaaggtggggaggggcatgggcccaggcccatcagcctccctgctg

SEQ ID NO: 784023 - DNA, 120 bp, Artificial Sequence
  ENSG00000256453_10 (sequence is synthesized)
ggacagggacctatggcacctgggggcagcttaggtttgggttaagttgtggtgaggggccttgccctcccgctcccagcccagggtccaacctgacccagtgatcttccatggccgttc

SEQ ID NO: 784024 - DNA, 120 bp, Artificial Sequence
  ENSG00000256453_11 (sequence is synthesized)
cttgtcccacccccacccgatcataccttcccccctctgccacagcttagcatgaatcttctttattgtcctgatttgtcctctttgttggtttttatttgtggggaagggcagctgagc

SEQ ID NO: 784025 - DNA, 120 bp, Artificial Sequence
  ENSG00000256453_12 (sequence is synthesized)
caaaggggtcagaaattctgccctttgcctccaccacatggcattctggttttggtttctgtatagttttgggtctttctatgctggttgtatttatattaaacccctggttagtatata

SEQ ID NO: 784026 - DNA, 120 bp, Artificial Sequence
  ENSG00000256463_0 (sequence is synthesized)
atgtctcggcgcaagcaggccaagccccagcacctcaagtcggacgaggagctgctgccgcctgacggggctcccgagcacgccgccccgggggaaggtgcggaggacgcagacagcggg

SEQ ID NO: 784027 - DNA, 120 bp, Artificial Sequence
  ENSG00000256463_1 (sequence is synthesized)
cccgagagccgcagcgggggcgaggagaccagcgtgtgcgagaaatgctgcgccgagttcttcaagtgggcggacttcctggagcaccagcggagctgcaccaagctcccgcccgtgctg

SEQ ID NO: 784028 - DNA, 120 bp, Artificial Sequence
  ENSG00000256463_2 (sequence is synthesized)
gctgatcgtgcacgaggacgcgcccgcgccgccccccgaggacttccccgagccttcgcccgccagctcccccagcgagcgcgccgaaagcgaggcggccgaggaggcgggtgcggaggg

SEQ ID NO: 784029 - DNA, 80 bp, Artificial Sequence
  ENSG00000256463_3 (sequence is synthesized)
gagggcgaggccaggccggtggagaaggaggccgagcccatggacgcggaacccgcgggggacacgcgcgcgccccggcc

SEQ ID NO: 784030 - DNA, 120 bp, Artificial Sequence
  ENSG00000256463_4 (sequence is synthesized)
gcgcccagcaccaacgtgaccctggaggcgctgctgagcaccaaggtggcggtggcgcagttctcgcagggcgcgcgcgcggcaggcggctcgggagcaggtggaggcgtggcagctgca

SEQ ID NO: 784031 - DNA, 120 bp, Artificial Sequence
  ENSG00000256463_5 (sequence is synthesized)
gccgtgcccctgatcctggaacagctcatggccctgcagcagcagcagatccaccagctgcagctcatcgagcagatccgcagccaggtggccctcatgcagcgcccgccgccgcggccc

SEQ ID NO: 784032 - DNA, 120 bp, Artificial Sequence
  ENSG00000256463_6 (sequence is synthesized)
cgccagcgccgcagagcgcagcctcgtcgcagccgcagagcgcatccacgccgcctgccctggccccggggtccctgctgggtgcggcgcccggcctgccaagtccgcttctacctcaga

SEQ ID NO: 784033 - DNA, 120 bp, Artificial Sequence
  ENSG00000256463_7 (sequence is synthesized)
ccgcttctacctcagacttccgccagcggcgtcatcttccccaacccgctggtcagcatcgcggccacggccaacgctctggacccgctgtccgcgctcatgaagcaccgcaagggcaag

SEQ ID NO: 784034 - DNA, 120 bp, Artificial Sequence
  ENSG00000256463_8 (sequence is synthesized)
ccgcccaatgtgtcggtgttcgagcccaaagccagcgccgaggacccgttcttcaagcacaaatgccgcttctgcgccaaggtcttcggcagcgacagcgcgctccagatccacctgcgc

SEQ ID NO: 784035 - DNA, 120 bp, Artificial Sequence
  ENSG00000256463_9 (sequence is synthesized)
tcgcacacaggcgagcggcccttcaagtgcaacatctgcgggaaccgcttctccaccaaaggcaacctgaaggtgcacttccagaggcacaaggagaagtacccccacatccagatgaac

SEQ ID NO: 784036 - DNA, 120 bp, Artificial Sequence
  ENSG00000256463_10 (sequence is synthesized)
ccttacccggtccccgagtacctggacaacgtgcccacctgctcgggcatcccctacggcatgtcgctgccccccgagaagcccgtgaccacctggctggacagcaagcccgtgctgccc

SEQ ID NO: 784037 - DNA, 120 bp, Artificial Sequence
  ENSG00000256463_11 (sequence is synthesized)
accgtgcccacgtccgtggggctgcaactgccgcccactgtccctggcgcgcacggctacgccgactctcccagcgccaccccagccagccgctccccgcagaggccctcgcccgcctcc

SEQ ID NO: 784038 - DNA, 120 bp, Artificial Sequence
  ENSG00000256463_12 (sequence is synthesized)
agcgagtgcgcctccttgtccccaggcctcaaccacgtggagtccggcgtgtcggccaccgccgagtccccacagtcgctcctcggcgggccgcccctcactaaagccgagcccgtcagc

SEQ ID NO: 784039 - DNA, 120 bp, Artificial Sequence
  ENSG00000256463_13 (sequence is synthesized)
ctgccctgcaccaacgccagggccggggacgctcccgtgggcgcgcaggctagcgctgcacccacatcggtggacggcgcacccacgagcctcggcagccccgggctgcccgccgtctcc

SEQ ID NO: 784040 - DNA, 120 bp, Artificial Sequence
  ENSG00000256463_14 (sequence is synthesized)
gagcagttcaaggcccagtttccgttcggggggctgctagactcgatgcaaacgtcggaaacctcgaagctgcagcagctggtggagaacatcgacaagaagatgacggacccgaaccag

SEQ ID NO: 784041 - DNA, 120 bp, Artificial Sequence
  ENSG00000256463_15 (sequence is synthesized)
tgcgtcatctgccaccgggtgctgagctgccagagcgcgctgaagatgcactaccggacgcacacgggggagcggccgttcaagtgcaagatctgcggccgcgccttcaccaccaagggc

SEQ ID NO: 784042 - DNA, 120 bp, Artificial Sequence
  ENSG00000256463_16 (sequence is synthesized)
aacctcaagacgcacttcggcgtgcaccgtgcaaagccgcccctgcgcgtgcagcactcctgccccatctgccagaagaagttcaccaacgccgtggtcctgcagcagcacatccgcatg

SEQ ID NO: 784043 - DNA, 120 bp, Artificial Sequence
  ENSG00000256463_17 (sequence is synthesized)
cacatgggcggccagatccccaacacgccgctgccggagggcttccaggatgccatggactccgagctggcctacgacgacaagaacgcggagaccctgagcagctacgatgacgacatg

SEQ ID NO: 784044 - DNA, 120 bp, Artificial Sequence
  ENSG00000256463_18 (sequence is synthesized)
gacgagaactccatggaggacgacgctgagctgaaggacgcggccaccgacccggccaagccactcctgtcctacgcggggtcctgcccgccctccccgccctcggtcatctccagcatt

SEQ ID NO: 784045 - DNA, 120 bp, Artificial Sequence
  ENSG00000256463_19 (sequence is synthesized)
gccgccctggagaaccagatgaagatgatcgactcggtcatgagctgccagcagctgaccggcctcaagtccgtggagaacgggtccggggagagtgaccgcctgagcaacgactcctcg

SEQ ID NO: 784046 - DNA, 120 bp, Artificial Sequence
  ENSG00000256463_20 (sequence is synthesized)
tcggccgtgggcgacctggagagccgcagcgcgggcagccccgccctgtccgagtcctcgtcctcgcaggccctgtcgccggcccccagcaatggtgagagcttccgctccaagtccccg

SEQ ID NO: 784047 - DNA, 120 bp, Artificial Sequence
  ENSG00000256463_21 (sequence is synthesized)
cgccccggaggagccccaggaaatcccgctcaagaccgagaggccggacagcccagccgccgccccgggcagcggaggcgcccctggccgcgcgggcatcaaggaggaggcgcccttcag

SEQ ID NO: 784048 - DNA, 120 bp, Artificial Sequence
  ENSG00000256463_22 (sequence is synthesized)
cccttcagcctgctgttcctgagcagggagcggggtaagtgtcccagcactgtgtgtggtgtctgtggcaagccttttgcttgcaagagcgcgttggaaatccactaccgcagccatact

SEQ ID NO: 784049 - DNA, 120 bp, Artificial Sequence
  ENSG00000256463_23 (sequence is synthesized)
aaggagcggccattcgtctgcgcgctctgcaggcgagggtgctccactatgggtaatttaaaacagcacttactgacacacagattgaaagagctgccttctcagttatttgaccccaac

SEQ ID NO: 784050 - DNA, 120 bp, Artificial Sequence
  ENSG00000256463_24 (sequence is synthesized)
tttgctctaggtcccagccaaagcactcctagcctgatctccagcgccgcacccaccatgatcaaaatggaagtgaacggtcacggcaaggccatggcgctgggcgagggtcccccgctg

SEQ ID NO: 784051 - DNA, 120 bp, Artificial Sequence
  ENSG00000256463_25 (sequence is synthesized)
ccgcgccggacgcccaagcagcacaactgccagtcgtgcgggaagaccttctcctcggccagcgccctgcagatccatgagcgcacgcacaccggcgagaagccgttcggctgcaccatc

SEQ ID NO: 784052 - DNA, 120 bp, Artificial Sequence
  ENSG00000256463_26 (sequence is synthesized)
tgcggccgggccttcaccactaagggcaacctcaaggtgcacatggggacacacatgtggaataacgcccccgcgagacgcggccgccgcctgtctgtggagaaccccatggctctccta

SEQ ID NO: 784053 - DNA, 120 bp, Artificial Sequence
  ENSG00000256463_27 (sequence is synthesized)
gggggtgatgccctgaagttctctgaaatgttccagaaggacctggcagctcgggcaatgaacgtcgaccccagtttttggaaccagtatgctgcagccatcactaacgggctcgccatg

SEQ ID NO: 784054 - DNA, 120 bp, Artificial Sequence
  ENSG00000256463_28 (sequence is synthesized)
aagaacaacgagatctccgtcatccagaacggcggcatcccccagctccccgtgagtcttgggggcagcgccctcccccctctgggcagcatggccagtgggatggacaaagcacgcact

SEQ ID NO: 784055 - DNA, 120 bp, Artificial Sequence
  ENSG00000256463_29 (sequence is synthesized)
ggcagtagcccacccatcgtcagcttggacaaagcgagctcagaaacagcagccagccgcccattcacgcggtttatcgaggataacaaggagattggtatcaactagccagtgactcgc

SEQ ID NO: 784056 - DNA, 120 bp, Artificial Sequence
  ENSG00000256463_30 (sequence is synthesized)
tcatctgccctgcccaggcccacgttttgaagttggagcatcaggcctccgacctttcttgcctcggttctcattacactttcacccatagcagaaaacactttgtgcggctgccgagag

SEQ ID NO: 784057 - DNA, 120 bp, Artificial Sequence
  ENSG00000256463_31 (sequence is synthesized)
gtggtcttgtaagcgctgcatggcgctcccttcaacagcaagcctgactgttctcgagaactctgcaatcttttaaataagcttccttcaaaaaaaaaagtgcttggaaaaccgccttag

SEQ ID NO: 784058 - DNA, 120 bp, Artificial Sequence
  ENSG00000256463_32 (sequence is synthesized)
gaacagaaagagctcagaccatgtccacttcctttctcctgaaacctaataatctctccgagggagaaaggggttctctgcggtattccagtgaaactcatttgatggtttcttttgaat

SEQ ID NO: 784059 - DNA, 120 bp, Artificial Sequence
  ENSG00000256463_33 (sequence is synthesized)
tagttagacacttgaacggtgttttttagaactcttcatgttaaagacgtggtttagtactcccaatgctgtgtatcatgacactatcttcgtctgtagtatttatgatgttaagataat

SEQ ID NO: 784060 - DNA, 120 bp, Artificial Sequence
  ENSG00000256463_34 (sequence is synthesized)
gcgggtaacagacaatataatagccccgaccttaaacgaagcttttgtactgcagaatacatctggctgtgtgatttttttttttaagcaagatttgttttactataaataagtggatta

SEQ ID NO: 784061 - DNA, 120 bp, Artificial Sequence
  ENSG00000256463_35 (sequence is synthesized)
tttcaatgcaggcaaaattgtgaagttctgttgggaaagatagcatgcttttcgtgtgcaagtacctgtcagtaataagccttttttttttttttttttaatttaaatgtttgtagctgc

SEQ ID NO: 784062 - DNA, 120 bp, Artificial Sequence
  ENSG00000256463_36 (sequence is synthesized)
tatgtggacagttgttttctagtgtggtctgtagcccaataactggggaacgagttacagacaaacatcaccgtaaatgactcacaacattataaacagttgtgagaaaatatttcacat

SEQ ID NO: 784063 - DNA, 120 bp, Artificial Sequence
  ENSG00000256463_37 (sequence is synthesized)
tatcaaagctgtacaataaaaaggtaatgtttgtataatgtggttgcaaactcttaatttatactattgcacttttagtattttgtattagggaggtttgtctataatttgaaaatttaa

SEQ ID NO: 784064 - DNA, 120 bp, Artificial Sequence
  ENSG00000256463_38 (sequence is synthesized)
aaaaatgtaaagtattttataaatagtacttcagtttaaggaaaatgggaaaactgttacagttccttgttttgtcttatggtcaaacaatattagaaatctctgccacttgaaaagcca

SEQ ID NO: 784065 - DNA, 120 bp, Artificial Sequence
  ENSG00000256463_39 (sequence is synthesized)
ccaagacttgtcagcttttcagtaaagtagggcctgccgtttcttaaattaaaatgatttatttaacttttccacaaagcccactttaaaactgtgaccgccccctaacgaaaccttggt

SEQ ID NO: 784066 - DNA, 120 bp, Artificial Sequence
  ENSG00000256463_40 (sequence is synthesized)
gaattcatcctaggactatgacgtcagtacaagccaggaaggaactaggataaccttctgcaggtctgattttcatgtaagcgggtctgtctctctctctcacccacagacaagattgtg

SEQ ID NO: 784067 - DNA, 120 bp, Artificial Sequence
  ENSG00000256463_41 (sequence is synthesized)
gctgcctggtggcactggtcacatgtacagtaaacccaagagaaatggcaagtatcaggcagtacaatcagtcatgactttgaaattttccgagttcctgatttatttattatcttctca

SEQ ID NO: 784068 - DNA, 120 bp, Artificial Sequence
  ENSG00000256463_42 (sequence is synthesized)
gatgaaagcaaagcacagtgtcctctgatttttcagaacacagcctgacgctgatggctgagctgcatccagccaggagggccccggaggctggggcggccgaggcagcacaaacacggc

SEQ ID NO: 784069 - DNA, 120 bp, Artificial Sequence
  ENSG00000256463_43 (sequence is synthesized)
gtcgtgaactacctcattttcgtgcgttgcaagtgtgctggcgtctgacactatgaacttccaacaacaaaattgttcaagagatgctctggtagctgggtaactgcaaggagttgcatg

SEQ ID NO: 784070 - DNA, 120 bp, Artificial Sequence
  ENSG00000256463_44 (sequence is synthesized)
cccctgaagaaagaatcagacagtgaagtcttctcggtcgagacagaaaaatagaacaatcttctcctaacaaccacagcagcatcaacaatcattgtaagaggatgggctgtttgtgcc

SEQ ID NO: 784071 - DNA, 120 bp, Artificial Sequence
  ENSG00000256463_45 (sequence is synthesized)
agcgtgtcactaaacaaaaagtatcaaagactcattagctgtttatttctattggaaatcaacactgaactctacagctctgttttccacggtgatgagatgtaacttcgccccaccatg

SEQ ID NO: 784072 - DNA, 120 bp, Artificial Sequence
  ENSG00000256463_46 (sequence is synthesized)
ccacctcttctcacgggatgagggctcggggtgtctcaagcattaggcagagaaaactgaggtggcttaaggtcactgtgtttcagcagttgaatgttttcattatttatctgtgtcctt

SEQ ID NO: 784073 - DNA, 120 bp, Artificial Sequence
  ENSG00000256463_47 (sequence is synthesized)
tttggtgtgtgtgtgtgtgtggtttttttgtttgtttgtttttggttagtatttggtaccatatagtgttctctcttctcccaaaaggatgtgtatataactaaagagaaatgtaaagtg

SEQ ID NO: 784074 - DNA, 120 bp, Artificial Sequence
  ENSG00000256463_48 (sequence is synthesized)
ttgtaaataagatggctcatgaaggtacagtgagactgaccctcctgtgtgcagggctaggccatccctctgcatggtgaagagagacactatttttatactgtaatgccatgcggggct

SEQ ID NO: 784075 - DNA, 120 bp, Artificial Sequence
  ENSG00000256463_49 (sequence is synthesized)
gggacctctctgagcagctggggattgttacctagacccaatattttttattattaaatcttgtggcttgacacatctgctgactgaaatggatgtcttagtctaggttactatttttgt

SEQ ID NO: 784076 - DNA, 120 bp, Artificial Sequence
  ENSG00000256463_50 (sequence is synthesized)
catatggaattgaataaaatgcaggatgtaatgttatttctgagttgcattccttgatttttctaatggagaaagtggaatttgaggaggtcatttgtggtgggtgtgtatccgtggtat

SEQ ID NO: 784077 - DNA, 120 bp, Artificial Sequence
  ENSG00000256463_51 (sequence is synthesized)
ttccaccaggaacgtcaacacagcttggcagcttagatttaagcagtgtctcagtgcatcttgattggtcttgaaatttttgttttttgcttttttccaaaataaaaattcagcctccta

SEQ ID NO: 784078 - DNA, 120 bp, Artificial Sequence
  ENSG00000256463_52 (sequence is synthesized)
tgttaagtgaactggcaaaggcatctctaattttgctggaaatgaggaagccggatggtaaaggggaatcctaatgagcccatcgaaagccggctttgtactcaacagacagggtagccg

SEQ ID NO: 784079 - DNA, 120 bp, Artificial Sequence
  ENSG00000256463_53 (sequence is synthesized)
cagattgtatgaaaatattggaaatcaatggcttctatggaatttcattaagaagcaggatccacaattgatagggcctcataatttgatggattgggctaagaaaatgattagctagct

SEQ ID NO: 784080 - DNA, 120 bp, Artificial Sequence
  ENSG00000256463_54 (sequence is synthesized)
agaaagagtcatagaatacgcacgctgggacgtcagaaatgtcgaagtggggtaatttgtacaaaataaaaaatattgattttactcgtgcaaaattttgagacggagggcgggcgccga

SEQ ID NO: 784081 - DNA, 120 bp, Artificial Sequence
  ENSG00000256463_55 (sequence is synthesized)
attggtgttactgtcctgatttctaccaccgtctgcatctttggcctgttttcattggaagtatcatagattgtcatttggacagaccattcctagcgaatactggcctttcgcggagct

SEQ ID NO: 784082 - DNA, 120 bp, Artificial Sequence
  ENSG00000256463_56 (sequence is synthesized)
tggaaaaccctgtgggaaaatcagaaagctggtaagataagaggaagaagagatgtcacggtgtcagattatgtttgtattctgttctgtccaaagttctttacatcagtaaatgaaaaa

SEQ ID NO: 784083 - DNA, 120 bp, Artificial Sequence
  ENSG00000256463_57 (sequence is synthesized)
caaaacaaatgatgcataggccacgccctgcagtgaaagatgcaagaacttgttcatattggtatgaatcgttcactgtatatgattcaaacatgtggaaataaatgtttgattacagtc

SEQ ID NO: 784084 - DNA, 120 bp, Artificial Sequence
  ENSG00000256463_58 (sequence is synthesized)
ctggccagcttccgaccgtctctccctgaagccgccccgggggaaggtgcggaggacgcagacagcgggcccgagagccgcagcgggggcgaggagaccagcgtgtgcgagaaatgctgc

SEQ ID NO: 784085 - DNA, 120 bp, Artificial Sequence
  ENSG00000256525_0 (sequence is synthesized)
gcctctccggattctgttaacggtagtggtggcttgttgggatccgttgagtgatgggagagtgtgctctttaacttcggagagagatgcgctctcgtgtagccgtcagggcctgccata

SEQ ID NO: 784086 - DNA, 120 bp, Artificial Sequence
  ENSG00000256525_1 (sequence is synthesized)
aggtctgcaggtgcctgttgtctgggtttgggggtcgagtagatgcggggcagccggagctgttgacggaaaggagtagccccaaaggagggcatgtgaagtcgcacgcggagctcgagg

SEQ ID NO: 784087 - DNA, 120 bp, Artificial Sequence
  ENSG00000256525_2 (sequence is synthesized)
ggaacggcgagcacccagaagcccccgggtctggagagggaagcgaggcgctgttagagatctgtcagagaaggcatttcctaagtggaagcaagcagcagcttagccgggattctcttc

SEQ ID NO: 784088 - DNA, 120 bp, Artificial Sequence
  ENSG00000256525_3 (sequence is synthesized)
tgagtgggtgccaccccggcttcggacccttgggcgtagagttgcggaagaacctggccgcagaatggtggacctcggtggtggtgttcagggagcaggtattcccggtggacgccctcc

SEQ ID NO: 784089 - DNA, 120 bp, Artificial Sequence
  ENSG00000256525_4 (sequence is synthesized)
accacaaaccaggccctttgctacccggggacagtgccttcaggttagtttctgcagaaactctacgcgaaatcttgcaagacaaagagctgagtaaggaacagctagtagcatttcttg

SEQ ID NO: 784090 - DNA, 120 bp, Artificial Sequence
  ENSG00000256525_5 (sequence is synthesized)
agaacgtattaaaaacttctgggaaactacgggagaaccttcttcacggtgccttggaacactatgttaattgcctggatctggtaaacaagaggctaccttatggccttgctcagattg

SEQ ID NO: 784091 - DNA, 120 bp, Artificial Sequence
  ENSG00000256525_6 (sequence is synthesized)
tgacactaagcagatacgaaatggtgttaaaagtattggtgagaagactgaagcttcgttagtatggtttactcctccgagaacttcaaaccagtggcttgatttctggttacgtcatcg

SEQ ID NO: 784092 - DNA, 120 bp, Artificial Sequence
  ENSG00000256525_7 (sequence is synthesized)
actccagtggtggagaaagtttgccatgagtccatctaacttcagcagcagtgactgtcaggatgaagaaggccggaaaggaaacaaactttactacaattttccctggggaaaggagtt

SEQ ID NO: 784093 - DNA, 120 bp, Artificial Sequence
  ENSG00000256525_8 (sequence is synthesized)
aatagaaaccctgtggaacctaggagatcacgaacttttacacatgtatcctggcaatgtgtctaaattacatggccgagatggacgaaaaaatgtggttccttgtgttctctctgtaaa

SEQ ID NO: 784094 - DNA, 120 bp, Artificial Sequence
  ENSG00000256525_9 (sequence is synthesized)
tggggacctagaccgaggcatgctggcctacctctatgattctttccagctgacagagaactcctttacaagaaagaaaaatcttcatagaaaggtacttaaacttcacccttgtttagc

SEQ ID NO: 784095 - DNA, 120 bp, Artificial Sequence
  ENSG00000256525_10 (sequence is synthesized)
ccctattaaggttgctttggatgtaggaagaggccccacattggaactaagacaggtttgtcaagggctatttaatgagttactagaaaatgggatttctgtgtggcctggttatttgga

SEQ ID NO: 784096 - DNA, 120 bp, Artificial Sequence
  ENSG00000256525_11 (sequence is synthesized)
aactatgcagtcctcattggaacaactttattcgaagtatgatgaaatgagtattctcttcacagttttggttactgaaactactttggagaatggattaatacatctgagaagcagaga

SEQ ID NO: 784097 - DNA, 120 bp, Artificial Sequence
  ENSG00000256525_12 (sequence is synthesized)
caccacaatgaaggaaatgatgcatatatccaaattaaaagactttttgattaagtatatatcatcagctaagaatgtatagatttttatatttgtataataaatattcttctctcctaa

SEQ ID NO: 784098 - DNA, 85 bp, Artificial Sequence
  ENSG00000256525_13 (sequence is synthesized)
ctaaaggtggttatttaagtatttttaaaaattacatgaatatccaggtgaacaatgatttacaaaaaaagaaagatgaaagtgg

SEQ ID NO: 784099 - DNA, 120 bp, Artificial Sequence
  ENSG00000256525_14 (sequence is synthesized)
aggtgaacaatgatttacaaaaaaagaaagatgaaagtggaactgtttttatccaaaacttaagaaatttctaggattgaaatttttaagaagtttgaaatgattcctcttcagtttaga

SEQ ID NO: 784100 - DNA, 120 bp, Artificial Sequence
  ENSG00000256525_15 (sequence is synthesized)
taaataataaatttagtgcatgtagtctaagtatttttcagtttttttagaatctggccacaggaataagaatcaggttctcacagaatagaacaaggcatccctaataagtaatcccaa

SEQ ID NO: 784101 - DNA, 120 bp, Artificial Sequence
  ENSG00000256525_16 (sequence is synthesized)
aggcatttctgtttaattgtgaacagacagctatctctatgactcctagcccctgaacctttccactgtgggcttccatttgtatcagaagctgaagcattggtacataggaggaagaaa

SEQ ID NO: 784102 - DNA, 120 bp, Artificial Sequence
  ENSG00000256525_17 (sequence is synthesized)
tcctggatcagaggagctagatgtgggcctggaaaggctgattttagtgcatgaacatgcacttggagcatgtttatgggtcaaagaaaatcgagaggagaagttgaagttataggagag

SEQ ID NO: 784103 - DNA, 120 bp, Artificial Sequence
  ENSG00000256525_18 (sequence is synthesized)
aaaagaaatgattaatggggcaagatgaaggaaaccggaggggtcaggatgggatcaagagcccaagtagaagaatgtatcttgaaaaggagatatttgaaacagcagggaagaagaaaa

SEQ ID NO: 784104 - DNA, 120 bp, Artificial Sequence
  ENSG00000256525_19 (sequence is synthesized)
aggatagtgagatataaaaaggctactgggctttttggtctttgaaggacattttactgatgccctctattttctcagggagttaggaggcactattagtttaaatgtggaagagtgggg

SEQ ID NO: 784105 - DNA, 120 bp, Artificial Sequence
  ENSG00000256525_20 (sequence is synthesized)
gtttaaatggcacgagtggggaatagtcatataccctttgaacataaaaggaagctgccccaaatcaaaagttttaacaaataatgttgagtgttcagctgggattgggaaccatgagtt

SEQ ID NO: 784106 - DNA, 120 bp, Artificial Sequence
  ENSG00000256525_21 (sequence is synthesized)
tgtaggaaaccactcttcttagttaagtgatttattatacagtgttcatttagcctgctataaccatagagaagtctgattatagaattattctggggaatggggtttataaatggtttg

SEQ ID NO: 784107 - DNA, 120 bp, Artificial Sequence
  ENSG00000256525_22 (sequence is synthesized)
tagctaacaaaaaaaggaatcctttctttttcttacactccacttccaaaccatcagcaaatcctgtttgactctaacttcaaaacgtatcctgagtctgaccacttcctagcctgtcta

SEQ ID NO: 784108 - DNA, 120 bp, Artificial Sequence
  ENSG00000256525_23 (sequence is synthesized)
ctgctaccaccctgctataagccaccgccactcctcctcccctgatagagtggccctgttaaaaggtgcatgttgtgttgctcctttgctcagaacactccaggaaagcttctcatctca

SEQ ID NO: 784109 - DNA, 120 bp, Artificial Sequence
  ENSG00000256525_24 (sequence is synthesized)
ctcaggaaaaaccgaagccctctttttgatctgctgttctccacctcactcagtctgctccagcagcactgaccttgctatttctagaacatgctggagatgctgccagctcagagccct

SEQ ID NO: 784110 - DNA, 120 bp, Artificial Sequence
  ENSG00000256525_25 (sequence is synthesized)
gtcatttgtattccccattgcctagagtgctctttcttcatcatccatgtctcgtccccccaccttctttcgagtgtttgctcaagtgtcaccatagggagagaaccttttctgaccacc

SEQ ID NO: 784111 - DNA, 120 bp, Artificial Sequence
  ENSG00000256525_26 (sequence is synthesized)
ttaaagttgctgaaaacctcccccagcctgcctcttgccagcatgttccatcttcttccttttttagcacctaccaccttcacatatattatttacttatttttattgtctgtttctccc

SEQ ID NO: 784112 - DNA, 120 bp, Artificial Sequence
  ENSG00000256525_27 (sequence is synthesized)
tgccacgagagacggagatttttacccctagcacctggaactgttcctggtatcagaggcattaaaatgtttgttggatggactaatgaatgagaagagaaggctgggctgaatggctca

SEQ ID NO: 784113 - DNA, 67 bp, Artificial Sequence
  ENSG00000256525_28 (sequence is synthesized)
tctgtcggggtcaagcattcttcccacctcagccgcctgagtagctgggactacaggtacttaaact

SEQ ID NO: 784114 - DNA, 120 bp, Artificial Sequence
  ENSG00000256525_29 (sequence is synthesized)
catgtatcctggcaatgtgtctaaattacatatgcagagacactcacctacataactacaatccagtcatcaaaatcaggaaattaacagtaatccactattgccacagagccctacaaa

SEQ ID NO: 784115 - DNA, 120 bp, Artificial Sequence
  ENSG00000256525_30 (sequence is synthesized)
ttgaactgattatctcaataatggcatttataggtccaagatcttgtctttcatgtagttgtcatatgcctttacactccttcaaatgaacaattcctcttgtcttgcgtgaccttgaca

SEQ ID NO: 784116 - DNA, 120 bp, Artificial Sequence
  ENSG00000256525_31 (sequence is synthesized)
ctccttcagcagtcgtcatttctgtctgggtgattgagacccagcccagacctgaatgcggacactaaaaagatttaaagactttgagagtcccccagctttctgaccctggcttttgtg

SEQ ID NO: 784117 - DNA, 120 bp, Artificial Sequence
  ENSG00000256525_32 (sequence is synthesized)
gagaggtctgggaagatgggagatagtgagctcaaagaaggagaagataatggcgtatgtcccacattttctcccagggtttgtcaagggctatttaatgagttactagaaaatgggatt

SEQ ID NO: 784118 - DNA, 120 bp, Artificial Sequence
  ENSG00000256525_33 (sequence is synthesized)
ggcatgagccactgctcccagcccagtttatcttattaactatcagttcgacgataactgtgtgaaatacaactggtagaatagagtcccaggtatcagaaagtttactgcctttgaggg

SEQ ID NO: 784119 - DNA, 120 bp, Artificial Sequence
  ENSG00000256525_34 (sequence is synthesized)
caaattcttgtgaatctttaaagtatcatatgcaattcaaataggtttaaaatgtcagtacatatatgtattaatgaagactgtggttgatcatgaataattaacagaagctgaggattt

SEQ ID NO: 784120 - DNA, 120 bp, Artificial Sequence
  ENSG00000256525_35 (sequence is synthesized)
acttttacacatgtatcctggcaatgtgtctaaattacatctaaaggtggttatttaagtatttttaaaaattacatgaatatccaggtgaacaatgatttacaaaaaaagaaagatgaa

SEQ ID NO: 784121 - DNA, 120 bp, Artificial Sequence
  ENSG00000256537_0 (sequence is synthesized)
ggctacgcgccgcactgcaccgagcggcggcagcggcaagcttgggtgtgagcccgggagccgctttgcttaccgtcctgccggtcccagccgtcgctaggaggtccgcgggccctgcgg

SEQ ID NO: 784122 - DNA, 120 bp, Artificial Sequence
  ENSG00000256537_1 (sequence is synthesized)
caaccctcgctacagacgctgggcgggcggcgacacctggctcatggcccccgcggcggctccgtcctccttggccgtcagggcctcaagccccgccgcgacacccacctcgtacggcgt

SEQ ID NO: 784123 - DNA, 120 bp, Artificial Sequence
  ENSG00000256537_2 (sequence is synthesized)
cttctgcaaggggctctcccgcaccctgctcgccttcttcgagctggcctggcagctgcgcatgaacttcccgtacttctacgtcgcgggctcggtgatcctcaacatccgattgcaggt

SEQ ID NO: 784124 - DNA, 120 bp, Artificial Sequence
  ENSG00000256537_3 (sequence is synthesized)
acatatttagagccatgactaagctaacggcctccggggccagcatgatggccgactcccagggtccgttgcggcgcggcggagcagccaatggcgagccccacagtctcgcgagagtgc

SEQ ID NO: 784125 - DNA, 120 bp, Artificial Sequence
  ENSG00000256537_4 (sequence is synthesized)
tcaggcgctcttcgtggctgccctcttagctgctagcggagctcctcagggggcggccgggagcctacaatccctagaaagagaatacgctgttccggaaacagaactgcagttaagacc

SEQ ID NO: 784126 - DNA, 120 bp, Artificial Sequence
  ENSG00000256537_5 (sequence is synthesized)
ctcgaaaacatctaagaaagtgtgcatcctaaaacacctgacgaatttcagaatgtgacaaagcgcagaggatgcattatttcaaaacaaaacagaaggctaaaatttgcaggaaaaaga

SEQ ID NO: 784127 - DNA, 120 bp, Artificial Sequence
  ENSG00000256537_6 (sequence is synthesized)
aaatcagtaaaccgggaatcctcggactggattgtaagcaagatttcaatgaataagaagctgaaggtattaaggctgtgatatagaaggtacatatttcatcccacaagagaaaacaat

SEQ ID NO: 784128 - DNA, 120 bp, Artificial Sequence
  ENSG00000256537_7 (sequence is synthesized)
aataatcagaaattttcggtgaaaaaaacgcaaaactgtacaggaaaatcatcctccaagtaccagacataaaatgctgcaagcttttgaactaatggcgagagtgtaagaaaatgggct

SEQ ID NO: 784129 - DNA, 120 bp, Artificial Sequence
  ENSG00000256537_8 (sequence is synthesized)
ctacttcagtgatcctgtggcaggacgtggatcaagacttggaaccgcagaaaacgaaatcccatagtagcacaaagcttggctgttcagtgaataacatttaaataatcgtaaaataca

SEQ ID NO: 784130 - DNA, 120 bp, Artificial Sequence
  ENSG00000256537_9 (sequence is synthesized)
aatgttgtttatggtttttattgtttaagggcatacttaattatggttacaaagtggagtgcaaatgttatttaccatgttttaaaaatacagccggaaaatacaagtgggaatgttgaa

SEQ ID NO: 784131 - DNA, 120 bp, Artificial Sequence
  ENSG00000256537_10 (sequence is synthesized)
ggagggcgggggaagtaaatggaatgggggttatgtccttataaagtggaaacttgaaaggtactgtctgttgttgagtggggaaagacatttttattacttacagggtagccataaagt

SEQ ID NO: 784132 - DNA, 120 bp, Artificial Sequence
  ENSG00000256537_11 (sequence is synthesized)
ttctaaaacggtaatatattaaagagggagagtggtaggggagaacagtatgaagtcaacaggaaatggctaaagatggagagctcaggtagaatagtttaaaaaatgaaaattgataga

SEQ ID NO: 784133 - DNA, 120 bp, Artificial Sequence
  ENSG00000256537_12 (sequence is synthesized)
gtacctggtgtatttgaatacagcctagagagctttcattttccaaagagtgtggggataaattagtgaatgcatatttttcaaaattaagaaaacagaacatataattttgaacgctga

SEQ ID NO: 784134 - DNA, 120 bp, Artificial Sequence
  ENSG00000256537_13 (sequence is synthesized)
gaaaaataaaaatttaaaaactacactgtatacacggtatacctcaactgtgaataatagtagtcatgtaaagtcagtcataattatgtaaatactgaatactgattttacaacaaatga

SEQ ID NO: 784135 - DNA, 120 bp, Artificial Sequence
  ENSG00000256537_14 (sequence is synthesized)
ttctataacgctgggaggatgggagaaaagagatgtgtgtgtgtgtaatggtggtgagccaatcaagatctgatatagaaaaatgcagaaaaaggagtatacacatgttttcttcggatt

SEQ ID NO: 784136 - DNA, 120 bp, Artificial Sequence
  ENSG00000256537_15 (sequence is synthesized)
aaaaaaactaataataaatcaccaagagtggtaaagttttaaatcaagatctgatatagaaaagtgcagaaaaagtagtatacgcattttttttttcaggaaaaaattaactaataaacc

SEQ ID NO: 784137 - DNA, 120 bp, Artificial Sequence
  ENSG00000256537_16 (sequence is synthesized)
actaagaggggtaaagtgttaaaatagttgcattgttctatattccactcattgtgtccagcaaacagtgttctatggctttaagtagtaagcatcttgccccgtccaacaccatgtctg

SEQ ID NO: 784138 - DNA, 120 bp, Artificial Sequence
  ENSG00000256537_17 (sequence is synthesized)
gcctagggtaattgttctttctagtctttattctttgtctccagccaaactccatttgggcacattctcctatagccttttctacctgaagatactctgtgttttaaagctaagcttagg

SEQ ID NO: 784139 - DNA, 120 bp, Artificial Sequence
  ENSG00000256537_18 (sequence is synthesized)
tggcgctttttccattaaatttttcctggattccactgaccatataggagctcacttcttttaatccataaggccattttcataggttgccttatttttccctaatcgtgcatcaactgt

SEQ ID NO: 784140 - DNA, 120 bp, Artificial Sequence
  ENSG00000256537_19 (sequence is synthesized)
ctgttttatatacccaagacaggtttcctagactgcgataagccaaaacattttagtctaaaatatcagaagtgtagtttaatcaatgaaatagtaataccaagggatttagaatcgtgg

SEQ ID NO: 784141 - DNA, 120 bp, Artificial Sequence
  ENSG00000256537_20 (sequence is synthesized)
gatgtcccaatttgtaacacaaaagactgtctagtcttaatcctgaaatggtgacagagtaggatgctccatttgggtgactatgtgaacatattcctataacttttttcctcacatcag

SEQ ID NO: 784142 - DNA, 120 bp, Artificial Sequence
  ENSG00000256537_21 (sequence is synthesized)
tcatttgttaaaccgaagatgaagaaacagactttgtatttattacatcctccaacataattggcagctctgtgagggaagacactatatcctattcaattttacacccggtagtaacag

SEQ ID NO: 784143 - DNA, 120 bp, Artificial Sequence
  ENSG00000256537_22 (sequence is synthesized)
atgtatagttactacttacaatatatgcataaagttacagcttacatttacctcgtaatatatgtatatatatatattaggagttaaatgtattaggaggtaaatgtaaactctgtggtt

SEQ ID NO: 784144 - DNA, 120 bp, Artificial Sequence
  ENSG00000256537_23 (sequence is synthesized)
ggtttatcatttattcacaattgctcttaattcttggggtatagtttgcctcctacatgatgcaattcagtgaaattcccaggagacaaaacaagattttgacctgaataaaccacttat

SEQ ID NO: 784145 - DNA, 120 bp, Artificial Sequence
  ENSG00000256537_24 (sequence is synthesized)
tgttgtaattcacaagtgagtttattcttcctggcacacttccaggtaatatccattaggctaaggattttgtttgttcactgttctatccccaagcctagagcactgcccagtgcggaa

SEQ ID NO: 784146 - DNA, 120 bp, Artificial Sequence
  ENSG00000256537_25 (sequence is synthesized)
tagctaataaatattgttgaatggatagatgaatggcaattttgttggtatgctctacatagtcagcagtcaataaaggaaacatatattcgttcctgataataagatgattcactttat

SEQ ID NO: 784147 - DNA, 120 bp, Artificial Sequence
  ENSG00000256537_26 (sequence is synthesized)
tgcccataaattgggctttttcaggccatcatgcacgttgattgatccagagatccctcaagcatgaaaaagcagagacataggtggtatagttattatcaatagagataagaaatgtag

SEQ ID NO: 784148 - DNA, 120 bp, Artificial Sequence
  ENSG00000256537_27 (sequence is synthesized)
ctggcaaaaaaaaaaatgggaaacgatgcgttacagcttattttaactataaaaggaaaacagtgaacatagcaacatatgtaacctaagggataggggaaaagttgttttttttttttt

SEQ ID NO: 784149 - DNA, 120 bp, Artificial Sequence
  ENSG00000256537_28 (sequence is synthesized)
aattctgggtaaaaatacatgtgattacttgacaaatagcatatcattaccatcagcatcatttttaaaatatattgagtttttaataccaggaactatgaaaaactatttatatacatg

SEQ ID NO: 784150 - DNA, 120 bp, Artificial Sequence
  ENSG00000256537_29 (sequence is synthesized)
agctccgtaattctcacatataccctgtgaggaaaacatttttatcatttttcagagaagcaaaccgggatttagagaggttaagtaaattcctaaggtcatgataaccaaccagacctc

SEQ ID NO: 784151 - DNA, 120 bp, Artificial Sequence
  ENSG00000256537_30 (sequence is synthesized)
aaatgaatctccagtaattcctaaagttatatttcataaggagttcaattttcttaaatgtgtagataattacaaataattctgtttctcaaatttctggacagaaatattacctgggta

SEQ ID NO: 784152 - DNA, 120 bp, Artificial Sequence
  ENSG00000256537_31 (sequence is synthesized)
atagttattttttttaacataactattgagggtctttcatactaaaatataaatatttaacatgatttgatatgtaagttcaagtattttatactctctgcagccttaaacctattggct

SEQ ID NO: 784153 - DNA, 120 bp, Artificial Sequence
  ENSG00000256537_32 (sequence is synthesized)
tattttattagagggttggtgggattgagggatatgggagcaaagggagagagaggaaagaacgttgtcctcagaatggaagggaaacactttcctgtgctacccagagtagagatcaga

SEQ ID NO: 784154 - DNA, 120 bp, Artificial Sequence
  ENSG00000256537_33 (sequence is synthesized)
caatgttaaattttgaagccatgtctgttcctgtcctgaggatccctaactaaattttgttagaaaatcttgcagtttgcttttaatgggagatctttctggcaggacatcaatagcttt

SEQ ID NO: 784155 - DNA, 120 bp, Artificial Sequence
  ENSG00000256537_34 (sequence is synthesized)
tgatagcgtcaagaagaaaataaagttacatgcagaagcataaaggggtaggatgaaagttgaggaatatagggacaaaagatgagggaaaggaatatcctaatacttggaagtttgagc

SEQ ID NO: 784156 - DNA, 120 bp, Artificial Sequence
  ENSG00000256537_35 (sequence is synthesized)
atggaaagtagtctaaagacgacttgggaagttccaagaaaatgaaccaagaaaagaacctctgcaagaactatgagaattcccaacaattgggttggattgattcatattagtctatta

SEQ ID NO: 784157 - DNA, 120 bp, Artificial Sequence
  ENSG00000256537_36 (sequence is synthesized)
cttgggttaccttgagtgtggggattcttcttgcagttttaacacttgtactatggtctgaatgtgccccccaaaaattcacatgttggcatttaacccccaaagtgatgatctcaggag

SEQ ID NO: 784158 - DNA, 120 bp, Artificial Sequence
  ENSG00000256537_37 (sequence is synthesized)
atgggacctttgggaggtgatcaggtcataaagatgaaaccctcgtgaatgggattagtgcctttataaaggagaccccaaaataattcccttaccccttttgccatgtaaggttatagg

SEQ ID NO: 784159 - DNA, 120 bp, Artificial Sequence
  ENSG00000256537_38 (sequence is synthesized)
gaaaagtcatctatgaacaaggaaatgaaccctcaccagataccaaatttgtgaatgcctggatcttggacttcccagcttctagaactataagaaataaatttctgttgttcataagca

SEQ ID NO: 784160 - DNA, 120 bp, Artificial Sequence
  ENSG00000256553_0 (sequence is synthesized)
cccacatgaagtgtctaccttctgcagactccaatggctcaggaactgggaatgcagtgccaggctcgtggtatcctgcagcagatgtggggagttttccttctttatgtttccatgaag

SEQ ID NO: 784161 - DNA, 120 bp, Artificial Sequence
  ENSG00000256553_1 (sequence is synthesized)
atgacagctacggaaggtgccattgtccagatcaactgcacgtaccagacatctgggttcaacgggctgttctggtaccagcaacatgctggcgaagcacctacatttctgtcttacaat

SEQ ID NO: 784162 - DNA, 120 bp, Artificial Sequence
  ENSG00000256553_2 (sequence is synthesized)
gttctggatggtttggaggagaaaggtcgtttttcttcattccttagtcggtctaaagggtacagttacctccttttgaaggagctccagatgaaagactctgcctcttacctctgtgct

SEQ ID NO: 784163 - DNA, 120 bp, Artificial Sequence
  ENSG00000256574_0 (sequence is synthesized)
cttgttcagtcctgaacagtcctgttcagactgatcttatcacaggttgcacactgcctcaatgtcaccatgtttctaccctcagttgtgcttggcagagagaggacagctatacataaa

SEQ ID NO: 784164 - DNA, 120 bp, Artificial Sequence
  ENSG00000256574_1 (sequence is synthesized)
gtctgttcactctacaaaggtgaaatcattttttttaagaagcttgagtgcccaagggtttgataaatgtggaaaataaccgctgttcgaatatcctgttggcctgctgaagaaatgact

SEQ ID NO: 784165 - DNA, 120 bp, Artificial Sequence
  ENSG00000256574_2 (sequence is synthesized)
ggctgaggctgtaaagaaatcttgtggtcattctcatggaaagaggattggagccccgattctttgatctcattattgaccagttgattgagaagactgtcctcctgtccccacccaatc

SEQ ID NO: 784166 - DNA, 120 bp, Artificial Sequence
  ENSG00000256574_3 (sequence is synthesized)
acaataagtggtgatgtgaggtgtggaagaaacacgggagcagccttcctcaggacacctcttgtttatctctctagctctgaaatcacatgaagctgtggatggagagtcacctgatag

SEQ ID NO: 784167 - DNA, 120 bp, Artificial Sequence
  ENSG00000256574_4 (sequence is synthesized)
tcccagaaacccgtcccagcccaaggatgatgagtaaccagacgttggtaaccgagttcatcctgcagggcttttcggagcacccagaataccgggtgttcttattcagctgtttcctct

SEQ ID NO: 784168 - DNA, 120 bp, Artificial Sequence
  ENSG00000256574_5 (sequence is synthesized)
tcctctactctggggccctcacaggtaatgtcctcatcaccttggccatcacgttcaaccctgggctccacgctcctatgtactttttcttactcaacttggctactatggacattatct

SEQ ID NO: 784169 - DNA, 120 bp, Artificial Sequence
  ENSG00000256574_6 (sequence is synthesized)
gcacctcttccatcatgcccaaggcgctggccagtctggtgtcggaagagagctccatctcctacgggggctgcatggcccagctctatttcctcacgtgggctgcatcctcagagctgc

SEQ ID NO: 784170 - DNA, 120 bp, Artificial Sequence
  ENSG00000256574_7 (sequence is synthesized)
tgctcctcacggtcatggcctatgaccggtacgcagccatctgccacccgctgcattacagcagcatgatgagcaaggtgttctgcagcgggctggccacagccgtgtggctgctctgcg

SEQ ID NO: 784171 - DNA, 120 bp, Artificial Sequence
  ENSG00000256574_8 (sequence is synthesized)
ccgtcaacacggccatccacacggggctgatgctgcgcttggatttctgtggccccaatgtcattatccatttcttctgcgaggtccctcccctgctgcttctctcctgcagctccacct

SEQ ID NO: 784172 - DNA, 120 bp, Artificial Sequence
  ENSG00000256574_9 (sequence is synthesized)
acgtcaacggtgtcatgattgtcctggcggatgctttctacggcatagtgaacttcctgatgaccatcgcgtcctatggcttcatcgtctccagcatcctgaaggtgaagactgcctggg

SEQ ID NO: 784173 - DNA, 120 bp, Artificial Sequence
  ENSG00000256574_10 (sequence is synthesized)
attacaccgctgtcttctacgcctacataagcccggtctctggctacagcgcagggaagagcaagttggctggcctgctgtacactgtgctgagtcctaccctcaaccccctcatctata

SEQ ID NO: 784174 - DNA, 120 bp, Artificial Sequence
  ENSG00000256574_11 (sequence is synthesized)
ctttgagaaacaaggaggtcaaagcagccctcaggaagcttttccctttcttcagaaattaacttgtgtcttctgaagtttttgtccttggagactgcagttttagtggagtctgatgag

SEQ ID NO: 784175 - DNA, 120 bp, Artificial Sequence
  ENSG00000256574_12 (sequence is synthesized)
caagtttctggactgggaggtaaatagacttgttttttctaacccagcagaacctgtgcatggatgagctgggagtgctggttccctgagacttggtgatggggggattgcggtaggtgt

SEQ ID NO: 784176 - DNA, 120 bp, Artificial Sequence
  ENSG00000256574_13 (sequence is synthesized)
gacccaccagcctctgagacaccagatctcttggtctgactccaaggtggtgtcagtgctgagttggcagagaaacacagggcctaggaggagaaaagtgttccttgtgttttcaactca

SEQ ID NO: 784177 - DNA, 120 bp, Artificial Sequence
  ENSG00000256574_14 (sequence is synthesized)
tagccacatcaaacattttccttttgtatgtacaacactcagggtgtaaattctaaaatcacacctagaattcagctgtgtgggtctaaaaagttaggcagaattgtggaccccacagcc

SEQ ID NO: 784178 - DNA, 120 bp, Artificial Sequence
  ENSG00000256574_15 (sequence is synthesized)
cctgaagggttgtcagactgaagctttgttttaaggtgaccactggcctctaggaaaccttctacccccattatcttacctcaactgtttcctctggagccacttggacttcaaaaatag

SEQ ID NO: 784179 - DNA, 120 bp, Artificial Sequence
  ENSG00000256574_16 (sequence is synthesized)
tttgattttaatgcaaactgttgtttctgcttttgtcttttcttcttactaacacttcagattctgagtatctgacctacctaattggcctggagcgaggacagctgccatgagtcagct

SEQ ID NO: 784180 - DNA, 120 bp, Artificial Sequence
  ENSG00000256574_17 (sequence is synthesized)
ctaataagttaaacggcattgtagtaaggcattgctatccttccattgtttcagataaaactgggtgaacgaatcctctgtgtctaataaagacaggtcttgtgcttgtgctccatgcta

SEQ ID NO: 784181 - DNA, 120 bp, Artificial Sequence
  ENSG00000256574_18 (sequence is synthesized)
ttacaaaactgcactggaaaatccattatctttatcatgatccattaaagatgacagaactaagatgtgaatgtttagttgtatcttggaattgaatagaaacatatcattcgatatgtg

SEQ ID NO: 784182 - DNA, 120 bp, Artificial Sequence
  ENSG00000256574_19 (sequence is synthesized)
tgtgaagctgagagtagagtttgatatttgatttagatgggatggttcttcatccagtattctcattatcattcatcagaagctcattgactcaagtatttgatgaattgtagctgactg

SEQ ID NO: 784183 - DNA, 120 bp, Artificial Sequence
  ENSG00000256574_20 (sequence is synthesized)
tagctttggcacgtagattcttacagacagtttaatctcttctaagtgaattctgagtcccaaataacatgttgaaaccctcagtggtctcactttccaataaacatggctttgaaaacc

SEQ ID NO: 784184 - DNA, 120 bp, Artificial Sequence
  ENSG00000256574_21 (sequence is synthesized)
actatattgaatagaagcgaagagacagagtatacttgtcttgttcctaatccagaagaaaagtttgaatcttttaccattgagtaagcttgagtgcccaagggtttgataaatgtggaa

SEQ ID NO: 784185 - DNA, 120 bp, Artificial Sequence
  ENSG00000256590_0 (sequence is synthesized)
tctttcattagaaccgtcagatagtctctgagatcttaggaaccctgttttgttgtatatcctctgccctgatatgaagaaaagatgattcttactgtgggctttagctttttgtttttc

SEQ ID NO: 784186 - DNA, 120 bp, Artificial Sequence
  ENSG00000256590_1 (sequence is synthesized)
tgaggtggtactgctctgcacttacgacactgtatattcaaatccagatttattctggtaccggataaggccagattattcctttcagtttgtcttttatggggataacagcagatcaga

SEQ ID NO: 784187 - DNA, 120 bp, Artificial Sequence
  ENSG00000256590_2 (sequence is synthesized)
aggtgcagattttactcaaggacggttttctgtgaaacacattctgacccagaaagcctttcacttggtgatctctccagtaaggactgaagacagtgccacttactactgtgcctttag

SEQ ID NO: 784188 - DNA, 120 bp, Artificial Sequence
  ENSG00000256618_0 (sequence is synthesized)
cccaaacccaactaattctactaccaaataacctcaactaaaacatttacccaaataaagtataggcgatagaaatgatatctcggcacaatagacataataccgcgatggaaagatgaa

SEQ ID NO: 784189 - DNA, 120 bp, Artificial Sequence
  ENSG00000256618_1 (sequence is synthesized)
aaaacataaccaagcataaagtagcaaggacaaacccctataccttctgcataatgaattaactagaaataactttacaaagagaaccaaagccaagacccccgaaaccagacgagctac

SEQ ID NO: 784190 - DNA, 120 bp, Artificial Sequence
  ENSG00000256618_2 (sequence is synthesized)
ctaagaacagctgaaagagcacacccatctatgtagcaaaatagtgggaagattcataggtagaggtgacaagcctaccgagcctggtgatagctggttgtccaagatagaatcttagtt

SEQ ID NO: 784191 - DNA, 120 bp, Artificial Sequence
  ENSG00000256618_3 (sequence is synthesized)
caactttaaatttatctacagaaccagctaatgcctttgtaaatttaactgttagtctaaagagggacagctctttagacactaggaaaaaaccttgtagagagagtaaaaaatataact

SEQ ID NO: 784192 - DNA, 120 bp, Artificial Sequence
  ENSG00000256618_4 (sequence is synthesized)
tccaaagttggcctagaagaagcgatcaattaagaaggcgttcaagctcaacacccaaccacccaaaaaattccaaacacataactgaactcctcacatcacattggaccaatctatcat

SEQ ID NO: 784193 - DNA, 120 bp, Artificial Sequence
  ENSG00000256618_5 (sequence is synthesized)
ttcatagaagaaataatgttagtataagtgacatgcaaacattctcctccgcataagcctacatcagaccaaaatacttcactgacaattaacagcccaatatctataaataatcaatga

SEQ ID NO: 784194 - DNA, 120 bp, Artificial Sequence
  ENSG00000256618_6 (sequence is synthesized)
tctagcattaccagtactagaggcaccacctgcccagtgacatatgtttaatggctgcggtaccctaaccgtgtaaaggtagcataatcacttgttccttaaatagggacttgtctgaat

SEQ ID NO: 784195 - DNA, 120 bp, Artificial Sequence
  ENSG00000256618_7 (sequence is synthesized)
ggctccacgagggttcagctgtctcttactttcaaccagtgaaattgacctgcccgtgaagaggcggacataatacaacaagacgagaagaccctaaggagctttaatttatgaatgcaa

SEQ ID NO: 784196 - DNA, 120 bp, Artificial Sequence
  ENSG00000256618_8 (sequence is synthesized)
acaagaccaaataggcccgcaggccctaaactaccagacctgcgttaaacatttcggttggggcgacctcggagtataacctaacctccgagcaacatatgctgagactataccagtcaa

SEQ ID NO: 784197 - DNA, 120 bp, Artificial Sequence
  ENSG00000256618_9 (sequence is synthesized)
ggcgaatatccacatacaattgacccaataatttgaccaacggaacaagttaccctagtgataacagtacaatcctattctagggtccacatcgacagtagcattaacgacctcgatgtt

SEQ ID NO: 784198 - DNA, 120 bp, Artificial Sequence
  ENSG00000256618_10 (sequence is synthesized)
ggatcaggacatcccaatggtgcagccgctattaaaggttcgtttgttcaacgattagagtcctatgtgatctgagttcagaccggagtaatccaggttggtttctatctattctacatt

SEQ ID NO: 784199 - DNA, 120 bp, Artificial Sequence
  ENSG00000256618_11 (sequence is synthesized)
tcttccagtacgaaaggataagagaaatggggcccacttcataaagtgcccctgccccatagatgatattatctcagcattttactgtacccacacccacccaagaacagggtttgttaa

SEQ ID NO: 784200 - DNA, 120 bp, Artificial Sequence
  ENSG00000256660_0 (sequence is synthesized)
agtagagtgtgtctgggtcagctgagtgactacatcaaagctcccagccttgaaaaacacatgctgttcccaggcctcaagatattgaaacattaattagataatttaaagtagcgtttt

SEQ ID NO: 784201 - DNA, 120 bp, Artificial Sequence
  ENSG00000256660_1 (sequence is synthesized)
cttctacaatgtctgaagaagtgacctacgcgacactcacatttcaggattctgctggagcaaggaataaccgagatggaaataacctaagaaaaagagggcatccagctccatctccca

SEQ ID NO: 784202 - DNA, 120 bp, Artificial Sequence
  ENSG00000256660_2 (sequence is synthesized)
tttggcgtcatgctgctctgggtctggtaactctttgcctgatgttgctgattgggctggtgacattggggatgatgtttttgcagatatctaatgacattaactcagattcagagaaat

SEQ ID NO: 784203 - DNA, 120 bp, Artificial Sequence
  ENSG00000256660_3 (sequence is synthesized)
tgagtcaacttcagaaaaccatccaacagcagcaggataacttatcccagcaactgggcaactccaacaacttgtccatggaggaggaatttctcaagtcacagatctccagtgtactga

SEQ ID NO: 784204 - DNA, 120 bp, Artificial Sequence
  ENSG00000256660_4 (sequence is synthesized)
agaggcaggaacaaatggccatcaaactgtgccaagagctaatcattcatacttcagaccacagatgtaatccatgtcctaagatgtggcaatggtaccaaaatagttgctactatttta

SEQ ID NO: 784205 - DNA, 120 bp, Artificial Sequence
  ENSG00000256660_5 (sequence is synthesized)
gacagtttggaagaaaaggattttcttatgtcacagccattactcatgttttcgttcttttggctgggattatcatgggactcctctggcagaagttggttctgggaagatggctctgtt

SEQ ID NO: 784206 - DNA, 120 bp, Artificial Sequence
  ENSG00000256660_6 (sequence is synthesized)
ccctctccatccttatttagtactaaagaacttgaccagatcaatggatccaaaggatgtgcttattttcaaaaaggaaatatttatatttctcgctgtagtgctgaaattttttggatt

SEQ ID NO: 784207 - DNA, 120 bp, Artificial Sequence
  ENSG00000256660_7 (sequence is synthesized)
tgcgagaagacagctgccccagtgaagactgaggatttggattagtatgcttcttccaaattctccaagaagtaagagacttgtgagtaagctcatatgaggaaagaggaaactacggta

SEQ ID NO: 784208 - DNA, 120 bp, Artificial Sequence
  ENSG00000256660_8 (sequence is synthesized)
ccagagccaaaccagcttttaaaatgactgtgtatttacattatcagacaaatgaacttgtttaacagaacattctccagttccttgtctgacgtcttctgatttgatgttattattcgg

SEQ ID NO: 784209 - DNA, 120 bp, Artificial Sequence
  ENSG00000256660_9 (sequence is synthesized)
tcttaaaattatacctggggacaaaggggaatagccatactatggccctatgattgtctcagaatcatttcactgaatttctttgctttctcaaataaagactcctttctttcattatta

SEQ ID NO: 784210 - DNA, 120 bp, Artificial Sequence
  ENSG00000256660_10 (sequence is synthesized)
ggtaaacacaagctttccatggaatcctgggaaaattaataatgattgtgagaattataaatacagacataaaaagaggagtacaacatactgagaaaagagctccagtaacaaatattg

SEQ ID NO: 784211 - DNA, 120 bp, Artificial Sequence
  ENSG00000256660_11 (sequence is synthesized)
cgtctgatacttttctgctgtctcatatctctcctattcgtcatatcttcccaaaaaaccggcaaaagacattatcaggatttggttctaaattcattgttttatcttgataagctaaac

SEQ ID NO: 784212 - DNA, 120 bp, Artificial Sequence
  ENSG00000256660_12 (sequence is synthesized)
tggacttagacaaagactctttgtttccagttattcattagaataaagagcctcttttctgcctagacacacattcacttatcattccaatgctgagaaataaagtcaagaaatatgtat

SEQ ID NO: 784213 - DNA, 120 bp, Artificial Sequence
  ENSG00000256660_13 (sequence is synthesized)
gtgacaaatttatagcaaggcactgaattttatcttttggtagaaatgtgtttatttaacacacacacacacctaatactacattcaaagtattttataaatactaacccttgaagaaag

SEQ ID NO: 784214 - DNA, 120 bp, Artificial Sequence
  ENSG00000256660_14 (sequence is synthesized)
cagttatattcccattttataggtagaaatattataatagagagattaagtaacttgcctgaggtcactcagctcataaattgcactttagggattgtgcactcagtcactcagctattc

SEQ ID NO: 784215 - DNA, 120 bp, Artificial Sequence
  ENSG00000256660_15 (sequence is synthesized)
tgactctccagcacctacaatccaaaagggtgctgctggtcataagaacacatatcaacacatttatttatactaaataactgtcaaccattttctaacaaaaagtaagactgaattgac

SEQ ID NO: 784216 - DNA, 120 bp, Artificial Sequence
  ENSG00000256660_16 (sequence is synthesized)
tgattagttcaacaattagtgtcatgttgaggacttgccaattacaatatacggcaagtgtcttttatgaattaaaatgaactaaaccttccacttcagggtttggatgaaactatttaa

SEQ ID NO: 784217 - DNA, 120 bp, Artificial Sequence
  ENSG00000256660_17 (sequence is synthesized)
aggacaaatagaatatataacacttggaaaatttcaatttttttaactatttaaagttatgaaaaaatagacgtcaacaaaaatgtgtaaggggatattaggtttgctaaattctttcac

SEQ ID NO: 784218 - DNA, 120 bp, Artificial Sequence
  ENSG00000256660_18 (sequence is synthesized)
ttttgaggaacacctctcatcataactacatttaaatgaaacaactgtattaatattttaaatataatagtatttttctattagataaaatttaagatctttggcatcttaatggatttt

SEQ ID NO: 784219 - DNA, 120 bp, Artificial Sequence
  ENSG00000256660_19 (sequence is synthesized)
taaactttttattgatacataagagatgtatatgttttggggtatatgtgataatttgatacattcagatagtgtgtaaagatcaaataagtggaattgggatatcgatcactttaaata

SEQ ID NO: 784220 - DNA, 120 bp, Artificial Sequence
  ENSG00000256660_20 (sequence is synthesized)
tttatcttttctttatgctaggagcattcaaattattattttctcattattgtgaaatgtacagtagattattgttaattgtattcaccctaataatctatgaaacactaggtcttactt

SEQ ID NO: 784221 - DNA, 120 bp, Artificial Sequence
  ENSG00000256660_21 (sequence is synthesized)
cttctatctaacagaatatttgtattcataatggctttttatctaccttcctcccccaacaaatcattatccacccccctccctcctgtttcactctttaaagcatgttgtcaacgtttt

SEQ ID NO: 784222 - DNA, 120 bp, Artificial Sequence
  ENSG00000256660_22 (sequence is synthesized)
cttaaactgaataataatcactcatcttctgtcaaagatgccatgcttcagctgtgactcagcagttccttaaatcacaaacaatggtaggtctattattttctccctggatacacttta

SEQ ID NO: 784223 - DNA, 120 bp, Artificial Sequence
  ENSG00000256660_23 (sequence is synthesized)
tcttcatccatttcccaatgttttgtcatggctatttctactcaaacactaatcccccattctctaatcaccattattaatcatatcaagtcaattagtttggtttcacactaataataa

SEQ ID NO: 784224 - DNA, 120 bp, Artificial Sequence
  ENSG00000256660_24 (sequence is synthesized)
tgacaaaaagcacatgcagagtaatacacaaacaaaaaaagtgacagttacttttttgtgacaagagcaatattgggtatgaactgattaatattaatctgaggtgttgctactagactg

SEQ ID NO: 784225 - DNA, 120 bp, Artificial Sequence
  ENSG00000256660_25 (sequence is synthesized)
agggtttccaggagtagtactatgacatcatgtaaacacattcagttttcatgttggaatctaagatgtgtcccttctcccaaagggattttaatcattcttggcctctctactcactct

SEQ ID NO: 784226 - DNA, 120 bp, Artificial Sequence
  ENSG00000256660_26 (sequence is synthesized)
taatcaaagtgtggaggaggtggcccccacagcagggtttggaacctacagaccctggcccctgagacatgcagctgtcagacaagccagcatgtcaaacacaggttagagagactgagc

SEQ ID NO: 784227 - DNA, 120 bp, Artificial Sequence
  ENSG00000256660_27 (sequence is synthesized)
ttccagattgcatagccatttccttgactactgagtaaaggccaaggctaagatttagtaagcctagccctgaagcaagcaaagaatatggcagtgtaatgcaggtcatttagaaaaaaa

SEQ ID NO: 784228 - DNA, 120 bp, Artificial Sequence
  ENSG00000256660_28 (sequence is synthesized)
caatgttgggcacaaagaaaatttagatctgacaagtataattttctaaagacattatttcaggattaacatcaatttcttagcagaggaaatgaatactattgtcagaaccatatctat

SEQ ID NO: 784229 - DNA, 120 bp, Artificial Sequence
  ENSG00000256660_29 (sequence is synthesized)
atagtcaatcatttcctcttttaacgtctgtcttgttctctttttacccaccacatatgtataactatgtgaaaaattatatttgtgcataataaaatgtgataactttttacaacagaa

SEQ ID NO: 784230 - DNA, 120 bp, Artificial Sequence
  ENSG00000256671_0 (sequence is synthesized)
acaaagactgtgtcactactttgtggaatgttattttagaacttccagaatgcctcagtaaatcctgactgccatgtaactgtgtactgtgctgctgagctcttaacatgaagcagcagc

SEQ ID NO: 784231 - DNA, 120 bp, Artificial Sequence
  ENSG00000256671_1 (sequence is synthesized)
agtgaccctggcgggccaggctgacgtgcgtgggaacagtgggagtgaccctggctgggaagcagggaggcctggatattgtttctcctggctctgtgtcctgccattctcatccctgtg

SEQ ID NO: 784232 - DNA, 120 bp, Artificial Sequence; identical to SEQ ID NO: 562272
  ENSG00000256671_2 (sequence is synthesized)

SEQ ID NO: 784233 - DNA, 120 bp, Artificial Sequence; identical to SEQ ID NO: 562273
  ENSG00000256671_3 (sequence is synthesized)

SEQ ID NO: 784234 - DNA, 120 bp, Artificial Sequence
  ENSG00000256671_4 (sequence is synthesized)
agcgctgcaagggcggctttgcgcccgctgagacgatcgtgaacagtaatggggagctgtaccatgagcagtgtttcgtgtgcgctcagtgcttccagcagttcccagaaggactcttct

SEQ ID NO: 784235 - DNA, 120 bp, Artificial Sequence; identical to SEQ ID NO: 562275
  ENSG00000256671_5 (sequence is synthesized)

SEQ ID NO: 784236 - DNA, 120 bp, Artificial Sequence
  ENSG00000256671_6 (sequence is synthesized)
gacctctgccaggaagttctggcagatatcgggtttgtcaagaatgctgggagacacctgtgtcgcccctgtcataatcgtgagaaagccagaggccttgggaaatacatctgccagaaa

SEQ ID NO: 784237 - DNA, 120 bp, Artificial Sequence
  ENSG00000256671_7 (sequence is synthesized)
tgccatgctatcatcgatgagcagcctctgatattcaagaacgacccctaccatccagaccatttcaactgcgccaactgcgggaaggatctgactgccgatgcacaggagctgaaaggg

SEQ ID NO: 784238 - DNA, 120 bp, Artificial Sequence
  ENSG00000256671_8 (sequence is synthesized)
gagctatactgcctgccatgccatgataaaatgggggtccccatctgtggcgcttgccgacggcccatcgaagggcgtgtggtgaacgccatgggcaagcagtggcatgtggagcatttt

SEQ ID NO: 784239 - DNA, 120 bp, Artificial Sequence
  ENSG00000256671_9 (sequence is synthesized)
gtttgtgccaagtgtgagaaaccctttcttggacatcgccattatgagaggaaaggcctggcgtattgtgaaactcactataaccagctatttggtgatgtttgcttccactgcaatcgt

SEQ ID NO: 784240 - DNA, 120 bp, Artificial Sequence
  ENSG00000256671_10 (sequence is synthesized)
gttatagaaggtgatgtggtctctgctcttaataaggcctggtgcgtgaactgctttgcctgttctacctgcaacactaaattaacactcaaggataagtttgttgaaattgacctaaag

SEQ ID NO: 784241 - DNA, 120 bp, Artificial Sequence
  ENSG00000256671_11 (sequence is synthesized)
ccagtctgcaaacactgttatgagaaaatgccagaagaatttaagaggcgacttgccaaacgggagagagaagcaaaggataaggacaagcagaaaaagaaaaagccagtctgtttgtaa

SEQ ID NO: 784242 - DNA, 120 bp, Artificial Sequence
  ENSG00000256671_12 (sequence is synthesized)
gagaattatttgatttcttatttcctctttctgttcaggccttctgaaagtaaaggttcttcctttaactgttccctgttctttcttctattccttctttgtcctactcaaagggataag

SEQ ID NO: 784243 - DNA, 120 bp, Artificial Sequence
  ENSG00000256671_13 (sequence is synthesized)
ggtgctgagtcagagggaaaagctcagaacagccttgagcagcgaagaataaagcatgactcatctcgtcctgcccacccctcacactggactataaataccctccctgggtctgtgtgc

SEQ ID NO: 784244 - DNA, 120 bp, Artificial Sequence
  ENSG00000256671_14 (sequence is synthesized)
tgttattccaaaagatgcgatgaatacccagaactaggctattcatgggctgttgcccagttcaagctctattgggtcctgaggaagattactattttggctacattgtttatcattaaa

SEQ ID NO: 784245 - DNA, 120 bp, Artificial Sequence
  ENSG00000256671_15 (sequence is synthesized)
accagcccagggatgtgtaaacctgcatctggagaataagacatttctttttggttaaatgatattagagaaaaaaaaaactatccaaggctgctaacaaataatcttcactttcaatta

SEQ ID NO: 784246 - DNA, 120 bp, Artificial Sequence
  ENSG00000256671_16 (sequence is synthesized)
tatccagcaataagttgttctccagaaaagaaagcttggaaacttacccagtttgccttccatttgggacatgactgatgtgcttcagtctttgtataataaatgcatcttcgccactct

SEQ ID NO: 784247 - DNA, 120 bp, Artificial Sequence
  ENSG00000256671_17 (sequence is synthesized)
ctttcctgaggactcctccttcatgttcagtttcatgatgaaagactgaagtgccacatgcatgccaggtatttgatagctgtgaggtcagaggtggcatctctatggcccatatgggca

SEQ ID NO: 784248 - DNA, 120 bp, Artificial Sequence
  ENSG00000256683_0 (sequence is synthesized)
actccagaagtaggagcagtttacggaagtgtaacgttgaggcccttcttgtgtatctggagaaaatagaggttctgactcctcaggagcaaaaaacataacctgaagagggaggaagtg

SEQ ID NO: 784249 - DNA, 120 bp, Artificial Sequence
  ENSG00000256683_1 (sequence is synthesized)
gatttggggttcaccatttcttggggcacacttgattgaaaactgagacttctgaagagaaggccagaagatacaaagacagaccatcccagttgaatgctgtcttccaagaacagaaga

SEQ ID NO: 784250 - DNA, 120 bp, Artificial Sequence
  ENSG00000256683_2 (sequence is synthesized)
aaatgatccaggcccaggaatccataacactggaggatgtggctgtggacttcacttgggaggagtggcaactcctgggcgctgctcagaaggacctgtaccgggatgtgatgttggaga

SEQ ID NO: 784251 - DNA, 120 bp, Artificial Sequence
  ENSG00000256683_3 (sequence is synthesized)
actacagcaacctggtggcagtggggtatcaagccagcaaaccggatgcactcttcaagttggaacaaggagaacaactgtggacaattgaagatggaatccacagtggagcctgttcag

SEQ ID NO: 784252 - DNA, 120 bp, Artificial Sequence
  ENSG00000256683_4 (sequence is synthesized)
acatatggaaagttgatcatgtgctggagcgcttgcagagtgaaagcctggtgaacagaaggaaaccatgtcatgaacatgatgcatttgaaaatattgttcattgcagcaaaagtcagt

SEQ ID NO: 784253 - DNA, 120 bp, Artificial Sequence
  ENSG00000256683_5 (sequence is synthesized)
ttctgttagggcaaaatcatgatatatttgacttacgtggaaaaagtttgaaatccaatttaactttagttaaccagagcaaaggctatgaaataaagaactctgttgagtttactggaa

SEQ ID NO: 784254 - DNA, 120 bp, Artificial Sequence
  ENSG00000256683_6 (sequence is synthesized)
atggggactcctttcttcatgctaaccatgaacgacttcatactgcaattaaattccctgcaagtcaaaaactcatcagcactaagtcccaattcatcagtcccaagcatcagaaaacac

SEQ ID NO: 784255 - DNA, 120 bp, Artificial Sequence
  ENSG00000256683_7 (sequence is synthesized)
gaaaattagagaagcatcatgtgtgcagtgaatgtgggaaagccttcatcaagaagtcttggctaactgatcaccaggtaatgcatacaggagagaaaccccacagatgtagtctatgtg

SEQ ID NO: 784256 - DNA, 120 bp, Artificial Sequence
  ENSG00000256683_8 (sequence is synthesized)
agaaagccttctccagaaagttcatgcttactgaacatcagcgaactcatacaggagaaaaaccttatgaatgccctgaatgtggcaaagcctttctcaagaaatcacggctcaacatac

SEQ ID NO: 784257 - DNA, 120 bp, Artificial Sequence
  ENSG00000256683_9 (sequence is synthesized)
tcattgtacaccagcgaattcatacaggtgagaaaccttatatatgcaatgaatgtggaaaaggcttcattcagaagacgtgtctcatagcacatcagagatttcacacaggaaagacgc

SEQ ID NO: 784258 - DNA, 120 bp, Artificial Sequence
  ENSG00000256683_10 (sequence is synthesized)
cctttgtgtgcagtgaatgtggaaaatcctgttctcagaaatcaggtctcattaaacatcaaagaattcacacaggagagaaaccctttgaatgtagtgaatgtgggaaagcctttagca

SEQ ID NO: 784259 - DNA, 120 bp, Artificial Sequence
  ENSG00000256683_11 (sequence is synthesized)
caaagcaaaagctcattgtccatcaaaggactcatacaggagagagaccctatggctgtaacgagtgtgggaaagcgtttgcgtatatgtcgtgtctggttaagcataagagaatacaca

SEQ ID NO: 784260 - DNA, 120 bp, Artificial Sequence
  ENSG00000256683_12 (sequence is synthesized)
caagggagaaacaagaggcagccaaggtggaaaatcctcctgcagagaggcacagctcattacacaccagtgatgtcatgcaggagaaaaactctgctaacggggcgactacacaagtgc

SEQ ID NO: 784261 - DNA, 120 bp, Artificial Sequence
  ENSG00000256683_13 (sequence is synthesized)
cttctgtggcccctcagacatcattaaacatcagcggcctcctcgcaaacaggaacgtagtccttgtgggacagccagtggtcagatgtgcagcctcaggagataacagaggatttgcac

SEQ ID NO: 784262 - DNA, 120 bp, Artificial Sequence
  ENSG00000256683_14 (sequence is synthesized)
aggacagaaaccttgtgaatgcagtgaatgtggttgtgccttccgtgatcaattatgtcttattttatgttacagaaaacccataggaagaaaactcagatctatgtggaaaagggttga

SEQ ID NO: 784263 - DNA, 120 bp, Artificial Sequence
  ENSG00000256683_15 (sequence is synthesized)
gcaaaaatttgtagttcattatgtggccgaaaagcatacactgagagaacatgtataaggctgagatagcctgataaactcatcctattaaaatgtatgctgtgatacacaggcaaattt

SEQ ID NO: 784264 - DNA, 120 bp, Artificial Sequence
  ENSG00000256683_16 (sequence is synthesized)
gatgttaacctaagcacatacacagcaattgctcgactgtgtcaattaaatgagtaaaggaagcccaagtacttttaagtggaggaaatgaagtactgtgaatttttaaaacagatgaga

SEQ ID NO: 784265 - DNA, 120 bp, Artificial Sequence
  ENSG00000256683_17 (sequence is synthesized)
taattggtgtcgggagtgttgcagtgactgaaaagcttcataaggggcagttggtgggaaagggctaatactgtaatggtggaatgtgggacacatatgtgtcaattcagtttccttaga

SEQ ID NO: 784266 - DNA, 120 bp, Artificial Sequence
  ENSG00000256683_18 (sequence is synthesized)
ccagtgccagtgtggaggattaattgaaaaccaggaccataaactttcagaactttgtattatgcagagggatctgtgaaactagtcaatttgtttcattaaacaaatattttaaaatta

SEQ ID NO: 784267 - DNA, 120 bp, Artificial Sequence
  ENSG00000256683_19 (sequence is synthesized)
acatagtttttggcaggaagactggggagcgccggggtataggcatttgggaggtacctggtgggagtctgtgatccccctgtctgtggtccgcgtgcctttggtgtgagtacagtgact

SEQ ID NO: 784268 - DNA, 120 bp, Artificial Sequence
  ENSG00000256683_20 (sequence is synthesized)
ggagaaaatagaggggaacccctatcagaaagactgctgtcacattttaatgcctctctagacctgataatttaaagggagtcacattcctcagataaaagattcatttctttctcattt

SEQ ID NO: 784269 - DNA, 120 bp, Artificial Sequence
  ENSG00000256683_21 (sequence is synthesized)
gagcagtttacggaagtgtaacgttgaggcccttcttgtgtatctggagaaaatagagagtcttgctctcgtcgcccaggctggagtgtagtggcgtgcttggctcaactgcaacctctg

SEQ ID NO: 784270 - DNA, 120 bp, Artificial Sequence
  ENSG00000256683_22 (sequence is synthesized)
gttttattctttcctttgttccataatagatttgtagaagcctataaacatcaatttcactaatataaaaagtataaatttcaaaaagcaggatctggagagaagtaagcttagttttta

SEQ ID NO: 784271 - DNA, 120 bp, Artificial Sequence
  ENSG00000256683_23 (sequence is synthesized)
aactcaatatcatgcaaaatagtaggataaggaatataatgttcatagcattaacactaaattatgaattttgtgacaccatgcatggctggaggatcctgtggattatattagctgtca

SEQ ID NO: 784272 - DNA, 120 bp, Artificial Sequence
  ENSG00000256683_24 (sequence is synthesized)
gcttgcatctaatatctctgacagccaatgtcacaagaaaatcataatttacatggtatgtcctgtttttgaagataaaacagattacttcctgggggttgccattatttcatggcactt

SEQ ID NO: 784273 - DNA, 120 bp, Artificial Sequence
  ENSG00000256683_25 (sequence is synthesized)
tggtctcaggaaatttcttcagtggttcttcctagagttgatgtggtggatggtgtccagaatagcagccttctcataaattcagatgcaggtttcctgtggctgtttcttgaaggactc

SEQ ID NO: 784274 - DNA, 120 bp, Artificial Sequence
  ENSG00000256683_26 (sequence is synthesized)
cagggaccaacacaagttaatttcagccttgtggcagtctggatttaacttggaataaaacctagacatcctgggaatatggcaggattccaggactttcaaatggttctcaatgaacag

SEQ ID NO: 784275 - DNA, 120 bp, Artificial Sequence
  ENSG00000256683_27 (sequence is synthesized)
atagctgaactggtgtttgaatatagatttggagacagggagttgaaagtgatattgtctgaacaggacttggattggagtttacagatttcctttagactttcaccttgtagaaaatgc

SEQ ID NO: 784276 - DNA, 120 bp, Artificial Sequence
  ENSG00000256683_28 (sequence is synthesized)
caagtccttattgtatagtaaataattgaacaaagggagttttggcctttgtgttcaagctaatggagggtgagctctgggcttctggaatatcttgctaatggtagtgtctttgtttgc

SEQ ID NO: 784277 - DNA, 120 bp, Artificial Sequence
  ENSG00000256683_29 (sequence is synthesized)
ttgggtcctttggccactggacagcctaaaaatacgaactatgatagatctgtgatctatgataggccagaaacttccagaactagaggctaaagttaaaacctgacttctgggagggtg

SEQ ID NO: 784278 - DNA, 120 bp, Artificial Sequence
  ENSG00000256683_30 (sequence is synthesized)
tggacctaagatcagccacataggtcatctgtgattgtgtcccagtaaagtaagaaagtacacatatcaaaaaataaatttcggctgggcgcggtggctcatggctgtaatccagcactt

SEQ ID NO: 784279 - DNA, 120 bp, Artificial Sequence
  ENSG00000256683_31 (sequence is synthesized)
ctccttgctgattgtctcttttctaaaactaatctgcctaagagttcaccatctcctgaggctggtgctatggtgggtctcatttcctacctgccttcacagtccttccacggaaacgtc

SEQ ID NO: 784280 - DNA, 120 bp, Artificial Sequence; identical to SEQ ID NO: 767961
  ENSG00000256713_0 (sequence is synthesized)

SEQ ID NO: 784281 - DNA, 120 bp, Artificial Sequence; identical to SEQ ID NO: 767962
  ENSG00000256713_1 (sequence is synthesized)

SEQ ID NO: 784282 - DNA, 120 bp, Artificial Sequence; identical to SEQ ID NO: 767963
  ENSG00000256713_2 (sequence is synthesized)

SEQ ID NO: 784283 - DNA, 120 bp, Artificial Sequence; identical to SEQ ID NO: 767964
  ENSG00000256713_3 (sequence is synthesized)

SEQ ID NO: 784284 - DNA, 120 bp, Artificial Sequence; identical to SEQ ID NO: 767965
  ENSG00000256713_4 (sequence is synthesized)

SEQ ID NO: 784285 - DNA, 120 bp, Artificial Sequence; identical to SEQ ID NO: 767966
  ENSG00000256713_5 (sequence is synthesized)

SEQ ID NO: 784286 - DNA, 120 bp, Artificial Sequence
  ENSG00000256713_6 (sequence is synthesized)
gggcctggtttctcaggacctcttctctgtctacctcagcgccgatgacaagagtggcagcgtggtgatctttggtggcattgactcttcttactacactggaagtctgaactgggtgcc

SEQ ID NO: 784287 - DNA, 120 bp, Artificial Sequence
  ENSG00000256713_7 (sequence is synthesized)
tgttaccgtcgagggttactggcagatcaccgtggacagcatcaccatgaacggagagaccatcgcctgtgctgagggctgccaggccattgttgacaccggcacctctctgctgaccgg

SEQ ID NO: 784288 - DNA, 120 bp, Artificial Sequence
  ENSG00000256713_8 (sequence is synthesized)
cccaaccagccccattgccaacatccagagcgacatcggagccagcgagaactcagatggcgacatggtggtcagctgctcagccatcagcagcctgcccgacatcgtcttcaccatcaa

SEQ ID NO: 784289 - DNA, 120 bp, Artificial Sequence
  ENSG00000256713_9 (sequence is synthesized)
tggagtccagtaccccgtgccacccagtgcctacatcctgcagagcgaggggagctgcatcagtggcttccagggcatgaacgtccccaccgaatctggagagctttggatcctgggtga

SEQ ID NO: 784290 - DNA, 120 bp, Artificial Sequence
  ENSG00000256713_10 (sequence is synthesized)
tgtcttcatccgccagtactttaccgtcttcgacagggcaaacaaccaggtcggcctggcccctgtggcttaagcctaagtctcttcagccacctcccaggaagatctggcctccgtcct

SEQ ID NO: 784291 - DNA, 120 bp, Artificial Sequence
  ENSG00000256713_11 (sequence is synthesized)
atgcccactttagatgtatctaattctcctgactgttcttcccaggggagtgtgaaggtcttggccctgttccctgtcctaccaataacgtagaataaaaacataacccactgaaacagg

SEQ ID NO: 784292 - DNA, 120 bp, Artificial Sequence
  ENSG00000256713_12 (sequence is synthesized)
gtttttgttccctgcctcatgcctgactgatcatcttgcccttctgccaacataacttatcttgccagctaggccgggagctccctgcagcctggaactgtgaggctgtcttgtttcgct

SEQ ID NO: 784293 - DNA, 120 bp, Artificial Sequence
  ENSG00000256713_13 (sequence is synthesized)
tggcgtttcccatgcctggcagagggtaggcacttgggaaatatttgtagggtaaatgaatgcgggatgaatgagtgcgtgaacgagaggaacagaaatttcacgcattggccaatggat

SEQ ID NO: 784294 - DNA, 120 bp, Artificial Sequence
  ENSG00000256713_14 (sequence is synthesized)
gggtggggaaggaatgtctgggctcacctcctggttcctccttggagagatgaacccctgagggctcagggagcttaacttgcttcttaccctcagcatcaccatgaacggagagaccat

SEQ ID NO: 784295 - DNA, 120 bp, Artificial Sequence
  ENSG00000256713_15 (sequence is synthesized)
gcctgggctctgtggctccaggcagtgacccagagtctgccccctagatgtcagtggcccagggcaggcaggaaagctcacagtcagagttcattcattcattcgttcactcgttcatgc

SEQ ID NO: 784296 - DNA, 120 bp, Artificial Sequence
  ENSG00000256713_16 (sequence is synthesized)
aatgttaatttctctgagcgcctcattctatttcagggcctgtgctgggctcagggggagacagcagtgagcaaactcatagcctaggagacaaacacagtcatcaaggggtctcgcaaa

SEQ ID NO: 784297 - DNA, 120 bp, Artificial Sequence; identical to SEQ ID NO: 767998
  ENSG00000256713_17 (sequence is synthesized)

SEQ ID NO: 784298 - DNA, 120 bp, Artificial Sequence
  ENSG00000256713_18 (sequence is synthesized)
cattcaaactataaggcctgtgttcttccaaacgtagttccaccactcccccgctgtgtgaccttgggcaggtggcctcacctccctcaggctcagtgtcctcatggtaagtggaaacaa

SEQ ID NO: 784299 - DNA, 120 bp, Artificial Sequence
  ENSG00000256713_19 (sequence is synthesized)
cagtgacggtgcccactgcatgggccctggcctaagaggaaaagaaaccacattggtcacaccccaggacagccctggaaagtgcccaatcaacggtcgctctgaggaggcaacagcaga

SEQ ID NO: 784300 - DNA, 120 bp, Artificial Sequence; identical to SEQ ID NO: 767999
  ENSG00000256713_20 (sequence is synthesized)

SEQ ID NO: 784301 - DNA, 120 bp, Artificial Sequence; identical to SEQ ID NO: 768000
  ENSG00000256713_21 (sequence is synthesized)

SEQ ID NO: 784302 - DNA, 120 bp, Artificial Sequence
  ENSG00000256762_0 (sequence is synthesized)
gcatgtgtctgctgctccctagtctgggccatgagtgagggtggaggccaagtctcatgcatttttgcagcccccacaagactgtgcaggtggccggccctcattgaatgcggggttaat

SEQ ID NO: 784303 - DNA, 120 bp, Artificial Sequence
  ENSG00000256762_1 (sequence is synthesized)
ccctgagttcatctgaggttggcttggaaggtgtgggcaccatttggcccagttcttacagctctgaagagagcagcaggaatggggctgagcagggaagacaactttccattgaaggcc

SEQ ID NO: 784304 - DNA, 120 bp, Artificial Sequence
  ENSG00000256762_2 (sequence is synthesized)
cctttcagggccagaactgtccctcccaccctgcagctgccctgcctctgcccatgaggggtgagagtcaggcgacctcatgccaagtgtagaaaggggcagatgggagccccaggttat

SEQ ID NO: 784305 - DNA, 120 bp, Artificial Sequence
  ENSG00000256771_0 (sequence is synthesized)
gtttatcctcagtgttctgtgtcctgtgcttatagaggcccgtcctctgtggccgtgtgacctgcaagtattgggagagccacagctaaaccccgggacccctggaagcctagaaatggg

SEQ ID NO: 784306 - DNA, 89 bp, Artificial Sequence
  ENSG00000256771_1 (sequence is synthesized)
ggaatttatatagggatgtgatgttagagaactacagaaacttggtcttccttggtattgttgtctctaagccagacctggttacctgt

SEQ ID NO: 784307 - DNA, 120 bp, Artificial Sequence
  ENSG00000256771_2 (sequence is synthesized)
ccttggtattgttgtctctaagccagacctggttacctgtctggagcaaggaaaaaaacctttaactatggaaagacatgagatgattgccaaacccccagttatgagttctcattttgc

SEQ ID NO: 784308 - DNA, 120 bp, Artificial Sequence
  ENSG00000256771_3 (sequence is synthesized)
ccaagacctttggccagagaacatacaaaattctttccaaatagggatgctgagaagatatgaagaatgcagacatgacaatttacagttaaaaaaaggctgtaaaagcgtgggtgagca

SEQ ID NO: 784309 - DNA, 120 bp, Artificial Sequence
  ENSG00000256771_4 (sequence is synthesized)
taaggtgcacaaaggaggttataatggacttaaccaatgtttgacaactacccagaaagaaatatttcaatgtgataaatatggaaaagtctttcataagttttcaaattcaaacacata

SEQ ID NO: 784310 - DNA, 120 bp, Artificial Sequence
  ENSG00000256771_5 (sequence is synthesized)
caaattcaaacacatataagacaagacatactggaataaatcttttcaaatgtataatatgtggcaaagcttttaaacggtcctcaacccttactacacataagaaaattcatactggag

SEQ ID NO: 784311 - DNA, 120 bp, Artificial Sequence
  ENSG00000256771_6 (sequence is synthesized)
tgaagaatgtggcaaagcttttaaccaatctgcaaaccttactacacataagagaattcataccggagagaaaccctacagatgtgaagaatgtggcaaagcctttaagcagtcctcaaa

SEQ ID NO: 784312 - DNA, 60 bp, Artificial Sequence
  ENSG00000256771_7 (sequence is synthesized)
ccgatccacagaccttactacacataagatagttcatactggagagaaaccctacaaatg

SEQ ID NO: 784313 - DNA, 120 bp, Artificial Sequence
  ENSG00000256771_8 (sequence is synthesized)
aatgtgaagaatgtggcaaagcctttaagcacccctcacacgttaccacacataagaaaattcatactagagggaaaccctacaactgtgaagaatgtggcaaatcctttaagcactgct

SEQ ID NO: 784314 - DNA, 79 bp, Artificial Sequence
  ENSG00000256771_9 (sequence is synthesized)
ggaaaccctacaactgtgaagaatgtggcaaatcctttaagcactgctctaaccttactatacataagagaattcatac

SEQ ID NO: 784315 - DNA, 120 bp, Artificial Sequence
  ENSG00000256771_10 (sequence is synthesized)
actacacataagatacttcatactggagagaaaccctacagatgtagagaatgtggcaaagcttttaaccattccacaacccttttttcacatgagaaaattcatactggagagaaaccc

SEQ ID NO: 784316 - DNA, 80 bp, Artificial Sequence
  ENSG00000256771_11 (sequence is synthesized)
tactggagagaaaccctacaaatgtgatgaatgtggcaaaacctttacctggccctcaatcctctccaaacataaaagaa

SEQ ID NO: 784317 - DNA, 120 bp, Artificial Sequence
  ENSG00000256771_12 (sequence is synthesized)
tgaagaatgtggcaaagcttttaactggtcctcagaccttaataaacataagaaaattcatattgaacgaaaaccctacatagtgaagaatgtgacagatcttttaaatgttcctccact

SEQ ID NO: 784318 - DNA, 87 bp, Artificial Sequence
  ENSG00000256771_13 (sequence is synthesized)
aacataagaaaattcatattgaacgaaaaccctacatagtgaagaatgtgacagatcttttaaatgttcctccacttttaattatga

SEQ ID NO: 784319 - DNA, 120 bp, Artificial Sequence
  ENSG00000256771_14 (sequence is synthesized)
ctttttaaggaagttctcaacccttattacacataattcataccaaacagaagccctacaagtgtgaagaatgtggcaaaacctataaacctataacaagttctcaattccttttttttt

SEQ ID NO: 784320 - DNA, 85 bp, Artificial Sequence
  ENSG00000256771_15 (sequence is synthesized)
ttttgagatggagtttcactcttgtcaccgaggctggagtgcaatgacatgatctccgttcactgcaatctctgcctcctgggtt

SEQ ID NO: 784321 - DNA, 120 bp, Artificial Sequence
  ENSG00000256771_16 (sequence is synthesized)
tacaggcgtgagccaccatgcctggctacaagttcttaattcttaagagacaccatgcctggctacaagttcttaattcttaagagacatggcgataattcatgctgaagaggaaatctg

SEQ ID NO: 784322 - DNA, 120 bp, Artificial Sequence
  ENSG00000256771_17 (sequence is synthesized)
ctgaagaggaaatctggaaacctgaaagatgcgacattgcttttaccaacacctccacatttcctatacataaaaataaattatactagtgtaataccctagaaatgtataaaatgtgac

SEQ ID NO: 784323 - DNA, 120 bp, Artificial Sequence
  ENSG00000256771_18 (sequence is synthesized)
aaagcctttatatgattgtcatacatgattgtaggtgatagaagtcatactgccaaaactcctgtaagtgtgaagaatgtggcaaaatattttattagtgcttataccttatttcacagg

SEQ ID NO: 784324 - DNA, 120 bp, Artificial Sequence
  ENSG00000256771_19 (sequence is synthesized)
aaagctcttatccttgagaaaaattgtgcaaatacaaagaatatggaaaaaccattaatgcctactcacatcttactgaacagaagaaggttcatagttaataaagcattaaaagtgcaa

SEQ ID NO: 784325 - DNA, 120 bp, Artificial Sequence
  ENSG00000256771_20 (sequence is synthesized)
ttactgtcaaaaaatctttcagaaaatagaagtctttaaagtgaagaatatttattctgaagacagccattacaaatataaagggggttgtagtgcctttacttgtgtcacagatcttag

SEQ ID NO: 784326 - DNA, 120 bp, Artificial Sequence
  ENSG00000256771_21 (sequence is synthesized)
tgcacacatgtagtactagaggaaaaccctgaagcagttgctcaagctttgtttcagggaatcaagggaatttatattgagaatagtactgcaaatgtaatgaatggaaagacttttctt

SEQ ID NO: 784327 - DNA, 120 bp, Artificial Sequence
  ENSG00000256771_22 (sequence is synthesized)
ttccaaaaatgacagcttagaaaacaccagagggtttataccaaaatatatttttgcagatgcagtaaatatcaaaaaatatttaattcaaaattgattctatgtaaatatcagagaatt

SEQ ID NO: 784328 - DNA, 120 bp, Artificial Sequence
  ENSG00000256771_23 (sequence is synthesized)
ttccatagaataattaaggcactgacacttcagacattacactaaatcagaatgttcagtataaaaactaatccacagctacagctgttagataaattatttctatataattttttaaaa

SEQ ID NO: 784329 - DNA, 120 bp, Artificial Sequence
  ENSG00000256771_24 (sequence is synthesized)
agtggatttttgaagcactgtaattacattgaaagtatacttgttttcttgaaaaaatttttttgaaaagtgaataatgatataatacagctttcacattgctttatgctattttattcc

SEQ ID NO: 784330 - DNA, 120 bp, Artificial Sequence
  ENSG00000256771_25 (sequence is synthesized)
tattatattcacatgtgaaagcatgtgatcaattgttgctgcattagagatattagagattgttttttattagttgggcattatgtatgaccttttctataaaagagtaaggacattaaa

SEQ ID NO: 784331 - DNA, 120 bp, Artificial Sequence
  ENSG00000256771_26 (sequence is synthesized)
atgtaagatgcatgatgaaaatataagtggagaggctctttgtagttaactgatattaagtaatgtgtaaggtgggggttcatgttctcatttctataatcctagccaatgacttaatgt

SEQ ID NO: 784332 - DNA, 120 bp, Artificial Sequence
  ENSG00000256771_27 (sequence is synthesized)
tgatgctttgaatgtcttttggatggtctaacctacattaacatgtatgcggaacatcttaaaactttttttcaaaaatcataatgaattattttattaataagcaaagataaaaaataa

SEQ ID NO: 784333 - DNA, 120 bp, Artificial Sequence
  ENSG00000256797_0 (sequence is synthesized)
agttttcttttagtaccttgtgccaaagagacatatccaaggttgagattagtttccattttctttgtactattttctggataataagacattagacatttgaagagatggagaatgaag

SEQ ID NO: 784334 - DNA, 120 bp, Artificial Sequence
  ENSG00000256797_1 (sequence is synthesized)
atgggtatatgacgctgagtttcaagaatcgttgtaaatcgaagcagaaatctaaagatttctccctatatccacaatattattgtcttctgctcatatttggatgcattgtgatcctta

SEQ ID NO: 784335 - DNA, 120 bp, Artificial Sequence
  ENSG00000256797_2 (sequence is synthesized)
tattcattatgacagggattgacctgaagttctggcataaaaaaatggatttctcccagaatgtaaacgtcagcagtctatcaggacacaattacttgtgcccaaatgactggctgttga

SEQ ID NO: 784336 - DNA, 120 bp, Artificial Sequence
  ENSG00000256797_3 (sequence is synthesized)
tgttactggttttcaacttcttttaaaacgtggaaagagagtcaacgtgattgtacacagctacaggcacatttactggtgattcaaaatttggatgagctggagttcatacagaacagt

SEQ ID NO: 784337 - DNA, 120 bp, Artificial Sequence
  ENSG00000256797_4 (sequence is synthesized)
ttaaaacctggacattttggttggattggactatatgttacattccaagggaacctatggatgtggatagatgaacactttttagttccagaattgttttcagtgattggaccaactgat

SEQ ID NO: 784338 - DNA, 120 bp, Artificial Sequence
  ENSG00000256797_5 (sequence is synthesized)
gacaggagctgtgccgttatcacaggaaactgggtgtattctgaagactgtagctccacatttaagggcatttgccagagagatgcgatcttgacgcacaatggaaccagtggtgtgtaa

SEQ ID NO: 784339 - DNA, 120 bp, Artificial Sequence
  ENSG00000256806_0 (sequence is synthesized)
gttttagccttcgaaggaccatggtgcttccacgtcatcgtgttgtggcgctcccggctatggcagtaccgtagttttcctctcttctgcctgcggtgaccattgggctgtagggtgccc

SEQ ID NO: 784340 - DNA, 120 bp, Artificial Sequence
  ENSG00000256806_1 (sequence is synthesized)
cgaggcctccctggccccctcacgccggcagaatggcctcagcccgaggggccaagcagtcttcgccccgggtggggaccacccgctacacagagacgtccacggtccgcgtggagacct

SEQ ID NO: 784341 - DNA, 120 bp, Artificial Sequence
  ENSG00000256806_2 (sequence is synthesized)
cgtcccaccgcgtggagacgtcgtcccggcgggtggagacctcccagcgccgcagcgaggggccctccctctccccctcggggaagcggctccctcgcatcctcgaggcgtcctcccggc

SEQ ID NO: 784342 - DNA, 120 bp, Artificial Sequence
  ENSG00000256806_3 (sequence is synthesized)
acgtggaatcctcctcgcagcgcacggaaacgacctcccgccacgtcagagcctcgtccctgagggtggagacgtctctgcactgcgcggagagcccgaccccgcgggccaagccggccg

SEQ ID NO: 784343 - DNA, 120 bp, Artificial Sequence
  ENSG00000256806_4 (sequence is synthesized)
cccgccagaacgaaaaaacggcccgatgagatgctgcttcccaaaggccaccaaggggccagggccctcagccaggacagaaaggcctccagttgccagccagccagccagctgccaggt

SEQ ID NO: 784344 - DNA, 120 bp, Artificial Sequence
  ENSG00000256806_5 (sequence is synthesized)
ggaccaatcattttcggtttcatggaaacaaaccataaatcaatgtaagaaacagccaagccgcagtttctgaacacagccaacgtttactgaccgtcctgcgtcttggaccagcctact

SEQ ID NO: 784345 - DNA, 120 bp, Artificial Sequence
  ENSG00000256806_6 (sequence is synthesized)
tttgacccagtgaactattttcacttgaagccagcacagaaggttttcaggcccaggatgctgtctaaatcgggttgatggacaaagagaggctgtttgagcctctgagccaggtgagtt

SEQ ID NO: 784346 - DNA, 120 bp, Artificial Sequence
  ENSG00000256806_7 (sequence is synthesized)
aggaacagagaccaaactgaaataatgacctgtggaatgattccatgcctgctaaaaactcgagggacaaggaacagactcataaattattaattggcctttgtttatgtttcaaagtaa

SEQ ID NO: 784347 - DNA, 120 bp, Artificial Sequence
  ENSG00000256806_8 (sequence is synthesized)
atggtcgttttctttatgctaagtctttgtacctggcacccccatccatacacttttttaaggtaggttagatgtggttaaaaatgacagtaaacccaccagcaagcaaaaataatctta

SEQ ID NO: 784348 - DNA, 120 bp, Artificial Sequence
  ENSG00000256806_9 (sequence is synthesized)
gaaagtgagaggaggtcactgaaacctggcctgaggtttgaagaagatggagaagagttatatttattgagaaccggctctgtgccaggcactagatgttcctccacttacgatggggtt

SEQ ID NO: 784349 - DNA, 120 bp, Artificial Sequence
  ENSG00000256806_10 (sequence is synthesized)
acctcccgttgaaactattgtaagttgaaaatatggtaatttgaaaatgcacttaatacccctaacctactaaacatcatggcttagcctagcctaccttaaacatgctcagaacaccta

SEQ ID NO: 784350 - DNA, 120 bp, Artificial Sequence
  ENSG00000256806_11 (sequence is synthesized)
aagttgagcaaaatcatctaacagaaagcctgttttataataaaatgttgaatatctcatgtaatttattgcatactgtactaaaagtgaaaaagaatggttgtaagagtacttaaagta

SEQ ID NO: 784351 - DNA, 120 bp, Artificial Sequence
  ENSG00000256806_12 (sequence is synthesized)
ctatttctactgaatgtcacttttgtaccattgtaaagtcgaaaaatcataagtcaaaccatcttaagttgggaactgtctgtattctgggaacttgggctatagcagtaaaaaaggcaa

SEQ ID NO: 784352 - DNA, 120 bp, Artificial Sequence
  ENSG00000256806_13 (sequence is synthesized)
agtcccagctctagtggagcttacactctggtgaaaaggcagacaagcaatgatgaaacaagacaattttctattgtgattagcactatgaaggaaatacatgggtaatgtgatagagaa

SEQ ID NO: 784353 - DNA, 120 bp, Artificial Sequence
  ENSG00000256806_14 (sequence is synthesized)
gagataactagtggattcaacagggacaggaaggcctggcacccagcaggtgggcagggcgtaactaactgttcattcatccacctccctgggctccccacactgcagaaaaccagagac

SEQ ID NO: 784354 - DNA, 120 bp, Artificial Sequence
  ENSG00000256806_15 (sequence is synthesized)
aagtcagcagcacagtggagctttccgcgggagacagagcatttaatgagagcaagagctggacagtgtggtcaggaatcgtcccacccaaggaaccagacacatactcggtccttgatg

SEQ ID NO: 784355 - DNA, 120 bp, Artificial Sequence
  ENSG00000256806_16 (sequence is synthesized)
gggtttcctgaggctctcatactttctcctgccctggaaaatgccatccaggagctcatctctttgctactgcctctcttccagagcagcacaagaaggaaataaaatggacttgcgggg

SEQ ID NO: 784356 - DNA, 120 bp, Artificial Sequence
  ENSG00000256806_17 (sequence is synthesized)
gcccagggatggaagggtggagaaacgccaccctcttgacgaagaagagggctctgggcagcctgtggctggagaagttacctcggatcctttagccagagcaaatccgccccctagtag

SEQ ID NO: 784357 - DNA, 120 bp, Artificial Sequence
  ENSG00000256806_18 (sequence is synthesized)
gtagcagcacgatgccccagggcactttctcctgggttaccttccaatccagcaggggagggggataaaatggagttttcctttctgggaagaaaaagaaacacacacacacacacacac

SEQ ID NO: 784358 - DNA, 120 bp, Artificial Sequence
  ENSG00000256812_0 (sequence is synthesized)
acttgaactccatttcatcttttttcataccatctctaagattgctgccgcatttgcttgttaaactgaaagcatgtttcttgcaaaggctctattggaaggagcagatcgaggtcttgg

SEQ ID NO: 784359 - DNA, 120 bp, Artificial Sequence
  ENSG00000256812_1 (sequence is synthesized)
agaagctcttggaggcctctttggaggaggtggtcagagaagagaaggaggaggaagaaatattggagggatagttggaggaattgtgaattttatcagtgaggctgcagcagctcagta

SEQ ID NO: 784360 - DNA, 120 bp, Artificial Sequence
  ENSG00000256812_2 (sequence is synthesized)
tactccagaaccgcctcccactcagcagcatttcaccagtgtggaggcctcagaaagtgaggaagttaggcgatttcggcaacaatttacacagctggctggaccagacatggaggtggg

SEQ ID NO: 784361 - DNA, 120 bp, Artificial Sequence
  ENSG00000256812_3 (sequence is synthesized)
tgccactgatctgatgaatattctcaacaaagtcctttctaagcacaaagatcttaagactgacggttttagtcttgacacctgccggagcattgtgtctgtcatggacagtgacacgac

SEQ ID NO: 784362 - DNA, 120 bp, Artificial Sequence
  ENSG00000256812_4 (sequence is synthesized)
tcaagaaatggcagtgtgtttataagcagtatgacagggaccattctgggtctctgggaagttctcagctgcggggagctctgcaggccgcaggcttccagctaaatgaacaactttacc

SEQ ID NO: 784363 - DNA, 120 bp, Artificial Sequence
  ENSG00000256812_5 (sequence is synthesized)
aaatgattgtccgccggtatgctaatgaagatggagatatggattttaacaatttcatcagctgcttggtccgcctggatgccatgtttcgtgccttcaagtctctggatagagatagag

SEQ ID NO: 784364 - DNA, 120 bp, Artificial Sequence
  ENSG00000256812_6 (sequence is synthesized)
atggcctgattcaagtgtctatcaaagaatggctgcagttgaccatgtattcctgaagtgggaactgagaagtcaagatcctccctggaggacaggactgaaaaccttgccaagctgtac

SEQ ID NO: 784365 - DNA, 120 bp, Artificial Sequence
  ENSG00000256812_7 (sequence is synthesized)
acagttgctgataccctgtgcaacagctctcatttcctggcaagctctttcacaaccctacatatttctgatcatgtgctgccttttactgctgaattaaaacagatatttcacgaaaaa

SEQ ID NO: 784366 - DNA, 120 bp, Artificial Sequence
  ENSG00000256870_0 (sequence is synthesized)
gaacaaaacctgcccagagcgctccctgtgtagattcgctggaagcagctggaggctccagttctcatctgctcaggtgtccccggcgccttggcgaactcggccactccagttcctcac

SEQ ID NO: 784367 - DNA, 120 bp, Artificial Sequence
  ENSG00000256870_1 (sequence is synthesized)
gtggtgagcactcagggcagcgggtcgattttccgaggtcccatacctgggtttgaggggcgcggctcgcagcggcgggtgcaggggcgactgccagccctcaccccgcctcggggtgcg

SEQ ID NO: 784368 - DNA, 120 bp, Artificial Sequence
  ENSG00000256870_2 (sequence is synthesized)
ttcggaggccgacacctggaggacgcctccagtccccgcgggacgccacgcctgcgcgccagggatccgggataagaagtgcgcgccgggctccggctgcgcgccgcggggccaccagtt

SEQ ID NO: 784369 - DNA, 120 bp, Artificial Sequence
  ENSG00000256870_3 (sequence is synthesized)
tgcgcgcagggctcaggcgaccgtgcggccatggacacgccacggggcatcggcaccttcgtggtgtgggactacgtggtgttcgcgggcatgctggtcatctcggccgccatcggcatc

SEQ ID NO: 784370 - DNA, 120 bp, Artificial Sequence
  ENSG00000256870_4 (sequence is synthesized)
tactacgccttcgctgggggcggccagcagacctccaaggacttcctgatgggcggccgcagaatgaccgcagtgcccgtggcgctgtccctcaccgctagcttcatgtcagccgtcact

SEQ ID NO: 784371 - DNA, 120 bp, Artificial Sequence
  ENSG00000256870_5 (sequence is synthesized)
gtcctgggcaccccctccgaggtctaccgttttggggccatttttagcatctttgccttcacctacttctttgtggtggtcatcagcgcggaggtcttcctcccggtgttctacaaactg

SEQ ID NO: 784372 - DNA, 120 bp, Artificial Sequence
  ENSG00000256870_6 (sequence is synthesized)
ggaattaccagcacctacgagtatttagaacttcgatttaacaaatgtgttcgtctctgtggaacagtcctcttcattgttcaaacaattctgtatactggaattgttatttatgcccct

SEQ ID NO: 784373 - DNA, 120 bp, Artificial Sequence
  ENSG00000256870_7 (sequence is synthesized)
gccctggctttgaatcaagtcacaggatttgatctgtggggcgcggtagtggcaacgggggtggtctgcacattctactgcacactgggtggtcttaaagcagttatctggacagatgtt

SEQ ID NO: 784374 - DNA, 120 bp, Artificial Sequence
  ENSG00000256870_8 (sequence is synthesized)
tttcaagttgggatcatggtggctggatttgcatccgtgattatacaggctgtggtgatgcaaggtggaatcagcactattttaaatgatgcctatgatggtggaagattaaatttctgg

SEQ ID NO: 784375 - DNA, 120 bp, Artificial Sequence
  ENSG00000256870_9 (sequence is synthesized)
aattttaatcctaaccctttgcaaagacacaccttctggacaattattataggagggaccttcacatggaccagcatctacggtgtcaaccaatcccaggtgcagagatatatttcttgt

SEQ ID NO: 784376 - DNA, 120 bp, Artificial Sequence
  ENSG00000256870_10 (sequence is synthesized)
aaaagcagattccaggcaaaactgtctctctacatcaatcttgtgggactctgggcaatcctcacatgctcagtgttttgtgggctcgccctatattccaggtaccatgactgtgatcct

SEQ ID NO: 784377 - DNA, 120 bp, Artificial Sequence
  ENSG00000256870_11 (sequence is synthesized)
tggacagccaagaaagtgtctgcaccagaccagctcatgccttatttggtactggacattctgcaagattatccaggacttcctggactttttgtggcctgtgcttacagtgggacatta

SEQ ID NO: 784378 - DNA, 120 bp, Artificial Sequence
  ENSG00000256870_12 (sequence is synthesized)
agcacagtgtcctccagtattaatgccttagcagcagtaactgtggaagatctaatcaaaccttacttcagatcgctctcagaaaggtctctgtcttggatttcccaaggaatgagtgtg

SEQ ID NO: 784379 - DNA, 120 bp, Artificial Sequence
  ENSG00000256870_13 (sequence is synthesized)
gtgtatggagccctgtgtattggaatggctgcgctggcgtcacttatgggagctttgttgcaggcagcactcagcgtatttggtatggttggtggaccacttatgggcctgttcgctttg

SEQ ID NO: 784380 - DNA, 120 bp, Artificial Sequence
  ENSG00000256870_14 (sequence is synthesized)
ggcattttggttccctttgccaactcaattggagcacttgttggtctgatggctggatttgccatttctctatgggttggaattggagctcaaatatatcctccacttcctgagagaaca

SEQ ID NO: 784381 - DNA, 120 bp, Artificial Sequence
  ENSG00000256870_15 (sequence is synthesized)
ttgccattgcaccttgatatccaaggctgtaacagcacctacaatgagacaaatttgatgacaaccacagaaatgccatttactactagtgtttttcaaatatacaatgttcaaaggact

SEQ ID NO: 784382 - DNA, 120 bp, Artificial Sequence
  ENSG00000256870_16 (sequence is synthesized)
ttggaactttggtaacattattagtggggatacttgtcagtttatcaacaggaggaagaaaacagaacttagaccccagatacatactaaccaaagaggactttttatccaattttgata

SEQ ID NO: 784383 - DNA, 120 bp, Artificial Sequence
  ENSG00000256870_17 (sequence is synthesized)
tttttaagaaaaagaagcatgttttgagctataaatcacatccagtggaagatggtggaactgataatcctgctttcaaccacattgaattgaactcagatcagagtggcaagagcaatg

SEQ ID NO: 784384 - DNA, 120 bp, Artificial Sequence
  ENSG00000256870_18 (sequence is synthesized)
ggactcgtttgtgaagctgctctgatactagatatccttaaatgatgtttcaattttatatgttttctaagataattggatcaggttttctttgtgtgtgtgtgtgtgttgtatcatgag

SEQ ID NO: 784385 - DNA, 120 bp, Artificial Sequence
  ENSG00000256870_19 (sequence is synthesized)
tgtttgggggataagtttttgttaaaacaaagtctggactatcttcatttactacatcattaattgatgttactctggagtttagaattctggcattgacatttccctctctttccttta

SEQ ID NO: 784386 - DNA, 120 bp, Artificial Sequence
  ENSG00000256870_20 (sequence is synthesized)
tttcgatgaagctataattgtgaaaattgtaactacatagatgctgaaaggctaatacacacatatgcacatgtatttgattgtcaaaggtatattcttaaatttgggtattattgaaaa

SEQ ID NO: 784387 - DNA, 120 bp, Artificial Sequence
  ENSG00000256870_21 (sequence is synthesized)
tattttccatgccttggtgctagcatataagtttggaagtttgccaacatcacaattcatcttgaaaagagcttttttccctcctaccacatacaccattcttagggagcaatgaggtaa

SEQ ID NO: 784388 - DNA, 120 bp, Artificial Sequence
  ENSG00000256870_22 (sequence is synthesized)
caggtctgtgttgtctagatctttgctttttatccccctatcagtccagggcatatactaacctgcaaactgattctgaatcaggaaggtggtaatcaataagtattctggctgggaaag

SEQ ID NO: 784389 - DNA, 120 bp, Artificial Sequence
  ENSG00000256870_23 (sequence is synthesized)
accgtgggcccaatgatcaaagtcttcttggtgctgttcattaattcttgtgccttttggcttgttttctagagtttctgggctttggctgctgatactgcctttcttagactgtaattt

SEQ ID NO: 784390 - DNA, 120 bp, Artificial Sequence
  ENSG00000256870_24 (sequence is synthesized)
ttatctgcatgcccagtttctgacctatcaacttgggttttattgtgcactctaactgagcttgtcttcataattttctgtttattgccctgggcttggatatgtctcaagacactcatg

SEQ ID NO: 784391 - DNA, 120 bp, Artificial Sequence
  ENSG00000256870_25 (sequence is synthesized)
tgaatcatgccaccccaaatcctggcttatcaagtcccagactataaattatgaactcccattagcttggtactaacatatacttgatgtaggtatttatggacttgatgatccaagaat

SEQ ID NO: 784392 - DNA, 120 bp, Artificial Sequence
  ENSG00000256870_26 (sequence is synthesized)
attatattcttcaaaatggttaagctccatggagttagatgactacacttaatgctattaagttgaacttttgaatgtcaactaatttgcaatcaattaaagatacatatgcctagaaat

SEQ ID NO: 784393 - DNA, 120 bp, Artificial Sequence
  ENSG00000256870_27 (sequence is synthesized)
tttgaaatttcggtatatttatccagttaaagggctaaattatataagcaaacactactttttttaaaacgtctggactcaaaaaatgctttgttccatgttttaaaatttttaagtagc

SEQ ID NO: 784394 - DNA, 120 bp, Artificial Sequence
  ENSG00000256870_28 (sequence is synthesized)
agtctcaaagttgcttagctgtttattttgctatgttcctagctaagagtttggttataggagttcatcaataacttattttttgtacagttcccacattagatactgtttaaaagttct

SEQ ID NO: 784395 - DNA, 120 bp, Artificial Sequence
  ENSG00000256870_29 (sequence is synthesized)
tttttaaactcaattttttttagaaacataagagaaatatttagatacatacaaatgtttttatgattaaataattttatgcttattttctgatacgtgttatttaggtaatcatgccct

SEQ ID NO: 784396 - DNA, 120 bp, Artificial Sequence
  ENSG00000256870_30 (sequence is synthesized)
ccctgtacatttagaggttgctaactgacaatgttaagaaatttaaaaaaaaaaaaaagcctgggcatgatggctcatgcttgtaatctgaacatttgggaggctgaggcaggaagatcg

SEQ ID NO: 784397 - DNA, 89 bp, Artificial Sequence
  ENSG00000256870_31 (sequence is synthesized)
ctcatctcttagctaggcatgttgccacatacttgtagtcccagttattagggaagctgaggtgggaggatagcttaagcccaggattt

SEQ ID NO: 784398 - DNA, 120 bp, Artificial Sequence
  ENSG00000256870_32 (sequence is synthesized)
tagctaggcatgttgccacatacttgtagtcccagttattagggaagctgaggtgggaggatagcttaagcccaggatttcaaggctgcattgagctatgattacaccactgcactccag

SEQ ID NO: 784399 - DNA, 120 bp, Artificial Sequence
  ENSG00000256892_0 (sequence is synthesized)
tattatcaaactatcttaatcaaaccatttaccttaaataaaggtataggtgatagaaatttttagcctggcacaatagacttagtacagtaagggaaagatgaaagaactgtatcaagc

SEQ ID NO: 784400 - DNA, 120 bp, Artificial Sequence
  ENSG00000256892_1 (sequence is synthesized)
actgaaaagcaaagacaagcccttatgccttctgcataatgtattaaccagaaataactttacacagagaactatagccaagtcccccaaaaccagccaagctacccaagaacagctgaa

SEQ ID NO: 784401 - DNA, 120 bp, Artificial Sequence
  ENSG00000256892_2 (sequence is synthesized)
agagcacactcacctatgtggcaagatagtgggaagattcatgagtagaagtgacaaggctatggagcctggtgatagctggttgtccaagatagactcctagttcaactttaagcttat

SEQ ID NO: 784402 - DNA, 120 bp, Artificial Sequence
  ENSG00000256892_3 (sequence is synthesized)
acacagaattacttaacctccctgtaagtttaactgttagtctaaagagggacagctctttagaccctaggaaacaaccttcctacagaaaataaaaaatattaccaccacagttggccc

SEQ ID NO: 784403 - DNA, 120 bp, Artificial Sequence
  ENSG00000256892_4 (sequence is synthesized)
aaaagcagccaccaattaagaacatgtttaagttcaacatctatcttaaattctaatcactctactgaactcctaacatcacactggactaatctattacttaatagacacaataatgtt

SEQ ID NO: 784404 - DNA, 120 bp, Artificial Sequence
  ENSG00000256892_5 (sequence is synthesized)
agtataagtaacatgaagacattctccattgcataagcttacatcagaccagaataatccactgacagttaacagcctaatattaataaacaatataataaacaccctattatttacact

SEQ ID NO: 784405 - DNA, 120 bp, Artificial Sequence
  ENSG00000256892_6 (sequence is synthesized)
agcattaccagtatttgaggcactgcctgcccagtgacatttgttcaacagccacagtatcctgaccatgcaaaagtagcataatcacttgttccctaaatagggacttgtatgaatggc

SEQ ID NO: 784406 - DNA, 120 bp, Artificial Sequence
  ENSG00000256892_7 (sequence is synthesized)
cacaggagggttcggctgcctcttacttttaatcagggaaattgacctatccgtgaagaggcagatataaacaaataagatgagaagctccctatggagctttaattcattaatgcaaat

SEQ ID NO: 784407 - DNA, 120 bp, Artificial Sequence
  ENSG00000256892_8 (sequence is synthesized)
taaaactcaaacaagcctacaggctctagcctactattcttgcattaaaaattttggttggggtgaccttggagcataattcaacctctgaacaacctacactaagactgcactagtcta

SEQ ID NO: 784408 - DNA, 120 bp, Artificial Sequence
  ENSG00000256892_9 (sequence is synthesized)
agtgagttaatacatatggacccaataatttgatcaacagagtaaggtaccctagggataacagcacaatccattctacagttcatattgacaatagggtttatgaccttgatgttagat

SEQ ID NO: 784409 - DNA, 120 bp, Artificial Sequence
  ENSG00000256892_10 (sequence is synthesized)
caggacatcctaatggtgtaaccactgttaaggattcatttattcaatgattaaagtcaattaatgtgatctgagttcagactggagtaatccaggttggtttctatctatttaacattt

SEQ ID NO: 784410 - DNA, 120 bp, Artificial Sequence
  ENSG00000256892_11 (sequence is synthesized)
ctccaagtatgaaaggacaagagaaatagagtccctttcataaagtgccctcacttcatagaggatgctatctcaatctaaaaaatcatcaccaccctacccaagaacagggtttgttaa

SEQ ID NO: 784411 - DNA, 120 bp, Artificial Sequence
  ENSG00000256977_0 (sequence is synthesized)
atggccttctcaggccgagcgcgcccctgcattatcccagagaacgaagaaatcccccgagcagcccttaacactgtccacgaggccaatgggaccgaggacgagagggctgtttccaaa

SEQ ID NO: 784412 - DNA, 120 bp, Artificial Sequence
  ENSG00000256977_1 (sequence is synthesized)
ctgcagcgcaggcacagtgacgtgaaagtctacaaggagttctgtgacttttatgcgaaattcaacatggccaacgccctggccagcgccacttgcgagcgctgcaagggcggctttgcg

SEQ ID NO: 784413 - DNA, 120 bp, Artificial Sequence
  ENSG00000256977_2 (sequence is synthesized)
cccgctgagacgatcgtgaacagtaatggggagctgtaccatgagcagtgtttcgtgtgcgctcagtgcttccagcagttcccagaaggactcttctatgagtttgaaggaagaaagtac

SEQ ID NO: 784414 - DNA, 120 bp, Artificial Sequence
  ENSG00000256977_3 (sequence is synthesized)
tgtgaacatgactttcagatgctctttgccccttgctgtcatcagtgtggtgaattcatcattggccgagttatcaaagccatgaataacagctggcatccggagtgcttccgctgtgac

SEQ ID NO: 784415 - DNA, 120 bp, Artificial Sequence; identical to SEQ ID NO: 784237
  ENSG00000256977_4 (sequence is synthesized)

SEQ ID NO: 784416 - DNA, 120 bp, Artificial Sequence; identical to SEQ ID NO: 784238
  ENSG00000256977_5 (sequence is synthesized)

SEQ ID NO: 784417 - DNA, 120 bp, Artificial Sequence; identical to SEQ ID NO: 784239
  ENSG00000256977_6 (sequence is synthesized)

SEQ ID NO: 784418 - DNA, 120 bp, Artificial Sequence; identical to SEQ ID NO: 784240
  ENSG00000256977_7 (sequence is synthesized)

SEQ ID NO: 784419 - DNA, 120 bp, Artificial Sequence; identical to SEQ ID NO: 784241
  ENSG00000256977_8 (sequence is synthesized)

SEQ ID NO: 784420 - DNA, 120 bp, Artificial Sequence; identical to SEQ ID NO: 784242
  ENSG00000256977_9 (sequence is synthesized)

SEQ ID NO: 784421 - DNA, 120 bp, Artificial Sequence
  ENSG00000256977_10 (sequence is synthesized)
gcagcatgaccgcttcctgagctcctgctgccgcatttaggccctgtcagctgtgaggccactggtgctgagtcagagggaaaagctcagaacagccttgagcagcgaagaataaagcat

SEQ ID NO: 784422 - DNA, 120 bp, Artificial Sequence
  ENSG00000256977_11 (sequence is synthesized)
ctgttattccaaaagatgcgatgaatacccagaactaggctattcatgggctgttgcccagttcaagctctattgggtcctgaggaagattactattttggctacattgtttatcattaa

SEQ ID NO: 784423 - DNA, 120 bp, Artificial Sequence
  ENSG00000256977_12 (sequence is synthesized)
aaccagcccagggatgtgtaaacctgcatctggagaataagacatttctttttggttaaatgatattagagaaaaaaaaaactatccaaggctgctaacaaataatcttcactttcaatt

SEQ ID NO: 784424 - DNA, 120 bp, Artificial Sequence
  ENSG00000256977_13 (sequence is synthesized)
atatccagcaataagttgttctccagaaaagaaagcttggaaacttacccagtttgccttccatttgggacatgactgatgtgcttcagtctttgtataataaatgcatcttcgccactc

SEQ ID NO: 784425 - DNA, 66 bp, Artificial Sequence; identical to SEQ ID NO: 562323
  ENSG00000256977_14 (sequence is synthesized)

SEQ ID NO: 784426 - DNA, 120 bp, Artificial Sequence
  ENSG00000256977_15 (sequence is synthesized)
atgaagcagcagcagtgaccctggcgggccaggctgacgtgcgtgggaacagtgggagtgaccctggctgggaagcagggaggcctggatattgtttctcctggctctgtgtcctgccat

SEQ ID NO: 784427 - DNA, 120 bp, Artificial Sequence
  ENSG00000256977_16 (sequence is synthesized)
actcctccttcatgttcagtttcatgatgaaagactgaagtgccacatgcatgccaggtatttgatagctgtgaggtcagaggtggcatctctatggcccatatgggcagtggcgtgatt

SEQ ID NO: 784428 - DNA, 120 bp, Artificial Sequence
  ENSG00000256977_17 (sequence is synthesized)
cagtgtttatagcatagtccactgggactgccgctctgacaaagactgtgtcactactttgtggaatgttattttagaacttccagaatgcctcagtaaatcctgactgccatgtaactg

SEQ ID NO: 784429 - DNA, 120 bp, Artificial Sequence
  ENSG00000256980_0 (sequence is synthesized)
agagcctaggcccttcctcgcttttccaagtcttttgccaaccagtttgttagactttcccctattctgaatcaggtgggagcacagcatggccgtgggaacgagtgctctcagcaagga

SEQ ID NO: 784430 - DNA, 120 bp, Artificial Sequence
  ENSG00000256980_1 (sequence is synthesized)
gccgtggtggaccctgcccgaaaactttcattctccaatggtgttccacatggaagaggaccaggaggagctcatcttcggacttgatgacacgtaccttcgctgcattgagctgcacag

SEQ ID NO: 784431 - DNA, 120 bp, Artificial Sequence
  ENSG00000256980_2 (sequence is synthesized)
aagcagtggctgctgctcatgttccattgcgtggggagccaggactccaagtgtcacgctcgaggtctgaagatgctagagcgtgtccgaagccagcccctgaccaatgatgacctggtc

SEQ ID NO: 784432 - DNA, 120 bp, Artificial Sequence
  ENSG00000256980_3 (sequence is synthesized)
acctccgttagcctgccaccgtacaccggagactgatctcccctgggaagaggggatgagaggagaagtcttggcttcgcttttggtgagaaagacatgaaaaacactgaagaaagtttg

SEQ ID NO: 784433 - DNA, 120 bp, Artificial Sequence
  ENSG00000256980_4 (sequence is synthesized)
aatttgtggccagacctgcccctctcaggccttctaggcatgtgtctgagggaagtctcctgagtgttagaagtgttattggcaaagcaatccaataaaataagctacctatgatgcaaa

SEQ ID NO: 784434 - DNA, 120 bp, Artificial Sequence
  ENSG00000256980_5 (sequence is synthesized)
ggagccttcctgcacctccataccctcaaccccctgctccaaaattctttgaatttagagtgaagaaaaatttctgattccaggacatcagaaagccaagcacttatcagatgattaagt

SEQ ID NO: 784435 - DNA, 120 bp, Artificial Sequence
  ENSG00000256980_6 (sequence is synthesized)
ttgacttgaaagaattaagctcagagcagataattacttggaatgaattatcttgggaagacctccggggattggacatccaccctaaggtggatcaaggggcgggttgtttggattcca

SEQ ID NO: 784436 - DNA, 120 bp, Artificial Sequence
  ENSG00000257008_0 (sequence is synthesized)
catctccaggctccatctcttgaaccatggatcccagcgttgttagcaatgagtattatgatgttgcccatggagcaaaagatccagtgggtccccacttccctgcaggacatcactgct

SEQ ID NO: 784437 - DNA, 120 bp, Artificial Sequence
  ENSG00000257008_1 (sequence is synthesized)
gtcctgggtacagaagcatatactgaggaagacaaatcaatggtgtcccatgcacagaaaagccagcattcttgtctcagccattccaggtggctgaggtctccacaggtcacaggggga

SEQ ID NO: 784438 - DNA, 120 bp, Artificial Sequence
  ENSG00000257008_2 (sequence is synthesized)
agctgggacctccgaataaggccatccaaggactccagcagtttccgccaggctcagtgtctgcgtaaggatcctggggcaaacaaccacttggagagccaaggggtgagaggtacagct

SEQ ID NO: 784439 - DNA, 120 bp, Artificial Sequence
  ENSG00000257008_3 (sequence is synthesized)
ggcgatgctgacagggagctgcggggaccctcagaaaaagccacagctggccagccacgagtgaccctgctgcccacgccccacgtcagcgggctgagccaggagtttgaaagccactgg

SEQ ID NO: 784440 - DNA, 120 bp, Artificial Sequence
  ENSG00000257008_4 (sequence is synthesized)
ccagagatcgcagagaggtccccgtgtgtggctggcgtcatccctgtcatctactacagtgtcctgctgggcttggggctgcctgtcagcctcctgaccgcagtggccctggcgcgcctt

SEQ ID NO: 784441 - DNA, 120 bp, Artificial Sequence
  ENSG00000257008_5 (sequence is synthesized)
cgccaggtgccccaggctgtggtgcgcacggccaacatcctggagtttgctgccaaccacgcctcagtctggatcgccatcctgctcacggttgaccgctacactgccctgtgccacccc

SEQ ID NO: 784442 - DNA, 120 bp, Artificial Sequence
  ENSG00000257008_6 (sequence is synthesized)
ctgcaccatcgggccgcctcgtccccaggccggacccgccgggccattgctgctgtcctgagtgctgccctgttgaccggcatccccttctactggtggctggacatgtggagagacacc

SEQ ID NO: 784443 - DNA, 120 bp, Artificial Sequence
  ENSG00000257008_7 (sequence is synthesized)
gactcacccagaacactggacgaggtcctcaagtgggctcactgtctcactgtctatttcatcccttgtggcgtgttcctggtcaccaactcggccatcatccaccggctacggaggagg

SEQ ID NO: 784444 - DNA, 120 bp, Artificial Sequence
  ENSG00000257008_8 (sequence is synthesized)
ggccggagtgggctgcagccccgggtgggcaagagcacagccatcctcctgggcatcaccacactgttcaccctcctgtgggcgccccgggtcttcgtcatgctctaccacatgtacgtg

SEQ ID NO: 784445 - DNA, 120 bp, Artificial Sequence
  ENSG00000257008_9 (sequence is synthesized)
gcccctgtccaccgggactggagggtccacctggccttggatgtggccaatatggtggccatgctccacacggcagccaacttcggcctctactgctttgtcagcaagactttccgggcc

SEQ ID NO: 784446 - DNA, 120 bp, Artificial Sequence
  ENSG00000257008_10 (sequence is synthesized)
actgtccgacaggtcatccacgatgcctacctgccctgcactttggcatcacagccagagggcatggcggcgaagcctgtgatggagcctccgggactccccacaggggcagaagtgtag

SEQ ID NO: 784447 - DNA, 120 bp, Artificial Sequence
  ENSG00000257008_11 (sequence is synthesized)
gacagggagctgcggggaccctcagaaaaagccacaggtgacccaggactcagggccccagagcatggggcttgagggacgagagacagctggccagccacgagtgaccctgctgcccac

SEQ ID NO: 784448 - DNA, 120 bp, Artificial Sequence
  ENSG00000257017_0 (sequence is synthesized)
actggaaaagatagtgaccttaccagggccaaagtttgtagacacaggaattacgaaatggagaagggggagaagtgagctagtggcagcataaaaagaccagcagatgccccacagcac

SEQ ID NO: 784449 - DNA, 120 bp, Artificial Sequence
  ENSG00000257017_1 (sequence is synthesized)
tgctcttccagaggcaagaccaaccaagatgagtgccctgggagctgtcattgccctcctgctctggggacagctttttgcagtggactcaggcaatgatgtcacggatatcgcagatga

SEQ ID NO: 784450 - DNA, 120 bp, Artificial Sequence
  ENSG00000257017_2 (sequence is synthesized)
cggctgcccgaagccccccgagattgcacatggctatgtggagcactcggttcgctaccagtgtaagaactactacaaactgcgcacagaaggagatggagtatacaccttaaatgataa

SEQ ID NO: 784451 - DNA, 120 bp, Artificial Sequence
  ENSG00000257017_3 (sequence is synthesized)
gaagcagtggataaataaggctgttggagataaacttcctgaatgtgaagcagatgacggctgcccgaagccccccgagattgcacatggctatgtggagcactcggttcgctaccagtg

SEQ ID NO: 784452 - DNA, 120 bp, Artificial Sequence
  ENSG00000257017_4 (sequence is synthesized)
taagaactactacaaactgcgcacagaaggagatggagtgtacaccttaaacaatgagaagcagtggataaataaggctgttggagataaacttcctgaatgtgaagcagtatgtgggaa

SEQ ID NO: 784453 - DNA, 120 bp, Artificial Sequence
  ENSG00000257017_5 (sequence is synthesized)
gcccaagaatccggcaaacccagtgcagcggatcctgggtggacacctggatgccaaaggcagctttccctggcaggctaagatggtttcccaccataatctcaccacaggtgccacgct

SEQ ID NO: 784454 - DNA, 120 bp, Artificial Sequence
  ENSG00000257017_6 (sequence is synthesized)
ctctatgtggggaaaaagcagcttgtagagattgagaaggttgttctacaccctaactactcccaggtagatattgggctcatcaaactcaaacagaaggtgtctgttaatgagagagtg

SEQ ID NO: 784455 - DNA, 120 bp, Artificial Sequence
  ENSG00000257017_7 (sequence is synthesized)
atgcccatctgcctaccttcaaaggattatgcagaagtagggcgtgtgggttatgtttctggctgggggcgaaatgccaattttaaatttactgaccatctgaagtatgtcatgctgcct

SEQ ID NO: 784456 - DNA, 120 bp, Artificial Sequence
  ENSG00000257017_8 (sequence is synthesized)
gtggctgaccaagaccaatgcataaggcattatgaaggcagcacagtccccgaaaagaagacaccgaagagccctgtaggggtgcagcccatactgaatgaacacaccttctgtgctggc

SEQ ID NO: 784457 - DNA, 120 bp, Artificial Sequence
  ENSG00000257017_9 (sequence is synthesized)
atgtctaagtaccaagaagacacctgctatggcgatgcgggcagtgcctttgccgttcacgacctggaggaggacacctggtatgcgactgggatcttaagctttgataagagctgtgct

SEQ ID NO: 784458 - DNA, 120 bp, Artificial Sequence
  ENSG00000257017_10 (sequence is synthesized)
gtggctgagtatggtgtgtatgtgaaggtgacttccatccaggactgggttcagaagaccatagctgagaactaatgcaaggctggccggaagcccttgcctgaaagcaagatttcagcc

SEQ ID NO: 784459 - DNA, 120 bp, Artificial Sequence
  ENSG00000257017_11 (sequence is synthesized)
tggaagagggcaaagtggacgggagtggacaggagtggatgcgataagatgtggtttgaagctgatgggtgccagccctgcattgctgagtcaatcaataaagagctttcttttgaccca

SEQ ID NO: 784460 - DNA, 120 bp, Artificial Sequence
  ENSG00000257017_12 (sequence is synthesized)
aagaactactacaaactgcgcacagaaggagatggggaggcgatgccatgcagcctacctcatgtaaatctcagagtcacatttacatctccagcagatgtgggaaaagaaggaatgctg

SEQ ID NO: 784461 - DNA, 120 bp, Artificial Sequence
  ENSG00000257017_13 (sequence is synthesized)
taggtgatgactccctaagggtcaccaagggtcttgttcattagggcctgaagggcactggctgaatccattgtctacatcgcccacagattaggagagcctgtgcatacagagagcctg

SEQ ID NO: 784462 - DNA, 120 bp, Artificial Sequence
  ENSG00000257017_14 (sequence is synthesized)
ctagagagccctgggtctaaggagaagcaagctccagggagaacaagtcaaggaatgacataaaatcttaatccatggaagcctagcaggaggctggacatgggctggaactcctgcttc

SEQ ID NO: 784463 - DNA, 120 bp, Artificial Sequence
  ENSG00000257017_15 (sequence is synthesized)
tcgttattaggaggagctgttgctctctcctttcattctcagaacaagaggcaaaggcccagcctcttctgctcttactggtgtggaaatgccaacctgcctcgtattaactgcaccatc

SEQ ID NO: 784464 - DNA, 120 bp, Artificial Sequence
  ENSG00000257017_16 (sequence is synthesized)
tacaaaatctgagctccagccagtgctgctctagattcatctttctttagagagaatgaattattgtagcccctagccctttcaatgaatttcagggaattgtggaaattcctttattgg

SEQ ID NO: 784465 - DNA, 120 bp, Artificial Sequence
  ENSG00000257017_17 (sequence is synthesized)
gctcttccagaggcaagaccaaccaagatgaggtgggtccacagctttccctcctgcctttcctctggttctttatttcagtcttttttgcatacatcggtagagatgcagaaatagaac

SEQ ID NO: 784466 - DNA, 120 bp, Artificial Sequence
  ENSG00000257017_18 (sequence is synthesized)
aaagaaacgggcaaatgggctaaattatagtgaaccaaagggcttagtgtgttaaatcttctccttttctgcatccatagaagacagtgctgctgtctttcccaggagataagatttact

SEQ ID NO: 784467 - DNA, 120 bp, Artificial Sequence
  ENSG00000257017_19 (sequence is synthesized)
ctcaggagtgtctttttccttcaggttacatttttgactttatagggtatgtcatcagctcccgtggtaggcttcctggcatcctgagtatatttattagcagatattttcctctttaaa

SEQ ID NO: 784468 - DNA, 120 bp, Artificial Sequence
  ENSG00000257017_20 (sequence is synthesized)
aatgtacaataaggaagactaatagtaacacatttgaatgacacaattaattgactagtacctgggatacacactaatacctgggatacatctaattaaggcacttagatcttataaaaa

SEQ ID NO: 784469 - DNA, 82 bp, Artificial Sequence
  ENSG00000257017_21 (sequence is synthesized)
ctgggatacatctaattaaggcacttagatcttataaaaataaacactttttgaaatgttgaaataataagactagaaaagg

SEQ ID NO: 784470 - DNA, 60 bp, Artificial Sequence
  ENSG00000257017_22 (sequence is synthesized)
cccaggtagctgggactacaggcgtgcgccactacctcgatctcttgacctcgtgatctg

SEQ ID NO: 784471 - DNA, 67 bp, Artificial Sequence
  ENSG00000257017_23 (sequence is synthesized)
agaaactattttaatagaagcaagtagtgcccgaatggttggcatttgttagtgagatggtgaactg

SEQ ID NO: 784472 - DNA, 120 bp, Artificial Sequence
  ENSG00000257017_24 (sequence is synthesized)
tgcccgaatggttggcatttgttagtgagatggtgaactggcagacggcacctgtgggtcaatgcccatggccaccgtcctgcttttggacaccagttctcttccaggtaaccttctggc

SEQ ID NO: 784473 - DNA, 120 bp, Artificial Sequence
  ENSG00000257017_25 (sequence is synthesized)
attttggggtttcagataccatttcctaaaggtgaattattataaaatactagaaatacccacgtgtttaaaattatatatttaaggaaccttttattacggaaaatatcaagaagtaga

SEQ ID NO: 784474 - DNA, 120 bp, Artificial Sequence
  ENSG00000257017_26 (sequence is synthesized)
ggaatagcacagtaagcccaaagttcccatctctgagttatctacattttattaccactatctttgcggtgtctgagggaggtttctctttcctggagggctcctgtattattgccaatg

SEQ ID NO: 784475 - DNA, 120 bp, Artificial Sequence
  ENSG00000257017_27 (sequence is synthesized)
tactttcctgaatgcagccagaaactgagcccacccctccacctatgtgcctttctatccctctctgaagcttctgcagaattcccagcaggacagggcttgctggaagcttggtatgct

SEQ ID NO: 784476 - DNA, 120 bp, Artificial Sequence
  ENSG00000257017_28 (sequence is synthesized)
cagaagctgctaaagtgtgtatgggcaggtgtgggggcaatttcttggtcctagcacttccatatatcgactttcttttctggctgctaagtgggaggagtgtgtgtgtatgcatgtgtg

SEQ ID NO: 784477 - DNA, 120 bp, Artificial Sequence
  ENSG00000257017_29 (sequence is synthesized)
tgtgtggatgcatgcatgtgctgtgaagcagggagactagctttccactcctccttgtcttctctctgcagtgccctgggagctgtcattgccctcctgctctggggacagctttttgca

SEQ ID NO: 784478 - DNA, 120 bp, Artificial Sequence
  ENSG00000257017_30 (sequence is synthesized)
gtggactcaggcaatgatgtcacggatatcgcaggtcagtctttggttgggtaggagtgtgcatcccactctgaccctctcgggtctgcactctctctgagaacacccaattcccccttc

SEQ ID NO: 784479 - DNA, 120 bp, Artificial Sequence
  ENSG00000257017_31 (sequence is synthesized)
ttatctcgacctctgggctttcaggaccataaagaacattggggttcctgccagaaatgaggggagcttgcctttccattggcttctattcggggtggaaggagattgatgtgcagagca

SEQ ID NO: 784480 - DNA, 120 bp, Artificial Sequence
  ENSG00000257017_32 (sequence is synthesized)
gctcccgctcatctgacttttcacggttcactgggaacaatttccaaatagcaaactctctggcttctctctctttgcagatgacggctgcccgaagccccccgagattgcacatggcta

SEQ ID NO: 784481 - DNA, 120 bp, Artificial Sequence
  ENSG00000257017_33 (sequence is synthesized)
acaacccccttctctgacatttccatgatgggtggtgctgaggtgattcgccagaaagttcgttgctctccttggagccaggagatttagattctaataagcgttttgtcgccagtagcc

SEQ ID NO: 784482 - DNA, 120 bp, Artificial Sequence
  ENSG00000257017_34 (sequence is synthesized)
acttcctgaatgtgaagcaggtgggtgctgagcactgagcacttaagagagcaggcaggcgtccagcggggaacgtcctagaggcacagccttccagtgcggcttcctctgagcacacaa

SEQ ID NO: 784483 - DNA, 120 bp, Artificial Sequence
  ENSG00000257017_35 (sequence is synthesized)
cagaggcaaagacccagcctcttctgctcttactggtgtggaaatgccaacctgcctcgtattaactgcaccatctacaaaatctgagctccagccagtgctgctctagattcatctttc

SEQ ID NO: 784484 - DNA, 120 bp, Artificial Sequence
  ENSG00000257017_36 (sequence is synthesized)
catgtaaatctcagagtcacatttacatctccagcagatgtgggaaaagaaggaatgctgatgatgatgtcaccctcacctagtgagtcttgctgtcctggcactgctctaagggcttta

SEQ ID NO: 784485 - DNA, 120 bp, Artificial Sequence
  ENSG00000257017_37 (sequence is synthesized)
tacttatttgctcacttagtcctcacagtatccctctgaacagagtttattgttttcactttgctgataaggaaactgaggcacagacaggttgagtatcttgcccaaattcaggcagcc

SEQ ID NO: 784486 - DNA, 120 bp, Artificial Sequence
  ENSG00000257017_38 (sequence is synthesized)
tgtaagaggcagagtcaggatttgaaccctgagccctccctgtactgcttggctgtgaccgccatgaccacagtgtgttctgctgggcttaactggtgtccaggcacttggcttccagca

SEQ ID NO: 784487 - DNA, 120 bp, Artificial Sequence
  ENSG00000257017_39 (sequence is synthesized)
cagcactctttcccttcctccttctcatattctctctcctttctcccttcctgtctgcctcctttcttcttcttctttttaattcttctccttaaatgccttctcactctgctctgggtg

SEQ ID NO: 784488 - DNA, 120 bp, Artificial Sequence
  ENSG00000257057_0 (sequence is synthesized)
atgctgggctgcctgcgactgagctgagaaggaaaccgtgcccagggctctcggaagaccgctgcggcatgacaggcgaggaggcggtggtggtgaccgcagtggtggcgcccaaggcgg

SEQ ID NO: 784489 - DNA, 120 bp, Artificial Sequence
  ENSG00000257057_1 (sequence is synthesized)
gtcgcgaagaggagcagcctcctccgccagcagggctggggtgcggggcgcgcggggaacccggccgcggccccctagagcacggccagcagtggaagaaatttttatattgtgagccac

SEQ ID NO: 784490 - DNA, 120 bp, Artificial Sequence
  ENSG00000257057_2 (sequence is synthesized)
ctgcagtggccctggaagggatttggagcattaaaaggaatctgcctgtgggaggcttgaagccaggactgccgagcagaaacagtttattgccacaagccaagtactactccaggcacg

SEQ ID NO: 784491 - DNA, 120 bp, Artificial Sequence
  ENSG00000257057_3 (sequence is synthesized)
gaggactcagaagataagatgaattagattttccattaagaaggaacctctttctgctgatgtctgaagaacggagaagaaactcaagcttgtttcaggatttaagatgtgtgcaaaaaa

SEQ ID NO: 784492 - DNA, 120 bp, Artificial Sequence
  ENSG00000257057_4 (sequence is synthesized)
atgatagcctgtaattactattattggtattaatacctatctataaattaatccaaagtaatgaaagactattggtaatgttcagtaagtacctgaaaacaataaaggaaaatatactta

SEQ ID NO: 784493 - DNA, 80 bp, Artificial Sequence
  ENSG00000257093_0 (sequence is synthesized)
gcctcgcctagccatggtggagcagggagacgcggcgccgctgctgcgctgggccgagggccccgccgtctccctgccgc

SEQ ID NO: 784494 - DNA, 120 bp, Artificial Sequence
  ENSG00000257093_1 (sequence is synthesized)
ggagccgccccggaggcgggagcccgaggagccggccgccccggaggtgctgctgcagcccgggcgcctggagctgggcgacgtggaggaggaccaggtggtggccgtgttcgtggtcac

SEQ ID NO: 784495 - DNA, 120 bp, Artificial Sequence
  ENSG00000257093_2 (sequence is synthesized)
ggtggtggccgtgttcgtggtcaccttcgacccccgctcgggaaacatggtagaatggtgcttacctcaagatattgaccttgaaggtgttgagttcaagtctatggccagtgggtccca

SEQ ID NO: 784496 - DNA, 120 bp, Artificial Sequence
  ENSG00000257093_3 (sequence is synthesized)
taaaatccaatctgatttcatctatttccgaaaggggcccttcttcggcctggcctgctttgccaacatgcccgtggagagcgagctggaacgtggcgcgcggatgaagtctgtgggcat

SEQ ID NO: 784497 - DNA, 120 bp, Artificial Sequence
  ENSG00000257093_4 (sequence is synthesized)
cctctctccctcctacacactgctttaccgctacatgcacttcttggagaaccaggttcggcaccagttggagatgccaggacattactctcatctggctgccttctatgaggacaaaaa

SEQ ID NO: 784498 - DNA, 120 bp, Artificial Sequence
  ENSG00000257093_5 (sequence is synthesized)
gggggtgctccatgctggtcccggcagaggcagcagcctgccccctgtctactggctgccttccatccaccgatacatgtaccctgagatgaagatcacacacccagctggctgcatgtc

SEQ ID NO: 784499 - DNA, 120 bp, Artificial Sequence
  ENSG00000257093_6 (sequence is synthesized)
tcagtttataaagttctttggagaacagatcctcatcctctggaaatttgccttacttcgaaagcgcattttgatattttctcccccacctgtgggcgtggtgtgctatagagtgtactg

SEQ ID NO: 784500 - DNA, 120 bp, Artificial Sequence
  ENSG00000257093_7 (sequence is synthesized)
ctgctgctgcttggccaacgtttcactgcctggcatcgggggcaccattcctgagtccaaacctttcttctacgtgaacgtggctgacatcgagagcctggaggtagaggtgtcctatgt

SEQ ID NO: 784501 - DNA, 120 bp, Artificial Sequence
  ENSG00000257093_8 (sequence is synthesized)
ggcctgcaccacagagaagatattcgaggagaagcgggagctgtatgacgtctacgtggataaccagaatgtgaagacacaccacgaccacctgcagccgctgctgaagatcaacagtgc

SEQ ID NO: 784502 - DNA, 120 bp, Artificial Sequence
  ENSG00000257093_9 (sequence is synthesized)
tgacagggagaagtaccgccggctcaacgagcagaggcagatgctgttgtactcccaggaagtagaagaagactacaacccttgtgaagaggacctcttcgtgctgtttttcctagaaca

SEQ ID NO: 784503 - DNA, 120 bp, Artificial Sequence
  ENSG00000257093_10 (sequence is synthesized)
aaacaaccggatatttcagactttgttggaggtgtctgccagtcaagacaaaactctgacagcagagcatgcccggggcatgggcctagacccccaaggagaccggagctttctcctgga

SEQ ID NO: 784504 - DNA, 120 bp, Artificial Sequence
  ENSG00000257093_11 (sequence is synthesized)
cctgctggaggcctatggcattgatgtcatgctggttatcgacaacccctgttgcccgtaggaggagccaacaggactgggagccacttcacgtgggatgtcagcagcccggagttcacc

SEQ ID NO: 784505 - DNA, 120 bp, Artificial Sequence
  ENSG00000257093_12 (sequence is synthesized)
ccagggccccagagggcctcattttttattaagttgacacaaaggaatattgtttatactttccaacaaacataatttttgcaatttcctttctgcccttttccctagagataaggtgag

SEQ ID NO: 784506 - DNA, 120 bp, Artificial Sequence
  ENSG00000257093_13 (sequence is synthesized)
atcaccttggttttgtgtcctgccatgttaggatattggaatctgccactttctcccagagctgctggtcctctgggcttggtcatgggagttgtatcactaggagtaggctgagctctg

SEQ ID NO: 784507 - DNA, 120 bp, Artificial Sequence
  ENSG00000257093_14 (sequence is synthesized)
gaaacattgggatggactgttcagaaagtctgtgtggtctttgtcccttgatgtatttgagaataagacaaccacctgtcccctgtggccttagatgttcatctgcctaaaggcagaaac

SEQ ID NO: 784508 - DNA, 120 bp, Artificial Sequence
  ENSG00000257093_15 (sequence is synthesized)
tagaccagatgatcttttaaggtttttagtagttctaggagtctatagtcttgggatcaaatcccttttcttgttcattagggcaactttatgtcttctctgtttacttgagtagggacc

SEQ ID NO: 784509 - DNA, 120 bp, Artificial Sequence
  ENSG00000257093_16 (sequence is synthesized)
acaaagagggaaaaaaggatgtttctgacaccaaatatgagcttatcttatggtcagaatgaaagaggttgcttatcagtgagctgaaaactaaaattatagaatgaagcctggaaacct

SEQ ID NO: 784510 - DNA, 120 bp, Artificial Sequence
  ENSG00000257093_17 (sequence is synthesized)
tcctcaaagtaacttgatggtggccatgcaatgtaatgttcctctttgtctgaaccttcctcttcttgggatgaattggtgaattgctaagggccaatgctggccttggagcttgcaagc

SEQ ID NO: 784511 - DNA, 120 bp, Artificial Sequence
  ENSG00000257093_18 (sequence is synthesized)
aaattaattttccagtttagtctcttaagggttcaataatgctcttggagtaagttgggtatttttaaaggctgaagtttggactaccggaggatagagcaattgaagttcgagcaggat

SEQ ID NO: 784512 - DNA, 120 bp, Artificial Sequence
  ENSG00000257093_19 (sequence is synthesized)
ggagaagccactctaagtctcttcatctggacacgaattctctggaggcattagcagcagcacctctgggtcaacacagatttactggattccaaaatctagcaaggatctgagctggtt

SEQ ID NO: 784513 - DNA, 120 bp, Artificial Sequence
  ENSG00000257093_20 (sequence is synthesized)
aactcagagggtggagcatgatgctaacaagacggtttatcattttggacccctcacaaacacacttctctttagcagaggtgacattccttaggctaaataattggatccagggacata

SEQ ID NO: 784514 - DNA, 120 bp, Artificial Sequence
  ENSG00000257093_21 (sequence is synthesized)
acagatttgttgagagaaaatgtggcagtgccttcacccgggacagtggtcaggaagccctgagcatccctgatggatttatccatcctcttctgaagtgctctgctctaggctgggtcc

SEQ ID NO: 784515 - DNA, 120 bp, Artificial Sequence
  ENSG00000257093_22 (sequence is synthesized)
tgttgccacctgcctgttctctggttggcttttgcaggagggcagcttacgtgtttgtcaaccagttagaaagccagttcctgtgggtcgagtttaggcctttttggccatagttgagaa

SEQ ID NO: 784516 - DNA, 120 bp, Artificial Sequence
  ENSG00000257093_23 (sequence is synthesized)
ttttgacttgggatactgggttgttggtgacaaataatgtcttccttttcccccttcccgcctggctcggttatgggaatagccgtcagtgcatccatgtctgtgaccaacacccagcca

SEQ ID NO: 784517 - DNA, 120 bp, Artificial Sequence
  ENSG00000257093_24 (sequence is synthesized)
gactaatgtacacagcagggagaaataacattcaaatggtggttcacacatctcatctcaagataagattcttagggttcactgctttattcaaaagtgttttcactgtagctccttcat

SEQ ID NO: 784518 - DNA, 120 bp, Artificial Sequence
  ENSG00000257093_25 (sequence is synthesized)
atggaatatcaaaactgaagaaattcacatgtggaaatgcaaatagacattgattaatcaaggtagcatctttatgtaaatatataaataagtttgggcattgaaatgtaaactgtacag

SEQ ID NO: 784519 - DNA, 120 bp, Artificial Sequence
  ENSG00000257093_26 (sequence is synthesized)
ctaatagacttttctcctctgcaatgtgggttgctgtcatttcagtaatgtgtatgtttacaaaagaaaaaaaaatctgtgtttcgaggttgaagcctcaccttttattctcctttacat

SEQ ID NO: 784520 - DNA, 120 bp, Artificial Sequence
  ENSG00000257093_27 (sequence is synthesized)
gcaaccctctcttcttgcctctcaagggttgaggggtcctttctgtcaagtaatggttatttttcgtggtatcctgaggttcagggtgttttaagctgggggtaggtggttagaggcagg

SEQ ID NO: 784521 - DNA, 120 bp, Artificial Sequence
  ENSG00000257093_28 (sequence is synthesized)
agtagaagtgaaaggaaaggtctgattctcctagaggacacaagaagacctcctttttctggaattagggaatctgccggaaggagctgtttgaggcatttctgctctgagccttctata

SEQ ID NO: 784522 - DNA, 120 bp, Artificial Sequence
  ENSG00000257093_29 (sequence is synthesized)
tgcaaacactgcagttttaactgcaagctcagaagtgctggtgtaaacatagcagggtgagaatgaagttcctgttttttcctttgaatggtgagtcagggcttctgggttcccttaact

SEQ ID NO: 784523 - DNA, 120 bp, Artificial Sequence
  ENSG00000257093_30 (sequence is synthesized)
agtgccatgtttcaggtcataggggccttgggctcagctgaccccaatgcagaacttctccctttaagagagattccaataaattggtccttccctaccttgccagcttcttcataggac

SEQ ID NO: 784524 - DNA, 120 bp, Artificial Sequence
  ENSG00000257093_31 (sequence is synthesized)
cagaaatcttgtgcagagcctctgcttggctgaacagcgtgtgctttatctcttcagttacctttgccactgttgagcatcctcagagtatgtcttgcctgggctatgaagtggagcctg

SEQ ID NO: 784525 - DNA, 120 bp, Artificial Sequence
  ENSG00000257093_32 (sequence is synthesized)
tggcttcggaaatcacctttcgaagccttgctctatgccagattctgctccccaacatgacagattaacaggcacaacctaggatcctttgctaccagttctctactagggaattccaca

SEQ ID NO: 784526 - DNA, 120 bp, Artificial Sequence
  ENSG00000257093_33 (sequence is synthesized)
gtggcagcagaagctaggagccatgtggacctgcttttctgccagtcttgaaatattttctgagaaaccatctgcttttgttcagaagaaagtgctgaacatcgttcacagacttctagg

SEQ ID NO: 784527 - DNA, 120 bp, Artificial Sequence
  ENSG00000257093_34 (sequence is synthesized)
tctgtaagctctttaggggcgggcattatgatgaccaccggcctcctggaggagggttggatacctgtggtgtgacaccttctgccaccatctcctgccgggcctcagccctcgcctgcc

SEQ ID NO: 784528 - DNA, 120 bp, Artificial Sequence
  ENSG00000257093_35 (sequence is synthesized)
tgagcaggcctagttctcctgtgaagctgtcagcctgatctcatgccacactgtgaaatgaactatgtgccagtttggaaatgattgctgacctgagatgctggctgggctgccctgttg

SEQ ID NO: 784529 - DNA, 120 bp, Artificial Sequence
  ENSG00000257093_36 (sequence is synthesized)
ttcctgaataagtcagaagaagttccaggtgggagtggaattcaggtttggggctcgttggtatccatgcaaaatatgacaaaggcctgttcaagagggcattttcaattctgtaggctc

SEQ ID NO: 784530 - DNA, 120 bp, Artificial Sequence
  ENSG00000257093_37 (sequence is synthesized)
agcagatgatactgcccagcctttgggaaaatgtccagttggcccctggcttaggactctccacaaggagtttgaaatggtagggcttatcccctaccagactaaaagtatggcccaaat

SEQ ID NO: 784531 - DNA, 120 bp, Artificial Sequence
  ENSG00000257093_38 (sequence is synthesized)
tatgtgtttagaatttgcttggcctttaaacacgaaccattccctatgcctggtagagaccattccagtgtcagtgtcccacctgggacctgtacagtcctcagtaaattatgattgcaa

SEQ ID NO: 784532 - DNA, 120 bp, Artificial Sequence
  ENSG00000257093_39 (sequence is synthesized)
tgaattagaaggcttttgccttccatatccatcatccattatagcatctgtgcttccacctggttagggggagggaagctgaaatcattgatgtatcaatagaagtaatttagcttagga

SEQ ID NO: 784533 - DNA, 120 bp, Artificial Sequence
  ENSG00000257093_40 (sequence is synthesized)
acttgcatctataacttaccttgttttgttccactttaaagtcaagacaagaaagttaagatagcacacaggtgcacatgcttccagatgccacatgtgaacatttgttgatcatgtgac

SEQ ID NO: 784534 - DNA, 120 bp, Artificial Sequence
  ENSG00000257093_41 (sequence is synthesized)
taccgatgacactttagctagaagataaattaaatcttagctaaatcattgtttttccttctggtggctatgaggatgaatttgctctcagtcttgatgcactgaaagcccttcaaacac

SEQ ID NO: 784535 - DNA, 120 bp, Artificial Sequence
  ENSG00000257093_42 (sequence is synthesized)
agtaaaagatgaaatcactcatctttaaactgaggccttcagggaagcttttgtaaaggacagtaatgaattaggctttcagttttaggacatcaaccctccgagaaaaggcagaaaccc

SEQ ID NO: 784536 - DNA, 120 bp, Artificial Sequence
  ENSG00000257093_43 (sequence is synthesized)
gagggaccatttatttcccttcgaaactgtatagcccagggaatggattgagatgctttctccagaccctgtataggtcaaccttgcagaggtaaaggaggaggggcaggtggatgaata

SEQ ID NO: 784537 - DNA, 120 bp, Artificial Sequence
  ENSG00000257093_44 (sequence is synthesized)
aaataggataatgctcagcttggcagtggacttgccttagtgtgatgacaggtctaacatgggcaagacaattagaatggggaccaatatgccaggcatgggcttttatctccctagtag

SEQ ID NO: 784538 - DNA, 120 bp, Artificial Sequence
  ENSG00000257093_45 (sequence is synthesized)
atcccaagctagtaggcttggattctgccaaatggccagccctcctgtcttctccccgtaccttgtagttagaccgaggtgagaatcctgctgaccccagtcccatcccctctcatttca

SEQ ID NO: 784539 - DNA, 120 bp, Artificial Sequence
  ENSG00000257093_46 (sequence is synthesized)
ggaaaacccttttgtgattcaggtagggggagaggaggagttaagggctccgtttactcccaagtcatggatttttaatattccatttttatcactaatatacctctcttcctagaagct

SEQ ID NO: 784540 - DNA, 120 bp, Artificial Sequence
  ENSG00000257093_47 (sequence is synthesized)
actggagtattgagtgttgtgggaaaaggctaactgtgaattaagttaatgtttttcttataagaaatggaagtttatttttttattgatattactatgtgatgaactgagtatgcatat

SEQ ID NO: 784541 - DNA, 120 bp, Artificial Sequence
  ENSG00000257093_48 (sequence is synthesized)
actgaaatggaaggaaattttaaaactattattctagaagaaatgggcagttttgtaatttggtggtggctgagaccccatagaagttttactatgtaaataatttggagagtgaataag

SEQ ID NO: 784542 - DNA, 120 bp, Artificial Sequence
  ENSG00000257093_49 (sequence is synthesized)
gagattgtgctatgaaatcctgacagcgctctttaggaggcagacttgacagtcctaggaaggttgacataaaaataccaaccttcagtaaagctctagtacaaaaaagggtaaatgtca

SEQ ID NO: 784543 - DNA, 120 bp, Artificial Sequence
  ENSG00000257093_50 (sequence is synthesized)
tcattcttatttttaggcctctttcttgagagaggtgggagtgggaggtagtgttataactggcactttaatttgtttttggaactagaatttaggggcagttggatgaaattgcaaatt

SEQ ID NO: 784544 - DNA, 120 bp, Artificial Sequence
  ENSG00000257093_51 (sequence is synthesized)
tagaaggggaataagaattttctagtgctatataaagaaatgatgatggagacaaaagccttgctttcctctttttagaatttattttcgatttttagcatactgtggggcttttagagc

SEQ ID NO: 784545 - DNA, 120 bp, Artificial Sequence
  ENSG00000257093_52 (sequence is synthesized)
taatatgatctaaattcagaaaatttaattttcatagtaggccaggtgtgaattacttatgtttgctatagaatgcttatttagactaacaataaatttactttgctttctaaggccagt

SEQ ID NO: 784546 - DNA, 120 bp, Artificial Sequence
  ENSG00000257093_53 (sequence is synthesized)
cagcgaatgtggggatgaggcaggatgttttaaatgagccagagatgatccacaaagtgaacagtcgacacagaggtctttgagttggatggttgcaaatatattgacattagagtgaaa

SEQ ID NO: 784547 - DNA, 120 bp, Artificial Sequence
  ENSG00000257093_54 (sequence is synthesized)
actccttcctttgggtaaactaaagaaagataaagtatactaaaaaattttaagatggtgttatacaaaaaaaagtttgggtctaacgtgtccacaaagactgtcaagtgaagaatggtg

SEQ ID NO: 784548 - DNA, 120 bp, Artificial Sequence
  ENSG00000257093_55 (sequence is synthesized)
gagattcttggtgtttgagcagccaacctggatgagtgacttcagggacagagcagaggaaagcaaaatgaatttcctttatttacccaaaacttgttgactgaatttttgtataggtcc

SEQ ID NO: 784549 - DNA, 120 bp, Artificial Sequence
  ENSG00000257093_56 (sequence is synthesized)
gggaaaataagcctaaacaaatagttgtagccttagaaaaactgttttcccatttctttctgagttagaatcagcatagcctccctgtcgccttaaatgtaaaaatcctattttgattaa

SEQ ID NO: 784550 - DNA, 120 bp, Artificial Sequence
  ENSG00000257093_57 (sequence is synthesized)
taccccagcctaagagttatagcaatacgagagactgaatctatttttgtttcgggtctttacctcatagtatgaaattagtaagacactgcatagattttgccctgaatactggtgtgc

SEQ ID NO: 784551 - DNA, 120 bp, Artificial Sequence
  ENSG00000257093_58 (sequence is synthesized)
ccaggtatgccgtgctctctctctgtttccagtggtggtaattttaaggcctaaagaaagctggggttaatcctgaagctaaaagtaaatgtttcttgaattgattttgttctgtggtac

SEQ ID NO: 784552 - DNA, 120 bp, Artificial Sequence
  ENSG00000257093_59 (sequence is synthesized)
aaataacatctatgaatatcatatctgtatatatctgaaccaagttgtgtgcagagaggttgatataactatatttacagaaaatgatttttacaattaaagttcacattttaacatgaa

SEQ ID NO: 784553 - DNA, 120 bp, Artificial Sequence
  ENSG00000257103_0 (sequence is synthesized)
agcgggcgtgcggagcgggcgacagtggcgtgggatctgcctctctgcgagcagctgggagcggcggcggcggcgccatgagcgggggcaccccttacatcggcagcaagatcagcctca

SEQ ID NO: 784554 - DNA, 120 bp, Artificial Sequence
  ENSG00000257103_1 (sequence is synthesized)
tctccaaggcggagatccgctacgagggcatcctctacaccatcgacaccgaaaactccaccgtagcccttgccaaagttcgatcctttggtacagaagacagaccgacagatcgtccaa

SEQ ID NO: 784555 - DNA, 120 bp, Artificial Sequence
  ENSG00000257103_2 (sequence is synthesized)
taccacctcgagatgaagtctttgaatacattatattccgtgggagtgacattaaagaccttactgtttgtgagccaccaaaaccacagtgttctttgcctcaagacccagctattgttc

SEQ ID NO: 784556 - DNA, 120 bp, Artificial Sequence
  ENSG00000257103_3 (sequence is synthesized)
agtcctcactaggctcatcgacttcttcattccagtccatgggttcttatggacctttcggcaggatgcccacatacagtcagttcagtccgagttccttagttgggcagcagtttggtg

SEQ ID NO: 784557 - DNA, 120 bp, Artificial Sequence
  ENSG00000257103_4 (sequence is synthesized)
ctgttggtgttgctggaagctctttgacatcctttggaacagaaacatcaaacagtggtaccttaccccaaagtagtgcggttggttctgcctttacacaggatacaagatctctaaaaa

SEQ ID NO: 784558 - DNA, 120 bp, Artificial Sequence
  ENSG00000257103_5 (sequence is synthesized)
cacagttatctcaaggtcgctcaagccctcagttagaccctttgagaaaaagcccaaccatggaacaagcagtgcagaccgcctcagcccacttacctgctccagcagctgttgggagaa

SEQ ID NO: 784559 - DNA, 120 bp, Artificial Sequence
  ENSG00000257103_6 (sequence is synthesized)
ggagtcctgtatcaaccaggcctttgccatctgccagccaaaaggcaggagagaatcaggagcacaggcgagctgaagtacacaaagtttcaaggccagaaaatgagcaactcagaaatg

SEQ ID NO: 784560 - DNA, 120 bp, Artificial Sequence
  ENSG00000257103_7 (sequence is synthesized)
ataacaagagacaagtagctccaggtgctccttcagctccaaggagagggcgtgggggtcatcggggtggcaggggaagatttggtattcggcgagatgggccaatgaaatttgagaaag

SEQ ID NO: 784561 - DNA, 120 bp, Artificial Sequence
  ENSG00000257103_8 (sequence is synthesized)
actttgactttgaaagtgcaaatgcacaattcaacaaggaagagattgacagagagtttcataataaacttaaattaaaagaagataaacttgagaaacaggagaagcctgtaaatggtg

SEQ ID NO: 784562 - DNA, 120 bp, Artificial Sequence
  ENSG00000257103_9 (sequence is synthesized)
aagataaaggagactcaggagttgatacccaaaacagtgaaggaaatgccgatgaagaagatccacttggacctaattgctattatgacaaaactaaatccttctttgataatatttctt

SEQ ID NO: 784563 - DNA, 120 bp, Artificial Sequence
  ENSG00000257103_10 (sequence is synthesized)
gtgatgacaatagagaacggagaccaacctgggctgaagaaagaagattaaatgctgaaacatttggaatcccacttcgtccaaaccgtggccgtgggggatacagaggcagaggaggtc

SEQ ID NO: 784564 - DNA, 120 bp, Artificial Sequence
  ENSG00000257103_11 (sequence is synthesized)
ttggtttccgtggtggcagagggcgtggtggtggcagaggtggtaccttcactgcccctcgaggatttcgcggtggattcagaggaggtcgtgggggccgggagtttgcggattttgaat

SEQ ID NO: 784565 - DNA, 120 bp, Artificial Sequence
  ENSG00000257103_12 (sequence is synthesized)
ataggaaagacaacaaagttgctgcatagtctacaaacaagtctctgaaaataggtgaatttctagctcttcatggtcctgaacattgatttcagtctttgcaaagaatgaagaagtgaa

SEQ ID NO: 784566 - DNA, 120 bp, Artificial Sequence
  ENSG00000257103_13 (sequence is synthesized)
ttcgctgtacatttgtcaccagcactgggtttttgttttttgtttgtttttccgcttaatttcaaagataaaatgcagttacttttgggggtggaaggctcatcttaaaacatgagcatt

SEQ ID NO: 784567 - DNA, 120 bp, Artificial Sequence
  ENSG00000257103_14 (sequence is synthesized)
tcactgaaaggttttttttttttatcactaaattgtatttggcaattgcaagttgcctgcagatagggccgtgatactgtgttttgagccacagaaggttgtgtgtgtgtgtgtgtgtgt

SEQ ID NO: 784568 - DNA, 120 bp, Artificial Sequence
  ENSG00000257103_15 (sequence is synthesized)
gtgtctttttcctcctttcttttggggaatcctgtaatatgaggtagcttatttcgtcaattaattagggtgctggatggtagagaattttgtcagtcaactatgtacacacagtaaata

SEQ ID NO: 784569 - DNA, 120 bp, Artificial Sequence
  ENSG00000257103_16 (sequence is synthesized)
ctgtttcttaggcaaaggtaacttttttatatagttgtaaaattccattatattccattgccaaagaaacattaagaactttgtatagctgtataaaaagcaactaattttttaaagaat

SEQ ID NO: 784570 - DNA, 120 bp, Artificial Sequence
  ENSG00000257103_17 (sequence is synthesized)
aaacattttaaagtcagcaaacatactgtgtccttgcagaagttgatgtgctgagcagcagccttatgggtgggtctttttttcttagttttccaggcttaacatttttgattttgtttt

SEQ ID NO: 784571 - DNA, 120 bp, Artificial Sequence
  ENSG00000257103_18 (sequence is synthesized)
ttaatgtttggaacataaatgaagatttgatacattatttcattatctaaaaaggattaattattcatgctcattgtaagaacttcattttgtagcaaatggcatatcacaggatctgtc

SEQ ID NO: 784572 - DNA, 120 bp, Artificial Sequence
  ENSG00000257103_19 (sequence is synthesized)
cagataatcgatattttcagtatacaaatgtaaataatcacagatgagaatgtacttagctgtattttcaaataagtaatcttccccccttttgtaggactttaaaactaggcatcaatg

SEQ ID NO: 784573 - DNA, 120 bp, Artificial Sequence
  ENSG00000257103_20 (sequence is synthesized)
aacctgtttttcctattatgcctggaatttagtcatgataccttgactcattccatcatatttcaagaggattcagagtgctagaaattattttggtagcctgtaacacacggcaacact

SEQ ID NO: 784574 - DNA, 120 bp, Artificial Sequence
  ENSG00000257103_21 (sequence is synthesized)
ggtccttgggcctatgatgacccacagatgactcagtatagagttcattgctaattataaattactagtgaatctttttgatattttaagctctagtgggaaaaatctggccacttttgt

SEQ ID NO: 784575 - DNA, 120 bp, Artificial Sequence
  ENSG00000257103_22 (sequence is synthesized)
gtttttatgaaggccatggaataaaaggatccaaagatttaaatatttttatctaatattttgattgttttcttaactttctccttaaaacattcagtagtgataaagatatagaaactg

SEQ ID NO: 784576 - DNA, 120 bp, Artificial Sequence
  ENSG00000257103_23 (sequence is synthesized)
cactgtaggagaattggaatatttaaggctggttgacattttttattttcattttatatcttttgtatagctctacaaggcagtgttttgtaatttggtttcattatgaagatccagtac

SEQ ID NO: 784577 - DNA, 120 bp, Artificial Sequence
  ENSG00000257103_24 (sequence is synthesized)
ttggcagccatagtttagacaatattgttcagtgctgtttgcttgcatgttaacaacaaaaccttttagaggacccacaaatcatgatattgaacacagttccgaggcattcagagcatc

SEQ ID NO: 784578 - DNA, 120 bp, Artificial Sequence
  ENSG00000257103_25 (sequence is synthesized)
agagcaagtaccatggcaatacatgtgtagactgttggagatgtcccgggccaatttcaagaaagaaaactgtaaatactagttctacttgctctgaaattatgagtttatgcgttttcc

SEQ ID NO: 784579 - DNA, 120 bp, Artificial Sequence
  ENSG00000257103_26 (sequence is synthesized)
cagccctccgaatcactgactggggcgttttgtgccccagcaataactggcagcatggcatacctgcagtaccccttacaatattaaagcaaagtttttattctaaaacagaataaaact

SEQ ID NO: 784580 - DNA, 120 bp, Artificial Sequence
  ENSG00000257103_27 (sequence is synthesized)
gttcaataaaaaatgctcgtcaaagttctttctctttaaatagtaacattctgtttcagtaggaacataatgaaaggaatcttttaaatggaagagcggaattataatgtttgtattccc

SEQ ID NO: 784581 - DNA, 120 bp, Artificial Sequence
  ENSG00000257103_28 (sequence is synthesized)
tgtaataactataaatcagttactttatttctaagattgagttattgttgcagatgtttagggaaagctaaaagccccttccttcccctcctgtgtgtaaataaaatacttctgagatca

SEQ ID NO: 784582 - DNA, 120 bp, Artificial Sequence
  ENSG00000257103_29 (sequence is synthesized)
gggattacaggcgtgagccatcacgcctagccaagatgcttatttctaattagctttagtaattacttaggcttaatttgggagtagcactgcatattttggctgagggatattctttta

SEQ ID NO: 784583 - DNA, 120 bp, Artificial Sequence
  ENSG00000257103_30 (sequence is synthesized)
actaccatctttaggttggatttagaggttgtggaagggggaggtactgttgaaatatagtgaaaacctgcttagatgaaataccaaggaaagagcacagtatatcaaaagtgaatgatc

SEQ ID NO: 784584 - DNA, 120 bp, Artificial Sequence
  ENSG00000257103_31 (sequence is synthesized)
cctaagtactgtagaaacttagagaagaaatttgatataacctagtatggcagagaattgggccctttctagggacctttttactcatattgccagaactttttgcagctgctttaggca

SEQ ID NO: 784585 - DNA, 120 bp, Artificial Sequence
  ENSG00000257103_32 (sequence is synthesized)
gaatgcagcctcacagtcctatcttaaggggaagcattgaaaccagagtccattgtctattgccttggaaatgctaaaaaagctcctcgtaaacctgtctgctgatttggctgtttgtcc

SEQ ID NO: 784586 - DNA, 120 bp, Artificial Sequence
  ENSG00000257103_33 (sequence is synthesized)
agatacttagtattagaatcactgaaccttaatgttggtgttgaatgtaccatttctgctacttctctagttggtatgggtccttgctgtcccatctgcataactgcctaggacagcact

SEQ ID NO: 784587 - DNA, 120 bp, Artificial Sequence
  ENSG00000257103_34 (sequence is synthesized)
ccatgtgttataaacattgcttgcatccaaggatagtggacagtatattggctcccccttcccctgccctccatattgccataaaattcccaaactattcagtacactttaatttccaag

SEQ ID NO: 784588 - DNA, 120 bp, Artificial Sequence
  ENSG00000257103_35 (sequence is synthesized)
attattaatttgtacagatgctggggggagaggtagacaattaccatcattaaaatgctgcattactttatatcattgaataatgtcaaacattttttaaaatttttttatcatttaaaa

SEQ ID NO: 784589 - DNA, 120 bp, Artificial Sequence
  ENSG00000257108_0 (sequence is synthesized)
agttctagtttccaacaacagaggctgcagccacccagccccgaagcagggcccagcgagacagggcccagtggggccttattctctctcttgcagccccaagcgtgacccagctgcaga

SEQ ID NO: 784590 - DNA, 120 bp, Artificial Sequence
  ENSG00000257108_1 (sequence is synthesized)
gaagctgagacggtgattcggactgactggactctggcctccaggtgtctgcacctcacactggacccacctggagactccacgggctcccggcagctccggctgcttgggtggatccgg

SEQ ID NO: 784591 - DNA, 120 bp, Artificial Sequence
  ENSG00000257108_2 (sequence is synthesized)
gtgcccgcaggggctgtgggagggccccggggcctgcactgctcccccgatggcctgctcttcctcacggccggggctgcaccctgtgtccacgtgctagatctggagggacgccccatc

SEQ ID NO: 784592 - DNA, 120 bp, Artificial Sequence
  ENSG00000257108_3 (sequence is synthesized)
tgcctcctgccctgccgcactccggggagcggggccttcgttccagaggacgtggctgtgacagcgtcagggcttgtggtggtcagcgatcccatccatggggctgtccatgcactccag

SEQ ID NO: 784593 - DNA, 120 bp, Artificial Sequence
  ENSG00000257108_4 (sequence is synthesized)
cacacagcccgggaccccgggggccactgggtgacagtgggcaccttcctgtctccccgagggctggctgtggatgccctcaaccgcctcctggtgacggactacttgcctggggctgtg

SEQ ID NO: 784594 - DNA, 120 bp, Artificial Sequence
  ENSG00000257108_5 (sequence is synthesized)
cacagcttctcgttgggtcctgcttgggagcccctggccccagcctccatgctgggtctggagggcccctgctgggtgggcccagggcctgatgggggccttgctgtgagtgaggagttt

SEQ ID NO: 784595 - DNA, 120 bp, Artificial Sequence
  ENSG00000257108_6 (sequence is synthesized)
ggggatgtgaggctgtttggcagtgcccgccaacccctgggctccctggggggctggacggggcacactttcggctgcccagcgggcatctgctccaactcagagggcaatgttattgtg

SEQ ID NO: 784596 - DNA, 120 bp, Artificial Sequence
  ENSG00000257108_7 (sequence is synthesized)
gcagacgagcagaggcgccaggtgaccctgtttccccgggctgggccacccatctgcctggtgtcagaggggcttgggcagcccttgggagtggcctgtgcaccccagggccagctcctg

SEQ ID NO: 784597 - DNA, 120 bp, Artificial Sequence
  ENSG00000257108_8 (sequence is synthesized)
ctgacctgaggctgggttggagcagccctcctgtgcctgaggccagctcccaggcccttggatcaccgcgggaggaaccctcaggatgggtggagcctccaggctatgggcattgcctgc

SEQ ID NO: 784598 - DNA, 120 bp, Artificial Sequence
  ENSG00000257108_9 (sequence is synthesized)
ctgatgccagcaccacctgggctgggccctgggcttggctcgagttctcctgctggtgaggctccggatctcaggagcagccctgagtctgcttcccaggctgcccctgccaggcctgca

SEQ ID NO: 784599 - DNA, 120 bp, Artificial Sequence
  ENSG00000257108_10 (sequence is synthesized)
gcctccccagccagggctgctctctgctgtccccattcagtgccctggcccctgcattcatgccccccacaccccctcaggccctgtgcctggactttggggctggcagctgaagccttg

SEQ ID NO: 784600 - DNA, 120 bp, Artificial Sequence
  ENSG00000257108_11 (sequence is synthesized)
agatcctgggccagctgccggcacacagctaggcagactctcccaccaggtgcccctgcccaggcctcctaatcgggggcagacaggcagggagggtgtggctgggctgggctgggcggg

SEQ ID NO: 784601 - DNA, 120 bp, Artificial Sequence
  ENSG00000257108_12 (sequence is synthesized)
gcggcctggggcaggggtgtggcccctaaatgtccccaacctcagagggacctagagtcctgagcctccagtagcttctctgggcctggcagaggtaagggggaggcaaccctggagtgt

SEQ ID NO: 784602 - DNA, 120 bp, Artificial Sequence
  ENSG00000257108_13 (sequence is synthesized)
ctggaggcccatggctggctgaaccctggatgccttttcttccgcgtccccatgaatgaaagctgtctgggccttcattctgcagacagggacaaacagctccatgctgtttgtcctccc

SEQ ID NO: 784603 - DNA, 120 bp, Artificial Sequence
  ENSG00000257108_14 (sequence is synthesized)
agtgcagccgtgctgggagggtctgggggagcttcctacaaggagagactcctgctgctttggaaaactgagaaaaaataggggtctaaccctctcctcccattttacaagtggggaaat

SEQ ID NO: 784604 - DNA, 120 bp, Artificial Sequence
  ENSG00000257108_15 (sequence is synthesized)
gaggcgtgaaaggagaggcgtctgggttactccgtgggtctggggtccagggaagggcctgtatgggggagggagctgggaggggacggtgtctggctctacccctgtggggtggggagg

SEQ ID NO: 784605 - DNA, 120 bp, Artificial Sequence
  ENSG00000257108_16 (sequence is synthesized)
tggggctcccctgtatcacaggacatcccccctgagaggtccctcatatgtctgggtcctgtgggtgggggactaactgcgcaatgtagttaggtgctcaataaacggagttgccgctga

SEQ ID NO: 784606 - DNA, 120 bp, Artificial Sequence
  ENSG00000257115_0 (sequence is synthesized)
tgacttcatgttcattatcttctcttcattcttaaaaaaggaacacattttataaaagagtcctgactgataatgtgtcccttgaccttgcaggtcactggcctaatgaatgtctctgag

SEQ ID NO: 784607 - DNA, 120 bp, Artificial Sequence
  ENSG00000257115_1 (sequence is synthesized)
ccaaattccagctttgcttttgtaaatgaatttatactccaaggtttcacttgtgagtggacaattcagatcttcctcttctcactctttactacaacatatgcactgactataacaggg

SEQ ID NO: 784608 - DNA, 120 bp, Artificial Sequence
  ENSG00000257115_2 (sequence is synthesized)
aatggagccattgcttttgtcctgtggtgtgactggcgacttcacactcccatgtacatgttcctgggaaatttctcctttttagagatatggtatgtctcttctacagttcccaagatg

SEQ ID NO: 784609 - DNA, 120 bp, Artificial Sequence
  ENSG00000257115_3 (sequence is synthesized)
ttggtcaacttcctttcagagaaaaaaaacatctcctttgctggatgttttctccagttttatttcttcttctctttgggtacatcagaatgcttgcttttgactgtgatggcctttgat

SEQ ID NO: 784610 - DNA, 120 bp, Artificial Sequence
  ENSG00000257115_4 (sequence is synthesized)
ccttgctatctgccgtcccttgctctatcctaatatcatgactgggcatctctgtgccaaactggtcatactgtgctgggtttgtggatttctgtggttcctgatccccattgttctcat

SEQ ID NO: 784611 - DNA, 120 bp, Artificial Sequence
  ENSG00000257115_5 (sequence is synthesized)
ctctcagatgcccttctgtggcccaaacattattgaccatgttgtgtgtgacccagggccacgatttgcattggattgtgtttctgccccaagaatccaactgttttgctacactctaag

SEQ ID NO: 784612 - DNA, 120 bp, Artificial Sequence
  ENSG00000257115_6 (sequence is synthesized)
ctcattagttatttttggtaacttcctctttattattggatcctatactcttgtcctgaaagctgtgttgggtatgccttcaagcactgggagacataaggccttctctacctgtgggtc

SEQ ID NO: 784613 - DNA, 120 bp, Artificial Sequence
  ENSG00000257115_7 (sequence is synthesized)
tcatttggctgtggtatcactgtgctatagctctcttatggtcatgtatgtgagcccaggactcggacattctacagggatgcagaaaattgaaactttgttctatgctatggtgacccc

SEQ ID NO: 784614 - DNA, 120 bp, Artificial Sequence
  ENSG00000257115_8 (sequence is synthesized)
actcttcaatccccttatctatagcctccagaataaggagataaaggcagccctgaggaaagttctgggaagttccaacataatctaaggcatattagattattcctccatgatcagatc

SEQ ID NO: 784615 - DNA, 120 bp, Artificial Sequence
  ENSG00000257138_0 (sequence is synthesized)
cctttctgcactgggtggcaaccaggtctttagattagccaactagagaagagaagtagaatagccaattagagaagtgacatcatgttgactctaactcgcatccgcactgtgtcctat

SEQ ID NO: 784616 - DNA, 120 bp, Artificial Sequence
  ENSG00000257138_1 (sequence is synthesized)
gaagtcaggagtacatttctgttcatttcagtcctggagtttgcagtggggtttctgaccaatgccttcgttttcttggtgaatttttgggatgtagtgaagaggcaggcactgagcaac

SEQ ID NO: 784617 - DNA, 120 bp, Artificial Sequence
  ENSG00000257138_2 (sequence is synthesized)
agtgattgtgtgctgctgtgtctcagcatcagccggcttttcctgcatggactgctgttcctgagtgctatccagcttacccacttccagaagttgagtgaaccactgaaccacagctac

SEQ ID NO: 784618 - DNA, 120 bp, Artificial Sequence
  ENSG00000257138_3 (sequence is synthesized)
caagccatcatcatgctatggatgattgcaaaccaagccaacctctggcttgctgcctgcctcagcctgctttactgctccaagctcatccgtttctctcacaccttcctgatctgcttg

SEQ ID NO: 784619 - DNA, 120 bp, Artificial Sequence
  ENSG00000257138_4 (sequence is synthesized)
tgcactgtcctctgtgtttggtgcttttttagcagacctcacttcacagtcacaactgtgctattcatgaataacaatacaaggctcaactggcagattaaagatctcaatttattttat

SEQ ID NO: 784620 - DNA, 120 bp, Artificial Sequence
  ENSG00000257138_5 (sequence is synthesized)
tcctttctcttctgctatctgtggtctgtgcctcctttcctattgtttctggtttcttctgggatgctgactgtctccctgggaaggcacatgaggacaatgaaggtctataccagaaac

SEQ ID NO: 784621 - DNA, 120 bp, Artificial Sequence
  ENSG00000257138_6 (sequence is synthesized)
tctcgtgaccccagcctggaggcccacattaaagccctcaagtctcttgtctcctttttctgcttctttgtgatatcatcctgtgctgccttcatctctgtgcccctactgattctgtgg

SEQ ID NO: 784622 - DNA, 120 bp, Artificial Sequence
  ENSG00000257138_7 (sequence is synthesized)
cgcgacaaaataggggtgatggtttgtgttgggataatggcagcttgtccctctgggcatgcagccatcctgatctcaggcaatgccaagttgaggagagctgtgatgaccattctgctc

SEQ ID NO: 784623 - DNA, 120 bp, Artificial Sequence
  ENSG00000257138_8 (sequence is synthesized)
tgggctcagagcagcctgaaggtaagagccgaccacaaggcagattcccggacactgtgctgagaatggacatgaaatgagctcttcattaatacgcctgtgagtcttcataaatatgcc

SEQ ID NO: 784624 - DNA, 120 bp, Artificial Sequence
  ENSG00000257218_0 (sequence is synthesized)
acgcgcgggcgcactgcgggggccaaggaaggaagaaatgtggtcgcggttggtgtggctgggccttcgggcccctctgggcgggcgccagggcttcacctccaaggcggatcctcaggg

SEQ ID NO: 784625 - DNA, 120 bp, Artificial Sequence
  ENSG00000257218_1 (sequence is synthesized)
cagtggccggatcacggctgcggtgatcgagcacctggagcgtctagcgcttgtggacttcggcagccgcgaggcagtggcgcgactggagaaagctatcgccttcgccgaccggctacg

SEQ ID NO: 784626 - DNA, 120 bp, Artificial Sequence
  ENSG00000257218_2 (sequence is synthesized)
cgccgtggacacagacggggtggagcccatggaatcggtcctggaggacagatgtctatacctgagatccgacaatgtggtagaaggcaactgtgctgatgaattactacaaaactccca

SEQ ID NO: 784627 - DNA, 120 bp, Artificial Sequence
  ENSG00000257218_3 (sequence is synthesized)
tcgcgtcgtggaggagtactttgtggcccccccaggtaatatctctttgccaaagctggatgaacaagagccattcccacacagctgagtagctcattctggaaagggggtactctgtga

SEQ ID NO: 784628 - DNA, 120 bp, Artificial Sequence
  ENSG00000257218_4 (sequence is synthesized)
acatgtggaagcataatgacagtatttttttactgtgaatactaatgttcctgcttttttcagtcccctgaaaaaatggatgctcaagcatttcttaataacagattcttctgaagacag

SEQ ID NO: 784629 - DNA, 120 bp, Artificial Sequence
  ENSG00000257218_5 (sequence is synthesized)
aattgggaaagatctggccccaacaaggcagtgagttcctgatgctaactgaggtgaaagaaaagcaaaagtcagcttccaaggaattcacttaacaggcctgttcagtatggaagacat

SEQ ID NO: 784630 - DNA, 120 bp, Artificial Sequence
  ENSG00000257218_6 (sequence is synthesized)
tatttatctgcctttaactccccccaaaggaccataccaactgcatgaaagtgaacttttctatctacgtaactggtagacggagcatcttgatcactatgtgacaaccttggctgtcat

SEQ ID NO: 784631 - DNA, 120 bp, Artificial Sequence
  ENSG00000257218_7 (sequence is synthesized)
ttttagttgccatttgcattgatttgagcagccctatctttaccgaacatacctgaatttgttcctgggctcccactttcttcccagaagagggctaacttcctactaaggtctgaagag

SEQ ID NO: 784632 - DNA, 120 bp, Artificial Sequence
  ENSG00000257218_8 (sequence is synthesized)
tgttgaaagtagactagagcttgggaactcctaacctagaactatctgccatcccacaaagtgattatatgccaaagggatactagtcatacctagtgtttctctttctgaaaagagaac

SEQ ID NO: 784633 - DNA, 120 bp, Artificial Sequence
  ENSG00000257218_9 (sequence is synthesized)
ttatcctaaaattagccctgggcctgggacaaaggagccctctccgcccccaaaatgattattaaattgagatgagtccaggataaaactcagataccaaggataaatgaaacttattta

SEQ ID NO: 784634 - DNA, 120 bp, Artificial Sequence
  ENSG00000257218_10 (sequence is synthesized)
tccagcctgggcgacagagcaagtctcaaaaaaaaaaaaaaagtgatagaatcagagagtttttcctctaaccaaactgccaaagttggttttggctaagaatttcccaataatatttat

SEQ ID NO: 784635 - DNA, 120 bp, Artificial Sequence
  ENSG00000257218_11 (sequence is synthesized)
ttttcctctaaccaaactgccaaagttggttttggctaagaatttcccaataatatttatgctgctgctcatttttttagttttctgagacaggggtctccctctgtcacccaggctgga

SEQ ID NO: 784636 - DNA, 120 bp, Artificial Sequence
  ENSG00000257218_12 (sequence is synthesized)
atcctcccacctcagcctcctaagtaactgggactacatatgtgcatcaccacgtccagttaatttttttttaagtagaggtgggggttttgctatgttgcctatctggtcgtgaactcc

SEQ ID NO: 784637 - DNA, 120 bp, Artificial Sequence
  ENSG00000257218_13 (sequence is synthesized)
tgaactcctggcctcaagggatcctctggcatgccttggcctcccaaagggctaggatcacaggcaaaagccaccgtgtgtttatttttcccattcccttcctttatctgcaatgctttt

SEQ ID NO: 784638 - DNA, 120 bp, Artificial Sequence
  ENSG00000257218_14 (sequence is synthesized)
ttctttaaggcagcctaatttacaagcttggccttgaattaaaagagaacccagaacccgctcttggagtttacgttctcaaaccaacatcagagcaactgtctatccccatataaataa

SEQ ID NO: 784639 - DNA, 120 bp, Artificial Sequence
  ENSG00000257218_15 (sequence is synthesized)
actacaactcagtgattttttaaattagtgtgcctatttggtgaaatctgtgaacttaatcaaggacaaccacacatgtcaattactaaacatttaaaatatatttctaaacagaatggg

SEQ ID NO: 784640 - DNA, 120 bp, Artificial Sequence
  ENSG00000257218_16 (sequence is synthesized)
ccgactcagtcacagtaactgttgatctccatagtagagcaacccacaaagacagaactgatttttttcccataatcaggggtgaaaaatatacaacttgtttctgaaccaaaaccacaa

SEQ ID NO: 784641 - DNA, 120 bp, Artificial Sequence
  ENSG00000257218_17 (sequence is synthesized)
tttctgcagtttaaaatgtttcactgctaatatggccctggtagaaattatgtagttttttttcttctttaaaaaaaaaaaattaaaaaaatttcctaagacactaaatcctcaatctgg

SEQ ID NO: 784642 - DNA, 120 bp, Artificial Sequence
  ENSG00000257218_18 (sequence is synthesized)
aatgtagattctgagcacaaagcagctcagttaacctaaaaaataaagaaaaaattcccatcacctgtctcagtagggcctgaaaggagagaagtagtgtggggaacccctgctttggta

SEQ ID NO: 784643 - DNA, 120 bp, Artificial Sequence
  ENSG00000257218_19 (sequence is synthesized)
tggagagtcacggccccttgacccagaccgagaccgtgagtagccatagctggtgcttctctcaggataaactcggatgtaggaagtttcaccctgaaatgcaaacaaaaacaaaaagag

SEQ ID NO: 784644 - DNA, 120 bp, Artificial Sequence
  ENSG00000257218_20 (sequence is synthesized)
taaaggggaaaaaaatcagagccagaagaataagcaaaccaacatctaacaataatagttaagtattgagcacttactgtgtactctgtgcctggcatgaggctatctcattaaaccttc

SEQ ID NO: 784645 - DNA, 120 bp, Artificial Sequence
  ENSG00000257218_21 (sequence is synthesized)
ataacattatgaggtaggtactcttactatcccatttcaagaatgaagaaaattaagacttaagttatatcatttgcccaaggtaacacaataaatgccaatttgacatgttgatactca

SEQ ID NO: 784646 - DNA, 120 bp, Artificial Sequence
  ENSG00000257218_22 (sequence is synthesized)
attaactatgataaacaatatatctgaattactgccattgacccccctcaaagctaagaactggaaaggatctcaggggtcatatagtttaatcccctgccacctcatgtatgcatcttt

SEQ ID NO: 784647 - DNA, 120 bp, Artificial Sequence
  ENSG00000257218_23 (sequence is synthesized)
ggatgggcatctatggaaggagctagcctgtatttaataccttccagatgtgaggacctgagctagatgctttagacgttatcctcttgctctagattcctggcaagtcttgtgatggtg

SEQ ID NO: 784648 - DNA, 120 bp, Artificial Sequence
  ENSG00000257218_24 (sequence is synthesized)
ctattatgtgaccattttgcccatgaaggaatcgaggtcccaagagtagttcaggtaaggaattaataagcagcagaggagtcatgtccaggctggcttgtccccaggccctctgccttc

SEQ ID NO: 784649 - DNA, 120 bp, Artificial Sequence
  ENSG00000257218_25 (sequence is synthesized)
agccaccattctcagaagatccaaagatgccaaggggaaagaagccggatgctttttcaccttaggtgaaagtcagtaattggagttaccctttctgaggccctgctttgcagtataact

SEQ ID NO: 784650 - DNA, 120 bp, Artificial Sequence
  ENSG00000257218_26 (sequence is synthesized)
gaggatcaggtgctgttctgtttctgcttcaaattcaagtcctagaggacagtctgaacaaaagcatcattaaaccagggaaggaccaacctctaagccaaaaactaggcaattatatga

SEQ ID NO: 784651 - DNA, 120 bp, Artificial Sequence
  ENSG00000257218_27 (sequence is synthesized)
atcctcagaaaaagaaatgagcccagagacctgtgtccccaaacatccgtaaatctcatagtaaggcaggacaggataaccagaaaaaaacaatgtccaactggtctggtttctggtctc

SEQ ID NO: 784652 - DNA, 120 bp, Artificial Sequence
  ENSG00000257218_28 (sequence is synthesized)
aatggtaccaaagggatagtcaccacctcaatcaaactgagatccaaaacagcagctgctttcctacaaggaaagacatcaagaactactgagtctgaagggtgacataatcaaccacaa

SEQ ID NO: 784653 - DNA, 120 bp, Artificial Sequence
  ENSG00000257218_29 (sequence is synthesized)
gaaaatgttacggtttagcctggcacagtggtgcatgcctgcagtcccaactactggagaggctgaggtgggaggactgcttgggcccaggagttcaaggtcagcctcggcaatataatg

SEQ ID NO: 784654 - DNA, 120 bp, Artificial Sequence
  ENSG00000257218_30 (sequence is synthesized)
agactgtctctaaaatcaaaaattagagaaatataaaaattataaaattaaaaaagaaaatgtcatgatagctcaggtttcagagaggatgctgcactactctgggaaaaaagtgaagtg

SEQ ID NO: 784655 - DNA, 120 bp, Artificial Sequence
  ENSG00000257218_31 (sequence is synthesized)
acagctcagccctgacagcaggacctagaagggctgagatgaagaggctgacctgtagagctcagcctggacccacaggaggggtagttgagttcacagagggatactgccatttaagct

SEQ ID NO: 784656 - DNA, 120 bp, Artificial Sequence
  ENSG00000257218_32 (sequence is synthesized)
ggttgtgaatggggtggtatgaagaccgactgcactagtattctctccaggttacaaataccatgaccaaactgtgtaatgtgatactaatatgcagaataaagcatattaaaaaacaaa

SEQ ID NO: 784657 - DNA, 120 bp, Artificial Sequence
  ENSG00000257218_33 (sequence is synthesized)
cgcgactggagaaagctatcgccttcgccgaccggctacgcgccgtggacacagacggggtggagcccatggaatcggtcctggaggacaggttggagtgcagtggtgtgatctccgctc

SEQ ID NO: 784658 - DNA, 120 bp, Artificial Sequence
  ENSG00000257315_0 (sequence is synthesized)
atgttagtggctgccaggaaaacttgtcatcattttagtcattcggtcaaggcccgtcagatactgcaagagttccaaaatgatcaccaacttccatggaagaatttgaagcaggacgaa

SEQ ID NO: 784659 - DNA, 120 bp, Artificial Sequence
  ENSG00000257315_1 (sequence is synthesized)
actggccattggatttctactttttatatgttaaaatggctcttggagcattgctactcagttcaccatagtcttggtagagccagtggagttgtgctcacctcccttcagtggactcta

SEQ ID NO: 784660 - DNA, 120 bp, Artificial Sequence
  ENSG00000257315_2 (sequence is synthesized)
atgacttatgtttgtgatattcttaagccatttgaggaggctacccagaaagtgagcgtgaagaccgcaggattgaatcaggtgctacccctaatccatcatctactcctttccctgcag

SEQ ID NO: 784661 - DNA, 120 bp, Artificial Sequence
  ENSG00000257315_3 (sequence is synthesized)
aaactcagagaagattttcaagtcagaggtattactcaggccctcaatctggtggatagtttatctctgaaacttgaaacagataccctactaagtgccatgcttaaatccaagccctgt

SEQ ID NO: 784662 - DNA, 120 bp, Artificial Sequence
  ENSG00000257315_4 (sequence is synthesized)
atcttggctactttgttagatccttgctttaaaaacagtttggaagacttttttcctcaaggtgctgatttagaaacttataagcagttccttgcagaagaggtctgtaattatatggaa

SEQ ID NO: 784663 - DNA, 120 bp, Artificial Sequence
  ENSG00000257315_5 (sequence is synthesized)
tcttcaccagagatctgccaaattccaacttcagaagcttcttgtccctcagttacagtgggagctgattcatttacctcatctctaaaagaaggcacctccagttcaggttctgttgat

SEQ ID NO: 784664 - DNA, 120 bp, Artificial Sequence
  ENSG00000257315_6 (sequence is synthesized)
agctcagctgtagacaatgttgcccttggaagcaaaagcttcatgttcccttctgctgtagcagttgtggatgagtacttcaaagagaagtattcagagttctcaggaggtgatgaccct

SEQ ID NO: 784665 - DNA, 120 bp, Artificial Sequence
  ENSG00000257315_7 (sequence is synthesized)
ttaatttactggcagaggaagataagcatatggccggctttgacccaggttgccatccagtatctaagttgccccatgtgtagttggcaatctgaatgtatctttactaaaaatagccac

SEQ ID NO: 784666 - DNA, 120 bp, Artificial Sequence
  ENSG00000257315_8 (sequence is synthesized)
tttcatccaaaacagatcatgagcctggactttgacaatatagaacaactgatgtttctgaaaatgaacttgaaaaatgttaactacgattattctacgttggttctgagctgggatcct

SEQ ID NO: 784667 - DNA, 120 bp, Artificial Sequence
  ENSG00000257315_9 (sequence is synthesized)
gagcagaatgaagttgttcaaagcagtgaaaaagaaatactgccttaatttctttttctccatttaaaatgggcaactttttgctgtgttactgtatcttaatagctgtagttgttaaat

SEQ ID NO: 784668 - DNA, 120 bp, Artificial Sequence
  ENSG00000257315_10 (sequence is synthesized)
ataatcattatctttataaacacatctggggaaacctgaaatcacacaagggctgaaaattcctcagaggcaatataattttgataaaatgaagattaaagatttcatagctataactgt

SEQ ID NO: 784669 - DNA, 120 bp, Artificial Sequence
  ENSG00000257315_11 (sequence is synthesized)
ggcgctagcacttgaaaattttgcttataccaatgagagagaagatatttttaattaaaaaaaatatagtgcagcattgaaaggccttaggctttcttcctggtagattgaactagtaat

SEQ ID NO: 784670 - DNA, 120 bp, Artificial Sequence
  ENSG00000257315_12 (sequence is synthesized)
tggttttaagtaaaacttcccccaccatgggaaattttattgctctgaaatcaacgaaatgagaaaaaagtacactggctggcattcctcctgcccctgtttttctgtttccttaaaaac

SEQ ID NO: 784671 - DNA, 120 bp, Artificial Sequence
  ENSG00000257315_13 (sequence is synthesized)
cctgatgcttaattacaacttggcaaaaagaaaacccgtgaaattgttttatatttggaaatttctaattgcctcctcatactggtcagctttataatttcaaattgttgagtgtgatag

SEQ ID NO: 784672 - DNA, 120 bp, Artificial Sequence
  ENSG00000257315_14 (sequence is synthesized)
tgttaccctttagaattggatcttatataaaagggaaatattagaaaacaattaggaaaatatacttttagtctttgaaatgcctgttttaacctttataaaatattataaaaatagatt

SEQ ID NO: 784673 - DNA, 120 bp, Artificial Sequence
  ENSG00000257315_15 (sequence is synthesized)
gtgtaggtactttcaaataatttatgggtaaaaacagactaaaatgtttgcaagaattggaaaaggttgaatgggaattgtaatgagagccctttgaacatgcttggaaaaacccagtag

SEQ ID NO: 784674 - DNA, 120 bp, Artificial Sequence
  ENSG00000257315_16 (sequence is synthesized)
acatttcccaaagattgtttctgtaattttaggtaatctttttaaaaacatacttaatgacccattatactgtattaactgtgcggttgttttggccactgaattcttaatgaaaactaa

SEQ ID NO: 784675 - DNA, 120 bp, Artificial Sequence
  ENSG00000257315_17 (sequence is synthesized)
gcagtcggtatttttatgtgttaggaatcattggtgaaatgagtgaattgatctcattttaagatccctttctactctgaaagtatgtttctgagattgagtaggaggccagaaaatgat

SEQ ID NO: 784676 - DNA, 120 bp, Artificial Sequence
  ENSG00000257315_18 (sequence is synthesized)
gacttttagtaaaagtctattaaaagtttcagactgaataactaatgtgagatcccaatttttcctttttttcattttagatttggggatattccctgcccaaaaaattcctggaaaatt

SEQ ID NO: 784677 - DNA, 120 bp, Artificial Sequence
  ENSG00000257315_19 (sequence is synthesized)
gactagtattaagtgtgagtaaaaggtgtccacttttttttaagttttgattttagttttgtcttggatagtatttggcaagatttagcctagaaattatgtagtatttattacataaga

SEQ ID NO: 784678 - DNA, 120 bp, Artificial Sequence
  ENSG00000257315_20 (sequence is synthesized)
gaaattatgtagtatttattacataagaatcaaaattgctttgttactgggctggtttcaaagtttagaactcatttctatgtatcaaaatcgggttttttttggttttgattttttttt

SEQ ID NO: 784679 - DNA, 120 bp, Artificial Sequence
  ENSG00000257315_21 (sequence is synthesized)
cattgtgaaatgaaatctcaactccaaaagtttacccttttactaactggagtaaatgtatacttacaaagtctttagctgtagccattagtagtaaagaatttggacctaggctgcgta

SEQ ID NO: 784680 - DNA, 120 bp, Artificial Sequence
  ENSG00000257315_22 (sequence is synthesized)
agcaagcctttccagggccactatttaatggcaaaccagtgatactggtgttgatacaaaataagaaataaattttcccttagataaagctttctgtgttttgacagtgccagtttagaa

SEQ ID NO: 784681 - DNA, 120 bp, Artificial Sequence
  ENSG00000257315_23 (sequence is synthesized)
tggctataatgctgctctgccttctacagcttgctgcaccactctgtagttactctattaccatacgtttctatcttttttggttaaacactccctgatgacgatgatggatatatatac

SEQ ID NO: 784682 - DNA, 120 bp, Artificial Sequence
  ENSG00000257315_24 (sequence is synthesized)
atacatccatattatacataatgatatatgtgtaaggatttaccttcgtctttattttgtgggctgggcaaaatttagtgtaacaataacttcatgatactttggtataagagtaagttc

SEQ ID NO: 784683 - DNA, 120 bp, Artificial Sequence
  ENSG00000257315_25 (sequence is synthesized)
tttatttttataatgaacccaaatctaaagtcttttatagtgcattttaaaaggggaaacttatccaaatgttatatttctatacatttttgtgtatatgtgtgtgtgtataagccagtt

SEQ ID NO: 784684 - DNA, 120 bp, Artificial Sequence
  ENSG00000257315_26 (sequence is synthesized)
agtatatatctgtatgtatattatatacataaaacactatatttttacatacaagtatgcttttattatacagataataaagatgggggaaggtttctgtttttttcttaataggtgaag

SEQ ID NO: 784685 - DNA, 120 bp, Artificial Sequence
  ENSG00000257315_27 (sequence is synthesized)
aaatcttgaagaccagaaattggatcttactgaaaaactgatgtttttttgttttttttttaaattatattgttcagctatggaagatggagttttttttcatgatcctttaactctcaa

SEQ ID NO: 784686 - DNA, 120 bp, Artificial Sequence
  ENSG00000257315_28 (sequence is synthesized)
ttttgttttgttttgttttgtttttgaggagataactaaccctagctgtctccagtctgacaaaggttatttgaatggacttaatctcccagtagttgggagatgttttaaaaacacatg

SEQ ID NO: 784687 - DNA, 120 bp, Artificial Sequence
  ENSG00000257315_29 (sequence is synthesized)
tctcccagtagttgggagatgttttaaaaacacatgctgtgtttgaattgtggctgagaggttttcttggcaatgtgaggaggaaatttttttctgcctcattattattaattcatggat

SEQ ID NO: 784688 - DNA, 120 bp, Artificial Sequence
  ENSG00000257315_30 (sequence is synthesized)
tgagtgttggttcgacctacaggcgtaatagattggaactcagtgaagacacagatgttcctgttcagagcaaccagctaatgattacagtttaaagacaatttctgtgatcaagttgtc

SEQ ID NO: 784689 - DNA, 120 bp, Artificial Sequence
  ENSG00000257315_31 (sequence is synthesized)
atttggaagattaaacccatttcacgaggacttggagcctggtccttgctttgaggaagcagtggcttgtttcaagaagccacttctgatctaagaatctacccagcatgcctaatcaag

SEQ ID NO: 784690 - DNA, 120 bp, Artificial Sequence
  ENSG00000257315_32 (sequence is synthesized)
gagaagactgctatttttttttctattccacatgtaccaaaggtgacagctgcccattccgtcactgtgaagctgcaataggaaatgaaactgtttgcacattatggcaagaagggcgct

SEQ ID NO: 784691 - DNA, 120 bp, Artificial Sequence
  ENSG00000257315_33 (sequence is synthesized)
ccttgttattgggaaaatcagccaacaggatgtcaaaaattaaactgcgctttccatcacaatagaggacgatatgttgatggccttttcctacctccgagcaaaactgtgttgcccact

SEQ ID NO: 784692 - DNA, 120 bp, Artificial Sequence
  ENSG00000257315_34 (sequence is synthesized)
gtgcctgagtcaccagaagaggaagtgaaggctagccaactttcagttcagcagaacaaattgtctgtccagtccaatccttcccctcagctgcggagcgttatgaaagtagaaagttcc

SEQ ID NO: 784693 - DNA, 120 bp, Artificial Sequence
  ENSG00000257315_35 (sequence is synthesized)
gaaaatgttcctagccccacgcatccaccagttgtaattaatgctgcagatgatgatgaagatgatgatgatcagttttctgaggaaggtgatgaaaccaaaacacctaccctgcaacca

SEQ ID NO: 784694 - DNA, 120 bp, Artificial Sequence
  ENSG00000257315_36 (sequence is synthesized)
actcctgaagttcacaatggattacgagtgacttctgtccggaaacctgcagtcaatataaagcaaggtgaatgtttgaattttggaataaaaactcttgaggaaattaagtcaaagaaa

SEQ ID NO: 784695 - DNA, 120 bp, Artificial Sequence
  ENSG00000257315_37 (sequence is synthesized)
atgaaggaaaaatctaagaagcaaggtgagggttcttcaggagtttccagtcttttactccaccctgagcccgttccaggtcctgaaaaagaaaatgtcaggactgtggtgaggacagta

SEQ ID NO: 784696 - DNA, 120 bp, Artificial Sequence
  ENSG00000257315_38 (sequence is synthesized)
actctctccaccaaacaaggagaagaacccttggttagattgagtcttactgagagactggggaaacgaaaattttcagcaggcggtgacagtgatcctccattaaagcgtagcctggca

SEQ ID NO: 784697 - DNA, 120 bp, Artificial Sequence
  ENSG00000257315_39 (sequence is synthesized)
cagaggctagggaagaaagttgaagctccagaaactaacattgacaaaacaccaaagaaagctcaagtttccaagtctcttaaggagcgattaggcatgtcagctgatccagataatgag

SEQ ID NO: 784698 - DNA, 120 bp, Artificial Sequence
  ENSG00000257315_40 (sequence is synthesized)
gatgcaacagataaagttaataaagttggtgagatccatgtgaagacattagaagaaattcttcttgaaagagccagtcagaaacgtggagaattgcaaactaaactcaagacagaagga

SEQ ID NO: 784699 - DNA, 120 bp, Artificial Sequence
  ENSG00000257315_41 (sequence is synthesized)
ccttcaaaaactgatgattctacttcaggagcaagaagctcctccactatccgtatcaaaaccttctctgaggtcctggctgaaaaaaaacatcggcagcaggaagcagagagacaaaaa

SEQ ID NO: 784700 - DNA, 120 bp, Artificial Sequence
  ENSG00000257315_42 (sequence is synthesized)
agcaaaaaggatacaacttgcatcaagctaaagattgatagtgaaattaaaaaaacagtagttttgccacccattgttgccagcagaggacaatcagaggagcctgcaggtaaaacaaag

SEQ ID NO: 784701 - DNA, 120 bp, Artificial Sequence
  ENSG00000257315_43 (sequence is synthesized)
tctatgcaggaggtgcacatcaagacgctggaagaaattaaactggagaaggcactgagggtgcagcagagctctgagagcagcaccagctccccgtctcaacacgaggccactccaggg

SEQ ID NO: 784702 - DNA, 120 bp, Artificial Sequence
  ENSG00000257315_44 (sequence is synthesized)
gcaaggcggctgctgcgaatcaccaaaagaacagggatgaaagaagagaagaaccttcaggaaggaaatgaagttgattctcagagcagtattagaacagaagctaaagaggcttcaggt

SEQ ID NO: 784703 - DNA, 120 bp, Artificial Sequence
  ENSG00000257315_45 (sequence is synthesized)
gagaccacaggagttgacatcactaaaattcaagtcaagagatgtgagaccatgagagagaagcacatgcagaaacagcaggagagggaaaaatcagtcttgacacctcttcggggagat

SEQ ID NO: 784704 - DNA, 120 bp, Artificial Sequence
  ENSG00000257315_46 (sequence is synthesized)
gtagcctcttgcaatacccaagtggcagagaaaccagtgctcactgctgtgccaggaatcacacggcacctgaccaagcggcttcccacaaagtcatcccagaaggtggaggtagaaacc

SEQ ID NO: 784705 - DNA, 120 bp, Artificial Sequence
  ENSG00000257315_47 (sequence is synthesized)
tcagggattggagactcattattgaatgtgaaatgtgcagcacagaccttggaaaaaaggggtaaagctaaacccaaagtgaacgtgaagccatctgtggttaaagttgtgtcatccccc

SEQ ID NO: 784706 - DNA, 120 bp, Artificial Sequence
  ENSG00000257315_48 (sequence is synthesized)
aaattggccccaaaacgtaaggcagtggagatgcacgctgctgtcattgccgctgtgaagccactcagctccagcagtgtcctacaggaacccccagccaaaaaggcagctgtggctgtt

SEQ ID NO: 784707 - DNA, 120 bp, Artificial Sequence
  ENSG00000257315_49 (sequence is synthesized)
gtcccgcttgtctctgaggacaaatcagtcactgtgcctgaagcagaaaatcctagagacagtcttgtgctgcctccaacccagtcctcttcagattcctcacccccggaggtgtctggc

SEQ ID NO: 784708 - DNA, 120 bp, Artificial Sequence
  ENSG00000257315_50 (sequence is synthesized)
ccttcctcatcccaaatgagcatgaaaactcgccgactcagctctgcctcaacaggaaagcccccactctctgtggaggatgattttgagaaactaatatgggagatttcaggaggcaaa

SEQ ID NO: 784709 - DNA, 120 bp, Artificial Sequence
  ENSG00000257315_51 (sequence is synthesized)
ttggaagctgagattgacctggatcctgggaaagatgaagatgaccttctgcttgagctatcagaaatgattgatagctgaaggtggtagtgaggacactttaaaaaaaaaatcgccaaa

SEQ ID NO: 784710 - DNA, 120 bp, Artificial Sequence
  ENSG00000257315_52 (sequence is synthesized)
aaactggacttagtttcatctattgtaacatttacctgagatgatcatttctttagtctagaatttgccccaaatcagaagtatacctctgaattatctgtatgtgtcctggattccttg

SEQ ID NO: 784711 - DNA, 120 bp, Artificial Sequence
  ENSG00000257315_53 (sequence is synthesized)
gggtcagatttttaaagttactttataaccattttgtccatttgatgccattgtttatcatcttttgagaaaaaagttctgtcatacccttctctccacaaaaaagagactgagagggag

SEQ ID NO: 784712 - DNA, 120 bp, Artificial Sequence
  ENSG00000257315_54 (sequence is synthesized)
atcaagtgaaagggtgcaagcgaacttagtgactccttgaggtgtttgtcagttttggcttttttcttctttgttgtattctttatgtattgtcttgatgtacttaatattacctgagtt

SEQ ID NO: 784713 - DNA, 120 bp, Artificial Sequence
  ENSG00000257315_55 (sequence is synthesized)
tgaaatggatgaagacagctgctaccattaaggaccaaattttatgctaccactaaacaaaaatacccactcagtctgtgttaaattgtatgtctttttaaaggtatttaaagattcaac

SEQ ID NO: 784714 - DNA, 120 bp, Artificial Sequence
  ENSG00000257315_56 (sequence is synthesized)
taagctttaaagagggctgagcagctcaggaagcctgtaatgtgggcataactctttggacctgatcttgatgcttctgctgctctgttagcctctgaagagcaatatctaatttattat

SEQ ID NO: 784715 - DNA, 120 bp, Artificial Sequence
  ENSG00000257315_57 (sequence is synthesized)
tactgtaattttttaaaaggctttaaagtgcctcaggggtcccctgaaactaattttctatttctgggattccctggattcattatatgagatggtgacatgattagaggaattcttttt

SEQ ID NO: 784716 - DNA, 120 bp, Artificial Sequence
  ENSG00000257315_58 (sequence is synthesized)
tagtatgaaaattgtcctttttcttcttcagtacttgcctccttgctggcattgaattaacacagggacaaaatttggttaattttttatttctaactctcccaacaaacccctgttgcc

SEQ ID NO: 784717 - DNA, 120 bp, Artificial Sequence
  ENSG00000257315_59 (sequence is synthesized)
cagtatttgtttggtggcctttaaccacctgagggaaaaaatgagcttattcaagctgccaatatttatctatgggctgtagcagtacactgaattgtactgtgccagggatattgagat

SEQ ID NO: 784718 - DNA, 120 bp, Artificial Sequence
  ENSG00000257315_60 (sequence is synthesized)
gctctgggggtgtattgtatacctgccagttttcttcatttctgaattgagttttcttttcttgatgttggtttccttcatatcacctcaaggtttagatttgtgaaggaataagcatga

SEQ ID NO: 784719 - DNA, 120 bp, Artificial Sequence
  ENSG00000257315_61 (sequence is synthesized)
tggaaataatagtcttgaaaggagatatgttgtatataatcaggaggaagaggaaggaaggacttacccattttgatattttgctgtaggtggccagttttgtttctcatagggaaatct

SEQ ID NO: 784720 - DNA, 120 bp, Artificial Sequence
  ENSG00000257315_62 (sequence is synthesized)
gacccacctgtcatgttggctcctaaggaactgctgttgtaagcggctcatcaagagttgaacttcacgtagccttgttgggaatatggaaaaggaagaaagccacaggactgcccattc

SEQ ID NO: 784721 - DNA, 120 bp, Artificial Sequence
  ENSG00000257315_63 (sequence is synthesized)
agtcttgggaagattgggatgattctgcacaagcaaaaatgactgaagtttatgtatagacacacctctaccaatccatcttcagctgactgaatgttgtatgatagcccttctccaaag

SEQ ID NO: 784722 - DNA, 120 bp, Artificial Sequence
  ENSG00000257315_64 (sequence is synthesized)
cagaggtagaatgttcaggtttcaccatggattttctacttatttcgtttttggaatcagcttacagattccaggtcccttttgtatatattctttattcttttgcttttttaaaaaata

SEQ ID NO: 784723 - DNA, 120 bp, Artificial Sequence
  ENSG00000257315_65 (sequence is synthesized)
attttgtttcatatttaaagcacttgtattagtcaatgtttcgtgttccgcattatttgaaccatttgcccttacagaaagagaaatacttgtttgtgttttaaataaaactgatgtagg

SEQ ID NO: 784724 - DNA, 120 bp, Artificial Sequence
  ENSG00000257315_66 (sequence is synthesized)
gcggccaagcaagaagaaagacgtggcagcaagcgggagtcggggatagtgtcatcggttcggtaaagtttctgttctctggtaactagacccgtttttttgattcccgggtggcttggg

SEQ ID NO: 784725 - DNA, 120 bp, Artificial Sequence
  ENSG00000257315_67 (sequence is synthesized)
gccggggaggtgggggagagggcgaggggagtggcagcggcctcccctcgcccctgggtcgcggcctatcccgggaagtcagagcggatccttcagcttcgccgtaacgacccctccccc

SEQ ID NO: 784726 - DNA, 120 bp, Artificial Sequence
  ENSG00000257315_68 (sequence is synthesized)
ccacctcccggtcgcggccctcgccggggctggctgggagccccaggctcccgctcacttttcccatcctccccacccccaccccgttcaccccacccccacggcgcctgctcctttccc

SEQ ID NO: 784727 - DNA, 120 bp, Artificial Sequence
  ENSG00000257315_69 (sequence is synthesized)
agccaaccttcctcccctcccccacatccggtgttcgctaatctcgaggagcccggagcagccccgaaaaccgactgttcccccgaatcccgaagagagaactgacactagattgctttc

SEQ ID NO: 784728 - DNA, 120 bp, Artificial Sequence
  ENSG00000257315_70 (sequence is synthesized)
ttcggggcaacagtttctctagttgagcggaccctcactgcctaaatcaatcagactgagtgccgggcgctgaatttacctactctcattcctctccagggtcccggtactttggagctt

SEQ ID NO: 784729 - DNA, 120 bp, Artificial Sequence
  ENSG00000257315_71 (sequence is synthesized)
gtctcaaactccacatacagaaagccaccgaccttattccggtatcctacacccattccccactctcattacactcccacccctggccctcagcgtcggagtcaagagcaacagggacac

SEQ ID NO: 784730 - DNA, 120 bp, Artificial Sequence
  ENSG00000257315_72 (sequence is synthesized)
ttccgttctccttgtaggactggtgaaaccgtaatgaagaacacccctaaactcccataatcggtgcggattcctatggggaaggcctatattgttgacatcttccaggccttggttctg

SEQ ID NO: 784731 - DNA, 120 bp, Artificial Sequence
  ENSG00000257315_73 (sequence is synthesized)
gaccttgagaaagaggctgtggaactagagatagcgatgctttttagggtaaatgtatgtaggtattgggggaaggggagggatcaatcgaaaaatggaagtggtttaaagttcatattt

SEQ ID NO: 784732 - DNA, 120 bp, Artificial Sequence
  ENSG00000257315_74 (sequence is synthesized)
cactttttgctatctctatagcgtacaacttgtgagttacttacaggctgtaaaagcttctcaagtctaaaaatatctgaaaactaaacttgaattaactcttaatacaaacagtacttt

SEQ ID NO: 784733 - DNA, 120 bp, Artificial Sequence
  ENSG00000257315_75 (sequence is synthesized)
gaaaatgcagcatttaaccttgttttaaaatttttttctcaaagcatttttttccagccactcacattttaaaaggttgtattacttttagttagaactgaaagggctcaactagcattt

SEQ ID NO: 784734 - DNA, 120 bp, Artificial Sequence
  ENSG00000257315_76 (sequence is synthesized)
gctgtgaccagtatgcggagtctgtgttggctttccagaattgactttttgggttgtattggcaaatcacagtcctaaatgatgaatgttgaatgatgcactatgtttttgtttaaatga

SEQ ID NO: 784735 - DNA, 120 bp, Artificial Sequence
  ENSG00000257315_77 (sequence is synthesized)
gatttcctgaaaatagttaatttcagaattaagggaaattgatgtcgctatcatgaggcatcataaaaatatgtattttacaaggtgaaggcatttcaagtagatatagttcttgatgaa

SEQ ID NO: 784736 - DNA, 120 bp, Artificial Sequence
  ENSG00000257315_78 (sequence is synthesized)
gcaggaagaacatggatctgggatttggaagacctggcttctagctgctactaaccaactctgtgactctgggaaagggggactcagttcttacttctgtaacatgaggacactggacta

SEQ ID NO: 784737 - DNA, 120 bp, Artificial Sequence
  ENSG00000257315_79 (sequence is synthesized)
tttgaattcagaacttagaaaattggaagggaccttaaagccctctaagaaagagttcgggaatgttctccattgctgtcagttttcctccaaaaataacctggcttggaagttattggt

SEQ ID NO: 784738 - DNA, 120 bp, Artificial Sequence
  ENSG00000257315_80 (sequence is synthesized)
ccagtgggaatttgattccccatagaaactggagaaaaggtaatgcaagtagagaggaacagctgtatttctgcttgagtaataaacccactaacagattctggtacgaattgtggagac

SEQ ID NO: 784739 - DNA, 120 bp, Artificial Sequence
  ENSG00000257315_81 (sequence is synthesized)
ataaagagaatgagtgtatgtactctaagtgtaccagtttcttcactctctcctggcagaagatgcaacacttttagtgattctgggattctgggatgtgttcctattaattctaataca

SEQ ID NO: 784740 - DNA, 120 bp, Artificial Sequence
  ENSG00000257315_82 (sequence is synthesized)
gatgaagaagatgtggtagaggaaaagatggtagcagaaggagtgaataaagaggcaaaacagcctgctaaaaagaaaagaaagaagggtttgcgaattaaggggaaaaggcgtcgaaaa

SEQ ID NO: 784741 - DNA, 120 bp, Artificial Sequence
  ENSG00000257315_83 (sequence is synthesized)
aaattgattcttgccaaaaagtttagtaaggatttgggatctgggaggcctgttgcagatgcccctgctttgttagcttccaatgaccctgagcaggatgaagaaagtctttttgagagc

SEQ ID NO: 784742 - DNA, 120 bp, Artificial Sequence
  ENSG00000257315_84 (sequence is synthesized)
aatatagaaaaacagatctatctacctagtactagagccaagacctccattgtgtggcacttctttcatgttgacccccagtacacctggcgggccatttgtaacctctgtgagaaaagc

SEQ ID NO: 784743 - DNA, 120 bp, Artificial Sequence
  ENSG00000257315_85 (sequence is synthesized)
gtcagcaggggtaaaccaggtagccatcttggtacatctactcttcaacgacatctgcaagcaaggcattcacctcattggaccagggccaacaagtttggagttgctagtggagaggag

SEQ ID NO: 784744 - DNA, 120 bp, Artificial Sequence
  ENSG00000257315_86 (sequence is synthesized)
gactttaccttggatgtgtctttatctccctcttctggaagcaatggaagctttgaatatattcctactgatccattagatgataatagaatgggcaagaagcatgataaatcagcatct

SEQ ID NO: 784745 - DNA, 120 bp, Artificial Sequence
  ENSG00000257315_87 (sequence is synthesized)
gatgccctaagggcagaaagagggagatttctcatcaaaagtaacattgtcaagcatgctttaattcctggaactagagccaagacatctgccgtttggaattttttttacactgatcct

SEQ ID NO: 784746 - DNA, 120 bp, Artificial Sequence
  ENSG00000257315_88 (sequence is synthesized)
cagcacatctcaagagctgtgtgtaatatatgtaaaagaagtgtgagccggggtaggccagggtcccacttagggacttcaacacttcaacgacacctgcaagccacacatcctatccat

SEQ ID NO: 784747 - DNA, 120 bp, Artificial Sequence
  ENSG00000257315_89 (sequence is synthesized)
tgggctgttgccaacaaagacagtggtgctgttgcaaatggattagatgaagctgagactgagagaagtgatctcttgagtgataccttgcatggagaaaagtctacaggcagccaagat

SEQ ID NO: 784748 - DNA, 120 bp, Artificial Sequence
  ENSG00000257315_90 (sequence is synthesized)
ttaacagctgaggaccttagtgactctgattcagatgaacctatgttagaggttgaaaacagatctgaaagtcctattcccgttgcagagcaaggcactctgatgcgtgcgcaggagaga

SEQ ID NO: 784749 - DNA, 120 bp, Artificial Sequence
  ENSG00000257315_91 (sequence is synthesized)
gaaacaacatgttgtggaaatccagtctcaagtcacataagtcaggcaattatccaaatgattgtggaggatatgcatccttacaactatttctcaaccccagcctttcagaggttcatg

SEQ ID NO: 784750 - DNA, 120 bp, Artificial Sequence
  ENSG00000257315_92 (sequence is synthesized)
cagattgtggcccctgattataggttgccatcagagacttactttttcactaaggctgtacctcagttatatgattgtgtcagagaaaaaattttcttaactttagagaatgttcaaagc

SEQ ID NO: 784751 - DNA, 120 bp, Artificial Sequence
  ENSG00000257315_93 (sequence is synthesized)
caaaagatacacctgactgttgacatatggacccatgacccatccactgactattttattgtgactgtacactgggtttctttggaaactgcgtcttttctcaataatggcaggatcccc

SEQ ID NO: 784752 - DNA, 120 bp, Artificial Sequence
  ENSG00000257315_94 (sequence is synthesized)
gattttagaaagtgggcagtgctttgtgttacaggtttggctaaagactgtttgataaccaatattttacaagaattaaatgaccagattggtctgtggctttctccaaatttccttatc

SEQ ID NO: 784753 - DNA, 120 bp, Artificial Sequence
  ENSG00000257315_95 (sequence is synthesized)
cctagcttcattgtttctgacaattcctctaatgtggtacatgcaatcaaagatggtggttttacccatgtgccatgcttcctgcattgtttaaatatggtcattcaggactttttctgc

SEQ ID NO: 784754 - DNA, 120 bp, Artificial Sequence; identical to SEQ ID NO: 40336
  ENSG00000257315_96 (sequence is synthesized)

SEQ ID NO: 784755 - DNA, 120 bp, Artificial Sequence; identical to SEQ ID NO: 40337
  ENSG00000257315_97 (sequence is synthesized)

SEQ ID NO: 784756 - DNA, 120 bp, Artificial Sequence; identical to SEQ ID NO: 40338
  ENSG00000257315_98 (sequence is synthesized)

SEQ ID NO: 784757 - DNA, 120 bp, Artificial Sequence; identical to SEQ ID NO: 40339
  ENSG00000257315_99 (sequence is synthesized)

SEQ ID NO: 784758 - DNA, 120 bp, Artificial Sequence; identical to SEQ ID NO: 40340
  ENSG00000257315_100 (sequence is synthesized)

SEQ ID NO: 784759 - DNA, 120 bp, Artificial Sequence; identical to SEQ ID NO: 40341
  ENSG00000257315_101 (sequence is synthesized)

SEQ ID NO: 784760 - DNA, 120 bp, Artificial Sequence; identical to SEQ ID NO: 40342
  ENSG00000257315_102 (sequence is synthesized)

SEQ ID NO: 784761 - DNA, 120 bp, Artificial Sequence
  ENSG00000257335_0 (sequence is synthesized)
attgctaagccatccttcagacagagagggagcggctgcaagaggtaatgagagatggcaagaaagaagctgaaaaaatttactactttggagattgtgctcagtgttcttctgcttgtg

SEQ ID NO: 784762 - DNA, 120 bp, Artificial Sequence
  ENSG00000257335_1 (sequence is synthesized)
ttgtttatcatcagtattgttctaattgtgcttttagccaaagagtcactgaaatcaacagccccagatcctgggacaactggtaccccagatcctgggacaactggtaccccagatcct

SEQ ID NO: 784763 - DNA, 120 bp, Artificial Sequence
  ENSG00000257335_2 (sequence is synthesized)
ggaacaactggtaccacacatgctaggacaacgggtcccccagatcctggaacaactggtaccactcctgtttctgctgaatgtccagtggtaaatgaattggaacgaattaattgcatc

SEQ ID NO: 784764 - DNA, 120 bp, Artificial Sequence
  ENSG00000257335_3 (sequence is synthesized)
cctgaccagccgccaacaaaggccacatgtgaccaacgtggctgttgctggaatccccagggagctgtaagtgttccctggtgctactattccaagaatcatagctaccatgtagagggc

SEQ ID NO: 784765 - DNA, 120 bp, Artificial Sequence
  ENSG00000257335_4 (sequence is synthesized)
aaccttgtcaacacaaatgcaggattcacagcccggttgaaaaatctgccttcttcaccagtgtttggaagcaatgttgacaatgttcttctcacagcagaatatcagacatctaatcgt

SEQ ID NO: 784766 - DNA, 120 bp, Artificial Sequence
  ENSG00000257335_5 (sequence is synthesized)
ttccactttaagttgactgaccaaaccaataacaggtttgaagtgccccacgaacacgtgcagtccttcagtggaaatgctgctgcttctttgacctaccaagttgaaatctccagacag

SEQ ID NO: 784767 - DNA, 120 bp, Artificial Sequence
  ENSG00000257335_6 (sequence is synthesized)
ccatttagcatcaaagtgaccagaagaagcaacaatcgtgttttgtttgactcgagcattgggcccctactgtttgctgaccagttcttgcagctctccactcgactgcctagcactaac

SEQ ID NO: 784768 - DNA, 120 bp, Artificial Sequence
  ENSG00000257335_7 (sequence is synthesized)
gtgtatggcctgggagagcatgtgcaccagcagtatcggcatgatatgaattggaagacctggcccatatttaacagagacacaactcccaatggaaacggaactaatttgtatggtgcg

SEQ ID NO: 784769 - DNA, 120 bp, Artificial Sequence
  ENSG00000257335_8 (sequence is synthesized)
cagacattcttcttgtgccttgaagatgctagtggattgtcctttggggtgtttctgatgaacagcaatgccatggaggttgtccttcagcctgcgccagccatcacttaccgcaccatt

SEQ ID NO: 784770 - DNA, 120 bp, Artificial Sequence
  ENSG00000257335_9 (sequence is synthesized)
gggggcattctcgacttctatgtgttcttgggaaacactccagagcaagttgttcaagaatatctagagctcattgggcggccagcccttccctcctactgggcgcttggatttcacctc

SEQ ID NO: 784771 - DNA, 120 bp, Artificial Sequence
  ENSG00000257335_10 (sequence is synthesized)
agtcgttacgaatatggaaccttagacaacatgagggaagtcgtggagagaaatcgcgcagcacagctcccttatgatgttcagcatgctgatattgattatatggatgagagaagggac

SEQ ID NO: 784772 - DNA, 120 bp, Artificial Sequence
  ENSG00000257335_11 (sequence is synthesized)
ttcacttatgattcagtggattttaaaggcttccctgaatttgtcaacgagttacacaataatggacagaagcttgtcatcattgtggatccagccatctccaacaactcttcctcaagt

SEQ ID NO: 784773 - DNA, 120 bp, Artificial Sequence
  ENSG00000257335_12 (sequence is synthesized)
aaaccctatggcccatatgacaggggttcagatatgaagatatgggtgaatagttcagatggagtgactccactcattggggaggtctggcctggacaaactgtgtttcctgattatacc

SEQ ID NO: 784774 - DNA, 120 bp, Artificial Sequence
  ENSG00000257335_13 (sequence is synthesized)
aatcccaactgtgctgtttggtggacaaaggaatttgagctttttcacaatcaagtagagtttgatggaatctggattgatatgaatgaagtctccaactttgttgatggttcggtctca

SEQ ID NO: 784775 - DNA, 120 bp, Artificial Sequence
  ENSG00000257335_14 (sequence is synthesized)
ggatgttccacaaacaacctaaataatcccccattcactcccagaatcctggatgggtacctgttctgcaagactctctgtatggatgcagtgcagcactggggcaagcagtatgacatt

SEQ ID NO: 784776 - DNA, 120 bp, Artificial Sequence
  ENSG00000257335_15 (sequence is synthesized)
cacaatctgtatggctactccatggcggtcgccacagcagaagctgccaagactgtgttccctaataagagaagcttcattctgacccgttctacctttgcgggctctggcaagtttgca

SEQ ID NO: 784777 - DNA, 120 bp, Artificial Sequence
  ENSG00000257335_16 (sequence is synthesized)
gcacattggttaggagacaacactgccacctgggatgacctgagatggtccatccctggcgtgcttgagttcaacctttttggcatcccaatggtgggtcctgacatatgtggctttgct

SEQ ID NO: 784778 - DNA, 120 bp, Artificial Sequence
  ENSG00000257335_17 (sequence is synthesized)
ttggacacccctgaggagctctgtaggcggtggatgcagttgggtgcattttatccgttttctagaaatcacaatggccaaggctacaaggaccaggatcctgcctcctttggagctgac

SEQ ID NO: 784779 - DNA, 120 bp, Artificial Sequence
  ENSG00000257335_18 (sequence is synthesized)
tccctgctgttgaattcctccaggcactaccttaacatccgctatactctattgccctacctatacaccctcttcttccgtgctcacagccgaggggacacggtggccaggccccttttg

SEQ ID NO: 784780 - DNA, 120 bp, Artificial Sequence
  ENSG00000257335_19 (sequence is synthesized)
catgagttctacgaggacaacagcacttgggatgtgcaccaacagttcttatgggggcccggcctcctcatcactccagttctggatgaaggtgcagagaaagtgatggcatatgtgcct

SEQ ID NO: 784781 - DNA, 120 bp, Artificial Sequence
  ENSG00000257335_20 (sequence is synthesized)
gatgctgtctggtatgactacgagactgggagccaagtgagatggaggaagcaaaaagtcgagatggaacttcctggagacaaaattggacttcaccttcgaggaggctacatcttcccc

SEQ ID NO: 784782 - DNA, 120 bp, Artificial Sequence
  ENSG00000257335_21 (sequence is synthesized)
acacagcagccaaatacaaccactctggccagtcgaaagaaccctcttggtcttatcattgccctagatgagaacaaagaagcaaaaggagaacttttctgggataatggggaaacgaag

SEQ ID NO: 784783 - DNA, 120 bp, Artificial Sequence
  ENSG00000257335_22 (sequence is synthesized)
gatactgtggccaataaagtgtatcttttatgtgagttttctgtcactcaaaaccgcttggaggtgaatatttcacaatcaacctacaaggaccccaataatttagcatttaatgagatt

SEQ ID NO: 784784 - DNA, 120 bp, Artificial Sequence
  ENSG00000257335_23 (sequence is synthesized)
aaaattcttgggacggaggaacctagcaatgttacagtgaaacacaatggtgtcccaagtcagacttctcctacagtcacttatgattctaacctgaaggttgccattatcacagatatt

SEQ ID NO: 784785 - DNA, 120 bp, Artificial Sequence
  ENSG00000257335_24 (sequence is synthesized)
gatcttctcctgggagaagcatacacagtggaatggagcataaagataagggatgaagaaaaaatagactgttaccctgatgagaatggtgcttctgccgaaaactgcactgcccgtggc

SEQ ID NO: 784786 - DNA, 120 bp, Artificial Sequence
  ENSG00000257335_25 (sequence is synthesized)
tgtatctgggaggcatccaattcttctggagtccctttttgctattttgtcaacgacctatactctgtcagtgatgttcagtataattcccatggggccacagctgacatctccttaaag

SEQ ID NO: 784787 - DNA, 120 bp, Artificial Sequence
  ENSG00000257335_26 (sequence is synthesized)
tcttccgtttatgccaatgccttcccctccacacccgtgaacccccttcgcctggatgtcacttaccataagaatgaaatgctgcagttcaagatttatgatcccaacaagaatcggtat

SEQ ID NO: 784788 - DNA, 120 bp, Artificial Sequence
  ENSG00000257335_27 (sequence is synthesized)
gaagttccagtccctctgaacatacccagcatgccatccagcacccctgagggtcaactctatgatgtgctcattaagaagaatccatttgggattgaaattcgccggaagagtacaggc

SEQ ID NO: 784789 - DNA, 120 bp, Artificial Sequence
  ENSG00000257335_28 (sequence is synthesized)
actataatttgggactctcagctccttggctttaccttcagtgacatgtttatccgcatctccacccgccttccctccaagtacctctatggctttggggaaactgagcacaggtcctat

SEQ ID NO: 784790 - DNA, 120 bp, Artificial Sequence
  ENSG00000257335_29 (sequence is synthesized)
aggagagacttggagtggcacacttgggggatgttctcccgagaccagcccccagggtacaagaagaattcctatggtgtccacccctactacatggggctggaggaggacggcagtgcc

SEQ ID NO: 784791 - DNA, 120 bp, Artificial Sequence
  ENSG00000257335_30 (sequence is synthesized)
catggagtgctcctgctgaacagcaatgccatggatgtgacgttccagcccctgcctgccttgacataccgcaccacagggggagttctggacttttatgtgttcttggggccgactcca

SEQ ID NO: 784792 - DNA, 120 bp, Artificial Sequence
  ENSG00000257335_31 (sequence is synthesized)
gagcttgtcacccagcagtacactgagttgattggccggcctgtgatggtaccttactggtctttggggttccagctgtgtcgctatggctaccagaatgactctgagatcgccagcttg

SEQ ID NO: 784793 - DNA, 120 bp, Artificial Sequence
  ENSG00000257335_32 (sequence is synthesized)
tatgatgagatggtggctgcccagatcccttatgatgtgcagtactcagacatcgactacatggagcggcagctggacttcaccctcagccccaagtttgctgggtttccagctctgatc

SEQ ID NO: 784794 - DNA, 120 bp, Artificial Sequence
  ENSG00000257335_33 (sequence is synthesized)
aatcgcatgaaggctgatgggatgcgggtcatcctcattctggatccagccatttctggcaatgagacacagccttatcctgccttcactcggggcgtggaggatgacgtcttcatcaaa

SEQ ID NO: 784795 - DNA, 120 bp, Artificial Sequence
  ENSG00000257335_34 (sequence is synthesized)
tacccaaatgatggagacattgtctggggaaaggtctggcctgattttcctgatgttgttgtgaatgggtctctagactgggacagccaagtggagctatatcgagcttatgtggccttc

SEQ ID NO: 784796 - DNA, 120 bp, Artificial Sequence
  ENSG00000257335_35 (sequence is synthesized)
ccagactttttccgtaattcaactgccaagtggtggaagagggaaatagaagaactatacaacaatccacagaatccagagaggagcttgaagtttgatggcatgtggattgatatgaat

SEQ ID NO: 784797 - DNA, 120 bp, Artificial Sequence
  ENSG00000257335_36 (sequence is synthesized)
gaaccatcaagcttcgtgaatggggcagtttctccaggctgcagggacgcctctctgaaccaccctccctacatgccacatttggagtccagggacaggggcctgagcagcaagaccctt

SEQ ID NO: 784798 - DNA, 120 bp, Artificial Sequence
  ENSG00000257335_37 (sequence is synthesized)
tgtatggagagtcagcagatcctcccagacggctccctggtgcagcactacaacgtgcacaacctgtatgggtggtcccagaccagacccacatacgaagccgtgcaggaggtgacggga

SEQ ID NO: 784799 - DNA, 120 bp, Artificial Sequence
  ENSG00000257335_38 (sequence is synthesized)
caggacattggctgggagacaacacggccgcatgggatcagctgaagaagtctatcattggcatgatggagttcagcctctttggcatatcctatacgggagcagatatctgtgggttct

SEQ ID NO: 784800 - DNA, 120 bp, Artificial Sequence
  ENSG00000257335_39 (sequence is synthesized)
ttcaagacgctgagtacgagatgtgtgttcgctggatgcagctgggggccttttaccccttctcaagaaaccacaataccattgggaccaggagacaagaccctgtgtcctgggatgctg

SEQ ID NO: 784801 - DNA, 120 bp, Artificial Sequence
  ENSG00000257335_40 (sequence is synthesized)
cttttgtgaatatttccagaaatgtcctgcagaccagatacaccctgttgccatatctgtataccttgatgcaaaaggcccacacggagggcgtcactgttgtgcggcctctgctccatg

SEQ ID NO: 784802 - DNA, 120 bp, Artificial Sequence
  ENSG00000257335_41 (sequence is synthesized)
agtttgtgtcagaccaggtgacatgggacatagacagtcagttcctgctgggcccagccttcctggtcagccctgtcctggagcgcaatgccagaaatgtcactgcatatttccctagag

SEQ ID NO: 784803 - DNA, 120 bp, Artificial Sequence
  ENSG00000257335_42 (sequence is synthesized)
cccgttggtacgattactacacgggtgtggatattaatgcaagaggagagtggaagaccttgccagcccctcttgaccacattaatcttcatgtccgtgggggctacatcctgccctggc

SEQ ID NO: 784804 - DNA, 120 bp, Artificial Sequence
  ENSG00000257335_43 (sequence is synthesized)
aagagcctgcactgaacacccacttaagtcgaaagaaccctcttggtcttattattgccctagatgaaaacaaagaagcaaaaggagaacttttctgggatgatgggcaaacaaaggata

SEQ ID NO: 784805 - DNA, 120 bp, Artificial Sequence
  ENSG00000257335_44 (sequence is synthesized)
ctgtggccaagaaagtatatcttttatgtgagttttctgtcactcaaaaccacttggaggtgactatttcacaatcaacctacaaggaccccaataatttagcattcaatgagattaaaa

SEQ ID NO: 784806 - DNA, 120 bp, Artificial Sequence
  ENSG00000257335_45 (sequence is synthesized)
ttcttgggatggaggaacctagcaatgttacggtgaaacacaatggtgtcccaagtcagacttctcctacagtcacttatgattctaacctgaaggtcgccattatcacagacatcaatc

SEQ ID NO: 784807 - DNA, 120 bp, Artificial Sequence
  ENSG00000257335_46 (sequence is synthesized)
ttttcctgggagaagcatacacagtggagtggagcataaagataagggatgaagaaaaaatagactgttaccctgatgagaatggtgattctgcagaaaactgcactgcccgtggctgta

SEQ ID NO: 784808 - DNA, 120 bp, Artificial Sequence
  ENSG00000257335_47 (sequence is synthesized)
tctgggaggcatccaattcttctggagtccctttttgctattttgtcaacgacctatactctgtcagtgatgttcagtataactcccatggggccacagctgacatctccttaaagtctt

SEQ ID NO: 784809 - DNA, 120 bp, Artificial Sequence
  ENSG00000257335_48 (sequence is synthesized)
ctgttcatgccaatgccttcccttccacacccgtgaacccccttcgcctggatgtcacttaccataagaatgaaatgctacagttcaagatttatgatcccaacaacaatcggtatgaag

SEQ ID NO: 784810 - DNA, 120 bp, Artificial Sequence
  ENSG00000257335_49 (sequence is synthesized)
ttccagtccctctgaacatacccagcgtgccatccagcacccctgagggtcaactctatgatgtcctcattaagaagaatccatttgggattgaaattcgccggaagagtacaggcacta

SEQ ID NO: 784811 - DNA, 120 bp, Artificial Sequence
  ENSG00000257335_50 (sequence is synthesized)
taatttgggactctcagctccttggcttcaccttcaatgacatgtttatccgcatctccacccgccttccctccaagtacctctatggctttggggagactgagcacacgtcctacagga

SEQ ID NO: 784812 - DNA, 120 bp, Artificial Sequence
  ENSG00000257335_51 (sequence is synthesized)
gagacttggagtggcacacttgggggatgttctcccgagaccagcccccagggtacaagaagaattcctatggtgtccacccctactacatggggctagaggaggatggcagtgcccatg

SEQ ID NO: 784813 - DNA, 120 bp, Artificial Sequence
  ENSG00000257335_52 (sequence is synthesized)
gagtgctcctgctgaacagcaatgccatggatgtgacgttccagcccctgcctgccttgacataccgtaccacagggggagttctggacttttatgtgttcttggggccaactccagagc

SEQ ID NO: 784814 - DNA, 120 bp, Artificial Sequence
  ENSG00000257335_53 (sequence is synthesized)
ttgtcacccagcagtacactgagttgattggccggcctgtgatggtaccttactggtctttggggttccagctgtgtcgctatggctaccagaacgactctgagatctccagcttgtatg

SEQ ID NO: 784815 - DNA, 120 bp, Artificial Sequence
  ENSG00000257335_54 (sequence is synthesized)
atgagatggtggctgcccagatcccttatgacgtgcagtactcagacatcgactacatggagcggcagctggacttcaccctcagccccaagtttgccgggtttccagctctgatcaatc

SEQ ID NO: 784816 - DNA, 120 bp, Artificial Sequence
  ENSG00000257335_55 (sequence is synthesized)
gcatgaaggctgatgggatgcgggtcatcctcattctggatccagccatttctggcaatgagacacagccctatcctgccttcactcggggcgtggaggatgacgtcttcatcaagtacc

SEQ ID NO: 784817 - DNA, 120 bp, Artificial Sequence
  ENSG00000257335_56 (sequence is synthesized)
caaatgatggagacattgtctggggaaaggtctggcctgattttcctgatgttgttgtgaatgggtctctagactgggacagtcaagtggagctatatcgagcttatgtggccttcccag

SEQ ID NO: 784818 - DNA, 120 bp, Artificial Sequence
  ENSG00000257335_57 (sequence is synthesized)
actttttccgtaattcaactgccaagtggtggaagagggaaatagaagaactatacaacaatccacagaatccagagaggagcttgaagtttgatggcatgtggattgatatgaatgaac

SEQ ID NO: 784819 - DNA, 120 bp, Artificial Sequence
  ENSG00000257335_58 (sequence is synthesized)
catcaagcttcgtgaatggggcagtttctccaggctgcagggatgcctctctgaaccaccctccctacatgccgtatttggagtccagggacaggggcctgagcagcaagaccctgtgca

SEQ ID NO: 784820 - DNA, 120 bp, Artificial Sequence
  ENSG00000257335_59 (sequence is synthesized)
tggagagtcagcagatcctcccagacggctccccggtgcagcactacaatgtgcacaacctgtacgggtggtcccagaccagacccacatacgaagccgtgcaggaggtgacaggacagc

SEQ ID NO: 784821 - DNA, 120 bp, Artificial Sequence
  ENSG00000257335_60 (sequence is synthesized)
gaggggtcgtcatcacccgctccacatttccctcttctggccgctgggcaggacattggctgggagacaacacagccgcgtgggatcagctgaagaagtctatcattggcatgatggagt

SEQ ID NO: 784822 - DNA, 120 bp, Artificial Sequence
  ENSG00000257335_61 (sequence is synthesized)
tcagcctcttcggcatatcctatacgggagcagatatctgtgggttctttcaagatgctgaatatgagatgtgtgttcgctggatgcagctgggggccttttaccccttctcaagaaacc

SEQ ID NO: 784823 - DNA, 120 bp, Artificial Sequence
  ENSG00000257335_62 (sequence is synthesized)
acaacaccattgggaccaggagacaagaccctgtgtcctgggatgttgcttttgtgaatatttccagaactgtcctgcagaccagatacaccctgttgccatatctgtataccttgatgc

SEQ ID NO: 784824 - DNA, 120 bp, Artificial Sequence
  ENSG00000257335_63 (sequence is synthesized)
ataaggcccacacggagggcgtcactgttgtgcggcctctgctccatgagtttgtgtcagaccaggtgacatgggacatagacagtcagttcctgctgggcccagccttcctggtcagcc

SEQ ID NO: 784825 - DNA, 120 bp, Artificial Sequence
  ENSG00000257335_64 (sequence is synthesized)
ctgtcctggagcgtaatgccagaaatgtcactgcatatttccctagagcccgctggtatgattactacacgggtgtggatattaatgcaagaggagagtggaagaccttgccagcccctc

SEQ ID NO: 784826 - DNA, 120 bp, Artificial Sequence
  ENSG00000257335_65 (sequence is synthesized)
ttgaccacattaatcttcatgtccgtgggggctacatcctgccctggcaagagcctgcactgaacacccacttaagccgccagaaattcatgggcttcaaaattgccttggatgatgaag

SEQ ID NO: 784827 - DNA, 120 bp, Artificial Sequence
  ENSG00000257335_66 (sequence is synthesized)
gaactgctgggggctggctcttctgggatgatgggcaaagcattgatacctatgggaaaggactctattacttggccagcttttctgccagccagaatacgatgcaaagccatataattt

SEQ ID NO: 784828 - DNA, 120 bp, Artificial Sequence
  ENSG00000257335_67 (sequence is synthesized)
tcaacaattacatcactggtacaaatcctttgaaactgggctacattgaaatctggggagtgggcagtgtccccgttaccagtgtcagcatctctgtgagtggcatggtcataacaccct

SEQ ID NO: 784829 - DNA, 120 bp, Artificial Sequence
  ENSG00000257335_68 (sequence is synthesized)
ccttcaacaatgaccccacgacacaggtattaagcatcgatgtgactgacagaaacatcagcctacataattttacttcattgacgtggataagcactctgtgaatttttacagcaagat

SEQ ID NO: 784830 - DNA, 120 bp, Artificial Sequence
  ENSG00000257335_69 (sequence is synthesized)
tctaactaactatgaatgactttgaaactacttatacttcatactcataaaaattattgtgtgttgctaatttgttcatacccactattggtgaaatatttctgttaattttgttatatg

SEQ ID NO: 784831 - DNA, 120 bp, Artificial Sequence
  ENSG00000257335_70 (sequence is synthesized)
ttttttgtgtgaaccctaaaggttaaaccttagccctgtgggataggcagttagggaggtgtggaaaatctatgcattaccttaatgtctctgtgtggttagtatggtagtgactgttca

SEQ ID NO: 784832 - DNA, 120 bp, Artificial Sequence
  ENSG00000257335_71 (sequence is synthesized)
tcatatgacatttactgaagatgaactgggtccatgatgaagtgtgtgtatgtccacgtttgtaatcatagaatggaccccattcttttgttaaatacacaagagaaagctttctgtgac

SEQ ID NO: 784833 - DNA, 120 bp, Artificial Sequence
  ENSG00000257335_72 (sequence is synthesized)
agttccaggtcttgaagctaatcagcatctcaagaaagtatccagaaagaacatctgctagttggttataggcggtgggaggaataatatacctaattggttataggtggggggagcatg

SEQ ID NO: 784834 - DNA, 120 bp, Artificial Sequence
  ENSG00000257335_73 (sequence is synthesized)
ataagcaaagaaaaggcaaacacaaggaaagatcagatgaaacagaagatgatagtaaaagtgatcctaagtaagaacataatgtaaaattgtcagcagcctcatggggaggaaaaagga

SEQ ID NO: 784835 - DNA, 120 bp, Artificial Sequence
  ENSG00000257335_74 (sequence is synthesized)
agagtcaactcacttgaagaagagggtcttgagaaatccttagcataaagggctactggtgagattgagatctgagcaggcaaagctcaaaagagagtttggaggttaaaaataatttat

SEQ ID NO: 784836 - DNA, 120 bp, Artificial Sequence
  ENSG00000257335_75 (sequence is synthesized)
ttttgcagtagtgtgctttgaaatgtgtaaatcttatttctaatgtatacaaccacatttcacataaaaatatgcaatttatatgccagataaaaataaaacaagtgaatttgcaagtga

SEQ ID NO: 784837 - DNA, 120 bp, Artificial Sequence
  ENSG00000257335_76 (sequence is synthesized)
taagactgtagctgcagctgcatagacaagctacctttctggagagagaaacatccatctacatgctgaggagtagtttttagtgttttctgtaatttcatagcagaacctgggtaaagt

SEQ ID NO: 784838 - DNA, 120 bp, Artificial Sequence
  ENSG00000257335_77 (sequence is synthesized)
taacctaaaccgttaacatcagtcatgatgaaatgtgaaaaaataccttcatatactttatttagcaataagataggctgacatagtatctcataaattaatattggaggaactgatgga

SEQ ID NO: 784839 - DNA, 120 bp, Artificial Sequence
  ENSG00000257335_78 (sequence is synthesized)
gccaggaactgattaagaactctatttagagcccagaacagagttgtttatcctgaataataacagtgaaaatttgatttcattttactatggaaattcctaggtgctaattgtggactt

SEQ ID NO: 784840 - DNA, 120 bp, Artificial Sequence
  ENSG00000257335_79 (sequence is synthesized)
attgctaagccatccttcagacagagagggagcggctgcaagaggtaatgagcaacatggatagacctggaggctattttttctgcgtgaaatgacccagaaacagaaagtaaaaaactg

SEQ ID NO: 784841 - DNA, 120 bp, Artificial Sequence
  ENSG00000257335_80 (sequence is synthesized)
tgacagttgaattcttccaaattaaagacatgattgccttttgacatgagctcttcaggtgcagaccatactttattactctctttagcacagtgctatacatgccttaggtcattaata

SEQ ID NO: 784842 - DNA, 120 bp, Artificial Sequence
  ENSG00000257335_81 (sequence is synthesized)
aaaggttattgattgaatgagcaaaactgaaatgatgcagtatagcatagaataatttctttctaatttggctgtgcaaaggcctatctatcttttgtagcagtttggttatatgtagcc

SEQ ID NO: 784843 - DNA, 120 bp, Artificial Sequence
  ENSG00000257335_82 (sequence is synthesized)
aaacttcccacccacttcttgcaggaggctgtgtggttactccctagtagtatggtatactctgaggctaaaataaaacaaaccctgtcaacagactaggcctttttgatcagtcagaaa

SEQ ID NO: 784844 - DNA, 120 bp, Artificial Sequence
  ENSG00000257335_83 (sequence is synthesized)
tgctcagtactacagaagcggacctcatctctatactaactgagttgtttccgtaaaactgatcctgtctcctggagatggctagcatccagtcccccagtgcagaagaaagaagctcag

SEQ ID NO: 784845 - DNA, 120 bp, Artificial Sequence
  ENSG00000257335_84 (sequence is synthesized)
acagagtcaagtgtcagcgtttgagctattccagggtgaacccagcaatctcaggtttggtcttttgaagcaaaccaagatccccaggaaactgtggcatgttcacgtacttgccattga

SEQ ID NO: 784846 - DNA, 120 bp, Artificial Sequence
  ENSG00000257335_85 (sequence is synthesized)
acacagagttgttgatccaacgccaccttttctcttcacgatggtaaattaagccaataaaatacttctcagcatcagttatgtcctgaagaaacttctggaaataaaaaaaaaatttta

SEQ ID NO: 784847 - DNA, 120 bp, Artificial Sequence
  ENSG00000257335_86 (sequence is synthesized)
gggttaacactgggaaataaaaacttcccacccacttcttgcaggaggctgtgtggttaaatcctgttacattatacttcagctcttaccatggccttgtcattgggttgaactggagct

SEQ ID NO: 784848 - DNA, 120 bp, Artificial Sequence
  ENSG00000257335_87 (sequence is synthesized)
gtattttagattttgccaacaataacaagcgctgccaagtacttcagctgagatcacccaaataatactctactagcaaaagctttgcgtggcgttctaaccatcagaaactgagatggc

SEQ ID NO: 784849 - DNA, 120 bp, Artificial Sequence
  ENSG00000257365_0 (sequence is synthesized)
aatgcgcgttgttgcttaacgaagcagagtcctacacactgtctgctgctctcctgatcatggcttctccgagttctttcacctactattgccctccatcttcctcccccgtctggtcag

SEQ ID NO: 784850 - DNA, 120 bp, Artificial Sequence
  ENSG00000257365_1 (sequence is synthesized)
agccgctgtacagtctgaggcccgagcacgcgcgagagcggttgcaggacgactcggtggaaacagtcacgtccatagaacaggcaaaagtagaagaaaagatccaagaggtcttcagtt

SEQ ID NO: 784851 - DNA, 120 bp, Artificial Sequence
  ENSG00000257365_2 (sequence is synthesized)
cttacaagttcaaccaccttgtaccaaggcttgttttgcagagggagaagcacttccattatctgaaaagaggccttcgacaactgacagatgcctatgagtgtctggatgccagccgcc

SEQ ID NO: 784852 - DNA, 120 bp, Artificial Sequence
  ENSG00000257365_3 (sequence is synthesized)
catggctctgctattggatcctgcacagcttggaactgctagatgaacccatcccccagatagtggctacagatgtgtgtcagttcctggagctgtgtcagagcccagaaggtggctttg

SEQ ID NO: 784853 - DNA, 120 bp, Artificial Sequence
  ENSG00000257365_4 (sequence is synthesized)
gaggaggacccggtcagtatccacaccttgcacccacatatgcagcagtcaatgcattgtgcatcattggcaccgaggaggcctatgacatcattaacagagagaagcttcttcagtatt

SEQ ID NO: 784854 - DNA, 120 bp, Artificial Sequence
  ENSG00000257365_5 (sequence is synthesized)
tgtactccctgaagcaacctgacggctcctttctcatgcatgtcggaggtgaggtggatgtgagaagcgcatactgtgctgcctccgtagcctcgctgaccaacatcatcactccagacc

SEQ ID NO: 784855 - DNA, 120 bp, Artificial Sequence
  ENSG00000257365_6 (sequence is synthesized)
tctttgagggcactgctgaatggatagcaaggtgtcagaactgggaaggtggcattggcggggtaccagggatggaagcccatggtggctataccttctgtggcctggccgcgctggtaa

SEQ ID NO: 784856 - DNA, 120 bp, Artificial Sequence
  ENSG00000257365_7 (sequence is synthesized)
tcctcaagagggaacgttccttgaacttgaagagcttattacaatgggtgacaagccggcagatgcgatttgaaggaggatttcagggccgctgcaacaagctggtggatggctgctact

SEQ ID NO: 784857 - DNA, 120 bp, Artificial Sequence
  ENSG00000257365_8 (sequence is synthesized)
ccttctggcaggcggggctcctgcccctgctccaccgcgcactgcacgcccaaggtgaccctgcccttagcatgagccactggatgttccatcagcaggccctgcaggagtacatcctga

SEQ ID NO: 784858 - DNA, 120 bp, Artificial Sequence
  ENSG00000257365_9 (sequence is synthesized)
tgtgctgccagtgccctgcgggggggcttctggataaacctggcaagtcgcgtgatttctaccacacctgctactgcctgagcggcctgtccatagcccagcacttcggcagcggagcca

SEQ ID NO: 784859 - DNA, 120 bp, Artificial Sequence
  ENSG00000257365_10 (sequence is synthesized)
tgttgcatgatgtggtcctgggtgtgcccgaaaacgctctgcagcccactcacccagtgtacaacattggaccagacaaggtgatccaggccactacatactttctacagaagccagtcc

SEQ ID NO: 784860 - DNA, 120 bp, Artificial Sequence
  ENSG00000257365_11 (sequence is synthesized)
gctctttgctcacccatctccccagtcagacaaggtttatacgtttcaatacatactgcattctgtgctacacaagccttagcctcagtggagctgtggttctcttggtactttcttgtc

SEQ ID NO: 784861 - DNA, 120 bp, Artificial Sequence
  ENSG00000257365_12 (sequence is synthesized)
aaacaaaaccaatggctctgggtttggagaacacagtggctggttttaaaaattctttccacacctgtcaaaccaaaaatctatcagcccacgtggtgtggttggtgaacagtgcatgcc

SEQ ID NO: 784862 - DNA, 120 bp, Artificial Sequence
  ENSG00000257365_13 (sequence is synthesized)
aggaggaagcagtccctcctcaccagctctccagccaggacgatcacacagagatgaatggcatctgagtattacggcatccagagccactgctgactcccacttgcacgccaccattca

SEQ ID NO: 784863 - DNA, 120 bp, Artificial Sequence
  ENSG00000257365_14 (sequence is synthesized)
gtcaccagactgggtgccctccgatgggtggaataagtctgcttcatgccaaggctgggctttgggtcccaccaagatgagttctctgtaagactgtggtggagttgcaccaggaggtgc

SEQ ID NO: 784864 - DNA, 120 bp, Artificial Sequence
  ENSG00000257365_15 (sequence is synthesized)
ctctgcctctcgacttgcaccctggtcatttgtaagggaaaagagctggaggtggggagagaaagatctccttcagttgggagtccttccacttcaacactggagaactgagccttgcat

SEQ ID NO: 784865 - DNA, 120 bp, Artificial Sequence
  ENSG00000257365_16 (sequence is synthesized)
ctctccagggtccaaggccacgcttggtgcacaggcaagacttgcttcagccccaggtgtggtgacttagacctaggaaaccaattatgagtggaaagtgaccctctagttcaactgtgc

SEQ ID NO: 784866 - DNA, 120 bp, Artificial Sequence
  ENSG00000257365_17 (sequence is synthesized)
cagaggaaacagccctccagtgcccacctgcctcactcctccctatcatgtaccgtgaaaaccccctctgatggcctcaaggcagtgcctgcaggccgaggcccttctgggggtttctat

SEQ ID NO: 784867 - DNA, 120 bp, Artificial Sequence
  ENSG00000257365_18 (sequence is synthesized)
ctttcttccaccagactccaagcccactctcctccaagactgtgttgtcttttctcaccaagagtattaacactactaagtctttcaccttaacttatgactcaggatttattcacgtcc

SEQ ID NO: 784868 - DNA, 120 bp, Artificial Sequence
  ENSG00000257365_19 (sequence is synthesized)
tgcccactctaggctcacaggaataaaatcaagtgctagacacactggctgctactaaggcactagcctctgtagctggtggtggcagcgtggggtgccgcccagcgtgctgggtcctgg

SEQ ID NO: 784869 - DNA, 120 bp, Artificial Sequence
  ENSG00000257365_20 (sequence is synthesized)
cagtgcctctgctgtgctgcacattgagccctttctcagtcagtggagtatcaagttgggccatctgtctactgacctggccttcatgtaagcagctgtgggctgcgggcagacaggagc

SEQ ID NO: 784870 - DNA, 120 bp, Artificial Sequence
  ENSG00000257365_21 (sequence is synthesized)
tcagagatgcagcatgaggcgcttagaaaaacctggccatttgctgcctctaattcccttttgctttgccatattgggctatgtattacctccttgaaataataaaagaataacattttc

SEQ ID NO: 784871 - DNA, 120 bp, Artificial Sequence
  ENSG00000257365_22 (sequence is synthesized)
cttgatgaagagtcaaataacacgtctgactctgtgagcagcagaggccacccggaatcaacaagagatgctgcccgtcttcacctgtccattgtcatattctacctagggaaggagatt

SEQ ID NO: 784872 - DNA, 120 bp, Artificial Sequence
  ENSG00000257365_23 (sequence is synthesized)
gcggtgcctttcctctgggaagctccgggcgcccaggcttgggcttcgtcgtggagcgtttgcgcggccagcttggggaagggtcgtttcaaggttgggcttggaggagagggcagtagc

SEQ ID NO: 784873 - DNA, 120 bp, Artificial Sequence
  ENSG00000257365_24 (sequence is synthesized)
cgagtcccctctgccctaaagaacgagaagaatcgtgttctatgcctggaggacagaggcagcccgtgcgggtcggacagcccactctgttctgccagtacttcgggaggttctggggtg

SEQ ID NO: 784874 - DNA, 120 bp, Artificial Sequence
  ENSG00000257365_25 (sequence is synthesized)
catagtgcacttttcccaacctgccctcagcttctggaggcagagagcagggccaggctgctgtcatgccgtttcacgatctgtttaatttttgacctacagtgccaggcaaaagtagaa

SEQ ID NO: 784875 - DNA, 120 bp, Artificial Sequence
  ENSG00000257365_26 (sequence is synthesized)
atgtcatgttctttcactgaagccatgccgtgagcaactctatccaaatagaatgtcacacctctcagttggagacccaggaggactgaccgtgtgccaagagtgaggacaggagaagcg

SEQ ID NO: 784876 - DNA, 120 bp, Artificial Sequence
  ENSG00000257365_27 (sequence is synthesized)
caggtgagaaagtggaattaggtcattgatacttggctggatctgccgggcccttactgaccctttgcccttcaacaggtgaccctgcccttagcatgagccactggatgttccatcagc

SEQ ID NO: 784877 - DNA, 120 bp, Artificial Sequence
  ENSG00000257365_28 (sequence is synthesized)
agagaagttgctggttatccagtcagtgattgcagggggacgtcctgaagctgagtgtttacccgtgtgtgtgtacgtgcacatacgtgtgtatggtggaagcataagctattagaatgg

SEQ ID NO: 784878 - DNA, 120 bp, Artificial Sequence
  ENSG00000257446_0 (sequence is synthesized)
actcctagggctgctcgcgctagttaaggtctggggctttcttgctccgagagggaccagttacttccgccgtagctgctgttgctctgtcgactgcgctgtgacctgcactgttcacgg

SEQ ID NO: 784879 - DNA, 120 bp, Artificial Sequence
  ENSG00000257446_1 (sequence is synthesized)
gacctttagagaggacgccagaatacctggaagccaggaaatggattcggtggcctttgaggatgtggctgtgaacttcacccaggaggagtgggctttgctggatccttcccagaaaaa

SEQ ID NO: 784880 - DNA, 120 bp, Artificial Sequence
  ENSG00000257446_2 (sequence is synthesized)
tctctacagggaagtgatgcaggaaaccttgaggaacctgacctccataggaaaaaaatggaacaaccagtacattgaagatgagcaccaaaatcctaggagaaacctaagaagacttat

SEQ ID NO: 784881 - DNA, 120 bp, Artificial Sequence
  ENSG00000257446_3 (sequence is synthesized)
aggggagagactctctgaaagtaaagaaagtcatcagcatggagaagttttgacacaggttccagatgacacactgaagaagaaaactcctggagtacaatcatatgaaagcagtgtgtg

SEQ ID NO: 784882 - DNA, 120 bp, Artificial Sequence
  ENSG00000257446_4 (sequence is synthesized)
tggagaaatcggcataggtctttcatcccttaataggcacctcagagcctttagttattccagtagccttgcaatacatggaagaactcacactggggaaaagccttatgaatgtaagga

SEQ ID NO: 784883 - DNA, 120 bp, Artificial Sequence
  ENSG00000257446_5 (sequence is synthesized)
atgtgggaaagcattcaggtttcccagttctgttcgtagacatgaaagaatccactctgcaaaaaaaccctatgaatgtaagcagtgtgggaaagcattcagttttcccagttctgttcg

SEQ ID NO: 784884 - DNA, 120 bp, Artificial Sequence
  ENSG00000257446_6 (sequence is synthesized)
tagacatgaaagaatccactctgcaaaaaaaccctatgaatgtaagcagtgtgggaaagcattatcttatcttgtaagctttcagacacacatgagaatgcacactggagagagacctca

SEQ ID NO: 784885 - DNA, 120 bp, Artificial Sequence
  ENSG00000257446_7 (sequence is synthesized)
aaacgctataaatgcaagcaatgtgataaagccttcaattgtcccagttcctttcaatatcatgaaaggactcacagtggagagaaaccctatgagtgtacacaatgtaggaaagccttc

SEQ ID NO: 784886 - DNA, 120 bp, Artificial Sequence
  ENSG00000257446_8 (sequence is synthesized)
ctggagagaaaccctatgagtgtaagctatgtggtaagggatttatttcttccacttcctttcgctatcatgaaaagactcacactggagagaaaccttatgaatgtaaaaaatgtgtga

SEQ ID NO: 784887 - DNA, 120 bp, Artificial Sequence
  ENSG00000257446_9 (sequence is synthesized)
cacactggagagaaaccttatgaatgtaaaaaatgtgtgaaagccttcagttttgtcaaggatcttcgaatacatgaaaggacacacactggagagaaaccctttgaatgtaaacaatgt

SEQ ID NO: 784888 - DNA, 75 bp, Artificial Sequence
  ENSG00000257446_10 (sequence is synthesized)
gacacacactggagagaaaccctttgaatgtaaacaatgtgggaaaaccttcacttcttccaattcctttcacta

SEQ ID NO: 784889 - DNA, 120 bp, Artificial Sequence
  ENSG00000257446_11 (sequence is synthesized)
cacatacgaactcacacaggagagaaaccctatggatgtaagcaatgtggtaaagtctttagagttgcctcacaacttaaaatgcatgaaaggactcacacaggagagaaaccctatgag

SEQ ID NO: 784890 - DNA, 120 bp, Artificial Sequence
  ENSG00000257446_12 (sequence is synthesized)
tgtaagcaatgtggaaaagccttcatttcttctaattctattcgctatcataaaaggactcacactggagagaaaccctataaatgtaaacagtgtgggaaagccttcatttcttccaac

SEQ ID NO: 784891 - DNA, 84 bp, Artificial Sequence
  ENSG00000257446_13 (sequence is synthesized)
taaatgtaaacagtgtgggaaagccttcatttcttccaactcttttctctaccatgaaaggattcataaagcctttagatctgc

SEQ ID NO: 784892 - DNA, 120 bp, Artificial Sequence
  ENSG00000257591_0 (sequence is synthesized)
cccgctttcctgactcccaggcgtcttgcaccaaagggaggtcgggatctcggttttccggccccgagagggaccaggtgcctccgccatagcttctgtcgctccatcgcccgcactgtg

SEQ ID NO: 784893 - DNA, 120 bp, Artificial Sequence
  ENSG00000257591_1 (sequence is synthesized)
actggactgttagagggatccgtggagaggaggccaggacacctggaagccgggaaatggattcagtggtctttgaggatgtagatgtgaacttcacccaggaggagtgggctttgctgg

SEQ ID NO: 784894 - DNA, 120 bp, Artificial Sequence
  ENSG00000257591_2 (sequence is synthesized)
atccttcccagaagaatctctacagagatgtgatgcaggaaaccttcaggaacctggcttctgtaggaaaaaaatggaaagatcagaaaattgaagatgagtacaaaaatcccaggagaa

SEQ ID NO: 784895 - DNA, 120 bp, Artificial Sequence
  ENSG00000257591_3 (sequence is synthesized)
acctaagaggtcttatgggagagagactcttagaaagtaagaaagatcatcagcatggagaaattttgacccaggttccagatgacatgctgaagaagaaaactccccgagtaaaatcat

SEQ ID NO: 784896 - DNA, 120 bp, Artificial Sequence
  ENSG00000257591_4 (sequence is synthesized)
gtggagaagtcagcgtgggtcatgcatcccttaataggcaccacagagctgacactggacacaagccatatgagtatcaggaatatggacagaagccatataaatgtacatactgtaaga

SEQ ID NO: 784897 - DNA, 120 bp, Artificial Sequence
  ENSG00000257591_5 (sequence is synthesized)
aagccttcagtgatctcccctactttcgaacacatgaatgggctcacactggggggaaaccttatgattgtgaggaatgtggaaaaagctttatttcccgttcaagcattcgaagacaca

SEQ ID NO: 784898 - DNA, 120 bp, Artificial Sequence
  ENSG00000257591_6 (sequence is synthesized)
cacaggataatgcacagtggagatggaccctacaaatgtaacttttgtgggaaagccttgatgtgtctcagtttgtatcttatccacaaacgaactcacactggagagaaaccatatgaa

SEQ ID NO: 784899 - DNA, 120 bp, Artificial Sequence
  ENSG00000257591_7 (sequence is synthesized)
tcattctggtagccttcgaatacatgaaagaactcacactggagagaagccttatgaatgcagtgagtgtgggaaagcattccatagttccacatgcctccatgcacataaaataactca

SEQ ID NO: 784900 - DNA, 120 bp, Artificial Sequence
  ENSG00000257591_8 (sequence is synthesized)
cactggggagaagccgtatgaatgtaaacagtgtgggaaagcctttgtttctttcaattccgttcgatatcatgaaagaactcacactggagagaagccctatgaatgtaagcaatgtgg

SEQ ID NO: 784901 - DNA, 80 bp, Artificial Sequence
  ENSG00000257591_9 (sequence is synthesized)
agggtaaagcctttggatgtgcctcgagcgttaaaatccatgaaaggactcacactggagaaaaaccctgtagctccaac

SEQ ID NO: 784902 - DNA, 120 bp, Artificial Sequence
  ENSG00000257591_10 (sequence is synthesized)
tgaaaggactcacactggagaaaaaccctgtagctccaacacttcgaaaggccaaggcgagaagattgcttaattcacataagattcctagaagccaccgaatccaatcatggtaaaaat

SEQ ID NO: 784903 - DNA, 120 bp, Artificial Sequence
  ENSG00000257591_11 (sequence is synthesized)
gtgtttccctcaaatcatgggaaccatcgcaaaattattctgaagcttctgcagtcactgtcatttgacagcattcagaaataaatgccagtagcccaggagcaaaaatttttgggagta

SEQ ID NO: 784904 - DNA, 120 bp, Artificial Sequence
  ENSG00000257591_12 (sequence is synthesized)
gtttagctggggcctcactcagatacctaggacacagagttggaaataactcttaagagagacacacctccagtaagaccttaagacagttctgtcataaaaaaaatacgaggtttggcc

SEQ ID NO: 784905 - DNA, 120 bp, Artificial Sequence
  ENSG00000257591_13 (sequence is synthesized)
cttgttccaaaagcagaaaaggaggatgcacggaagaaaaagataccccagaagaaacataaacttaagagacaaacaaattcagccaaaagaaaatgcaaataaaagttcaaaacaaaa

SEQ ID NO: 784906 - DNA, 120 bp, Artificial Sequence
  ENSG00000257591_14 (sequence is synthesized)
caaaacaaaaaaacctctaaaattcataaaacacaaaatgacaaactctattaaatatgcccctatgatatctcttagataaaagttggccgtaatagagaaaatgaagataggtgttgg

SEQ ID NO: 784907 - DNA, 120 bp, Artificial Sequence
  ENSG00000257591_15 (sequence is synthesized)
tgactggcagattctgggtctacgatgaatcagagaaggatggttttcactttgttttacatttttttaatgcttgatgttgacttggtagaaagatgataataaagagattcttctgtc

SEQ ID NO: 784908 - DNA, 120 bp, Artificial Sequence
  ENSG00000257594_0 (sequence is synthesized)
gagtttgtgaaaagttgtgagccgagcaggaggaagtagggagagaggagttgggctgtgccggaggccgaggaccgagagggctcaggtgacccctggaaagcctgggtggctggaaag

SEQ ID NO: 784909 - DNA, 120 bp, Artificial Sequence
  ENSG00000257594_1 (sequence is synthesized)
gagcctagcgcctgcatgaaaggaagaacctgctgggaagtacctgagctcgagctgtgggttccgccgcccttcccctgcgtggtggcttggtggccgcgtctgcgcctcagccctgag

SEQ ID NO: 784910 - DNA, 120 bp, Artificial Sequence
  ENSG00000257594_2 (sequence is synthesized)
aatccggatggcggtgaggtggacttgggcaggcaagagctgcctgctgctggcgtttttaacagtggcctatatcttcgtggagctcttggtctctacttttcatgcctccgcaggagc

SEQ ID NO: 784911 - DNA, 120 bp, Artificial Sequence
  ENSG00000257594_3 (sequence is synthesized)
cggccgtgccagggagctggggtcaagaaggctctcagacctccagaaaaatacggaggatttgtctcgaccgctttataagaagccccctgcagattcccgtgcacttggggagtgggg

SEQ ID NO: 784912 - DNA, 120 bp, Artificial Sequence
  ENSG00000257594_4 (sequence is synthesized)
gaaagccagcaaactccagctcaacgaggatgaactgaagcagcaagaagaactcattgagagatacgccatcaatatttacctcagtgacaggatttccctgcatcgacacatagagga

SEQ ID NO: 784913 - DNA, 120 bp, Artificial Sequence
  ENSG00000257594_5 (sequence is synthesized)
taaaagaatgtatgagtgtaagtcccagaagttcaactataggacacttcctaccacctctgttatcattgctttctataacgaagcctggtcgactttgctccgtaccattcacagtgt

SEQ ID NO: 784914 - DNA, 120 bp, Artificial Sequence
  ENSG00000257594_6 (sequence is synthesized)
tttagaaacttctcctgcagttcttttgaaagagatcatcttggtggatgacttgagtgacagagtttatttgaagacacaacttgaaacttacatcagcaatcttgatagagtacgctt

SEQ ID NO: 784915 - DNA, 120 bp, Artificial Sequence
  ENSG00000257594_7 (sequence is synthesized)
gattaggaccaataagcgagaggggctggttagggcccgtctgattggggccactttcgccactggggacgtcctcactttcctggattgtcactgtgagtgtaattccggttggctgga

SEQ ID NO: 784916 - DNA, 120 bp, Artificial Sequence
  ENSG00000257594_8 (sequence is synthesized)
accgcttttggaaaggattgggagagatgaaacagcagttgtgtgtcctgttatagacacaattgattggaatacttttgaattctatatgcagataggggagcccatgattggtgggtt

SEQ ID NO: 784917 - DNA, 120 bp, Artificial Sequence
  ENSG00000257594_9 (sequence is synthesized)
tgactggcgtttaacatttcagtggcattctgtccccaaacaggaaagggacaggcggatatcaagaattgaccccatcagatcacctaccatggctggaggactgtttgctgtcagcaa

SEQ ID NO: 784918 - DNA, 120 bp, Artificial Sequence
  ENSG00000257594_10 (sequence is synthesized)
gaaatattttcagtaccttggaacgtatgacacaggaatggaagtgtggggaggtgaaaaccttgagctgtcttttagggtgtggcagtgtggtggcaaattggagatccacccgtgttc

SEQ ID NO: 784919 - DNA, 120 bp, Artificial Sequence
  ENSG00000257594_11 (sequence is synthesized)
ccacgtgggccatgtgttccccaagcgggcaccatatgctcgccccaatttcctacagaatactgctcgggcagcagaagtttggatggatgaatacaaagagcacttctacaatagaaa

SEQ ID NO: 784920 - DNA, 120 bp, Artificial Sequence
  ENSG00000257594_12 (sequence is synthesized)
ccctccagcaagaaaagaagcttatggtgatatttctgaaagaaaattactacgagagcggttgagatgcaagagctttgactggtatttgaaaaacgtttttcctaatttacatgttcc

SEQ ID NO: 784921 - DNA, 120 bp, Artificial Sequence
  ENSG00000257594_13 (sequence is synthesized)
agaggatagaccaggctggcatggggctattcgcagtagagggatctcgtctgaatgtttagattataattctcctgacaacaaccccacaggtgctaacctttcactgtttggatgcca

SEQ ID NO: 784922 - DNA, 120 bp, Artificial Sequence
  ENSG00000257594_14 (sequence is synthesized)
tggtcaaggaggcaatcaattctttgaatatacttcaaacaaagaaataaggtttaattctgtgacagagttatgtgcagaggtacctgagcaaaaaaattatgtgggaatgcaaaattg

SEQ ID NO: 784923 - DNA, 120 bp, Artificial Sequence
  ENSG00000257594_15 (sequence is synthesized)
tcccaaagatgggttccctgtaccagcaaacattatttggcattttaaagaagatggaactatttttcacccacactcaggactgtgtcttagtgcttatcggacaccggagggccgacc

SEQ ID NO: 784924 - DNA, 120 bp, Artificial Sequence
  ENSG00000257594_16 (sequence is synthesized)
tgatgtacaaatgagaacttgtgatgctctagataaaaatcaaatttggagttttgagaaatagagcacaacagcactttcgtcatgagctgacagtagtgtcaagaaagtcaaagagcc

SEQ ID NO: 784925 - DNA, 120 bp, Artificial Sequence
  ENSG00000257594_17 (sequence is synthesized)
ttaagagcctcagtgaagattgtattttattttatcaaaagccacctagcagtcatctgtggagcactggaaagctggggttcattttggtatatcacactgaaactgggtacccagagt

SEQ ID NO: 784926 - DNA, 120 bp, Artificial Sequence
  ENSG00000257594_18 (sequence is synthesized)
gctgctgtttaatatttcacaatgccttacttattggttgttttatataagagttttgtcaatatggtctcttcttaaaagaagttgactatgaattgaaacacacaaaacatttaagtg

SEQ ID NO: 784927 - DNA, 120 bp, Artificial Sequence
  ENSG00000257594_19 (sequence is synthesized)
ccagacttaatattaaagaatgtaaaggtccaagtaaaatgaggtatgatttatgttgatgtgtaagttcaccgcacatcccactttttaacaaaactcatgaatgtgcagtttgagcca

SEQ ID NO: 784928 - DNA, 120 bp, Artificial Sequence
  ENSG00000257594_20 (sequence is synthesized)
ttgctattttgattacatagaatttgtatttcttttttagccagcacattaaattttagattttattttttaatctaatttttttctaatcaaaaagaaaattgagcttaaggcaaaagg

SEQ ID NO: 784929 - DNA, 120 bp, Artificial Sequence
  ENSG00000257594_21 (sequence is synthesized)
cctggttttagagatatgtgtaattggaagagggcatttgtttgagtgtgagtttggaggcctttttaacatgcagacatacccatatttaaatgaaatggggagatatttacattccgt

SEQ ID NO: 784930 - DNA, 120 bp, Artificial Sequence
  ENSG00000257594_22 (sequence is synthesized)
ggcattttctgattgcacttccttaagttatgaatgtactagaaagggactcatccagaatactatgcctccctttgttaatgcttaatcatttaaagtaaacacaattgaagcctctct

SEQ ID NO: 784931 - DNA, 120 bp, Artificial Sequence
  ENSG00000257594_23 (sequence is synthesized)
gaagttaaacccaactatgtttattaaaatgtgtgaaactgaaagtgggctaggttctaccaaggctgtggaactctcctacgagttctgctgatcaggaaatttaagaatttatcttaa

SEQ ID NO: 784932 - DNA, 120 bp, Artificial Sequence
  ENSG00000257594_24 (sequence is synthesized)
aaatgcaaggaaaaaagactgccttggcaattgtgaatggtgctttcaatctcctagcaccgagcctggcacttaggcagctttcagtaagtgggtgaatgaatgactgaatgaatgaat

SEQ ID NO: 784933 - DNA, 120 bp, Artificial Sequence
  ENSG00000257594_25 (sequence is synthesized)
gaatggctcagctgaggaatgtaactttggtcaagttattatgatgtgtttgggcttagttttctcattggtaaaatgtgggtgctggattggatcttaaagatcccttccagctctgaa

SEQ ID NO: 784934 - DNA, 120 bp, Artificial Sequence
  ENSG00000257594_26 (sequence is synthesized)
atgctgattgtacagtatattcttcccagattgactcactgtgcaatctttacaatactttttatcttttcacttttgacataggtaatgttgttgagcagttgagcaatgttcagtcca

SEQ ID NO: 784935 - DNA, 89 bp, Artificial Sequence
  ENSG00000257594_27 (sequence is synthesized)
ataggtaatgttgttgagcagttgagcaatgttcagtccagttgtgaagctggagaagagaaatgggttttaaaaattaagtgagggga

SEQ ID NO: 784936 - DNA, 120 bp, Artificial Sequence
  ENSG00000257594_28 (sequence is synthesized)
gctgaactcacctgaagtggtttacttctgtgggttaagaagttctagtcagtgttcatagtcgtttcgttttgataattgttgaaccaattttgtttttaaaacctttagactctgaaa

SEQ ID NO: 784937 - DNA, 120 bp, Artificial Sequence
  ENSG00000257594_29 (sequence is synthesized)
gtaatattttgactaagaatgtaaatatttccaaactaaattactcgggaagtaaacgctttttttaaaagtatttttactggttttataccaatattatatgcagaaatcacaggatga

SEQ ID NO: 784938 - DNA, 120 bp, Artificial Sequence
  ENSG00000257594_30 (sequence is synthesized)
atttagaattaaatctcaattagttcactttggcctagatttatgaaaaatgcatgcctcgtaaagagtccactgtattcacgagtaaagttgcttttagtgttcacttgatgacttgga

SEQ ID NO: 784939 - DNA, 120 bp, Artificial Sequence
  ENSG00000257594_31 (sequence is synthesized)
gagtaggaattttgcaaaatctgaatttaaggaaattctttaggataaccatttcaaaaaataaaattgctatgcaatcttgaatattttctcttttgcctcgtaaaatgaaaatgcatt

SEQ ID NO: 784940 - DNA, 120 bp, Artificial Sequence
  ENSG00000257594_32 (sequence is synthesized)
cacagtttctgtaaattatttagcagccttaaagtttatcaaaaaattgtccagattccacgtgcagcatgcttggccctgcatttaatttaagaaggattaataataatgctctgaatt

SEQ ID NO: 784941 - DNA, 120 bp, Artificial Sequence
  ENSG00000257594_33 (sequence is synthesized)
tttcgaaagggattctcctaaacccacccacttctcttgcccaggctgctttttaaaaatatttttttattttttacttatttttaaattttctctttttatttatttttggttttcttg

SEQ ID NO: 784942 - DNA, 120 bp, Artificial Sequence
  ENSG00000257594_34 (sequence is synthesized)
ttagccacctgttatatgggagaacgaaaattgttatattttgaaagtacttattacattatttttattttagtatcttgatgctcctgtcaaaagggaaatgaggcttttaaaaataaa

SEQ ID NO: 784943 - DNA, 120 bp, Artificial Sequence
  ENSG00000257594_35 (sequence is synthesized)
gtaccttaattctttattgactttttgccctaaattgctaggtgtgacccagcaatcttttaggaagagattttacagtggtgctttatttatatcaataatccagtatagttaggctgt

SEQ ID NO: 784944 - DNA, 120 bp, Artificial Sequence
  ENSG00000257594_36 (sequence is synthesized)
tcattcctcataatagagtacataacagaaaagtgggactttcacattttcatatttaggcacgttccaatttaattccaaaaatactctgtaattctacatctaaaaaaaccgattccc

SEQ ID NO: 784945 - DNA, 120 bp, Artificial Sequence
  ENSG00000257594_37 (sequence is synthesized)
taattcgaatttattggtaccaaagctctctttggctatagacaattaagagttgaccttttaagttaatgtatatgcttaaaaacagttttaggaaaatatttggtagacaaagagttt

SEQ ID NO: 784946 - DNA, 120 bp, Artificial Sequence
  ENSG00000257594_38 (sequence is synthesized)
caactttaaatgttcactatgtcatttagtgtccaactttacggataggttgactatctaaataggcatttttagtcattaaaaaaaatctagtcaccaggaggatccctataactcaaa

SEQ ID NO: 784947 - DNA, 120 bp, Artificial Sequence
  ENSG00000257594_39 (sequence is synthesized)
ataacttgtttgtaaaagaaaatttgtttacttacccattagtaagttcctgcatattcattataagatggcaaatcaaacttttctaggatgaagacagcttatttttaagttgtatag

SEQ ID NO: 784948 - DNA, 120 bp, Artificial Sequence
  ENSG00000257594_40 (sequence is synthesized)
tcttagttggtttagggtctcaattttaattaataaaatacttggtttttatttgcttgtccttttgaattcctgttttaataattttaaaatgagcacaaagaacgttgaagttcagat

SEQ ID NO: 784949 - DNA, 120 bp, Artificial Sequence
  ENSG00000257594_41 (sequence is synthesized)
taatctcttctgaatgatgtttttttcctctgtgatgagttgtttctgacttttttccttttgtatttgtaatgttgattaagatgtaaaataaaaagtgtgcctgattatttttgcaaa

SEQ ID NO: 784950 - DNA, 120 bp, Artificial Sequence
  ENSG00000257704_0 (sequence is synthesized)
ggggaccagctgcgtgggcggcggcgccgagagccccggaggcgcggggctgagcgagggcccgcgggggcgctggctgcgcttggctccggtatgcgcctacttcctctgcgtctcgct

SEQ ID NO: 784951 - DNA, 120 bp, Artificial Sequence
  ENSG00000257704_1 (sequence is synthesized)
gcttggctccggtatgcgcctacttcctctgcgtctcgctagctgccgtgctgctcgccgtgtactacggtctcatctgggtacccacgcggtctcccgcggcacccgccggcccacagc

SEQ ID NO: 784952 - DNA, 80 bp, Artificial Sequence
  ENSG00000257704_2 (sequence is synthesized)
gccgcctgtcccggcgcccgccgctgcctccctctcctgcctcctgggagtccccggcgggccgcgaccccagctccagc

SEQ ID NO: 784953 - DNA, 120 bp, Artificial Sequence
  ENSG00000257704_3 (sequence is synthesized)
caacccggatcgccagccctcgagagctctgtgctccacgccgaggatgcaccgtctctggattggtccggccttcttcctaatgacatcgctcagcgtctctggagccgtcatcccgcg

SEQ ID NO: 784954 - DNA, 120 bp, Artificial Sequence
  ENSG00000257704_4 (sequence is synthesized)
gaatgggggcccagggggtgtcagctcggggccttgcctcttgcagctactctgtggtcaggccgggtcctccaccatcaggaagatcccatcctgagctctgtctcctgcccctcctgc

SEQ ID NO: 784955 - DNA, 120 bp, Artificial Sequence
  ENSG00000257704_5 (sequence is synthesized)
tgtgggatgctgagcacagagcccacagcccatctgcctcttcacctccctgaatccgtgtccatctgcaataaacgacagcctcggctgcctcgtgctgtgtctgtcctgttgtctgca

SEQ ID NO: 784956 - DNA, 120 bp, Artificial Sequence
  ENSG00000257727_0 (sequence is synthesized)
aggcggtcgccgggacaccccgtgtgtggcaggcggcgaagcgctctggagaatcccggacagccctgctccctgcagccaggtgtagtttcgggagccactggggccaaagtgagagtc

SEQ ID NO: 784957 - DNA, 120 bp, Artificial Sequence
  ENSG00000257727_1 (sequence is synthesized)
cagcggtcttccagcgcttgggccacggcggcggccctgggagcagaggtggagcgaccccattacgctaaagatgaaaggctggggttggctggccctgcttctgggggccctgctggg

SEQ ID NO: 784958 - DNA, 120 bp, Artificial Sequence
  ENSG00000257727_2 (sequence is synthesized)
aaccgcctgggctcggaggagccaggatctccactgtggagcatgcagggctctggtggatgaactagaatgggaaattgcccaggtggaccccaagaagaccattcagatgggatcttt

SEQ ID NO: 784959 - DNA, 120 bp, Artificial Sequence
  ENSG00000257727_3 (sequence is synthesized)
ccggatcaatccagatggcagccagtcagtggtggaggtgccttatgcccgctcagaggcccacctcacagagctgctggaggagatatgtgaccggatgaaggagtatggggaacagat

SEQ ID NO: 784960 - DNA, 120 bp, Artificial Sequence
  ENSG00000257727_4 (sequence is synthesized)
tgatccttccacccatcgcaagaactacgtacgtgtagtgggccggaatggagaatccagtgaactggacctacaaggcatccgaatcgactcagatattagcggcaccctcaagtttgc

SEQ ID NO: 784961 - DNA, 120 bp, Artificial Sequence
  ENSG00000257727_5 (sequence is synthesized)
gtgtgagagcattgtggaggaatacgaggatgaactcattgaattcttttcccgagaggctgacaatgttaaagacaaactttgcagtaagcgaacagatctttgtgaccatgccctgca

SEQ ID NO: 784962 - DNA, 120 bp, Artificial Sequence
  ENSG00000257727_6 (sequence is synthesized)
gatgagctatgaaccactggagcagcccacactggcttgatggatcacccccaggaggggaaaatggtggcaatgccttttatatattatgtttttactgaaattaactgaaaaaatatg

SEQ ID NO: 784963 - DNA, 120 bp, Artificial Sequence
  ENSG00000257727_7 (sequence is synthesized)
aaaccaaaagtacaaactgtgttgtcttttcatgcctggaattgcccttacattaagcttgaagataaggagttatatagacaggaaagataatggaggagaaagaagagttttgggatt

SEQ ID NO: 784964 - DNA, 120 bp, Artificial Sequence
  ENSG00000257727_8 (sequence is synthesized)
gatacaggataaaggtaggagaggcctgaacctttaattcttctaccttctgagattccactccactcataaactagataagctttcagtcagtgcccactcaataccacgtctttagag

SEQ ID NO: 784965 - DNA, 120 bp, Artificial Sequence
  ENSG00000257727_9 (sequence is synthesized)
tctaattgtggagaatagaggaacctccatgaggaagcaggggaacatagtgtatggtagtgtagaattctagaaatcccttgtgttcatggctgttgaaacataaagtaagacagggct

SEQ ID NO: 784966 - DNA, 120 bp, Artificial Sequence
  ENSG00000257727_10 (sequence is synthesized)
tggtcttgaaggaaataacggatatgcattattcttccttccctgcccatccagatggagggaccagcaagaacagagacaggaaggggaaaatggatgtgaccaactcagctgaaaagt

SEQ ID NO: 784967 - DNA, 120 bp, Artificial Sequence
  ENSG00000257727_11 (sequence is synthesized)
aagggctttatcggatagggacagacgaggtaaggaaggttgtttaatgagaggccttgcttgccagcctaagcttttaaatttgatgccagtggcaacaataaagtgtatctatcacta

SEQ ID NO: 784968 - DNA, 120 bp, Artificial Sequence
  ENSG00000257727_12 (sequence is synthesized)
caaaaaacaaacaaacaaacaaaactaattaaaatcaattagggaaagctttttagaataggttgttggagctagatttggaaagaaaagtaaggatataaattactaatgtacagaggt

SEQ ID NO: 784969 - DNA, 120 bp, Artificial Sequence
  ENSG00000257727_13 (sequence is synthesized)
taactgttactgttcccccaaacaaagtagctcactctggctttggatgaaattcgactgcttaaaaaggaccttggtttaatagaaatgaagaaaacagactcagaaaaaagatttggc

SEQ ID NO: 784970 - DNA, 120 bp, Artificial Sequence
  ENSG00000257727_14 (sequence is synthesized)
tctgtctcatttggaagaagctgcaggcttattccccatgcacttgcttcctggctgcaaaccttaatactttgtttctgctgtagaatttgttagcaaacagggagtcctgatcagcac

SEQ ID NO: 784971 - DNA, 120 bp, Artificial Sequence
  ENSG00000257727_15 (sequence is synthesized)
ccttctccacatccacatgactggtttttaatgtagcactgtggtatacatgcaaacatccgttcaaaatctgagtcggagctaaaaataaaaaatgaaaaaacagaaataagaataaaa

SEQ ID NO: 784972 - DNA, 120 bp, Artificial Sequence
  ENSG00000257727_16 (sequence is synthesized)
gacagccctgctccctgcagccaggtgtagtttcgggagccactggggccaaagtgagagtccagcggtcttccagcgcttgggccacggcggcggccctgggagcagagcatgcagggc

SEQ ID NO: 784973 - DNA, 120 bp, Artificial Sequence
  ENSG00000257727_17 (sequence is synthesized)
agcctctcctaagctgcctgttcgcgcgagagtttggaggggcgggtttggggtcggtgtctgattggggctcgcaccgcagcacgctggagtcccgcttaggtaccagttagcgtcagg

SEQ ID NO: 784974 - DNA, 120 bp, Artificial Sequence
  ENSG00000257743_0 (sequence is synthesized)
tccctatgaattgctgagggagagatacagcatagaaaaaaacaaggtgatgcgatggcgaggaagctcagtgtattggaagtccttctgatcatcttctgcttaattgtggtgaccata

SEQ ID NO: 784975 - DNA, 120 bp, Artificial Sequence
  ENSG00000257743_1 (sequence is synthesized)
gatatcctcttgctgcttcttgtgttggaggaaacttcagatacttcatttactccagagtgcccagagattccccagtcggaaaggatagactgcacacctgaccaggaggtgaccgag

SEQ ID NO: 784976 - DNA, 120 bp, Artificial Sequence
  ENSG00000257743_2 (sequence is synthesized)
gatatctgcagatggcaatataagtgctgctggtcgcctgtggcagatgccaatgtccctaggtgcttcttcccctggaactggggctatgaagccagcaatggccatacaaatacaagc

SEQ ID NO: 784977 - DNA, 120 bp, Artificial Sequence
  ENSG00000257743_3 (sequence is synthesized)
acaggatttactgcccagttgaaaaggttgccatcaccatctctgtttggaaatgatgtcgccaccacccttttcacagctgaatatcagacatccaatcggtttcattttaagatcact

SEQ ID NO: 784978 - DNA, 120 bp, Artificial Sequence
  ENSG00000257743_4 (sequence is synthesized)
gactttaataacatacgctatgaagtttcccatgaaaatattaacctggttgatgggattgctgatgcctccaatttgagctattacgtggaggttactgataaacctttcagcatcaaa

SEQ ID NO: 784979 - DNA, 120 bp, Artificial Sequence
  ENSG00000257743_5 (sequence is synthesized)
ataatgaggacaagcaacagaagagtcttgttggacacgagcatcgggcccctccagtttgcccagcagtacctgcaactgtctttccgactgcccagtgccaatgtgtatgggctggga

SEQ ID NO: 784980 - DNA, 120 bp, Artificial Sequence
  ENSG00000257743_6 (sequence is synthesized)
gagcatgtgcaccagcagtaccgccacaatatgacctggaagacttggcccatcttcacccgggacgctacccccaccgagggcatgattaatctgtatggagctcatacattcttcttg

SEQ ID NO: 784981 - DNA, 120 bp, Artificial Sequence
  ENSG00000257743_7 (sequence is synthesized)
tgccttgaagatgccaggggctcctcttttggagtatttctgatgaacagtaatgccatggaggttacccttcagccagctcctgcgatcacttatcgcacgattggaggcattcttgac

SEQ ID NO: 784982 - DNA, 120 bp, Artificial Sequence
  ENSG00000257743_8 (sequence is synthesized)
ttttacgtattcctaggaaacactccagaacaagtggttcaggaatacttggagcttgttggacggccattcttccctccctattggagtcttgggttccagcttagtcgcagggactat

SEQ ID NO: 784983 - DNA, 120 bp, Artificial Sequence
  ENSG00000257743_9 (sequence is synthesized)
ggtggcatcaataaattgaaagaagttgtaagccgaaatcgtttagctgagataccatatgatgtccagtactctgacatagactacatggatggaaagaaggatttcactgttgatgaa

SEQ ID NO: 784984 - DNA, 120 bp, Artificial Sequence
  ENSG00000257743_10 (sequence is synthesized)
gtcgcttactctggtctcccagattttgtcaaggagttacatgacaatggacagaaatatcttattattatgaatcctggcatctccaaaaactctaactacgagccctataataatgga

SEQ ID NO: 784985 - DNA, 120 bp, Artificial Sequence
  ENSG00000257743_11 (sequence is synthesized)
agcctaaagagagtgtggatcttggggagcaatggctttgctgttggggagggatatccgggaccgacagtctttcccgattataccaatccagtatgcactgagtggtggacagatcag

SEQ ID NO: 784986 - DNA, 120 bp, Artificial Sequence
  ENSG00000257743_12 (sequence is synthesized)
gtcgctaaatttcatgatcatctggagtttgatggagtgtggattgaaatgaatgaagtatctagcttactccaagcttctaataaccagtgtgaatccaacaacttgaactttcctcct

SEQ ID NO: 784987 - DNA, 120 bp, Artificial Sequence
  ENSG00000257743_13 (sequence is synthesized)
tttcttcctagagttctggatcacttactttttgcaagaactctctgcatggacacggagtttcatgggggccttcattatgacatccacagcttgtatggccactccatggcaagaacc

SEQ ID NO: 784988 - DNA, 120 bp, Artificial Sequence
  ENSG00000257743_14 (sequence is synthesized)
acaaacttagccctggagaccatcttcatgaataataggagcttcatcttatcccgttctacttttgctggatctggcaaatttgctgctcattggctgggggacaatgcggccacatgg

SEQ ID NO: 784989 - DNA, 120 bp, Artificial Sequence
  ENSG00000257743_15 (sequence is synthesized)
gatgacctccgatggtctatccccactatccttgagttcaacctgtttggcatccccatggtaggtgccaacatctgtggttataacaacaatgtcacagaggagctctgcagaaggtgg

SEQ ID NO: 784990 - DNA, 120 bp, Artificial Sequence
  ENSG00000257743_16 (sequence is synthesized)
atgcagcttggagcattttatccactaccaaggaatcacaatgggcctgggttcagggaccaggatcccgctgcctttggtgttgattccctgctgctgaaatcctccagacattatctg

SEQ ID NO: 784991 - DNA, 120 bp, Artificial Sequence
  ENSG00000257743_17 (sequence is synthesized)
aacatccgctacaccttgctgccctatctctatacccttttctaccatgctcacacccggggagagacggtagcaaggccccttgtacatgagttctaccaggactcagccacgtgggat

SEQ ID NO: 784992 - DNA, 120 bp, Artificial Sequence
  ENSG00000257743_18 (sequence is synthesized)
gtgcatgagcagttcttatggggacctggactcctcatcacgcctgttttatatgaaggtgtggacgaagtgaaagcatacatacctgatgccacctggtatgactatgagacaggagtg

SEQ ID NO: 784993 - DNA, 120 bp, Artificial Sequence
  ENSG00000257743_19 (sequence is synthesized)
gccatctcatggaggaaacagttggtgaatatgcttctcccaggtgacaagataggacttcatctgcgagggggctacatatttcccactcagaagccaaacacaaccacagaagccagc

SEQ ID NO: 784994 - DNA, 120 bp, Artificial Sequence
  ENSG00000257743_20 (sequence is synthesized)
cggaggaattccctgggactcatcatcgccttggactataagagagaagcaaagggggagctgtactgggatgacggtgtatctaaagatgctgtgactgaaaagaagtatattctatat

SEQ ID NO: 784995 - DNA, 120 bp, Artificial Sequence
  ENSG00000257743_21 (sequence is synthesized)
gatttctctgttacctctaaccatctacaagcaaagattataaataataattatatggacactgacaacctcatgttcacagatatcacaatcttgggaatggacaaacagccagctaat

SEQ ID NO: 784996 - DNA, 120 bp, Artificial Sequence
  ENSG00000257743_22 (sequence is synthesized)
tttatcgtcctactgaataatgttgccacctccagtccaagcgttgtctacaatgcttccacaaaggtggtaaccatcactgatctccaaggactggtactgggacaagaattctctatt

SEQ ID NO: 784997 - DNA, 120 bp, Artificial Sequence
  ENSG00000257743_23 (sequence is synthesized)
aggtggaatcttcctgtcagtgacctggagaagttcaactgctaccctgatgatccaacagcctctgaggagagttgtaggcagcgggggtgtctttgggaggacacatctactcctgga

SEQ ID NO: 784998 - DNA, 120 bp, Artificial Sequence
  ENSG00000257743_24 (sequence is synthesized)
gtgcccacctgttactatgacaccatccctaattatgttgctagtgatattcagtacctgaacaccagcatcactgcagacctttccctcccgatggcccctgagtcagctgctgctgcc

SEQ ID NO: 784999 - DNA, 120 bp, Artificial Sequence
  ENSG00000257743_25 (sequence is synthesized)
gcctctgattctctctctgcaaagatcagcttcctccacctgaaagtgatctatcacacagcaaccatgctgcaggtcaagatctatgaccccactaataaaaggtatgaggttccagta

SEQ ID NO: 785000 - DNA, 120 bp, Artificial Sequence
  ENSG00000257743_26 (sequence is synthesized)
ccactgaacacccctccccaaccagttggtgaccctgaaaaccgtctgtatgatgtcaggattcagaacaatccttttggaatccagattcaacgcaaaaactccagcactgtgatttgg

SEQ ID NO: 785001 - DNA, 120 bp, Artificial Sequence
  ENSG00000257743_27 (sequence is synthesized)
gattctcaactccctggcttcatcttcaatgacatgtttctctccatttctacgcgtctgccgtcccagtacatctatggctttggggaaactgagcacacgactttcagaagaaacatg

SEQ ID NO: 785002 - DNA, 120 bp, Artificial Sequence
  ENSG00000257743_28 (sequence is synthesized)
aactggaacacatggggaatgtttgctcatgatgagccacctgcgtacaagaagaattcctatggtgtccacccttactacatggcactggaggaggatggtagtgcccatggagtgctc

SEQ ID NO: 785003 - DNA, 120 bp, Artificial Sequence
  ENSG00000257743_29 (sequence is synthesized)
ctgctaaatagcaatgccatggatgtgacattacagcccactcctgctctgacataccgcaccacaggagggattttggacttctacattgttttggggccaacccctgaacttgtaact

SEQ ID NO: 785004 - DNA, 120 bp, Artificial Sequence
  ENSG00000257743_30 (sequence is synthesized)
cagcaatacacagagttgattggtcggccagcaatgattccatactgggccttgggattccatctgagtcgctatggataccagaatgatgctgaaatctccagtttgtatgatgcaatg

SEQ ID NO: 785005 - DNA, 120 bp, Artificial Sequence
  ENSG00000257743_31 (sequence is synthesized)
gtggcagcccagattccctatgacgtccagcatgtagacatcgattacatgaaccggaagctggatttcaccctcagtgccaactttcaaaacctcagtcttctgattgagcaaatgaag

SEQ ID NO: 785006 - DNA, 120 bp, Artificial Sequence
  ENSG00000257743_32 (sequence is synthesized)
cattcattagaggacaggaaaataacgtgttcatcaaatggcctgacaccaatgacattgtctggggaaaggtttggccagatctgcctaatgtaattgtagatggatcccttgaccatg

SEQ ID NO: 785007 - DNA, 120 bp, Artificial Sequence
  ENSG00000257743_33 (sequence is synthesized)
aaactcaggttaagctttacagggcctacgttgcctttcctgacttctttcgtaatagcacagctgcgtggtggaagaaagagatagaagagctctatgcaaaccctcgagagccagaga

SEQ ID NO: 785008 - DNA, 120 bp, Artificial Sequence
  ENSG00000257743_34 (sequence is synthesized)
agagcttgaagtttgatggattgtggattgatatgaatgagccatcaaattttgtggatggatctgtcaggggctgcagcaatgaaatgctaaataacccaccctatatgccatatttgg

SEQ ID NO: 785009 - DNA, 120 bp, Artificial Sequence
  ENSG00000257743_35 (sequence is synthesized)
aatctagggacaagggcctgagcagcaagactctgtgcatggagagtcagcagatcctgccggacagctcccccgtggagcactacaacgtgcacaacctgtacgggtggtcccagacca

SEQ ID NO: 785010 - DNA, 120 bp, Artificial Sequence
  ENSG00000257743_36 (sequence is synthesized)
gacccacatacgaagctgtgcaggaggtgacaggacagcgaggggtcatcatcacccgctccacatttccctcttctggacgctggggaggacaccggttgggaaacaacacagctgcat

SEQ ID NO: 785011 - DNA, 120 bp, Artificial Sequence
  ENSG00000257743_37 (sequence is synthesized)
gggaccagctggggaaatctatcattggcatgatggagttcagtctctttggaataccttatacaggagcagatatctgtgggttctttggagatgctgaatatgagatgtgtgttcgct

SEQ ID NO: 785012 - DNA, 120 bp, Artificial Sequence
  ENSG00000257743_38 (sequence is synthesized)
ggatgcaactgggggcattttatccattttccagaaaccacaacaacatcgggacaaggagacaagatcctgtggcctggaattcaacctttgagatgttgtccagaaaagtcctagaga

SEQ ID NO: 785013 - DNA, 120 bp, Artificial Sequence
  ENSG00000257743_39 (sequence is synthesized)
ccagatataccctgcttccttatctctatactctgatgcataaagctcacgttgagggcagcacagttgtccggccccttctccatgagtttacggatgacaggacaacatgggatatag

SEQ ID NO: 785014 - DNA, 120 bp, Artificial Sequence
  ENSG00000257743_40 (sequence is synthesized)
accgtcagttcatgttgggccctgctatcttaatcagccctgtgttggaaactagcacatttgagatctctgcttattttccgagagcccgttggtatgactatagcacgggaactagca

SEQ ID NO: 785015 - DNA, 120 bp, Artificial Sequence
  ENSG00000257743_41 (sequence is synthesized)
gcacatcaacaggtcagaggaaaatcctgaaggctccccttgaccacatcaaccttcatgtcagaggaggctacatcctgccctggcaagagcctgctatgaacactcactccagtcgac

SEQ ID NO: 785016 - DNA, 120 bp, Artificial Sequence
  ENSG00000257743_42 (sequence is synthesized)
aaaattttatgggattgattgttgctttggatgacaatgggacagctgaaggccaggtgttctgggatgatggacaaagcattgatacctatgaaaatggaaattattttttggcaaact

SEQ ID NO: 785017 - DNA, 120 bp, Artificial Sequence
  ENSG00000257743_43 (sequence is synthesized)
ttatagcagctcagaacatcctgcaaatccagaccatacacaataagtatttgagtgactcgaatccactaaaagttgggtatattagaatctggggtgtgaatacctatgtgacacaag

SEQ ID NO: 785018 - DNA, 120 bp, Artificial Sequence
  ENSG00000257743_44 (sequence is synthesized)
tcagtttcacctatgacaaccggcaatttatggagacaaatttcaagagtgaaccttataatcagatactaactattcaattgactgacaagactatcaacctggaaaagttaactgagg

SEQ ID NO: 785019 - DNA, 120 bp, Artificial Sequence
  ENSG00000257743_45 (sequence is synthesized)
ttacttggattgatggtggtcctgtacttcctactccaactaagacaagtaccatcccaatgagttctcatccttctccatctactaccaatgccaccagttctgagacaatcaccagtt

SEQ ID NO: 785020 - DNA, 120 bp, Artificial Sequence
  ENSG00000257743_46 (sequence is synthesized)
ctgccagtgcaaatactaccactggcactactgatactgttcctatcacaaccacatctttcccaagtactactagtgttacaactaatactactgttcctgatacaacttctcctttcc

SEQ ID NO: 785021 - DNA, 120 bp, Artificial Sequence
  ENSG00000257743_47 (sequence is synthesized)
ctacaagtactactaatgctagcactaatgctactgttcctatcacaaccacacctttcccaacaagtactattggtgttacaactaatgctactgttcccaatacaactgcccctttcc

SEQ ID NO: 785022 - DNA, 120 bp, Artificial Sequence
  ENSG00000257743_48 (sequence is synthesized)
caacaaatgctagtactgctagcactaatgctactgttcctatcacaaccacatgttttgcaacaagtactattggtgttacaactaatgctactgttcccgatacaactgcccctttcc

SEQ ID NO: 785023 - DNA, 120 bp, Artificial Sequence
  ENSG00000257743_49 (sequence is synthesized)
caacaaatactactactgctagcactaatgctactattcctatcacaaccacaccttttgcaacaagtactattagtgttacaactagtactactgttcctgatacaactgctcctttcc

SEQ ID NO: 785024 - DNA, 120 bp, Artificial Sequence
  ENSG00000257743_50 (sequence is synthesized)
ctacaagtactactagtgctagcactaatgctacccctgttcctatcacaaccacactttttgcaacaagtactattggtgttacaactggtactactgttcctgatacaactgctcctt

SEQ ID NO: 785025 - DNA, 120 bp, Artificial Sequence
  ENSG00000257743_51 (sequence is synthesized)
tccctacaagtactactagtactagcactagtgctactgttcctattacaaccacaccttcccctacaaatactgctgatgctaacactagtaatactgttcctaataccactatgcctt

SEQ ID NO: 785026 - DNA, 120 bp, Artificial Sequence
  ENSG00000257743_52 (sequence is synthesized)
ctcctacaagtagtactactgtgagtactattgctaccgttcccatttcagtgactccttctctgacaagtactgctgatgccaccattagtactactgtacttattgccactacttctt

SEQ ID NO: 785027 - DNA, 120 bp, Artificial Sequence
  ENSG00000257743_53 (sequence is synthesized)
ctctaacaggtactactgatgttagcactagtactactattaataatataagtactcctgttcaaacaaatactactaatgctagcactagtactaatgttgctaatataactgctacct

SEQ ID NO: 785028 - DNA, 120 bp, Artificial Sequence
  ENSG00000257743_54 (sequence is synthesized)
ctcatacaagtactgatgatactgttcctaataatactgttccagttacagctattccttctcttgcaaatactggtgttgacactactagcaacagtttttccattatgaccacttctt

SEQ ID NO: 785029 - DNA, 120 bp, Artificial Sequence
  ENSG00000257743_55 (sequence is synthesized)
tctctgaaagtactaatgctatgaacactactgttattatggcaactacttctcctacaagtactgatgttgctagcacaaataatgatgcttctatgacaaattttcttttagctacaa

SEQ ID NO: 785030 - DNA, 120 bp, Artificial Sequence
  ENSG00000257743_56 (sequence is synthesized)
tgtctgctggtaatataactagtaatagtatttccataacaactacttcttttggtaatagtgttccttttgtgactactccttctccaagtactgatgctactactacaagtaataata

SEQ ID NO: 785031 - DNA, 120 bp, Artificial Sequence
  ENSG00000257743_57 (sequence is synthesized)
ctaatcctggcatgactacttattaccagacttctcctaccattcctacccatactcttacttctattcctagctctattacttctattttgagcatgtttccaacaagtaatacattca

SEQ ID NO: 785032 - DNA, 120 bp, Artificial Sequence
  ENSG00000257743_58 (sequence is synthesized)
ctactgataaaattactaattttactacccctacaaatgcaaacaccattattttcaacactcttgatacaaaaagtaccatggtaatagatgctacggtcactactaccagcaccaaag

SEQ ID NO: 785033 - DNA, 120 bp, Artificial Sequence
  ENSG00000257743_59 (sequence is synthesized)
ataataccatgagtccagatacaacagttacttccatagacaaattcaccacacacatcacacagttcgctactccccattctgctactactacaacactggccttaagccacacctcat

SEQ ID NO: 785034 - DNA, 120 bp, Artificial Sequence
  ENSG00000257743_60 (sequence is synthesized)
tagctcctacaaatctttctaatctaggcaccatggatattactgatgcagataactccagcagtgttacaggtaacacgacacacatttctgtttcaaatctcacaacagcctcagtca

SEQ ID NO: 785035 - DNA, 120 bp, Artificial Sequence
  ENSG00000257743_61 (sequence is synthesized)
caataacagccactggtctagattcacaaactccccatatggtaataaattctgtggctacttatttacctattactgcaactagtgctaccacagatactacaaatattacaaaatatg

SEQ ID NO: 785036 - DNA, 120 bp, Artificial Sequence
  ENSG00000257743_62 (sequence is synthesized)
ctttaaatactaccactcctgatagtacagtacatacctctgctactgcacctacttatattgcaaatgccataaatgctactcaagttccatgattactactcaaggcaggatagttac

SEQ ID NO: 785037 - DNA, 120 bp, Artificial Sequence
  ENSG00000257743_63 (sequence is synthesized)
ctcagataacgcctacaaacaactattacagatatagaaaatcagttacgagacactctatctatcttatgctacttaagttttcacggatattagtactctagccataaaagacacagc

SEQ ID NO: 785038 - DNA, 120 bp, Artificial Sequence
  ENSG00000257743_64 (sequence is synthesized)
tactccaaacactctcgtcattgcagacatgtttaggaaggtttacaaaccttataggtttcaccaaagaagctgtgggtacttattttgcaaccatagtatgtgctcttattcttttaa

SEQ ID NO: 785039 - DNA, 120 bp, Artificial Sequence
  ENSG00000257743_65 (sequence is synthesized)
gtttgatggagtgtggattgtaagttattattcctgactcaaatttcctttggaaacagataacgccaaattttcagatgagttttgaccttgatgtcaaataaatgtcaataaaaaata

SEQ ID NO: 785040 - DNA, 120 bp, Artificial Sequence
  ENSG00000257923_0 (sequence is synthesized)
actctgccaggtggatgttgtgcgtagccggagccaggttgaagagagaactcgatgccaccgcaacggtattggcgaaccggcaggatgaaagtgagcagtccagaaagcggcttatcg

SEQ ID NO: 785041 - DNA, 120 bp, Artificial Sequence
  ENSG00000257923_1 (sequence is synthesized)
aacagagccgggagttcaagaagaacactccagaggatttgcgcaagcaggtagcgccgctgctgaagagtttccaaggagagattgatgcactgagtaaaagaagcaaggaagctgaag

SEQ ID NO: 785042 - DNA, 120 bp, Artificial Sequence
  ENSG00000257923_2 (sequence is synthesized)
cagctttcttgaatgtctacaaaagattgattgacgtcccagatcccgtaccagctttggatctcggacagcaactccagctcaaagtgcagcgcctgcacgatattgaaacagagaacc

SEQ ID NO: 785043 - DNA, 120 bp, Artificial Sequence
  ENSG00000257923_3 (sequence is synthesized)
agaaacttagggaaactctggaagaatacaacaaggaatttgctgaagtgaaaaatcaagaggttacgataaaagcacttaaagagaaaatccgagaatatgaacagacactgaagaacc

SEQ ID NO: 785044 - DNA, 120 bp, Artificial Sequence
  ENSG00000257923_4 (sequence is synthesized)
aagccgaaaccatagctcttgagaaggaacagaagttacagaatgactttgcagaaaaggagagaaagctgcaggagacacagatgtccaccacctcaaagctggaggaagctgagcata

SEQ ID NO: 785045 - DNA, 120 bp, Artificial Sequence
  ENSG00000257923_5 (sequence is synthesized)
aggttcagagcctacaaacagccctggaaaaaactcgaacagaattatttgacctgaaaaccaaatacgatgaagaaactactgcaaaggccgacgagattgaaatgatcatgacggacc

SEQ ID NO: 785046 - DNA, 120 bp, Artificial Sequence
  ENSG00000257923_6 (sequence is synthesized)
ttgaaagggcaaaccagagggcagaggtggctcagagagaggcggagaccttaagggaacagctctcatcggccaatcactccctccagctggcctcacagatccagaaggcaccagacg

SEQ ID NO: 785047 - DNA, 120 bp, Artificial Sequence
  ENSG00000257923_7 (sequence is synthesized)
tggagcaggccatagaggtgctgacccgctccagcctagaagttgagttggccgccaaggagcgggagatcgcacagctggtggaggacgtgcagagactccaggccagcctcaccaagc

SEQ ID NO: 785048 - DNA, 120 bp, Artificial Sequence
  ENSG00000257923_8 (sequence is synthesized)
tgcgggagaattcggccagccagatctcacagcttgagcagcagctgagcgccaaaaacagcacactcaaacaactggaagaaaaactcaaaggccaggctgactatgaagaggtgaaga

SEQ ID NO: 785049 - DNA, 120 bp, Artificial Sequence
  ENSG00000257923_9 (sequence is synthesized)
aagagctgaacattctgaagtccatggagtttgcaccgtccgagggcgctgggacacaggatgcggccaagcccctggaggtgctgttgctggagaagaaccgctcgctgcagtccgaga

SEQ ID NO: 785050 - DNA, 120 bp, Artificial Sequence
  ENSG00000257923_10 (sequence is synthesized)
acgccgcgctgcgcatctccaacagcgacctgagcgggtcagccaggaggaaagggaaagaccagcctgaaagtcggcgcccgggatctttgccggccccccctccttctcagttgcccc

SEQ ID NO: 785051 - DNA, 120 bp, Artificial Sequence
  ENSG00000257923_11 (sequence is synthesized)
gcaacccgggggagcaggcttccaatactaatggtacacaccagttctcaccagcggggttaagtcaagactttttcagctcatccctggcaagccccagcctacccctggcttctacag

SEQ ID NO: 785052 - DNA, 120 bp, Artificial Sequence
  ENSG00000257923_12 (sequence is synthesized)
gaaaatttgcactaaactctcttctccagcggcagctaatgcagtccttctactccaaggctatgcaggaagccggaagcacaagcatgattttttcaacaggtccatacagcacaaact

SEQ ID NO: 785053 - DNA, 120 bp, Artificial Sequence
  ENSG00000257923_13 (sequence is synthesized)
ccatatcttcccaaagtccattacaacaaagcccagatgtcaatggcatggccccatcccccagccagtcagaaagtgctgggagcgtctccgagggcgaggagatggacactgcagaaa

SEQ ID NO: 785054 - DNA, 120 bp, Artificial Sequence
  ENSG00000257923_14 (sequence is synthesized)
tcgcccggcaggtcaaagagcagctgattaagcacaatatcggacaacgtattttcggacattatgtgttgggactgtctcaagggtccgtgagcgagattctggcccggcccaagccat

SEQ ID NO: 785055 - DNA, 120 bp, Artificial Sequence
  ENSG00000257923_15 (sequence is synthesized)
ggaataaactgactgttcgtggcaaggagccatttcacaagatgaaacagttcctctccgatgagcagaacatcctggccctccgtagcatccaaggcagacaaagagagaatccaggcc

SEQ ID NO: 785056 - DNA, 120 bp, Artificial Sequence
  ENSG00000257923_16 (sequence is synthesized)
agagcctgaacagactatttcaggaagtaccgaaacgaagaaatgggtctgaaggtaacatcaccacccggatccgagcctcggagactggctctgatgaagccatcaagtccatcctag

SEQ ID NO: 785057 - DNA, 120 bp, Artificial Sequence
  ENSG00000257923_17 (sequence is synthesized)
agcaagccaagagggagctccaagtgcagaaaactgcagagccggcccagccttcctccgcatccggcagcgggaactctgatgacgccatccgctccatcctgcagcaagcccgccggg

SEQ ID NO: 785058 - DNA, 120 bp, Artificial Sequence
  ENSG00000257923_18 (sequence is synthesized)
agatggaggcccagcaggctgccctcgaccctgccttaaagcaggcaccactgtcccagagtgacatcaccatcctcacccccaagcttctgtccacctcgcccatgcccaccgtgtcca

SEQ ID NO: 785059 - DNA, 120 bp, Artificial Sequence
  ENSG00000257923_19 (sequence is synthesized)
gctacccacctctcgccatctccctgaagaagccctccgcagctcctgaggccggtgcctctgctctgccgaaccccccggccctcaaaaaggaggcccaggacgcccccgggctggacc

SEQ ID NO: 785060 - DNA, 120 bp, Artificial Sequence
  ENSG00000257923_20 (sequence is synthesized)
cccagggagcagccgattgtgcacaaggggtcctgagacaggtgaaaaatgaggtgggccgcagcggtgcctggaaggaccactggtggagcgcggtgcagccggagagaagaaatgccg

SEQ ID NO: 785061 - DNA, 120 bp, Artificial Sequence
  ENSG00000257923_21 (sequence is synthesized)
cctcctccgaggaggccaaggccgaagaaacgggcggcgggaaagagaagggcagcggtggcagcggaggtggcagccagcctcgggccgagcgcagtcagctccagggaccctcgtcgt

SEQ ID NO: 785062 - DNA, 120 bp, Artificial Sequence
  ENSG00000257923_22 (sequence is synthesized)
cagagtactggaaggagtggcccagcgctgagtccccatactcccagagctcagagctgagtctgaccggggccagccgcagcgagacaccacagaacagccccctgccatcctccccga

SEQ ID NO: 785063 - DNA, 120 bp, Artificial Sequence
  ENSG00000257923_23 (sequence is synthesized)
tcgtgcccatgtccaagcccaccaagccctcggtccccccgctgacccccgagcagtacgaggtctacatgtaccaggaggtggacaccatcgagctcacccggcaggttaaggaaaagc

SEQ ID NO: 785064 - DNA, 120 bp, Artificial Sequence
  ENSG00000257923_24 (sequence is synthesized)
tggccaagaacggcatctgccagagaatcttcggggagaaggtgctgggcctgtcccagggcagcgtcagcgacatgctgtcccgaccgaagccatggagcaagctgacgcagaaaggcc

SEQ ID NO: 785065 - DNA, 120 bp, Artificial Sequence
  ENSG00000257923_25 (sequence is synthesized)
gagaacccttcatccggatgcagctctggctgaacggcgagctaggccagggtgttctacccgtccagggccagcagcaagggccagtcctccactccgtgacatcgctccaggacccgc

SEQ ID NO: 785066 - DNA, 120 bp, Artificial Sequence
  ENSG00000257923_26 (sequence is synthesized)
tgcagcagggctgtgtgagctcagaaagcactccaaagacctccgccagctgcagccctgcccctgagtccccgatgagttccagtgagtcggtgaagagcctgaccgagctggtccagc

SEQ ID NO: 785067 - DNA, 120 bp, Artificial Sequence
  ENSG00000257923_27 (sequence is synthesized)
agccctgtccccccatcgaggcgagcaaggacagcaagccaccagagcccagtgacccgccagcatccgactcccagcccacaaccccgctgcctctctccggacactcggccctcagca

SEQ ID NO: 785068 - DNA, 120 bp, Artificial Sequence
  ENSG00000257923_28 (sequence is synthesized)
tccaagaattagtagccatgtccccggagctggacacctacggcataaccaagcgggtgaaggaggtgctgacggacaacaacctcggccagcgcttatttggggagaccatcttagggc

SEQ ID NO: 785069 - DNA, 120 bp, Artificial Sequence
  ENSG00000257923_29 (sequence is synthesized)
tcacccaaggctctgtctctgacctccttgcccgccccaaaccctggcataagctcagtctgaaaggacgagagcccttcgtccggatgcagctgtggctgaacgaccccaacaatgtgg

SEQ ID NO: 785070 - DNA, 120 bp, Artificial Sequence
  ENSG00000257923_30 (sequence is synthesized)
agaagctgatggacatgaaacggatggagaagaaagcctacatgaagcggcggcacagctcagtcagtgacagccagccctgcgaaccgccctctgtcggcaccgagtacagccagggcg

SEQ ID NO: 785071 - DNA, 120 bp, Artificial Sequence
  ENSG00000257923_31 (sequence is synthesized)
ccagcccccagccccagcaccagctgaagaaaccccgggtggtgctggctccggaggagaaggaggcgctgaaacgagcgtatcagcaaaagccatacccgtcaccaaaaaccatcgaag

SEQ ID NO: 785072 - DNA, 120 bp, Artificial Sequence
  ENSG00000257923_32 (sequence is synthesized)
acctcgccacccagctcaacctgaaaaccagcaccgtcatcaactggttccacaactacaggtctcggatccgcagagaactgttcattgaggaaattcaggccgggagtcagggccagg

SEQ ID NO: 785073 - DNA, 120 bp, Artificial Sequence
  ENSG00000257923_33 (sequence is synthesized)
cgccagcgactcaccctcggcccgcagcggccgggcggcgcccagctcggagggcgacagctgcgacggcgtggaggccactgagggcccaggcagcgccgacaccgaggagcccaagtc

SEQ ID NO: 785074 - DNA, 120 bp, Artificial Sequence
  ENSG00000257923_34 (sequence is synthesized)
cccaagtctcagggagaggccgagcgggaggaggtgccgcggccggcggagcagacggagccgccgccctcggggaccccgggcccggacgacgcccgcgacgacgaccacgagggaggc

SEQ ID NO: 785075 - DNA, 80 bp, Artificial Sequence
  ENSG00000257923_35 (sequence is synthesized)
acgacgcccgcgacgacgaccacgagggaggccccgtggaaggcccggggcccctgcccagccccgcctccgcgaccgcc

SEQ ID NO: 785076 - DNA, 120 bp, Artificial Sequence
  ENSG00000257923_36 (sequence is synthesized)
ccgagctccgcgccgccgcccagcaacagcagcagcagcagcgccccccgcaggcccagctcgctgcagagccttttcggcctccccgaggccgcgggcgcccgggactcgcgcgacaac

SEQ ID NO: 785077 - DNA, 120 bp, Artificial Sequence
  ENSG00000257923_37 (sequence is synthesized)
tgcgcaagaagaaggccgcgaacttgaacagcatcatccaccgcctggagaaggccgccagccgggaggaacctatcgaatgggagttctgaggggccgcggccctggggcgggcagcca

SEQ ID NO: 785078 - DNA, 80 bp, Artificial Sequence
  ENSG00000257923_38 (sequence is synthesized)
ggctgggccgcaagggcctggacggggtcggacggggcaggcgctgcggacaccgtggcctgggcttggcccgcggcctg

SEQ ID NO: 785079 - DNA, 120 bp, Artificial Sequence
  ENSG00000257923_39 (sequence is synthesized)
tgagcccgcagcccagaccccctccacggtccgcggcctgcaccgacccgaggcccagatccaaggccgcggcccagacccactctgcggcccgggccgaccctgcggcctccaccaacc

SEQ ID NO: 785080 - DNA, 120 bp, Artificial Sequence
  ENSG00000257923_40 (sequence is synthesized)
gcggcctggacccctggaccgctttgcgcacttaccgccctgcgggccacagggcaaaatcgccataggccaaggtgcatatagaaaacaaaggagcattaagcccaatctatgtcgtgt

SEQ ID NO: 785081 - DNA, 120 bp, Artificial Sequence
  ENSG00000257923_41 (sequence is synthesized)
tttcaaggaagaaaacggaaatgtgtggtcgagcttttttgtaccctgaagtgttttttttattgccctaagtgatttccacaggttctggaataactcttacagctttgccttgtgtcc

SEQ ID NO: 785082 - DNA, 120 bp, Artificial Sequence
  ENSG00000257923_42 (sequence is synthesized)
tcctgttccgtgtgggctttaaaagaaaaaaaatcaaacccacatattaaaagggggctttttatctgccatctaatggcttcagagcgataatacactattatcttcttaaaccaggaa

SEQ ID NO: 785083 - DNA, 120 bp, Artificial Sequence
  ENSG00000257923_43 (sequence is synthesized)
aaaataaaagggggggtgggatttttcagaaaaattaaaaaagaaagtttttgtagctgttcagttgccactaagagattgcacagtcaaaacgactctaaacacactagtttggattcc

SEQ ID NO: 785084 - DNA, 120 bp, Artificial Sequence
  ENSG00000257923_44 (sequence is synthesized)
taaatattttcaagaaaagaatcttctcgtttgaaactttgaattaaaataaaacacatttactccacatattttttaacaaaaagaaaacgtcacatcaggaaactctgattttgtggt

SEQ ID NO: 785085 - DNA, 120 bp, Artificial Sequence
  ENSG00000257923_45 (sequence is synthesized)
agctgacatagtgttttcttgtacgtgaatagaatcctgacatgtagtgcacattgatgtatagctttaactgaccctgggttttgcagaccagggtttgtttaatacactccattctag

SEQ ID NO: 785086 - DNA, 120 bp, Artificial Sequence
  ENSG00000257923_46 (sequence is synthesized)
aaaaaaagaaaaaaaaaaaagaaaagatccgaatctaggtattttataatctgctttttaacctctaaccgcagagcacgctgatcagacctcatatcttggaggtttaggagacaagtt

SEQ ID NO: 785087 - DNA, 120 bp, Artificial Sequence
  ENSG00000257923_47 (sequence is synthesized)
tcttggaggtttaggagacaagttagaactgtagcatgtacctgttaattttgtttaatttatggtgtctcaatctgtctgtgcgtctgcacgtgtgcaagcattgaaagaaaggagaga

SEQ ID NO: 785088 - DNA, 120 bp, Artificial Sequence
  ENSG00000257923_48 (sequence is synthesized)
gtagtccgggcgagcacagcaggcagttccagggccagacgggcccatccccaagtagatagcagtctacggatctctctctggcacagaaggcacctcacctcacaccactctcctgga

SEQ ID NO: 785089 - DNA, 120 bp, Artificial Sequence
  ENSG00000257923_49 (sequence is synthesized)
tacctgatgaactgagccctcccaggggaagacactccccaggcctgggcagggcttacacgcgcactctctctcttctttccctttttcttcccaccgcaagcactgatgaccctgttg

SEQ ID NO: 785090 - DNA, 120 bp, Artificial Sequence
  ENSG00000257923_50 (sequence is synthesized)
aactcgtgggaaacttcctttctctgcaggagagagaacgtggcattctgggctccccactcccatccctgtagaaatggcccaaactcacaccaaaacgtggatgctcttcaacttcca

SEQ ID NO: 785091 - DNA, 120 bp, Artificial Sequence
  ENSG00000257923_51 (sequence is synthesized)
aacctaccatttgcccttctttcatttcgcctcttagttctttttatgcacagttttagggcagtctaagtacaaactgaaagtctaacttgtctctgattcctcccttgtctatgtgta

SEQ ID NO: 785092 - DNA, 120 bp, Artificial Sequence
  ENSG00000257923_52 (sequence is synthesized)
tatgcgtgagaatagaggcgggtgagagtgtgcgtgcgtgtgcgtgtgtgcaattttatacgtctgtgtattttcttaagtacctgtgcacacgtagagtgcattactgccacctttttc

SEQ ID NO: 785093 - DNA, 120 bp, Artificial Sequence
  ENSG00000257923_53 (sequence is synthesized)
aataagctgttttatcagttacggcttctacaagtttgctaatttagacttctttattgccatatctttaaactaacaatagatgatttcggtatatatatatatttttttttgcttatt

SEQ ID NO: 785094 - DNA, 120 bp, Artificial Sequence
  ENSG00000257923_54 (sequence is synthesized)
tataggtgctgtattttattatctgattgttaggaagggatgaaaggggcaaatattctttagagggatagactgccggcagtattgggtataatttacaagatgtagttgtcatactgt

SEQ ID NO: 785095 - DNA, 120 bp, Artificial Sequence
  ENSG00000257923_55 (sequence is synthesized)
atattactgattgaaaactttttgaccgtattgtgtatcattgaaacctttgtcttaggtcaacatctttggatgacattttaatggtgcattcattatttcttaagtttaattaatatt

SEQ ID NO: 785096 - DNA, 120 bp, Artificial Sequence
  ENSG00000257923_56 (sequence is synthesized)
acttttttttttatttggggggtgggagggagttataattttaaaggtatgctctggctgttccacctccgtgtgcttgttaattaacttgtaggactttgactgtaagatgtgaaacca

SEQ ID NO: 785097 - DNA, 120 bp, Artificial Sequence
  ENSG00000257923_57 (sequence is synthesized)
tttaacctgcagctgcagcacttagttcacgttttcacaaatttcaagagtcactacactaaagacaatgccttttcatgaataagaagttttcagaaggctctagggggctgggaggca

SEQ ID NO: 785098 - DNA, 120 bp, Artificial Sequence
  ENSG00000257923_58 (sequence is synthesized)
ggctgttcgtttgtcttttgttgggggtatcatttctgaacttgaaatccagttcagggagaagagaattcaaaattagaggagcttaaggggacacgggtcaacatctagctcgattca

SEQ ID NO: 785099 - DNA, 120 bp, Artificial Sequence
  ENSG00000257923_59 (sequence is synthesized)
ggtgcattgagaagagtgagttcacatcggtgacccttaggacagtgagtggcagagccctgacgactgtggtgtcctctccacaaaaccctcaagggacttttgtcatcatgtgtgatg

SEQ ID NO: 785100 - DNA, 120 bp, Artificial Sequence
  ENSG00000257923_60 (sequence is synthesized)
aatctttaaatatcgtctaattttcataagaatgaaaagaagttaacaggaaatagtaggctagggtttagttttaaaggcatgactgttatttacaaaggtgttaaatctgaggaaatt

SEQ ID NO: 785101 - DNA, 120 bp, Artificial Sequence
  ENSG00000257923_61 (sequence is synthesized)
gacaaatacagatttgtccattctagtggccaaacagtaacagtctaaaatgcagtcattttgaccctcccaagcaatttagtcatatgtgttgttttctcttttctgtttttacttctt

SEQ ID NO: 785102 - DNA, 120 bp, Artificial Sequence
  ENSG00000257923_62 (sequence is synthesized)
agatttttaactaggttactgttggttcccattctgtcttttttgccagacttacatctggtgccagatacaatcagttggttaaattttgcttgcagttctgtgtattttttttcctct

SEQ ID NO: 785103 - DNA, 120 bp, Artificial Sequence
  ENSG00000257923_63 (sequence is synthesized)
attatttatttttttaaaaaaaatagagatcctaaccttagatctttgatgtgaagctagcactgtctgtaatacttctaagagctgccactaaaataatacagcaatccgtggccaggg

SEQ ID NO: 785104 - DNA, 120 bp, Artificial Sequence
  ENSG00000257923_64 (sequence is synthesized)
gagcaccccctcctggttgggcccctcagttggagtctaagggttaatctctcatcttgctaagcagtattcaagtgccttgaacagtgtcccctcggcatggctccccttcagcaggct

SEQ ID NO: 785105 - DNA, 120 bp, Artificial Sequence
  ENSG00000257923_65 (sequence is synthesized)
ggcattccaagcagtggcccccgcaggcagccgacccccttcctcttcacgctctatgagtttaaaaagctgatttgtacctctcccctgggggaaacggttccatataaaacactaaca

SEQ ID NO: 785106 - DNA, 120 bp, Artificial Sequence
  ENSG00000257923_66 (sequence is synthesized)
cttaattacaagctccattatgccattttaaatggcttctttttgttaattggaggcattgttcataacttaaggcttttgccattaacttagctggctaagcagaggctcggggtaaaa

SEQ ID NO: 785107 - DNA, 120 bp, Artificial Sequence
  ENSG00000257923_67 (sequence is synthesized)
tcagtgtttgcatttagcctcttgacccggagttccggcccaagctcccttgtgatagccgagatggcaggtgtgtgagttctgtcctagacctgtgcccaactcacttccaccccagag

SEQ ID NO: 785108 - DNA, 120 bp, Artificial Sequence
  ENSG00000257923_68 (sequence is synthesized)
gagtcttctgtcctcctccccaacccccgagctccctggtaacctcctcttgaacttctgtatcagtgaagacatctgtggtttctgctcaccagacctctctttagaaagggttatcag

SEQ ID NO: 785109 - DNA, 120 bp, Artificial Sequence
  ENSG00000257923_69 (sequence is synthesized)
agccatggagcttagctcaattggattcttctagacgatcttaggaggcatcttggcatgaggcagcttctaagcgtctcctgggacaggattggggtgacagcccagggatgcatgcat

SEQ ID NO: 785110 - DNA, 120 bp, Artificial Sequence
  ENSG00000257923_70 (sequence is synthesized)
gggagaactctctgagaaatgccaggatcgtggctcacagggacccaccatcaaaacctgctactttgtgcaagtaattgaggcaaaagataccagtcgacagcctccctggggtagatc

SEQ ID NO: 785111 - DNA, 120 bp, Artificial Sequence
  ENSG00000257923_71 (sequence is synthesized)
ccttgtacctccaaagtacaaatacctccctgctcagtttccttcctgtcgccatctttgttttcttcccattgaaaaaccatcctgtctgatgtggacgttcaggtctgctggttggcg

SEQ ID NO: 785112 - DNA, 120 bp, Artificial Sequence
  ENSG00000257923_72 (sequence is synthesized)
gtccgggcccagagtgcagcagagctctgggttaaatattcctttctggccaccgcccaagcccaggtggccagctctcataccccatctccctccttggccagggccagcatcaggcgt

SEQ ID NO: 785113 - DNA, 120 bp, Artificial Sequence
  ENSG00000257923_73 (sequence is synthesized)
gcagctcatgaccagtttacacaggctgcaaagagatcgctgtgggcctcggctgactactttaagattatgccacagccaggccctaaaaagagaggggaacaggagtccccaggtgag

SEQ ID NO: 785114 - DNA, 120 bp, Artificial Sequence
  ENSG00000257923_74 (sequence is synthesized)
ctctctgacgggcaggtgccttcccgactaaggttggactggatgactttgttcctcctgcatgcatgtcctttgatgcaagggtgatcaatgaactctgttgacattctatgcaatgtt

SEQ ID NO: 785115 - DNA, 120 bp, Artificial Sequence
  ENSG00000257923_75 (sequence is synthesized)
tttcattcctctgattttagcaaagcaaatcttactgaaaaatagcagagccaggggaacagacgcatgtccttctgggagtcacacaaaagcagagagattttgaactgaggggcgaca

SEQ ID NO: 785116 - DNA, 120 bp, Artificial Sequence
  ENSG00000257923_76 (sequence is synthesized)
gcctttgccttaaatgcagtatgacaggcgcttcttggcagaccagtaaaaacaaaagcccatagaccttactcatcccaaggccgacaagccagctgtacagggcgagatgtagcaaca

SEQ ID NO: 785117 - DNA, 120 bp, Artificial Sequence
  ENSG00000257923_77 (sequence is synthesized)
cggggcatgagcggtgggcgtgctgggctatttgctgtggtactttaggctggaggtttggctcctgtgctgccggtggggggccctgtccctccccagatgtcctccctcttcttcaca

SEQ ID NO: 785118 - DNA, 120 bp, Artificial Sequence
  ENSG00000257923_78 (sequence is synthesized)
ctcctcattgtcccttctacctcactaacctgtcttctccatctgatgtcacccagaaccacaccccacagaactgtgaggcacgtgggctggagagagcagaaaagctgccagcgcagc

SEQ ID NO: 785119 - DNA, 120 bp, Artificial Sequence
  ENSG00000257923_79 (sequence is synthesized)
agacacgaacatccctctgcctggtgggccggctttgtgtgtctctccttttgtgagcgcaacacggacaaacagctgtgctctgcaaggcacacggatgtttcccttccacctgttccc

SEQ ID NO: 785120 - DNA, 120 bp, Artificial Sequence
  ENSG00000257923_80 (sequence is synthesized)
aaagctccagcagctgtttcttttgcaggcagggcgtggtctcggggctccgagggtcttgtctttggtccgccttcctttctgtccagtcctgctcagctgttaagatccatcatggcc

SEQ ID NO: 785121 - DNA, 120 bp, Artificial Sequence
  ENSG00000257923_81 (sequence is synthesized)
attatccttgtcccggactgccccaaagttcccagctggctttggggaacactgtagctcttgggtgtctcttgtctctggcatggttttagcgtcactgcgaacactcctttgcaaaca

SEQ ID NO: 785122 - DNA, 120 bp, Artificial Sequence
  ENSG00000257923_82 (sequence is synthesized)
tcaaacatctcaaagacggaaaaggatagatggcttcctccagcctacacgccccgtccacagtggcatcaccctcttatcccaaaagaatatgccagttcccatccagcaccgaagaaa

SEQ ID NO: 785123 - DNA, 120 bp, Artificial Sequence
  ENSG00000257923_83 (sequence is synthesized)
atcagctcctggggctggtggttggaggtgggtctgtccactgtgggggccaaagtgttcccctgctggagacagtttgcaagtaagaacctaaggatggggacagcatcctgtgcttgg

SEQ ID NO: 785124 - DNA, 120 bp, Artificial Sequence
  ENSG00000257923_84 (sequence is synthesized)
gcattgaccagccaaagctcacatttagaaagccctcagtgcttctgtggtttcacctgggcatcgacgacattagggaagcctttgtgaccacaagggcagggcttgtgccctgagtgg

SEQ ID NO: 785125 - DNA, 120 bp, Artificial Sequence
  ENSG00000257923_85 (sequence is synthesized)
cgaggtggtgacctgaggccagtgtgatgtggttggatctcagcgtgtactgaatgccagtctggccggcacactcgaacgctaagagaatggtccaatttgatgatcttatttctattt

SEQ ID NO: 785126 - DNA, 120 bp, Artificial Sequence
  ENSG00000257923_86 (sequence is synthesized)
cgatcaggttttgactttttgtagatgaaaactaccagggaaaaggggaagcaggtacccaataaagtttagaaagatccagtctgtgaaacccttagagatgggctgaaagttaagtcc

SEQ ID NO: 785127 - DNA, 120 bp, Artificial Sequence
  ENSG00000257923_87 (sequence is synthesized)
accaacccttgggcttaatcaggacggaagaggagggggtgtggggggcagagcgtaaaacaagccccagccctactcccggccccccagcccagtcttcccaatcccagaggccccggc

SEQ ID NO: 785128 - DNA, 120 bp, Artificial Sequence
  ENSG00000257923_88 (sequence is synthesized)
ggcctgtgctcctcaccaccctggtcaggggaatagaaggaaatgcaatttccgcctgtctgcccgacttccaaaaactgcctcctcctgcccaggcctctcccaccaccaccttccctc

SEQ ID NO: 785129 - DNA, 120 bp, Artificial Sequence
  ENSG00000257923_89 (sequence is synthesized)
caaagataaccgtgtccatgccatccgtggcatcatctcgagttttcatttttggatgaagtgacatttagctttaacaagacatttccaaagcgcctagtctcctccaaaatgctaact

SEQ ID NO: 785130 - DNA, 120 bp, Artificial Sequence
  ENSG00000257923_90 (sequence is synthesized)
ttaaaagttgggcattgtaggcgaaaaatcccaaaaaaaaaaaaagacaaaaaaaaaaggctggcgagagaaagacatttggctatgcataaatgtgcacttcccccatgcccccgttct

SEQ ID NO: 785131 - DNA, 120 bp, Artificial Sequence
  ENSG00000257923_91 (sequence is synthesized)
taaactcttaagatgcctttgagttgcttttcatgaatccttttagtttacccgataatgttaagaaagcattagtctacgttactgtaatttctgtagtgtttacgctttaatttctac

SEQ ID NO: 785132 - DNA, 120 bp, Artificial Sequence
  ENSG00000257923_92 (sequence is synthesized)
cacaaaatatgctatatgctatgtatcaagctttctgtaatcagaaagaaaaggtgccttatatcccaatgtcacggctacatccctatggaaattaatcagaagcacagtgtgtacgga

SEQ ID NO: 785133 - DNA, 120 bp, Artificial Sequence
  ENSG00000257923_93 (sequence is synthesized)
agcattgggacttctgctggtgaaacaagagaccattcagcaagacacattgaagtggcacggagctgcttttgttttataattcttttttccccccttttccttcttcttttttattat

SEQ ID NO: 785134 - DNA, 120 bp, Artificial Sequence
  ENSG00000257923_94 (sequence is synthesized)
tttattattttttttgtactttgctttaaacggaaagcacttaaatagatgactatgtgtaaaagctctgtgcaattgaaatcatttttcttcattttaaaaaaataacgtattgcacac

SEQ ID NO: 785135 - DNA, 120 bp, Artificial Sequence
  ENSG00000257923_95 (sequence is synthesized)
caaatgaactcaaagtaagctttagaccaggacgattcaggttatgaatgagtttgttcactgtagttccgtttgttcatgaaccgaagggaaaacaggcctccccgactccctccagtc

SEQ ID NO: 785136 - DNA, 120 bp, Artificial Sequence
  ENSG00000257923_96 (sequence is synthesized)
tcccagcctgcctcttggtgaccactgtgctgggcgtgcagggcccgcgggctctggccggagccgctggcctgacgaggcaggatagggagtatccgtgattcagaagctgagaccctt

SEQ ID NO: 785137 - DNA, 120 bp, Artificial Sequence
  ENSG00000257923_97 (sequence is synthesized)
ccccagtgtctgaggccacagccatcccttccagcacttaatcttgtcttgttgaaatggactgactgctactgacctgccggcgtgcgtgagggtgattataaaaggatgtttccttga

SEQ ID NO: 785138 - DNA, 120 bp, Artificial Sequence
  ENSG00000257923_98 (sequence is synthesized)
gaaaaaaaaaattatttctatcctcttctatttattattaggttaatcatttaagtacttatcaggagtgtattgttattttgtgttttgttgtcataaatgctttttgctgtcactcta

SEQ ID NO: 785139 - DNA, 120 bp, Artificial Sequence
  ENSG00000257923_99 (sequence is synthesized)
gtggttactatcctctgccttcctctcctcccctactcccccagagaaccaaggcgtctgggggattgactggggggcagagggggtttccccagcaaaatcaaacacctgtctccagag

SEQ ID NO: 785140 - DNA, 120 bp, Artificial Sequence
  ENSG00000257923_100 (sequence is synthesized)
tagccactcaaaaactggtggtctctatgtgtctaactttttaaatgagagtgtttatgaacaaaaaaatttaccaacgtgtgagggagttgctgagttgaagaatgctcgcttgaggag

SEQ ID NO: 785141 - DNA, 120 bp, Artificial Sequence
  ENSG00000257923_101 (sequence is synthesized)
cttcagaggaatcttagcaaagccaagttcagttccccaaagcctcctagagcctctggtaagacttctgggttcatgaagtttcggcgagccgtggtcagagagggcgcggtggcctgg

SEQ ID NO: 785142 - DNA, 120 bp, Artificial Sequence
  ENSG00000257923_102 (sequence is synthesized)
ccaagactttacctccaagcgagagagtgatttcttgcaaggcccgcatgggttgatacgttttggttggttttttgttgttgtttttcttgcgtacaaagttggtcaaaaccatctttc

SEQ ID NO: 785143 - DNA, 120 bp, Artificial Sequence
  ENSG00000257923_103 (sequence is synthesized)
aaagcaacagtgttttgtagtaccaggctgtggcttgagggctcacctaggagatcataggcagagggcccctttcccctataggtggttcaacgtggaggaaggttgggtgtggagatt

SEQ ID NO: 785144 - DNA, 120 bp, Artificial Sequence
  ENSG00000257923_104 (sequence is synthesized)
gcttgctgtggccccaagctcagccagcaggacacccagttgttgccaatcaggtgtgaaggtgaggcgccctgccttgatcccatgggcccagcagaaggaaacttaccccaggccaag

SEQ ID NO: 785145 - DNA, 120 bp, Artificial Sequence
  ENSG00000257923_105 (sequence is synthesized)
gcaagggccctgctcaccccaaggtaggctgggaagagcatctctttccatatcatcacctccccttctccaagattgccgggggccctgattttgttctctctttgaaagaaaccctcc

SEQ ID NO: 785146 - DNA, 120 bp, Artificial Sequence
  ENSG00000257923_106 (sequence is synthesized)
accgaaacaatggtccccatctccccagaagcctttttttttttcatttttctctaattagtctatgcatttctctctctcaaaccatcttctgcctcttcccttgagaaaacgggcatc

SEQ ID NO: 785147 - DNA, 120 bp, Artificial Sequence
  ENSG00000257923_107 (sequence is synthesized)
tcacgtacccccatctgagacctcttggaaaaaaaaaatcccgtgtattctggagatgtgagaattcacccaaaattcttaaaacattggagaatagcttgttataaaataaaagtgggg

SEQ ID NO: 785148 - DNA, 120 bp, Artificial Sequence
  ENSG00000257923_108 (sequence is synthesized)
gtaaaaagaaggtggttttccccacatccctttgcattgaataagagacctagttctttgcgtttgtgcaataactctttgctgcttgccttgagagcgggtagcaccacgctcctgtcc

SEQ ID NO: 785149 - DNA, 120 bp, Artificial Sequence
  ENSG00000257923_109 (sequence is synthesized)
agactactaacagcacaagacgcactcacagggtggcggaatcttccggaaaactctctataagctcagctccccccaccccacccccactctagcgttttgtcacgtcttacattttag

SEQ ID NO: 785150 - DNA, 120 bp, Artificial Sequence
  ENSG00000257923_110 (sequence is synthesized)
cagtattttatattttctgtaacgcaccaagtcttagatctttctagagcttgtttgttcatcctcacaatcacagatttttttctccaatcctcacagagacccaattgaccaaaaaag

SEQ ID NO: 785151 - DNA, 120 bp, Artificial Sequence
  ENSG00000257923_111 (sequence is synthesized)
aaaaaaggaaaaaaaaaaagtcgtcttttttttttttttttgtacaaatcgctttgagatgcctctggtgtgttgctgtgtgacatctctctggtaacattttatttcttgctatttgtt

SEQ ID NO: 785152 - DNA, 120 bp, Artificial Sequence
  ENSG00000257923_112 (sequence is synthesized)
tttctacattaagagtcaaagttgacctggctggcgtgggggtgggggaggcacccgtcggccccttggtgttgtccctctgtctttggttagccatacgatgtttgttctcagcactgt

SEQ ID NO: 785153 - DNA, 120 bp, Artificial Sequence
  ENSG00000257923_113 (sequence is synthesized)
acaacggtccctatataatacggagaagcaatatcactgtatgagactcacaccatgtattattattcactagcaccctaggtgtgataattgaagtaaatatcttttatacaaacacaa

SEQ ID NO: 785154 - DNA, 120 bp, Artificial Sequence
  ENSG00000257923_114 (sequence is synthesized)
ccgtctcaatatgtctcaagatggcggccaatgtgggatcgatgtttcaatattggaagcgctttgatttacagcagctgcagagagaactcgatgccaccgcaacggtattggcgaacc

SEQ ID NO: 785155 - DNA, 120 bp, Artificial Sequence
  ENSG00000257923_115 (sequence is synthesized)
cgctgcgcatctccaacagcgacctgagcggacgctgtgcggagctgcaagtccgtatcactgaggctgtggccacagccactgagcagagagagctgatcgcccgcctggagcaggacc

SEQ ID NO: 785156 - DNA, 120 bp, Artificial Sequence
  ENSG00000257923_116 (sequence is synthesized)
tgagcatcattcagtccatccagcggcccgatgccgagggtgccgctgagcaccgcctggagaagatcccagagcccatcaaagaggccactgccctattctacggacctgcagcaccag

SEQ ID NO: 785157 - DNA, 120 bp, Artificial Sequence
  ENSG00000257923_117 (sequence is synthesized)
ccagcggtgccctcccagagggccaggtggattcactgctttccatcatctccagccagagggagcgcttccgtgcccggaaccaggagcttgaggccgagaaccgcctggcccagcaca

SEQ ID NO: 785158 - DNA, 120 bp, Artificial Sequence
  ENSG00000257923_118 (sequence is synthesized)
ccctccaggccctgcagagtgagctggacagcctgcgcgccgacaacatcaagctctttgagaagatcaagttcctgcagagctaccctggccggggcagcggcagtgatgacacggagc

SEQ ID NO: 785159 - DNA, 120 bp, Artificial Sequence
  ENSG00000257923_119 (sequence is synthesized)
tgcggtactcgtcccagtacgaggagcgcctggaccccttctcctccttcagcaagcgggagcggcagaggaagtacctgagcttgagtccctgggacaaggccaccctcagcatggggc

SEQ ID NO: 785160 - DNA, 120 bp, Artificial Sequence
  ENSG00000257923_120 (sequence is synthesized)
gtctggttctctccaacaagatggcgcgcaccatcggcttcttctacacactgttcctgcactgcctggtcttcctggtgctctacaagctggcatggagcgagagcatggagagggact

SEQ ID NO: 785161 - DNA, 120 bp, Artificial Sequence
  ENSG00000257923_121 (sequence is synthesized)
gtgccaccttctgcgccaagaagttcgctgaccacctgcacaagttccacgagaatgacaacggggctgcggctggtgacttgtggcagtgataccccggggcctcccccgtgacagtga

SEQ ID NO: 785162 - DNA, 120 bp, Artificial Sequence
  ENSG00000257923_122 (sequence is synthesized)
cggctgcgcctccaccccgactgctcagtgcatctaatcacttagactcccctgaagaatcccccatggaaactgcccttatccgctgtccagcagctgccagaggccccaggtcacctc

SEQ ID NO: 785163 - DNA, 120 bp, Artificial Sequence
  ENSG00000257923_123 (sequence is synthesized)
gggtccccttgaaagaatgtctcggtcacatcaggcccgctaggtccagagagcgagcccccaatgcccggccaggctaagccgcagagaccctctcagcccccacctcaggttagggct

SEQ ID NO: 785164 - DNA, 120 bp, Artificial Sequence
  ENSG00000257923_124 (sequence is synthesized)
ctgcccgcagcctgacctctagccctggtggcagaggtccctcagctgcgaggctaattgggtgaccaccgattccagctgcggttaatccagcttgggcctgtctgcactgcgatcctc

SEQ ID NO: 785165 - DNA, 120 bp, Artificial Sequence
  ENSG00000257923_125 (sequence is synthesized)
acaggtttgatactctccttcctagtaccatggatgtggggaggacccagggggagagttgggtcagcccctgaccgccccggtccccgcggatacctgttgctcttcggggccgtggga

SEQ ID NO: 785166 - DNA, 120 bp, Artificial Sequence
  ENSG00000257923_126 (sequence is synthesized)
gctgccgggagcccacgctgaagaattccgcagcacgcccgccagctgctgcgcctcattcctcactgactttgagttgttaatgtagaggtgggaggatctcgattccattttcatccc

SEQ ID NO: 785167 - DNA, 120 bp, Artificial Sequence
  ENSG00000257923_127 (sequence is synthesized)
ttgggctctcctaggatccccccatgccccgtaagaggtggaagacgcttccttccaggacagcaggctttgagtccagcacccccagcctgcctttgccaccagccccaccctgcagag

SEQ ID NO: 785168 - DNA, 120 bp, Artificial Sequence
  ENSG00000257923_128 (sequence is synthesized)
tatatgaggcttgacagagtctgccccctcccccactgcaccccaagagagagagccccagccagcggaacagtttctattaccccctccctgcccccagacccatgtgatttctgcttt

SEQ ID NO: 785169 - DNA, 120 bp, Artificial Sequence
  ENSG00000257923_129 (sequence is synthesized)
cttctttagcaagatattctggtttctagataaggaagagtctctaatgagcccccgagccccagtctcttcagactcatggattggtatgaggggtctgaacgtctcctagccaatcag

SEQ ID NO: 785170 - DNA, 120 bp, Artificial Sequence
  ENSG00000257923_130 (sequence is synthesized)
aactggctgtggaccaccctagcacggccacctctcagggccactggcaggccttcctgagttagatttgtagttgcatatttagctttgcacatttgaaataaaccacggttgcagcca

SEQ ID NO: 785171 - DNA, 120 bp, Artificial Sequence
  ENSG00000257923_131 (sequence is synthesized)
actcactgggtaatccttccaacaaacttctttccttctttattgtgaaggctggtcactgctatgccttctgccatgaaaatttgggagttagtttatataagatgtgacacatgggac

SEQ ID NO: 785172 - DNA, 120 bp, Artificial Sequence
  ENSG00000257923_132 (sequence is synthesized)
attttttgtgtggagttgagtctgggtaaatcacatgtctttttcgctgggccacagttcttcatttctcccagggccctttaggaaggcctgccccagaataagcacattcccacgcag

SEQ ID NO: 785173 - DNA, 120 bp, Artificial Sequence
  ENSG00000257923_133 (sequence is synthesized)
tctttccccagatgtcttcagccccatttccagcagaacgcatgccatcctgcaggctgtggggatgtggaaattgataggttgtctggaaatatgaaagtcagagccaattccaggtgc

SEQ ID NO: 785174 - DNA, 120 bp, Artificial Sequence
  ENSG00000257923_134 (sequence is synthesized)
agatactggacaagcttggtctgtaagaacacgtgggcaggtgtgtgggtgtctcagaccctcgagctcatcccagaccctgtcccatgtcagttagcaagccaccaaagtccataaggg

SEQ ID NO: 785175 - DNA, 120 bp, Artificial Sequence
  ENSG00000257923_135 (sequence is synthesized)
ccctcctatcccagataagaagaattgccttctttcctcccagctgatttgcttttctcgtcattatatggcaaaccaggctgcactcccctcctaaggcaggcggtggttctctttggg

SEQ ID NO: 785176 - DNA, 120 bp, Artificial Sequence
  ENSG00000257923_136 (sequence is synthesized)
ctctgagtcctcagtgttctgcctcttcgggtgccaaccaggaaagccgccttccgcttttagagcaacgtgaagaaatcatggcagcccacgatttgcgcaagcaggtagcgccgctgc

SEQ ID NO: 785177 - DNA, 120 bp, Artificial Sequence
  ENSG00000257923_137 (sequence is synthesized)
cagaaaggatttggtggtactggtttttatgtgtgtgtgtgttgttttttaaaaaaattttctccaagggacctggtcaaagatttcaagccttaaatctgatcaacccaatctggggcg

SEQ ID NO: 785178 - DNA, 120 bp, Artificial Sequence
  ENSG00000257923_138 (sequence is synthesized)
gcggcagctcagtctctcctcctcgctgtgccaatctgtttctgtggtggcgggtggcggctcggtgttaaatttggagacccccgtgggtttcccatgccgacctgcatatgtctgcgg

SEQ ID NO: 785179 - DNA, 120 bp, Artificial Sequence
  ENSG00000257923_139 (sequence is synthesized)
gcacggggaagggagggccgcagacccccgttgagtccccgactgccagcagcaagttgccgcaggcgcactggctctgcagccccgggatcaagagagaactcgatgccaccgcaacgg

SEQ ID NO: 785180 - DNA, 120 bp, Artificial Sequence
  ENSG00000257923_140 (sequence is synthesized)
aaagtgccaggaacccatatcgcatgcaagcgtgtgtgttcaaattagccttctccagggaggaattcacagcaccaggaatacgcgcagagatgttcttttgcacttttgcattttaaa

SEQ ID NO: 785181 - DNA, 120 bp, Artificial Sequence
  ENSG00000257923_141 (sequence is synthesized)
acgtgcatcgcttacgagcgcagcattttcaagccttttcttgagatcagctcgttcagttacatgtgcttttgaagatgaccatttgtgaaaccatcagccactggcaaagtgaagaaa

SEQ ID NO: 785182 - DNA, 120 bp, Artificial Sequence
  ENSG00000257923_142 (sequence is synthesized)
gagaaagtgacttgcctcacgctgcccggttccacccagggaccttgtgaagagacgcgggaaggctggcagaaaggagaaccgtccttcctgtggaatactcccgagatcgcaccactc

SEQ ID NO: 785183 - DNA, 63 bp, Artificial Sequence
  ENSG00000257923_143 (sequence is synthesized)
atcgcaccactcactgtacatgtgtccatgtatataaacatgtttatgaatatacataaataa

SEQ ID NO: 785184 - DNA, 120 bp, Artificial Sequence
  ENSG00000257949_0 (sequence is synthesized)
cctttggcgcgtgagtgacagcggcccagacagagggggcgatgtccgcgtcgtggctggggccggtcgcggggcagactaatcccctgctcctggccaggggaggctcccgagcggatc

SEQ ID NO: 785185 - DNA, 120 bp, Artificial Sequence
  ENSG00000257949_1 (sequence is synthesized)
ctcgggaaaggggctccgaaggtcaagaaactgccctgctgggcgtccggggagtgggaaaataaagcactttttgtatcccgcccctcccccgtcacgtgaccacgcgaggcggaaaga

SEQ ID NO: 785186 - DNA, 120 bp, Artificial Sequence
  ENSG00000257949_2 (sequence is synthesized)
agaaatccgaggaccggcgacgcctagaacaggagcccatgatgctgcccaaacctgggacctattacctcccctgggaggttagtgcaggccaagttcctgatgggagcacgctgagaa

SEQ ID NO: 785187 - DNA, 120 bp, Artificial Sequence
  ENSG00000257949_3 (sequence is synthesized)
catttggcaggttgtgcctctatgacatgattcagtccagagtaacactgatggctcagcacggatccgatcagcaccaggttcttgtctgtaccaagttggtggagcccttccacgccc

SEQ ID NO: 785188 - DNA, 120 bp, Artificial Sequence
  ENSG00000257949_4 (sequence is synthesized)
tacatcgtcctcggggagctccagcatcagcaggacagaggctccgtggtgaaggcgcgcgtgctgacctgtgtggaggggatgaacctgcccttgttggaacaagccatccgggagcag

SEQ ID NO: 785189 - DNA, 120 bp, Artificial Sequence
  ENSG00000257949_5 (sequence is synthesized)
agactgtacaagcaggagcggggcggcagccagtaggaaacagcagcctagcaacaccctcacctgcttcagagcccgaaccctctggagctgcaggagcccgggagagcacagacgcct

SEQ ID NO: 785190 - DNA, 120 bp, Artificial Sequence
  ENSG00000257949_6 (sequence is synthesized)
ccccagcgacggccttgtctggagctcgaaagccgaggggcgggtgatgaatccagccccttcccctactttgggattggctcagcaatgagaacccagaaagcatgccataaatccgac

SEQ ID NO: 785191 - DNA, 120 bp, Artificial Sequence
  ENSG00000257949_7 (sequence is synthesized)
agccccaccccaggagactgcaggtggccgagcttgggcgccggggccgtgcttggtgtggggccatggagggttccagaaggtcctggtgaataaaggcccagggggcgtgctcttgaa

SEQ ID NO: 785192 - DNA, 120 bp, Artificial Sequence
  ENSG00000257987_0 (sequence is synthesized)
agtgccccaacctggacgttccagaagaggccagggaggatctgagatggccttcttcaacttgtatctattgggatatcaaaattcctttcagaacaagaaaaggaacacaactgaaga

SEQ ID NO: 785193 - DNA, 120 bp, Artificial Sequence
  ENSG00000257987_1 (sequence is synthesized)
aacaaaccagaaggaaccagagcctactaggcttccccccattatctcaaaagatgggaattattccgtgcaccagaatagccacacaagataccacgaagctgtccggaaggtgttgtt

SEQ ID NO: 785194 - DNA, 120 bp, Artificial Sequence
  ENSG00000257987_2 (sequence is synthesized)
accatgccatggatccggagcccacgccattgtctcataaaaagcgcgatgaccaggtttatggatcactctattctcaatgacaggaccttcagtctgtattaagaagatatggctgca

SEQ ID NO: 785195 - DNA, 120 bp, Artificial Sequence
  ENSG00000257987_3 (sequence is synthesized)
gaaagacaagatgaattgtggcaagagtgcagagggggaaagaaggaggtttcccagttccgatggctgactaatgggaggaggagatggagaaagcacagtaaacagactggactaaaa

SEQ ID NO: 785196 - DNA, 120 bp, Artificial Sequence
  ENSG00000257987_4 (sequence is synthesized)
agaagaggccagggaggatctgagatggccttcttcaacttgtatctattgggatatcaaaattcctttcagaacaagaaaaggaacacaactgaagaaacaaaaactttttgtttatcc

SEQ ID NO: 785197 - DNA, 120 bp, Artificial Sequence
  ENSG00000258083_0 (sequence is synthesized)
gcggttgttctctctcttttgctctctagatttcacaaggaacaagggcttagaactaaatgttgatgaattactctagtgccactgaattttatctccttggcttccctggctctgaag

SEQ ID NO: 785198 - DNA, 120 bp, Artificial Sequence
  ENSG00000258083_1 (sequence is synthesized)
aactacatcatatcctttttgctatattcttctttttctacttggtgacattaatgggaaacacagtcatcatcatgattgtctgtgtggataaacgtctgcagtcccccatgtatttct

SEQ ID NO: 785199 - DNA, 120 bp, Artificial Sequence
  ENSG00000258083_2 (sequence is synthesized)
tcctcggccacctctctgccctggagatcctggtcacaaccataatcgtccccgtgatgctttggggattgctgctccctgggatgcagacaatatatttgtctgcctgtgttgtccagc

SEQ ID NO: 785200 - DNA, 120 bp, Artificial Sequence
  ENSG00000258083_3 (sequence is synthesized)
tcttcttgtaccttgctgtggggacaacagagttcgcattacttggagcaatggctgtggaccgttatgtggctgtctgtaaccctctgaggtacaacatcattatgaacagacacacct

SEQ ID NO: 785201 - DNA, 120 bp, Artificial Sequence
  ENSG00000258083_4 (sequence is synthesized)
tcttgtgtcatgggtgtttgggtttctttttcaaatctggccggtctatgtcatgtttcagcttacttactgcaaatcaaatgtggtgaacaattttttttgtgaccgagggcaattgct

SEQ ID NO: 785202 - DNA, 120 bp, Artificial Sequence
  ENSG00000258083_5 (sequence is synthesized)
caaactatcctgcaataatactcttttcacggagtttatcctcttcttaatggctgtttttgttctctttggttctttgatccctacaattgtctccaacgcctacatcatctccaccat

SEQ ID NO: 785203 - DNA, 120 bp, Artificial Sequence
  ENSG00000258083_6 (sequence is synthesized)
tctcaagatcccgtcatcctctggccggaggaaatccttctccacttgtgcctcccacttcacctgtgttgtgattggctacggcagctgcttgtttctctacgtgaaacccaagcaaac

SEQ ID NO: 785204 - DNA, 120 bp, Artificial Sequence
  ENSG00000258083_7 (sequence is synthesized)
gcaggcagctgattacaattgggtagtttccctgatggtttcagtagtaactcctttcctcaatcctttcatcttcaccctccggaatgataaagtcatagaggcccttcgggatggggt

SEQ ID NO: 785205 - DNA, 120 bp, Artificial Sequence
  ENSG00000258083_8 (sequence is synthesized)
gaaacgctgctgtcaactattcaggaattagccttgctctgaggacttttacatggtaaagcacttagtatggattctagaataatctgaaaagaacttgctcatctttgaactgcatca

SEQ ID NO: 785206 - DNA, 120 bp, Artificial Sequence
  ENSG00000258083_9 (sequence is synthesized)
gagagaaggaagcaaagagaaggagagagatagagacagttggactctctcctcagcactcgtatttctggacttttgcataagcttctgtatgaggacagtatccttcactctgaatgg

SEQ ID NO: 785207 - DNA, 120 bp, Artificial Sequence
  ENSG00000258083_10 (sequence is synthesized)
agacagaagcagctgttcctgtctcctgagcatagctcagcactaggtgagcgagagatagcctgggctggtccctggggagcagtagaactttccagtccaggctgcttctccggagat

SEQ ID NO: 785208 - DNA, 120 bp, Artificial Sequence
  ENSG00000258083_11 (sequence is synthesized)
cttgctatctagctatctatctatcatctgcctttcttaagatatgatgatttcacaattaaactttgaaaaattaaatgtcagagatagactatctatatagtctagaaaatagactag

SEQ ID NO: 785209 - DNA, 120 bp, Artificial Sequence
  ENSG00000258083_12 (sequence is synthesized)
tggttgcttagggctgaggggaatgcagacatagggtagtgatagctatggggtacaggctttctttttgaaatgatggttgtaaatatctatgaatataccaaaaatcattgaactata

SEQ ID NO: 785210 - DNA, 120 bp, Artificial Sequence
  ENSG00000258083_13 (sequence is synthesized)
cattttcaatgagtcaactttatggaatgtgatttatatttcaataaagcttttgaaaatagtatattagatcatgaagaagtattgtgaagaaaagtgaaacaggaatgaaagggaata

SEQ ID NO: 785211 - DNA, 120 bp, Artificial Sequence
  ENSG00000258083_14 (sequence is synthesized)
tctcttgcaggagtgttgaaatttcaaataaggttttcagggaaggattgagagaggtaaggtggtgatacattcggaaacttgttaaagaacattccaggcatagtgagtaataagtga

SEQ ID NO: 785212 - DNA, 120 bp, Artificial Sequence
  ENSG00000258083_15 (sequence is synthesized)
gagatcctagggaaggcataacaaagatgctgaaatggagtgtgcagaggagaaagcaatggcagtcagagtggtaactggaatgcagaccatgtagagccttgtgagcctttttttttt

SEQ ID NO: 785213 - DNA, 120 bp, Artificial Sequence
  ENSG00000258102_0 (sequence is synthesized)
gcaaggctcgcagccacctctcgggagtgcagggccagatcctgtgccagcggccttacacggccacagtcggattcgctgccgcagcagccgccacccccaggagccgccgggaccctc

SEQ ID NO: 785214 - DNA, 120 bp, Artificial Sequence
  ENSG00000258102_1 (sequence is synthesized)
gcgtcgtcgccgccgcggcccagatccccacaccatgccgtcggagaagaccttcaagcagcggcgcaccttcgaacaaagagtagaagatgtccgacttattcgagagcagcatccaac

SEQ ID NO: 785215 - DNA, 120 bp, Artificial Sequence
  ENSG00000258102_2 (sequence is synthesized)
caaaatcccggtgataatagaacgatacaagggtgagaagcagcttcctgttctggataaaacaaagttccttgtacctgaccatgtcaacatgagtgagctcatcaagataattagaag

SEQ ID NO: 785216 - DNA, 120 bp, Artificial Sequence
  ENSG00000258102_3 (sequence is synthesized)
agaaagatgaagatggattcctgtacatggtctgtgcctcccaggagacgttcgggatgaaattgtcagtgtaaaaccagaaaaaatgcatctcttctagaattttttaaacccttacca

SEQ ID NO: 785217 - DNA, 120 bp, Artificial Sequence
  ENSG00000258102_4 (sequence is synthesized)
aggaaaaaaaaagggatgttaccaactgagatcgatcagttcatctaatcacagatcatcaaacagtagtgttcccacctaggagtgttaggaagttgtgtttgtgtttcaagcagaaaa

SEQ ID NO: 785218 - DNA, 120 bp, Artificial Sequence
  ENSG00000258102_5 (sequence is synthesized)
actgagctccaagtgagcacattcagctttggaaactatattatttaatgtaggctagcttgttttcaaattttaaaagtttaaaaataaaatactttgcattctaaaaaaaaaaaaaaa

SEQ ID NO: 785219 - DNA, 120 bp, Artificial Sequence
  ENSG00000258102_6 (sequence is synthesized)
catcttttagtctcccagaaagactggaaccagtgatgagttccatgaagacaaagacctgtttatcttgttctgctccagcaccgagcaggtgcagtggcttatgcctgttatcccaga

SEQ ID NO: 785220 - DNA, 120 bp, Artificial Sequence
  ENSG00000258102_7 (sequence is synthesized)
tcaagaccagcctgggaaacatagcaagagcctgtctctattgggagaaaaaaaaaaaaaagcaacagcgacgaggcccgaggtgcagctgtctcgcctcgcctgtcttttgcaggcacc

SEQ ID NO: 785221 - DNA, 120 bp, Artificial Sequence
  ENSG00000258102_8 (sequence is synthesized)
cagctgtctcgcctcgcctgtcttttgcaggcaccggcatgcacagaagatggctctccgggaggaagattcctttccattttgttctctctctgcctccgcaaggctcgcagccacctc

SEQ ID NO: 785222 - DNA, 120 bp, Artificial Sequence
  ENSG00000258102_9 (sequence is synthesized)
tcgggagtgcagggccagatcctgtgccagcggccttgcttgaatggcttcttgacggttactgctccagttttgctgagtcagaagaatcccacagccgctcaccggaaacacagctgt

SEQ ID NO: 785223 - DNA, 120 bp, Artificial Sequence
  ENSG00000258102_10 (sequence is synthesized)
tgggcaaaaataaccacagagctgagcatcatgcaccttccagaaaagatggcagaaaacctcaaaacaaaagagaaatacaaaacaataggagacactgtcaagaaaaaaaaaacaaaa

SEQ ID NO: 785224 - DNA, 120 bp, Artificial Sequence
  ENSG00000258102_11 (sequence is synthesized)
aatacctaactgcaagaactgccgcatccctggtggtctgaccttgtctctgagctaagcagcagatttcagccacagcgtctgactctcaggcagacacatcctgtccaaggactggag

SEQ ID NO: 785225 - DNA, 120 bp, Artificial Sequence
  ENSG00000258102_12 (sequence is synthesized)
gttctcccacccagagcggtcagctgcatgtggctggttggggggcggttcagaaacggcccaagagaaatggaaatatgatggctggttgattgtttcgcagtctgcatgacagaccac

SEQ ID NO: 785226 - DNA, 120 bp, Artificial Sequence
  ENSG00000258102_13 (sequence is synthesized)
cagagcatccgttctcccacccagagcggtcagctgcatgtggctggttggggggcggttcagacagaaacggcccaagagaaatggaaatatgatggctggttgattgtttcgcagtct

SEQ ID NO: 785227 - DNA, 120 bp, Artificial Sequence
  ENSG00000258102_14 (sequence is synthesized)
gcatgacagaccaccctcctaacaagactctaggtcaagtgctcttctctgccctgtggatctactggggagaaattagctctcggtggtatttccaattatggagaaaagcgattcctc

SEQ ID NO: 785228 - DNA, 120 bp, Artificial Sequence
  ENSG00000258102_15 (sequence is synthesized)
atcatgtgttttgcagtggaccaagagacatgaagcccgttttccaccctcgcctctttctccatctagctgcatgaccttgggaggtggcgtgacctctcggcttctttgctgcctcat

SEQ ID NO: 785229 - DNA, 120 bp, Artificial Sequence
  ENSG00000258223_0 (sequence is synthesized)
aaggctggcaaaaaggagaccagacaggaggcgtctgtagagatatcatgaacttcaacttagctttgttttccagagactggagctaaactgggctttcaacatcatcatgaagtttat

SEQ ID NO: 785230 - DNA, 120 bp, Artificial Sequence
  ENSG00000258223_1 (sequence is synthesized)
cctcctctgggctctcttgaatctgactgttgctttggcctttaatccagattacacagtcagctccactcccccttacttggtctatttgaaatctgactacttgccctgcgctggagt

SEQ ID NO: 785231 - DNA, 120 bp, Artificial Sequence
  ENSG00000258223_2 (sequence is synthesized)
cctgatccacccgctttgggtgatcacagctgcacactgcaatttaccaaagcttcgggtgatattgggggttacaatcccagcagactctaatgaaaagcatctgcaagtgattggcta

SEQ ID NO: 785232 - DNA, 120 bp, Artificial Sequence
  ENSG00000258223_3 (sequence is synthesized)
acagaggctgaactcaatgactatgtgaaattagccaacctgccctaccaaactatctctgaaaataccatgtgctctgtctctacctggagctacaatgtgtgtgatatctacaaagag

SEQ ID NO: 785233 - DNA, 120 bp, Artificial Sequence
  ENSG00000258223_4 (sequence is synthesized)
cccgattcactgcaaactgtgaacatctctgtaatctccaagcctcagtgtcgcgatgcctataaaacctacaacatcacggaaaatatgctgtgtgtgggcattgtgccaggaaggagg

SEQ ID NO: 785234 - DNA, 120 bp, Artificial Sequence
  ENSG00000258223_5 (sequence is synthesized)
cagccctgcaaggaagtttctgctgccccggcaatctgcaatgggatgcttcaaggaatcctgtcttttgcggatggatgtgttttgagagctgatgttggcatctatgccaaaattttt

SEQ ID NO: 785235 - DNA, 120 bp, Artificial Sequence
  ENSG00000258223_6 (sequence is synthesized)
tactatataccctggattgaaaatgtaatccaaaataactgagctgtggcagttgtggaccatatgacacagcttgtccccatcgttcacctttagaattaaatataaattaactcctca

SEQ ID NO: 785236 - DNA, 120 bp, Artificial Sequence
  ENSG00000258223_7 (sequence is synthesized)
cgtctgtagagatatcatgaacttcaacttagctttggtactttcttccctgaagacagagggcagaactctgagttccagaaccattttcaactgtattggggaccaatcacttgactc

SEQ ID NO: 785237 - DNA, 120 bp, Artificial Sequence
  ENSG00000258223_8 (sequence is synthesized)
tattcttgtctctctgacagatgacgctacactctcctctgaataatggacaccatttctaaaactgaatcctgctactaaaataattcagatgatatatttttccaattctacaatctt

SEQ ID NO: 785238 - DNA, 120 bp, Artificial Sequence
  ENSG00000258227_0 (sequence is synthesized)
gtatttcttggggatgctaccaaggcagagactgtgaagaaggaagaacgttgcttgggcaaaaggagcatattctcaggagacggggcccctgcctgccacaccaagcattaggccacc

SEQ ID NO: 785239 - DNA, 120 bp, Artificial Sequence
  ENSG00000258227_1 (sequence is synthesized)
aggaagacccccatctgcaagcaagcctagccttccagggagaaagaggcccctgcagctccttcatcatgaactggcacatgatcatctctgggcttattgtggtagtgcttaaagttg

SEQ ID NO: 785240 - DNA, 120 bp, Artificial Sequence
  ENSG00000258227_2 (sequence is synthesized)
ttggaatgaccttatttctactttatttcccacagatttttaacaaaagtaacgatggtttcaccaccaccaggagctatggaacagtctcacagatttttgggagcagttccccaagtc

SEQ ID NO: 785241 - DNA, 120 bp, Artificial Sequence
  ENSG00000258227_3 (sequence is synthesized)
ccaacggcttcattaccacaaggagctatggaacagtctgccccaaagactgggaattttatcaagcaagatgttttttcttatccacttctgaatcatcttggaatgaaagcagggact

SEQ ID NO: 785242 - DNA, 120 bp, Artificial Sequence
  ENSG00000258227_4 (sequence is synthesized)
tttgcaaaggaaaaggatccacattggcaattgtcaacacgccagagaaactgaagtttcttcaggacataactgatgctgagaagtattttattggcttaatttaccatcgtgaagaga

SEQ ID NO: 785243 - DNA, 120 bp, Artificial Sequence
  ENSG00000258227_5 (sequence is synthesized)
aaaggtggcgttggatcaacaactctgtgttcaatggcaatgttaccaatcagaatcagaatttcaactgtgcgaccattggcctaacaaagacatttgatgctgcatcatgtgacatca

SEQ ID NO: 785244 - DNA, 120 bp, Artificial Sequence
  ENSG00000258227_6 (sequence is synthesized)
gctaccgcaggatctgtgagaagaatgccaaatgatcacagttccctgtgacaagaactatacttgcaactctttttgaatccatacaggtcgtctggccaatgattcttttacttacct

SEQ ID NO: 785245 - DNA, 120 bp, Artificial Sequence
  ENSG00000258227_7 (sequence is synthesized)
atctgtctaccagtagcggtccttgcccatttgggaaactgagcttctttcttctgcactgggggactggatgctagccatctccaggagacaggatcagttttacggaaacaactcagt

SEQ ID NO: 785246 - DNA, 120 bp, Artificial Sequence
  ENSG00000258227_8 (sequence is synthesized)
tagtatagagatgaggtccgcttctgtagtactgagcatttctgactgatcaaaaaggcctagtctgttgacagggtttgttttattttagcctcagagtataccatactactagggagt

SEQ ID NO: 785247 - DNA, 120 bp, Artificial Sequence
  ENSG00000258227_9 (sequence is synthesized)
aactgtagagtgagaaattataaacattatttagggattaccatggtggaagagggataaacataggtcctgtgacttcgtctctgttctcaagggaaccccattcacatgcccctccta

SEQ ID NO: 785248 - DNA, 120 bp, Artificial Sequence
  ENSG00000258227_10 (sequence is synthesized)
actccacaagcgagggtagcagaggctctcctcagtctgaactaaggcttggccttggggagggctcctagtgctgagcttggagcagcacggacagcagcattgtttatgggaatggag

SEQ ID NO: 785249 - DNA, 120 bp, Artificial Sequence
  ENSG00000258227_11 (sequence is synthesized)
agaggtctgggcaggataggaaccttcttggagacccctttgaagaaaaccaggcagccaagggagccaaacacactagatttctgttcttcagcaaagccctgaagagacacttaagct

SEQ ID NO: 785250 - DNA, 120 bp, Artificial Sequence
  ENSG00000258227_12 (sequence is synthesized)
aaaaattcccttgtcatatttctgaaactccattataacatatgtaactcctttgtaaccaaaatttaggtaagcaggcttcctttgctctgaaggttttgagtacctggctgtatttgt

SEQ ID NO: 785251 - DNA, 120 bp, Artificial Sequence
  ENSG00000258227_13 (sequence is synthesized)
tgagtatttttaaaattttggatagtctcttaggcaacaataatcacaatatattcatcccttcagttctggagaaagcctgataccaggcacagcctactgaccccaaggagcctggca

SEQ ID NO: 785252 - DNA, 120 bp, Artificial Sequence
  ENSG00000258227_14 (sequence is synthesized)
agaactggtccagccgacgaagagtaggaaaagagaagggctgctcagggaaacattggctgggggcacggaataagcacatagtaaaaagggaacatcagggtcaaatggaaatcacct

SEQ ID NO: 785253 - DNA, 120 bp, Artificial Sequence
  ENSG00000258227_15 (sequence is synthesized)
gagacaggaaacagggagttcatttggccacactggaagaaaggcaagaaagaggaagacaagtcttggagtaccctggctgttctccacactcacaagacatcagctatatactctgct

SEQ ID NO: 785254 - DNA, 120 bp, Artificial Sequence
  ENSG00000258227_16 (sequence is synthesized)
tggtgcataagaaagagaaaagagatgccttttgtgttttgagtaagaataattaaaccataaggaagaccatgtataaaactgatggaaataatagtcaccaaagtacagcacatacca

SEQ ID NO: 785255 - DNA, 120 bp, Artificial Sequence
  ENSG00000258227_17 (sequence is synthesized)
ttttgtgtctaataacaatgtagcacagtaatgactgtacatgtcattgtatgtataccaaacaagattgttgtaaatcatattttttattacaacactaagttctgcttctgcattcct

SEQ ID NO: 785256 - DNA, 120 bp, Artificial Sequence
  ENSG00000258227_18 (sequence is synthesized)
aggtttcatcatttttggctccttagcatggccacttacaattttttaacatgagataacacatcaggtgtcagaacttgcttgaagggaattaccagaagtaatttgtgtttgagatgg

SEQ ID NO: 785257 - DNA, 120 bp, Artificial Sequence
  ENSG00000258227_19 (sequence is synthesized)
ggtggaaattggaattatattagtagccggtggagatacaagttctctgactgtgttgggaaaggataagtgctaccgttgagaagggaagaaaggctgagtctaggtggagaaaaatat

SEQ ID NO: 785258 - DNA, 120 bp, Artificial Sequence
  ENSG00000258227_20 (sequence is synthesized)
caacagaactctagccaaaggcaagccccagaactcagacaacagaaaggaaatcctaatccttctgttttgagaagagagaactgtagttgcttcacttcctatttcatgacagaataa

SEQ ID NO: 785259 - DNA, 120 bp, Artificial Sequence
  ENSG00000258227_21 (sequence is synthesized)
ctgcaaacttttaagatcaggaaatgtagacatctagtgatttctttagtagacagtttaatttcccccaagattaggagacacttctgtgcaggttctaaaaggagcccaatggcctgg

SEQ ID NO: 785260 - DNA, 120 bp, Artificial Sequence
  ENSG00000258227_22 (sequence is synthesized)
ggtgggagtggggagtagatagggaatatgtgggatttggtttaagttcatcattggaagagttcctggatccttgcaagcttagataaatgtgatctttattagatagcagtggcatgc

SEQ ID NO: 785261 - DNA, 120 bp, Artificial Sequence
  ENSG00000258227_23 (sequence is synthesized)
tttaaaaaaaaaaaaggcaatgaaaatttagcaagccactgaatttgagttttcactttgtttctaatatgctgtgtgaatcagtacagttttcttaccctttcttggtcttaatttcct

SEQ ID NO: 785262 - DNA, 120 bp, Artificial Sequence
  ENSG00000258227_24 (sequence is synthesized)
tactgataaaatggggtagtaatacctatctcaaaaaattattgcacatattaaataacattcctctatgtatctcaatggcattagacattaggagaagcattttgtggaggatttgaa

SEQ ID NO: 785263 - DNA, 120 bp, Artificial Sequence
  ENSG00000258227_25 (sequence is synthesized)
gttgagatcttcatccaagaagtagcttttcaatttgctagaagcttaatgtaggcaagccacttcatttttcagaacttgtttactcatttataatatgggaataaaaatttgtgcaag

SEQ ID NO: 785264 - DNA, 120 bp, Artificial Sequence
  ENSG00000258227_26 (sequence is synthesized)
tcagagaagggtgccttaaaaatgttgtggccaagccacatgagatcaaagacacacttttcatgacctcaaatgtgggcccagcctaggtcagccaacccccatccaacccttagactc

SEQ ID NO: 785265 - DNA, 120 bp, Artificial Sequence
  ENSG00000258227_27 (sequence is synthesized)
acgaacaaatccacctgagatcagcagagccaccctagatcagctgaaactctaagcacaaaaataaaaacttatcactgtataccactggagttttctggttatctctcgtatagcaaa

SEQ ID NO: 785266 - DNA, 120 bp, Artificial Sequence
  ENSG00000258227_28 (sequence is synthesized)
atctaactgatgcaatctccatctggccttcatccttctccctttattgtcctttcgtgtattgttcatccagcaaccaggatgatcttgttaaaacattaaacagattctgtcactctt

SEQ ID NO: 785267 - DNA, 120 bp, Artificial Sequence
  ENSG00000258227_29 (sequence is synthesized)
gcccctgcctgccacaccaagcattaggccaccaggaagacccccatctgcaagcaagcctagccttccagggagaaagagaagtttcttcaggacataactgatgctgagaagtatttt

SEQ ID NO: 785268 - DNA, 120 bp, Artificial Sequence
  ENSG00000258227_30 (sequence is synthesized)
ggatcaacaactctgtgttcaatggcaagtacgtgaacatgccacagtttcctggggatcttggtttgcttcaaaagaccaaacctgagattgctgggttcaccctggaatagctcaaac

SEQ ID NO: 785269 - DNA, 120 bp, Artificial Sequence
  ENSG00000258227_31 (sequence is synthesized)
gctgacacttgactctgttctgctcttctcctttcttccaacccatctattccctgagacacattttaataaatgttttcttatgaaagagatcaaactttcataaggagaaagaagagt

SEQ ID NO: 785270 - DNA, 120 bp, Artificial Sequence
  ENSG00000258227_32 (sequence is synthesized)
tgtcagcaattcaagactatctttcctaccctctgcagtgcctctttcagctatccaggtactgagtgttcatctgattttttgttctcatgtatgtatatgtgcttttttgtgtgtaga

SEQ ID NO: 785271 - DNA, 120 bp, Artificial Sequence
  ENSG00000258227_33 (sequence is synthesized)
tagttgtcaaatttggtgttcctgtagggggatgactaatggaaactttattcagccactgcgctcttctccttattctccttatattattgtcaaggaaccagactagactgggtggaa

SEQ ID NO: 785272 - DNA, 120 bp, Artificial Sequence
  ENSG00000258289_0 (sequence is synthesized)
agacttcggctcggttcccgagacggaatacccaggagtcgagtacttgggcgcatgcggcaaccgtatctcagttctcgcgaggtttcgtcttcccggaagcgttggaggacattccct

SEQ ID NO: 785273 - DNA, 120 bp, Artificial Sequence
  ENSG00000258289_1 (sequence is synthesized)
gttgactgcgtcgcgatgtgtggcgactgtgtggagaaggaatatcccaaccggggtaatacctgcctggagaatggatctttcttactgaactttacaggctgtgcagtgtgcagtaag

SEQ ID NO: 785274 - DNA, 120 bp, Artificial Sequence
  ENSG00000258289_2 (sequence is synthesized)
cgggattttatgctgatcacaaacaaatccttgaaagaagaagatggagaagaaatagttacctatgatccagatttgtgtaagaattgtcatcatgtaatagccagacatgagtataca

SEQ ID NO: 785275 - DNA, 120 bp, Artificial Sequence
  ENSG00000258289_3 (sequence is synthesized)
ttcagtatcatggatgaatttcaggagtataccatgctgtgtctgttatgcggcaaagccgaagatactatcagtattctccctgatgacccccgacaaatgactctcttattctaagga

SEQ ID NO: 785276 - DNA, 120 bp, Artificial Sequence
  ENSG00000258289_4 (sequence is synthesized)
tccttctacagatctgttataactatattgtgttggtttacaatacagcaagcctgatggtttgtcttatttcattcatactgaaaattctttgcatattttttttctgcttagacttac

SEQ ID NO: 785277 - DNA, 120 bp, Artificial Sequence
  ENSG00000258289_5 (sequence is synthesized)
ttattctttgaggaaaaaaggtaatgtaggagctcattgttctctagagctgagctcttctgctaaagttcaaagttcacatcagtgtagccagagtgaagcatctttgttagcagttat

SEQ ID NO: 785278 - DNA, 120 bp, Artificial Sequence
  ENSG00000258289_6 (sequence is synthesized)
gtggtcagaaaacaactagaatgggagcacacctggtgcccagattttggtttccaataaaaggaaccaggactccttagaaaatgaactgattctagaactgggatatgaactgtacaa

SEQ ID NO: 785279 - DNA, 120 bp, Artificial Sequence
  ENSG00000258289_7 (sequence is synthesized)
gatgagcctagagtatcttgtgccacagaaaaatgaagtactgaaattaaaaaaaaaaaatcatagtgattgggagtatgtcagcatgatcgaactgaaggatctctgaaaggccacagc

SEQ ID NO: 785280 - DNA, 120 bp, Artificial Sequence
  ENSG00000258289_8 (sequence is synthesized)
tggagcaatttgagtaacaaaataaagtagtattgggttataacccaaactatataataaatatttacaagcccaaactaatataaatgattgaatgggaacaaatctcttgtgcagaag

SEQ ID NO: 785281 - DNA, 120 bp, Artificial Sequence
  ENSG00000258289_9 (sequence is synthesized)
aatttcaaataatttatgtagatactccccacttagtgggctctgcatagtgacttccttgcagagtataatatggaaaggggggaaaagagtaactttacagtggagaaatctgacaga

SEQ ID NO: 785282 - DNA, 120 bp, Artificial Sequence
  ENSG00000258289_10 (sequence is synthesized)
caccagctcagccaggtgattgaggttaacatcatccatgataagcccttttgatagcatgtatccttgatagcatcacatcatacagaatgtgataagaatggcactttacctctgtgg

SEQ ID NO: 785283 - DNA, 120 bp, Artificial Sequence
  ENSG00000258289_11 (sequence is synthesized)
tcctcctccccagaactcagaacccaagtctgatcaggagaaaaacatcacacaaattccaattgagaagcattctttaaaatacctaaccagtacttctcaaaactatcaaggccataa

SEQ ID NO: 785284 - DNA, 120 bp, Artificial Sequence
  ENSG00000258289_12 (sequence is synthesized)
aaaacaaggaaaatctgagacatggtcacagccaagaggagcctgagaagacatgactgctagatgtaatgtggtatcctacatggaattatataccacgaaaagaaaaaaaggtcattt

SEQ ID NO: 785285 - DNA, 120 bp, Artificial Sequence
  ENSG00000258289_13 (sequence is synthesized)
ggtagaaactagggaaatctgaatacagtgtggacttcagttaatataaatgagaaaatggtttcattggctttaaagggattttagaatatcttactttgcatagtttcatgagcactg

SEQ ID NO: 785286 - DNA, 120 bp, Artificial Sequence
  ENSG00000258289_14 (sequence is synthesized)
gccaggaggttataaactggcatttaggcctctctgccatttagtagcagtatagtcattaagcaaagcattactctggactttattgtcctgtttctatcaaattggactaacaaaaat

SEQ ID NO: 785287 - DNA, 120 bp, Artificial Sequence
  ENSG00000258289_15 (sequence is synthesized)
atcacagtattgttaggagatttaaatgaattagtgaatgtaagatactttagaaagcatgtaaagtactagaaacaatgaggtggcttcaattagtgctcattctgagacctaaattta

SEQ ID NO: 785288 - DNA, 120 bp, Artificial Sequence
  ENSG00000258289_16 (sequence is synthesized)
aagggtcaggcattagaaacaaaagtgtttcttcatatctaggagatttggaaattctgaactaaggtcttataagaacaagaaatgagcaaagtgttcattgtagatactagggaaaag

SEQ ID NO: 785289 - DNA, 120 bp, Artificial Sequence
  ENSG00000258289_17 (sequence is synthesized)
ctttgttgaataacagtaatgatgataatatctgagctttattaagtacttactacatgctaagagctttttaagcacttatttaatcctcattaacaaattcataaggtaggtgctatt

SEQ ID NO: 785290 - DNA, 120 bp, Artificial Sequence
  ENSG00000258289_18 (sequence is synthesized)
gatagtttagccataaccagatatggcttgttatttgtaagttatcatgaaaaggtttatattcactattctttatttcagtgtagcacttttagagccaaaaaaactcaggcacaaaga

SEQ ID NO: 785291 - DNA, 120 bp, Artificial Sequence
  ENSG00000258289_19 (sequence is synthesized)
ctcgtctttactaaaaatacaaaaacaaaaattagccaggggtggtggtatgcacctgcagtcccagcaacatgggaggctgaacaggagaatcgcttgaacccgcgacagggaggttgt

SEQ ID NO: 785292 - DNA, 85 bp, Artificial Sequence
  ENSG00000258289_20 (sequence is synthesized)
caaaacaacaacaaaaaaagaagttaaataacttgtttaagatcacacagctagtgcagttaccccctctcagtaattatgtttg

SEQ ID NO: 785293 - DNA, 120 bp, Artificial Sequence
  ENSG00000258289_21 (sequence is synthesized)
cacagctagtgcagttaccccctctcagtaattatgtttggcaaatatgaaatacaaggatctggcaaggttaggaagaggttaagaatatcagtgacagtactctgaggcatctgggca

SEQ ID NO: 785294 - DNA, 120 bp, Artificial Sequence
  ENSG00000258289_22 (sequence is synthesized)
tgtcagatgaagatttattattcagaaaagttaagtcagctgttgcagggatcagttgttttattcctggaaaatgtttttcattttgctgcaaatctatatctgacctgctgaggaaat

SEQ ID NO: 785295 - DNA, 120 bp, Artificial Sequence
  ENSG00000258289_23 (sequence is synthesized)
cgtttggtgaaatgaatccagaaagcagagaaaatgcttcattactttaaatagcagcattaagcccattatagcctctgaattgtcccttccttgagtttgctaatgcttccaacttag

SEQ ID NO: 785296 - DNA, 120 bp, Artificial Sequence
  ENSG00000258289_24 (sequence is synthesized)
tcatttgaagcccaagagtctaattttatatgccctgccaatgtcctcatctattgcagaatgtataattatctatttgttttggactatatgttacaaaaatttaaaacataagatcct

SEQ ID NO: 785297 - DNA, 120 bp, Artificial Sequence
  ENSG00000258289_25 (sequence is synthesized)
ctctctatatttcattattggtgaacccacattgtgctgtgttttgtgatattttatcattttctagattcttatgtggatctaataacgaccacttgaacccagtttcacagaatcctt

SEQ ID NO: 785298 - DNA, 90 bp, Artificial Sequence
  ENSG00000258289_26 (sequence is synthesized)
tctaataacgaccacttgaacccagtttcacagaatccttatttttctgttcaaattaggaattagggacatggatgaaattggaaatct

SEQ ID NO: 785299 - DNA, 120 bp, Artificial Sequence
  ENSG00000258289_27 (sequence is synthesized)
agttaggtctttaagaggaaaatgtcattaacacctcatttatctgggatatcaaatagtctatgtaaatgacttttgcagataactaaagcttacgattcaggaactgaattttttttg

SEQ ID NO: 785300 - DNA, 120 bp, Artificial Sequence
  ENSG00000258289_28 (sequence is synthesized)
tttatcaaattatttttcacggacatatttttaaaagctttatgctgccttaacaagatatactttttattattgttattattgtgaccttagggtcatccatgtgagttttcacttttc

SEQ ID NO: 785301 - DNA, 120 bp, Artificial Sequence
  ENSG00000258289_29 (sequence is synthesized)
gggacccttaggaggagagtgtgtcattttctaggggaaaaaagaagttttcagtgcctcagctcttgccaggctgaagagacaaagttgtgtttatcttgaaaagtctttcagtgcgtg

SEQ ID NO: 785302 - DNA, 120 bp, Artificial Sequence
  ENSG00000258289_30 (sequence is synthesized)
gtgccacttgtcctggagaacacaccagcctctgcccctgcactgtaccatctcctatattatatcccccacctccacctcatcccccagcccccaagtcatgaggctcagtcgttgctg

SEQ ID NO: 785303 - DNA, 120 bp, Artificial Sequence
  ENSG00000258289_31 (sequence is synthesized)
ggagaatggtgaagaggagtcacagaacaggtggataaacttagtggatgaactgcacctaccttcctctcagacagagatttggtccccaagacttttcagagcgggtttgtgctggtc

SEQ ID NO: 785304 - DNA, 120 bp, Artificial Sequence
  ENSG00000258289_32 (sequence is synthesized)
accttcccacagaaggaagtgtgtggaggaagttgaagctgctgtggttccagacgcaggcaggtcacccctgatgctttcaacaagaggcgtgcagtgcatcgcaggacatctgctaag

SEQ ID NO: 785305 - DNA, 120 bp, Artificial Sequence
  ENSG00000258289_33 (sequence is synthesized)
aaaaatgccttgatttcttcatcagtaaaactagcaatggggcttgacctagctttgggattttagagtgaaatttcaataacaaagcaaatgtttactagggtgttttcacaggggcac

SEQ ID NO: 785306 - DNA, 120 bp, Artificial Sequence
  ENSG00000258289_34 (sequence is synthesized)
atccattgggaactgtctccttggaacaaagaataagcaagtccggggagcagctggtcttgagaatctgatttgttgagatgagatgaagtaattatcaccagggagcgccaagctgcc

SEQ ID NO: 785307 - DNA, 120 bp, Artificial Sequence
  ENSG00000258289_35 (sequence is synthesized)
ttgcagcttttccatggctgttcaagtatacagggaccatgtgtctcagctggctgctccctaaaaacaagtttccattacctaagtggacagaaggagtgacaggaagtgtagagggaa

SEQ ID NO: 785308 - DNA, 120 bp, Artificial Sequence
  ENSG00000258289_36 (sequence is synthesized)
gtgtgtcccctgctgaagctgggtggagttcctagaagcaaccaataagaaagagtccccaccaagccactgagtcacaaggacttggcactgatagtgggcagaactgtaacttgccgg

SEQ ID NO: 785309 - DNA, 120 bp, Artificial Sequence
  ENSG00000258289_37 (sequence is synthesized)
atttatgtgcatacctagagcttccccctagtactctctgggcctccagagacacctcttattctctgctcttttgcaagccttcttcaagaaggccatgggagttcccaagatgaggag

SEQ ID NO: 785310 - DNA, 120 bp, Artificial Sequence
  ENSG00000258289_38 (sequence is synthesized)
tgtgggggttccctcttccttaggtacatgccatcccttttctcctggtgtgaccttggacccttcagactcccagggttctcacctttcctaatggaatatacttggtgaggctctcct

SEQ ID NO: 785311 - DNA, 120 bp, Artificial Sequence
  ENSG00000258289_39 (sequence is synthesized)
atgcctggtgggttgaagcagtggaagtatttgagaacagtaaaagaccttgaagaggatgtatttttattttatttttaattcataaagccatctttccactgccacaactaagctccc

SEQ ID NO: 785312 - DNA, 120 bp, Artificial Sequence
  ENSG00000258315_0 (sequence is synthesized)
agtctccctgctctccgtggtcccggctcgcgtgtagcggcggcggcggcgtctccgtgaggaggcgcgcggggccatgacgtcagcgtccacaaaggtcggagagatcttctcggcggc

SEQ ID NO: 785313 - DNA, 120 bp, Artificial Sequence
  ENSG00000258315_1 (sequence is synthesized)
cggcgccgccttcacgaagctcggggagctgacgatgcagctgcatcccgtggccgactcttctcctgcgggtgcgaagtggacggagacggaaatagagatgctgagggctgctgtgaa

SEQ ID NO: 785314 - DNA, 120 bp, Artificial Sequence
  ENSG00000258315_2 (sequence is synthesized)
gcgatttggggacgatcttaatcacatcagctgtgtcatcaaggaacggacagtggcccagataaaggccactgtgaaacgcaaggtatatgaagattctggcatcccccttccagctga

SEQ ID NO: 785315 - DNA, 120 bp, Artificial Sequence
  ENSG00000258315_3 (sequence is synthesized)
aaagggcccaagaaggtggcatctggtgtcttgtcacctcctccagctgcccctcctcccagcagctccagtgtccctgaggccgggggtccccccataaagaaacagaaggctgatgtg

SEQ ID NO: 785316 - DNA, 120 bp, Artificial Sequence
  ENSG00000258315_4 (sequence is synthesized)
acactcagtgctctgaacgactccgatgccaacagtgacgtggtggatattgaagggctaggagaaactcctccagctaagaaactcaacttcgaccaggcctgaccctggattctggcc

SEQ ID NO: 785317 - DNA, 120 bp, Artificial Sequence
  ENSG00000258315_5 (sequence is synthesized)
ttctcatgacctctgctgatcctcctctcctctcctgctgagccttccacctctgacctctcactgttcatgccggacctgtggatctcctgggactccgagcaaggcctgcacgagaga

SEQ ID NO: 785318 - DNA, 120 bp, Artificial Sequence
  ENSG00000258315_6 (sequence is synthesized)
gggctgaaaggctgctggggctgccacctcgctattcccgcataagcatctgcccccaacccctttgaccttcatctgatggacatttttatacagaaaacaataaagatttccctctca

SEQ ID NO: 785319 - DNA, 120 bp, Artificial Sequence
  ENSG00000258315_7 (sequence is synthesized)
gtgtcccgtatctcaataaagagaatctgctctcttcagccctgtgtctgtgcttgagtgggggcgagcacggggctgagactagaggtcggcctctgcctggaaagtcccgatgtctga

SEQ ID NO: 785320 - DNA, 120 bp, Artificial Sequence
  ENSG00000258315_8 (sequence is synthesized)
gcggaagtggagcgaagtgtggcgcggaagtgaggcgaaggctttccccatcgactgggcgcgccgagcggtctaagcgactgcgtctgatggggcggggagccgccgggttgagcctat

SEQ ID NO: 785321 - DNA, 120 bp, Artificial Sequence
  ENSG00000258315_9 (sequence is synthesized)
acgtggacgctgagagcgggcgcttggactcggtcacagacacggaccctctctagcacagggacagacattagtttccctttgtgcgtggcacagcacagagtcggtgttaataaatga

SEQ ID NO: 785322 - DNA, 120 bp, Artificial Sequence
  ENSG00000258315_10 (sequence is synthesized)
tcgttgggtgagggaatgaatgacagataaaaatacagacaggcccatagcccagactcctgtttcacagttctccctgctgcgaacgggtcgaccacaaaccaccgccactcccaacca

SEQ ID NO: 785323 - DNA, 120 bp, Artificial Sequence
  ENSG00000258315_11 (sequence is synthesized)
ccccagttcatggaattcccccagacggctgcaggctgtgttggtgggtctgttttgaaaagcccttcctggcgagttggtttcagtgtgctgtgtacagcagccgtttaacgttgatgg

SEQ ID NO: 785324 - DNA, 120 bp, Artificial Sequence
  ENSG00000258315_12 (sequence is synthesized)
tggaaaggggtgtctaaggtggaggtggttgtgatttcttgtgattggggtcctcccggttcccgcagggcctcaagagctttccgcctccccttacggaggacctctttatgcatccgt

SEQ ID NO: 785325 - DNA, 120 bp, Artificial Sequence
  ENSG00000258315_13 (sequence is synthesized)
ggaaggggtcccagaaatcggaaggaggcggctggttggctgtgggatgcatagcctgtgggcgggctccacaccccccctcccatttttgctatcccccctctccccttctgacagtgc

SEQ ID NO: 785326 - DNA, 120 bp, Artificial Sequence
  ENSG00000258315_14 (sequence is synthesized)
gaagtggacggagacggaaatagagatgctgagggctgctgtgaagcgatttggggacgatcttaatcacatcagctgtgtcatcaaggaacggacagtgtgagggagggtggctgccag

SEQ ID NO: 785327 - DNA, 120 bp, Artificial Sequence
  ENSG00000258315_15 (sequence is synthesized)
aaaagggcgggtgggcagccttcttcctccttacccaaggttccatcgtcctcagaactcctttccagctcagctgcttccctactttgtcactagttttttagaatccccttgaggact

SEQ ID NO: 785328 - DNA, 120 bp, Artificial Sequence
  ENSG00000258315_16 (sequence is synthesized)
atgtgaatttaggttgcctgagatgctgttattgtatttgatgatggaagtcccctggttatttatataaatgtttgaggaccccactgcagtgtttccagggatatggtgaccctgaac

SEQ ID NO: 785329 - DNA, 120 bp, Artificial Sequence
  ENSG00000258315_17 (sequence is synthesized)
tagttgatcagtaaatctcaatccacctgtaaatcaccaagctctacctgatgtctctcccagaagagaattaggagatgggcctttcccactactcagttcagggactccactctccac

SEQ ID NO: 785330 - DNA, 120 bp, Artificial Sequence
  ENSG00000258315_18 (sequence is synthesized)
actccatccatcctgagtgagtgtaaaacttcgagaaagtgagaaccctaccaatgggttggggccccgacctggattcttatgaagggactcccagaaccccttcccctcccgtcccct

SEQ ID NO: 785331 - DNA, 120 bp, Artificial Sequence
  ENSG00000258366_0 (sequence is synthesized)
aacggaccggaagtggggggcggaagtgcagtgggctcagcgccgactgcgcgcctctgcccgcgaaaactctgagctggctgacagctggggacgggtggcggccctcgactggagtcg

SEQ ID NO: 785332 - DNA, 120 bp, Artificial Sequence
  ENSG00000258366_1 (sequence is synthesized)
gttgagttcctgagggaccccggttctggaaggttcgccgcggagacaagtgagcagtctgtgccatagggattctcgaagagaacagcgttgtgtcccagtgcacatgctcgcatcgct

SEQ ID NO: 785333 - DNA, 120 bp, Artificial Sequence
  ENSG00000258366_2 (sequence is synthesized)
taccaggagtgcccgagaccctaagatgttcggagtggttttttcgcacagacccgaatagcctgcccctcagccacgctctgtgcccttctgagaacaggctgatatgcccaagatagt

SEQ ID NO: 785334 - DNA, 120 bp, Artificial Sequence
  ENSG00000258366_3 (sequence is synthesized)
cctgaatggtgtgaccgtagacttccctttccagccctacaaatgccaacaggagtacatgaccaaggtcctggaatgtctgcagcagaaggtgaatggcatcctggagagccctacggg

SEQ ID NO: 785335 - DNA, 120 bp, Artificial Sequence
  ENSG00000258366_4 (sequence is synthesized)
tacagggaagacgctgtgcctgctgtgcaccacgctggcctggcgagaacacctccgagacggcatctctgcccgcaagattgccgagagggcgcaaggagagcttttcccggatcgggc

SEQ ID NO: 785336 - DNA, 120 bp, Artificial Sequence
  ENSG00000258366_5 (sequence is synthesized)
cttgtcatcctggggcaacgctgctgctgctgctggagaccccatagcttgctacacggacatcccaaagattatttacgcctccaggacccactcgcaactcacacaggtcatcaacga

SEQ ID NO: 785337 - DNA, 120 bp, Artificial Sequence
  ENSG00000258366_6 (sequence is synthesized)
gcttcggaacacctcctaccgctcacgctgcagggccacgctgtgggtgttggagacagctcctcctcgacccacggtgctctctcccaccaggcctaaggtgtgtgtgctgggctcccg

SEQ ID NO: 785338 - DNA, 120 bp, Artificial Sequence
  ENSG00000258366_7 (sequence is synthesized)
ggagcagctgtgcatccatcctgaggtgaagaaacaagagagtaaccatctacagatccacttgtgccgtaagaaggtggcaagtcgctcctgtcatttctacaacaacgtagaagaaaa

SEQ ID NO: 785339 - DNA, 120 bp, Artificial Sequence
  ENSG00000258366_8 (sequence is synthesized)
aagcctggagcaggagctggccagccccatcctggacattgaggacttggtcaagagcggaagcaagcacagggtgtgcccttactacctgtcccggaacctgaagcagcaagccgacat

SEQ ID NO: 785340 - DNA, 120 bp, Artificial Sequence
  ENSG00000258366_9 (sequence is synthesized)
catattcatgccgtacaattacttgttggatgccaagagccgcagagcacacaacattgacctgaaggggacagtcgtgatctttgacgaagctcacaacgtggagaagatgtgtgaaga

SEQ ID NO: 785341 - DNA, 120 bp, Artificial Sequence
  ENSG00000258366_10 (sequence is synthesized)
atcggcatcctttgacctgactccccatgacctggcttcaggactggacgtcatagaccaggtgctggaggagcagaccaaggcagcgcagcagggtgagccccacccggagttcagcgc

SEQ ID NO: 785342 - DNA, 120 bp, Artificial Sequence
  ENSG00000258366_11 (sequence is synthesized)
ggactcccccagcccagggctgaacatggagctggaagacattgcaaagctgaagatgatcctgctgcgcctggagggggccatcgatgctgttgagctgcctggagacgacagcggtgt

SEQ ID NO: 785343 - DNA, 120 bp, Artificial Sequence
  ENSG00000258366_12 (sequence is synthesized)
caccaagccagggagctacatctttgagctgtttgctgaagcccagatcacgtttcagaccaagggctgcatcctggactcgctggaccagatcatccagcacctggcaggacgtgctgg

SEQ ID NO: 785344 - DNA, 120 bp, Artificial Sequence
  ENSG00000258366_13 (sequence is synthesized)
agtgttcaccaacacggccggactgcagaagctggcggacattatccagattgtgttcagtgtggacccctccgagggcagccctggttccccagcagggctgggggccttacagtccta

SEQ ID NO: 785345 - DNA, 120 bp, Artificial Sequence
  ENSG00000258366_14 (sequence is synthesized)
taaggtgcacatccatcctgatgctggtcaccggaggacggctcagcggtctgatgcctggagcaccactgcagccagaaagcgagggaaggtgctgagctactggtgcttcagtcccgg

SEQ ID NO: 785346 - DNA, 120 bp, Artificial Sequence
  ENSG00000258366_15 (sequence is synthesized)
ccacagcatgcacgagctggtccgccagggcgtccgctccctcatccttaccagcggcacgctggccccggtgtcctcctttgctctggagatgcagatccctttcccagtctgcctgga

SEQ ID NO: 785347 - DNA, 120 bp, Artificial Sequence
  ENSG00000258366_16 (sequence is synthesized)
gaacccacacatcatcgacaagcaccagatctgggtgggggtcgtccccagaggccccgatggagcccagttgagctccgcgtttgacagacggttttccgaggagtgcttatcctccct

SEQ ID NO: 785348 - DNA, 120 bp, Artificial Sequence
  ENSG00000258366_17 (sequence is synthesized)
atggagaagagcctggagttctggcgggcccgcgacttggccaggaagatggaggcgctgaagccgctgtttgtggagcccaggagcaaaggcagcttctccgagaccatcagtgcttac

SEQ ID NO: 785349 - DNA, 120 bp, Artificial Sequence
  ENSG00000258366_18 (sequence is synthesized)
tatgcaagggttgccgcccctgggtccaccggcgccaccttcctggcggtctgccggggcaaggccagcgaggggctggacttctcagacacgaatggccgtggtgtgattgtcacgggc

SEQ ID NO: 785350 - DNA, 120 bp, Artificial Sequence
  ENSG00000258366_19 (sequence is synthesized)
ctcccgtaccccccacgcatggacccccgggttgtcctcaagatgcagttcctggatgagatgaagggccagggtggggctgggggccagttcctctctgggcaggagtggtaccggcag

SEQ ID NO: 785351 - DNA, 120 bp, Artificial Sequence
  ENSG00000258366_20 (sequence is synthesized)
caggcgtccagggctgtgaaccaggccatcgggcgagtgatccggcaccgccaggactacggagctgtcttcctctgtgaccacaggttcgcctttgccgacgcaagagcccaactgccc

SEQ ID NO: 785352 - DNA, 120 bp, Artificial Sequence
  ENSG00000258366_21 (sequence is synthesized)
tcctgggtgcgtccccacgtcagggtgtatgacaactttggccatgtcatccgagacgtggcccagttcttccgtgttgccgagcgaactatgccagcgccggccccccgggctacagca

SEQ ID NO: 785353 - DNA, 120 bp, Artificial Sequence
  ENSG00000258366_22 (sequence is synthesized)
cccagtgtgcgtggagaagatgctgtcagcgaggccaagtcgcctggccccttcttctccaccaggaaagctaagagtctggacctgcatgtccccagcctgaagcagaggtcctcaggg

SEQ ID NO: 785354 - DNA, 120 bp, Artificial Sequence
  ENSG00000258366_23 (sequence is synthesized)
tcaccagctgccggggaccccgagagtagcctgtgtgtggagtatgagcaggagccagttcctgcccggcagaggcccagggggctgctggccgccctggagcacagcgaacagcgggcg

SEQ ID NO: 785355 - DNA, 120 bp, Artificial Sequence
  ENSG00000258366_24 (sequence is synthesized)
gggagccctggcgaggagcaggcccacagctgctccaccctgtccctcctgtctgagaagaggccggcagaagaaccgcgaggagggaggaagaagatccggctggtcagccacccggag

SEQ ID NO: 785356 - DNA, 120 bp, Artificial Sequence
  ENSG00000258366_25 (sequence is synthesized)
gagcccgtggctggtgcacagacggacagggccaagctcttcatggtggccgtgaagcaggagttgagccaagccaactttgccaccttcacccaggccctgcaggactacaagggttcc

SEQ ID NO: 785357 - DNA, 120 bp, Artificial Sequence
  ENSG00000258366_26 (sequence is synthesized)
gatgacttcgccgccctggccgcctgtctcggccccctctttgctgaggaccccaagaagcacaacctgctccaaggcttctaccagtttgtgcggccccaccataagcagcagtttgag

SEQ ID NO: 785358 - DNA, 120 bp, Artificial Sequence
  ENSG00000258366_27 (sequence is synthesized)
gaggtctgtatccagctgacaggacgaggctgtggctatcggcctgagcacagcattccccgaaggcagcgggcacagccggtcctggaccccactggaagaacggcgccggatcccaag

SEQ ID NO: 785359 - DNA, 120 bp, Artificial Sequence
  ENSG00000258366_28 (sequence is synthesized)
ctgaccgtgtccacggctgcagcccagcagctggacccccaagagcacctgaaccagggcaggccccacctgtcgcccaggccacccccaacaggagaccctggcagccaaccacagtgg

SEQ ID NO: 785360 - DNA, 120 bp, Artificial Sequence
  ENSG00000258366_29 (sequence is synthesized)
gggtctggagtgcccagagcagggaagcagggccagcacgccgtgagcgcctacctggctgatgcccgcagggccctggggtccgcgggctgtagccaactcttggcagcgctgacagcc

SEQ ID NO: 785361 - DNA, 120 bp, Artificial Sequence
  ENSG00000258366_30 (sequence is synthesized)
tataagcaagacgacgacctcgacaaggtgctggctgtgttggccgccctgaccactgcaaagccagaggacttccccctgctgcacaggttcagcatgtttgtgcgtccacaccacaag

SEQ ID NO: 785362 - DNA, 120 bp, Artificial Sequence
  ENSG00000258366_31 (sequence is synthesized)
cagcgcttctcacagacgtgcacagacctgaccggccggccctacccgggcatggagccaccgggaccccaggaggagaggcttgccgtgcctcctgtgcttacccacagggctccccaa

SEQ ID NO: 785363 - DNA, 120 bp, Artificial Sequence
  ENSG00000258366_32 (sequence is synthesized)
ccaggcccctcacggtccgagaagaccgggaagacccagagcaagatctcgtccttccttagacagaggccagcagggactgtgggggcgggcggtgaggatgcaggtcccagccagtcc

SEQ ID NO: 785364 - DNA, 120 bp, Artificial Sequence
  ENSG00000258366_33 (sequence is synthesized)
tcaggacctccccacgggcctgcagcatctgagtggggcctctaggatgtgcccagcctgccacaccgcctccaggaagcagagcgtcatgcaggtcttctggccagagccccagtgagt

SEQ ID NO: 785365 - DNA, 120 bp, Artificial Sequence
  ENSG00000258366_34 (sequence is synthesized)
gcccacggaggcccccagcacacccaacgtggcttgatcacctgcctgtccagctctggtgggccaagaacccacccaacagaataggccagcccatgccagccggcttggcccgctgca

SEQ ID NO: 785366 - DNA, 120 bp, Artificial Sequence
  ENSG00000258366_35 (sequence is synthesized)
gccacgggagctccgggcgggcccctctcagcaggctgtgtgtgccagggctgtggggcagaggacgtggtgcccttccagtgccctgcctgtgacttccagcgctgccaagcctgctgg

SEQ ID NO: 785367 - DNA, 120 bp, Artificial Sequence
  ENSG00000258366_36 (sequence is synthesized)
tggttggtccctgcggtgggaccggatctgggcctgcctctgagaagccctgagctaccttggggtctggggtgggtttctgggaaagtgcttccccagaacttccctggctcctggcct

SEQ ID NO: 785368 - DNA, 120 bp, Artificial Sequence
  ENSG00000258366_37 (sequence is synthesized)
gtgagtggtgccacaggggcaccccagctgagcccctcaccgggaaggaggagacccccgtgggcacgtgtccacttttaatcaggggacagggctctctaataaagctgctggcagtgc

SEQ ID NO: 785369 - DNA, 120 bp, Artificial Sequence
  ENSG00000258366_38 (sequence is synthesized)
agtcagccctgctgccagccagtgccgggtgctggggactcagggaggcccgccgggaccactgcgggacagtgagccgagcagaagctggaacgcaggagaggaaggagagggggcggt

SEQ ID NO: 785370 - DNA, 120 bp, Artificial Sequence
  ENSG00000258366_39 (sequence is synthesized)
cagggctctcaggagccgggtcctgggcaaggcgcagccgttttcaaattttcaggaaagcggtcggctcacactcgagcagtaaaaagatgcctctggggaggaggcccgtgcagctct

SEQ ID NO: 785371 - DNA, 120 bp, Artificial Sequence
  ENSG00000258366_40 (sequence is synthesized)
ccgggcaatggtggtggctcggcctagagaggcggtagtggaacgcagaccctggtgggggaatgacatcaagggaggagacgggcgggaccccagatttctgcctgtgggcgatggaag

SEQ ID NO: 785372 - DNA, 120 bp, Artificial Sequence
  ENSG00000258366_41 (sequence is synthesized)
tgaggttcactggccagcggagccggacacagaacgcgcaaaacgccgtgtaggcctggaggagccgaagagcaggcggaccccctccgcgggggaacagtttccgccgggagcacaaag

SEQ ID NO: 785373 - DNA, 120 bp, Artificial Sequence
  ENSG00000258366_42 (sequence is synthesized)
tcctttggctgctgctctaagtagccgctggtggatgactcagcttctgccagccctcgggtgcctggaggatgagggactgcacacagtgctcacccgcgttggctcctgagcccctgc

SEQ ID NO: 785374 - DNA, 120 bp, Artificial Sequence
  ENSG00000258366_43 (sequence is synthesized)
tgccacaggctaggcacatgcccagccgtggatctcctgcccccatgggcctggccaccttctccatatccaggccaatccagagcattctcctcactgtccctctgaagattggagtta

SEQ ID NO: 785375 - DNA, 120 bp, Artificial Sequence
  ENSG00000258366_44 (sequence is synthesized)
agcctctccggctactcggggtcagcgtggggcccctgcagcagatgagggtcttcacttcggtgaactgaacccttgaagcggctgtgggcagggcagcagggctatggccacccccca

SEQ ID NO: 785376 - DNA, 120 bp, Artificial Sequence
  ENSG00000258366_45 (sequence is synthesized)
gtggcgctggcgccgcggcgttggctgagcccttgaccggggctggagggaagggccgacattcagtgtgtccgcgtctgttctgtctgtgccatagggattctcgaagagaacagcgtt

SEQ ID NO: 785377 - DNA, 120 bp, Artificial Sequence
  ENSG00000258366_46 (sequence is synthesized)
ccatagattcttggctgtctgcagggccgagttagccgaatgccacctgcctttgatacgtgagaacgttgtctgagaaccgtgacttctgtgcttgcttgtgtctggtcagcttgctac

SEQ ID NO: 785378 - DNA, 120 bp, Artificial Sequence
  ENSG00000258366_47 (sequence is synthesized)
tcctgcgctcgtggcgctggcgccgcggcgttggctgagcccttgaccggggctggagggaagggccgacattcagtgtgtccgcgtctgttctgttagtcccagttcccgggcgggatt

SEQ ID NO: 785379 - DNA, 120 bp, Artificial Sequence
  ENSG00000258366_48 (sequence is synthesized)
cctctctgaggagcagctgatattcacgggtcaggaggaagcatttccattagaggggcagccggtggccagcctcacttggaagaaggtgaatggcatcctggagagccctacgggtac

SEQ ID NO: 785380 - DNA, 120 bp, Artificial Sequence
  ENSG00000258366_49 (sequence is synthesized)
atccctgggagtatctggggttgggtcatcgctggtgtgtgtgagtgtgtgtgtgtgtgtatgtgcacgtgtgcatatgtgtgcgcttctggcctctgcagctgagtcctggccctcggg

SEQ ID NO: 785381 - DNA, 120 bp, Artificial Sequence
  ENSG00000258366_50 (sequence is synthesized)
ctctgagctggctgacagctggggacgggtggcggccctcgactggagtcggttgagttcctgagggaccccggttctggaaggttcgccgcggagacaagtctgtgccatagggattct

SEQ ID NO: 785382 - DNA, 120 bp, Artificial Sequence
  ENSG00000258405_0 (sequence is synthesized)
agtttcctgaagacccggaagccgatcgcgtggggagccggtcttggagcagcgggattagcttctaaagtctctttcatctctcctaaggaagaagcctagaagaggaggaagaggaaa

SEQ ID NO: 785383 - DNA, 120 bp, Artificial Sequence
  ENSG00000258405_1 (sequence is synthesized)
gaaaaggagtcaggaatgcctcttagatatctcttccaaatgcatgatgaaaaaggtgggaagattacttgagccagggagttgaaggctgcagtgagccctgtttttgccaccacactc

SEQ ID NO: 785384 - DNA, 120 bp, Artificial Sequence
  ENSG00000258405_2 (sequence is synthesized)
cagcttgggattgatttctaaagactcatgttacatgaggaagcagctcagaagaggaaaggaaaggagccaggcatggctcttcctcagggacgcttgactttcagggatgtggctata

SEQ ID NO: 785385 - DNA, 120 bp, Artificial Sequence
  ENSG00000258405_3 (sequence is synthesized)
gaattctcattggcagagtggaaattcctgaaccctgcgcagagggctttgtacagggaagtgatgttggagaactacaggaacctggaggctgtggatatctcttccaaacgcatgatg

SEQ ID NO: 785386 - DNA, 120 bp, Artificial Sequence
  ENSG00000258405_4 (sequence is synthesized)
aaggaggtcttgtcaacagggcaaggcaatacagaagtgatccacacagggatgttgcaaagacatgaaagttatcacactggagatttttgcttccaggaaattgaaaaagatattcat

SEQ ID NO: 785387 - DNA, 120 bp, Artificial Sequence
  ENSG00000258405_5 (sequence is synthesized)
gactttgagtttcagtcacaaaaagatgaaagaaatggccatgaagcatccatgccaaaaatcaaagagttgatgggtagcacagaccgacatgatcaaaggcatgctggaaacaagcct

SEQ ID NO: 785388 - DNA, 120 bp, Artificial Sequence
  ENSG00000258405_6 (sequence is synthesized)
attaaagatcagcttggattaagctttcatttgcatcttcctgaactccacatatttcagcccgaagagaaaattgctaatcaagtggagaagtctgtcaacgatgcttcctcaatttca

SEQ ID NO: 785389 - DNA, 120 bp, Artificial Sequence
  ENSG00000258405_7 (sequence is synthesized)
acatcccaaagaatttcttgtaggcctgaaacacatactcctaataactatgggaataattttttccattcatcattactcacacaaaaacaggaagtacacatgagagaaaaatctttc

SEQ ID NO: 785390 - DNA, 120 bp, Artificial Sequence
  ENSG00000258405_8 (sequence is synthesized)
caatgtaatgagactggcgaagcctttaattgtagctcatttgtaaggaaacatcagataatccatttaggagaaaaacaatataaatttgatatatgtggcaaagtctttaatgagaag

SEQ ID NO: 785391 - DNA, 90 bp, Artificial Sequence
  ENSG00000258405_9 (sequence is synthesized)
atataaatttgatatatgtggcaaagtctttaatgagaagcgataccttgcacgccatcgtagatgtcacactagaaagtccttcagtta

SEQ ID NO: 785392 - DNA, 79 bp, Artificial Sequence
  ENSG00000258405_10 (sequence is synthesized)
gagaaaccttacaagtgtaatgaatgtggaaagtccttcagttacaagtcatcccttacatgccatcataggaaagtcc

SEQ ID NO: 785393 - DNA, 90 bp, Artificial Sequence
  ENSG00000258405_11 (sequence is synthesized)
tggaaagtccttcagttacaagtcatcccttagatgccatcgtagacttcatactggaataaaaccttacaagtgtaatgagtgtggcaa

SEQ ID NO: 785394 - DNA, 76 bp, Artificial Sequence
  ENSG00000258405_12 (sequence is synthesized)
ttacaagtgtaatgaatgtggcaaggcttttaatcaacaatcacacctttcacgtctgtggtaaggcttttattca

SEQ ID NO: 785395 - DNA, 120 bp, Artificial Sequence
  ENSG00000258405_13 (sequence is synthesized)
tgtggtaaggcttttattcatcagtcaagccttgcacgtcatcatagacttcatactggagagaaatcttacaaatgtgaagaatgtgacagagttttcagtcagaaatcaaaccttgag

SEQ ID NO: 785396 - DNA, 90 bp, Artificial Sequence
  ENSG00000258405_14 (sequence is synthesized)
gagaaaccttacaagtgtaatgagtgtcacaagaccttcagtcacaggtcatctcttccatgccatcgtagacttcatagtgggaagact

SEQ ID NO: 785397 - DNA, 90 bp, Artificial Sequence
  ENSG00000258405_15 (sequence is synthesized)
tccatgccatcgtagacttcatagtgggaagacttttaatgtacagtcacacctttcacgtcatcatagacttcatactggagagaaacc

SEQ ID NO: 785398 - DNA, 88 bp, Artificial Sequence
  ENSG00000258405_16 (sequence is synthesized)
tagaattcatagctaaggctcacaatcacttgattgattcatcaatcaagccttgcatgtcatcatagacttcatactggagagaaac

SEQ ID NO: 785399 - DNA, 77 bp, Artificial Sequence
  ENSG00000258405_17 (sequence is synthesized)
atgtcatgtgacaaagttttcagtcacagatcacgccttaaaagacataggagaattcatactggagagaaacctta

SEQ ID NO: 785400 - DNA, 120 bp, Artificial Sequence
  ENSG00000258405_18 (sequence is synthesized)
gtgtggcaaagcctttagtgaccagtcaacacttaccatcaggccattcatggtgtagggaaacttgactaatgtaatgattgtcacaaagtcttcagtaacgctacaacgattgcaaat

SEQ ID NO: 785401 - DNA, 120 bp, Artificial Sequence
  ENSG00000258405_19 (sequence is synthesized)
cattggagaatccataatgaagagagatcttccgagtgtaataaatgtggcaaatttttcagacatcgttcataccttgcagttcatcagtgaactcatactggagagaaaccttacaaa

SEQ ID NO: 785402 - DNA, 120 bp, Artificial Sequence
  ENSG00000258405_20 (sequence is synthesized)
tgtcatgactgtggcaaggtcttcagtcaagcttcatcctatgcaaaacataggagaattcatgcaggagagaaatgtcacaagtgtgatgagtgttgcaaagcctttacttcatgttca

SEQ ID NO: 785403 - DNA, 120 bp, Artificial Sequence
  ENSG00000258405_21 (sequence is synthesized)
cacctcattagacatcagagaatccctactggagagaaatcttacaaatgtcatcagtgtggcaaggtcttcagtccgaggtcactccttgcagaacatcagaaaattcatttttgagat

SEQ ID NO: 785404 - DNA, 120 bp, Artificial Sequence
  ENSG00000258405_22 (sequence is synthesized)
aactgttcccaatgcagtgagtatagcaaaccatcaagcattaattgacattggagtcaattcagcattgacttgagtttgtgttgacttaacattgagttcaagccttaattgacatgc

SEQ ID NO: 785405 - DNA, 83 bp, Artificial Sequence
  ENSG00000258405_23 (sequence is synthesized)
cataggtcacttgaggtcaagagtttgaaacaagcatggccaagagatgtgagccagttttcccagcctgtttattattattt

SEQ ID NO: 785406 - DNA, 120 bp, Artificial Sequence
  ENSG00000258405_24 (sequence is synthesized)
gtcaagagtttgaaacaagcatggccaagagatgtgagccagttttcccagcctgtttattattattttttgagatggagtgttgctcttgctgcccaggctagagtgcaatggtgcgat

SEQ ID NO: 785407 - DNA, 83 bp, Artificial Sequence
  ENSG00000258405_25 (sequence is synthesized)
ctccgcctcctgggttcaagcgattcctctgcctcagcctccctagttgctgggattacaggtatatgccaagggtttctcca

SEQ ID NO: 785408 - DNA, 72 bp, Artificial Sequence
  ENSG00000258405_26 (sequence is synthesized)
ccgcccacctcagcctcccaaagtgatgagattacaggcatatgccaccgcgcctggcaactttttaaagag

SEQ ID NO: 785409 - DNA, 120 bp, Artificial Sequence
  ENSG00000258405_27 (sequence is synthesized)
tttttttgagatagtactttttaaagagatagtacttttttgagatagtacttttttaaagggatataccatagtagttttaaaagggatatcaggctgggtgtggcagctcacgccggt

SEQ ID NO: 785410 - DNA, 73 bp, Artificial Sequence
  ENSG00000258405_28 (sequence is synthesized)
acctgtagtctcagctactcagggggctgaggctggacaatggtgtgaacccaggaggcggtgcttgcagggt

SEQ ID NO: 785411 - DNA, 120 bp, Artificial Sequence
  ENSG00000258405_29 (sequence is synthesized)
aaaaaaaaaaaagatatcaaacccggggtgtctcatcccacagcactttggaagactgaagtgagtggatcatctaagatcagagttcaagagcaccctggctaacatggtgaaacccca

SEQ ID NO: 785412 - DNA, 120 bp, Artificial Sequence
  ENSG00000258405_30 (sequence is synthesized)
ggggtgggggtgtgcacctttagttccagctacttgggacactgaggcatgagaatcacttaaacctgggaggtagaggttacagcgaatcaaaaccgtgccactgtactgcagcgaggt

SEQ ID NO: 785413 - DNA, 120 bp, Artificial Sequence
  ENSG00000258405_31 (sequence is synthesized)
tggcagagtgagtctccatctcaaacaaacaaatgaaaaaaacagacatcaaaaatgcttttgttctcgttgtgtcatagacttcccttttttttccttctggttcctcttcagttctct

SEQ ID NO: 785414 - DNA, 120 bp, Artificial Sequence
  ENSG00000258405_32 (sequence is synthesized)
atttattttttcttttttgcagattgagtttgagatatatcttagttttaatagttttatttcttaacacataatgacttctgaaagatgcctttgcagcatcctgtaatcagctcacat

SEQ ID NO: 785415 - DNA, 120 bp, Artificial Sequence
  ENSG00000258405_33 (sequence is synthesized)
cattcgtttctgtacttgtatattttccagttgttttccggttgaccccaaaattcgtgagatttttttcctacaacaatttcaaaagagttgctgtttgaaattagttgcatccagttc

SEQ ID NO: 785416 - DNA, 120 bp, Artificial Sequence
  ENSG00000258405_34 (sequence is synthesized)
agatcgaggtctgcatgctttctagtctttgttatttattggaaggctgtggtacctactacttaagtttgattgttgcagtgtgtacttggtaaagatgtcagtgaccttttaaataaa

SEQ ID NO: 785417 - DNA, 120 bp, Artificial Sequence
  ENSG00000258405_35 (sequence is synthesized)
catcaaaatgtagtttaagcagttagtctgtttttcagttttctttccttatgtcattttttaaaatcttgagctgggagctatttattgtgtgtttccctcaaggccctgtggtccatt

SEQ ID NO: 785418 - DNA, 120 bp, Artificial Sequence
  ENSG00000258405_36 (sequence is synthesized)
ctggaaaaatgttgaaacatgggctggagtggcatagagcgctgctccaaaagcacccatgtattcttttcttttttggaaatggagtctcgctctgtcagcttggatggagtgcagtgg

SEQ ID NO: 785419 - DNA, 86 bp, Artificial Sequence
  ENSG00000258405_37 (sequence is synthesized)
ggatcaagtgatgctcctgcctcagtctcctgaggagctggaattacaggcacccaccagcacacccagctagtttttgtattttt

SEQ ID NO: 785420 - DNA, 120 bp, Artificial Sequence
  ENSG00000258405_38 (sequence is synthesized)
caggctggtctcaaactcctgacctcgcgatccacccgactcagcctcccactgtgatgggattacaggcatgagctaccacgtcgagactcttttttttttttttttttagatggagtt

SEQ ID NO: 785421 - DNA, 120 bp, Artificial Sequence
  ENSG00000258405_39 (sequence is synthesized)
ttttttttttttttagatggagttttgcttttgttgctgaggctggagtgcaatggtgcgatctggtgtcactccaatgtcttcctcctgggttcaagtgatttctcctgcctcatccta

SEQ ID NO: 785422 - DNA, 87 bp, Artificial Sequence
  ENSG00000258405_40 (sequence is synthesized)
atgtcttcctcctgggttcaagtgatttctcctgcctcatcctactgagtagttgggattacaggtgccctccaccactcccggctc

SEQ ID NO: 785423 - DNA, 120 bp, Artificial Sequence
  ENSG00000258405_41 (sequence is synthesized)
atctgcccacctcgacctcccaaaatgctaggattacaagcgtgagccattgtgcctgaccactcatgtattcttgattgaaataatttgcttatttcttagttctacagctgaccctct

SEQ ID NO: 785424 - DNA, 120 bp, Artificial Sequence
  ENSG00000258405_42 (sequence is synthesized)
ttcactgtttccaaggtcaatagctgtgtgttcacacttctgcattttataaatgttcctgtgagttttttgtaaggaagaattaactgtcaggaatcaatgtcatcagaaccttgcaaa

SEQ ID NO: 785425 - DNA, 120 bp, Artificial Sequence
  ENSG00000258405_43 (sequence is synthesized)
agaagtttctttagcccaggtttgtgaaagaggtttctctaattttcaaggatgggggtgataagagcaacctttgccattagcccttccaggaccccatgtaagactttagacaccttc

SEQ ID NO: 785426 - DNA, 120 bp, Artificial Sequence
  ENSG00000258405_44 (sequence is synthesized)
tcactcatctcagaccttctcagggtaacttggtgaaaatgtcttccgatctgagccccagtgagcctccctgcaacttggcgacgaggggcttgaccagaaaaggtcaacccgagtgtc

SEQ ID NO: 785427 - DNA, 120 bp, Artificial Sequence
  ENSG00000258405_45 (sequence is synthesized)
cctgaccgttgaaatgattggcaaaatggagtgcgtgtctgggtgtggcttttttttttttgaggagtgcccagttgtgattagaattttcaatgggatgcagtgccctaaaaatgaaaa

SEQ ID NO: 785428 - DNA, 120 bp, Artificial Sequence
  ENSG00000258405_46 (sequence is synthesized)
acaaaagcagaagaatggaagaaatagaggtagactcagacacagagaccatcttcaaggcctttctctgtatgaggacatcacagcaaaatctaaagcaggtcacgtcaatccctggca

SEQ ID NO: 785429 - DNA, 120 bp, Artificial Sequence
  ENSG00000258405_47 (sequence is synthesized)
gggaaccctccaccggcttcccgtgttccccaggacaaaagcccaacccctcactgtggctccacagccccgtgtgcagggcccctgccagtgtccagcctcctcctggcagcttgccct

SEQ ID NO: 785430 - DNA, 120 bp, Artificial Sequence
  ENSG00000258405_48 (sequence is synthesized)
catctcatgactccctctgccccagtcacatttgcttttctcttttcccaaacatcaaaacccttcctgtctcaggtcattgtccctgctcttaccctatgtaccctgtccctttctcct

SEQ ID NO: 785431 - DNA, 120 bp, Artificial Sequence
  ENSG00000258405_49 (sequence is synthesized)
ccttcaggtctaggctcagagctctctcccatgccctcccacccctggtctcaagctcctgagctcaagtgatctacccacctcggcctcctagagtgctgggatgacaggcatgagcca

SEQ ID NO: 785432 - DNA, 120 bp, Artificial Sequence
  ENSG00000258405_50 (sequence is synthesized)
ctgcaaccagcctctgcatggggtttcctcaactttaggtctgtgccctgaaggggagctcattccagcccagttcccaactgctgcagcatgtgtgtgtgggcttctccagaaggggag

SEQ ID NO: 785433 - DNA, 120 bp, Artificial Sequence
  ENSG00000258405_51 (sequence is synthesized)
aaggggagccagagtttccctgtaggagtttatcctccatggtgaggagggccgcaggggggactgtatttgctcagggtgaggtctcctttgtgtcaggcctctgagcccaagctaagc

SEQ ID NO: 785434 - DNA, 120 bp, Artificial Sequence
  ENSG00000258405_52 (sequence is synthesized)
atggcctgaagcaactgaagatccacgaaagaagtgaaaatacccttaagtgatgacattccaccattgtgatttatttctgcaccatcttgactgatcaatgtgctttgtaatctcccc

SEQ ID NO: 785435 - DNA, 120 bp, Artificial Sequence
  ENSG00000258405_53 (sequence is synthesized)
actgatcaatgtgctttgtaatctcccccacccttcagaaggctctttgtaatcctccccacccttgagaatggacttggtgagatccaccccctgcctgcaaagcattgcccctaactc

SEQ ID NO: 785436 - DNA, 120 bp, Artificial Sequence
  ENSG00000258405_54 (sequence is synthesized)
cctgcaaagcattgcccctaactccaccgcctgtcccaaaagctacaagaactaatgataatcccaccatactttgctgactctcttttcacactcagcccgcctgcacccaggtgaaat

SEQ ID NO: 785437 - DNA, 120 bp, Artificial Sequence
  ENSG00000258429_0 (sequence is synthesized)
actgttaagggggccgccatggcccggctgtggggcgcgctgagtctttggccactgtgggcggccgtgccgtggggcggggcggcagccgtcggtgtccgggcttgcagctccacggcc

SEQ ID NO: 785438 - DNA, 120 bp, Artificial Sequence
  ENSG00000258429_1 (sequence is synthesized)
gccccggacggcgtcgagggcccggcgctgcggcgctcctattggcgccacctgaggcgtctggtgctgggtcctcccgaaccgccgttctcgcacgtgtgccaagtcggggacccggtg

SEQ ID NO: 785439 - DNA, 120 bp, Artificial Sequence
  ENSG00000258429_2 (sequence is synthesized)
gtgtgccaagtcggggacccggtgctgcgcggcgtggcggccccggtggagcgggcgcagctaggcgggcccgagctgcagcggctgacgcaacggctggtccaggtgatgcggcggcgg

SEQ ID NO: 785440 - DNA, 120 bp, Artificial Sequence
  ENSG00000258429_3 (sequence is synthesized)
cagctgggggtgccgcggcaggtgctggcgctggagctccccgaggcgctgtgtcgggagtgcccgccccgccagcgcgcgctccgccaaatggagcccttccccctgcgcgtgttcgtg

SEQ ID NO: 785441 - DNA, 120 bp, Artificial Sequence
  ENSG00000258429_4 (sequence is synthesized)
aaccccagcctgcgagtgcttgacagccgcctggtcacctttcccgagggctgcgagagcgtcgccggcttcctggcctgcgtgccccgcttccaggcggtgcagatctcagggctggac

SEQ ID NO: 785442 - DNA, 120 bp, Artificial Sequence
  ENSG00000258429_5 (sequence is synthesized)
cccaatggagaacaggtggtgtggcaggcgagcgggtgggcagcccgcatcatccagcacgagatggaccacctgcagggctgcctgtttattgacaaaatggacagcaggacgttcaca

SEQ ID NO: 785443 - DNA, 120 bp, Artificial Sequence
  ENSG00000258429_6 (sequence is synthesized)
aacgtctattggatgaaggtgaatgactaaagctttgctactggggctgaggattccggataccaagacgcaaacactttcactttgagctgggcaaatcttacttggcatcaacttgga

SEQ ID NO: 785444 - DNA, 120 bp, Artificial Sequence
  ENSG00000258429_7 (sequence is synthesized)
tggctcgcatatgacaggaaactggattgccaaggcatggcagactgagctggaggaagatgtcagaaatgtttgccctgaaatcagttacggacaaaatgttggctacaacttgaggag

SEQ ID NO: 785445 - DNA, 120 bp, Artificial Sequence
  ENSG00000258429_8 (sequence is synthesized)
aaaaatcacccccaaaggagtggacatttcctaacaattctgtatggaggaaggtggggtaattgcattcgtctgcagtagacacgagttcctcggacctgtataatctcccaaagccaa

SEQ ID NO: 785446 - DNA, 120 bp, Artificial Sequence
  ENSG00000258429_9 (sequence is synthesized)
ggtttggtaataatgtagtccccaaatacctgaaagctgtctttaaaaatgcaggtaagcatgtgactggccatttgtgccgagttcttatttttacggagggcttgtggccttagacgc

SEQ ID NO: 785447 - DNA, 120 bp, Artificial Sequence
  ENSG00000258429_10 (sequence is synthesized)
cagtttgcttatggaaatgaaagagaatagtccctgttcaaggatgtgtttcatgacagcacgagtgtaaatgagtgcccacacattttaacagccttgggcaggattttgctgctgaga

SEQ ID NO: 785448 - DNA, 120 bp, Artificial Sequence; identical to SEQ ID NO: 755049
  ENSG00000258429_11 (sequence is synthesized)

SEQ ID NO: 785449 - DNA, 120 bp, Artificial Sequence; identical to SEQ ID NO: 755050
  ENSG00000258429_12 (sequence is synthesized)

SEQ ID NO: 785450 - DNA, 120 bp, Artificial Sequence; identical to SEQ ID NO: 755051
  ENSG00000258429_13 (sequence is synthesized)

SEQ ID NO: 785451 - DNA, 120 bp, Artificial Sequence; identical to SEQ ID NO: 755052
  ENSG00000258429_14 (sequence is synthesized)

SEQ ID NO: 785452 - DNA, 120 bp, Artificial Sequence; identical to SEQ ID NO: 755053
  ENSG00000258429_15 (sequence is synthesized)

SEQ ID NO: 785453 - DNA, 84 bp, Artificial Sequence; identical to SEQ ID NO: 755054
  ENSG00000258429_16 (sequence is synthesized)

SEQ ID NO: 785454 - DNA, 120 bp, Artificial Sequence; identical to SEQ ID NO: 755055
  ENSG00000258429_17 (sequence is synthesized)

SEQ ID NO: 785455 - DNA, 120 bp, Artificial Sequence; identical to SEQ ID NO: 755056
  ENSG00000258429_18 (sequence is synthesized)

SEQ ID NO: 785456 - DNA, 120 bp, Artificial Sequence; identical to SEQ ID NO: 755057
  ENSG00000258429_19 (sequence is synthesized)

SEQ ID NO: 785457 - DNA, 120 bp, Artificial Sequence
  ENSG00000258436_0 (sequence is synthesized)
ggggttggagcaggaggaatctgactgtcctttgctactttctatcttcccttactcaacagcagtcaaagccaaagatgcgaagtcactcttacctctgatgataataatggtgataat

SEQ ID NO: 785458 - DNA, 120 bp, Artificial Sequence
  ENSG00000258436_1 (sequence is synthesized)
tttcttggtgcttctgttctgggaaaatgaggtgaatgatgaagcagtgatgtcaactttagaacacttgcatgtggactaccctcagaatgacgttcccgttcctgcaaggtactgcaa

SEQ ID NO: 785459 - DNA, 120 bp, Artificial Sequence
  ENSG00000258436_2 (sequence is synthesized)
cctgaccacacttgtaaaaaggagcatgtcttcatccatgagaggcctcgaaaaatcaatggtatttgcatttctcccaagaaggttgcttgccaaaacctttcggccattttctgcttt

SEQ ID NO: 785460 - DNA, 120 bp, Artificial Sequence
  ENSG00000258436_3 (sequence is synthesized)
cagagtgagacaaagttcaaaatgacagtctgtcagctcattgaaggcacaagataccctgcctgcaggtaccactattcccccacagaggggtttgttcttgtcacttgtgatgacttg

SEQ ID NO: 785461 - DNA, 120 bp, Artificial Sequence
  ENSG00000258436_4 (sequence is synthesized)
aggccagatagtttccttggctatgttaaataactcaagatcagctcccgagtctgagatctcttctctcaatggcattggagctggctgtgcctgaggcagacctggaccgtggacatg

SEQ ID NO: 785462 - DNA, 120 bp, Artificial Sequence
  ENSG00000258453_0 (sequence is synthesized)
tgacttcatgttcattatcttctcttcattcttaaaaaaggaacacattttataaaagagtcctgactgataatgtgtcccttgaccttgcatgtcactggcctaatgaatgtctctgag

SEQ ID NO: 785463 - DNA, 120 bp, Artificial Sequence
  ENSG00000258453_1 (sequence is synthesized)
ccaaattccagctttgcttttgtaaatgaatttatactccaaggtttctcttgtgagtggacaattcagatcttcctcttctcactctttactacaatatatgcactgactataacaggg

SEQ ID NO: 785464 - DNA, 120 bp, Artificial Sequence
  ENSG00000258453_2 (sequence is synthesized)
aatggagccattgcttttgtcctgtggtgtgaccggcgacttcacactcccatgtacatgttcctgggaaatttctcctttttagagatatggtatgtctcttctacagttcccaagatg

SEQ ID NO: 785465 - DNA, 120 bp, Artificial Sequence; identical to SEQ ID NO: 784609
  ENSG00000258453_3 (sequence is synthesized)

SEQ ID NO: 785466 - DNA, 120 bp, Artificial Sequence
  ENSG00000258453_4 (sequence is synthesized)
ccttgctatctgccgtcccttgctctatcctaatatcatgactgggcatctctatgccaaactggtcatactgtgctgggtttgtggatttctgtggttcctgatccccattgttctcat

SEQ ID NO: 785467 - DNA, 120 bp, Artificial Sequence
  ENSG00000258453_5 (sequence is synthesized)
ctctcagaagcccttctgtggcccaaacattattgaccatgttgtgtgtgacccagggccactatttgcattggattgtgtttctgccccaagaatccaactgttttgctacactctaag

SEQ ID NO: 785468 - DNA, 120 bp, Artificial Sequence; identical to SEQ ID NO: 784612
  ENSG00000258453_6 (sequence is synthesized)

SEQ ID NO: 785469 - DNA, 120 bp, Artificial Sequence
  ENSG00000258453_7 (sequence is synthesized)
tcatttggctgtggtatcactgtgctatagccctcttatggtcatgtatgtgagcccaggactcggacattctacagggatgcagaaaattgaaactttgttctatgctatggtgacccc

SEQ ID NO: 785470 - DNA, 120 bp, Artificial Sequence
  ENSG00000258453_8 (sequence is synthesized)
actcttcaatccccttatctatagcctccagaataaggagataaaggcagccctgaggaaagttctggggagttccaacataatctaaggcatattagattattcctccatgatcagatc

SEQ ID NO: 785471 - DNA, 120 bp, Artificial Sequence
  ENSG00000258472_0 (sequence is synthesized)
agaggaggcagaggctgggaatgggagcagtaagctgtcggcaggggcagcacacccagcagggggaacacacccgggtggctgtccctcacaagggtggcaacatccggggtccctggg

SEQ ID NO: 785472 - DNA, 120 bp, Artificial Sequence
  ENSG00000258472_1 (sequence is synthesized)
cccgaggctggaagagcctctggacaggtttgggaaccatcaggtcagatctggaagaactctgggaactacgggggcaccactatctgcaccaggaatccctaaagccagccccagtac

SEQ ID NO: 785473 - DNA, 120 bp, Artificial Sequence
  ENSG00000258472_2 (sequence is synthesized)
tagagaagcctctgccagagtggccagtgcctcagttcatcaacctctttctaccagagtttcccattaggcccattagggggcagcagcagctgaagctggactgtgctgctgccatct

SEQ ID NO: 785474 - DNA, 120 bp, Artificial Sequence
  ENSG00000258472_3 (sequence is synthesized)
agagagaggaggcagaggctgggaatgggagcagtaagctgtcggcaggggcagcacacccagcagggggaacacacccgggtggctgtccctcacaagcagggtggcaacatccggggt

SEQ ID NO: 785475 - DNA, 120 bp, Artificial Sequence
  ENSG00000258472_4 (sequence is synthesized)
gtggctaaaggctcctttggaactgtcctcaaggtgctagattgcacccagaaagctgtatttgcagtgaaggtggtgcccaaggtaaaggtcctacagagggataccgtgaggcagtgc

SEQ ID NO: 785476 - DNA, 120 bp, Artificial Sequence
  ENSG00000258472_5 (sequence is synthesized)
aaaaggaagagatggcactaaaacacatgcaggcagaactgcagcagcaacaagctgtcctggccaaagaggtgcgggacctgaaagagaccttggagtttgcagaccaggagaatcagg

SEQ ID NO: 785477 - DNA, 120 bp, Artificial Sequence
  ENSG00000258472_6 (sequence is synthesized)
ttgctcacctggagctgggtcaggttgagtgtcaattgaaaaccacactggaagtgctccgggagcgcagcttgcagtgtgagaacctcaaggacactgtagagaacctaacggctaaac

SEQ ID NO: 785478 - DNA, 120 bp, Artificial Sequence
  ENSG00000258472_7 (sequence is synthesized)
tggccagcaccatagcagataaccaggagcaagatctggagaaaacacggcagtactctcaaaagctagggctgctgactgagcaactacagagcctgactctctttctacagacaaaac

SEQ ID NO: 785479 - DNA, 120 bp, Artificial Sequence
  ENSG00000258472_8 (sequence is synthesized)
taaaggagaagactgaacaagagacccttctgctgagtacagcctgtcctcccacccaggaacaccctctgcctaatgacaggaccttcctgggaagcatcttgacagcagtggcagatg

SEQ ID NO: 785480 - DNA, 120 bp, Artificial Sequence
  ENSG00000258472_9 (sequence is synthesized)
cagtgcaaagaggaggttagcatccaggttatctccatgacttgggcatcatgcatcgagatgtgaagatggagaatattcttctagatgaacgagctggactgtgctgctgccatctcg

SEQ ID NO: 785481 - DNA, 120 bp, Artificial Sequence; identical to SEQ ID NO: 782986
  ENSG00000258484_0 (sequence is synthesized)

SEQ ID NO: 785482 - DNA, 120 bp, Artificial Sequence
  ENSG00000258484_1 (sequence is synthesized)
acgacgcctatgaagcccttagtccttctagttgcgcttttgctatggccttcgtctgtgccggcttatccgagcataactgtgacacctgatgaagagcaaaacttgaatcattatata

SEQ ID NO: 785483 - DNA, 120 bp, Artificial Sequence
  ENSG00000258484_2 (sequence is synthesized)
caagttttagagaacctagtacgaagtgttccctctggggagccaggtcgtgagaaaaaatctaactctccaaaacatgtttattctatagcatcaaagggatcaaaatttaaggagcta

SEQ ID NO: 785484 - DNA, 120 bp, Artificial Sequence
  ENSG00000258484_3 (sequence is synthesized)
gttacacatggagacgcttcaactgagaatgatgttttaaccaatcctatcagtgaagaaactacaactttccctacaggaggcttcacaccggaaataggaaagaaaaaacacacggaa

SEQ ID NO: 785485 - DNA, 120 bp, Artificial Sequence
  ENSG00000258484_4 (sequence is synthesized)
agtaccccattctggtcgatcaaaccaaacaatgtttccattgttttgcatgcagaggaaccttatattgaaaatgaagagccagagccagagccggagccagctgcaaaacaaactgag

SEQ ID NO: 785486 - DNA, 120 bp, Artificial Sequence
  ENSG00000258484_5 (sequence is synthesized)
gagcactggcattgggatctctacagaatcagaagatgttcctcagctctcaggtgaaactgcgatagaaaaacccgaagagtttggaaagcacccagagagttggaataatgatgacat

SEQ ID NO: 785487 - DNA, 120 bp, Artificial Sequence
  ENSG00000258484_6 (sequence is synthesized)
tttgaaaaaaattttagatattaattcacaagtgcaacaggcacttcttagtgacaccagcaacccagcatatagagaagatattgaagcctctaaagatcacctaaaacgaagccttgc

SEQ ID NO: 785488 - DNA, 120 bp, Artificial Sequence
  ENSG00000258484_7 (sequence is synthesized)
tctagcagcagcagcagaacataaattaaaaacaatgtataagtcccagttattgccagtaggacgaacaagtaataaaattgatgacatcgaaactgttattaacatgctgtgtaattc

SEQ ID NO: 785489 - DNA, 120 bp, Artificial Sequence
  ENSG00000258484_8 (sequence is synthesized)
tagatctaaactctatgaatatttagatattaaatgtgttccaccagagatgagagaaaaagctgctacagtattcaatacattaaaaaatatgtgtagatcaaggagagtcacagcctt

SEQ ID NO: 785490 - DNA, 120 bp, Artificial Sequence
  ENSG00000258484_9 (sequence is synthesized)
attaaaagtttattaaacaataatataaaaattttaaacctacttgatattccataacaaagctgatttaagcaaactgcattttttcacaggagaaataatcatattcgtaatttcaaa

SEQ ID NO: 785491 - DNA, 120 bp, Artificial Sequence
  ENSG00000258484_10 (sequence is synthesized)
agttgtataaaaatattttctattgtagttcaaatgtgccaacatctttatgtgtcatgtgttatgaacaattttcatatgcactaaaaacctaatttaaaataaaattttggttcagga

SEQ ID NO: 785492 - DNA, 120 bp, Artificial Sequence
  ENSG00000258484_11 (sequence is synthesized)
gtgcggcgcgagccccgggaaacatggctgctcgtcctatttcggcgtcgcggcatggccaccagctcccggagcccagttgggagaggtgccgaaggcataactgtgacacctgatgaa

SEQ ID NO: 785493 - DNA, 120 bp, Artificial Sequence
  ENSG00000258643_0 (sequence is synthesized)
ctccctccctcccagctcctgcaccaggaaacggcccggatcccggcagcggcctgacccggctccacgctggccaggaggatgaaaggccccagctgggggctccttgccaccagtgct

SEQ ID NO: 785494 - DNA, 120 bp, Artificial Sequence
  ENSG00000258643_1 (sequence is synthesized)
gtgtcttaagagctgccatcccggctggccgcccggatggcgaccccagcctcggccccagacacacgggctctggtggcagactttgtaggttataagctgaggcagaagggttatgtc

SEQ ID NO: 785495 - DNA, 120 bp, Artificial Sequence
  ENSG00000258643_2 (sequence is synthesized)
tgtggagctggccccggggagggcccagcagctgacccgctgcaccaagccatgcgggcagctggagatgagttcgagacccgcttccggcgcaccttctctgatctggcggctcagctg

SEQ ID NO: 785496 - DNA, 120 bp, Artificial Sequence
  ENSG00000258643_3 (sequence is synthesized)
catgtgaccccaggctcagcccaacaacgcttcacccaggtctccgatgaactttttcaagggggccccaactggggccgccttgtagccttctttgtctttggggctgcactgtgtgct

SEQ ID NO: 785497 - DNA, 120 bp, Artificial Sequence
  ENSG00000258643_4 (sequence is synthesized)
gagagtgtcaacaaggagatggaaccactggtgggacaagtgcaggagtggatggtggcctacctggagacgcagctggctgactggatccacagcagtgggggctgggagctggaagct

SEQ ID NO: 785498 - DNA, 120 bp, Artificial Sequence
  ENSG00000258643_5 (sequence is synthesized)
gctaaaggagctacagaacgaggtagagaagcagatgaatatgagtccacctccaggcaatgctggcccggtgatcatgtccattgaggagaagatggaggctgatgcccgttccatcta

SEQ ID NO: 785499 - DNA, 120 bp, Artificial Sequence
  ENSG00000258643_6 (sequence is synthesized)
tgttggcaatgtggactatggtgcaacagcagaagagctggaagctcactttcatggctgtggttcagtcaaccgtgttaccatactgtgtgacaaatttagtggccatcccaaagggtt

SEQ ID NO: 785500 - DNA, 120 bp, Artificial Sequence
  ENSG00000258643_7 (sequence is synthesized)
tgcgtatatagagttctcagacaaagagtcagtgaggacttccttggccttagatgagtccctatttagaggaaggcaaatcaaggtgatcccaaaacgaaccaacagaccaggcatcag

SEQ ID NO: 785501 - DNA, 120 bp, Artificial Sequence
  ENSG00000258643_8 (sequence is synthesized)
cacaacagaccggggttttccacgagcccgctaccgcgcccggaccaccaactacaacagctcccgctctcgattctacagtggttttaacagcaggccccggggtcgcgtctacagggg

SEQ ID NO: 785502 - DNA, 120 bp, Artificial Sequence
  ENSG00000258643_9 (sequence is synthesized)
cgtctacaggggccgggctagagcgacatcatggtattccccttactaaaaaaagtgtgtattaggaggagagagaggaaaaaaagaggaaagaaggaaaaaaaaaagaattaaaaaaaa

SEQ ID NO: 785503 - DNA, 120 bp, Artificial Sequence
  ENSG00000258643_10 (sequence is synthesized)
tttgggctgcactagggggaaccgggaatagagatggtgtcggcaggaagcccttggccttgggtttcccgggaggacagtcattaaacatggattcggccacacagctggtagagcgtt

SEQ ID NO: 785504 - DNA, 120 bp, Artificial Sequence
  ENSG00000258643_11 (sequence is synthesized)
gggggcaggggcctaggcccagagctgcaaccctagcccttcccaggccagaacctgatccctggccttcccctcctggttctgatctccccctcccctttccagggctccacgctggcc

SEQ ID NO: 785505 - DNA, 120 bp, Artificial Sequence
  ENSG00000258659_0 (sequence is synthesized)
tgaatgaatcctgaccacacccaccctggcttttcttcacctcttcaaccaggagccgagatttctgttgctctgaagccatccaggggtctttaaccagaagagagaggagagcctcag

SEQ ID NO: 785506 - DNA, 120 bp, Artificial Sequence
  ENSG00000258659_1 (sequence is synthesized)
gagttaggaccagaagaagccagggaagcagtgcaatggcttcaaaaatcttgcttaacgtacaagaggaggtgacctgtcccatctgcctggagctgttgacagaacccttgagtctag

SEQ ID NO: 785507 - DNA, 120 bp, Artificial Sequence
  ENSG00000258659_2 (sequence is synthesized)
actgtggccacagcctctgccgagcctgcatcactgtgagcaacaaggaggcagtgaccagcatgggaggaaaaagcagctgtcctgtgtgtggtatcagttactcatttgaacatctac

SEQ ID NO: 785508 - DNA, 120 bp, Artificial Sequence
  ENSG00000258659_3 (sequence is synthesized)
aggctaatcagcatctggccaacatagtggagagactcaaggaggtcaagttgagcccagacaatgggaagaagagagatctctgtgatcatcatggagagaaactcctactcttctgta

SEQ ID NO: 785509 - DNA, 120 bp, Artificial Sequence
  ENSG00000258659_4 (sequence is synthesized)
aggaggataggaaagtcatttgctggctttgtgagcggtctcaggagcaccgtggtcaccacacagtcctcacggaggaagtattcaaggaatgtcaggagaaactccaggcagtcctca

SEQ ID NO: 785510 - DNA, 120 bp, Artificial Sequence
  ENSG00000258659_5 (sequence is synthesized)
agaggctgaagaaggaagaggaggaagctgagaagctggaagctgacatcagagaagagaaaacttcctggaagtatcaggtacaaactgagagacaaaggatacaaacagaatttgatc

SEQ ID NO: 785511 - DNA, 120 bp, Artificial Sequence
  ENSG00000258659_6 (sequence is synthesized)
agcttagaagcatcctaaataatgaggagcagagagagctgcaaagattggaagaagaagaaaagaagacgctggataagtttgcagaggctgaggatgagctagttcagcagaagcagt

SEQ ID NO: 785512 - DNA, 120 bp, Artificial Sequence
  ENSG00000258659_7 (sequence is synthesized)
tggtgagagagctcatctcagatgtggagtgtcggagtcagtggtcaacaatggagctgctgcaggacatgagtggaatcatgaaatggagtgagatctggaggctgaaaaagccaaaaa

SEQ ID NO: 785513 - DNA, 120 bp, Artificial Sequence
  ENSG00000258659_8 (sequence is synthesized)
tggtttccaagaaactgaagactgtattccatgctccagatctgagtaggatgctgcaaatgtttagagaactgacagctgtccggtgctactgggtggatgtcacactgaattcagtca

SEQ ID NO: 785514 - DNA, 120 bp, Artificial Sequence
  ENSG00000258659_9 (sequence is synthesized)
tcagagacaagtgatatctgtgccaatttggccttttcagtgttataattatggtgtcttgggatcccaatatttctcctctgggaaacattactgggaagtggacgtgtccaagaaaac

SEQ ID NO: 785515 - DNA, 120 bp, Artificial Sequence
  ENSG00000258659_10 (sequence is synthesized)
tgcctggatcctgggggtatactgtagaacatattcccgccatatgaagtatgttgttagaagatgtgcaaatcgtcaaaatctttacaccaaatacagacctctatttggctactgggt

SEQ ID NO: 785516 - DNA, 120 bp, Artificial Sequence
  ENSG00000258659_11 (sequence is synthesized)
tatagggttacagaataaatgtaagtatggtgtctttgaagagtctttgtcctctgatcccgaggttttgactctctccatggctgtgcctccctgccgtgttggggttttcctcgacta

SEQ ID NO: 785517 - DNA, 120 bp, Artificial Sequence
  ENSG00000258659_12 (sequence is synthesized)
tgaagcaggcattgtctcatttttcaatgtcacaagccatggctccctcatttacaagttctctaaatgttgcttttctcagcctgtttatccatatttcaatccttggaactgtccagc

SEQ ID NO: 785518 - DNA, 120 bp, Artificial Sequence
  ENSG00000258659_13 (sequence is synthesized)
tcccatgactctatgcccaccaagctcttgaattttctcatttcttcacctacaaccctttgtcttgacttatctcctgcaactgactcatctgcaacattcacaccattgcttccttgt

SEQ ID NO: 785519 - DNA, 120 bp, Artificial Sequence
  ENSG00000258659_14 (sequence is synthesized)
ggtttcccttctttagaacttttactcatccttgagatgtatggtgtatttggcttgagttatgagagatgcttatttattcatttactctttttcatattttcagagaaagttacctaa

SEQ ID NO: 785520 - DNA, 120 bp, Artificial Sequence
  ENSG00000258659_15 (sequence is synthesized)
tccctcctaaagacacagcagtatgggtataacatccttgccttcccatttatccatgtttcactttatcactgatatgaagaggcccaaagcctgttagccaccatccatgctacctag

SEQ ID NO: 785521 - DNA, 120 bp, Artificial Sequence
  ENSG00000258659_16 (sequence is synthesized)
gtagtccataggaaccacccccatgaccaccaccaacatcaactaaaggttcttggagggtatgtcagtgtgttgctcaggataccccaggtacatcaaggaatcaaggagaggaaaata

SEQ ID NO: 785522 - DNA, 120 bp, Artificial Sequence
  ENSG00000258659_17 (sequence is synthesized)
tgagcaatatgtgtattcagagtgaagattttatgtccagagtatttgagctcaaaccttgcctgttgttttctaatcatgatgaatactttctcagtttctttttcctgaaatataaat

SEQ ID NO: 785523 - DNA, 120 bp, Artificial Sequence
  ENSG00000258659_18 (sequence is synthesized)
tgggatttaagactgtacctaactattaagatcactgtgtaaaactaagtgtctctaaatgtaatgcatcgatttagtgtctggaacataataaatatttgctctcatgattgctaaaaa

SEQ ID NO: 785524 - DNA, 120 bp, Artificial Sequence
  ENSG00000258659_19 (sequence is synthesized)
atcatgaaatggtgcgtatgggtggccaggagtggtgcttgtgagttataaagaagtgtttgtagctattagagttatttggtggtcaattggaataaaaaatctcccagagtagtaaaa

SEQ ID NO: 785525 - DNA, 120 bp, Artificial Sequence
  ENSG00000258713_0 (sequence is synthesized)
ggaggaggtgaggagggtttgctgggtgggtatgggggagggggagactctgcaggagcctaattccccactctgagctcacccttctgtctgcccgggccctaccccttcccctactct

SEQ ID NO: 785526 - DNA, 120 bp, Artificial Sequence
  ENSG00000258713_1 (sequence is synthesized)
cacccttataatccttttcagcactaggtcttcccgtcacctccacctctctccatgacccggctctgcttacccagacccgaagcacgtgaggatccgatcccagttcctccaaggggc

SEQ ID NO: 785527 - DNA, 120 bp, Artificial Sequence
  ENSG00000258713_2 (sequence is synthesized)
ctgggtgctggggaggggtcaggtagtccagtgcgtccacctgtatccacctggggccctagctgggcccagctcctggacagtgtcctatggctgggggcactaggactgacaatccag

SEQ ID NO: 785528 - DNA, 120 bp, Artificial Sequence
  ENSG00000258713_3 (sequence is synthesized)
ccaccactggcccagccctgctgctgcttctggtcagcttcctcacctttgacctgctccataggcccgcaggtcacactctgccacagcgcaaacttctcaccaggggccagagtcagg

SEQ ID NO: 785529 - DNA, 120 bp, Artificial Sequence
  ENSG00000258713_4 (sequence is synthesized)
gggccggtgaaggtcctggacagcaggaggctctactcctgcaaatgggtacagtctcaggacaacttagcctccaggacgcactgctgctgctgctcatggggctgggcccgctcctga

SEQ ID NO: 785530 - DNA, 120 bp, Artificial Sequence
  ENSG00000258713_5 (sequence is synthesized)
gagcctgtggcatgcccttgaccctgcttggcctggctttctgcctccatccttgggcctgagagcccctccccacaactcagtgtccttcaaatatacaatgaccacccttcttcatca

SEQ ID NO: 785531 - DNA, 120 bp, Artificial Sequence
  ENSG00000258817_0 (sequence is synthesized)
caggtaatgtaattaaccatcatttgaaatacatggcgaatagaaacaatgtgacagagtttattctattggggcttacagagaatccaaaaatgcagaaaatcatatttgttgtgtttt

SEQ ID NO: 785532 - DNA, 120 bp, Artificial Sequence
  ENSG00000258817_1 (sequence is synthesized)
ctgtcatctacatcaacgccatgataggaaatgtgctcattgtggtcaccatcactgccagcccatcactgagatcccccatgtactttttcctggcctatctctcctttattgatgcct

SEQ ID NO: 785533 - DNA, 120 bp, Artificial Sequence
  ENSG00000258817_2 (sequence is synthesized)
gctattcctctgtcaatacccctaagctgatcacagattcactctatgaaaacaagactatcttattcaatggatgtatgactcaagtctttggagaacattttttcagaggtgttgagg

SEQ ID NO: 785534 - DNA, 120 bp, Artificial Sequence
  ENSG00000258817_3 (sequence is synthesized)
tcatcctacttactgtaatggcctatgaccactatgtggccatctgcaagcccttgcactataccaccgtcatgaagcagcatgtttgtagcctgctagtgggagtgtcatgggtaggag

SEQ ID NO: 785535 - DNA, 120 bp, Artificial Sequence
  ENSG00000258817_4 (sequence is synthesized)
atcactttatgtgtgatctctacactttgatcaatcttgcctgcactaatacccacactctaggactcttcattgctgccaacagtgggttcatatgcctgttaaactgtctcttgctcc

SEQ ID NO: 785536 - DNA, 120 bp, Artificial Sequence
  ENSG00000258817_5 (sequence is synthesized)
tggtctcctgcgtggtcatactgtactccttaaagacccacagcttagaggcaaggcacgaagccctctctacctgtgtctcccacatcacagttgtcatcttatcctttataccctgca

SEQ ID NO: 785537 - DNA, 120 bp, Artificial Sequence
  ENSG00000258817_6 (sequence is synthesized)
tatttgtgtacatgagacctccagctactttacccattgataaagcagttgctgtattctacactatgataacttctatgttaaaccccttaatctacaccttgaggaatgctcaaatga

SEQ ID NO: 785538 - DNA, 120 bp, Artificial Sequence
  ENSG00000258817_7 (sequence is synthesized)
aaaatgccattaggaaattgtgtagtaggaaagctatttcaagtgtcaaataaatgtgactggagcccaacatgattcagctgaggcaagggtcaaaaggacattttgggtaatgccagc

SEQ ID NO: 785539 - DNA, 120 bp, Artificial Sequence
  ENSG00000258818_0 (sequence is synthesized)
gtacacacactcacacaaggacgccaaccccacctagatgcaaagcaggattcaaaagaacatctttgcgttttctaccggctccccatcatcgtactagggaggaagaagcgggcacct

SEQ ID NO: 785540 - DNA, 120 bp, Artificial Sequence
  ENSG00000258818_1 (sequence is synthesized)
ctaagatactgatggctctgcagaggacccattcattgcttctgcttttgctgctgaccctgctggggctggggctggtccagccctcctatggccaggatggcatgtaccagcgattcc

SEQ ID NO: 785541 - DNA, 120 bp, Artificial Sequence
  ENSG00000258818_2 (sequence is synthesized)
tgcggcaacacgtgcaccctgaggagacaggtggcagtgatcgctactgcaacttgatgatgcaaagacggaagatgactttgtatcactgcaagcgcttcaacaccttcatccatgaag

SEQ ID NO: 785542 - DNA, 120 bp, Artificial Sequence
  ENSG00000258818_3 (sequence is synthesized)
tcgtagtatctgcagcaccaccaatatccaatgcaagaacggcaagatgaactgccatgagggtgtagtgaaggtcacagattgcagggacacaggaagttccagggcacccaactgcag

SEQ ID NO: 785543 - DNA, 120 bp, Artificial Sequence
  ENSG00000258818_4 (sequence is synthesized)
atatcgggccatagcgagcactagacgtgttgtcattgcctgtgagggtaacccacaggtgcctgtgcactttgacggttagatgccaccatgtagggattatcgcgagtggttgacctt

SEQ ID NO: 785544 - DNA, 120 bp, Artificial Sequence
  ENSG00000258818_5 (sequence is synthesized)
acacttactccttaaatagcagtgagtaatgcatttgagctgtcccaggctctgtctcctcagctcatttcctactctttttctctatataactcattctattaaatacattgcaccaaa

SEQ ID NO: 785545 - DNA, 120 bp, Artificial Sequence
  ENSG00000258818_6 (sequence is synthesized)
gagatatggagacataaacctgtaatgaatgaggctgggcttttctgtaataagcttccttttataatactggtcagcttagctctctcagatcctatcctgtggaatttagttattatg

SEQ ID NO: 785546 - DNA, 120 bp, Artificial Sequence
  ENSG00000258818_7 (sequence is synthesized)
aaatgctttcatctatgtttatcacattttaataccacagcacttataatgatgtcactacatatagaagctcaaagttaagggatttgctgaagactgtaaagttaatggaagaattga

SEQ ID NO: 785547 - DNA, 120 bp, Artificial Sequence
  ENSG00000258818_8 (sequence is synthesized)
gacaaaaatccagtgtagctggccacttatccagggctttttctacttcatcacaaggaatgttttgaaagtgtctgctttttttatccttaaaattcacctgtcagggaggcattaaaa

SEQ ID NO: 785548 - DNA, 120 bp, Artificial Sequence
  ENSG00000258818_9 (sequence is synthesized)
atttggaaatgtatgccagcaaaatgtgagctctgtattttttggcattcttatgtttgggtttaataagattaagaaaatgatactgggaattttctttttcctgaaactttgaatcac

SEQ ID NO: 785549 - DNA, 120 bp, Artificial Sequence
  ENSG00000258818_10 (sequence is synthesized)
cctagtaagtcaaagtactaaaaaatgtactagatcattaagacttatgtgctcttactgattgaaagattttttatgttttccttgtaataaaggacctaaaccgaaggtacctgagaa

SEQ ID NO: 785550 - DNA, 120 bp, Artificial Sequence
  ENSG00000258818_11 (sequence is synthesized)
accacgcccccatctccgtccgtgtacacacactcacacaaggacgccaaccccacctagatgcaaagcaggattcaaaagaacatctttgcgttttctaccggctccccatcatcgtac

SEQ ID NO: 785551 - DNA, 120 bp, Artificial Sequence
  ENSG00000258818_12 (sequence is synthesized)
attattttttttctctgacttttaaattcttgtttagtttataaacatgcatgcaccttaataacctcataaactctggtcaaagactaatgcctatcagatccatgaccacaacacaga

SEQ ID NO: 785552 - DNA, 120 bp, Artificial Sequence
  ENSG00000258818_13 (sequence is synthesized)
agatttgtctcatttactccagagagaatgattcctctcaaagacaattctcacagctcttccttctcccttagaatatttagaagcaaattagggagctgtcaggtctctgagcccaag

SEQ ID NO: 785553 - DNA, 60 bp, Artificial Sequence
  ENSG00000258818_14 (sequence is synthesized)
actgaagaaccacaaaagaagtgaaaataaccaatcaattagccttgtgacattccttct

SEQ ID NO: 785554 - DNA, 90 bp, Artificial Sequence
  ENSG00000258818_15 (sequence is synthesized)
ccactcaattagccttgtgacattccttctcctggacaattagactcaggagctccccaccagagcaccttgtgacccccgcccctgccc

SEQ ID NO: 785555 - DNA, 65 bp, Artificial Sequence
  ENSG00000258818_16 (sequence is synthesized)
ccgcccctgcccgctagagaataacccactttgaccgtaatttcccactaccggactcagtctgc

SEQ ID NO: 785556 - DNA, 120 bp, Artificial Sequence
  ENSG00000258839_0 (sequence is synthesized)
agacgcagtcttcagcaaggaagtgctgggaacgccctggagtgaacccaggaagatgcctgcagtgggtgccagggcccctctccaccgtccctgctgggcttcggggccacgcccgac

SEQ ID NO: 785557 - DNA, 120 bp, Artificial Sequence
  ENSG00000258839_1 (sequence is synthesized)
tgctgtgaacggcctgcggagcaccacgtgcgacggctggaggcgagaggtctgcctttgatgtggctgttggtgcagggcctgtggtgccttccgcagcggaaatggcgcgccgcccgg

SEQ ID NO: 785558 - DNA, 120 bp, Artificial Sequence
  ENSG00000258839_2 (sequence is synthesized)
ggagggcgggagcagcgtcccgggtgcccctgtgaggatgagcgacgagatgactggagggtccctgaagacctcactagggtgcccccagccggtccgctcccaggaagcgacaccccc

SEQ ID NO: 785559 - DNA, 120 bp, Artificial Sequence
  ENSG00000258839_3 (sequence is synthesized)
acagccccagggctgcagctgagggggtcgccactctggctgggcgaggctgggcccttgggggcaggcgccagagtggcctcaggctctacaagatgcctgaaaacaccaacctctcca

SEQ ID NO: 785560 - DNA, 120 bp, Artificial Sequence
  ENSG00000258839_4 (sequence is synthesized)
gggctcactagcattggacgctttcacgctctgccctggccggaagccccctcaccccgcgcgatgtgcaaactcctgcagggctcactcagtttccagaactttaattattggaaagtt

SEQ ID NO: 785561 - DNA, 120 bp, Artificial Sequence
  ENSG00000258839_5 (sequence is synthesized)
ctccctggtccagcccccaaatctgccgtgaacgttgacagctgagttgctgctccatgcgtgctttggctgagagcagaggggacccctgtcctccctgagctgctgacgaggggaggg

SEQ ID NO: 785562 - DNA, 120 bp, Artificial Sequence
  ENSG00000258839_6 (sequence is synthesized)
gtgaagggtggggcctctggagagggcaggtcccggggaagctccggactcctagaggggcggccaggtgggggccctggtgaccaggacagactgtggtgttttttaacgtaaaggaga

SEQ ID NO: 785563 - DNA, 120 bp, Artificial Sequence
  ENSG00000258839_7 (sequence is synthesized)
tccgcggtgtgagggaccccctgggtcctgcacgccgcctggtggcaggccgggccatggtgggtgctcacgcccccggcatgtggccgccctcagtgggaggggctctgagaacgactt

SEQ ID NO: 785564 - DNA, 120 bp, Artificial Sequence
  ENSG00000258839_8 (sequence is synthesized)
tttaaaacgcagagaaaagctccattcttcccaggacctcagcgcagccctggcccaggaaggcaggagacagaggccaggacggtccagaggtgtcgaaatgtcctggggacctgagca

SEQ ID NO: 785565 - DNA, 120 bp, Artificial Sequence
  ENSG00000258839_9 (sequence is synthesized)
gcagccaccagggaagaggcagggagggagctgaggaccaggcttggttgtgagaatccctgagcccaggcggtagatgccaggaggtgtctggactggctgggccatgcctgggctgac

SEQ ID NO: 785566 - DNA, 120 bp, Artificial Sequence
  ENSG00000258839_10 (sequence is synthesized)
ctgtccagccagggagagggtgtgagggcagatctgggggtgcccagatggaaggaggcaggcatgggggacacccaaggccccctggcagcaccatgaactaagcaggacacctggagg

SEQ ID NO: 785567 - DNA, 120 bp, Artificial Sequence
  ENSG00000258839_11 (sequence is synthesized)
ggaagaactgtggggacctggaggcctccaacgactccttcctgcttcctggacaggactatggctgtgcagggatcccagagaagacttctgggctccctcaactccacccccacagcc

SEQ ID NO: 785568 - DNA, 120 bp, Artificial Sequence
  ENSG00000258839_12 (sequence is synthesized)
gtggagaacgcgctggtggtggccaccatcgccaagaaccggaacctgcactcacccatgtactgcttcatctgctgcctggccttgtcggacctgctggtgagcgggagcaacgtgctg

SEQ ID NO: 785569 - DNA, 120 bp, Artificial Sequence
  ENSG00000258839_13 (sequence is synthesized)
gagacggccgtcatcctcctgctggaggccggtgcactggtggcccgggctgcggtgctgcagcagctggacaatgtcattgacgtgatcacctgcagctccatgctgtccagcctctgc

SEQ ID NO: 785570 - DNA, 120 bp, Artificial Sequence
  ENSG00000258839_14 (sequence is synthesized)
ttcctgggcgccatcgccgtggaccgctacatctccatcttctacgcactgcgctaccacagcatcgtgaccctgccgcgggcgcggcgagccgttgcggccatctgggtggccagtgtc

SEQ ID NO: 785571 - DNA, 120 bp, Artificial Sequence
  ENSG00000258839_15 (sequence is synthesized)
gtcttcagcacgctcttcatcgcctactacgaccacgtggccgtcctgctgtgcctcgtggtcttcttcctggctatgctggtgctcatggccgtgctgtacgtccacatgctggcccgg

SEQ ID NO: 785572 - DNA, 120 bp, Artificial Sequence
  ENSG00000258839_16 (sequence is synthesized)
gcctgccagcacgcccagggcatcgcccggctccacaagaggcagcgcccggtccaccagggctttggccttaaaggcgctgtcaccctcaccatcctgctgggcattttcttcctctgc

SEQ ID NO: 785573 - DNA, 120 bp, Artificial Sequence
  ENSG00000258839_17 (sequence is synthesized)
tggggccccttcttcctgcatctcacactcatcgtcctctgccccgagcaccccacgtgcggctgcatcttcaagaacttcaacctctttctcgccctcatcatctgcaatgccatcatc

SEQ ID NO: 785574 - DNA, 120 bp, Artificial Sequence
  ENSG00000258839_18 (sequence is synthesized)
gaccccctcatctacgccttccacagccaggagctccgcaggacgctcaaggaggtgctgacatgctcctggtgagcgcggtgcacgcggctttaagtgtgctgggcagagggaggtggt

SEQ ID NO: 785575 - DNA, 120 bp, Artificial Sequence
  ENSG00000258839_19 (sequence is synthesized)
gatattgtgtggtctggttcctgtgtgaccctgggcagttccttacctccctggtccccgtttgtcaaagaggatggactaaatgatctctgaaagtgttgaagcgcggacccttctggg

SEQ ID NO: 785576 - DNA, 120 bp, Artificial Sequence
  ENSG00000258839_20 (sequence is synthesized)
tccagggaggggtccctgcaaaactccaggcaggacttctcaccagcagtcgtggggaacggaggaggacatggggaggttgtggggcctcaggctccgggcaccaggggccaacctcag

SEQ ID NO: 785577 - DNA, 120 bp, Artificial Sequence
  ENSG00000258839_21 (sequence is synthesized)
gctcctaaagagacattttccgcccactcctgggacactccgtctgctccaatgactgagcagcatccaccccaccccatctttgctgccagctctcaggaccgtgccctcgtcagctgg

SEQ ID NO: 785578 - DNA, 120 bp, Artificial Sequence
  ENSG00000258839_22 (sequence is synthesized)
gatgtgaagtctctgggtggaagtgtgtgccaagagctactcccacagcagccccaggagaaggggctttgtgaccagaaagcttcatccacagccttgcagcggctcctgcaaaaggag

SEQ ID NO: 785579 - DNA, 120 bp, Artificial Sequence
  ENSG00000258839_23 (sequence is synthesized)
gtgaaatccctgcctcaggccaagggaccaggtttgcaggagcccccctagtggtatggggctgagccctcctgagggccggttctaaggctcagactgggcactggggcctcagcctgc

SEQ ID NO: 785580 - DNA, 120 bp, Artificial Sequence
  ENSG00000258839_24 (sequence is synthesized)
tttcctgcagcagtcgcccaagcagacagccctggcaaatgcctgactcagtgaccagtgcctgtgagcatggggccaggaaagtctggtaataaatgtgactcagcatcacccacctta

SEQ ID NO: 785581 - DNA, 120 bp, Artificial Sequence
  ENSG00000258839_25 (sequence is synthesized)
gtgggtgcacatttgtgtgtgtgcctgtgtgtgggtgcacatttgtgtgtgtgtgcctgtgtgtgtgtgcctgtgtgtgtgggtgcacatttgtgtgtgtgtgtgcctgtgtgtgtgggt

SEQ ID NO: 785582 - DNA, 120 bp, Artificial Sequence
  ENSG00000258839_26 (sequence is synthesized)
gcacatttgtgtgtgtgtgtgtgcctgtgtgtgtgttgcaggccctggatgccagacactgaataaacgcaggaagacgtctgtcttcattctcctcgtgggtcgctggtccagaaacac

SEQ ID NO: 785583 - DNA, 120 bp, Artificial Sequence
  ENSG00000258839_27 (sequence is synthesized)
tgagggcagtgcccagaattgaaggcgaagccccagaagcatgttttgcagagaagtgcccagggaagctctgagggcccatgtagcaaagatcaggggatagtcggtctgagggtgaat

SEQ ID NO: 785584 - DNA, 120 bp, Artificial Sequence
  ENSG00000258839_28 (sequence is synthesized)
gggccactcggaccaagaccccagtcttgggggagggcttagctggagcaggtcctggcacagttgactgatggtgcacagaacccgtgcatcccacggccccacggtgctgcagctgca

SEQ ID NO: 785585 - DNA, 120 bp, Artificial Sequence
  ENSG00000258839_29 (sequence is synthesized)
ggaggggcggaggctgcagccagacagcatcagaagccagcgtggttctggaaggatcgagaacaccaaggtgttagggctgcagcaggggtcctgtcccctggcacccctcaccgccct

SEQ ID NO: 785586 - DNA, 120 bp, Artificial Sequence
  ENSG00000258839_30 (sequence is synthesized)
aatcttttacccttaggaggcagcagacacgaggggctgcccgaggctctagggcggccagtgaggcaggaaacatgttccagccccagctaggtactggtccgtggacccacctcccag

SEQ ID NO: 785587 - DNA, 120 bp, Artificial Sequence
  ENSG00000258839_31 (sequence is synthesized)
aaagcccatcactgtgtaatcgtctaacctggggctcgccgaggcctatgccttgagtccacccaaataggggatgtgatgtttggagctgcagcagccgccctacggttgggagtcaga

SEQ ID NO: 785588 - DNA, 120 bp, Artificial Sequence
  ENSG00000258839_32 (sequence is synthesized)
gaagagccggtgttccagggacaatgcagcagaggctgagcccaggcctgctgtcctgagaggtggctggatcactgacactttggcagtggtgctggggtttatgtcatgacctgcagc

SEQ ID NO: 785589 - DNA, 120 bp, Artificial Sequence
  ENSG00000258839_33 (sequence is synthesized)
tgagcctacttccaatgaccgtgagatctgaaagactgttttgagggcgtagcctctgccatgattgtggggaatgctgtcctgtttcctcccttggccctgctcagcccagcgagaggc

SEQ ID NO: 785590 - DNA, 120 bp, Artificial Sequence
  ENSG00000258839_34 (sequence is synthesized)
tgaggcgcacgtggctccccgggtgcccacaggcagcgtggctcaccagccgggcccttttccactgagccagaaccccccaaagccttcaatgcaggcaccacggtgagcccacgagaa

SEQ ID NO: 785591 - DNA, 120 bp, Artificial Sequence
  ENSG00000258839_35 (sequence is synthesized)
accctgcttgccacctcccacacccccacccccaagttcaaaggaaatggtccctgaaccaagggctgagatcagctgtgggtccagctgtcctggggagctgtactggagcccaccacg

SEQ ID NO: 785592 - DNA, 120 bp, Artificial Sequence
  ENSG00000258839_36 (sequence is synthesized)
gtgggactgttggtccggcggtgacccccacctccatgtctgtggccgcagctggacaggccactccctgggccacagagatgttttacctctcgcagccctcgggcacacattgagcag

SEQ ID NO: 785593 - DNA, 120 bp, Artificial Sequence
  ENSG00000258839_37 (sequence is synthesized)
ggtgtgggtgcacgtgtgtgcacgtgtgtgggtaaacattgtgtgtgcgcatacgtgtgtgggtaaacatttgtatgtgcacgcgtgtgtgggtaaacgtgtgtgcgcacgtatgtatgt

SEQ ID NO: 785594 - DNA, 120 bp, Artificial Sequence
  ENSG00000258839_38 (sequence is synthesized)
gtgtacatttgtatgtgtgtacatttgtatgcatgtgtgcctgtgtgtgtgtgcctgtgtgtgtgggtgcacatttgtgtgtgtgtgtgtgcctgtgtgtgtgtgtgcacgtatgtatgt

SEQ ID NO: 785595 - DNA, 120 bp, Artificial Sequence
  ENSG00000258839_39 (sequence is synthesized)
gtgcacacttgtatgcatgtgtgcctgtgtgtgtgggtgcacatttgtgtgtgtgtgcctgtgtgtgtgggtgcacatttgtgtgtgtgggtgcacatttgtgtgtgtgtgcgcctgtgt

SEQ ID NO: 785596 - DNA, 120 bp, Artificial Sequence
  ENSG00000258839_40 (sequence is synthesized)
gggtgcacatttgtgtgtgtgtgtgcctgtgtgtgtgcctgtgtgtgtgggtgcctgtgtgtgtggggcacatttgtgtgtgtgtgtgcctgtgtgtgggtgcacatttgtgtgtgtgcc

SEQ ID NO: 785597 - DNA, 120 bp, Artificial Sequence
  ENSG00000258839_41 (sequence is synthesized)
tctgtgtgtgtgcctgtgtgtgggggtgcacatttgtgtgtgcgcctgtgtgtgggggtgcacatttgtgtgtgcgcctgtgtgtgtgggtgcacatttgtgtgtgtgtgcgcctgtgtg

SEQ ID NO: 785598 - DNA, 120 bp, Artificial Sequence
  ENSG00000258839_42 (sequence is synthesized)
tgtgggtgcctgtgtgtgtgtggggcacatttgtgtgtgtgtgtgtgcctgtgtgtgggtgcacatttgtgtgtgtgcctgtgtgtgtgtgcctgtgtgtgggggtgcacatttgtgtgt

SEQ ID NO: 785599 - DNA, 120 bp, Artificial Sequence
  ENSG00000258839_43 (sequence is synthesized)
gtgtgtgcctgtgtgtgggggtgcacatttgtgtgtgtgtgtgcctgtgtgtgtgggtgcacatttgtgtgtgtgtgtgcctgtgtgtgtgggtgcacatttgtgtgtgtgtgcctgtgt

SEQ ID NO: 785600 - DNA, 120 bp, Artificial Sequence
  ENSG00000258873_0 (sequence is synthesized)
atggccgaagacacctattcacacaagatggtaaaaacaaatcataggcgctgtcgcacaaaattcacagaagaacagttgaaaatcctcatcaataccttcaatcaaaagccttaccca

SEQ ID NO: 785601 - DNA, 120 bp, Artificial Sequence
  ENSG00000258873_1 (sequence is synthesized)
ggttatgctaccaaacaaaaacttgctttagaaatcaatacagaagagtccagaatccagatttggtttcagaatcgaagagctaggcacggattccagaaaagaccagaagctgagact

SEQ ID NO: 785602 - DNA, 120 bp, Artificial Sequence
  ENSG00000258873_2 (sequence is synthesized)
ttagaatcaagccagagccaggggcaagatcaacctggtgtggagtttcaaagtagagaagccagacggtgtcgtaccacctacagcgcctctcagttacacactctcatcaaggcattt

SEQ ID NO: 785603 - DNA, 120 bp, Artificial Sequence
  ENSG00000258873_3 (sequence is synthesized)
atgaaaaacccatatcctgggattgattccagagaagaacttgctaaagaaatcggtgttccagagtcaagagtccaaatttggttccaaaatcgaagatctagattacttctccagaga

SEQ ID NO: 785604 - DNA, 120 bp, Artificial Sequence
  ENSG00000258873_4 (sequence is synthesized)
ttcctgagggactgcaaggtgcagaagatacacaaaatggcaccaacttcactagtgactctcatttctctggagccagaacgtggtgaacacagtcaaattcagtgtacttgataatat

SEQ ID NO: 785605 - DNA, 120 bp, Artificial Sequence
  ENSG00000258873_5 (sequence is synthesized)
caactggaccccaaatctgtctcacggtcttcctgggagtctatccttctgctgaaactgcaagctaagccttctgaagatggtaaaggacttggccagatgtggtgggtcacacttgta

SEQ ID NO: 785606 - DNA, 120 bp, Artificial Sequence
  ENSG00000258873_6 (sequence is synthesized)
agctcaggagtttgaaaccagcctggacaacatatagcaagactctgcctctattataaaaaaacaaaataaatgaaaaggactgtaggaggcagagacgggtacagggggtaccacact

SEQ ID NO: 785607 - DNA, 120 bp, Artificial Sequence
  ENSG00000258873_7 (sequence is synthesized)
gactgtaggaggcagagacgggtacagggggtaccacactaccctgttgacacagcctagatccagagttcagaagaccttgagacaatgaaaataaacttggtaataatcttttttcaa

SEQ ID NO: 785608 - DNA, 120 bp, Artificial Sequence
  ENSG00000258890_0 (sequence is synthesized)
cttccccgcgctttggttcgtgcgtccgcgccccagtgtcgggtctgcgtggatcggtccttccaggacaccgtcgccttcccggccgcgtcggagtccggcggcgacctgcctctgaaa

SEQ ID NO: 785609 - DNA, 120 bp, Artificial Sequence
  ENSG00000258890_1 (sequence is synthesized)
catggcaggctcggatgctgagtgggtaaccattgccaataaccttctttttaagtgtcatatacatctgagaatacatgaacttcaagactgtgatgctaatgtttttattgctcttta

SEQ ID NO: 785610 - DNA, 120 bp, Artificial Sequence
  ENSG00000258890_2 (sequence is synthesized)
tcagtctattttgggagaaaaggtaccagacctcatagttattcctaggagtcaagaagatgatgcacacaatgtacaagcagtaattgattcactggccttggactacttgcaggtcag

SEQ ID NO: 785611 - DNA, 120 bp, Artificial Sequence
  ENSG00000258890_3 (sequence is synthesized)
cttgtctcacataacaggagaaaatatagtgaaaggagataaagaatctattaagaatctcctggaaatatttgatggtttgttggagtatcttacagaacgcatcagtgaaacatctca

SEQ ID NO: 785612 - DNA, 120 bp, Artificial Sequence
  ENSG00000258890_4 (sequence is synthesized)
tgagaaaagtgaaactgaacagtattttaaagaatctgatcgaggagaacgtttggaagagccagaaagtactaaagaatctaaatcatcatggaaaagagtttcttttgggaggtgctc

SEQ ID NO: 785613 - DNA, 120 bp, Artificial Sequence
  ENSG00000258890_5 (sequence is synthesized)
cttgtcttctgagatgttgggcccctcttgggatggagatgaagcagaatccactggtgaaatcattagacttggagacacagcacacaccttttctctaagaagtaatggtgctcaatg

SEQ ID NO: 785614 - DNA, 120 bp, Artificial Sequence
  ENSG00000258890_6 (sequence is synthesized)
tcctaatgaaatgctgtctaaaaaagccttagcctcaccaagttctaaatcacatgaagatatgttgtaccctcctagtgttttgtccaagagtaggacatcctttgttgaagacacgga

SEQ ID NO: 785615 - DNA, 120 bp, Artificial Sequence
  ENSG00000258890_7 (sequence is synthesized)
aaccctttctgtgagtgggattccaaatgctaggaagctaggggagcctatccgagcagctattcctttacatccaccctaccacccttcagagcctcgagcaccctgccccataggaaa

SEQ ID NO: 785616 - DNA, 120 bp, Artificial Sequence
  ENSG00000258890_8 (sequence is synthesized)
agaatacttgcattcaagtcactgctccccagccgtaaattctactggagagcatacggaattttctggggatctagatgatggacttttcttaatttccaagttgcctaaaggcagcaa

SEQ ID NO: 785617 - DNA, 120 bp, Artificial Sequence
  ENSG00000258890_9 (sequence is synthesized)
atgggaagtatatccagctcaggtccaagggcctaggacaaggaagcctcccaaaggaaaaagaaatgaaaacagagctacagcctcatcctgcaattcacctttcccccagaggccaag

SEQ ID NO: 785618 - DNA, 120 bp, Artificial Sequence
  ENSG00000258890_10 (sequence is synthesized)
aaagagattaacagaacaagaattacatgatgtatcagaaaaactctctcagcggctttctgaactagattggatgttaaaaagtgctctgggtgatcggattaaagaaaagactgacca

SEQ ID NO: 785619 - DNA, 120 bp, Artificial Sequence
  ENSG00000258890_11 (sequence is synthesized)
catgcgtagaaagccaccctacagatcccattcgctctctccatctccagttaacaaacacaaacagttccacttggagagaaaaaggcagcgcaagccaagagaaacagatgtccgcca

SEQ ID NO: 785620 - DNA, 120 bp, Artificial Sequence
  ENSG00000258890_12 (sequence is synthesized)
attccaagcacaggcgtttactgaagcatttgaaagggaactaagaagacataaagttcaagagaatattggacctctaagaatacatgagaaggaggaggaaacagaaaaaatatacag

SEQ ID NO: 785621 - DNA, 120 bp, Artificial Sequence
  ENSG00000258890_13 (sequence is synthesized)
aggagaagctgttcgtaaaggaactccagaatgtagtcagccctggaagatttactctagaaaaaccacaacgcagagtctaagaggtggcctcccaaagccaaataaagcagttccaat

SEQ ID NO: 785622 - DNA, 120 bp, Artificial Sequence
  ENSG00000258890_14 (sequence is synthesized)
gaaagtaagtgaacacagtctcctgccccttatgctggagcagtttccgtttctttatgtttctggcccaacactaagcaaaatgtggaaacagcaaattgcacaggttgaacagcttaa

SEQ ID NO: 785623 - DNA, 120 bp, Artificial Sequence
  ENSG00000258890_15 (sequence is synthesized)
gaaagaagcatgtagagaaaatcgatcaaagaagaaactccaagatgaaatagaagaagccctaagaaggcatgacctccttactacccttgtcaagaaagaatatgaacataacaagag

SEQ ID NO: 785624 - DNA, 120 bp, Artificial Sequence
  ENSG00000258890_16 (sequence is synthesized)
actgcaagacttcaaggactgcattcgtaggcaaaggttgacccaatcaaagataaaagaaaatcgacagcaaatcgttcgtgctcgaaaatattatgatgattatagagttcagttgtg

SEQ ID NO: 785625 - DNA, 120 bp, Artificial Sequence
  ENSG00000258890_17 (sequence is synthesized)
tgcaaaaatgatgagaatgaggacccgggaagaaatgatatttaagaaactgtttgaagaaggtttaaacattcaaaagcaaagattacgagacctaagaaactatgccaaagaaaagcg

SEQ ID NO: 785626 - DNA, 120 bp, Artificial Sequence
  ENSG00000258890_18 (sequence is synthesized)
agatgaacaaaggagacgccaccaggatgaactggactccatggagaactactataaggaccagttttcattgctggcagaagccatatcacaggaacatcaagaacttaaagccagaga

SEQ ID NO: 785627 - DNA, 120 bp, Artificial Sequence
  ENSG00000258890_19 (sequence is synthesized)
gaaatctcaggcccagacattacataaggtgaagagggagctgagatctaagatggagaaggaaattcagcagctgcaggacatgataacacagaatgatgatgatgttttcttccggga

SEQ ID NO: 785628 - DNA, 120 bp, Artificial Sequence
  ENSG00000258890_20 (sequence is synthesized)
actggaagctgagcgcttcagatctcggcttcagctggcttcctttcagtacagtaaaagtccctccctatgaggccagacttgataatagtaggtgaaggttctggaggcctttaccag

SEQ ID NO: 785629 - DNA, 120 bp, Artificial Sequence
  ENSG00000258890_21 (sequence is synthesized)
gacagagctagaatcgagccagtaaacagtctaagccagaaaaataattttcaaatgctttacctgtattttcattccagtactttttatgattttttaaataaaaattgttttctaaaa

SEQ ID NO: 785630 - DNA, 120 bp, Artificial Sequence
  ENSG00000258890_22 (sequence is synthesized)
atatacagaggagaagcttcgtaaaggaactccagaatgtagtcagccctggaagatttactctagaaaaaccacaacgcagagtcagaggtggcctcccaaagccaaataaagcagttc

SEQ ID NO: 785631 - DNA, 120 bp, Artificial Sequence
  ENSG00000258890_23 (sequence is synthesized)
aagcagattcactaatacagtatacctgataaccgtagttgtaaatttcaaattcttattgttccagctggttggaaactgtcttagactgtcatcatgttctttatcaacttggatgtt

SEQ ID NO: 785632 - DNA, 120 bp, Artificial Sequence
  ENSG00000258890_24 (sequence is synthesized)
gctcataaattacttcaaaactaatttatactagaaagataaatttctggctaaattatttattgtcctatgattgcataaaatttctttctccaaaatttcgtgtgtcagaactgctat

SEQ ID NO: 785633 - DNA, 120 bp, Artificial Sequence
  ENSG00000258890_25 (sequence is synthesized)
ttatggtaaatatttggatgttactgaggcatcaacaggaagaattggtgcatttgtgtctttagcctgcacttacatttgtgacagcctaaatatttcagatatttgtcattgcaaaaa

SEQ ID NO: 785634 - DNA, 120 bp, Artificial Sequence
  ENSG00000258890_26 (sequence is synthesized)
ctgggacctgagctagcattatcatttaccactgaagaaggaggggttcgaaggaagaccatgggttcagtgctgggttcttcctctcactatatgatggcagctctctaagcctgtttt

SEQ ID NO: 785635 - DNA, 120 bp, Artificial Sequence
  ENSG00000258890_27 (sequence is synthesized)
ctcatctgaaattctttcatggttgttgtgaaagttaagtaagtagatgtgtgtaaacagttgggcacacagcctagctcagagtaaatgcataataaatgttaattgatgttattgaaa

SEQ ID NO: 785636 - DNA, 120 bp, Artificial Sequence
  ENSG00000258890_28 (sequence is synthesized)
gtgctccttgtcttctgagatgttgggcccctcttgggatggagatgaagcagaatccactggtgaaatcattagacttggagacacagcacacaccttttctctaagaagtaatggtct

SEQ ID NO: 785637 - DNA, 120 bp, Artificial Sequence
  ENSG00000258890_29 (sequence is synthesized)
aattattataagtacatttagaattgttcttttcaggatcaaaaccacatcacttacataagctttgatctaccagggatgttggatgacagttcttgtccacgtctcagattaagaaca

SEQ ID NO: 785638 - DNA, 120 bp, Artificial Sequence
  ENSG00000258890_30 (sequence is synthesized)
tgcctgagtgtggagtagagataagccatgagaactgtaatactgaacagttccaggaagacatctcaggaactgcagatggtactttcctgtggagggaaaaaacactagtatctgaaa

SEQ ID NO: 785639 - DNA, 120 bp, Artificial Sequence
  ENSG00000258890_31 (sequence is synthesized)
cacctacataagaggctttatgtacatgaccccattttattttcactcctttgtcagatactgtctaatttccttagtttttgcctaaatgctcctggcagctcaggctctgcttgaaag

SEQ ID NO: 785640 - DNA, 120 bp, Artificial Sequence
  ENSG00000258890_32 (sequence is synthesized)
tctgggtgtgccattttcctactccttgtgaggtggcatctgggccagccttgttagcagcttcctggtggcatggggagtgagccctcagttccacaggagtgcccaggatcactgctg

SEQ ID NO: 785641 - DNA, 120 bp, Artificial Sequence
  ENSG00000258890_33 (sequence is synthesized)
ccctctgctgcagtggggtgttattggagctgctcttcagattgaggtgataaagctgccaaaggctgaagggcttctggggccactggccccccacacgtgacatactgcctgaagaca

SEQ ID NO: 785642 - DNA, 120 bp, Artificial Sequence
  ENSG00000258890_34 (sequence is synthesized)
tggtaagtctgacttttctgtccagccctgttaagaaggtgaactttgttatctttcaggaccaccttctttgttcgtgactcttgtccaaatttgaatccaaaatctaaactgaagtcc

SEQ ID NO: 785643 - DNA, 120 bp, Artificial Sequence
  ENSG00000258890_35 (sequence is synthesized)
tatagtgctggccctgagttctgcttggccacacttcattttcttactccattgtgcattcccgtccattctcagtctccgtgtccctcatcttaatgtgaagtcttacttcctccctgc

SEQ ID NO: 785644 - DNA, 120 bp, Artificial Sequence
  ENSG00000258890_36 (sequence is synthesized)
ctcctacacataacaggtacttctccagtaaaactactttagaggtttgggaacatgtgagagacaaatttagtgtgataacatgaccttgcattccacataaaatcaggactagtgtcc

SEQ ID NO: 785645 - DNA, 120 bp, Artificial Sequence
  ENSG00000258890_37 (sequence is synthesized)
agctgtgctgtgaggggttttccacaaggatgacatttgctatgtcatcctaatcaggctgtgaaatgattaaccttttgagatcccaagctagcaataaatttcatctgtaaaatattt

SEQ ID NO: 785646 - DNA, 120 bp, Artificial Sequence
  ENSG00000258890_38 (sequence is synthesized)
tagtaattatagtttactaaagacttggacatatttctagaggaaggctttgaggagagcgtaagtaacttgtctgtagctcatgaatgcgtcgccgtcagaaccagtttttctatccag

SEQ ID NO: 785647 - DNA, 120 bp, Artificial Sequence
  ENSG00000258890_39 (sequence is synthesized)
aatttacactgatgaagggaggacaagtgcgcatatccaagccctttgagcagtgtgttttccggtggcctccccaaatgatcactccccctcctcagtgatgtacatgtgtaggtgtgg

SEQ ID NO: 785648 - DNA, 120 bp, Artificial Sequence
  ENSG00000258890_40 (sequence is synthesized)
catgtttctgctcttggcgttcttaccctatgtacatggctgcttgacactgcttttctgaaggttgtaaagaacctctgtgatacatgaaaagataatgaacaccttcgtcattaggga

SEQ ID NO: 785649 - DNA, 120 bp, Artificial Sequence
  ENSG00000258890_41 (sequence is synthesized)
aatacgactcagaaccacagttagaggacgagtgttggcaaggatgtggagaacttggggctgtaaaatggtgcagctgctttggaaaacaatctagcagttcctcagaaggttaccaaa

SEQ ID NO: 785650 - DNA, 120 bp, Artificial Sequence
  ENSG00000258890_42 (sequence is synthesized)
aggtcatatagagttaccctatgacccagcaatttcactcctagctatataatcacacaaaaaacacaaatgttcatagcattacttataatagcctaaaaggggaaacaacccaaagtg

SEQ ID NO: 785651 - DNA, 120 bp, Artificial Sequence
  ENSG00000258890_43 (sequence is synthesized)
tacagtaggatgttacttggcaataaaaaggaatgaagtattcatacatactgcagtatagatgaaccttgaaaacatgcggagtgaaagaaaccaaatacgaaaggccacgaattacat

SEQ ID NO: 785652 - DNA, 120 bp, Artificial Sequence
  ENSG00000258890_44 (sequence is synthesized)
gattccatttttaggaagtgtccagaatatgcaaatccatggagacagaaagtacagactggtgactgctaaggatgggacagggggaatgagcactagtcagtatacggtttctttttg

SEQ ID NO: 785653 - DNA, 120 bp, Artificial Sequence
  ENSG00000258890_45 (sequence is synthesized)
tttggggtggtaaaaatgttctgtagtggtgatggttgcacaactgagtataataaaacatactgaattatttattttaaaagggtaaggctggactcagtggctcacgcctgtaatccc

SEQ ID NO: 785654 - DNA, 80 bp, Artificial Sequence
  ENSG00000258890_46 (sequence is synthesized)
gaccagcctgggcaacatagtgagacgtcatctctccaaaaaattaaaaatttgggtagccaaggtgggagaattgcttg

SEQ ID NO: 785655 - DNA, 89 bp, Artificial Sequence
  ENSG00000258890_47 (sequence is synthesized)
aggtcaaggctgcagtgagttgtgactgcctaacctgtctcagaaaaaggaggtacattttatggtatgtcaaaacatctgaataaaac

SEQ ID NO: 785656 - DNA, 120 bp, Artificial Sequence
  ENSG00000258890_48 (sequence is synthesized)
gaggtacattttatggtatgtcaaaacatctgaataaaactagtatttaaaaaaaaaaaaccttgggaaatacaatcagtatatacctctagttggccaaaatgatattcctcaatgact

SEQ ID NO: 785657 - DNA, 120 bp, Artificial Sequence
  ENSG00000258890_49 (sequence is synthesized)
ccaggtaataattaagatagaagccaagtcatgcactgcatggcaatgtttctttcagcaagggacctcgtacattggtggttggagcaataggctgtatcatatagccccggtgtgcag

SEQ ID NO: 785658 - DNA, 120 bp, Artificial Sequence
  ENSG00000258890_50 (sequence is synthesized)
tggactgtactctctaggtttgtgtaagtacactgacattttgcacaacaacaaaatcatttaatgatgcatttcttggaacatatctccatcattaagtgacacatgactaatttacat

SEQ ID NO: 785659 - DNA, 120 bp, Artificial Sequence
  ENSG00000258890_51 (sequence is synthesized)
ttttaggaagtagaaaaccaaatgtattatacctgtaaagggaatggagagaagactaataaggcaatccatctatgacccaagacatttttatcctatgattttaactttagttaggtc

SEQ ID NO: 785660 - DNA, 120 bp, Artificial Sequence
  ENSG00000258890_52 (sequence is synthesized)
tctgtaagagctgctgttgctagattattgaaaattttggaggagtttgattagctggaagatggagagggaacaatagatgagggcctggataaatgctgtgaacagcgggatgacatg

SEQ ID NO: 785661 - DNA, 120 bp, Artificial Sequence
  ENSG00000258890_53 (sequence is synthesized)
cggagaaaacgggcaccttccctgctctgcgaggagacagaaagctgagctctgcaacatgacagaggcatcaactcaggatggcatgtgttcttgaacttttcattttgtgactcatgt

SEQ ID NO: 785662 - DNA, 120 bp, Artificial Sequence
  ENSG00000258890_54 (sequence is synthesized)
tgtcaccctccatagagccaaccataaatgttttcaaaacgattcattacaaactcaatattctttaaaaacgttgatgctgtgacagtgcaaacagcattgattttattgctcgacttc

SEQ ID NO: 785663 - DNA, 120 bp, Artificial Sequence
  ENSG00000258890_55 (sequence is synthesized)
ggcatgggcacatacatagttaatttttaaaaaccatttatacagatgttactgataaagctcatgtaacaaatgaatgaaaatacaaagaatatcaaagctaaaacactctgtaataaa

SEQ ID NO: 785664 - DNA, 120 bp, Artificial Sequence
  ENSG00000258890_56 (sequence is synthesized)
cacagcactgaaagctaacatccaccagttagccgaagaaagttttttttttttcccaatcactgccatgtggctggttttccgtagagggctaaaactcttcaataaggaagtacttca

SEQ ID NO: 785665 - DNA, 120 bp, Artificial Sequence
  ENSG00000258890_57 (sequence is synthesized)
actctacagattagaggaccccatttcaagattgaaatttaagatcaaataatacctgaccatagtacagtatatttccctatttccattaaaatgattttaagcctgtgaacattaaga

SEQ ID NO: 785666 - DNA, 120 bp, Artificial Sequence
  ENSG00000258890_58 (sequence is synthesized)
gtctgcctactcctacgaatttacattctgctgaaatcagtgaaagatgttgaaaagaattttctcaatagatgttaaaaagtgctctgggtgatcggattaaagaaaagactgaccata

SEQ ID NO: 785667 - DNA, 120 bp, Artificial Sequence
  ENSG00000258947_0 (sequence is synthesized)
ctcagcagccagcccggcccgcccgcgcccgtccgcagccgcccgccagacgcgcccagtatgagggagatcgtgcacatccaggccggccagtgcggcaaccagatcggggccaagttc

SEQ ID NO: 785668 - DNA, 120 bp, Artificial Sequence
  ENSG00000258947_1 (sequence is synthesized)
tgggaagtcatcagtgatgagcatggcatcgaccccagcggcaactacgtgggcgactcggacttgcagctggagcggatcagcgtctactacaacgaggcctcttctcacaagtacgtg

SEQ ID NO: 785669 - DNA, 120 bp, Artificial Sequence
  ENSG00000258947_2 (sequence is synthesized)
cctcgagccattctggtggacctggaacccggaaccatggacagtgtccgctcaggggcctttggacatctcttcaggcctgacaatttcatctttggtcagagtggggccggcaacaac

SEQ ID NO: 785670 - DNA, 120 bp, Artificial Sequence
  ENSG00000258947_3 (sequence is synthesized)
tgggccaagggtcactacacggagggggcggagctggtggattcggtcctggatgtggtgcggaaggagtgtgaaaactgcgactgcctgcagggcttccagctgacccactcgctgggg

SEQ ID NO: 785671 - DNA, 120 bp, Artificial Sequence
  ENSG00000258947_4 (sequence is synthesized)
ggcggcacgggctccggcatgggcacgttgctcatcagcaaggtgcgtgaggagtatcccgaccgcatcatgaacaccttcagcgtcgtgccctcacccaaggtgtcagacacggtggtg

SEQ ID NO: 785672 - DNA, 120 bp, Artificial Sequence
  ENSG00000258947_5 (sequence is synthesized)
gagccctacaacgccacgctgtccatccaccagctggtggagaacacggatgagacctactgcatcgacaacgaggcgctctacgacatctgcttccgcaccctcaagctggccacgccc

SEQ ID NO: 785673 - DNA, 120 bp, Artificial Sequence
  ENSG00000258947_6 (sequence is synthesized)
acctacggggacctcaaccacctggtatcggccaccatgagcggagtcaccacctccttgcgcttcccgggccagctcaacgctgacctgcgcaagctggccgtcaacatggtgcccttc

SEQ ID NO: 785674 - DNA, 120 bp, Artificial Sequence
  ENSG00000258947_7 (sequence is synthesized)
cttcgcccccctcacagcccggggcagccagcagtaccgggccctgaccgtgcccgagctcacccagcagatgttcgatgccaagaacatgatggccgcctgcgacccgcgccacggccg

SEQ ID NO: 785675 - DNA, 120 bp, Artificial Sequence
  ENSG00000258947_8 (sequence is synthesized)
ctacctgacggtggccaccgtgttccggggccgcatgtccatgaaggaggtggacgagcagatgctggccatccagagcaagaacagcagctacttcgtggagtggatccccaacaacgt

SEQ ID NO: 785676 - DNA, 120 bp, Artificial Sequence
  ENSG00000258947_9 (sequence is synthesized)
gaaggtggccgtgtgtgacatcccgccccgcggcctcaagatgtcctccaccttcatcgggaacagcacggccatccaggagctgttcaagcgcatctccgagcagttcacggccatgtt

SEQ ID NO: 785677 - DNA, 120 bp, Artificial Sequence
  ENSG00000258947_10 (sequence is synthesized)
ccggcgcaaggccttcctgcactggtacacgggcgagggcatggacgagatggagttcaccgaggccgagagcaacatgaacgacctggtgtccgagtaccagcagtaccaggacgccac

SEQ ID NO: 785678 - DNA, 120 bp, Artificial Sequence
  ENSG00000258947_11 (sequence is synthesized)
ggccgaggaagagggcgagatgtacgaagacgacgaggaggagtcggaggcccagggccccaagtgaagctgctcgcagctggagtgagaggcaggtggcggccggggccgaagccagca

SEQ ID NO: 785679 - DNA, 120 bp, Artificial Sequence
  ENSG00000258947_12 (sequence is synthesized)
gtgtctaaacccccggagccatcttgctgccgacaccctgctttcccctcgccctagggctcccttgccgccctcctgcagtatttatggcctcgtcctccccacctaggccacgtgtga

SEQ ID NO: 785680 - DNA, 120 bp, Artificial Sequence
  ENSG00000258947_13 (sequence is synthesized)
gctgctcctgtctctgtcttattgcagctccaggcctgacgttttacggttttgttttttactggtttgtgtttatattttcggggatacttaataaatctattgctgtcagataccctt

SEQ ID NO: 785681 - DNA, 120 bp, Artificial Sequence
  ENSG00000258947_14 (sequence is synthesized)
acggggacggctgtgagaaacaaggaatggtcagctcctcacatgatcctgaatggtgggaactcatctctccattttacagctgggcattggaggcccagagaaagggttctgtgggga

SEQ ID NO: 785682 - DNA, 120 bp, Artificial Sequence
  ENSG00000258947_15 (sequence is synthesized)
gaacagaaaccactcatgcatttcaagtggaatgaagtgtaaagcagacagaagcttacagaattgctagagagctggtgagacagaacggggcctccagaggactccggggtccaggag

SEQ ID NO: 785683 - DNA, 120 bp, Artificial Sequence
  ENSG00000258947_16 (sequence is synthesized)
cacgaggccttgctgcggtcaagagatcaggacgttcccatgcctgtgtcctggggttgggccgtggatgccacgttcccatgtctgtgtcctggggcggggccgtggatgccacgttcc

SEQ ID NO: 785684 - DNA, 120 bp, Artificial Sequence
  ENSG00000258947_17 (sequence is synthesized)
gcaggagggctgatccattcacccaggatcccctcaggaggcagagcctcgctctgctgtgaccccaagttctcaagactctgtccagagccctcgtcctgagcactcagcagcatcggc

SEQ ID NO: 785685 - DNA, 120 bp, Artificial Sequence
  ENSG00000258947_18 (sequence is synthesized)
agaactgggagctgcttcctggcagggcccgcctctgctgggagaccggacggtgagtcagccttaagcccggcaccagacccctctgaggatggagcaggagctggctgccctgaggct

SEQ ID NO: 785686 - DNA, 120 bp, Artificial Sequence
  ENSG00000258947_19 (sequence is synthesized)
gcaaaacttcttccctcgtggagacagggaggcacctcagacactcaccccggactcccttgaacagggacagggaggaaccccaggcagctagaccccagcagcagccacacgagcaca

SEQ ID NO: 785687 - DNA, 120 bp, Artificial Sequence
  ENSG00000258947_20 (sequence is synthesized)
ctgtggggcagggaggggcatctcttgagaacaaaagatccatttctcgactttccaaactggagagcttcttgagagaaaagagagagacaggtacaggtccacgccacccacacacag

SEQ ID NO: 785688 - DNA, 120 bp, Artificial Sequence
  ENSG00000258947_21 (sequence is synthesized)
agcagccagcccggcccgcccgcgcccgtccgcagccgcccgccagacgcgcccagtatgagggagatcgtgcacatccaggccggccagtgcggcaaccagatcggggccaagatgagg

SEQ ID NO: 785689 - DNA, 120 bp, Artificial Sequence
  ENSG00000258947_22 (sequence is synthesized)
acactgagacacggaatcctagtgacctgtgcaaggtcacacagctgggaagggtgagggaagcgtctgtgaacccagcaggcccagcccctgagtctaggctccgctcggcagctgtca

SEQ ID NO: 785690 - DNA, 120 bp, Artificial Sequence
  ENSG00000258947_23 (sequence is synthesized)
aggtagagagaggacgacccctgggagctgagacgatgccagcctcacacggacaggctgggtgacctcaggcaagtcgcttcccatttgggaccccaaggacccttctgcagacccagc

SEQ ID NO: 785691 - DNA, 120 bp, Artificial Sequence
  ENSG00000258947_24 (sequence is synthesized)
tgggggtccccgatgagactggctctcagagtccctgtgagtcccgtcagctgaggccagtaatgtcctggcaccatcactggacatggtttgctctcccatggaggggcaggtgtagca

SEQ ID NO: 785692 - DNA, 120 bp, Artificial Sequence
  ENSG00000258947_25 (sequence is synthesized)
tggtccacatctgctttgacagcaaatctggccagctgcaccttcagaacacgcccacagcccagcacccctcatgtctgctgctgcctcgggtcttcctcgtcccgtccgtgcgattgt

SEQ ID NO: 785693 - DNA, 120 bp, Artificial Sequence
  ENSG00000258947_26 (sequence is synthesized)
ctcctcactgggctcccacagctgcctggccgctcctcacatgcaatttggcatctgctcccgtgccacgctgtccttcatatcctcttgttatatatgccccgtccacaccacgtccct

SEQ ID NO: 785694 - DNA, 120 bp, Artificial Sequence
  ENSG00000258947_27 (sequence is synthesized)
gcggggccgtggatgccacgttcccacgtctgtgtcctggggcggggccgtggatgccacgttcccacgcctgtgtcctggggcggggccgtggatgccacgttcccacgcctgtgtcct

SEQ ID NO: 785695 - DNA, 120 bp, Artificial Sequence
  ENSG00000258947_28 (sequence is synthesized)
tgccttggcctcccaaagtgttgggagtgcagacacgagcccctgcatctggtggacgtctgactgaatcctgcctgtcctgctccgtcctgtcctgctccgtccttaaacacagtgagg

SEQ ID NO: 785696 - DNA, 120 bp, Artificial Sequence
  ENSG00000258947_29 (sequence is synthesized)
catctctgtcctcccatgggttaggttggctgagatgccagcaggcgtaactggatgtcaggcatccagacgcacagaacagacaataaatcacagtcacaaaagtgagagccaaacata

SEQ ID NO: 785697 - DNA, 120 bp, Artificial Sequence
  ENSG00000258947_30 (sequence is synthesized)
ttagtgccatgagggcctgtgcgtgtccaggggcacagacagggatggggcaggccagagactttggaggccataagagggcctagagaaggggtcacctggagggcttagtcaggggct

SEQ ID NO: 785698 - DNA, 120 bp, Artificial Sequence
  ENSG00000258947_31 (sequence is synthesized)
ggcggggccgtggatgccacgttcccatgcctgtgtcctggggcggggccgtggatgccacgttcccatgtctgtgtcctggggcggggccgtggacgcgccacagaaacaggagggcct

SEQ ID NO: 785699 - DNA, 120 bp, Artificial Sequence
  ENSG00000258986_0 (sequence is synthesized)
cttcccgccgccgctctcgcccgggccggccatggcgctcaacaatttccttttcgctcagtgcgcctgctacttcttggccttcctgttcagcttcgtggtggtggtcccgctgtccga

SEQ ID NO: 785700 - DNA, 120 bp, Artificial Sequence
  ENSG00000258986_1 (sequence is synthesized)
gaacggccacgacttccgcggccgctgcctgctcttcaccgagggcatgtggctgagcgccaacctcacggtgcaggagcgcgagcgcttcacggtgcaggagtggggcccgccggccgc

SEQ ID NO: 785701 - DNA, 120 bp, Artificial Sequence
  ENSG00000258986_2 (sequence is synthesized)
ctgccgcttcagcctgctcgccagcctcctgtctctgctgctggccgccgcgcacgcctggcgcacgctcttcttcctctgcaagggacacgagggctccttcttctccgccttcctgaa

SEQ ID NO: 785702 - DNA, 120 bp, Artificial Sequence
  ENSG00000258986_3 (sequence is synthesized)
cctcctggtcagcgccttcgtggtcttcctggtcttcattgccagcaccatcgtgagcgtgggcttcaccatgtggtgcgacaccatcaccgagaagggcaccgtaccccacagctgtga

SEQ ID NO: 785703 - DNA, 120 bp, Artificial Sequence
  ENSG00000258986_4 (sequence is synthesized)
agagctccaggacatcgacttggagctgggcgtggacaactccgccttctacgatcagtttgcaattgcccagtttggcctctgggcctcatggctggcctggctggccatcaccacgct

SEQ ID NO: 785704 - DNA, 120 bp, Artificial Sequence
  ENSG00000258986_5 (sequence is synthesized)
ggccttcctgaaggtctaccacaactaccgtcaggaggacctgctggacagcctgatccacgagaaggagctgctgctggcccggccgtccccacgcacctccttccaagaggagaagag

SEQ ID NO: 785705 - DNA, 120 bp, Artificial Sequence
  ENSG00000258986_6 (sequence is synthesized)
cgctgtcatttaggcacagtgcaggcagggggagctggccccgacctccctgctgcgctcgggggcacgggcctgcctggggaagcagctggggggctctgcctgggccctggccacatg

SEQ ID NO: 785706 - DNA, 120 bp, Artificial Sequence
  ENSG00000258986_7 (sequence is synthesized)
cagccctgcgtgtgtcccctcgacgccacgtgtagtgaggtgagcgccccagtgcccacctgtgagcctggcagtggactgggtgggtgccggctccctgatgaggatggtgcagagaga

SEQ ID NO: 785707 - DNA, 120 bp, Artificial Sequence
  ENSG00000258986_8 (sequence is synthesized)
ctatgggtgtggggcgggggcggggggcacctccaggcctcgcacagggccccttggctgtcccagtaggacctgactggccagcctatgtggagggcgtccagcttgtctcccccaacc

SEQ ID NO: 785708 - DNA, 120 bp, Artificial Sequence
  ENSG00000258986_9 (sequence is synthesized)
ctggccggatgctgtctccatgccagctggcccaggggtggccagatgtcacttagccctgaacgaattctgcatgaattctgccatccaggcagaggctgcgtgtggggaggagctcac

SEQ ID NO: 785709 - DNA, 120 bp, Artificial Sequence
  ENSG00000258986_10 (sequence is synthesized)
ggcaccttccagcctctggccccaggttggccccctccccagctgagtccccctcctgggtgggtgccataggcctgggagaccctgtggccgggctcagggaggcttctgaggcctgtg

SEQ ID NO: 785710 - DNA, 120 bp, Artificial Sequence
  ENSG00000258986_11 (sequence is synthesized)
agttcacctcactgtgtgtgggtcctgtctgtgcttggctgagggtcagggaagtggtaatctgggctccacagaatcgggggcatcatctggttggggatttcgggggcacacgtacca

SEQ ID NO: 785711 - DNA, 120 bp, Artificial Sequence
  ENSG00000258986_12 (sequence is synthesized)
catagaggactgggccaggagccatggcaggggtctgtgtgtgggtgagtatgggaggatgtgattgtgagtgcctttgtgcatgggagggtgtgattgtgtatatgagtgcatgagagg

SEQ ID NO: 785712 - DNA, 120 bp, Artificial Sequence
  ENSG00000258986_13 (sequence is synthesized)
gcatgggaggatatgagtgtgcatgagtgtgcatgtgagggtgtgactgagtgcatgagagtgtgactgcctgtgagtgaatgtgtgactgcatgtgcgagtgactgcctgggaggatgt

SEQ ID NO: 785713 - DNA, 120 bp, Artificial Sequence
  ENSG00000258986_14 (sequence is synthesized)
gattgtgcatgagtgtgcatgtgggtgtgactgcatgtgagggtgtgactgttgtgcgtgtgaaggcttgattgtgagtgtgcctgggaggatgtgagtgtgagggtgtgactccctgtg

SEQ ID NO: 785714 - DNA, 120 bp, Artificial Sequence
  ENSG00000258986_15 (sequence is synthesized)
acatgagtgtgcatgcatgtgagtgtgaggaagagtgtgtaggtgtgagtgtctaggcaggtgtgtctgcagtgtgtgcagcatgtgcgtaagtgcatgtgaatgtgcgtgtgttgcatg

SEQ ID NO: 785715 - DNA, 120 bp, Artificial Sequence
  ENSG00000258986_16 (sequence is synthesized)
tgagcatgtgcacgcctgtgcgtgtgagcattgtgtgcgtgatgggagccgtgggtgctgtgtggacagcccctctgcccctcccatgggctcccacgcccagcatccacctgagagagg

SEQ ID NO: 785716 - DNA, 120 bp, Artificial Sequence
  ENSG00000258986_17 (sequence is synthesized)
agggagctgccttcccattctgcagagtctgtgtgctgaggccccgcagaagcaagtggaggagctgggatgtgaacctgggaccccggcgtagggggctgcttggctgtggaccctgcc

SEQ ID NO: 785717 - DNA, 120 bp, Artificial Sequence
  ENSG00000258986_18 (sequence is synthesized)
cctcaggaaagcccagggtccacctccagaggactcgttctggggcgggggcggaggcggggggcctccccacccggggctcgatgaggggctgtccgtttcttggctcgagtgctgcca

SEQ ID NO: 785718 - DNA, 120 bp, Artificial Sequence
  ENSG00000258986_19 (sequence is synthesized)
agtgctccctgctgctgcgcccaccttcccggggagaggcgagcccctggctccctgagttcatgacccaccctgtccaccatcagcagctggcttgtgtctctgggtggctgggcacca

SEQ ID NO: 785719 - DNA, 120 bp, Artificial Sequence
  ENSG00000258986_20 (sequence is synthesized)
gcctcctggaggccacgtgcctgggtccacatggagggtcctggtgggggcatcatcctgggtcccgggagtgaggctggcaggtgcccatcgggggtgtcaagtccagggggatcgagg

SEQ ID NO: 785720 - DNA, 120 bp, Artificial Sequence
  ENSG00000258986_21 (sequence is synthesized)
ctctggaagctcaagggggctctggccttggggaccagctgagtttccagctggcagccaggtcctcgagggaaggggtttggacagaatccgaggccccctaagctgatggggtcccct

SEQ ID NO: 785721 - DNA, 120 bp, Artificial Sequence
  ENSG00000258986_22 (sequence is synthesized)
gtctccccttccagccctgacccactggacatggggactctttccagtccggagagctccttgtctgtgtccccagcagaaggtggggtggctcctgcctcaccctctgcccagccctga

SEQ ID NO: 785722 - DNA, 120 bp, Artificial Sequence
  ENSG00000258986_23 (sequence is synthesized)
tccaggccacagccatctagggccctgaaggaggggcaggaggcaggggtggcttctggaacctgaggcttggccccggttgggtctgttcttgggggctgcactgctggatcccaggag

SEQ ID NO: 785723 - DNA, 120 bp, Artificial Sequence
  ENSG00000258986_24 (sequence is synthesized)
caggtgtggaacagccccatggccagggtgatggaaatcctcggctgcatgcagacatagacccaccctggactgggctgtctccggagcccagacacatcgccctgggaaggggcagct

SEQ ID NO: 785724 - DNA, 120 bp, Artificial Sequence
  ENSG00000258986_25 (sequence is synthesized)
gggcctgcagtgtgctgggcaggggctggcggccctggtcgtgggctctccagggtccctcaggggattgggcctctccccaggcaggaaggtgggaagtgcaggcatgacccggggttc

SEQ ID NO: 785725 - DNA, 120 bp, Artificial Sequence
  ENSG00000258986_26 (sequence is synthesized)
ctgaggctggtccaccaagttgcttctgagacgccttcgcttctgtcctggctggctgttaatgatatccctgttctaattccactctggctaaactgaaagtaaagatccttaagctta

SEQ ID NO: 785726 - DNA, 120 bp, Artificial Sequence
  ENSG00000258986_27 (sequence is synthesized)
aataaaacaaaaatattttttaatgcttgcaacaaaaatgctgatggaattttaaaccaggaggagcaatgttaaggcttcctcactctgggaattggactaaaggtgacttagtcttaa

SEQ ID NO: 785727 - DNA, 120 bp, Artificial Sequence
  ENSG00000258986_28 (sequence is synthesized)
aggcaactagaaaaggcattaattctattaattaatgcctcagcgatttccatctcagcaaagatgtcttaatgaggcgctcgggacacccattatttatcttacaaatgcagctccagg

SEQ ID NO: 785728 - DNA, 120 bp, Artificial Sequence
  ENSG00000258986_29 (sequence is synthesized)
gtcctgcccatgtcaggcagtgtaacacacgtccccgcggagggctggcgctgcagaagctcccggtccaccccctcctgcccacacctggcctcaccctccccatctcttcgaggatga

SEQ ID NO: 785729 - DNA, 120 bp, Artificial Sequence
  ENSG00000258986_30 (sequence is synthesized)
cctctgtcccagtcccttggaccccgactcctccacgatctggcccctcccctcatacattgcatttcgggacccccgcaaaggaatcacttcagcctggactgcaaaccgcactcctac

SEQ ID NO: 785730 - DNA, 120 bp, Artificial Sequence
  ENSG00000258986_31 (sequence is synthesized)
acctcactatgagcaccttgggggtgtcctccaacaccccccgccccgccctctctctcctggtctcctttcgttcgagctgatgaggaactgacgacccagagtcggcctgtgtgaggc

SEQ ID NO: 785731 - DNA, 120 bp, Artificial Sequence
  ENSG00000258986_32 (sequence is synthesized)
ccgtacaggtggctcccgaagtctttagcggcacagggtcggtccctccaggccgacctggtaaaattcccgcatctcccgcaggccgcccttctctggcccctggaccccgggctcctg

SEQ ID NO: 785732 - DNA, 80 bp, Artificial Sequence
  ENSG00000258986_33 (sequence is synthesized)
gcccgcgcgcaccaggagctgtccgcggtgctgaccgcaggcgcttcccgcgctcggccgatgcgcacgcgtcccgggag

SEQ ID NO: 785733 - DNA, 120 bp, Artificial Sequence
  ENSG00000258986_34 (sequence is synthesized)
gggctctgggcaagaagggaggcttgcaatgctgggagggggccatttactgctggacatttgctgagctctcccccatccagaggaggaggcaggctcctgtgtggataaggtagttag

SEQ ID NO: 785734 - DNA, 120 bp, Artificial Sequence
  ENSG00000258986_35 (sequence is synthesized)
caatgggaccaggcagtgggagcagtcgggaaggcttcctgcaggaggtgggggagagctgggcttttgtaggtgggtttggggaggagatggccacagtgagttagaatcaggaagtgg

SEQ ID NO: 785735 - DNA, 120 bp, Artificial Sequence
  ENSG00000258986_36 (sequence is synthesized)
caaggccctggggtctggggtgggaagtgtgggggtgtggggggaggtggtgccagaaacgaaaccaggcatcagatcctgggggtccagtgtagggacaagggctttggactttggtgc

SEQ ID NO: 785736 - DNA, 120 bp, Artificial Sequence
  ENSG00000258986_37 (sequence is synthesized)
tggcgctgggtgggcctgttcagatcagagctggaggcttagaggagtcccctagccagggggaagctgatacagagtccaaggaaggaggcaggggatcccacttgtgaattcagattt

SEQ ID NO: 785737 - DNA, 120 bp, Artificial Sequence
  ENSG00000258986_38 (sequence is synthesized)
gccaccctgcccttgtataagctgcgtcccccgccccctaggagacttggtggagggcgatggtggcccccactctgagggacgctatttgctgaaatgcaggcatgtggggacacatca

SEQ ID NO: 785738 - DNA, 120 bp, Artificial Sequence
  ENSG00000258986_39 (sequence is synthesized)
gtggcccgtgagggccggagggggaaccctggaattgggtttgccccttgaaatctgcagatgtgccccagacggagatgaggcagatgaggggtgccgggtgggggtggctgagaccag

SEQ ID NO: 785739 - DNA, 120 bp, Artificial Sequence
  ENSG00000258986_40 (sequence is synthesized)
acacctggctcctgccagcactgatcagggcccgctggcttcaggtccaattccggaccccaggctggcctctgaaggctcttgctggccgtggctggcctgaggacgcttctcctggcc

SEQ ID NO: 785740 - DNA, 120 bp, Artificial Sequence
  ENSG00000258986_41 (sequence is synthesized)
aggagccctccaagggtgctggacatgggtgggcctgaatgctctttgccgagatgaactggacctgtcaaagacaccttcatgcaaatttagtgagtggaagaggcctcaggcctaatt

SEQ ID NO: 785741 - DNA, 120 bp, Artificial Sequence
  ENSG00000258986_42 (sequence is synthesized)
tgtgccagttggattaaggtgtgagtgcagtctgatggcaaatacgctcaaatgagaatcagcttaatgtagctcaggcctggttctgattaaattgtttctccttcaactgtttggaaa

SEQ ID NO: 785742 - DNA, 120 bp, Artificial Sequence
  ENSG00000258986_43 (sequence is synthesized)
gcccaggtccaattccggaccccaggctggcctctgaaggctcttgctggccgtggctggcctgaggacgcttctcctggccaggagccctccaagggtgctggacatgggtgggcctga

SEQ ID NO: 785743 - DNA, 120 bp, Artificial Sequence; identical to SEQ ID NO: 767937
  ENSG00000258992_0 (sequence is synthesized)

SEQ ID NO: 785744 - DNA, 80 bp, Artificial Sequence
  ENSG00000258992_1 (sequence is synthesized)
ctgcggcatgtgcgagtgccaaggagggcaccgccttcaggatggaggctgtgcaggagggggcggccggggtggagagt

SEQ ID NO: 785745 - DNA, 120 bp, Artificial Sequence; identical to SEQ ID NO: 553818
  ENSG00000258992_2 (sequence is synthesized)

SEQ ID NO: 785746 - DNA, 120 bp, Artificial Sequence
  ENSG00000258992_3 (sequence is synthesized)
gctgagctacatggtcagcctggaggtgggagaagagaagcatcctgttcatctctgcaagatcatgttgttctttcggagtaacccctacttccagaataaagtgattaccaaggaata

SEQ ID NO: 785747 - DNA, 120 bp, Artificial Sequence; identical to SEQ ID NO: 553820
  ENSG00000258992_4 (sequence is synthesized)

SEQ ID NO: 785748 - DNA, 120 bp, Artificial Sequence; identical to SEQ ID NO: 553821
  ENSG00000258992_5 (sequence is synthesized)

SEQ ID NO: 785749 - DNA, 120 bp, Artificial Sequence; identical to SEQ ID NO: 553822
  ENSG00000258992_6 (sequence is synthesized)

SEQ ID NO: 785750 - DNA, 120 bp, Artificial Sequence; identical to SEQ ID NO: 767944
  ENSG00000258992_7 (sequence is synthesized)

SEQ ID NO: 785751 - DNA, 120 bp, Artificial Sequence
  ENSG00000259092_0 (sequence is synthesized)
atggagactctcctgaaagtgctttcaggcaccttgttgtggcagttgacctgggtgagaagccaacaaccagtgcagagtcctcaagccgtgatcctccgagaaggggaagatgctgtc

SEQ ID NO: 785752 - DNA, 120 bp, Artificial Sequence
  ENSG00000259092_1 (sequence is synthesized)
gagaacagaagggtcatgacaaaatatctgcttcatttaatgaaaaaaagcagcaaagctccctgtaccttacggcctcccagctcagttactcaggaacctacttctgcggcacagaga

SEQ ID NO: 785753 - DNA, 120 bp, Artificial Sequence
  ENSG00000259120_0 (sequence is synthesized)
agttaatcattcaccccacaacacaggaagtgagccctacgccagtcccagccccagggcttcctgagctcggggcaggtccgcagtccacacgtcacccagacagaggacagcccagcc

SEQ ID NO: 785754 - DNA, 120 bp, Artificial Sequence
  ENSG00000259120_1 (sequence is synthesized)
cagccacagttgcttctttgagtcagggtgcagctctggtcacctggcggcctcttcagctcagccctccacaaagtgtgagcctgaaggaccaccctgaattgcccttgtaggacccag

SEQ ID NO: 785755 - DNA, 120 bp, Artificial Sequence
  ENSG00000259120_2 (sequence is synthesized)
aacagctaccagcagaatcagattctcatggaccaactggtattcaaagagacaatctggaatgatgcgttctggcagaacccctgggaccaggggggcctggcagtgattatcttattc

SEQ ID NO: 785756 - DNA, 120 bp, Artificial Sequence
  ENSG00000259120_3 (sequence is synthesized)
atttgccatcgtgtttggtttactcacttccacagaaaacactcagtgtgaagcgggtgaagaggagtgacctgacttgctggggactgagatggcagcaggggaggcgagctgacctgc

SEQ ID NO: 785757 - DNA, 120 bp, Artificial Sequence
  ENSG00000259120_4 (sequence is synthesized)
ccccattccagtggtgggccccttcgcggttccctctggctcaggggccaagccctggtgtcttcctttcccatcaggaaaaagtctagtaaaatactgtatctggcttagggttggtca

SEQ ID NO: 785758 - DNA, 120 bp, Artificial Sequence
  ENSG00000259120_5 (sequence is synthesized)
gactagtaagatggggaggctggtctgagaccaattctggctccttgaccctattgtttttagggttccccgaccagaaccctaaaagcacatggagaggatggctccactgcctcaggt

SEQ ID NO: 785759 - DNA, 120 bp, Artificial Sequence
  ENSG00000259120_6 (sequence is synthesized)
ggaaggagctatggctaacaaggttctctaacaggctcacaggcccagccagcaatttcacaaatccttgacagagaaagacacaaccaaatgaaataaaaattccttttcaaatctgct

SEQ ID NO: 785760 - DNA, 120 bp, Artificial Sequence
  ENSG00000259120_7 (sequence is synthesized)
ggtgaggcggcctgatggcctggggcaaaggccctcggtccagtctcttccccgtccaccccaagtctgacttctctcaggagggactcatgaacacgtgccctgagcacccccaaaatg

SEQ ID NO: 785761 - DNA, 120 bp, Artificial Sequence
  ENSG00000259120_8 (sequence is synthesized)
acatcacacaagggcagaaaggagctgaagggggaacgtgaaaggcagaaagggagccgtggttgccaggcaaccagccctagcccacctttgtttgtttggtgacagcaactaaggtct

SEQ ID NO: 785762 - DNA, 120 bp, Artificial Sequence
  ENSG00000259207_0 (sequence is synthesized)
gcgggaggcggacgagatgcgagcgcggccgcggccccggccgctctgggcgactgtgctggcgctgggggcgctggcgggcgttggcgtaggagggcccaacatctgtaccacgcgagg

SEQ ID NO: 785763 - DNA, 120 bp, Artificial Sequence
  ENSG00000259207_1 (sequence is synthesized)
tgtgagctcctgccagcagtgcctggctgtgagccccatgtgtgcctggtgctctgatgaggccctgcctctgggctcacctcgctgtgacctgaaggagaatctgctgaaggataactg

SEQ ID NO: 785764 - DNA, 120 bp, Artificial Sequence
  ENSG00000259207_2 (sequence is synthesized)
tgccccagaatccatcgagttcccagtgagtgaggcccgagtactagaggacaggcccctcagcgacaagggctctggagacagctcccaggtcactcaagtcagtccccagaggattgc

SEQ ID NO: 785765 - DNA, 120 bp, Artificial Sequence
  ENSG00000259207_3 (sequence is synthesized)
actccggctccggccagatgattcgaagaatttctccatccaagtgcggcaggtggaggattaccctgtggacatctactacttgatggacctgtcttactccatgaaggatgatctgtg

SEQ ID NO: 785766 - DNA, 120 bp, Artificial Sequence
  ENSG00000259207_4 (sequence is synthesized)
gagcatccagaacctgggtaccaagctggccacccagatgcgaaagctcaccagtaacctgcggattggcttcggggcatttgtggacaagcctgtgtcaccatacatgtatatctcccc

SEQ ID NO: 785767 - DNA, 120 bp, Artificial Sequence
  ENSG00000259207_5 (sequence is synthesized)
accagaggccctcgaaaacccctgctatgatatgaagaccacctgcttgcccatgtttggctacaaacacgtgctgacgctaactgaccaggtgacccgcttcaatgaggaagtgaagaa

SEQ ID NO: 785768 - DNA, 120 bp, Artificial Sequence
  ENSG00000259207_6 (sequence is synthesized)
gcagagtgtgtcacggaaccgagatgccccagagggtggctttgatgccatcatgcaggctacagtctgtgatgaaaagattggctggaggaatgatgcatcccacttgctggtgtttac

SEQ ID NO: 785769 - DNA, 120 bp, Artificial Sequence
  ENSG00000259207_7 (sequence is synthesized)
cactgatgccaagactcatatagcattggacggaaggctggcaggcattgtccagcctaatgacgggcagtgtcatgttggtagtgacaatcattactctgcctccactaccatggatta

SEQ ID NO: 785770 - DNA, 120 bp, Artificial Sequence
  ENSG00000259207_8 (sequence is synthesized)
tccctctttggggctgatgactgagaagctatcccagaaaaacatcaatttgatctttgcagtgactgaaaatgtagtcaatctctatcagaactatagtgagctcatcccagggaccac

SEQ ID NO: 785771 - DNA, 120 bp, Artificial Sequence
  ENSG00000259207_9 (sequence is synthesized)
agttggggttctgtccatggattccagcaatgtcctccagctcattgttgatgcttatgggaaaatccgttctaaagtagagctggaagtgcgtgacctccctgaagagttgtctctatc

SEQ ID NO: 785772 - DNA, 120 bp, Artificial Sequence
  ENSG00000259207_10 (sequence is synthesized)
cttcaatgccacctgcctcaacaatgaggtcatccctggcctcaagtcttgtatgggactcaagattggagacacggtgagcttcagcattgaggccaaggtgcgaggctgtccccagga

SEQ ID NO: 785773 - DNA, 120 bp, Artificial Sequence
  ENSG00000259207_11 (sequence is synthesized)
gaaggagaagtcctttaccataaagcccgtgggcttcaaggacagcctgatcgtccaggtcacctttgattgtgactgtgcctgccaggcccaagctgaacctaatagccatcgctgcaa

SEQ ID NO: 785774 - DNA, 120 bp, Artificial Sequence
  ENSG00000259207_12 (sequence is synthesized)
caatggcaatgggacctttgagtgtggggtatgccgttgtgggcctggctggctgggatcccagtgtgagtgctcagaggaggactatcgcccttcccagcaggacgaatgcagcccccg

SEQ ID NO: 785775 - DNA, 120 bp, Artificial Sequence
  ENSG00000259207_13 (sequence is synthesized)
ggagggtcagcccgtctgcagccagcggggcgagtgcctctgtggtcaatgtgtctgccacagcagtgactttggcaagatcacgggcaagtactgcgagtgtgacgacttctcctgtgt

SEQ ID NO: 785776 - DNA, 120 bp, Artificial Sequence
  ENSG00000259207_14 (sequence is synthesized)
ccgctacaagggggagatgtgctcaggccatggccagtgcagctgtggggactgcctgtgtgactccgactggaccggctactactgcaactgtaccacgcgtactgacacctgcatgtc

SEQ ID NO: 785777 - DNA, 120 bp, Artificial Sequence
  ENSG00000259207_15 (sequence is synthesized)
cagcaatgggctgctgtgcagcggccgcggcaagtgtgaatgtggcagctgtgtctgtatccagccgggctcctatggggacacctgtgagaagtgccccacctgcccagatgcctgcac

SEQ ID NO: 785778 - DNA, 120 bp, Artificial Sequence
  ENSG00000259207_16 (sequence is synthesized)
accggggagccctacatgacgaaaatacctgcaaccgttactgccgtgacgagattgagtcagtgaaagagcttaaggacactggcaaggatgcagtgaattgtacctataagaatgagg

SEQ ID NO: 785779 - DNA, 120 bp, Artificial Sequence
  ENSG00000259207_17 (sequence is synthesized)
atgactgtgtcgtcagattccagtactatgaagattctagtggaaagtccatcctgtatgtggtagaagagccagagtgtcccaagggccctgacatcctggtggtcctgctctcagtga

SEQ ID NO: 785780 - DNA, 120 bp, Artificial Sequence
  ENSG00000259207_18 (sequence is synthesized)
tgggggccattctgctcattggccttgccgccctgctcatctggaaactcctcatcaccatccacgaccgaaaagaattcgctaaatttgaggaagaacgcgccagagcaaaatgggaca

SEQ ID NO: 785781 - DNA, 120 bp, Artificial Sequence
  ENSG00000259207_19 (sequence is synthesized)
cagccaacaacccactgtataaagaggccacgtctaccttcaccaatatcacgtaccggggcacttaatgataagcagtcatcctcagatcattatcagcctgtgccacgattgcaggag

SEQ ID NO: 785782 - DNA, 120 bp, Artificial Sequence
  ENSG00000259207_20 (sequence is synthesized)
tccctgccatcatgtttacagaggacagtatttgtggggagggatttggggctcagagtggggtaggttgggagaatgtcagtatgtggaagtgtgggtctgtgtgtgtgtatgtggggg

SEQ ID NO: 785783 - DNA, 120 bp, Artificial Sequence
  ENSG00000259207_21 (sequence is synthesized)
tctgtgtgtttatgtgtgtgtgttgtgtgtgggagtgtgtaatttaaaattgtgatgtgtcctgataagctgagctccttagcctttgtcccagaatgcctcctgcagggattcttcctg

SEQ ID NO: 785784 - DNA, 120 bp, Artificial Sequence
  ENSG00000259207_22 (sequence is synthesized)
cttagcttgagggtgactatggagctgagcaggtgttcttcattacctcagtgagaagccagctttcctcatcaggccattgtccctgaagagaagggcagggctgaggcctctcattcc

SEQ ID NO: 785785 - DNA, 120 bp, Artificial Sequence
  ENSG00000259207_23 (sequence is synthesized)
agaggaagggacaccaagccttggctctaccctgagttcataaatttatggttctcaggcctgactctcagcagctatggtaggaactgctgggcttggcagcccgggtcatctgtacct

SEQ ID NO: 785786 - DNA, 120 bp, Artificial Sequence
  ENSG00000259207_24 (sequence is synthesized)
ctgcctcctttcccctccctcaggccgaaggaggagtcagggagagctgaactattagagctgcctgtgccttttgccatcccctcaacccagctatggttctctcgcaagggaagtcct

SEQ ID NO: 785787 - DNA, 120 bp, Artificial Sequence
  ENSG00000259207_25 (sequence is synthesized)
tgcaagctaattctttgacctgttgggagtgaggatgtctgggccactcaggggtcattcatggcctgggggatgtaccagcatctcccagttcataatcacaacccttcagatttgcct

SEQ ID NO: 785788 - DNA, 120 bp, Artificial Sequence
  ENSG00000259207_26 (sequence is synthesized)
tattggcagctctactctggaggtttgtttagaagaagtgtgtcacccttaggccagcaccatctctttacctcctaattccacaccctcactgctgtagacatttgctatgagctgggg

SEQ ID NO: 785789 - DNA, 120 bp, Artificial Sequence
  ENSG00000259207_27 (sequence is synthesized)
atgtctctcatgaccaaatgcttttcctcaaagggagagagtgctattgtagagccagaggtctggccctatgcttccggcctcctgtccctcatccatagcacctccacatacctggcc

SEQ ID NO: 785790 - DNA, 120 bp, Artificial Sequence
  ENSG00000259207_28 (sequence is synthesized)
ctgtgccttggtgtgctgtatccatccatggggctgattgtatttaccttctacctcttggctgccttgtgaaggaattattcccatgagttggctgggaataagtgccaggatggaatg

SEQ ID NO: 785791 - DNA, 120 bp, Artificial Sequence
  ENSG00000259207_29 (sequence is synthesized)
atgggtcagttgtatcagcacgtgtggcctgttcttctatgggttggacaacctcattttaactcagtctttaatctgagaggccacagtgcaattttattttatttttctcatgatgag

SEQ ID NO: 785792 - DNA, 120 bp, Artificial Sequence
  ENSG00000259207_30 (sequence is synthesized)
gttttcttaacttaaaagaacatgtatataaacatgcttgcattatatttgtaaatttatgtgatggcaaagaaggagagcataggaaaccacacagacttgggcagggtacagacactc

SEQ ID NO: 785793 - DNA, 120 bp, Artificial Sequence
  ENSG00000259207_31 (sequence is synthesized)
ccacttggcatcattcacagcaagtcactggccagtggctggatctgtgaggggctctctcatgatagaaggctatggggatagatgtgtggacacattggacctttcctgaggaagagg

SEQ ID NO: 785794 - DNA, 120 bp, Artificial Sequence
  ENSG00000259207_32 (sequence is synthesized)
gactgttcttttgtcccagaaaagcagtggctccattggtgttgacatacatccaacattaaaagccacccccaaatgcccaagaaaaaaagaaagacttatcaacatttgttccatgag

SEQ ID NO: 785795 - DNA, 120 bp, Artificial Sequence
  ENSG00000259207_33 (sequence is synthesized)
gtgggcacccaaccccctttcttccttttgtagtgactaaaaatggcccccttccaccagaaaaaaaatatgggcaagaaaaatacgtttcctgaaagtcattctaagttagatgtaatg

SEQ ID NO: 785796 - DNA, 120 bp, Artificial Sequence
  ENSG00000259207_34 (sequence is synthesized)
gatccaccaatcttttcctctgaggcttctgttgcgtaagccatttctgttacgtgaacttcactctcaggaatttgaaaaacttacaatttggttacctttgtttgtgtatgcacagtt

SEQ ID NO: 785797 - DNA, 120 bp, Artificial Sequence
  ENSG00000259207_35 (sequence is synthesized)
gattgcaaaggaaaatatttctttaccttcagtccctcaccagtcgccagcctttccaaggtaattaatacctttcttttgtaaaacgacacaagaaagtaaaatctaaaatgtaaaaca

SEQ ID NO: 785798 - DNA, 120 bp, Artificial Sequence
  ENSG00000259224_0 (sequence is synthesized)
aaacaaaaaaagaaagaaagaaagaaaagaagcagagttggactcagcgggaaaataggcgtgctaccacctcaggagagttccagggaagaaccccacccccactccaaccatgtcaca

SEQ ID NO: 785799 - DNA, 120 bp, Artificial Sequence
  ENSG00000259224_1 (sequence is synthesized)
atggctggagctctgaggggcccaggctccctgagccaggaggagaggagaaagtccaaggaaagatggctggcagtcacccctacttgaacccgcctgactccacacacccatcgccgc

SEQ ID NO: 785800 - DNA, 120 bp, Artificial Sequence
  ENSG00000259224_2 (sequence is synthesized)
cctccgctccacccagcctccgctggcaccagtgctgccagccctctgatgccaccaatggcctgctggtggccctgctgggtgggggcctgcctgctggcttcgtgggccccctttctc

SEQ ID NO: 785801 - DNA, 120 bp, Artificial Sequence
  ENSG00000259224_3 (sequence is synthesized)
atatggcttaccaggcttccaacctgccctcgctggagctgctcatctgtcgatgcctcttccacctccctattgccctgctacttaaactgcgtggcgacccccttctgggacctcctg

SEQ ID NO: 785802 - DNA, 120 bp, Artificial Sequence
  ENSG00000259224_4 (sequence is synthesized)
acatccgaggccgggcctacttctatgccctgctcaacgtcctcagcattggatgtgcctacagtgcggttcaggtggtgcccgctggcaacgctgccactgttcgcaaaggttcttcca

SEQ ID NO: 785803 - DNA, 120 bp, Artificial Sequence
  ENSG00000259224_5 (sequence is synthesized)
ccgtctgctccgccgtcctcaccctctgccttgagagccagggtctcagtggctacgactggtgtggactgttgggcagcatcctaggactaatcatcattgtgggacctggactctgga

SEQ ID NO: 785804 - DNA, 120 bp, Artificial Sequence
  ENSG00000259224_6 (sequence is synthesized)
cactacaggaggggatcacgggtgtctacaccgccctgggctatgggcaggctttcgtgggaggactggcgctgtccctggggcttctggtctatcgttctctgcactttccctcctgcc

SEQ ID NO: 785805 - DNA, 120 bp, Artificial Sequence
  ENSG00000259224_7 (sequence is synthesized)
ctatctggcttggtggggctgctgggctctgtgccaggcctctttgtgctgcagccccccgtgttgcccagtgatctcccgagttggagttgtgtgggggcagtggggatcctcgccttg

SEQ ID NO: 785806 - DNA, 120 bp, Artificial Sequence
  ENSG00000259224_8 (sequence is synthesized)
gtctccttcacatgtgtgagctatgcggtcaccaaggcccaccctgccctggtgtgcgctgtcctgcattccgaggtggtggtggcccttatactgcagtattatatgctccatgagact

SEQ ID NO: 785807 - DNA, 120 bp, Artificial Sequence
  ENSG00000259224_9 (sequence is synthesized)
gtggcaccttctgacatcgtgggggcaggggttgtgctgggcagcattgccatcatcacagcctggaacctcagctgtgagagggaagggaaggtggaggagtgagatagaacttgggag

SEQ ID NO: 785808 - DNA, 120 bp, Artificial Sequence
  ENSG00000259224_10 (sequence is synthesized)
cccgggggttgggagggacagggataaatagaggcaaagactgaagacaaacatgggaggagaagtgactggaaaagaactggtgtgggagagggatacctctcagagtcaagggtgact

SEQ ID NO: 785809 - DNA, 120 bp, Artificial Sequence
  ENSG00000259224_11 (sequence is synthesized)
tggggacttggtggagagggactacctggaagacctggggccagcctgggaccaagggatgtggagaccaggctgggtcctggaatcagggcataactaaggggtaaagtctgaggagca

SEQ ID NO: 785810 - DNA, 120 bp, Artificial Sequence
  ENSG00000259224_12 (sequence is synthesized)
gatccaaacggctgaggcagggaggccgtgggccacggggaggacttcactcagcagcaaagagaagagcattggggctggagtgttccggcaaagacagagccagcagctgcggtgggg

SEQ ID NO: 785811 - DNA, 120 bp, Artificial Sequence
  ENSG00000259224_13 (sequence is synthesized)
gaggggagcgtgcctccccacccctcccctcacggcaaaggtttcctttcctcgtgcttgtgccccccccttggggtggtgacgtgacattgacatcaaacaaggattactctgaatgtg

SEQ ID NO: 785812 - DNA, 120 bp, Artificial Sequence
  ENSG00000259261_0 (sequence is synthesized)
atgaaacacctgtggttctttctcctcctggtggcagctcccagatgggtcctgtcccaggtgcagctgcaggagtcgggcccaggactggtgaagccttcggagaccctgtccctcacc

SEQ ID NO: 785813 - DNA, 120 bp, Artificial Sequence
  ENSG00000259261_1 (sequence is synthesized)
ctacaacccgtccctcaagagtcgagtcaccatatcagtagacaagtccaagaaccagttctccctgaagctgagctctgtgaccgccgcggacagggccgtgtattactgtgcgagaga

SEQ ID NO: 785814 - DNA, 120 bp, Artificial Sequence
  ENSG00000259303_0 (sequence is synthesized)
atggacacgttttgctccacactcctgctgctgaccaccccttcctgggtcttgtcccaggtcaccttgaaggagtctggtcctgcgctggtgaaacccacagagaccctcacgctgacc

SEQ ID NO: 785815 - DNA, 120 bp, Artificial Sequence
  ENSG00000259303_1 (sequence is synthesized)
acagcacgtctctgaagaacaggctcatcatctccaaggacacctccaaaagccaggtggtccttaccatgaccaacatggaccctgtggacacagccacgtattactgtgcatggagag

SEQ ID NO: 785816 - DNA, 80 bp, Artificial Sequence
  ENSG00000259330_0 (sequence is synthesized)
ggcggcggatggggacgcggagccgggcggctgtggcggctgtggcggctgtggctgtggcggcggcggggaagcagctg

SEQ ID NO: 785817 - DNA, 80 bp, Artificial Sequence
  ENSG00000259330_1 (sequence is synthesized)
ctgtggctgtggcggcggcggggaagcagctgacgggccggcggcggcggcggcgctggcggcggtgactggtccaggcc

SEQ ID NO: 785818 - DNA, 80 bp, Artificial Sequence
  ENSG00000259330_2 (sequence is synthesized)
tgcccagtccttgcaggccgccaggccccctccagccggggccgtggagcaccggggcaaaggccggggcccccccatga

SEQ ID NO: 785819 - DNA, 120 bp, Artificial Sequence
  ENSG00000259330_3 (sequence is synthesized)
ccccatgaaggagcgcgacgcggccccggccgagcggggcaagccggccacctacaccggggacaagaaggcgaagatggcggccaagaccaacaagaagtgggtccggctcgccaccgt

SEQ ID NO: 785820 - DNA, 120 bp, Artificial Sequence
  ENSG00000259330_4 (sequence is synthesized)
gttcgcctacgtgctctccgtgtcgctggccgccatcgtgctcgccgtctactacagcctcatctggcagccggtgggcgccgggacctcggggggagccgctggcccgccccccggcgg

SEQ ID NO: 785821 - DNA, 80 bp, Artificial Sequence
  ENSG00000259330_5 (sequence is synthesized)
ctccaacgccactggcccgtctgggacttcgggggcggcggcggcggggcccaacaccactgggtcgtcccgccgcgagg

SEQ ID NO: 785822 - DNA, 120 bp, Artificial Sequence
  ENSG00000259330_6 (sequence is synthesized)
acagccccccggccgggccgctcgagcggcctcgggggccggacgaggacgaagaggaaacggcggcggcgcccgggagtcgttgaagccctccgcgctgggggccgccgggaaccattc

SEQ ID NO: 785823 - DNA, 120 bp, Artificial Sequence
  ENSG00000259330_7 (sequence is synthesized)
ggggccgccgggaaccattctccccaagcccagaggcaggacttcgcagcaggatggggtggagagcccgcgggagtgacccccacgagagtgaacgcccctcacactcccaccatcgcc

SEQ ID NO: 785824 - DNA, 120 bp, Artificial Sequence
  ENSG00000259330_8 (sequence is synthesized)
ggctggccccggagcgggaggcccgcagccagatcttcagccaagggaccacgattcgccggggggctgggggtttgctgcccaggaccgtgctgcaccagggccctgagccgtaggggg

SEQ ID NO: 785825 - DNA, 120 bp, Artificial Sequence
  ENSG00000259330_9 (sequence is synthesized)
atggggggaggggtggggagatcccggcaccaaacccttctgcgccgctcgctctggtgtatcctacatgcaggggtgactggggctttcccccaagactcaggggaaggatggagctgt

SEQ ID NO: 785826 - DNA, 120 bp, Artificial Sequence
  ENSG00000259330_10 (sequence is synthesized)
aggggctctttttaagtaagctgaagctctcgaaaggaggagggcaccaaaagtagtggagctcaggtacgtcaacctagttgcagtggccagagatgcattaaatttctagatccctgt

SEQ ID NO: 785827 - DNA, 120 bp, Artificial Sequence
  ENSG00000259330_11 (sequence is synthesized)
atatagttgttgacatatgcactagaagctataatcacatagaattctatgtatatcctcccacaccctgggtagctactgactgaaggggtcaagcaagggctatttgctgtcccccaa

SEQ ID NO: 785828 - DNA, 120 bp, Artificial Sequence
  ENSG00000259330_12 (sequence is synthesized)
caaacacggcttcttaaatcactcactttctcctgttcccctcctgtttctgaaatataagtttatgacgttctttcacaaaagagtataatcattcttagactgttgacatggctgtgg

SEQ ID NO: 785829 - DNA, 120 bp, Artificial Sequence
  ENSG00000259330_13 (sequence is synthesized)
aaagccttaggagaagtagaaacaatttagggagggtggggaatgtactcatcccctcttctttccatcctagtgcccccaccaaagaggcttcttgttgcagccctcagtatctggata

SEQ ID NO: 785830 - DNA, 120 bp, Artificial Sequence
  ENSG00000259330_14 (sequence is synthesized)
tgggccagggaggaaggaagggaaagagcaatgctgctgtgcttcaatcctggccttcccctcacagaattcttttaggaagagcaagcttttgtaagtagagtggcaagtgtttttatc

SEQ ID NO: 785831 - DNA, 120 bp, Artificial Sequence
  ENSG00000259330_15 (sequence is synthesized)
tttttttttttcctgctcctcaaaatgttgtcttgttccggcaatcacttttgccttccctctttcctgagcctgtagtgacaaagcccggcgatttgggatgaaatctgttgtaacacc

SEQ ID NO: 785832 - DNA, 120 bp, Artificial Sequence
  ENSG00000259330_16 (sequence is synthesized)
agagctttgattacacatcctctggttttgagttattctacagaatcagaaaggctggaaggtgggcttcacactcaggattgtgctttgagaaccagctaatagaccagccgagggaag

SEQ ID NO: 785833 - DNA, 120 bp, Artificial Sequence
  ENSG00000259330_17 (sequence is synthesized)
gttgaattggctgtctttacttttcccgataagccctacttaaatgcagcctgtaattgtataaaggagatgagaaacatcaagagaaatgacatacatgtagctctggggtagcaagaa

SEQ ID NO: 785834 - DNA, 120 bp, Artificial Sequence
  ENSG00000259330_18 (sequence is synthesized)
ctagacttcctcaatttggattccatttccttctgccatttgcttttaggcaattgagtgtgggtagtgatgagatatcaaatcccttagtgtttccattttgggaaatgaggcactatt

SEQ ID NO: 785835 - DNA, 120 bp, Artificial Sequence
  ENSG00000259330_19 (sequence is synthesized)
tttttttttaaaagacaacttacccacctgagtcctgaaacagtttgtctctccagttttctggcctatactctagttagctctgatccaagtttacaggacaacagccttgctttaagc

SEQ ID NO: 785836 - DNA, 120 bp, Artificial Sequence
  ENSG00000259330_20 (sequence is synthesized)
catgtcctgttgtgggcacgataatagcaactgagctgtcacagcctaccagcaggctggtaacacctccagggtctcttggctagagcagatttcttagcagctgactaggacttcagt

SEQ ID NO: 785837 - DNA, 120 bp, Artificial Sequence
  ENSG00000259330_21 (sequence is synthesized)
cattgggaagcctatgaggcctttacatttttggtgtgagatggggaagaaacataaaatgccactttacaacttcaataatagcctgtaatttatatttactgtgtgaatttttagtcc

SEQ ID NO: 785838 - DNA, 120 bp, Artificial Sequence
  ENSG00000259330_22 (sequence is synthesized)
tatattttaataatttgtaaattgatctcttattccaagaatcctttgaacttgtagaacatctgggagtccacttccctgtcctcttcctgatccctgctttctggactgtttaaatcc

SEQ ID NO: 785839 - DNA, 120 bp, Artificial Sequence
  ENSG00000259330_23 (sequence is synthesized)
tctttgggatggatcagagagtctagagaggccactcataggtccagctgctggcctcctgactctccaaagccttcactggaattgggacatttgctccagccctagctgtgaacatga

SEQ ID NO: 785840 - DNA, 120 bp, Artificial Sequence
  ENSG00000259330_24 (sequence is synthesized)
ccagagacattatttataattcagccatttaagatatacctgtactcaaaaagtcctgtatatttttaaaaagttttatttttcaggtgaacaaaaatacatcctaagaactctgcctaa

SEQ ID NO: 785841 - DNA, 120 bp, Artificial Sequence
  ENSG00000259384_0 (sequence is synthesized)
aaggatcccaaggcccaactccccgaaccactcagggtcctgtggacagctcacctagctgcaatggctacaggctcccggacgtccctgctcctggcttttggcctgctctgcctgccc

SEQ ID NO: 785842 - DNA, 120 bp, Artificial Sequence
  ENSG00000259384_1 (sequence is synthesized)
tggcttcaagagggcagtgccttcccaaccattcccttatccaggctttttgacaacgctatgctccgcgcccatcgtctgcaccagctggcctttgacacctaccaggagtttgaagaa

SEQ ID NO: 785843 - DNA, 120 bp, Artificial Sequence
  ENSG00000259384_2 (sequence is synthesized)
gcctatatcccaaaggaacagaagtattcattcctgcagaacccccagacctccctctgtttctcagagtctattccgacaccctccaacagggaggaaacacaacagaaatccaaccta

SEQ ID NO: 785844 - DNA, 120 bp, Artificial Sequence
  ENSG00000259384_3 (sequence is synthesized)
gcaacgtctatgacctcctaaaggacctagaggaaggcatccaaacgctgatggggaggctggaagatggcagcccccggactgggcagatcttcaagcagacctacagcaagttcgaca

SEQ ID NO: 785845 - DNA, 120 bp, Artificial Sequence
  ENSG00000259384_4 (sequence is synthesized)
caaactcacacaacgatgacgcactactcaagaactacgggctgctctactgcttcaggaaggacatggacaaggtcgagacattcctgcgcatcgtgcagtgccgctctgtggagggca

SEQ ID NO: 785846 - DNA, 120 bp, Artificial Sequence
  ENSG00000259384_5 (sequence is synthesized)
gctgtggcttctagctgcccgggtggcatccctgtgacccctccccagtgcctctcctggccctggaagttgccactccagtgcccaccagccttgtcctaataaaattaagttgcatca

SEQ ID NO: 785847 - DNA, 120 bp, Artificial Sequence
  ENSG00000259384_6 (sequence is synthesized)
aggatcccaaggcccaactccccgaaccactcagggtcctgtggacagctcacctagctgcaatggctacagaggctggaagatggcagcccccggactgggcagatcttcaagcagacc

SEQ ID NO: 785848 - DNA, 120 bp, Artificial Sequence
  ENSG00000259384_7 (sequence is synthesized)
tctgaatgtgagtatcgccatgtaagcccagtatttggccaatctcagaaagctcctggtccctggagggatggagagagaaaaacaaacagctcctggagcagggagagtgctggcctc

SEQ ID NO: 785849 - DNA, 80 bp, Artificial Sequence
  ENSG00000259417_0 (sequence is synthesized)
agagccccctctcggctgctggcccgggctcgcccgcgccgctgggggctctgactcctgccgagccgggcctgggcagc

SEQ ID NO: 785850 - DNA, 120 bp, Artificial Sequence
  ENSG00000259417_1 (sequence is synthesized)
aacgccgtagccggcgatccgcggtcgccctgggctcggcgccggcccagccaggaccccgggagcgcacgggacgggcctcgccagtcacactccagcgcccccacgagccagcacagt

SEQ ID NO: 785851 - DNA, 120 bp, Artificial Sequence
  ENSG00000259417_2 (sequence is synthesized)
gcctgctctcagtgaaaggccactgttctccttgggtgacccccatgatgcctgaccgctcctcgtgcctcctggaacagccagggtccttatgaagtggtgaccactccagtcagcagg

SEQ ID NO: 785852 - DNA, 120 bp, Artificial Sequence
  ENSG00000259417_3 (sequence is synthesized)
ggtggaaaatggtaccagtcaaacccgaggcggaggaggagcagcccgcagtcgctgccgcgagatggaggagcccacgcccgagcccgtctatgtcgacgtagacaaagggctgacctt

SEQ ID NO: 785853 - DNA, 120 bp, Artificial Sequence
  ENSG00000259417_4 (sequence is synthesized)
ggcctgcttcgtcttcctctgcctcttccttgtcgtgatgatcatccgctgtgccaaggtcatcatggacccttacagcgccatccccacatccacctgggaggagcagcacctggacga

SEQ ID NO: 785854 - DNA, 120 bp, Artificial Sequence
  ENSG00000259417_5 (sequence is synthesized)
ctgaggcacagcggctgtggggactggacctggcgctctgtgggtggctgtgccccaggatgcatccgtgtgttccctgccagcctgccatcccacagaggcaaggaatgaatctggcca

SEQ ID NO: 785855 - DNA, 120 bp, Artificial Sequence
  ENSG00000259417_6 (sequence is synthesized)
cccagggaaacagaaggtgcagcttagccctctcagccctccctcgagcaccagcgtggaatgcccgggtgccgtgggtgtcgcaaccatggaccagccaggggaaaagagccctggacc

SEQ ID NO: 785856 - DNA, 120 bp, Artificial Sequence
  ENSG00000259417_7 (sequence is synthesized)
aggacccaggaggctggggttccagtgtggggagtccctgtgagatgatagggtagtcaccttcccaggttcctgggcaccttttggaactggatccagcaacagacaccccccatccat

SEQ ID NO: 785857 - DNA, 120 bp, Artificial Sequence
  ENSG00000259417_8 (sequence is synthesized)
cacataacagtggtcttgtcttgaggagactctcggtcctttaaatgcaaagtagcaatggaggctcccaaccaagaggtcccacctgaaccccagccccctccccatggactagcagtg

SEQ ID NO: 785858 - DNA, 120 bp, Artificial Sequence
  ENSG00000259417_9 (sequence is synthesized)
gtgtggcagtgaggggggaaagcgggttgagggagtctcacctgaaaattcacaaaacgcacaggatatgggctgcttccaagcagtatttttttaaactaaaatatagagggatatatt

SEQ ID NO: 785859 - DNA, 120 bp, Artificial Sequence
  ENSG00000259417_10 (sequence is synthesized)
tttcctgttataaataaaatgtacattttagaaacttgggaaaatgcagataaatagaaagaaagggggaggaaataacacttataatcccacctcccggaaaccaccattttgatatat

SEQ ID NO: 785860 - DNA, 120 bp, Artificial Sequence
  ENSG00000259417_11 (sequence is synthesized)
tttcttccagcctttttacttgtattttttagtcaaattcatactctgtgcatgatgttgtatcgcctcatatgatagcaggaatacttccccattacatcaaacactcttcttagctgc

SEQ ID NO: 785861 - DNA, 120 bp, Artificial Sequence
  ENSG00000259417_12 (sequence is synthesized)
cagttttagtgaccgaagggcatcccatcggttgggtaggtcatggttaaaaaatcatctcctttggttgcatatttaattattttccactattttttcctcacacaaaatgatttcgcc

SEQ ID NO: 785862 - DNA, 120 bp, Artificial Sequence
  ENSG00000259417_13 (sequence is synthesized)
cggtaccctttttgggggtgcacagtccatgagatgaatattgaatggggagacctgggttctagtctcgcatttaccagtcaggttacaatgcgaccttgagcaagtcacttcacctcc

SEQ ID NO: 785863 - DNA, 120 bp, Artificial Sequence
  ENSG00000259417_14 (sequence is synthesized)
cagcgcctcagtttcctcattgtaagataggaaaagccttgtcatttttaaaattttattttttgcatatacctcatgtgaacgaaaggacagaaaggggagtgaatatactatgaatgt

SEQ ID NO: 785864 - DNA, 120 bp, Artificial Sequence
  ENSG00000259417_15 (sequence is synthesized)
gctatagtcggagttggggggcaaggaagaagtcatcgatgatggctcttctcaggccctccctcctcccacctctttctgccctccaccccactcccactccatcacctacatctatga

SEQ ID NO: 785865 - DNA, 120 bp, Artificial Sequence
  ENSG00000259417_16 (sequence is synthesized)
ccttgcagcaaaatcattagagcagagcctacaaaaccggccccaagtcccaattcctctacttccttgttagaggaccccaaataactcactcagcctctctgagccccaatttcctca

SEQ ID NO: 785866 - DNA, 120 bp, Artificial Sequence
  ENSG00000259417_17 (sequence is synthesized)
cctgtaaagtgagggaataacatctacctcgcaaggttgttgtgaggacgaaatgagagaacatgggcaaacatgaatgttcttgaattcaccaccccaggagaagccaggggtctgagc

SEQ ID NO: 785867 - DNA, 120 bp, Artificial Sequence
  ENSG00000259417_18 (sequence is synthesized)
tgggaggagcagaggttctgggtgccccctgcccctacagagcctggcaccttcagcttttctcaacttctgagggctgcttcctacaggccaaatctcccagccggaaccacttggtca

SEQ ID NO: 785868 - DNA, 120 bp, Artificial Sequence
  ENSG00000259417_19 (sequence is synthesized)
gaggaacactcacagcagcctttcccagcacctgacctcaagggatatggcgtctaccaatttacataattgcctttgtcatcagttttcccataacatggtacgaagttaaatgagagc

SEQ ID NO: 785869 - DNA, 120 bp, Artificial Sequence
  ENSG00000259417_20 (sequence is synthesized)
acctgagctccccttcctctgagtgcatttattccatccctccaagctgtggccttccatccccatccaagagacctgcagctgtgaagaagctcaagacttctttctcattgcctgcct

SEQ ID NO: 785870 - DNA, 120 bp, Artificial Sequence
  ENSG00000259417_21 (sequence is synthesized)
cccagccattagtccccaccacagcccaggccacctggaaaatgggttccaaagcactatcactactaggtgacccctgaatgtggacaaggccacagctcttcaggcagcatttcaggg

SEQ ID NO: 785871 - DNA, 120 bp, Artificial Sequence
  ENSG00000259417_22 (sequence is synthesized)
gctatccagttgtcatccctctcatacccctctcctacccacccctatccccactattgtggaatgcacgaagggacagctggcaaaggcagtgaaccaagatgcagggaaggccctgta

SEQ ID NO: 785872 - DNA, 120 bp, Artificial Sequence
  ENSG00000259417_23 (sequence is synthesized)
tgatggggaggatctaaagcaaaagccttttgtgcattgcctcaggttcagcagcagcagccctcactctgaagcctaccttgagaagccaggcatttctgtgaaaagctcatcagcatg

SEQ ID NO: 785873 - DNA, 120 bp, Artificial Sequence
  ENSG00000259417_24 (sequence is synthesized)
catttacaatgcaaactagaaccaactcccagtcagctaataacagaccccaggaaaaagaaaaggtcttccagacctccccgacacactttagaaccctcaggggtgaaaaagagggtg

SEQ ID NO: 785874 - DNA, 120 bp, Artificial Sequence
  ENSG00000259417_25 (sequence is synthesized)
ctccagggcagtgcaacttaaactgtggttgaaggacaaacagcctctgcaatacttgaggagcttgttagaaacccaaactcacagccccctccagacctacgtacagaatgtatatta

SEQ ID NO: 785875 - DNA, 120 bp, Artificial Sequence
  ENSG00000259417_26 (sequence is synthesized)
gcaagattcgctaggtggtttatgtgcacgttaaagtttaagaagcactgcctgagaatcccttggtcctaattaattcttttccacactcagatttgctaatgggtttcaccttatctc

SEQ ID NO: 785876 - DNA, 120 bp, Artificial Sequence
  ENSG00000259417_27 (sequence is synthesized)
ttgactcttgtttgatggcaacaggaaatagtagcatttcaggaagggtggaaaatataaaaagcactcccaacccaagcctccaaaaaacagcaattttcattttgtgtccatatattc

SEQ ID NO: 785877 - DNA, 120 bp, Artificial Sequence
  ENSG00000259417_28 (sequence is synthesized)
cataattttatatcatactctttctcctaacattacatcacaagtatactttcatgttgctgctacattcttcacacttgtcattttaatggccataaaacatgacatctagtgcacata

SEQ ID NO: 785878 - DNA, 120 bp, Artificial Sequence
  ENSG00000259417_29 (sequence is synthesized)
tataattatgtagactcctattattaaatatttggatttcttccattttccctgttgtacatgttccaagcaaaaaaagaaagatcaagatagatatgatgaagccggggagcttgctta

SEQ ID NO: 785879 - DNA, 120 bp, Artificial Sequence
  ENSG00000259417_30 (sequence is synthesized)
agacaggggagaataaatacttacagtacactctctccatttaagagacacatggagcacatgggggagggagacctgtctaagaactggatcatattaaggagaaaaaagcaactggaa

SEQ ID NO: 785880 - DNA, 120 bp, Artificial Sequence
  ENSG00000259417_31 (sequence is synthesized)
tctcaggcttcagttgttgcattatgctgctgaagcatagaggagatggtcctttgtgatcagagcgtctcaactcgtttctggcaagctaagatgaactttggggttgtggatagaaag

SEQ ID NO: 785881 - DNA, 120 bp, Artificial Sequence
  ENSG00000259417_32 (sequence is synthesized)
ataaactgatctgcaaaagaaatgcacagaagtattgaaggctagaagttggcagacaagaaatgaaaagcatttagagaatgggaggcctgtgaaggtagccacaacccaggacttaag

SEQ ID NO: 785882 - DNA, 120 bp, Artificial Sequence
  ENSG00000259417_33 (sequence is synthesized)
gagaacacaggctggagaggaactctccaaagcagagaatgggtggtgggttttccaggcaatggtgcctagtggccagttttaagttgttgcttgtactgtgctcagctacactccctt

SEQ ID NO: 785883 - DNA, 120 bp, Artificial Sequence
  ENSG00000259417_34 (sequence is synthesized)
catgttgccccaagccctctctaaagtctgataaatgatccaccactctgcagcagtggtctttgggacaatgaagacacctcggtggtgggtcacttagggaaatacaatctggaaggg

SEQ ID NO: 785884 - DNA, 120 bp, Artificial Sequence
  ENSG00000259417_35 (sequence is synthesized)
gccaacagtcccagagacaagtggggtagcagaaatatgcagaaccaagagttcagagtgatggtcactagaagaaatgtggcctctaaggatgctcagacaggtggatatgtatagtag

SEQ ID NO: 785885 - DNA, 120 bp, Artificial Sequence
  ENSG00000259417_36 (sequence is synthesized)
gaccctagctttaccatcctggcatatcattcccatcatagctatttcatttttttccaattagttgctgaaatgtctacatgttcttatcgagttgaaagatcagtgtctccctgtctc

SEQ ID NO: 785886 - DNA, 120 bp, Artificial Sequence
  ENSG00000259417_37 (sequence is synthesized)
attaaatttccagaacttcagaggctaaatcaatccaaaaggggctggccctgctttcaaacaccaagtgaagagaactacaaagtttggtgtgtccactagtgtggtttcataccccct

SEQ ID NO: 785887 - DNA, 120 bp, Artificial Sequence
  ENSG00000259417_38 (sequence is synthesized)
aggtcttgctgttgaggactggttctgccaggcatgatcaatgaccacccacaatgtcctgtggcccagcctgtggagaggtgcccaaacagagttatctgggtccacatccatgtgccc

SEQ ID NO: 785888 - DNA, 120 bp, Artificial Sequence
  ENSG00000259417_39 (sequence is synthesized)
agctattctgtccaatcatagcacaaagacaggttgcctgtgtccagagggacacacagcctcaggcacaccagcccttacttatgagcttgatggtcatcagcaaagactctctccctt

SEQ ID NO: 785889 - DNA, 120 bp, Artificial Sequence
  ENSG00000259417_40 (sequence is synthesized)
taggagggttctccttgggacttttcagtgtcttggcaggaaagagatggcacacacgaagcactgattgaagacagtttaatgaaagaatatttacagaggttgggcaagggtatggaa

SEQ ID NO: 785890 - DNA, 86 bp, Artificial Sequence
  ENSG00000259417_41 (sequence is synthesized)
aatgaaagaatatttacagaggttgggcaagggtatggaaaacaacagggaacagtaaaacacccagggatgacaaggcaaggtaa

SEQ ID NO: 785891 - DNA, 120 bp, Artificial Sequence
  ENSG00000259417_42 (sequence is synthesized)
cccaggagtttgaaaccagcctggcaacataagcaagaatctgtttatctacaaaaaataaaataattaaaaaaaaattacctggctgtggtgttgcacacctatagtcccagctactca

SEQ ID NO: 785892 - DNA, 120 bp, Artificial Sequence
  ENSG00000259417_43 (sequence is synthesized)
cacttgagtccaggagtttgaggttacaatgagctaggatcacactactgcactccagcctaggcgacaaagagagatgctgtctctaaaaataaaaaacaaaaacaaactacccaggaa

SEQ ID NO: 785893 - DNA, 120 bp, Artificial Sequence
  ENSG00000259417_44 (sequence is synthesized)
caggcaggccaccaactgttaccatctcttgcctagagagacaaggagaaggatctagaacccagggagagctatagccatggagaaggagtcacccaatggaagccctggccacagcta

SEQ ID NO: 785894 - DNA, 120 bp, Artificial Sequence
  ENSG00000259417_45 (sequence is synthesized)
gaggatcaaaactcctgcacccactgcagctcagtaggaagagagctgggggaataaataccttgacctcttgcctcctgccctccaatctcctgtctgggtcttccattggccaaaaac

SEQ ID NO: 785895 - DNA, 120 bp, Artificial Sequence
  ENSG00000259417_46 (sequence is synthesized)
aacagaagctaaaggtcaggggaccctgggtgatacggtccacataggcagcacactggagcaaaagaagaaaaaccagcacaattcatcttattaccacttagcagccattcacaaact

SEQ ID NO: 785896 - DNA, 120 bp, Artificial Sequence
  ENSG00000259417_47 (sequence is synthesized)
ttgcttagatgggagaaaaatattttgtccccggcacaggggaaacataaaatctcaccagcagccatattgtctgggggtgatagcaatttagtcccactccctcctgcaacttaaatc

SEQ ID NO: 785897 - DNA, 120 bp, Artificial Sequence
  ENSG00000259417_48 (sequence is synthesized)
ataatgtagccagtcccgggtaagtggaacacttcctgtaaagcacaactgctagtgcccccttctgtggctggtcatgaggcccagagtggtaactgcagtcttgttctcccaccaccc

SEQ ID NO: 785898 - DNA, 120 bp, Artificial Sequence
  ENSG00000259417_49 (sequence is synthesized)
attccatagcccctctactttctggcagtcccttagctgttggagaattttatctggtggaatgacccaaatcttcatccacagaggattcaaattcttagtgccgtgtcttcaatgagt

SEQ ID NO: 785899 - DNA, 120 bp, Artificial Sequence
  ENSG00000259417_50 (sequence is synthesized)
tgccacagtatccacagattcctaaagaacatgaagaggccttgaagatctcacctggaagctctgtaaaattatcagaaagaatagcaggtgctctagggcaacactactcaaactatg

SEQ ID NO: 785900 - DNA, 120 bp, Artificial Sequence
  ENSG00000259417_51 (sequence is synthesized)
gtccacggatggacagcattggcatctctggggagcttgttagaaatctaatttcatgcccccacctcaggcttacagaatgaggacaagggatacagggagtaccaagtgccctagcga

SEQ ID NO: 785901 - DNA, 120 bp, Artificial Sequence
  ENSG00000259417_52 (sequence is synthesized)
atcccagggttccaaagctagtactccttgcccctattgtgtagcagaaaccccactttcccttggatattggggttaaccatcctgacagtgcagtgatctctttctctgccaatattt

SEQ ID NO: 785902 - DNA, 120 bp, Artificial Sequence
  ENSG00000259417_53 (sequence is synthesized)
caacataaggagccccagatggcacaagatcatcttccaatttaacagacccataactatattccctggtggaagcagttcctcttggtcactagagatttccaaacccacaaaacctaa

SEQ ID NO: 785903 - DNA, 120 bp, Artificial Sequence
  ENSG00000259417_54 (sequence is synthesized)
ggtttcttggttaaaggccatgtttgtgggatatgctgagatgaatatgctgtggtttgaatgtgtcccccaaagttcatatgttggaaacttgattcccattgcaacagtgttgagatc

SEQ ID NO: 785904 - DNA, 120 bp, Artificial Sequence
  ENSG00000259417_55 (sequence is synthesized)
tggggcccaatgagaggtgattaggccatgagggcggagtgaatggattaatgcagttatctcaagagtgggtttgttatgaagggggtgtttggtcctcttttctctcttgcccatgtg

SEQ ID NO: 785905 - DNA, 120 bp, Artificial Sequence
  ENSG00000259417_56 (sequence is synthesized)
attccttccaccatgtttatgatgcaacaagaaggtcctcaccagatgctggttccttgatcttgtattttgcagcctccaaaatcgtgagccaaataaatttctattcattataaatta

SEQ ID NO: 785906 - DNA, 120 bp, Artificial Sequence
  ENSG00000259431_0 (sequence is synthesized)
attcctcgcgagtgtatggcgtgggctcccttccccctctgtgggtcccgcgaggagactctcgggctttgaggtgagacctgaagttccgctggccggtagtgtagcaggaaagggcag

SEQ ID NO: 785907 - DNA, 120 bp, Artificial Sequence
  ENSG00000259431_1 (sequence is synthesized)
gtcctcccgggtcgtgagccagtagcctcctggggtggcaaggtgtagagaggggggcgttgaaaggacacccgctacccggcctgctttctaggggtctctttggattgaggacatcag

SEQ ID NO: 785908 - DNA, 120 bp, Artificial Sequence
  ENSG00000259431_2 (sequence is synthesized)
cagcagtggaagggattttactggagacctgtcactgtcagagccttaaaatatcaccgacggggccttaatgtcaccgaggtagagagaaaagggcagtagccctagagactattgcga

SEQ ID NO: 785909 - DNA, 120 bp, Artificial Sequence
  ENSG00000259431_3 (sequence is synthesized)
cacagtgtgcccctcataagtttttccagggaggggttctgtactgagttgacgccccaggagctgagcaccaggctttgcatccttgggaactcagcaaacgtttgttcagccaattgc

SEQ ID NO: 785910 - DNA, 120 bp, Artificial Sequence
  ENSG00000259431_4 (sequence is synthesized)
aggtagcatggcccagggcttgattgaggtggagcgaaagttccttccagggcctggcacagaggagcggctgcaggagttggggggcaccctggagtaccgggtcaccttccgagacac

SEQ ID NO: 785911 - DNA, 120 bp, Artificial Sequence
  ENSG00000259431_5 (sequence is synthesized)
ctactatgacacccctgagctgagcctcatgcaggctgaccactggctgcgacgacgagaggatagtggatgggagctcaaatgtcctggagcagcaggtgtcttaggaccccacacgga

SEQ ID NO: 785912 - DNA, 120 bp, Artificial Sequence
  ENSG00000259431_6 (sequence is synthesized)
gtataaggaactcacagcggaacctacaattgtggcccaactctgtaaggtgctgcgggctgacggcctgggggctggagatgtggctgctgtgctgggcccactggggctgcaggaagt

SEQ ID NO: 785913 - DNA, 120 bp, Artificial Sequence
  ENSG00000259431_7 (sequence is synthesized)
agctagttttgtgactaagcggagtgcctggaagctggtgctcttgggagctgatgaagaggagccacagctcagggtggacttggatacagccgactttggctacgctgtgggtgaggt

SEQ ID NO: 785914 - DNA, 120 bp, Artificial Sequence
  ENSG00000259431_8 (sequence is synthesized)
agaggccctggtgcatgaggaggctgaagtaccaactgccctagagaagatccacaggctcagcagcatgcttggtgtgcctgcacaggagacagcaccagccaagctgattgtgtatct

SEQ ID NO: 785915 - DNA, 120 bp, Artificial Sequence
  ENSG00000259431_9 (sequence is synthesized)
acagcgtttccggcctcaagactatcagcgcctgctagaagtgaacagctccagagagaggccacaggagactgaagatcctgaccactgcctgggctaggggtgtcacttcctagaagg

SEQ ID NO: 785916 - DNA, 120 bp, Artificial Sequence
  ENSG00000259431_10 (sequence is synthesized)
agcgctgcctgtttcttccccctcctctaagctactcttccttgagccctccctggctgcttcctctcgctcatccgtcagatgcaatctgtgggccgcccctctcccctggccgctaag

SEQ ID NO: 785917 - DNA, 120 bp, Artificial Sequence
  ENSG00000259431_11 (sequence is synthesized)
cagcctccattgatttccgctcgtgtttataggatttccacttagccgtgatcagtagttaagcacaggaaaatcccttgccaccccccctcccttggtcgatgccattgattctgccag

SEQ ID NO: 785918 - DNA, 120 bp, Artificial Sequence
  ENSG00000259431_12 (sequence is synthesized)
cggctcctaaaccgccttacagctgagttagaagatgaggagaggcagcagggatttccctgccttgggatgtgggaaacagaagaaaagttgaggaaatggttgggaatcgctgttaga

SEQ ID NO: 785919 - DNA, 120 bp, Artificial Sequence
  ENSG00000259431_13 (sequence is synthesized)
actctagaaattctaatctgactttgccactgtgcccagctctggcccagagggtagagtgcctcctgtggaagtttaggggcaaatttgttccctgacctggagagggttagaaagaac

SEQ ID NO: 785920 - DNA, 120 bp, Artificial Sequence
  ENSG00000259431_14 (sequence is synthesized)
caacagctgccccctccccgcccccgtgttgagacaggttctcaaggctcaggggaagatgcatacctcctatgtaagaatgctcttcccttgctgttattcatacacactttccacttc

SEQ ID NO: 785921 - DNA, 120 bp, Artificial Sequence
  ENSG00000259431_15 (sequence is synthesized)
aaatatacccaaatatggctttcctcacttctcaggctttattgggctttatttgtgggagaagggggctggtccccagtttttgcagtgcaaagccagagcgccacctgctggtagccc

SEQ ID NO: 785922 - DNA, 120 bp, Artificial Sequence
  ENSG00000259431_16 (sequence is synthesized)
tcaggtgtaggttcgaagctgctggggccccctggggtttgggacacaggagaatttcaggctgtgagtggagacagttactgccacgattccacaggcaagttgttcacctcaaagatc

SEQ ID NO: 785923 - DNA, 120 bp, Artificial Sequence
  ENSG00000259431_17 (sequence is synthesized)
tcctgcaccgactggtgaaagtggtcgtaggtgaggcgcagctttagccgcaggggggcctaggaataggagagcagggaccagggttagcacccacggcttcttctatccctgggtctt

SEQ ID NO: 785924 - DNA, 120 bp, Artificial Sequence
  ENSG00000259431_18 (sequence is synthesized)
gtcttgggggaactcctgaagctcaccttgttaggattgaggattctgaagagctgggtgataggaaggccaccccgagctggaactgtgttcccactgggggcctgcagctgcagctgg

SEQ ID NO: 785925 - DNA, 120 bp, Artificial Sequence
  ENSG00000259431_19 (sequence is synthesized)
agactctgaacacaggagtttaacagagcacagtatggcagtaggtagggctcaggcagcccctctatactcagtggctccacacccttttcctgtaactccccaagtgctgatctccag

SEQ ID NO: 785926 - DNA, 120 bp, Artificial Sequence
  ENSG00000259431_20 (sequence is synthesized)
atgactcaatcccatctcacactgtctcccacccacctcctccacttagtggccttttctcctggagtccccaggccacctctgaactctgatctttacaaaccttgggcacagcagcct

SEQ ID NO: 785927 - DNA, 120 bp, Artificial Sequence
  ENSG00000259431_21 (sequence is synthesized)
ggggtgcctggctcagcctcaggcatgagacctgtaccagcccccgggagccgtgcggggccaacaatgaggagcagaatgcaaggggcggcctcgctcccctggccaccgcgggggtcg

SEQ ID NO: 785928 - DNA, 120 bp, Artificial Sequence
  ENSG00000259431_22 (sequence is synthesized)
cggcctcccattacatagcgcgtgtctcgagccctggcctgctctcggcaccgccacaacgggcgtaatatggccgctggtgccgggacctgccgggcgcgcggagggtcgggccgaggt

SEQ ID NO: 785929 - DNA, 67 bp, Artificial Sequence
  ENSG00000259490_0 (sequence is synthesized)
cagcctgggggttctctgagactctcatgtgcagcctctggattcaccttcagtgaccactacatga

SEQ ID NO: 785930 - DNA, 120 bp, Artificial Sequence
  ENSG00000259490_1 (sequence is synthesized)
atatgctgcgtctgtgaaaggcagacttaccatctcaagagaggattcaaagaacacgctgtatctgcaaatgagcaacctgaaaaccgaggacttggccgtgtattactgtgctagaga

SEQ ID NO: 785931 - DNA, 120 bp, Artificial Sequence
  ENSG00000259494_0 (sequence is synthesized)
gagaacgaaagatggcggcgcccgtaaggcggacgctgttaggggtggcggggggttggcggcggttcgagaggctctgggccggcagtctaagctctcgcagcctggctcttgcagccg

SEQ ID NO: 785932 - DNA, 120 bp, Artificial Sequence
  ENSG00000259494_1 (sequence is synthesized)
caccctcaagcaacggatccccatggcgcttgttgggcgcgttgtgcctgcagcggccacctgtagtctccaagccgttgaccccattgcaggaagagatggcgtctctactgcagcaga

SEQ ID NO: 785933 - DNA, 120 bp, Artificial Sequence
  ENSG00000259494_2 (sequence is synthesized)
ttgagatagagagaagcctgtattcagaccacgagcttcgtgctctggatgaaaaccagcgactggcaaagaagaaagctgaccttcatgatgaagaagatgaacaggatatattgctgg

SEQ ID NO: 785934 - DNA, 120 bp, Artificial Sequence
  ENSG00000259494_3 (sequence is synthesized)
cgcaagatttggaagatatgtgggagcagaaatttctacagttcaaacttggagctcgcataacagaagctgatgaaaagaatgaccgaacatccctgaacaggaagctagacaggaacc

SEQ ID NO: 785935 - DNA, 120 bp, Artificial Sequence
  ENSG00000259494_4 (sequence is synthesized)
ggagaccaggatgtttggatactgccccaggcagagtggcagcctggggagacccttcgaggaacagctgaacgaaccctggccacactctcagaaaacaacatggaagccaagttccta

SEQ ID NO: 785936 - DNA, 120 bp, Artificial Sequence
  ENSG00000259494_5 (sequence is synthesized)
ggaaatgcaccctgtgggcactacacattcaagttcccccaggcaatgcggacagagagtaacctcggagccaaggtgttcttcttcaaagcactgctattaactggagacttttcccag

SEQ ID NO: 785937 - DNA, 120 bp, Artificial Sequence
  ENSG00000259494_6 (sequence is synthesized)
gctgggaataagggccatcatgtgtgggtcactaaggatgagctgggtgactatttgaaaccaaaatacctggcccaagttaggaggtttgtttcagacctctgatgggccgagctgcct

SEQ ID NO: 785938 - DNA, 120 bp, Artificial Sequence
  ENSG00000259494_7 (sequence is synthesized)
gtggacggtgctcagacaagtctgggattagagcctcaaggacattgtgtgattgcctcacatttgcaggtaatatcaagcagcaaactaaattctgagaaataaacgagtctattactg

SEQ ID NO: 785939 - DNA, 120 bp, Artificial Sequence
  ENSG00000259494_8 (sequence is synthesized)
agtaacaaataatttcatattcttttctttgttgctcacatctaccataatacgacttaaaaagtctgtcttattttcgggtgagaggtaagggtattggaatagccttttctctcagtt

SEQ ID NO: 785940 - DNA, 120 bp, Artificial Sequence
  ENSG00000259494_9 (sequence is synthesized)
aaactttgtgaatgttatctgtgtttaactccaagtttgagactgagagtggggcaaatgaagcctttttccactaattcctgtgttttatgtgaaatccctcttaaagcgggagattga

SEQ ID NO: 785941 - DNA, 120 bp, Artificial Sequence
  ENSG00000259494_10 (sequence is synthesized)
gttctgttttccttgtttcacagatgaagactgaagaacagagaaagtaggggctagttaagtcagtaatagtatcaaaaccaatgaagtagttgtgtttgaattagtatgatcattgtt

SEQ ID NO: 785942 - DNA, 120 bp, Artificial Sequence
  ENSG00000259494_11 (sequence is synthesized)
tcttttttgaagactcaaaatatggtttgctgttcaaagaagcttacctcttgatttcttaccttttagtttcctcaagattgtgagactcttccctggaagaggtcagagttagagaga

SEQ ID NO: 785943 - DNA, 120 bp, Artificial Sequence
  ENSG00000259494_12 (sequence is synthesized)
tagtcagagagaagtttggagaccaggatgtttggatactgccccaggcagagtggcagcctggggagacccttcgaggaacagctgaacgaaccctggccacactctcaggtgacaccc

SEQ ID NO: 785944 - DNA, 120 bp, Artificial Sequence
  ENSG00000259494_13 (sequence is synthesized)
attttaaaggtggatgaactttgttttacagaccaaatgtcctcgtccttcaccagcagatagcgactgggctgattcaccaacagttagcgactgggctgattcgccaacagatagcga

SEQ ID NO: 785945 - DNA, 120 bp, Artificial Sequence
  ENSG00000259494_14 (sequence is synthesized)
ctgggctgattcgccagcagatagcgactgggctgattcgccagcatagcgactgggctgattcgccagcagatagcgactgggctgaatgtaggaactagaaaacaacatggaagccaa

SEQ ID NO: 785946 - DNA, 120 bp, Artificial Sequence
  ENSG00000259494_15 (sequence is synthesized)
tccacaaaattcacttcagactcagccagaggatttttaggctgactggggaattggattaagggtgggggtgggaaggttaatggaaattttgaagtttataaaaatttcagccagaaa

SEQ ID NO: 785947 - DNA, 120 bp, Artificial Sequence
  ENSG00000259494_16 (sequence is synthesized)
ttattttttttttatttttatttttagaccaggtgagaatcctttgttccactgagattttaaaatttagtacattcaaaattgatatttctaccattttctcagcctgcttgtcttctt

SEQ ID NO: 785948 - DNA, 120 bp, Artificial Sequence
  ENSG00000259494_17 (sequence is synthesized)
ctcagcctgcttgtcttcttatctttgcagcactgcttattgccatcactgcttatctgttcactcaacttgaaacctcagaattgtccttgacctcattcccacatccataagtccttg

SEQ ID NO: 785949 - DNA, 120 bp, Artificial Sequence
  ENSG00000259494_18 (sequence is synthesized)
agtccctcgtgatctgttctaaatagtcccctctttgttctaacagctttagctgtgaccctcttcacttctcactagactagggtttcccatctctggcattattggtgtttggggtcg

SEQ ID NO: 785950 - DNA, 120 bp, Artificial Sequence
  ENSG00000259494_19 (sequence is synthesized)
gataagtgtggggagctattctttgtgttataggatgtttagcagtatctctggcctgtacctactagatgccagtagcactacctcatcccctgaccccacccccagtgcagtaaccaa

SEQ ID NO: 785951 - DNA, 120 bp, Artificial Sequence
  ENSG00000259494_20 (sequence is synthesized)
aaatatctctagacatggccagatatttcccagggagcaaattacagtggttgagaagtactatactgagctattgaattagatgcccagtaagtttaaccttggttttgtggagtgccc

SEQ ID NO: 785952 - DNA, 120 bp, Artificial Sequence
  ENSG00000259494_21 (sequence is synthesized)
ttcagtgctgccaaaatgagctttctgaaacacacatcccttgtcacttctctgcatggaattcttaaaaggtttccaataaaaattctaactgtcaagcatggcctgcaaatcttattt

SEQ ID NO: 785953 - DNA, 120 bp, Artificial Sequence
  ENSG00000259494_22 (sequence is synthesized)
gccctgatcccagtctcatcagtctgccgtcttgctgttcattaatgtaaaattcaagttctaacttaacaaaccttttgcattccttgaatagtatggtctttcatgtgtctctgcttt

SEQ ID NO: 785954 - DNA, 120 bp, Artificial Sequence
  ENSG00000259494_23 (sequence is synthesized)
ggggcctgctggtccctgatgaaatactttactccttcctggcctgactgctcagtttttaagacagtttatacattataccgtatgtggtgaaacctttcctgagccttcaggaagaca

SEQ ID NO: 785955 - DNA, 120 bp, Artificial Sequence
  ENSG00000259494_24 (sequence is synthesized)
gagctactcctctctctaggctcccgtagcactggtgtgtgtccttattccatttatgcaacagacatatagggtctcagtgatgaacaggacactaccctactccctaggagcttgtgt

SEQ ID NO: 785956 - DNA, 120 bp, Artificial Sequence
  ENSG00000259494_25 (sequence is synthesized)
tctagtggagaatacattctttcacttatgccattgcactataattgtttactaacacatttttctccctagtcagaattttgacttccttaaacatgtgggcagtatctgttcctctct

SEQ ID NO: 785957 - DNA, 120 bp, Artificial Sequence
  ENSG00000259494_26 (sequence is synthesized)
ctgatcctagctttcagcaaagtacctggcacataggcatttgttgaatgttgactaaatggatttggtggtgcacagccactttacctgccctcccatcagcacaagtacctgctaacg

SEQ ID NO: 785958 - DNA, 120 bp, Artificial Sequence
  ENSG00000259494_27 (sequence is synthesized)
aaatgtcggtagccagtgtgtgttcccttgactctcccaaggggcctgtgtggcctgcaggagagacatcaagacagaatggaatatggtaggagaggaggttgctgctttctcagtctc

SEQ ID NO: 785959 - DNA, 120 bp, Artificial Sequence
  ENSG00000259494_28 (sequence is synthesized)
ctcagccatcacataggagtcagcagctgagtttcttgcgaggatcattgtgtccagatgctcaacgtctcttaacgtcaaacattcacaactgatccttgctcagctcccctttctgtt

SEQ ID NO: 785960 - DNA, 120 bp, Artificial Sequence
  ENSG00000259494_29 (sequence is synthesized)
tgcagtgaggaaaggggttctacccaagcactatgctttcctttaaacattgccattgtaataagtaaatgtaaaaggaaatatatcaaatatattaaaacacatatttatgtttaatag

SEQ ID NO: 785961 - DNA, 120 bp, Artificial Sequence
  ENSG00000259494_30 (sequence is synthesized)
atgcatataaaatagtgtattgacttattacaaatttactaaactgacaaataatataaaatggcaaagaaaaactcaagcaatgtaagagtatatactgtatatttaaaaagtgaaagt

SEQ ID NO: 785962 - DNA, 120 bp, Artificial Sequence
  ENSG00000259494_31 (sequence is synthesized)
gcgctcctttcctcccctctggctccacactgccagtatttctgcaagatggaatttctagcggtagaattaatgggtcaaagatgtgcacacttcagtttttggtaagtgcagcccagt

SEQ ID NO: 785963 - DNA, 120 bp, Artificial Sequence
  ENSG00000259494_32 (sequence is synthesized)
tgccctccagaatgtatataacaattgacgttttccaggagtggtgtctgagagtgcctctttgtctaaacctcactgacacatgaaatagttgcttttaaaattttgctcgtctagtga

SEQ ID NO: 785964 - DNA, 120 bp, Artificial Sequence
  ENSG00000259494_33 (sequence is synthesized)
gtcagatgatctctttcagattagcattttcctgtttgctagtgagattcagtatcttcatgtgtttattggctgtttgtacttcttcttttgtgaactgcctatttagatcgttcgctc

SEQ ID NO: 785965 - DNA, 120 bp, Artificial Sequence
  ENSG00000259494_34 (sequence is synthesized)
atctttgtaataagctgttttttctttttaatttgtttatatttttaatccatcttttccagattatagaaaagtaacatgcatttatgggattaagtttagaaaattcaggaaagtgta

SEQ ID NO: 785966 - DNA, 120 bp, Artificial Sequence
  ENSG00000259494_35 (sequence is synthesized)
ctgctaacgttttttactttatgtgagctcacactatctataaatttttcatctaatgctaggtagtgttttttttttttagtatgagaaaagccattcacgtatgtggtaaaaaaatta

SEQ ID NO: 785967 - DNA, 120 bp, Artificial Sequence
  ENSG00000259494_36 (sequence is synthesized)
tcggtgtctcgtaaatgtagtgtaagatgtaattttcctttttcagaagcaacctctattaatagtgtttttctgtatctcttcagaaattctctatgcatatacagatgcataaatgtt

SEQ ID NO: 785968 - DNA, 120 bp, Artificial Sequence
  ENSG00000259494_37 (sequence is synthesized)
ttgttttctttttttgcatataacgggaacatgtttatacactgttgtgtgccttccttttttctcatatacgcttttaaacatcttttcaggtcagcctattaagacctatcttaagct

SEQ ID NO: 785969 - DNA, 120 bp, Artificial Sequence
  ENSG00000259494_38 (sequence is synthesized)
ttttttaacaccagcatactattttataatatgtatgtactgcagtttgtttagccagtctgtttttacaaacaaagctgcagtgaatatccttgtatgctcatctttgctcacatgggc

SEQ ID NO: 785970 - DNA, 120 bp, Artificial Sequence
  ENSG00000259494_39 (sequence is synthesized)
aaattagtatatctggtaggataaaagtctagaactggagttgctaggtcaaagggcatgtgcaattaagttgacacctcttgccaattaatagcacttatactaatttataacccctcc

SEQ ID NO: 785971 - DNA, 120 bp, Artificial Sequence
  ENSG00000259494_40 (sequence is synthesized)
aaaatatgtgtgaaagtacaggttttttccttatccttcataagcagagtacagttaagtttttgaacttcaataatgatatatgttgttgtttaactttatttctttaaattattaata

SEQ ID NO: 785972 - DNA, 120 bp, Artificial Sequence
  ENSG00000259494_41 (sequence is synthesized)
agtttgaacaccttttaatgtatttatgggccagtgatatttattttcatgtgagcttaactgttcatgtgcttggttcatttttctttttaatttgttgttttttttcctcattgattt

SEQ ID NO: 785973 - DNA, 120 bp, Artificial Sequence
  ENSG00000259494_42 (sequence is synthesized)
tttttcctttagagatggaatcttgctatgttgcccaggctggccttaaactcctattctcaagcagtactcctgcctcagcttcctgagtatctgcattgatttttaagtgcttcttat

SEQ ID NO: 785974 - DNA, 120 bp, Artificial Sequence
  ENSG00000259494_43 (sequence is synthesized)
accttaagatattcctttgttgaacgtgttgaaaatatttttcctagtttgtcattttgtctttgactttttttgtgcttcatttttccttgcagaaagatttaatttttatgtagacaa

SEQ ID NO: 785975 - DNA, 120 bp, Artificial Sequence
  ENSG00000259494_44 (sequence is synthesized)
atataaatcttttgttttttgggcttaaaaattttgtttcttgcttagaaaggccttgccctctcaaataatatcttaaggtttaagaaagcatcctgcattttcttctaatgctcatgt

SEQ ID NO: 785976 - DNA, 82 bp, Artificial Sequence
  ENSG00000259494_45 (sequence is synthesized)
gtttaagaaagcatcctgcattttcttctaatgctcatgtgtttttattgtaattagaaaatatgccctcacaagttcaaga

SEQ ID NO: 785977 - DNA, 120 bp, Artificial Sequence
  ENSG00000259494_46 (sequence is synthesized)
ctgggtgacaaagcgagactctgtcttgggaaaaaaaaaatacagagaagattggaaaatattaaatgtccatgaaacaaccatccagaatgaataaattttttatgaaaagttaaaatg

SEQ ID NO: 785978 - DNA, 120 bp, Artificial Sequence
  ENSG00000259494_47 (sequence is synthesized)
atgaaaagttaaaatgtctattgttaaatctttgatctatatggtatcaattttattgtgaggactgagtatggaatccagcttggtttttcccatctggctaatcagttcttcagatgc

SEQ ID NO: 785979 - DNA, 120 bp, Artificial Sequence
  ENSG00000259494_48 (sequence is synthesized)
cgtttagtaattagtccatcatttccccatcatttgaaatgctgaattggggttgttaacccttagttatagattacagatactgtctactcatctgtttttgtctttaacttggtttat

SEQ ID NO: 785980 - DNA, 120 bp, Artificial Sequence
  ENSG00000259494_49 (sequence is synthesized)
tgagcctggtgaatctggactccatgggccaggaggcatttggattgagaggggaggagcctcttttcaggaatggctctagtcctattcctagggattgattttacctcagggccagat

SEQ ID NO: 785981 - DNA, 120 bp, Artificial Sequence
  ENSG00000259511_0 (sequence is synthesized)
agaacggaccagatgggtccagcagtgctgggtcaaggccaggaggggcagccggaagcgcgcgcatgctctggactcctgcagccgccgaaacggccaatcgtgtttaaggagaaacta

SEQ ID NO: 785982 - DNA, 87 bp, Artificial Sequence
  ENSG00000259511_1 (sequence is synthesized)
tcccgggtcgctgctgtgttctggaaaggcgcattgtaccctggatgcagcaggaatcctattcatcttcttcaccgatatggtctg

SEQ ID NO: 785983 - DNA, 120 bp, Artificial Sequence
  ENSG00000259511_2 (sequence is synthesized)
tcttcttcaccgatatggtctgtggactctgatgagccaaatctgacatcagttctggaacgtctagaagatactaaggagaacagttcggtgaggaaagaaaccaagctattttctctt

SEQ ID NO: 785984 - DNA, 120 bp, Artificial Sequence
  ENSG00000259511_3 (sequence is synthesized)
caagctattttctcttttcctcatgaacattatatttagaaattaaatgttaagtgataatattatataaaaacatgattaacaactgtaatcttagaggaattaaagtctgggtatttt

SEQ ID NO: 785985 - DNA, 120 bp, Artificial Sequence
  ENSG00000259511_4 (sequence is synthesized)
gcgggttgaggggtgaggggcgacgggtgtgaggggcgagagggacgggagcggggtaggggcagccctttcccaggcgatagcgggggctgtggtgctgttgcccttttaagctgcggc

SEQ ID NO: 785986 - DNA, 120 bp, Artificial Sequence
  ENSG00000259511_5 (sequence is synthesized)
ttgacaggagcagcgcctcctgtcggtggagtctgttacaaggggagcagccgcccaggccgccacacagctccccgcagaggcctcggtgccccttgccattttccagccctactccga

SEQ ID NO: 785987 - DNA, 120 bp, Artificial Sequence
  ENSG00000259511_6 (sequence is synthesized)
ctagagttgaggcatcagggagaggcggagctgggagagcgccgccgagaggtcccgcgggtggttgcggccgtgacagcggctcccgacgggctcaccttccgcgcccctcccgccaga

SEQ ID NO: 785988 - DNA, 120 bp, Artificial Sequence
  ENSG00000259511_7 (sequence is synthesized)
atgtccgtgtgagggttcaaggccaagctgaagttgttggcctctatcttccacaagaaccaggagccgccgccgcagctcacgctccactgcaacatcacgccaatcgtgtttaaggag

SEQ ID NO: 785989 - DNA, 120 bp, Artificial Sequence
  ENSG00000259571_0 (sequence is synthesized)
atgatgttgtgtttggagaaaagagagaagagaattgaataagtacatgaccccttggaagctgttttcagttgaggattttggtgagtagccacttgaaatcaagggaaattccatgaa

SEQ ID NO: 785990 - DNA, 120 bp, Artificial Sequence
  ENSG00000259571_1 (sequence is synthesized)
tagcaggagctgggaagaaaggaagaggaggaaggatcccaccacttttttcttcccatctaacaccgtgcttatgcaaagcatagtccatatgagatctgccttataaaaacttgctga

SEQ ID NO: 785991 - DNA, 120 bp, Artificial Sequence
  ENSG00000259571_2 (sequence is synthesized)
ataaagcgaatggaagttaaattttggactttcttccataatagcttcaaattatggtgactttgttgcctatagagggccaggaaatacatttctttgagatcctagaatctgagtgtg

SEQ ID NO: 785992 - DNA, 120 bp, Artificial Sequence
  ENSG00000259571_3 (sequence is synthesized)
gttccatttatccagaggcaaaagcacgcctgccactggaggcgctcttgggttccaacaaagaacctatgttgcctaaggaaacagtgctttctcttaaaaggtacaatcttggctcct

SEQ ID NO: 785993 - DNA, 120 bp, Artificial Sequence
  ENSG00000259571_4 (sequence is synthesized)
ctgccatgaagcggaatgttcctggacatgtgcttcagagaccttcctatttaaccaggatacaagttacattgttatgcaattcctctgctgaggccctgtaaaaggagtgagttagga

SEQ ID NO: 785994 - DNA, 120 bp, Artificial Sequence
  ENSG00000259571_5 (sequence is synthesized)
cagatgcagcaagatattaggacagatttcgcccattattcaggctgcacaacacagaaggaaacttgatttcaataagacccaattcttaacagtcttttctacccacttttacccata

SEQ ID NO: 785995 - DNA, 120 bp, Artificial Sequence
  ENSG00000259571_6 (sequence is synthesized)
acttttccaaatttggttcaaattgtgcagagaaacaataaaatttttaaaaaggataaactggctagttaaaagtaaatggcatttaattaaaacaaatcttgcaaattcatgaaaaaa

SEQ ID NO: 785996 - DNA, 66 bp, Artificial Sequence
  ENSG00000259680_0 (sequence is synthesized)
taaaaggtgggtccctgagactgtcctgtccagactctggattcaccttcagtaaccactacatga

SEQ ID NO: 785997 - DNA, 120 bp, Artificial Sequence
  ENSG00000259680_1 (sequence is synthesized)
caaactacgcagactctgtgaagggccgattcaccatctccagggacaacgccaataactcaccgtatctgcaaatgaacagcttgagagctgaggacacggctgtgtattactgtgtga

SEQ ID NO: 785998 - DNA, 120 bp, Artificial Sequence
  ENSG00000259803_0 (sequence is synthesized)
cgcgggtgctgagagctgcgggcggctttggccgggcccggcgcctgctggcctccgcctcgtgggtaccctgcatagtgctggggctggtgctgagctccgaggagctgcttaccgcgc

SEQ ID NO: 785999 - DNA, 120 bp, Artificial Sequence
  ENSG00000259803_1 (sequence is synthesized)
ctgagctccgaggagctgcttaccgcgcagcccgcgccccactgccgaccggaccccacgctgttgcccccagcgctgcgcgccctgcgcggacccgcgctgctggacgccgccatcccg

SEQ ID NO: 786000 - DNA, 80 bp, Artificial Sequence
  ENSG00000259803_2 (sequence is synthesized)
ccccgcgcccgcacgcaacggcacccggccctgcacacgcggctggctctacgcgctgcccggcgccggcctcctgcaaa

SEQ ID NO: 786001 - DNA, 120 bp, Artificial Sequence
  ENSG00000259803_3 (sequence is synthesized)
gccggcctcctgcaaagcccggtcacccagtggaaccttgtgtgtggagacggctggaaggtcccgctggagcaggtgagccacctcctgggctggctgctgggctgtgtcatcctggga

SEQ ID NO: 786002 - DNA, 120 bp, Artificial Sequence
  ENSG00000259803_4 (sequence is synthesized)
gcaggctgtgaccggtttggacgccgggcagtttttgtggcctccctggtgctgaccacaggcctgggggccagtgaggccctggctgccagcttccctaccctgctggtcctgcgccta

SEQ ID NO: 786003 - DNA, 120 bp, Artificial Sequence
  ENSG00000259803_5 (sequence is synthesized)
ctccacgggggcacattggcaggggccctcctcgccctgtatctggctcgcctggagttgtgtgaccctccccaccgcctggccttctccatgggggctggccttttctcggtggtgggc

SEQ ID NO: 786004 - DNA, 120 bp, Artificial Sequence
  ENSG00000259803_6 (sequence is synthesized)
accctgctgctgcccggcctggctgcgcttgtgcaggactggcgtcttctgcaggggctgggtgccctgatgagtggactcttgctgctcttttgggggttcccggccctgttccccgag

SEQ ID NO: 786005 - DNA, 120 bp, Artificial Sequence
  ENSG00000259803_7 (sequence is synthesized)
tctccctgctggctgctggccacaggtcaggtagctcgagccaggaagatcctgtggcgctttgcagaagccagtggcgtgggccccggggacagttccttggaggagaactccctggct

SEQ ID NO: 786006 - DNA, 120 bp, Artificial Sequence
  ENSG00000259803_8 (sequence is synthesized)
ggagcccccagccccggtaccactccccactggggcttctgcgtacccgagtcacctggagaaacgggcttatcttgggcttcagctcgctggttggtggaggcatcagagctagcttcc

SEQ ID NO: 786007 - DNA, 120 bp, Artificial Sequence
  ENSG00000259803_9 (sequence is synthesized)
gccgcagcctggcacctcaggtgccgaccttctacctgccctacttcctggaggccggcctggaggcggcagccttggtcttcctgctcctgacggcagattgctgtggacgccgccccg

SEQ ID NO: 786008 - DNA, 120 bp, Artificial Sequence
  ENSG00000259803_10 (sequence is synthesized)
tgctgctgctgggcaccatggtcacaggcctggcatccctgctgctcctcgctggggcccagtatctgccaggctggactgtgctgttcctctctgtcctggggctcctggcctcccggg

SEQ ID NO: 786009 - DNA, 120 bp, Artificial Sequence
  ENSG00000259803_11 (sequence is synthesized)
ctgtgtccgcactcagcagcctcttcgcggccgaggtcttccccacggtgatcaggggggccgggctgggcctggtgctgggggccgggttcctgggccaggcagccggccccctggaca

SEQ ID NO: 786010 - DNA, 120 bp, Artificial Sequence
  ENSG00000259803_12 (sequence is synthesized)
ccctgcacggccggcagggcttcttcctgcaacaagtcgtcttcgcctcccttgctgtccttgccctgctgtgtgtcctgctgctgcctgagagccgaagccgggggctgccccagtcac

SEQ ID NO: 786011 - DNA, 120 bp, Artificial Sequence
  ENSG00000259803_13 (sequence is synthesized)
tgcaggacgccgaccgcctgcgccgctccccactcctgcggggccgcccccgccaggaccacctgcctctgctgccgccctccaactcctactgggccggccacacccccgagcagcact

SEQ ID NO: 786012 - DNA, 120 bp, Artificial Sequence
  ENSG00000259803_14 (sequence is synthesized)
agtcctgcctggtggccctgggagccaggatgggaccaaagtcaaggcctggggcatggctgagtaccccagacgtctggtccagggcagacacattcctctcagaagcccgtgtctcag

SEQ ID NO: 786013 - DNA, 120 bp, Artificial Sequence
  ENSG00000259803_15 (sequence is synthesized)
tgcaggtggagccgtggggacagcgtgaaggtgtctccagccaggccccaggcactgggaggccctgggtctccccccagccacacccagtaggtgtggaggataaaggcttctgtggaa

SEQ ID NO: 786014 - DNA, 120 bp, Artificial Sequence
  ENSG00000259803_16 (sequence is synthesized)
agagctggccgtgggggaagagcaatggtgtgcggaggtgggggaggccctatctagggacaagcagaaaacttagggtgggcagatccccccgacccctgtgcaggggctgccggagac

SEQ ID NO: 786015 - DNA, 120 bp, Artificial Sequence
  ENSG00000259803_17 (sequence is synthesized)
cagagaggctgctgtgtgacctggaccaagccccttgccctctcatgcctcagtttccccttctctccacggagggattgagcaggacatggagggccccttccagtagccattctggga

SEQ ID NO: 786016 - DNA, 120 bp, Artificial Sequence
  ENSG00000259803_18 (sequence is synthesized)
ccgctgcccgagtccctcttgaaatgggcagggcagggagggcgtgggtaccagcgcaggtgctggggttcatttcttaggcctgtgtcatggctatgacccttggccggctggggtggg

SEQ ID NO: 786017 - DNA, 120 bp, Artificial Sequence
  ENSG00000259823_0 (sequence is synthesized)
aagcctctactgggaaccaccttctgtaggacagtcaccaggccagatccagaagcctctctaggctccagctttctctgtggaagatgacagcaattatagcaggaccctgccaggctg

SEQ ID NO: 786018 - DNA, 120 bp, Artificial Sequence
  ENSG00000259823_1 (sequence is synthesized)
tcgaaaagattccgcaataaaactttgccagtgggaagtacctagtgaaacggcctaagatgccacttcttctcatgtcccaggcttgaggccctgtggtccccatccttgggagaagtc

SEQ ID NO: 786019 - DNA, 120 bp, Artificial Sequence
  ENSG00000259823_2 (sequence is synthesized)
agctccagcaccatgaagggcatcctcgttgctggtatcactgcagtgcttgttgcagctgtagaatctctgagctgcgtgcagtgtaattcatgggaaaaatcctgtgtcaacagcatt

SEQ ID NO: 786020 - DNA, 120 bp, Artificial Sequence
  ENSG00000259823_3 (sequence is synthesized)
gcctctgaatgtccctcacatgccaacaccagctgtatcagctcctcagccagctcctctctagagacaccagtcagattataccagaatatgttctgctcagcggagaactgcagtgag

SEQ ID NO: 786021 - DNA, 120 bp, Artificial Sequence
  ENSG00000259823_4 (sequence is synthesized)
aatgcagcaacaccagcgatgccctggaccctcccctgaagaacgtgtccagcaacgcagagtgccctgcttgttatgaatctaatggaacttcctgtcatgggaagccctggaaatgct

SEQ ID NO: 786022 - DNA, 120 bp, Artificial Sequence
  ENSG00000259823_5 (sequence is synthesized)
atgaagaagaacagtgtgtctttctagttgcagaacttaagaatgacattgagtctaagagtctcgtgctgaaaggctgttccaacgtcagtaacgccacctgtcagttcctgtctggtg

SEQ ID NO: 786023 - DNA, 120 bp, Artificial Sequence
  ENSG00000259823_6 (sequence is synthesized)
aaaacaagactcttggaggagtcatctttcgaaagtttgagtgtgcaaatgtaaacagcttaacccccacgtctgcaccaaccacttcccacaacgtgggctccaaagcttccctctacc

SEQ ID NO: 786024 - DNA, 120 bp, Artificial Sequence
  ENSG00000259823_7 (sequence is synthesized)
tcttggcccttgccagcctccttcttcggggactgctgccctgaggtcctggggctgcactttgcccagcaccccatttctgcttctctgaggtccagagcaccccctgcggtgctgaca

SEQ ID NO: 786025 - DNA, 120 bp, Artificial Sequence
  ENSG00000259823_8 (sequence is synthesized)
ccctctttccctgctctgccccgtttaactgcccagtaagtgggagtcacaggtctccaggcaatgccgacagctgccttgttcttcattattaaagcactggttcattcactgcccaaa

SEQ ID NO: 786026 - DNA, 120 bp, Artificial Sequence
  ENSG00000259916_0 (sequence is synthesized)
atggttcaagcatctgggcacaggcggtccacccgtggctccaaaatggtctcctggtccgtgatagcaaagatccaggaaatatggtgcgaggaagatgagaggaagatggtgcgagag

SEQ ID NO: 786027 - DNA, 120 bp, Artificial Sequence
  ENSG00000259916_1 (sequence is synthesized)
ttcttggccgagttcatgagcacatatgtcatgatggtattcggccttggttctgtggcccatatggttctaaataaaacatatgggagctaccttggtgtcaacttgggttttggcttc

SEQ ID NO: 786028 - DNA, 120 bp, Artificial Sequence
  ENSG00000259916_2 (sequence is synthesized)
ggggtcaccatgggagtccacgtggcaggccgcatctctggagcccacatgaatgcagctgtgaccttcactaactgtgcgctgggccgcgtgccctggaggaagtttccagtccatgtg

SEQ ID NO: 786029 - DNA, 120 bp, Artificial Sequence
  ENSG00000259916_3 (sequence is synthesized)
ctggggcagttcctgggctccttcctggcagctgccaccatctacatctgtgtctccgcagcggccattctccacttttcgggtggagagctgatggtgaccggtccctttgctacagct

SEQ ID NO: 786030 - DNA, 120 bp, Artificial Sequence
  ENSG00000259916_4 (sequence is synthesized)
ctgtgtctcttcaccatcacggaccaggagaacaacccagcactgccaggaacacacgcgctggtgataagcatcctcgtggtcatcatcagggtgtcccatggcataaacacaggatat

SEQ ID NO: 786031 - DNA, 120 bp, Artificial Sequence
  ENSG00000259916_5 (sequence is synthesized)
gccatcaatccatcccgggacccgccccccagcatcttcaccttcattgctggctggggcaaacaggtcttcagcgatggggagaactggtggtgggtgccagtggtggcaccacttctg

SEQ ID NO: 786032 - DNA, 120 bp, Artificial Sequence
  ENSG00000259916_6 (sequence is synthesized)
ggtgcctctctaggtggcatcatctacctggtcttcattggctccaccatcccacgggagcccctgaaattggaggactctgtggcgtatgaagaccacgggataaccgtattgcccaag

SEQ ID NO: 786033 - DNA, 120 bp, Artificial Sequence
  ENSG00000259916_7 (sequence is synthesized)
atgggatctcatgaacccatgatctctcccctcaccctcatctccgtgagccttgccaacagatcttcagtccactctgccccacccttacatgaatccatggccctagagcacttctaa

SEQ ID NO: 786034 - DNA, 120 bp, Artificial Sequence
  ENSG00000259956_0 (sequence is synthesized)
gcgccgagtccttttgtccaagatggcggcgccgggggcgctgcctcctcggccgccgcctccgccgccgccgctgtgagaaacctacgggccgcccgcccgccgcgccagcgccatgaa

SEQ ID NO: 786035 - DNA, 120 bp, Artificial Sequence
  ENSG00000259956_1 (sequence is synthesized)
gcggcagagcgagcgagactctagcccgagcgggcgcggctcgtcatcgtccgccaagcgtccgcgggagcgcgaacgggaggcggaggcgggcgggcggcgggcggcgcacaaggcctc

SEQ ID NO: 786036 - DNA, 80 bp, Artificial Sequence
  ENSG00000259956_2 (sequence is synthesized)
aaaccccgcggcagcggaagcggcgggggcgggcatcgcgacggccgcggcaccggggacgcgaatcaccgcgcgagtag

SEQ ID NO: 786037 - DNA, 80 bp, Artificial Sequence
  ENSG00000259956_3 (sequence is synthesized)
gcaaggcctcgggggacccgggcgcctccggcatgtcgccccgcgcgtctcctctgccgccgcctccgccaccgcctggg

SEQ ID NO: 786038 - DNA, 120 bp, Artificial Sequence
  ENSG00000259956_4 (sequence is synthesized)
tggggccgagcccgcgtgtcccggctcatccgcggccgcgcctgagtacaagacgttgctcatcagcagcttgagccccgcgctgcccgccgagcacctcgaggaccggctcttccacca

SEQ ID NO: 786039 - DNA, 120 bp, Artificial Sequence
  ENSG00000259956_5 (sequence is synthesized)
gttcaagcgcttcggcgagatcagcctccgcctgtcgcacacgcctgagctgggccgtgtggcctacgtgaatttccggcacccacaggacgcacgcgaggcccgccagcacgccctggc

SEQ ID NO: 786040 - DNA, 120 bp, Artificial Sequence
  ENSG00000259956_6 (sequence is synthesized)
ccggcagctgctgctctacgaccgcccgctcaaggtagagcccgtgtacctgcgtggcggcggcgggagcagtcggcgaagtagcagcagcagcgccgccgcttccacgcctcccccagg

SEQ ID NO: 786041 - DNA, 120 bp, Artificial Sequence
  ENSG00000259956_7 (sequence is synthesized)
gccgcccgcgcccgccgacccgctcggctacctcccgctacacggaggctaccagtacaagcagcgctcgctgtcccccgtcgctgccccgcccctgcgggagccccgtgcccgtcacgc

SEQ ID NO: 786042 - DNA, 120 bp, Artificial Sequence
  ENSG00000259956_8 (sequence is synthesized)
cgccgcagccttcgccctggatgccgctgctgccgccgccgtgggactgtcccgggagcgggccctggactactacgggctgtacgacgaccgtgggcgcccctatggctacccagctgt

SEQ ID NO: 786043 - DNA, 120 bp, Artificial Sequence
  ENSG00000259956_9 (sequence is synthesized)
gtgtgaggaggacctgatgcccgaggatgaccagcgggccacgcgcaacctcttcattggtaacctggaccacagcgtatctgaggtggagctgcgaagggccttcgagaaatatggcat

SEQ ID NO: 786044 - DNA, 120 bp, Artificial Sequence
  ENSG00000259956_10 (sequence is synthesized)
catcgaggaggtggtcatcaagaggcctgcccgtggccagggcggtgcctatgccttcctcaagttccagaacctggacatggcccatagggctaaggtggccatgtcgggccgagtgat

SEQ ID NO: 786045 - DNA, 120 bp, Artificial Sequence
  ENSG00000259956_11 (sequence is synthesized)
tggtcgcaaccccattaagataggctatggcaaggccaaccccaccactcgtctctgggtgggtggcctgggacctaacacgtcactggcggctctggcccgagagtttgaccgctttgg

SEQ ID NO: 786046 - DNA, 120 bp, Artificial Sequence
  ENSG00000259956_12 (sequence is synthesized)
gagcattcggaccattgatcacgtcaaaggagatagctttgcctatattcagtacgagagcttggacgcagcccaggccgcctgtgctaaaatgaggggttttcccttgggtggaccaga

SEQ ID NO: 786047 - DNA, 120 bp, Artificial Sequence
  ENSG00000259956_13 (sequence is synthesized)
ccgcaggctccgcgtggattttgccaaagcagaggagactcggtacccccagcagtaccagccctcgccactccctgtgcattatgagctgctcacagatggatacacccggcaccgcaa

SEQ ID NO: 786048 - DNA, 120 bp, Artificial Sequence
  ENSG00000259956_14 (sequence is synthesized)
cctggacgccgacctggtgcgggacaggacgcccccacaccttctgtactcagaccgagaccggacttttttggaaggggactggaccagccccagtaaaagctctgaccgccgaaacag

SEQ ID NO: 786049 - DNA, 120 bp, Artificial Sequence
  ENSG00000259956_15 (sequence is synthesized)
ccttgagggctacagtcgctcagtgcgcagccggagtggtgagcgttggggggcagatggagaccgtggtttgcccaagccctgggaagagaggcggaaacggagaagcctttccagtga

SEQ ID NO: 786050 - DNA, 120 bp, Artificial Sequence
  ENSG00000259956_16 (sequence is synthesized)
ccgtgggaggacaacccattcaccatatgaggaacggagtaggaccaagggcagtgggcagcagtcagagcggggctccgaccgcacccctgagcgcagccgcaaggagaaccactccag

SEQ ID NO: 786051 - DNA, 120 bp, Artificial Sequence
  ENSG00000259956_17 (sequence is synthesized)
tgaagggaccaaggagtccagcagcaactccctcagcaacagcagacatggggctgaggaacggggccaccaccaccaccaccacgaggctgcagactcttcccacgggaagaaggcaag

SEQ ID NO: 786052 - DNA, 120 bp, Artificial Sequence
  ENSG00000259956_18 (sequence is synthesized)
agacagcgagcgcaatcaccggaccacagaggccgagcccaagcctctggaagagccaaaacacgagaccaaaaagctgaagaatctttcagagtacgctcagacactacagctgggttg

SEQ ID NO: 786053 - DNA, 120 bp, Artificial Sequence
  ENSG00000259956_19 (sequence is synthesized)
gaatgggcttctggtgttgaaaaacagctgcttccccacgtctatgcatatcctagagggggaccagggggtgatcagcagtctcctcaaagaccacacttctgggagcaagctgaccca

SEQ ID NO: 786054 - DNA, 120 bp, Artificial Sequence
  ENSG00000259956_20 (sequence is synthesized)
gctgaagatcgcccagcgccttcgactggaccagcccaagcttgacgaggtcacacgacgcatcaagcaggggagccccaacggctatgcggtcctcttagccacccaggcaacccccag

SEQ ID NO: 786055 - DNA, 120 bp, Artificial Sequence
  ENSG00000259956_21 (sequence is synthesized)
tgggcttggcactgaggggatgcccacagtagagcccggtctgcagaggcggcttctcaggaacctggtctcctacttgaaacagaagcaggccgcaggggtgatcagcttgccagtggg

SEQ ID NO: 786056 - DNA, 120 bp, Artificial Sequence
  ENSG00000259956_22 (sequence is synthesized)
ggggtccaagggcagagacggcacaggcatgctctacgccttcccaccctgcgacttttcccagcagtacctccagtcagcactaaggacattgggcaagctagaagaagaacacatggt

SEQ ID NO: 786057 - DNA, 120 bp, Artificial Sequence
  ENSG00000259956_23 (sequence is synthesized)
gatagtcatcgtcagagacactgcctagcccaagcctgtctttcccagcgtcatgtttgtgtcacaaaagcagttattttaaaatctgatcccctctctaccctaccactttggtttgaa

SEQ ID NO: 786058 - DNA, 120 bp, Artificial Sequence
  ENSG00000259956_24 (sequence is synthesized)
ttatctcctgggttattttggttcatttgggtggggatcaaagtcctgtccaccaccaaaactaagttcttagattttgggggatttttttttttaaacgatgagaagggaatccggtta

SEQ ID NO: 786059 - DNA, 120 bp, Artificial Sequence
  ENSG00000259956_25 (sequence is synthesized)
tgttgatttctagtgtacaagatactgtctgctgtggttctgtatttttttattttttgaccaactgtatggaaagttgtcagtaaaacctttgacagaggatggatttttaaacctgtt

SEQ ID NO: 786060 - DNA, 120 bp, Artificial Sequence
  ENSG00000259956_26 (sequence is synthesized)
cagagtcctggtttaatcaatcaagctaaaagaatcgaagacatccctagtgcatgtacacgaatgccctacgtcatccttccagcaccactgctgcatgggtcactctcggcctctcaa

SEQ ID NO: 786061 - DNA, 120 bp, Artificial Sequence
  ENSG00000259956_27 (sequence is synthesized)
acttacactcatttttatcttggctgacagcaggcaagcttcagtttgggctgtggacgctgccacacaagcctgagtagagcccatgcaaaggaagggatggggtgagcgcaaggcctg

SEQ ID NO: 786062 - DNA, 120 bp, Artificial Sequence
  ENSG00000259956_28 (sequence is synthesized)
tggtcagcagctactgatggttttttctgccttaaaccgtgtgtgtgtccatcatcatcagtttgagctgtggctgtttgtttgggacagagtgcccactcagcatgtttggcagcaggt

SEQ ID NO: 786063 - DNA, 120 bp, Artificial Sequence
  ENSG00000259956_29 (sequence is synthesized)
agccttcagcagctgtgtagtcttgtacaaggagaagctgtgcactgttgatgccagggggtctcggggcccctgatctgtccaggctcctggttcggcctactttctagcctcactcag

SEQ ID NO: 786064 - DNA, 120 bp, Artificial Sequence
  ENSG00000259956_30 (sequence is synthesized)
cccagggatagccagtgttgggagacagagttgcctcaggttcccaggggcccgggagtccaaatactggaatggagggttggaggcagccttccttggatttactcatgaactttgcct

SEQ ID NO: 786065 - DNA, 120 bp, Artificial Sequence
  ENSG00000259956_31 (sequence is synthesized)
agttgtttgtgatttttggctttctctggtcgttcaggggtgatgggtaatagagcaggcccgtgtccagtcatacctagagatttgtggggggatactgaacctctagactgaagtact

SEQ ID NO: 786066 - DNA, 120 bp, Artificial Sequence
  ENSG00000259956_32 (sequence is synthesized)
taccggggagcacagtggactaggggatgcccttgataatgacggtttcctaggtgcaagatcagagcatgtgcctacaccttgtgccctgatgccgaggtggagaccattgggaaataa

SEQ ID NO: 786067 - DNA, 120 bp, Artificial Sequence
  ENSG00000259956_33 (sequence is synthesized)
ttaatagatatttttctggggggaaatcacaagtcactgaggtgtttgtttgtttgttaggcagtgctagagcttgaagccactcaagccagttggggaggaaagggatgcggaggtacc

SEQ ID NO: 786068 - DNA, 120 bp, Artificial Sequence
  ENSG00000259956_34 (sequence is synthesized)
ctctagctgggaagaagggtgagattccgtcttcttccctgtctcaagtaagtaaggaaggtactgcggacagtgtgggccagggaggaaaaccagagcacacagttttgtcaccatgga

SEQ ID NO: 786069 - DNA, 120 bp, Artificial Sequence
  ENSG00000259956_35 (sequence is synthesized)
acaccccaaatgccattcttcagcgtgtctggtaccttggatgttcaaacagggaacactgtcagggctgaggagaacagaagctctggtaagcgaatgagcccctagatgataaccagg

SEQ ID NO: 786070 - DNA, 120 bp, Artificial Sequence
  ENSG00000259956_36 (sequence is synthesized)
aactccaggttctgctggccgtggcatcctctctccaggtctgctcccttaccggagctaggataaggtagcatgagtgacacctgagattagaggctggggctcactgcaggctgtgga

SEQ ID NO: 786071 - DNA, 120 bp, Artificial Sequence
  ENSG00000259956_37 (sequence is synthesized)
gaggtcatgctggtccacaggaacacttggcagtgctctcgtagacccctcggtgatgtggaatggacaggtgcctcgcaagagagcaagcacgttcataacaaaacagcaacacaaaga

SEQ ID NO: 786072 - DNA, 120 bp, Artificial Sequence
  ENSG00000259956_38 (sequence is synthesized)
catgttaagcatgtttatttatttgcctgtttttgtttttttacttgagctgtggtcacagctgccaggtacctaagcaagtcagttgggtacagcaggacacgccaccattccagggta

SEQ ID NO: 786073 - DNA, 120 bp, Artificial Sequence
  ENSG00000259956_39 (sequence is synthesized)
gctggtaccgccagaaacaggagtgggtcttgtcctgttgcaggcacactgcagtggttttcctgcagctctccaacaaacgcctgagtcacaggccagagctgccttggtatgttgtta

SEQ ID NO: 786074 - DNA, 120 bp, Artificial Sequence
  ENSG00000259956_40 (sequence is synthesized)
agtccaaaacttcttctctgggctacctatcttccttcatgaagcaggtgctcaggacccggaagaatcatctacctcccagctttgtgagacagaaccaagtaaaaggaaacatgctag

SEQ ID NO: 786075 - DNA, 120 bp, Artificial Sequence
  ENSG00000259956_41 (sequence is synthesized)
aaaacgtgcctagagaagacacttcaacctttgccttatccaacccctcttcagagaaaggtgtcccatggccccaaaaagaactgccaagttttggtgaggagtaacaccctggcatga

SEQ ID NO: 786076 - DNA, 120 bp, Artificial Sequence
  ENSG00000259956_42 (sequence is synthesized)
cattccttctctttcctggccctcaaccacttccttcctttggctcttaagacctagcaggttctgtgaactctcaggccttggccagcactagttaggggaggtcaggtggtcaatgtc

SEQ ID NO: 786077 - DNA, 120 bp, Artificial Sequence
  ENSG00000259956_43 (sequence is synthesized)
ctggtgattttatgagactgccccactgagaaaacttacttacttcaggcatccagtgcccccacccagggttcaggccctgtctaaggtgttgcttaaagacaaaaaggcaacatgtgc

SEQ ID NO: 786078 - DNA, 120 bp, Artificial Sequence
  ENSG00000259956_44 (sequence is synthesized)
ctcactggtggtgtgccactgttctcatgctgcctcctaagtgactccgattttcagccctggtagaataaggaagacagctgatgcctccttagccccttagcacatgttcctaaggtg

SEQ ID NO: 786079 - DNA, 120 bp, Artificial Sequence
  ENSG00000259956_45 (sequence is synthesized)
tgttgtcaagccaacctgaattctgcctccctgttatagtccctgtctcccccacagagacctgtgggtgctcccagcagagttgagactggctccgttgagttaatgactagaatatag

SEQ ID NO: 786080 - DNA, 120 bp, Artificial Sequence
  ENSG00000259956_46 (sequence is synthesized)
tgctttcactacttgattgttaacctgttttcttctgatgccatcagtaccagcagtcagactattccactggttaagtgtttactaccattaaagcgaggcatgaagcaaagagctgag

SEQ ID NO: 786081 - DNA, 120 bp, Artificial Sequence
  ENSG00000259956_47 (sequence is synthesized)
tgagtcctctgctctccagaggaccaagaaatacctgtgtgacacagacccacttcagtgtgtacagcaaattctatagtgcttctgagcccagcagggctttacctgcccctggagagt

SEQ ID NO: 786082 - DNA, 120 bp, Artificial Sequence
  ENSG00000259956_48 (sequence is synthesized)
tttagccgtcttgtgtttcttgtttacttcacaaccaaatttgtcccctcttctctctgttaagggagagaagtcactttagctggataatacctatgtaacaaactgagcagctgttat

SEQ ID NO: 786083 - DNA, 120 bp, Artificial Sequence
  ENSG00000259956_49 (sequence is synthesized)
ttgggcaaaatcaaaggaagaaagagactatggtcttctatttattgtgggaaggaaaacagggtggggcgggtgagtgaaaaggtggaaatccctggtaccttgcctggtggttacaca

SEQ ID NO: 786084 - DNA, 120 bp, Artificial Sequence
  ENSG00000259956_50 (sequence is synthesized)
gtttaaccataggccaattttaggggcctctgaagtatctttctacaaacgcagacaagctccactacccctaacctgccaggatgctcaagtccactgtcacaatccctttcagaaaac

SEQ ID NO: 786085 - DNA, 120 bp, Artificial Sequence
  ENSG00000259956_51 (sequence is synthesized)
attagtggccgctgccccagctacagagacggccgaaatgctttcactccttagctttgccaactccatcctccaaaacttcccagaatacctccctttccagttctaccaaatctgtac

SEQ ID NO: 786086 - DNA, 120 bp, Artificial Sequence
  ENSG00000259956_52 (sequence is synthesized)
ttgggagcagcctgctggatccagaacatgacaacagagagctgcgtccacagggaacaaagccctgacctctctctccacattacccttacaaaaacaggccctccccatgagagagct

SEQ ID NO: 786087 - DNA, 120 bp, Artificial Sequence
  ENSG00000259956_53 (sequence is synthesized)
acacggcaggggcagacactgtgagtataagctactttcctccctggagtgctctatgtgggcagaacatgctctccttgcctctcctggaaggtgtcttctctatggcctggctagagc

SEQ ID NO: 786088 - DNA, 120 bp, Artificial Sequence
  ENSG00000259956_54 (sequence is synthesized)
tgcaaaaaagggacacaccccacttcggtaaaagaaaatagggaaaggccataaacaaagacagacttgtagtttattttgtattttttttaaataaatacactttacattaaagaaaaa

SEQ ID NO: 786089 - DNA, 120 bp, Artificial Sequence
  ENSG00000260001_0 (sequence is synthesized)
agcttcggaggcttctctaggggcgcatggctctgcaaccggctcagttgctgggctgtgcgagtcccaggggtcgccagggggcacatcaccgtcaggggggaaagtggcgcggagccc

SEQ ID NO: 786090 - DNA, 120 bp, Artificial Sequence
  ENSG00000260001_1 (sequence is synthesized)
atcatgggtgaatcggccgccgcaaccgcatcccttttccaaaggcggcggcgggggcgaggtggtcgggtcacttttcccggaggcctaaagggcagcgcgcgttttctctcctttggg

SEQ ID NO: 786091 - DNA, 120 bp, Artificial Sequence
  ENSG00000260001_2 (sequence is synthesized)
ccgcccttccccgccccgccagctcccccgttccccgcggcgcccggcccctggctgcgcagacccctcttcagcctgaagctgtccgacacagaggacgtctttcctcgccgcgcgggg

SEQ ID NO: 786092 - DNA, 120 bp, Artificial Sequence
  ENSG00000260001_3 (sequence is synthesized)
tctttcctcgccgcgcggggccgctcgaggtcccggccgacagccgcgtgttcgtgcaggcggccttggcccgtccctccccgcgctggggcctggccctgcaccgctgctcagtgacgc

SEQ ID NO: 786093 - DNA, 120 bp, Artificial Sequence
  ENSG00000260001_4 (sequence is synthesized)
gctctgctgcgtgagggctgccccgccgacacctctgtcgccttcccgccaccgccgccgccgagcccgggtgccgcccgccccgcgcgtttcagcttccgcctgcgcccggtcttcaac

SEQ ID NO: 786094 - DNA, 120 bp, Artificial Sequence
  ENSG00000260001_5 (sequence is synthesized)
gagtccgccgggcgcctgcgcctctgacgccgccgccgccgccgccgccatcgcggtgtctgcctcaggacgaggcgtgcgccgacactggcagtggcagcgccgagggcctggctgctg

SEQ ID NO: 786095 - DNA, 120 bp, Artificial Sequence
  ENSG00000260001_6 (sequence is synthesized)
gctgacggcccccacctgcacacgctgacgcagcctatcgtggtcaccgtgccgcggccgccccccaggccgcccaagagtgtccccggccgtgcagtgcgccctgagcctcccgcgccg

SEQ ID NO: 786096 - DNA, 120 bp, Artificial Sequence
  ENSG00000260001_7 (sequence is synthesized)
ctggtgttggcagccttcgtgctgggcgccgcgctggccgccgggctgggtctcgtctgtgcgcactcagcgccccacgcccctggcccgcccgcgagagcctcgcccagcggtccccag

SEQ ID NO: 786097 - DNA, 120 bp, Artificial Sequence
  ENSG00000260001_8 (sequence is synthesized)
ggcccgcccgcgagagcctcgcccagcggtccccagcccaggaggtcccagtgaggaagggatggtgcgcccccaacatggtccggagatacacccagctaccaattcgggaccaggacc

SEQ ID NO: 786098 - DNA, 120 bp, Artificial Sequence
  ENSG00000260001_9 (sequence is synthesized)
aacaggaccggacccgcctccctggacctcggacctgatgaggccacgacccctgcgcttctctcctccccctgtccctcccacctgtgctcaaaataaacctctggactgaccggctaa

SEQ ID NO: 786099 - DNA, 120 bp, Artificial Sequence
  ENSG00000260001_10 (sequence is synthesized)
gagcctggaatccgggcgctggggcccttcgggggctgggcacgggcgactctggcagtggaaagaggatactctcggggtctgaggatctggggtgtctgcctcaggacgaggcgtgcg

SEQ ID NO: 786100 - DNA, 120 bp, Artificial Sequence
  ENSG00000260001_11 (sequence is synthesized)
gccgtggggcggcagagcgggtgggaaggacgcctgggagctggacccagtctcagcgtggcacttcccacagggccgcccaagagtgtccccggccgtgcagtgcgccctgagcctccc

SEQ ID NO: 786101 - DNA, 120 bp, Artificial Sequence
  ENSG00000260027_0 (sequence is synthesized)
ctttttggtgtaaatctggactctaattctgtaatatatcaaggaatctcgtaaaaccgacactaaaacgtccctgcctacaaatcatccggccaaattatgagttcattgtattatgcg

SEQ ID NO: 786102 - DNA, 120 bp, Artificial Sequence
  ENSG00000260027_1 (sequence is synthesized)
aatactttattttctaaatatccagcctcaagttcggttttcgctaccggagccttcccagaacaaacttcttgtgcgtttgcttccaacccccagcgcccgggctatggagcgggttcg

SEQ ID NO: 786103 - DNA, 120 bp, Artificial Sequence
  ENSG00000260027_2 (sequence is synthesized)
ggcgcttccttcgccgcctcgatgcagggcttgtaccccggcggggggggcatggcgggccagagcgcggccggcgtctacgcggccggctatgggctcgagccgagttccttcaacatg

SEQ ID NO: 786104 - DNA, 120 bp, Artificial Sequence
  ENSG00000260027_3 (sequence is synthesized)
cactgcgcgccctttgagcagaacctctccggggtgtgtcccggcgactccgccaaggcggcgggcgccaaggagcagagggactcggacttggcggccgagagtaacttccggatctac

SEQ ID NO: 786105 - DNA, 120 bp, Artificial Sequence
  ENSG00000260027_4 (sequence is synthesized)
ccctggatgcgaagctcaggaactgaccgcaaacgaggccgccagacctacacccgctaccagaccctggagctggagaaagaatttcactacaatcgctacctgacgcggcggcggcgc

SEQ ID NO: 786106 - DNA, 120 bp, Artificial Sequence
  ENSG00000260027_5 (sequence is synthesized)
agatttggtttcagaaccggcgcatgaagtggaaaaaggagaacaagaccgcgggcccggggaccaccggccaagacagggctgaagcagaggaggaagaggaagagtgagggatggaga

SEQ ID NO: 786107 - DNA, 120 bp, Artificial Sequence
  ENSG00000260027_6 (sequence is synthesized)
gatggagaaagggcagaggaagagacatgagaaagggagaggaagagaagcccagctctgggaactgaatcaggaaactcaaatcgaatagggaagtaaaaaaacaaaacaaaaaacaaa

SEQ ID NO: 786108 - DNA, 120 bp, Artificial Sequence
  ENSG00000260027_7 (sequence is synthesized)
aaaaaaaaccctatttaaatgaaaggagtttaaaaacattttttaaggagggagaaaggagaaattttggtttttcaacactgaaaaaatactacctataggaaagtctgtcaggtttgg

SEQ ID NO: 786109 - DNA, 120 bp, Artificial Sequence
  ENSG00000260027_8 (sequence is synthesized)
tttttttgtacaatatgaaaaggatattatctacctgttctgtagctttctggaatttacctccccttttctatgttgctattgtaaggtctttgtaaaatcttgcagttttgtaagccc

SEQ ID NO: 786110 - DNA, 120 bp, Artificial Sequence
  ENSG00000260027_9 (sequence is synthesized)
tctttaatgctgtctttgtggactgtgggtctggactaaccctgtggttgcctgccctcctgagcctccgccttcccagcagcggcaccaaggggccttagggagccccaaaacctacca

SEQ ID NO: 786111 - DNA, 120 bp, Artificial Sequence
  ENSG00000260027_10 (sequence is synthesized)
ctcgcgtgttccccaagcgcctggctgctgcttcttgcttcccgtcccccagccccatgctcccttttacattctgtgtgtatctaaaggatggaaaaataaaacgcaattaaaaataaa

SEQ ID NO: 786112 - DNA, 71 bp, Artificial Sequence
  ENSG00000260097_0 (sequence is synthesized)
ccaacatagagggatgtggagtccctgaagatgcttttggacaatggtctgaggttgggacagtggcagga

SEQ ID NO: 786113 - DNA, 120 bp, Artificial Sequence
  ENSG00000260097_1 (sequence is synthesized)
gaccttcctgattggagggaccggactccgtggtgcctggagatcagttggacaacagtatcttctcagagctgttctctactcctgacttctcctaggcttgagaattgataacatact

SEQ ID NO: 786114 - DNA, 120 bp, Artificial Sequence
  ENSG00000260097_2 (sequence is synthesized)
tcctaggcttgagaattgataacatactcttctggatcctagaagtgtccagaagaaggccatggacagaacggagactaggttccgtaagaggggacagattacgggaaagatcacgac

SEQ ID NO: 786115 - DNA, 120 bp, Artificial Sequence
  ENSG00000260097_3 (sequence is synthesized)
ggttccgtaagaggggacagattacgggaaagatcacgaccagccgtcaaccgcacccccagaatgagcagagtccccagcggagcacctcggggtaccccctccaggaggtggtggatg

SEQ ID NO: 786116 - DNA, 82 bp, Artificial Sequence
  ENSG00000260097_4 (sequence is synthesized)
gatcccagccccccatgtaggtcccttggctggaaaaggaagagggagtggtcagatgaatctgaggaggagccgagtggag

SEQ ID NO: 786117 - DNA, 120 bp, Artificial Sequence
  ENSG00000260097_5 (sequence is synthesized)
tgggctcaagatgaagctgaagcaacagcgagtgtcatccatcctccctgagcaccacaaggacttcaacagtcagcttgcccctggggtagatcccagccccccgcataggtccttttg

SEQ ID NO: 786118 - DNA, 120 bp, Artificial Sequence
  ENSG00000260097_6 (sequence is synthesized)
ctggaaaaggaagatggagtggtgggacgaatctgaggagtcgttggaggaggagccacggaaggtgctcgcccctgagcctgaggagatctgggtggcggagatgctgtgtggcctcaa

SEQ ID NO: 786119 - DNA, 73 bp, Artificial Sequence
  ENSG00000260097_7 (sequence is synthesized)
agccgggctggccctggccaatgacatggaggaggacgacgaggactccaaacaaaacatcttccacttcctg

SEQ ID NO: 786120 - DNA, 120 bp, Artificial Sequence
  ENSG00000260097_8 (sequence is synthesized)
ggacgacgaggactccaaacaaaacatcttccacttcctgtataggaagaaccgctctcgcatacccttgctccgtaagcgttggttccagttaggccattccatgaacccgagggccag

SEQ ID NO: 786121 - DNA, 120 bp, Artificial Sequence
  ENSG00000260097_9 (sequence is synthesized)
gaagaaccgctctcgcatacccttgctccgtaagcgtcggttccagttataccgttccacgaacccgagggccaggaagaaccgctctcgcatacccttgctccgtaagcatcggttcca

SEQ ID NO: 786122 - DNA, 120 bp, Artificial Sequence
  ENSG00000260097_10 (sequence is synthesized)
gttataccgttccatgaactcgagggccaggaagaaccgctctcagatagtcctgttccagaaacgacggttccacttcttctgttccatgagctgcagggcttgggtttccccagagga

SEQ ID NO: 786123 - DNA, 68 bp, Artificial Sequence
  ENSG00000260097_11 (sequence is synthesized)
cccagaggagttggacacctttcctagagctccagggaccggggaggcctgaggtcatcggcctgaga

SEQ ID NO: 786124 - DNA, 69 bp, Artificial Sequence
  ENSG00000260097_12 (sequence is synthesized)
ggagctgaatacagtgatcacgttgtcctcctaggagcaggggtggggggaggggggtggggtccttct

SEQ ID NO: 786125 - DNA, 81 bp, Artificial Sequence
  ENSG00000260097_13 (sequence is synthesized)
ccattcttgatggagctgaatacagtgatcacgttgtcctcctaggagcaggggtggggggaggggggtggggtcgtttcc

SEQ ID NO: 786126 - DNA, 120 bp, Artificial Sequence
  ENSG00000260097_14 (sequence is synthesized)
cggaacctggaggtcctgtttcttacggacttgcagtccaggaggatttgaaggcacaatgcaggggctcagattgggacagaattcttttgtgaaatatcagtgccacagattgtaaca

SEQ ID NO: 786127 - DNA, 90 bp, Artificial Sequence
  ENSG00000260097_15 (sequence is synthesized)
caatgcaggggctcagattgggacagaattcttttgtgaaatatcagtgccacagattgtaacagatagcttcatgcacactcggccatt

SEQ ID NO: 786128 - DNA, 120 bp, Artificial Sequence
  ENSG00000260097_16 (sequence is synthesized)
tgtaaaaataaatttttatttgatatttcatatatgtttgaaatgtgagaattcagatgtaattttttaccttgttttggcatgtttgtatattactttaaagagaatgtgtgttctaaa

SEQ ID NO: 786129 - DNA, 71 bp, Artificial Sequence
  ENSG00000260097_17 (sequence is synthesized)
ttactttaaagagtagagtgggtctcttggggaaacataataaaaatgaacttttctcaccttcacagcaa

SEQ ID NO: 786130 - DNA, 120 bp, Artificial Sequence
  ENSG00000260220_0 (sequence is synthesized)
ggcccgccatcaccggcctcagagacagccgcatgtctgggccagtcacggctcttggcctctgggccccaccgttgctgggaaggggaggctctgcgcacctgcagctgaggatgacgt

SEQ ID NO: 786131 - DNA, 120 bp, Artificial Sequence
  ENSG00000260220_1 (sequence is synthesized)
ggcagccctgaggtggcccgggccctcccagcagccagacccaccctgggcagctccccacgtggtcgggtctgacgacctcaaggaaccaggaccctgggggaaggcgtgcagcctgcc

SEQ ID NO: 786132 - DNA, 120 bp, Artificial Sequence
  ENSG00000260220_2 (sequence is synthesized)
catgtggtccacaggcccggaggctagggatggggacagctcggtgtcatcgggccgcctctcgtgctcttcggggggccacgacgtgtgtgtgtcttggaaggagaggccaccccaggt

SEQ ID NO: 786133 - DNA, 120 bp, Artificial Sequence
  ENSG00000260220_3 (sequence is synthesized)
gttggggccccagcagaggcccagaaagagtgacgcgcggctggagcagctgagagacaagatccgggcccaggcgtggcagcaggggagctgtgcgtccctgggcacctcagccccctc

SEQ ID NO: 786134 - DNA, 120 bp, Artificial Sequence
  ENSG00000260220_4 (sequence is synthesized)
cagcgcctccagactccacaaagcctccacgctgatgcttaggaggaaaggccaagaggcaaaaaatccccctccagcccctgaatgctcaggtttcagcatcttgagtgcagctgagcg

SEQ ID NO: 786135 - DNA, 120 bp, Artificial Sequence
  ENSG00000260220_5 (sequence is synthesized)
cagagttgaagccaaggcatcccacggccaggggcgcgagctctccagggtctcccagcaccaggttcctgttctgagggaaaaacccaaaagggtcaaaagcagttcttgcaaaagaga

SEQ ID NO: 786136 - DNA, 120 bp, Artificial Sequence
  ENSG00000260220_6 (sequence is synthesized)
gaagacccccaagttgccctcccctagaagagcggccaaagacaaacacaaagacgaagattcggagctggttggtgtttacgcctggagaaagggacaagctctggtgaggtcgctgct

SEQ ID NO: 786137 - DNA, 120 bp, Artificial Sequence
  ENSG00000260220_7 (sequence is synthesized)
tgggccccctcccgtcctccgcaggcaccatagcaaggatccctcgagagacccggctctcaccgtggacttaggagacagcgagaaagtcatagctgccaagtgctcaccggtttgtgc

SEQ ID NO: 786138 - DNA, 120 bp, Artificial Sequence
  ENSG00000260220_8 (sequence is synthesized)
ccagttgcccgatgccacctccgcctacagtgaccagcaggtgtctgggaacacacccagcctggcttccttcgaccagccagcgaccatacagacggccatggccatcctacaagacct

SEQ ID NO: 786139 - DNA, 120 bp, Artificial Sequence
  ENSG00000260220_9 (sequence is synthesized)
gcgccagcaaatccaggctgggctggagctggcccaggcccgcaagggagggcaagagctcgggccatcaaagcggaggctgcaggacgtggcagggaggggctgctgcagggaccccaa

SEQ ID NO: 786140 - DNA, 120 bp, Artificial Sequence
  ENSG00000260220_10 (sequence is synthesized)
tgcccagagctccttctctaagagtccctgggccatgacagagaggaagcattcctctttagagagggctaggagtgtccacacctgggagccctggagctcctccactgcacgggagtc

SEQ ID NO: 786141 - DNA, 120 bp, Artificial Sequence
  ENSG00000260220_11 (sequence is synthesized)
ctgtccgcagagggcctggggggcccaaggacaggaccgctccttccagaggccggagagtccccatgagaggttgggccacttctcccagaggccctggagtgcactggctgggcaggc

SEQ ID NO: 786142 - DNA, 120 bp, Artificial Sequence
  ENSG00000260220_12 (sequence is synthesized)
ctgcagtccgcagagggcctggggggcccaaagacagggcccctcctcccagaggcctgggagcccccctgaaaagcggagccccttcccccagcagccctggagtgctgtagccacaca

SEQ ID NO: 786143 - DNA, 120 bp, Artificial Sequence
  ENSG00000260220_13 (sequence is synthesized)
gggaggaccctggccccagactgcggaaccctctggaaaggcccagtcctccagcccagcggccctggagcagctccggcgtgcagagggccggcccccagggcaagggcagaggcatcg

SEQ ID NO: 786144 - DNA, 120 bp, Artificial Sequence
  ENSG00000260220_14 (sequence is synthesized)
gctcccccgtctcggctgccaagcatgccctgccaaggcccaccgggagcttccctcagaacccacttgggaaggagaaggacacgctgcggccctgccccaggtcccgggggctcctgg

SEQ ID NO: 786145 - DNA, 120 bp, Artificial Sequence
  ENSG00000260220_15 (sequence is synthesized)
gaccctcgcacagctctgagtccttgcgggagttcatgcgccagaaggcgcaggcccggcggcggcaggccctggaggagaaggcctcggccctgcgcacacgggagctgaggagccgga

SEQ ID NO: 786146 - DNA, 120 bp, Artificial Sequence
  ENSG00000260220_16 (sequence is synthesized)
ggctgcaggaggtctaccggcagcagagggaggccgtcctcggcagggcggtccccgtggtctcccggaccacccctggcatcgtgacctttgtccccagttctgcacagtccgggggcc

SEQ ID NO: 786147 - DNA, 120 bp, Artificial Sequence
  ENSG00000260220_17 (sequence is synthesized)
tggaagcctccgggagcctggagtccccagtgctggaatggagcaaagtgacctctggcatggtgctggggggccaggaagccccaggcagcttctgcctgtgtttgaacagagcctgga

SEQ ID NO: 786148 - DNA, 120 bp, Artificial Sequence
  ENSG00000260220_18 (sequence is synthesized)
accatgctgagaccctagatcccccagggatggggggcccccaagatggccgggatgcccccgtgctgctgtcagcttcaccctctctgggatccctggagctccaggacctgaccaccc

SEQ ID NO: 786149 - DNA, 120 bp, Artificial Sequence
  ENSG00000260220_19 (sequence is synthesized)
gctacctaccccgggggatgtgcatctacctggacccaaaggaggctgagcacctgggcacttccagctccctgcacctccggcataagcaggcgcagctgcaggcgctagagaccacag

SEQ ID NO: 786150 - DNA, 120 bp, Artificial Sequence
  ENSG00000260220_20 (sequence is synthesized)
ccaaagtcctcaagcagcgggtcgatagcctcaccgccaagctgcagggtgccgaagcgctggacaccgtcagggacccagctgtgggcctgctgcgctcgtgcccccacagcctacctg

SEQ ID NO: 786151 - DNA, 120 bp, Artificial Sequence
  ENSG00000260220_21 (sequence is synthesized)
ccgcccccacgctcgccacccccacgcttgccaccccagcctgccctggagccttggggcccaactggggcagaggggcacctggggagtgggtgagcatgcagccccagccccttctgc

SEQ ID NO: 786152 - DNA, 120 bp, Artificial Sequence
  ENSG00000260220_22 (sequence is synthesized)
ccccgacctacttcctggacggcgagacactgtcgtggggccccagctgggagcaacagcagagtgtgagcccgagggcccactgcgagagcaagccccgaggttttccagaggagggac

SEQ ID NO: 786153 - DNA, 120 bp, Artificial Sequence
  ENSG00000260220_23 (sequence is synthesized)
acgtggacgtgaaaccagacaaaaggctgcagagaggcgtggcccccttccaggccctcagcccctctgcggggagctcatatgcgggcccagccacgctgcaccctatctggggctccc

SEQ ID NO: 786154 - DNA, 120 bp, Artificial Sequence
  ENSG00000260220_24 (sequence is synthesized)
tgggactggaggagacgccgtcggtcggaggggcagattctgtggcgccctgcaccccccggagctgcggtaagggcgaccctgcggacaggccctgggctggctggtcgggtggccggg

SEQ ID NO: 786155 - DNA, 120 bp, Artificial Sequence
  ENSG00000260220_25 (sequence is synthesized)
gcatccaccgagaacaccttccactgcctagcactcgagcttggccctacggggtagagaaatccttttccacgtggagagcatccacgcctcgttattaaaggttttagaggctttcgg

SEQ ID NO: 786156 - DNA, 120 bp, Artificial Sequence
  ENSG00000260220_26 (sequence is synthesized)
agctcattaggaaggcccccagctgtggccagcccagggccgggctgcccaccgtgccagcccagtttcaatgacccacctgagggtttccatcgtgggccaggggaccggcgcaggcgg

SEQ ID NO: 786157 - DNA, 120 bp, Artificial Sequence
  ENSG00000260220_27 (sequence is synthesized)
gcatccggagccaggcagtggccagcccatcccgggcagggtcataggtggggctgcaggcctcgaagccgccatgtgaaggcagcagcgaccccaggcagggcgggccaggttgacctt

SEQ ID NO: 786158 - DNA, 120 bp, Artificial Sequence
  ENSG00000260220_28 (sequence is synthesized)
gcacctgctctcccctcagccccgcggccatgccgaccctggtcgtgggcacgccgcccacctgcctgggggacacacctcagccctgccacaagaacagccagaggcagggccccttct

SEQ ID NO: 786159 - DNA, 120 bp, Artificial Sequence
  ENSG00000260220_29 (sequence is synthesized)
acagccatgccccgtgccgctgtgcccagcccacctcctagggcgcttccttacagtcccatcagctcggattcgactttttcttctgctactgagtgttttcatccggggtttccaacg

SEQ ID NO: 786160 - DNA, 120 bp, Artificial Sequence
  ENSG00000260220_30 (sequence is synthesized)
agcagtgcccactgcctggtgcccaagggacccagcagctgctgaagccctgggcttgagggcctcgtgctggcgtgggctgcgctgtaggaccctcctggctggggggcttggcagggc

SEQ ID NO: 786161 - DNA, 120 bp, Artificial Sequence
  ENSG00000260220_31 (sequence is synthesized)
agctggaggggctggtgcagccatgggaactgagtgtggactcagaagtgggggacccccgtttgccgcttcatcattgtctgttgattttcttcaaaagaacaggttttgagcattgga

SEQ ID NO: 786162 - DNA, 120 bp, Artificial Sequence
  ENSG00000260220_32 (sequence is synthesized)
cctccagctttctggattctctgaagctggaccagcagaagcaggcgttggccctcctgcggcagcgggcagagctggaggcccgggagacacagcagaccctggatgggctgctcttca

SEQ ID NO: 786163 - DNA, 120 bp, Artificial Sequence
  ENSG00000260220_33 (sequence is synthesized)
ggaggcggctggagcagctgatggagagacactcgacccaggccaggccagaggaggcgttgaagctggagcagcctccgatgtgcaaggaccgagagccgaccacagcctctcagagca

SEQ ID NO: 786164 - DNA, 120 bp, Artificial Sequence
  ENSG00000260220_34 (sequence is synthesized)
cagggatggccacacccaggtcacacccgcctctggacacagatgctgccacgtcctcccagggtcccgaggacaggccagagaatgtggtggccaagccagcctctgcagaggtggagg

SEQ ID NO: 786165 - DNA, 120 bp, Artificial Sequence
  ENSG00000260220_35 (sequence is synthesized)
gccctgacggagccctctcccagcttcccctggccaagttcttccctccggacaaccccacccaccagatgctggagcggagcctgcgggaggaggagctgcgagcacagcaccaggccg

SEQ ID NO: 786166 - DNA, 120 bp, Artificial Sequence
  ENSG00000260220_36 (sequence is synthesized)
cgctgctgcgcctgcgagagatggcgctccaggagaaaacgctcgcggagctggcctggctggagcatcgacgagggtgcctggacagcaagagggacagagctgtgctggccgcgctgg

SEQ ID NO: 786167 - DNA, 120 bp, Artificial Sequence
  ENSG00000260220_37 (sequence is synthesized)
ttgagaagcagcagcaagccctcagcagattggagaaggagcagagggaaatccaatacctgagacacacgcagctgttcaggcaccgggacaggaagctgcttctgcagcatcagaggg

SEQ ID NO: 786168 - DNA, 120 bp, Artificial Sequence
  ENSG00000260220_38 (sequence is synthesized)
acgtcgtctccatgccggggcctgtggacatcctccccatcccggggcccacggacgtcgtcccagcgcacgagctgcaggcccaggccaagctgcagcagggttccagccccaaagtca

SEQ ID NO: 786169 - DNA, 120 bp, Artificial Sequence
  ENSG00000260220_39 (sequence is synthesized)
aggccgcctgggagggaggctcagagacaagccagcagccagaggcctccctgtgtcccctgaccccatgcaggcccagcagctccaccagccatcgcccccagagcagccccgcaagct

SEQ ID NO: 786170 - DNA, 120 bp, Artificial Sequence
  ENSG00000260220_40 (sequence is synthesized)
caaaggccacgcgccctcccactgagcagcaggatgtgacgccaccccagacaacctccgatgcagatggtcaccagcagcctccgaggccagcatggggcgaggacacacacgaccccc

SEQ ID NO: 786171 - DNA, 120 bp, Artificial Sequence
  ENSG00000260220_41 (sequence is synthesized)
agggcccgctggtggagagtggcagccatgtcagtcaagagcctggggagcagcctcgggcccctctgctgggcctgcagcacgtgagccccccggacggacagcggctgggcccagcct

SEQ ID NO: 786172 - DNA, 120 bp, Artificial Sequence
  ENSG00000260220_42 (sequence is synthesized)
ttcccgccgaggaggcggaggggcgcctccccacagctcagtgcaggtctcgggaggtgaaggagccacccccaggagaccctcagaccaagcccggcccttccttagcagggaagcccc

SEQ ID NO: 786173 - DNA, 120 bp, Artificial Sequence
  ENSG00000260220_43 (sequence is synthesized)
gggctccaacagacagccatgtggggagcttcagggaacgcagccgacgctcctgcggcagagaaggtccttgtggcccacaagaagccagccaggtggctgaggacagcatgagcgaag

SEQ ID NO: 786174 - DNA, 120 bp, Artificial Sequence
  ENSG00000260220_44 (sequence is synthesized)
agggcttggaatcggggctggattttgctgagagccccgtggaggagtcccaggaaaccgagagctggcgatcgggggagcagaggacggaggcctgtcagcaggaggtccccggcatct

SEQ ID NO: 786175 - DNA, 120 bp, Artificial Sequence
  ENSG00000260220_45 (sequence is synthesized)
cctccacctggctggaggctgcccaggccgctgcctccccagcagctcctgtggtccctgaggaggcggcgcccccaatcctgcaccagggcagtccccttctccccaccacctcctcct

SEQ ID NO: 786176 - DNA, 120 bp, Artificial Sequence
  ENSG00000260220_46 (sequence is synthesized)
ggaagaagccacggtgtcatcccacacctccccagcaggctctgtgagcagcctgtcctgtccctctctctgggagttccagaaagcagcggctaccctgatccagctttctgggagctc

SEQ ID NO: 786177 - DNA, 120 bp, Artificial Sequence
  ENSG00000260220_47 (sequence is synthesized)
cagctctcttcccagcttggaagctgaagactccccagacgaaggtttcagctggcctggagagctctctgcccgacactcctcgggggaagctggcctgcctttgtcctggcggtcaaa

SEQ ID NO: 786178 - DNA, 120 bp, Artificial Sequence
  ENSG00000260220_48 (sequence is synthesized)
ccagggtgagcctcggccaggcagtgctcctgggggtggaggatgggtgacctggcagaggccccagggccgcagggccggccccctgcgtggctcctccttggacacggccatggcaga

SEQ ID NO: 786179 - DNA, 120 bp, Artificial Sequence
  ENSG00000260220_49 (sequence is synthesized)
agtttcagcgccggagcaaagcccaaaggcaggctggctactgcctttcccagacatcccctctccaaggtcagggtcagagctgtcagaggcctccagcaaagtttgggaggaggactg

SEQ ID NO: 786180 - DNA, 120 bp, Artificial Sequence
  ENSG00000260220_50 (sequence is synthesized)
cgaggaggacctgccagaaccctgtaccggggccaagccagcctcggggagctccctgcctgcaggtggctcactgggccttggaagcggcgtggagccccaggtggctcctccctcccc

SEQ ID NO: 786181 - DNA, 120 bp, Artificial Sequence
  ENSG00000260220_51 (sequence is synthesized)
acggtccggggaggggcgggaagcttctgggaccagcgagagcctgaaagggggtgtcagaagcggcatggagccccaggtggctcttccgtccccatggcctggggaggggctggaagc

SEQ ID NO: 786182 - DNA, 120 bp, Artificial Sequence
  ENSG00000260220_52 (sequence is synthesized)
ttctgggaccagcgagagcctgatgggggtgtcagacacaggagaagccctccaggcaccccctgaggccgccggtgtggtgttcccgctgcaaatctcttctgccggtgactcggactc

SEQ ID NO: 786183 - DNA, 120 bp, Artificial Sequence
  ENSG00000260220_53 (sequence is synthesized)
actgctggtctttccttcgtggacctctttgagtgaaggggcagatttcggcaaaggaggagagacttctggctaccaggagggaacccgggatgctgacccgagcccatccaccaagag

SEQ ID NO: 786184 - DNA, 120 bp, Artificial Sequence
  ENSG00000260220_54 (sequence is synthesized)
caaactcccgtacctcatgccagagcccgagaccccggtgaccctgcaggctcctcctggggacccaggcaggctggcacctccagtagctgagagccgggcgcctgggcctggtgggaa

SEQ ID NO: 786185 - DNA, 120 bp, Artificial Sequence
  ENSG00000260220_55 (sequence is synthesized)
tggggcccccactgtcctggaggaagcctgtcccctacttgccggtgacgtcttgactgagatcctgtctcccgtggacgagttgctgtcctacggcagtgccgacctcccgtcctccat

SEQ ID NO: 786186 - DNA, 120 bp, Artificial Sequence
  ENSG00000260220_56 (sequence is synthesized)
ccacagggaggcccccctacccccacctcctcccactccccaagcacagagtgatggtgaagacaccaacccatgctcggatgccttcccttccccgccctcggggccccttgaggagga

SEQ ID NO: 786187 - DNA, 120 bp, Artificial Sequence
  ENSG00000260220_57 (sequence is synthesized)
caccgccatcaccacccaggatttgtcctccttgtctgaggagagtctgccggagggactgtttcctgggccccaggggtcggcgggaacccagtagttggggctctgcccaggggtggc

SEQ ID NO: 786188 - DNA, 120 bp, Artificial Sequence
  ENSG00000260220_58 (sequence is synthesized)
tggtccgggtggaagcgttgacgaccagttgggtagatgcagttctgcagcaggggatgaggccggaggcagccagtggcctgaacctgtcagctggccagggcactcgtcgtgtgaggg

SEQ ID NO: 786189 - DNA, 120 bp, Artificial Sequence
  ENSG00000260220_59 (sequence is synthesized)
gtcaggcagtgcccctggagggctcccagggccatcagtgcagcccccagctccatccagagtggcctctgtggccagggaaggtctgtcagggctgttggcagctggtgacgtggaagt

SEQ ID NO: 786190 - DNA, 120 bp, Artificial Sequence
  ENSG00000260220_60 (sequence is synthesized)
gatgatcggcggactgggctcctgttttgggcacagggttctgggctgatgtggcctttgaggaggtcttgggcagtcggggagagccctgggaaggagcgcagagctctgggcatgcag

SEQ ID NO: 786191 - DNA, 120 bp, Artificial Sequence
  ENSG00000260220_61 (sequence is synthesized)
agagccggggtgggtagcggggcagctcttagtgggtctggatgagctcctggacactgcctcacctgcggcagggtccctgggcagccgagcctgcttggccaagacccccaccagggg

SEQ ID NO: 786192 - DNA, 120 bp, Artificial Sequence
  ENSG00000260220_62 (sequence is synthesized)
ccaagaccccaaagaaatgctgggtaagaacaggaaggcagccacacccccacaggcagccacacctccatgtccctggttggcagccccggcagcctctctcccaggccaagtgccctt

SEQ ID NO: 786193 - DNA, 120 bp, Artificial Sequence
  ENSG00000260220_63 (sequence is synthesized)
ggccgccagtggaaagtctgggtcccttgagcatgctggtgaggacgttgagggaggcctgagctgccaggtagaggacccacccaggcccgagggctcactgggcagaaagccgctcct

SEQ ID NO: 786194 - DNA, 120 bp, Artificial Sequence
  ENSG00000260220_64 (sequence is synthesized)
ggagacagactcaggccgctgtacccatctcccaggtgtggagagagaccaggcagtggacttggtctccacgtggctcaccaggagggtcctgcgtgactccttagcagctctctccac

SEQ ID NO: 786195 - DNA, 120 bp, Artificial Sequence
  ENSG00000260220_65 (sequence is synthesized)
acaggcccccaggtgcagcccctagggagtgttttctggaactacagaggtgcacaggcgtccacaatgtcattgtgagctgtgtgtggcatacacatgcacacgtgggagtaagaacct

SEQ ID NO: 786196 - DNA, 120 bp, Artificial Sequence
  ENSG00000260220_66 (sequence is synthesized)
agaggcctggactttcccagggtggaccggccgggcggccggctgtgcgggacagtctcctggacctttccccggtggaccgggtgggcggccggctgtgcaggatggtcgcctggacct

SEQ ID NO: 786197 - DNA, 120 bp, Artificial Sequence
  ENSG00000260220_67 (sequence is synthesized)
tcccagggtggaccgggtgggcggccggctgtgcgggacggttgcctggaccttcccccggtggacagggtgggcggccggctgtgcgggacggttgcctggaccttcccctggtggacg

SEQ ID NO: 786198 - DNA, 120 bp, Artificial Sequence
  ENSG00000260220_68 (sequence is synthesized)
gggtgggcggccggctgtgcgggatggtcgcctggaccttcccagggtggactgggtgggcggccggctcttcccagggtggaccaggtgggcggccggctccgcaggacggtcgcctgg

SEQ ID NO: 786199 - DNA, 80 bp, Artificial Sequence
  ENSG00000260220_69 (sequence is synthesized)
accttcccggggtggactgggtgggcggccggctcttcccagggtgggccgggtgggcggccggctcttcccggggtgga

SEQ ID NO: 786200 - DNA, 120 bp, Artificial Sequence
  ENSG00000260220_70 (sequence is synthesized)
gcgccggctctgcgggacggtcgcctggaccttcccctggtggacggggtgggcggccggctgtgcgggatggttgcctggaccttcccagggtggactgggtgggcggccggctcttcc

SEQ ID NO: 786201 - DNA, 120 bp, Artificial Sequence
  ENSG00000260220_71 (sequence is synthesized)
gctcttcccagggtggaccaggtgggcggccggctccgcgggacggtcgcctggaccttcccggggtggactgggtgggcggccggctcttcccagggtggaccaggtgggcggccggct

SEQ ID NO: 786202 - DNA, 120 bp, Artificial Sequence
  ENSG00000260220_72 (sequence is synthesized)
cggtcgcctggaccttcccggggtggaccgggtgggtggccggctcttcccccggtggacagggtgggcgccggctccgcgggacggtcacctgaagccaggcccggactgcacacctgc

SEQ ID NO: 786203 - DNA, 120 bp, Artificial Sequence
  ENSG00000260220_73 (sequence is synthesized)
ttcttcgcatcaaagccacgaagaggcgtccaagaaaaggcgttgcagcccagaggcaagaacagtcagagtcgccaagagcaggaacgaggacggggcggagcagcgcctatgccagga

SEQ ID NO: 786204 - DNA, 120 bp, Artificial Sequence
  ENSG00000260220_74 (sequence is synthesized)
agggggtcatggggatcagcgaaggccaagagaggaagagagaacatctggggaaaagaagagctggggtgggcctgactggtgctgactcacacccctgagccctgcttagaagtcagg

SEQ ID NO: 786205 - DNA, 120 bp, Artificial Sequence
  ENSG00000260220_75 (sequence is synthesized)
ggcatctgcctgctttgactttggaggctcctcccacacccaaactgccggcacatgacgtgcagctgggtggactgggcatggatgtctcacacctgagctgcacagaccagaggaagc

SEQ ID NO: 786206 - DNA, 120 bp, Artificial Sequence
  ENSG00000260220_76 (sequence is synthesized)
cacggctcaagggcccaaggtcatttctgcgcagcccgcacggccgggggcttttcctctggggatcagtggcccaaggtctcttctggagcatgctcaggacttgctgtgcctggaagg

SEQ ID NO: 786207 - DNA, 120 bp, Artificial Sequence
  ENSG00000260220_77 (sequence is synthesized)
ccagggcagctgatttctcctggtgccatggacttttctttgcttccagaggattcactgggacccctgtaatttctctgggacccttttgaatctgagggtctcttcttgaatgcggag

SEQ ID NO: 786208 - DNA, 120 bp, Artificial Sequence
  ENSG00000260220_78 (sequence is synthesized)
ttgatgagcagcgtgttggccttagggacatctgtgtcccagcactgatccttccaggatgtggcttctcctgtccagggcctcaggcctcctccacttcagagaggagcatactccaga

SEQ ID NO: 786209 - DNA, 120 bp, Artificial Sequence
  ENSG00000260220_79 (sequence is synthesized)
ctttatgcatgcagtctggtgggaggcatcacaaagctggcgtggcaaagccctaagatgccaggtcacaggacacacggagctgccaaggccctctaccccatagctctggtgagagac

SEQ ID NO: 786210 - DNA, 120 bp, Artificial Sequence
  ENSG00000260220_80 (sequence is synthesized)
cccaggccccttagaacctctttgggccccctgccgtgaggcaagagcccctctccagacacccctcgcccgggagcagctggacccagcctgccttctccagccccggggcggctgctt

SEQ ID NO: 786211 - DNA, 120 bp, Artificial Sequence
  ENSG00000260220_81 (sequence is synthesized)
agccccaggtgccgttaacaatggccggcctgtgtcagggtccccattcaccatgtgcacaggaagcccagctcgggccatgcatctgattttgcaccagctcctgcccagcccacctga

SEQ ID NO: 786212 - DNA, 120 bp, Artificial Sequence
  ENSG00000260220_82 (sequence is synthesized)
gaatgcagatgtttggatccagtggggaatgtgttcctgctccatgctcccaatttcagaacaaactttgagctgagctacagctttctcattgatccccttctagtcttctgaacaaat

SEQ ID NO: 786213 - DNA, 120 bp, Artificial Sequence
  ENSG00000260220_83 (sequence is synthesized)
tagtctgtgattttttatttttttccatttattgctgacccttttggatttatgaggccgtgtgagaggaattatgtatctcacacacacgcatctggcatgacgataaatctccaccac

SEQ ID NO: 786214 - DNA, 120 bp, Artificial Sequence
  ENSG00000260220_84 (sequence is synthesized)
tgaagccccgcagatttgcagcgaatctgatggctcccaggctcgctgccacgtggttggtgctgacgtgcggcgcaatgcggtggcggctgcagtcacagctggaaccagcgtgacttt

SEQ ID NO: 786215 - DNA, 120 bp, Artificial Sequence
  ENSG00000260220_85 (sequence is synthesized)
ccctgggagcccagcaggtgcctcgcgtcgctggcaggtggtagggtgcccttgaagggggctggtcgtgaggaacgaaggaaaacccgggccagggcttccaaggacagcggccctgga

SEQ ID NO: 786216 - DNA, 120 bp, Artificial Sequence
  ENSG00000260220_86 (sequence is synthesized)
gggggccggagccgtcaggttactctgagcaccggagaaaaagccgcttcagcagaggtgtaaacgcatttaatctcccaacaggacatatacagagcggagggctttggcattcagata

SEQ ID NO: 786217 - DNA, 120 bp, Artificial Sequence
  ENSG00000260220_87 (sequence is synthesized)
tattgaccgggcaagatggtaatccaaggttcctccccttcaaggtctcctgctgtatttgcctgggctctgatctgtcgtcaccgcttgggccaataaatcttgataccagcctccaga

SEQ ID NO: 786218 - DNA, 120 bp, Artificial Sequence
  ENSG00000260220_88 (sequence is synthesized)
aagccccgaggtgtgtctcaggctcctctcctgctgtgatggcttgggtcccccgtcccgtgctcccggctgaccagggagtgaagccaggtgccctcttctccaaggttttccagagga

SEQ ID NO: 786219 - DNA, 120 bp, Artificial Sequence
  ENSG00000260220_89 (sequence is synthesized)
acacaaagacgaaggttggcagtcttgctcccattttgtagatgaggcaaccgaggttcacagagtttccacagcctgcccggggctgcacagaggcagagcctcccacccgtccagccc

SEQ ID NO: 786220 - DNA, 120 bp, Artificial Sequence
  ENSG00000260220_90 (sequence is synthesized)
aaggccggtgctcctaacctggaagcccagccgtgtgcacctggggccacgcctgggcagcttgtcgaggccaccctccaggcgtggattctggggccaccgaaccacagcgttttggag

SEQ ID NO: 786221 - DNA, 120 bp, Artificial Sequence
  ENSG00000260220_91 (sequence is synthesized)
acaccagcaagagcccccaggtggagtgaacgcctgagattggctttgtgggaccctcactccaagtgtgagcagtgccagctcgctggccactcctgtaatgctccatgcctcagtttc

SEQ ID NO: 786222 - DNA, 120 bp, Artificial Sequence
  ENSG00000260220_92 (sequence is synthesized)
tccacactgcgtgcaatcacagccctggggccgtggggaggggcactgcgtggcgtgcgttctgtccgtgcccaggtgcctaagcatctgtcccgtgtcatcagttgccggcccctctgc

SEQ ID NO: 786223 - DNA, 120 bp, Artificial Sequence
  ENSG00000260220_93 (sequence is synthesized)
tcctaggcagagcagcagcttccagccgagagtaaacgcctctgtgcccatacccagagaggacacgcgggtgaggtgggagctcagcggggctgcggggccaccgtgtgcattcagcgg

SEQ ID NO: 786224 - DNA, 120 bp, Artificial Sequence
  ENSG00000260220_94 (sequence is synthesized)
ggccagaggccgagcagaaggggactgcgatgtagggacccgggcacccagaaggttccggaaggccgtggaaacatgcgtacaatataacaattttctgcatgatcaccccctccctcc

SEQ ID NO: 786225 - DNA, 80 bp, Artificial Sequence
  ENSG00000260230_0 (sequence is synthesized)
gaggatgcgcagaccgaggcagggaggcgggggtgcgggaggctccgcggctgcgcgggcgcgtgctggtggcctcggcg

SEQ ID NO: 786226 - DNA, 80 bp, Artificial Sequence
  ENSG00000260230_1 (sequence is synthesized)
ggcccgagcggcctggctgcgggatctgtgcgcacggatggcgcggccgccccggcagcacccgggggtctgggcgtcgc

SEQ ID NO: 786227 - DNA, 120 bp, Artificial Sequence
  ENSG00000260230_2 (sequence is synthesized)
cccggggggccggggaccccggggacgcgcgcggggggacacgggcgccgacgaggcggtgccgcgccacgactcctcctacggcaccttcgcgggggagttctacgacctgcgctacct

SEQ ID NO: 786228 - DNA, 120 bp, Artificial Sequence
  ENSG00000260230_3 (sequence is synthesized)
ggagttctacgacctgcgctacctgtcggaggagggttaccccttccctactgctcctcctgtggatccatttgccaaaatcaaagtggacgactgtggaaaaactaagggatgctttag

SEQ ID NO: 786229 - DNA, 120 bp, Artificial Sequence
  ENSG00000260230_4 (sequence is synthesized)
atatggcaaaccaggctgtaatgcagagacctgtgactatttcctcagctaccggatgataggggctgatgtagaatttgagctgagtgcagacacagatggttgggtagcagttggatt

SEQ ID NO: 786230 - DNA, 120 bp, Artificial Sequence
  ENSG00000260230_5 (sequence is synthesized)
ctcttcagacaagaaaatgggtggtgatgatgtcatggcctgcgtccatgatgacaatggcagggtccgcatacagcacttctataatgtaggccagtgggcaaaggagattcagagaaa

SEQ ID NO: 786231 - DNA, 120 bp, Artificial Sequence
  ENSG00000260230_6 (sequence is synthesized)
ccctgccagagatgaagaaggagtttttgagaacaatcgcgtcacctgcagatttaaacgccctgtgaatgttcccagagatgaaacaattgttgatctgcatttgagttggtattatct

SEQ ID NO: 786232 - DNA, 120 bp, Artificial Sequence
  ENSG00000260230_7 (sequence is synthesized)
gtttgcttggggtccagccattcagggctctatcactcgacatgatatagactcaccgccggcttcagagcgtgttgtcagtatttacaagtatgaagacatttttatgccatcagctgc

SEQ ID NO: 786233 - DNA, 120 bp, Artificial Sequence
  ENSG00000260230_8 (sequence is synthesized)
ctatcaaaccttctcatctccattttgtttgcttctgattgttgctctgaccttctacctattgatgggaaccccctaaccacagctgcagggccaacagattacatggattgggaagtc

SEQ ID NO: 786234 - DNA, 120 bp, Artificial Sequence
  ENSG00000260230_9 (sequence is synthesized)
tttagtataaatatattttttaaagaatatccagtataattttagcttcaattatttaagaaaaaaaacctcatataatttcagctttttggaagaaagaacaagcttcttttgtagtca

SEQ ID NO: 786235 - DNA, 120 bp, Artificial Sequence
  ENSG00000260230_10 (sequence is synthesized)
aagaagattgtttaataatgaccctatacttttggaacatacttacaccttttctaagcactttcacatatgttttcttatttaacttcacaacatctctgagttggattgatgaaaatt

SEQ ID NO: 786236 - DNA, 120 bp, Artificial Sequence
  ENSG00000260230_11 (sequence is synthesized)
gtgattgccatcttcctgaatgggatttgagacccaaaaagactgcctttttatgatccacataccatataactttggctagaaatgacaaatagaaaggcagagaaggaactaagtata

SEQ ID NO: 786237 - DNA, 120 bp, Artificial Sequence
  ENSG00000260230_12 (sequence is synthesized)
gaaatcatgtctcaaaacagtctttactatgagtgctatagcacagagagttattttgaatattactagggagaactttactgaatgtcataagttcacagtcagccttttgggcagaag

SEQ ID NO: 786238 - DNA, 120 bp, Artificial Sequence
  ENSG00000260230_13 (sequence is synthesized)
aaatttcaaatttccgtaaagcagaagtgcttttggatatttacacagccaatggggagattggaggaaaatacaatgatatgaaaatagttcatatttatttgaaattttggccgagca

SEQ ID NO: 786239 - DNA, 61 bp, Artificial Sequence
  ENSG00000260230_14 (sequence is synthesized)
agacgtctctattaaaaagtacaaaaatgagccaggcgtggtggtgcacacctataatccc

SEQ ID NO: 786240 - DNA, 66 bp, Artificial Sequence
  ENSG00000260230_15 (sequence is synthesized)
ctggccaatgtggtgaaacccccgtctctattaaaaagtacaaaaatgagccaggcgtggtggtgc

SEQ ID NO: 786241 - DNA, 120 bp, Artificial Sequence
  ENSG00000260230_16 (sequence is synthesized)
actccagcctaggtgacagagccagactctgtctcaaaaataactaactaaataaataatatttatttgaaatttcttctcagttagagagcagctatgggaaaacatttttactgctat

SEQ ID NO: 786242 - DNA, 120 bp, Artificial Sequence
  ENSG00000260230_17 (sequence is synthesized)
ttgcaaaggttggagaccaaactgtgagcattcctgaagatgtaaagttgtgttaatgatattaaaaaaaaaaaaaaagggaattcttagcagttagaatttgaacttttctaccactga

SEQ ID NO: 786243 - DNA, 120 bp, Artificial Sequence
  ENSG00000260230_18 (sequence is synthesized)
attttataaaactaaggtattcatctgtggttacagtgaattctcttgtcagagccagcataccttaagtgtgattaaaaatgtatttttttttttttttgcgatgaattttccctcttg

SEQ ID NO: 786244 - DNA, 120 bp, Artificial Sequence
  ENSG00000260230_19 (sequence is synthesized)
gtgtgagccaccgtgcctggcctaaaaatgtgttatatcagacaaaacatcttagtaaaaatttagggcattttaataataagccaacagtttttgagactgtagagattttgagtagaa

SEQ ID NO: 786245 - DNA, 120 bp, Artificial Sequence
  ENSG00000260230_20 (sequence is synthesized)
agaattttttttatgaggtggctttttaaaaaataattgaaaatgggaaaatgacccataaagtgaattcacctagaatatccatttaaatgttcagacttgtggctgagcgcggtggct

SEQ ID NO: 786246 - DNA, 65 bp, Artificial Sequence
  ENSG00000260230_21 (sequence is synthesized)
ggaggcagagcttgcagtgagccaaaattgtgccacttgcactccagcctgggtgacagagggag

SEQ ID NO: 786247 - DNA, 120 bp, Artificial Sequence
  ENSG00000260230_22 (sequence is synthesized)
tgacagagggagaccctgtctcaaaaaaataagtaaaataaaatgttcagacttataaactagacaggtagtcagcataattcatagtaatgccttgacattaggcgccccaaaggactc

SEQ ID NO: 786248 - DNA, 120 bp, Artificial Sequence
  ENSG00000260230_23 (sequence is synthesized)
actcctttgttctttgttccaaatgtctgtgctaactgcccattttgaggagagaagtctgcaggtatagttagtgctgctgagacatttccactctggcattctagagttctctggctt

SEQ ID NO: 786249 - DNA, 120 bp, Artificial Sequence
  ENSG00000260230_24 (sequence is synthesized)
gcccttgttgctttaaagctggttccaacttcgtgggctttatgattgagcaacactggtgattgtgatttctaataccaccctccagattcatgtcacaggtgaaagtctgcctgtggg

SEQ ID NO: 786250 - DNA, 120 bp, Artificial Sequence
  ENSG00000260230_25 (sequence is synthesized)
gagagctttcacattctcctggagttgaaccaaaataaggaaaacatcaacaaacacagttaccaaaagcttccaaggagggatggaggagaaattctgttcattgcagatggggagaaa

SEQ ID NO: 786251 - DNA, 120 bp, Artificial Sequence
  ENSG00000260230_26 (sequence is synthesized)
ttaaatgacatcaagtgcataatggaactgggtaggattcaaactcaagtcccctggttcaagtccttgactccactctgggcatggctaagtctggcctgtgtctcatcttctcagctc

SEQ ID NO: 786252 - DNA, 120 bp, Artificial Sequence
  ENSG00000260230_27 (sequence is synthesized)
tagtggctgtttagtagtgaagatactgatatgcaggcagccatgttgtaaataagaagcaaatatttttatatttctctctcttatgtgtataatatttgagctacaaacaggttaaaa

SEQ ID NO: 786253 - DNA, 120 bp, Artificial Sequence
  ENSG00000260230_28 (sequence is synthesized)
caaaagagagacttcagcttagtagcaggcagggaaggaagaagtgaatgcagcttccttccgcttacatttctaatcaagctaattatttcactagtgatttctcatttgattaccgat

SEQ ID NO: 786254 - DNA, 120 bp, Artificial Sequence
  ENSG00000260230_29 (sequence is synthesized)
tttgcttatttatgcttagaactttcaatgacttctcagtgccattaaggtaaaatgcaagccatttctgtgacctgcaatatcatcttttgccactcctcctcacttgctatgtcttag

SEQ ID NO: 786255 - DNA, 120 bp, Artificial Sequence
  ENSG00000260230_30 (sequence is synthesized)
caagactgagaggctctcagttcttcagacctgctctatctcacctctcattttgttcatattctccacctcttgtgcttgatgaactcctattcacctatcaggtcacaacttaaatat

SEQ ID NO: 786256 - DNA, 120 bp, Artificial Sequence
  ENSG00000260230_31 (sequence is synthesized)
atcaaatgctcccatagcacattgggcttcctcatcaacatgctcgttatacttttctagaattgctggcttgtcctccttgttatctccctaatgcagagaccattactcatcattgta

SEQ ID NO: 786257 - DNA, 120 bp, Artificial Sequence
  ENSG00000260230_32 (sequence is synthesized)
gcagatatttatccatatcaggtactcagcaaacatttgtggaatgaatctatatgtgaaactatacttctatggcaagtttgtttggttcagaaggcttgcatttcatgtatattggga

SEQ ID NO: 786258 - DNA, 120 bp, Artificial Sequence
  ENSG00000260230_33 (sequence is synthesized)
gactggccaacatttttatattcttcctcctatgctcaaaccataaataattatgttagcaaacactgaactttgtcttttgaaacataaatagaaacatccttagtaacagtactaaca

SEQ ID NO: 786259 - DNA, 120 bp, Artificial Sequence
  ENSG00000260230_34 (sequence is synthesized)
gtaatcatttttcagaaataagaattcacaccagtgatacagaatggcctttgaccattatctcagagaactagcagtcgatagacatgctgaagtgataattccaaaaacttcagtttc

SEQ ID NO: 786260 - DNA, 120 bp, Artificial Sequence
  ENSG00000260230_35 (sequence is synthesized)
attcatccctacttaaatataagagaatcaacttctattttatgtctgtattcccattttctaatatactacttgtcacagaggagatgcccaaccagtgtttttcgtaaagtacctgaa

SEQ ID NO: 786261 - DNA, 120 bp, Artificial Sequence
  ENSG00000260230_36 (sequence is synthesized)
tagattaataataatgctagtgaaatatatttagtgctgttctaagcactttacatgaattaactcatttaatcctcaccgcaaccataggaagtagattctattatttatccaatttta

SEQ ID NO: 786262 - DNA, 120 bp, Artificial Sequence
  ENSG00000260230_37 (sequence is synthesized)
cagatgaaaaaactgaggctggtcacttgacataaattaccagtgctggccaggactttagagaccatttaatccaatgctcttattttacagaggtgcagctgaagcctaaggaggtga

SEQ ID NO: 786263 - DNA, 120 bp, Artificial Sequence
  ENSG00000260230_38 (sequence is synthesized)
tatgatttcctacacattcatgcaccttcgtgcacatccattaaaacttttattaaatggaacccactatccatactccaattagctaggtgccttttttcccccatttagtaatttaca

SEQ ID NO: 786264 - DNA, 120 bp, Artificial Sequence
  ENSG00000260230_39 (sequence is synthesized)
attaattggaggactttttatagttatatttagaggaaaggagcatgttttactctatatcaactttcttttctgcttaaaagcattttgattctttattttaccagtcattttagttct

SEQ ID NO: 786265 - DNA, 120 bp, Artificial Sequence
  ENSG00000260230_40 (sequence is synthesized)
tttaataggtttaatacacagatcaaacaagacttaaatacatttttaacaatgtaacaatttaaaagaaattgcctaaaacctaggtcttctaacttggagcccagtgctttttttatt

SEQ ID NO: 786266 - DNA, 120 bp, Artificial Sequence
  ENSG00000260230_41 (sequence is synthesized)
gctccgctgagtcaaaaggtgaatatataaacatgatttcagatagaatgcagaagctgtatttaattaagttggcttttgtcattaaagaaatcagaaagtttggacaactcaggaatg

SEQ ID NO: 786267 - DNA, 120 bp, Artificial Sequence
  ENSG00000260230_42 (sequence is synthesized)
gatttccatcctagatggtatttactactatttctggaattaagtttactgtctatattcaggattttgtgcataagagacgtgaccactgaggttgtgtgtcattcttatctctactcc

SEQ ID NO: 786268 - DNA, 120 bp, Artificial Sequence
  ENSG00000260230_43 (sequence is synthesized)
aggggtcagcaaactttctctgttaagggtcagatagtagttttttggcttttcagtctctgtttggctctgctataaacaatacataaatgaatgagcatggctatgttccaataaaac

SEQ ID NO: 786269 - DNA, 120 bp, Artificial Sequence
  ENSG00000260230_44 (sequence is synthesized)
ttaattgacactgaactttgaatttcatgtacttttcaaatgtcacaaatgttttccttttgatttttttcagaaagccattaaaaaaatccaaagaccattcttagcttgcaggctgca

SEQ ID NO: 786270 - DNA, 120 bp, Artificial Sequence
  ENSG00000260230_45 (sequence is synthesized)
caaaaacaggaagcaggcggggtttgcttatggactgtggctttcccacccttgttcttagatagggacacaccaatatatcatgattagttgtaaaggatactgccagtaacatattat

SEQ ID NO: 786271 - DNA, 120 bp, Artificial Sequence
  ENSG00000260230_46 (sequence is synthesized)
tactggttagttgtaagaatatcaaagttagtgaataatttgcttttaaaataaattattgttgatttatttttataaataaatggcacagggcatctcatgctcttgcattctaatata

SEQ ID NO: 786272 - DNA, 120 bp, Artificial Sequence
  ENSG00000260230_47 (sequence is synthesized)
ttttctggaattgatgcaaaagtggtggcagtaaagtacagagccggctaagcagcagttttgtcttaagtaactgtggtgatcatggacaaccattgcgctgaactgctcttcatggta

SEQ ID NO: 786273 - DNA, 120 bp, Artificial Sequence
  ENSG00000260230_48 (sequence is synthesized)
atggacaaccattgcgctgaactgctcttcatggtaaggatttcagtgtttcagagtaattcattaacctagagatgttttaaaaagttgtatcggccgggcgcggtggctcaagcctgt

SEQ ID NO: 786274 - DNA, 120 bp, Artificial Sequence
  ENSG00000260230_49 (sequence is synthesized)
aaaataaaataaaataaaagttgtatcaaaatctgctgcaccatgggagtgttttacacatgtgatgtggcatctaccttatgtaccataatggaaaaatgtttgagaaccactgcacta

SEQ ID NO: 786275 - DNA, 120 bp, Artificial Sequence
  ENSG00000260230_50 (sequence is synthesized)
ggccaaaggctgggatgtgtatactttgctgccgtgtataattgtatgtccttgttctctaaacggaattggttatgtttagtgaacagttaggtggttctccatgtgtttatatacaca

SEQ ID NO: 786276 - DNA, 120 bp, Artificial Sequence
  ENSG00000260230_51 (sequence is synthesized)
gacgatccccgaatttggatggttcaacttaagagttttcaaacttacgatgatatgaaagtgatatacatttgatacattcctacaacttacaatggggttatgtcccataattgtttt

SEQ ID NO: 786277 - DNA, 120 bp, Artificial Sequence
  ENSG00000260230_52 (sequence is synthesized)
gacttatgatattttcaacttacaattgatgggtttactgagacataaccctcttgtaacttgaggagcatgtgtatatttgtacatacatgatggtgtgtgtttatacacaaaggcctg

SEQ ID NO: 786278 - DNA, 120 bp, Artificial Sequence
  ENSG00000260230_53 (sequence is synthesized)
aatatacacaccatgagcatttgaaggtctttgtcaaggttgtttctgtttctgatctcttgcctactttaaaacccaagaggtagaacattatgcatattacaggcaaaactatgcttg

SEQ ID NO: 786279 - DNA, 120 bp, Artificial Sequence
  ENSG00000260230_54 (sequence is synthesized)
agtttatagcaatgtagtttgtagaaaggattcctggatgttttactaagcctttcctcctccattcaacattatatgaattgttaagaacatataaagtaccactgttgaatgtgactt

SEQ ID NO: 786280 - DNA, 120 bp, Artificial Sequence
  ENSG00000260230_55 (sequence is synthesized)
ttctatactgttagttaagaaaccaagactagtgttagctgagtaactggcatgttgatgcaacctatacaggttttgtatttaattaggttccttattcagttattcaagtatccagtt

SEQ ID NO: 786281 - DNA, 120 bp, Artificial Sequence
  ENSG00000260230_56 (sequence is synthesized)
atttagtttcaaggtagatttctttgtttttatatttaataaaagacttgcatataagttcctcttcatgaaaatagtggctaggctagtgtgattttaagtatgtctggcaactcaaaa

SEQ ID NO: 786282 - DNA, 120 bp, Artificial Sequence
  ENSG00000260230_57 (sequence is synthesized)
tgtaatggattcatcaagctatttgggatttttaacataaaacacactgctgcttgattaatgtgttcagttttcccctggatatttgctattaggctgatagccatttggttggattct

SEQ ID NO: 786283 - DNA, 120 bp, Artificial Sequence
  ENSG00000260230_58 (sequence is synthesized)
tctggagagtaattgattctctaaggtaatggggtgctgcagtgggtgtagcattcacccaggtcactagaatcctacctgtttcatcacatagaaggccctggccatggggaagagtga

SEQ ID NO: 786284 - DNA, 120 bp, Artificial Sequence
  ENSG00000260230_59 (sequence is synthesized)
atgcagcttctccggatgccttatttccacagacatgctgatatgctggaacaatctggctccaggagtattaatatacttttttgagactgtctacaaaatactattttgtaaaaacta

SEQ ID NO: 786285 - DNA, 120 bp, Artificial Sequence
  ENSG00000260230_60 (sequence is synthesized)
tgcctttacatagacattgataggttatatttgttttataacaattgtgtacctaatgtttgtgattaattttgagatttatgtatatttataagcctatcttatgtaaatttttactct

SEQ ID NO: 786286 - DNA, 120 bp, Artificial Sequence
  ENSG00000260230_61 (sequence is synthesized)
aagatgtgtggcacattactaataaagacgtggatttctatttatgtaaagtaattgtagcaatattcctagatgctacctaaatgattgttctgtccatttgccatcacaaatactttt

SEQ ID NO: 786287 - DNA, 120 bp, Artificial Sequence
  ENSG00000260230_62 (sequence is synthesized)
ttgccatcacaaatacttttatctttggatgattatgttagtcagaatatattaattagatttaaactttaaaataagaattacaacatagtttgaaattcttcctgttgatgtaattaa

SEQ ID NO: 786288 - DNA, 120 bp, Artificial Sequence
  ENSG00000260230_63 (sequence is synthesized)
aaaaaaaaaaaagaaaaaaaaattgtaaataaatattgcattcattcatggttcatgagtaccagatgggggtattcatttggtgtatcgcataaataaggattttgcagcagttcaaac

SEQ ID NO: 786289 - DNA, 120 bp, Artificial Sequence
  ENSG00000260230_64 (sequence is synthesized)
gtatcgcataaataaggattttgcagcagttcaaacagataaaagtgaagagttgagccatcatgctatagagagtagtaagaacatgctctcaactccaaagaccctgcacgatctaat

SEQ ID NO: 786290 - DNA, 120 bp, Artificial Sequence
  ENSG00000260230_65 (sequence is synthesized)
cggataccacatgcacataagcagaaatttactttcagtaaagccccattatctgttgcatgagtgctgtgaatttcaatgttcctggtttattagtttaatttatattgaatttgtaaa

SEQ ID NO: 786291 - DNA, 120 bp, Artificial Sequence
  ENSG00000260230_66 (sequence is synthesized)
tttgtgttagtttgattatatgaaaatttgtaagttaaaaagagttggtatacatttaattaacagaaacaatttaaatggttaacttggagaatctttttccattaaaagggattcaga

SEQ ID NO: 786292 - DNA, 120 bp, Artificial Sequence
  ENSG00000260230_67 (sequence is synthesized)
aataattcagtagtaactaacatgtaaaagactctaatactaatataatgtagagaacactggctgggagtttagatacccagattcaagtcctgttgcaaccgctgacttcactataca

SEQ ID NO: 786293 - DNA, 120 bp, Artificial Sequence
  ENSG00000260230_68 (sequence is synthesized)
acctcgggcaagccccttcccatctcaggactgcagttcttgtgtacaaagtggggcagatcatctctaaggttcctcctaagagagtgaaactgtgtttttaagattccaggtagcaaa

SEQ ID NO: 786294 - DNA, 120 bp, Artificial Sequence
  ENSG00000260230_69 (sequence is synthesized)
ttggggtccagccattcagggtaagcttacatttcagcatctggattaaacgccagacaccactgtgcttgtgttcattgttaattgaagtcacactgtgtgcacaagagagcgataagc

SEQ ID NO: 786295 - DNA, 120 bp, Artificial Sequence
  ENSG00000260230_70 (sequence is synthesized)
actctggatcatttaaaggaaaaggagatgcgactcctaccttcagaaggttataatggacttattataatggacttattatacggacaaacaaatgaacagttacacacatgcaaagct

SEQ ID NO: 786296 - DNA, 120 bp, Artificial Sequence
  ENSG00000260230_71 (sequence is synthesized)
acagcagtacaagatagtatgtcatgagtgatgtgcttaatgaaacagatcatgtatctgctgtatgtagggctctgttcaattctcacagcattcttatttactcctcaccatgtcctt

SEQ ID NO: 786297 - DNA, 120 bp, Artificial Sequence
  ENSG00000260230_72 (sequence is synthesized)
gagaggtataggtattattgtcctgattttagagagattaagaaacttggtcaaggctatacaactaattagtagaagaattaaaattcaatcctaagtctgtctgaccccaaagcccat

SEQ ID NO: 786298 - DNA, 85 bp, Artificial Sequence
  ENSG00000260230_73 (sequence is synthesized)
ttaaaattcaatcctaagtctgtctgaccccaaagcccatgaatactcttaactcctatgctgtaaatataaaaagactgaacgg

SEQ ID NO: 786299 - DNA, 120 bp, Artificial Sequence
  ENSG00000260230_74 (sequence is synthesized)
gcctgggcactatagtgagaccctgtctccattcaaaaaaaaaaaagaagaagaaagaaataataaaaagtactgaacaggaagggcttctggagacttctccagagattgacaccaagc

SEQ ID NO: 786300 - DNA, 120 bp, Artificial Sequence
  ENSG00000260230_75 (sequence is synthesized)
atttcattagggcccactttgtgactattctgttagtcacaaatctaccaaattatcccatagtttaacccattactccttaaatatttatgtgtataggaattacctggctatattgtt

SEQ ID NO: 786301 - DNA, 120 bp, Artificial Sequence
  ENSG00000260230_76 (sequence is synthesized)
aattacctggctatattgttaaagtgcagttttctgtaggtcttcccctctctcctcccctctactggtctcccctccccttccctcctctcccagggtcttgctctgtcacccaggctg

SEQ ID NO: 786302 - DNA, 83 bp, Artificial Sequence
  ENSG00000260230_77 (sequence is synthesized)
tctgtcacccaggctggagtgcaatgaaacaatcagagctcactgcagcctccacctcccaggtttaagtgactcatgcgcca

SEQ ID NO: 786303 - DNA, 120 bp, Artificial Sequence
  ENSG00000260230_78 (sequence is synthesized)
cctggcaagattctgcatttctaataagctccctggtcatgctggttcattgatgacctcattttgggtggcaagtctctgcagcatttgcccagcaaagacccaaggatatcatgagac

SEQ ID NO: 786304 - DNA, 120 bp, Artificial Sequence
  ENSG00000260230_79 (sequence is synthesized)
cttttagagactgctaaaatcaagttacactgagtcttgagcattccttctggttgattagcctaagggcctgctcaagaatggaagtgagtgtggtttgcagtccttgcactgagaatt

SEQ ID NO: 786305 - DNA, 120 bp, Artificial Sequence
  ENSG00000260230_80 (sequence is synthesized)
cattctggctcctggtaattgcatctttctttactgtgtgctcatcaactatttgctgcctaatctgatctggttgtttttttccttcaattcgtttccaccaatcagcccagagatgac

SEQ ID NO: 786306 - DNA, 120 bp, Artificial Sequence
  ENSG00000260230_81 (sequence is synthesized)
ataatctaccttttattttgcctgttgccaattgggaagacacttgactgtctccagattggtgacaccttttccatttgctaatttcccagattaccaacagtggctctgcagttataa

SEQ ID NO: 786307 - DNA, 120 bp, Artificial Sequence
  ENSG00000260230_82 (sequence is synthesized)
cttcaattactttcggtaccctgggaaataaattatatctcagcctggagaaatggagtaatctaaaatagtgggatttgaagtctaaaaatttgagtttgagtattggttctgcccctt

SEQ ID NO: 786308 - DNA, 120 bp, Artificial Sequence
  ENSG00000260230_83 (sequence is synthesized)
ggtagctgtataatatttagcctattatttaatttctgaatttcatttccttatatctaaagtggggataataatacttcctattccatggaaatattgtaaggattaagtgaaaacaag

SEQ ID NO: 786309 - DNA, 120 bp, Artificial Sequence
  ENSG00000260230_84 (sequence is synthesized)
tatttgaaattgctttaccaattggaaaaagctgtattttcagaaggtcatctttttacatatatggcagactagcctaaagttcaaagccttctccaaatctggtcctgctttacctga

SEQ ID NO: 786310 - DNA, 120 bp, Artificial Sequence
  ENSG00000260230_85 (sequence is synthesized)
taagctctctcaaaacttctgttcttctcactaactctaagcaaaacaggcacattcctaccccatatactggcttctgcttttcttgtttcctgaatgcccttctattttttttatgtt

SEQ ID NO: 786311 - DNA, 85 bp, Artificial Sequence
  ENSG00000260230_86 (sequence is synthesized)
tgggattacagatgcccaccaccacacccagataacttttgtatttttagtagagacgctgtgtcaccatgtttgcccacctcag

SEQ ID NO: 786312 - DNA, 120 bp, Artificial Sequence
  ENSG00000260230_87 (sequence is synthesized)
acaggcatgagccaccacacccggcctcctgaatgcccttttaattgattatatcctacctattctcctaaggtccctgtaagggggaaaactttgaactaaggcttgaaaggggtatga

SEQ ID NO: 786313 - DNA, 120 bp, Artificial Sequence
  ENSG00000260230_88 (sequence is synthesized)
aaactttgaactaaggcttgaaaggggtatgaggttggatttcactcaaagaaggcatgaactgtaggcgcatagttaagttgagcagcccttgcaggtgaccagtgagctgaggttagg

SEQ ID NO: 786314 - DNA, 120 bp, Artificial Sequence
  ENSG00000260230_89 (sequence is synthesized)
ggtgaccagtgagctgaggttaggtaggagaggtgactgggatctattgagagaaaagtctgctctgttacccagtctggagtgcagtgaaacaatcacagctcactgcagcctccacct

SEQ ID NO: 786315 - DNA, 120 bp, Artificial Sequence
  ENSG00000260230_90 (sequence is synthesized)
ctcagcctcccaagtgtctgaaactacaggcatacaaacctgagaagtttgatttttgctaactggggccagcacggacactaagcagggacctgacatgtcaagtttggcagggcttcc

SEQ ID NO: 786316 - DNA, 120 bp, Artificial Sequence
  ENSG00000260230_91 (sequence is synthesized)
ctagcagataggaccttaaaaaccctcactctgagccctattcctaaggagacctttgcactgaatgtatatgccttagtctccctaacccaagtttcaaatggattattcaggaggtca

SEQ ID NO: 786317 - DNA, 120 bp, Artificial Sequence
  ENSG00000260230_92 (sequence is synthesized)
gacacttttaatcaactgaagattattaaatatattttacacacagtctgtacttctttccacttgtaacaaaattaaaagaaagtttcccatccaaagactagtttggtactttaatca

SEQ ID NO: 786318 - DNA, 120 bp, Artificial Sequence
  ENSG00000260230_93 (sequence is synthesized)
tcccactttctataccattctaccctaatctgccagacacacagacacacacagacacacatccagtataccacactccctctggcatggcctgggcaggctactaagtgtcccacagac

SEQ ID NO: 786319 - DNA, 120 bp, Artificial Sequence
  ENSG00000260230_94 (sequence is synthesized)
agtagaggagggcttccatctgtaagggagacgttagtagtgttgtcaggagttgttgatgatccatatatatacaagatagatttgagggaaaaagttagtagtctctgctgtttgaaa

SEQ ID NO: 786320 - DNA, 120 bp, Artificial Sequence
  ENSG00000260230_95 (sequence is synthesized)
taaaaatatagtttgcccatttgggtattaataagacaaaactcatagagccgttttaggaggcaatcatacaataatcacacaaaattatgtaactagtagttttaaaattgagatggc

SEQ ID NO: 786321 - DNA, 120 bp, Artificial Sequence
  ENSG00000260230_96 (sequence is synthesized)
aggaaacagatcaacagcattgttctgatgggggagtgcagattaataagaactagtctttttggataaatttaactaatttctatgttctttattatatgtacaatgatagagaattct

SEQ ID NO: 786322 - DNA, 120 bp, Artificial Sequence
  ENSG00000260230_97 (sequence is synthesized)
gataactcaaatacctgaatccagatctttgtaaccactgcttacgtattcaacactaaatagacttttgatttttccattgtttgcctataccattataaatctgttcttttttcaatt

SEQ ID NO: 786323 - DNA, 120 bp, Artificial Sequence
  ENSG00000260230_98 (sequence is synthesized)
catgattcctgtgtacgtggagtaaacagcctaggagaaaagatttctctcacaaagtggaggcataatgcagccttacccttcaatgtatggtttgatgcattatggtggttacccctt

SEQ ID NO: 786324 - DNA, 120 bp, Artificial Sequence
  ENSG00000260230_99 (sequence is synthesized)
agagcaaggctctgtctcaaaaaaaaaatagtgataataatccagtagtaatagtaactggtatttattgagctggaaatctgctgtatgctaacgtattattctagatgccaggaagta

SEQ ID NO: 786325 - DNA, 120 bp, Artificial Sequence
  ENSG00000260230_100 (sequence is synthesized)
aggaagtagtgaggatgatatgtttgaaaatggaagaagatggggaacctgagtcagatgcaacattaaaagagattgtctttgtcagtgaactctagaatttcaaaaacatgtaagtga

SEQ ID NO: 786326 - DNA, 120 bp, Artificial Sequence
  ENSG00000260230_101 (sequence is synthesized)
acaatcattgaattcctggataaatattctgagacaaatggcctcaggactgtagtgagaagtaacaggaagaagatatatgaagctgcttaacatacagtagtttgtagtggctcaata

SEQ ID NO: 786327 - DNA, 120 bp, Artificial Sequence
  ENSG00000260230_102 (sequence is synthesized)
actattcagaaaaaaacaaaactcgttcaagtcaggactcagtctatagcagtgaaccccagcctttttgataccaaggactggtttagtggaagacgatttttccatggactgggtcaa

SEQ ID NO: 786328 - DNA, 79 bp, Artificial Sequence
  ENSG00000260230_103 (sequence is synthesized)
ctggtttagtggaagacgatttttccatggactgggtcaaggggaaggtttttgggtgattcaacattgtaatatataa

SEQ ID NO: 786329 - DNA, 65 bp, Artificial Sequence
  ENSG00000260230_104 (sequence is synthesized)
tgacaacctacatccttcacatatgcagttcacaatagggactgcactcctatgagaatctaatg

SEQ ID NO: 786330 - DNA, 120 bp, Artificial Sequence
  ENSG00000260230_105 (sequence is synthesized)
ctatgagaatctaatgccactgctgatctaagaggaggtggagctcaggcagttatgcaagccatggggagtggctataaatacaggtgaagcttcgcttgcttgcctgccactcacctc

SEQ ID NO: 786331 - DNA, 120 bp, Artificial Sequence
  ENSG00000260230_106 (sequence is synthesized)
gcttgcttgcctgccactcacctcctgctgtgcggcttagttcctaacaggccatggactggtactggttagtggcccagggattggggatccctggtctctagtactgaagcagatata

SEQ ID NO: 786332 - DNA, 120 bp, Artificial Sequence
  ENSG00000260230_107 (sequence is synthesized)
ggacttagcataaaataagcataaaactagaaaaagtaatgcatttgatccaactactttggtggtaaaaagttaggattgtactttatgatgtgatcaaggtccaggatagtaaaaatg

SEQ ID NO: 786333 - DNA, 120 bp, Artificial Sequence
  ENSG00000260230_108 (sequence is synthesized)
gactattcagagtgcacagaagtgtgccagaaaagtgtgacctggtggcttttttaaagtataataaatctaatggacaaaattagcaaagcctcactttaaaaaaagtagcattacaaa

SEQ ID NO: 786334 - DNA, 120 bp, Artificial Sequence
  ENSG00000260230_109 (sequence is synthesized)
tcccaaagaaaaaacttaaaaataacaagaaaaaaactcataaaatagaatgatttttaaaagtttgtactgatttacatttcctaatgtctgtgggtgattttatttattcctttgaca

SEQ ID NO: 786335 - DNA, 120 bp, Artificial Sequence
  ENSG00000260230_110 (sequence is synthesized)
tgggtatggtatggtttgatgcattatggtgtatggtttgatgcattatggtggtaagtaatcttataagaaagatagacaactgttagaaattatgtgtttaaagaatttagcgacaag

SEQ ID NO: 786336 - DNA, 69 bp, Artificial Sequence
  ENSG00000260230_111 (sequence is synthesized)
ttgccttgaacctaggagacaggttgcagtgagccaggatggcaccactgcactccaacctgggcaaca

SEQ ID NO: 786337 - DNA, 120 bp, Artificial Sequence
  ENSG00000260230_112 (sequence is synthesized)
aacagagggagactctgtctcaaaaacaacaaaaaacaaaaacaaagaatttagtgacctaagaaaatgttacctacaggttaacgcaaaatggaagttgaaaatggaatggaaaaatcc

SEQ ID NO: 786338 - DNA, 120 bp, Artificial Sequence
  ENSG00000260230_113 (sequence is synthesized)
tgttatcaagtatataaatggaaaaatcccactatcaagtatataaatgtatcactgttaacttttttctcttagaacatgtatattgtattaaacgtgtgattctcaaactcccagggg

SEQ ID NO: 786339 - DNA, 120 bp, Artificial Sequence
  ENSG00000260230_114 (sequence is synthesized)
acagcggtaagcccgtggttatatgaaattgtgcctctctcagtgccccaggttcctctcctgtaaagtgagaaaaggacacacctactctcagttcacatgcaagattaggtccaaagg

SEQ ID NO: 786340 - DNA, 120 bp, Artificial Sequence
  ENSG00000260230_115 (sequence is synthesized)
tgtgtgtcctacaccctcccccatgaaggggatgattagccttcatcaaagccattttctgagtccccaaacatttctcgatatgtgtgagaaaaaacagtcaacacatttttaaaaatt

SEQ ID NO: 786341 - DNA, 120 bp, Artificial Sequence
  ENSG00000260286_0 (sequence is synthesized)
gactgtgaactcctgtgactgccagtggtgtacctgaaggaccactggcctttttacacaatggctaacagccgattttcttgtacgcaaatttgggttaagatgtatgggtattttgcg

SEQ ID NO: 786342 - DNA, 120 bp, Artificial Sequence
  ENSG00000260286_1 (sequence is synthesized)
gggctgtgtcggcgtctccagaaattctggcgtgtcactgttaagggcttttttgttaagaagaaggaaaaaaaaatcccttcagctgagacttattttcatgaggaaaaaattgttgta

SEQ ID NO: 786343 - DNA, 120 bp, Artificial Sequence
  ENSG00000260286_2 (sequence is synthesized)
cttggccaagtgttgatgaatgaatctctacccattgagaagagagctcaagctgcccagaaaattggactgctggccttcacaggaggaccacctgctgggaactttgcagctgagtac

SEQ ID NO: 786344 - DNA, 120 bp, Artificial Sequence
  ENSG00000260286_3 (sequence is synthesized)
aaaagagccaaaagtctgcaatttattcctattctcattagtttttttgaaggcagattcgagtctactatcaaaagtgaaacaaacagctacctcctccttaaattttggacttgttac

SEQ ID NO: 786345 - DNA, 120 bp, Artificial Sequence
  ENSG00000260286_4 (sequence is synthesized)
gttctctctgtcatgacatgcaataacttgtcttgcgtcaaggagcttaaagaccacagtgctctaaaatatcatttgcaaatgttggctgctgagaattggtctggatggacagagaat

SEQ ID NO: 786346 - DNA, 120 bp, Artificial Sequence
  ENSG00000260286_5 (sequence is synthesized)
tttgcagaggtgctgtatttcctaattggttttcataggaattagtttctctaaatccagttacatgttgcagctctctgtgtattaccctggaaaactgaaataaacaataaaaatcga

SEQ ID NO: 786347 - DNA, 74 bp, Artificial Sequence
  ENSG00000260287_0 (sequence is synthesized)
gagaagggcaagaggtcatctgagcacatccagcgcatcgaccgggacataagcgggacattaaggaagcatat

SEQ ID NO: 786348 - DNA, 120 bp, Artificial Sequence
  ENSG00000260314_0 (sequence is synthesized)
cagctgggcagctctgggaacttggattaggtggagaggcagttggggggcctcgttgttttgcgtcttagttccgccctcctgtccatcaggagaaggaaaggataaaccctgggccat

SEQ ID NO: 786349 - DNA, 120 bp, Artificial Sequence
  ENSG00000260314_1 (sequence is synthesized)
gaggctacccctgctcctggtttttgcctctgtcattccgggtgctgttctcctactggacaccaggcaatttttaatctataatgaagatcacaagcgctgcgtggatgcagtgagtcc

SEQ ID NO: 786350 - DNA, 120 bp, Artificial Sequence
  ENSG00000260314_2 (sequence is synthesized)
cagtgccgtccaaaccgcagcttgcaaccaggatgccgaatcacagaaattccgatgggtgtccgaatctcagattatgagtgttgcatttaaattatgcctgggagtgccatcaaaaac

SEQ ID NO: 786351 - DNA, 120 bp, Artificial Sequence
  ENSG00000260314_3 (sequence is synthesized)
ggactgggttgctatcactctctatgcctgtgactcaaaaagtgaatttcagaaatgggagtgcaaaaatgacacacttttggggatcaaaggagaagatttattttttaactacggcaa

SEQ ID NO: 786352 - DNA, 120 bp, Artificial Sequence
  ENSG00000260314_4 (sequence is synthesized)
cagacaagaaaagaatattatgctctacaagggatcgggtttatggagcaggtggaagatctatggaaccacagacaatctgtgctccagaggttatgaagccatgtatacgctactagg

SEQ ID NO: 786353 - DNA, 120 bp, Artificial Sequence
  ENSG00000260314_5 (sequence is synthesized)
caatgccaatggagcaacctgtgcattcccgttcaagtttgaaaacaagtggtacgcagattgcacgagtgctgggcggtcggatggatggctctggtgcggaaccactactgactatga

SEQ ID NO: 786354 - DNA, 120 bp, Artificial Sequence
  ENSG00000260314_6 (sequence is synthesized)
cacagacaagctatttggatattgtccattgaaatttgagggcagtgaaagcttatggaataaagacccgctgaccagcgtttcctaccagataaactccaaatccgctttaacgtggca

SEQ ID NO: 786355 - DNA, 120 bp, Artificial Sequence
  ENSG00000260314_7 (sequence is synthesized)
ccaggcgaggaaaagctgccaacaacagaacgctgagctcctgagcatcacagagattcatgagcaaacatacctgacaggattaaccagttccttgacctcaggactctggattggact

SEQ ID NO: 786356 - DNA, 120 bp, Artificial Sequence
  ENSG00000260314_8 (sequence is synthesized)
taacagtctgagcttcaacagcggttggcagtggagtgaccgcagtcctttccgatatttgaactggttaccaggaagtccatcagctgaacctggaaaaagctgtgtgtcactaaatcc

SEQ ID NO: 786357 - DNA, 120 bp, Artificial Sequence
  ENSG00000260314_9 (sequence is synthesized)
tggaaaaaatgctaaatgggaaaatctggaatgtgttcagaaactgggctatatttgcaaaaagggcaacaccactttaaattcttttgttattccctcagaaagtgatgtgcctactca

SEQ ID NO: 786358 - DNA, 120 bp, Artificial Sequence
  ENSG00000260314_10 (sequence is synthesized)
ctgtcctagtcagtggtggccgtatgccggtcactgttacaagattcacagagatgagaaaaaaatccagagggatgctctgaccacctgcaggaaggaaggcggtgacctcacaagtat

SEQ ID NO: 786359 - DNA, 120 bp, Artificial Sequence
  ENSG00000260314_11 (sequence is synthesized)
ccacaccatcgaggaattggactttattatctcccagctaggatatgagccaaatgacgaattgtggatcggcttaaatgacattaagattcaaatgtactttgagtggagtgatgggac

SEQ ID NO: 786360 - DNA, 120 bp, Artificial Sequence
  ENSG00000260314_12 (sequence is synthesized)
ccctgtaacgtttaccaaatggcttcgtggagaaccaagccatgaaaacaacagacaggaggattgtgtggtgatgaaaggcaaggatgggtactgggcagatcggggctgtgagtggcc

SEQ ID NO: 786361 - DNA, 120 bp, Artificial Sequence
  ENSG00000260314_13 (sequence is synthesized)
tcttggctacatctgcaagatgaaatcacgaagccaaggtccagaaatagtggaagtcgaaaaaggctgcaggaaaggctggaaaaaacatcacttttactgctatatgattggacatac

SEQ ID NO: 786362 - DNA, 120 bp, Artificial Sequence
  ENSG00000260314_14 (sequence is synthesized)
gctttcaacatttgcagaagcaaaccaaacctgtaataatgagaatgcttatttaacaactattgaagacagatatgaacaagccttcctgactagtttcgttggcttaaggcctgaaaa

SEQ ID NO: 786363 - DNA, 120 bp, Artificial Sequence
  ENSG00000260314_15 (sequence is synthesized)
atatttctggacaggactttcagatatacaaaccaaagggacttttcagtggaccatcgaggaagaggttcggttcacccactggaattcagatatgccagggcgaaagccagggtgtgt

SEQ ID NO: 786364 - DNA, 120 bp, Artificial Sequence
  ENSG00000260314_16 (sequence is synthesized)
tgccatgagaaccgggattgcagggggcttatgggatgttttgaaatgtgatgaaaaggcaaaatttgtgtgcaagcactgggcagaaggagtaacccacccaccgaagcccacgacgac

SEQ ID NO: 786365 - DNA, 120 bp, Artificial Sequence
  ENSG00000260314_17 (sequence is synthesized)
tcccgaacccaaatgtccggaggattggggcgccagcagtagaacaagcttgtgtttcaagctgtatgcaaaaggaaaacatgagaagaaaacgtggtttgaatctcgagatttttgtcg

SEQ ID NO: 786366 - DNA, 120 bp, Artificial Sequence
  ENSG00000260314_18 (sequence is synthesized)
agctctgggtggagacttagctagcatcaataacaaagaggaacagcaaacaatatggcgattaataacagctagtggaagctaccacaaactgttttggttgggattgacatatggaag

SEQ ID NO: 786367 - DNA, 120 bp, Artificial Sequence
  ENSG00000260314_19 (sequence is synthesized)
cccttcagaaggttttacttggagtgatggttctcctgtttcatatgaaaactgggcttatggagaacctaataattatcaaaatgttgaatactgtggtgagctgaaaggtgaccctac

SEQ ID NO: 786368 - DNA, 120 bp, Artificial Sequence
  ENSG00000260314_20 (sequence is synthesized)
tatgtcttggaatgatattaattgtgaacaccttaacaactggatttgccagatacaaaaaggacaaacaccaaaacctgagccaacaccagctcctcaagacaatccaccagttactga

SEQ ID NO: 786369 - DNA, 120 bp, Artificial Sequence
  ENSG00000260314_21 (sequence is synthesized)
cagtattatttcagcaaagagaaggaaaccatggacaatgcgcgagcgttttgcaagaggaattttggtgatcttgtttctattcaaagtgaaagtgaaaagaagtttctatggaaatat

SEQ ID NO: 786370 - DNA, 120 bp, Artificial Sequence
  ENSG00000260314_22 (sequence is synthesized)
gtaaacagaaatgatgcacagtctgcatattttattggtttattgatcagcttggataaaaagtttgcttggatggatggaagcaaagtggattacgtgtcttgggccacaggtgaaccc

SEQ ID NO: 786371 - DNA, 120 bp, Artificial Sequence
  ENSG00000260314_23 (sequence is synthesized)
aattttgcaaatgaagatgaaaactgtgtgaccatgtattcaaattcagggttttggaatgacattaactgtggctatccaaacgccttcatttgccagcgacataacagtagtatcaat

SEQ ID NO: 786372 - DNA, 120 bp, Artificial Sequence
  ENSG00000260314_24 (sequence is synthesized)
gctaccacagttatgcctaccatgccctcggtcccatcagggtgcaaggaaggttggaatttctacagcaacaagtgtttcaaaatctttggatttatggaagaagaaagaaaaaattgg

SEQ ID NO: 786373 - DNA, 120 bp, Artificial Sequence
  ENSG00000260314_25 (sequence is synthesized)
caagaggcacgaaaagcttgtataggctttggagggaatctggtctccatacaaaatgaaaaagagcaagcatttcttacctatcacatgaaggactccactttcagtgcctggactggg

SEQ ID NO: 786374 - DNA, 120 bp, Artificial Sequence
  ENSG00000260314_26 (sequence is synthesized)
ctgaatgatgtcaattcagaacacacgttcctttggacggatggacgaggagtccattacacaaactgggggaaaggttaccctggtggaagaagaagcagtctttcttatgaagatgct

SEQ ID NO: 786375 - DNA, 120 bp, Artificial Sequence
  ENSG00000260314_27 (sequence is synthesized)
gactgtgttgttattattggaggtgcatcaaatgaagcaggaaaatggatggatgatacctgcgacagtaaacgaggctacatatgccagacacgatccgacccttccttgactaatcct

SEQ ID NO: 786376 - DNA, 120 bp, Artificial Sequence
  ENSG00000260314_28 (sequence is synthesized)
ccagcaacgattcaaacagatggctttgttaaatatggcaaaagcagctattcactcatgagacaaaaatttcaatggcatgaagcggagacatactgcaagcttcacaattcccttata

SEQ ID NO: 786377 - DNA, 120 bp, Artificial Sequence
  ENSG00000260314_29 (sequence is synthesized)
gccagcattctggatccctacagtaatgcatttgcgtggctgcagatggaaacatctaatgaacgtgtgtggatcgccctgaacagtaacttgactgataatcaatacacttggactgat

SEQ ID NO: 786378 - DNA, 120 bp, Artificial Sequence
  ENSG00000260314_30 (sequence is synthesized)
aagtggagggtgaggtacactaactgggctgctgatgagcccaaattgaaatcagcatgtgtttatctggatcttgatggctactggaagacagcacattgcaatgaaagtttttacttt

SEQ ID NO: 786379 - DNA, 120 bp, Artificial Sequence
  ENSG00000260314_31 (sequence is synthesized)
ctctgtaaaagatcagatgaaatccctgctactgaacccccacaactgcctggcagatgcccggagtcagatcacacagcatggattcctttccatggtcactgttactatattgagtcc

SEQ ID NO: 786380 - DNA, 120 bp, Artificial Sequence
  ENSG00000260314_32 (sequence is synthesized)
tcatatacaagaaactggggccaagcttctctggaatgtcttcgaatgggttcctctctggtttccattgaaagtgctgcagaatccagttttctgtcatatcgggttgagccacttaaa

SEQ ID NO: 786381 - DNA, 120 bp, Artificial Sequence
  ENSG00000260314_33 (sequence is synthesized)
agtaaaaccaatttttggataggattgttcagaaatgttgaagggacgtggctgtggataaataacagtccggtctcctttgtcaactggaacacaggagatccctctggtgaacggaat

SEQ ID NO: 786382 - DNA, 120 bp, Artificial Sequence
  ENSG00000260314_34 (sequence is synthesized)
gattgtgtagctttacatgcgtcttctgggttttggagtaatattcactgttcatcctacaaaggatatatttgtaaaagaccaaaaattattgatgctaaacctactcatgaattactt

SEQ ID NO: 786383 - DNA, 120 bp, Artificial Sequence
  ENSG00000260314_35 (sequence is synthesized)
acaacaaaagctgacacaaggaagatggacccttctaaaccgtcttccaacgtggccggagtagtcatcattgtgatcctcctgattttaacgggtgctggccttgccgcctatttcttt

SEQ ID NO: 786384 - DNA, 120 bp, Artificial Sequence
  ENSG00000260314_36 (sequence is synthesized)
tataagaaaagacgtgtgcacctacctcaagagggcgcctttgaaaacactctgtattttaacagtcagtcaagcccaggaactagtgatatgaaagatctcgtgggcaatattgaacag

SEQ ID NO: 786385 - DNA, 120 bp, Artificial Sequence
  ENSG00000260314_37 (sequence is synthesized)
aatgaacactcggtcatctagtacctcaatgcgattctgagatatttgaatttcataaaattgtaactgaaatttaaaatttttagttcaatgtgattgttttctttaaaatgagtactg

SEQ ID NO: 786386 - DNA, 120 bp, Artificial Sequence
  ENSG00000260314_38 (sequence is synthesized)
aattgtactggtctgtccttttttcctttgcctaattgaagaaataattgcttgttttctagcctggcaagatattttcataaaagagggataacaatgctgattactaccttttaaaat

SEQ ID NO: 786387 - DNA, 120 bp, Artificial Sequence
  ENSG00000260314_39 (sequence is synthesized)
attttagataaatgcacagcaccacagcaccacatctaagcattagtgatgggtagctgatgtcagcttcatgtggattttaagcactctagaaacaatgaagcttcttggcatatttta

SEQ ID NO: 786388 - DNA, 120 bp, Artificial Sequence
  ENSG00000260314_40 (sequence is synthesized)
aggagctcccaaaatgtgttacctattaaattgtaactcagcaagtagaagaccatttgaaaagtcaggtacaaatttcctcaagtggcataaaaatgtagtcagttttctcttttacca

SEQ ID NO: 786389 - DNA, 120 bp, Artificial Sequence
  ENSG00000260314_41 (sequence is synthesized)
gtttttatttccactccaattatttagaactttatttgtacatgtgcagaagaataaggcagctgagaatcttgtttcccccaagagagttttacaggctgagtgttgcaaatgtgttct

SEQ ID NO: 786390 - DNA, 120 bp, Artificial Sequence
  ENSG00000260314_42 (sequence is synthesized)
ttgtcctgttatatgtatatcaggaatacaaggatgtgaaataaaactgtaaatttgcataactggatgtacttagataatgtgaaataaacattaaagacaaggtctatttttaataga

SEQ ID NO: 786391 - DNA, 120 bp, Artificial Sequence
  ENSG00000260325_0 (sequence is synthesized)
gcgctgggagcctcgcgccctttgacagcagttagttgctgactcggatgcagagagtcggtaacaccttctccaacgagagccgggtggcatcccggtgtcccagcgtgggccttgctg

SEQ ID NO: 786392 - DNA, 120 bp, Artificial Sequence
  ENSG00000260325_1 (sequence is synthesized)
aacggaaccgggtggccacaatgccggtgcggctgctcagggacagtccagcggctcaggaggacaatgaccatgccagagacggtttccaaatgaagctggatgcccacggcttcgccc

SEQ ID NO: 786393 - DNA, 120 bp, Artificial Sequence
  ENSG00000260325_2 (sequence is synthesized)
gggacccggaaagggtcagttaccgcatgtcacagaaggtgcaccggaaaatgctcccgtccaacctgagtcctaccgccatgacctgctgcctgaccccctccgggcagctgtgggtca

SEQ ID NO: 786394 - DNA, 120 bp, Artificial Sequence
  ENSG00000260325_3 (sequence is synthesized)
gaggccagtgtgtggcgctggccctccctgaagcccaaacaggaccgtccccgagactcgggagcctcggctctaaggcttccaacctgacccggtaaacaaacgacgcgatgtgcagca

SEQ ID NO: 786395 - DNA, 120 bp, Artificial Sequence
  ENSG00000260428_0 (sequence is synthesized)
gcagcgcgcgacagagctgacgccgcgcccccgccggccccatgtccttcgccacgctgcgcccggcgccgccgggccgctacctgtaccccgaggtgagcccgctgtcggaggacgagg

SEQ ID NO: 786396 - DNA, 120 bp, Artificial Sequence
  ENSG00000260428_1 (sequence is synthesized)
gaggtgagcccgctgtcggaggacgaggaccgcggcagcgacagctcgggctccgacgagaaaccctgtcgcgtgcacgcggcgcgctgcggcctccagggcgcccggcggagggcgggg

SEQ ID NO: 786397 - DNA, 120 bp, Artificial Sequence
  ENSG00000260428_2 (sequence is synthesized)
ggggccggccaggccgtgagccccggcagcggcacacggcgaacgcgcgcgagcgagaccgcaccaacagcgtgaacacggccttcacggcgctgcgcacgctgatccccaccgagcccg

SEQ ID NO: 786398 - DNA, 120 bp, Artificial Sequence
  ENSG00000260428_3 (sequence is synthesized)
acgctgcgcctggcctccagctacatctcgcacctgggcaacgtgctgctggcgggcgaggcctgcggcgacggacagccctgccactccgggcccgccttcttccacgcggcgcgcgcc

SEQ ID NO: 786399 - DNA, 120 bp, Artificial Sequence
  ENSG00000260428_4 (sequence is synthesized)
ggcagccccccgccgccgcccccgccgcctcccgcccgcgacggcgagaacacccagcccaaacagatctgcaccttctgcctcagcaaccagagaaagttgagcaaggaccgcgacaga

SEQ ID NO: 786400 - DNA, 120 bp, Artificial Sequence
  ENSG00000260428_5 (sequence is synthesized)
aagacagcgattcgcagttaggaggtggccggcagcagccaggaggcagacgctgctgggggaggtggacgcccggggtgactgcagacagcccccaccttggacctgagctgggcaagg

SEQ ID NO: 786401 - DNA, 120 bp, Artificial Sequence
  ENSG00000260428_6 (sequence is synthesized)
cccaccgcaagcatgcccccaggccagccctggctgcgagcggggccgagggacagacggacgtacagacaggcgccggcagcgggactctgcgctggccccagcacctgcccgggccca

SEQ ID NO: 786402 - DNA, 120 bp, Artificial Sequence
  ENSG00000260428_7 (sequence is synthesized)
ctggaactttctgcgctggcttttcttccggccactgtgtgatggcatcttgtgtttttgatatgataatataaagtctgaaaattttgtataattaaaaacaaaacagtatcttccaaa

SEQ ID NO: 786403 - DNA, 120 bp, Artificial Sequence
  ENSG00000260456_0 (sequence is synthesized)
ctctgagcggttgaggttggggctggggttgagctcgggttgggttcctcctggggcaggagggaaaggcgggagccagggcgtcagggcctgcggacgatgtgtgtgtgaaagggcgcg

SEQ ID NO: 786404 - DNA, 120 bp, Artificial Sequence
  ENSG00000260456_1 (sequence is synthesized)
tcagccataagaagccatatgcgtgcgagccggtccccaccgtccccgcggcgttgtcaccatcatcatgaggccactggagcagcctcaggcgctgctgccggggggccgggcgcgggg

SEQ ID NO: 786405 - DNA, 120 bp, Artificial Sequence
  ENSG00000260456_2 (sequence is synthesized)
tgcgtcgggctctgcaggttggcactcacacccagcgcgcaggatggcaggaatagcacatttcaaacctacaagaaagaagtgtgcctcccccgtcattcgatgcaccctggcccctgg

SEQ ID NO: 786406 - DNA, 120 bp, Artificial Sequence
  ENSG00000260456_3 (sequence is synthesized)
gccatctgctgtgaatgccagaccagattcgggggccgcctgcctgtgtccagggtggaagcagcactgccttactgggtccctctgtccctgagaccccgaaagcagagtcaaaagacg

SEQ ID NO: 786407 - DNA, 120 bp, Artificial Sequence
  ENSG00000260456_4 (sequence is synthesized)
gatgcctagggaccaggcagtgatgccctactgggtgccccaggtcctgaggtctcagcagcagatagtcaggaggcagcagagtttgaaaggcatccaagcacccctgctggatgcatg

SEQ ID NO: 786408 - DNA, 120 bp, Artificial Sequence
  ENSG00000260456_5 (sequence is synthesized)
ctgctggcacaactgctggcggatctgcggtgatgagtgcctgttgtccaagttccagcagctccaggccccctaccaggaccagctaccggctcctgcagcgcgtctgctgcccctcgg

SEQ ID NO: 786409 - DNA, 120 bp, Artificial Sequence
  ENSG00000260456_6 (sequence is synthesized)
cctcctgaccctcctccaggccatcccgagggtcatcatggccattcgccagtgttttggggtttgaagttggaatcttcagctactgtcaagaacagccacaaaaatgtgtcacgatca

SEQ ID NO: 786410 - DNA, 120 bp, Artificial Sequence
  ENSG00000260456_7 (sequence is synthesized)
agatctttgagagtccaccaatcaggaggcgtctgtgacagtcgctgtcttctcagaacagaatccacacccaggattcaacccaaatgatttctcatcaggtgattcttggttgtagca

SEQ ID NO: 786411 - DNA, 120 bp, Artificial Sequence
  ENSG00000260456_8 (sequence is synthesized)
ttgtccccatgtccgtgtccctgggggagggcagctatttccgagtgtctcttcagggacagcagacccactggatgagggcccgaaaatggtttcagcacctgtgtcagagcagaacgc

SEQ ID NO: 786412 - DNA, 120 bp, Artificial Sequence
  ENSG00000260456_9 (sequence is synthesized)
aaccggcgccagggtcccggggagagaggcagcaggaagtgaggctgaggggctgtctgtgtcgcgcagggagccgggcagggctgttttccatggctgccggccctctccttagatgag

SEQ ID NO: 786413 - DNA, 120 bp, Artificial Sequence
  ENSG00000260456_10 (sequence is synthesized)
tacacagctgcttttcacagcgctcagcctgccctcctggagggatcatttgaggagaaaatccatctcaacatccacatgttgtgtatcacttgaacgcggggcagggcaaggaagacc

SEQ ID NO: 786414 - DNA, 120 bp, Artificial Sequence
  ENSG00000260456_11 (sequence is synthesized)
aaagctcccccactttcaggaggcgactcctccttctttgctggacaggggcgaacaggaaccacgttggctctggaagttcacagggcagtggatcagggctcaggaggaagaagatgg

SEQ ID NO: 786415 - DNA, 120 bp, Artificial Sequence
  ENSG00000260456_12 (sequence is synthesized)
tgcagccgcaggcacttctgagtgacgagaggcaggcatgcgttgaaggtgatctgcagggcactcacacacagggcttggcaaggtcccgcagtcgtggggaacgtggaagttctgacc

SEQ ID NO: 786416 - DNA, 120 bp, Artificial Sequence
  ENSG00000260456_13 (sequence is synthesized)
caggccttctgtcaccggtcccaagcccacgtcgtttctgcgacagcgtgactgaccagtaagtcatctgcttaccaatgtcccccgagccaaggacagcgatggaaagccgtgcggtat

SEQ ID NO: 786417 - DNA, 120 bp, Artificial Sequence
  ENSG00000260456_14 (sequence is synthesized)
ctgtgacctcattcaatccctgcagagcccctggcggccatcgtcgtacggttggcaccagcatggactccagagcccaccacctggcttatggccccagctctgccctcattagcggtg

SEQ ID NO: 786418 - DNA, 120 bp, Artificial Sequence
  ENSG00000260456_15 (sequence is synthesized)
gaacctggccagcaacttaagctctccatgcctccgtttcttcatccataaaataagaatagcactggtacccctgcgcagggctgctgcgagaatcaaggtgcctcgctggaacttaac

SEQ ID NO: 786419 - DNA, 120 bp, Artificial Sequence
  ENSG00000260456_16 (sequence is synthesized)
gtgaggggagccagtgtggtctgtggaggctcctttgagcaggtgacatctgagctgccctctgaagataacaaggatccagacatgacggggagaaggagacgctgcaggcagaggaca

SEQ ID NO: 786420 - DNA, 120 bp, Artificial Sequence
  ENSG00000260456_17 (sequence is synthesized)
aagttaaggacgcagtactcctcccctctgaagggcacagcaacaaggcgccaccgtggaagcagggtccaggccctcacctgacatgaagcctgccaggaccttgatcttggacatccc

SEQ ID NO: 786421 - DNA, 120 bp, Artificial Sequence
  ENSG00000260456_18 (sequence is synthesized)
tgatcttggacatcccagcctccagagcaggaagttggatttgtctcctactccatagaagaaatagaggccatcagataagaatttcctcaacttggccaggtgtggtggctcactcct

SEQ ID NO: 786422 - DNA, 120 bp, Artificial Sequence
  ENSG00000260456_19 (sequence is synthesized)
gtgattcatatgcttccatagcaggtgtctgcttctgagccaagctcccagggcagcggagcaggcaccaaccagcatcccaggggagggcacagcttgtccagctgggatgtttgggtg

SEQ ID NO: 786423 - DNA, 120 bp, Artificial Sequence
  ENSG00000260456_20 (sequence is synthesized)
ccctgtgagatgccccaagccaccaacccagcttatctcaggagaagcctcggcggcccgtctgccggcctggagagatgtgctacagcagccgggggtggggggagagggtgggcttag

SEQ ID NO: 786424 - DNA, 120 bp, Artificial Sequence
  ENSG00000260456_21 (sequence is synthesized)
aatctcttggcagggagcccccaagagcagggtgagacctgccttcatttcacctgtccccttcacagttctgcaaagccagcattatcatcccttttcagaaggagtgggcactcaggt

SEQ ID NO: 786425 - DNA, 120 bp, Artificial Sequence
  ENSG00000260456_22 (sequence is synthesized)
aatgcctcaccccagtcctgcggctggaaagcgatatggccaggactgcaccccacccctcatccctgcaccccttccctgcctgggattcctccagccctgtgcactgtggagcgcctc

SEQ ID NO: 786426 - DNA, 120 bp, Artificial Sequence
  ENSG00000260456_23 (sequence is synthesized)
tgccttccgctcatggaggtttcccaagggcacgcgctgagggcagctggtctcagcctggggccgggtcctagtaactgtctctctttgctttccagccagtgttttggggtttgaagt

SEQ ID NO: 786427 - DNA, 120 bp, Artificial Sequence
  ENSG00000260456_24 (sequence is synthesized)
actggatgagggcccgaaaatggtttcagcacctgtgtcaggctctgcttttggggtgaactcaagataagacaaggtgagcagatcccatctcaccagtcagggaggaagcgccatcgg

SEQ ID NO: 786428 - DNA, 120 bp, Artificial Sequence
  ENSG00000260456_25 (sequence is synthesized)
agcagagacctgaagacaattccaggaaacctggcaatgaaaggtgagagagaagctgattatggccaggtctggcacagaaagcccctgtttgtgcaatcctgcattcttcctttttaa

SEQ ID NO: 786429 - DNA, 120 bp, Artificial Sequence
  ENSG00000260458_0 (sequence is synthesized)
agcaggccacagggaggcttgggcacagtcagctttccgtcctgttgggaagcctgtttctgctttcagtgcctacgtggtgtcaggaacgccggtcacagtgaacgcctgcaggaccca

SEQ ID NO: 786430 - DNA, 120 bp, Artificial Sequence
  ENSG00000260458_1 (sequence is synthesized)
cactgctgcatcgtctctgtgggacagatactgaagccagggcttggcttaccctcgtgacagtctcccgaggatgttctagtgactggatcctttccagctggtgcctgggaaatggca

SEQ ID NO: 786431 - DNA, 120 bp, Artificial Sequence
  ENSG00000260458_2 (sequence is synthesized)
gccactactaattcagccttgaagacagtaccgtgcctactcagcaccattacgtagaagacagaactcaagaggagccgccctgcctggagctagcctgggggtgagccagggtccccc

SEQ ID NO: 786432 - DNA, 120 bp, Artificial Sequence
  ENSG00000260458_3 (sequence is synthesized)
aacccccgggatgaccgcggccagccgggccaacccctacagcatcgtgtcattggaggaggacgggctgcacctggtcaccatgtcgggcgccaacggcttcggcaacggcaaggtgca

SEQ ID NO: 786433 - DNA, 120 bp, Artificial Sequence
  ENSG00000260458_4 (sequence is synthesized)
cacgcggcgcaggtgccgcaaccgcttcgtcaagaagaatggccagtgcaacattgcgttcgccaacatggacgagaagtcacagcgctacctggctgacatgttcaccacctgtgtgga

SEQ ID NO: 786434 - DNA, 120 bp, Artificial Sequence
  ENSG00000260458_5 (sequence is synthesized)
catccgctggcgctacatgctgctcatcttctcgctggccttccttgcctcctggctgctgttcggcgtcatcttctgggtcatcgcggtggcacacggtgacctggagccggctgaggg

SEQ ID NO: 786435 - DNA, 120 bp, Artificial Sequence
  ENSG00000260458_6 (sequence is synthesized)
ccacggccgcacaccctgtgtgatgcaggtgcacggcttcatggcggccttcctcttctccatcgagacgcagaccaccatcggctacgggctgcgctgtgtgacggaggagtgcctggt

SEQ ID NO: 786436 - DNA, 120 bp, Artificial Sequence; identical to SEQ ID NO: 659493
  ENSG00000260458_7 (sequence is synthesized)

SEQ ID NO: 786437 - DNA, 120 bp, Artificial Sequence
  ENSG00000260458_8 (sequence is synthesized)
ccacaacgccgtggtggccctgcgtgacggcaagctctgcctcatgtggcgtgtgggcaacctgcgcaagagccacattgtggaggcccatgtgcgcgcgcagctcatcaagccgcgggt

SEQ ID NO: 786438 - DNA, 120 bp, Artificial Sequence
  ENSG00000260458_9 (sequence is synthesized)
cgacatcgatgtgggcttcgacaagggcctggaccgcatctttctggtgtcgcccatcaccatcttgcatgaaattgacgaggccagcccgctcttcggcatcagccggcaggacctgga

SEQ ID NO: 786439 - DNA, 120 bp, Artificial Sequence
  ENSG00000260458_10 (sequence is synthesized)
gacggacgactttgagatcgtggtcatcctggaaggcatggtggaggccacagccatgaccacccaggcccgcagctcctacctggccaatgagatcctgtggggtcaccgctttgagcc

SEQ ID NO: 786440 - DNA, 120 bp, Artificial Sequence
  ENSG00000260458_11 (sequence is synthesized)
cgtgctcttcgaggagaagaaccagtacaagattgactactcgcacttccacaagacctatgaggtgccctctacgccccgctgcagtgcgaaggatctggtagagaacaagttcctgct

SEQ ID NO: 786441 - DNA, 120 bp, Artificial Sequence
  ENSG00000260458_12 (sequence is synthesized)
gcccagtgccaactccttctgctatgagaacgagctggccttcctgagccgtgacgaggaggatgaggcggacggagaccaggacggccgaagccgggatggcctcagcccccaggccag

SEQ ID NO: 786442 - DNA, 120 bp, Artificial Sequence
  ENSG00000260458_13 (sequence is synthesized)
gcatgactttgacagactccaggctggcggcggggtcctggagcagcggccctacagacgggggtcagagatctgagccaaccttggccgacatgcagcatccacccctggccggggaga

SEQ ID NO: 786443 - DNA, 120 bp, Artificial Sequence
  ENSG00000260458_14 (sequence is synthesized)
ggccccgcggtcgctcaggggccctgggtttgagcagaacgggcccagtgccctgggttgcagactcagtagcgttttagtcgttttatgtttctttgcaaaggcctcagaaggttggcc

SEQ ID NO: 786444 - DNA, 120 bp, Artificial Sequence
  ENSG00000260458_15 (sequence is synthesized)
ggagagggggcagccagagcggcagcccccggcctcagaggctatcacaggctcagggcaaagaagtggcctcctggggggccaggccacgggggccagggcttctgcctgaagatggag

SEQ ID NO: 786445 - DNA, 120 bp, Artificial Sequence
  ENSG00000260458_16 (sequence is synthesized)
ctgcagcctgcggggaagcagcccagctcgatggtgggcccagcctctgctgtccaaggctggctagctgcggtgctccttgctggtttttaacttggggagaaacaccgggtttcagct

SEQ ID NO: 786446 - DNA, 120 bp, Artificial Sequence
  ENSG00000260458_17 (sequence is synthesized)
ttctcgaccttagcttgggtgagactgtttacaaaaaaaaaaaaaaccatgcaattggagaaaaaaattttaattcatagggggcaaaaagaacaattagaattccatgggtctgccagg

SEQ ID NO: 786447 - DNA, 63 bp, Artificial Sequence
  ENSG00000260596_0 (sequence is synthesized)
aggcccggtgagagactccactccgcggagaactgcctttctttcctgggcatcccggggatc

SEQ ID NO: 786448 - DNA, 120 bp, Artificial Sequence
  ENSG00000260596_1 (sequence is synthesized)
ccagagccggcccaggtaccagcagacctgcgcgcagtgcgcaccccggctgacgtgcaagggagctcgctggcctctctgtgcccttgttcttccgtgaaattctggctgaatgtctcc

SEQ ID NO: 786449 - DNA, 120 bp, Artificial Sequence
  ENSG00000260596_2 (sequence is synthesized)
ctggctgaatgtctccccccaccttccgacgctgtctaggcaaacctggattagagttacatctcctggatgattagttcagagatatattaaaatgccccctccctgtggatcctatag

SEQ ID NO: 786450 - DNA, 65 bp, Artificial Sequence
  ENSG00000260596_3 (sequence is synthesized)
ctaggcccggtgagagactccactccgcggagaactgcctttctttcctgggcatcccggggatc

SEQ ID NO: 786451 - DNA, 65 bp, Artificial Sequence; identical to SEQ ID NO: 786450
  ENSG00000260596_4 (sequence is synthesized)

SEQ ID NO: 786452 - DNA, 67 bp, Artificial Sequence
  ENSG00000260596_5 (sequence is synthesized)
cgcctttgtcgcttcaaacaccgcaagtgttcttttaaaagaattatatcaacctttcaagtgaaat

SEQ ID NO: 786453 - DNA, 120 bp, Artificial Sequence
  ENSG00000260596_6 (sequence is synthesized)
tcaacctttcaagtgaaatgcaacatgtctgaaacgtggtatctggagaggaacagtaagaggaccttgtgagtgaataatttgtttccacattacagagtgggtaataagcagattagt

SEQ ID NO: 786454 - DNA, 70 bp, Artificial Sequence
  ENSG00000260596_7 (sequence is synthesized)
gcagaggctaaacaagagttacatcacctggattttgtttcctgcaatatgtcacaatggcgacagtttc

SEQ ID NO: 786455 - DNA, 120 bp, Artificial Sequence
  ENSG00000260691_0 (sequence is synthesized)
atttgaaatagcggagttggggttggatcggggctttggggttggataggggatttggggctgggtcggccggggtcggggaggggggtggtgaaaaggtgacagggagctgcccccgct

SEQ ID NO: 786456 - DNA, 120 bp, Artificial Sequence
  ENSG00000260691_1 (sequence is synthesized)
caagagccggtggttgggggtctgagaagaagtcaccaatatgaagttattcggcttcgggagccgcaggggccagacggcccagggctccatagaccacgtctacacgggttccggata

SEQ ID NO: 786457 - DNA, 120 bp, Artificial Sequence
  ENSG00000260691_2 (sequence is synthesized)
tgcagaagatccacagggcagctgtcaaaggcgacgccgcggaggtggagcgctgcctggcgcgcaggagcggagacctggacgccctggacaagcagcacagaactgctctacacttgg

SEQ ID NO: 786458 - DNA, 120 bp, Artificial Sequence
  ENSG00000260691_3 (sequence is synthesized)
cagaactgctctacacttggcctgtaccagtggccatgtgcaagtggtcactctcctggttaacagaaaatgccagattgatgtctgtgacaaagaaaacagaacgcctttgatacaggc

SEQ ID NO: 786459 - DNA, 120 bp, Artificial Sequence
  ENSG00000260691_4 (sequence is synthesized)
gccaggaagaggcttgtgccgttattctgctggaacatggcgccaatccaaaccttaaggatatctacggcaacactgctctccattatgccgtgtatagtgagagcacctcactggcag

SEQ ID NO: 786460 - DNA, 120 bp, Artificial Sequence
  ENSG00000260691_5 (sequence is synthesized)
atagtgagagcacctcactggcagaaaaactgctttcccatggtgcacatattgaagcactggacaaggacaataataccccacttttatttgctataatttgcaagaaagagaaaatgg

SEQ ID NO: 786461 - DNA, 120 bp, Artificial Sequence
  ENSG00000260691_6 (sequence is synthesized)
aaagaaagcaagttcacatgccgttgataggctgagacggtcagctctcatgcttgctgtatactatgactcaccaggtattgtcaatatccttcttaagcaaaatattgatgtcttcgc

SEQ ID NO: 786462 - DNA, 120 bp, Artificial Sequence
  ENSG00000260691_7 (sequence is synthesized)
tcaagacatgtgtggacgagatgcagaagattatgctatttctcatcatttgacaaaaattcaacaacaaattttggaacataaaaagaagatacttaaaaaggagaaatcagatgttgg

SEQ ID NO: 786463 - DNA, 120 bp, Artificial Sequence
  ENSG00000260691_8 (sequence is synthesized)
aagttctgatgaatctgcagtcagcattttccatgaactgcgtgtggattcattgcctgcatcggatgacaaagacttgaatgttgctactaagcagtgtgtccccgagaaagtgtcaga

SEQ ID NO: 786464 - DNA, 120 bp, Artificial Sequence
  ENSG00000260691_9 (sequence is synthesized)
gtgtcagagcctttacctggatcttcgcatgaaaaaggaaacagaatagtcaatggacaaggagaagggcctcctgcaaaacatccttccttgaagcctagcactgaagtggaagatcct

SEQ ID NO: 786465 - DNA, 120 bp, Artificial Sequence; identical to SEQ ID NO: 652082
  ENSG00000260691_10 (sequence is synthesized)

SEQ ID NO: 786466 - DNA, 83 bp, Artificial Sequence
  ENSG00000260691_11 (sequence is synthesized)
tcagaaaatatatgtgatagtacatcttctgctgctgctggcagattaacccaacaaagaaagattgggaaaacgtatcctca

SEQ ID NO: 786467 - DNA, 80 bp, Artificial Sequence
  ENSG00000260691_12 (sequence is synthesized)
aacgtatcctcagcaatttcccaagaagctgaaggaagagcatgagttaatatgctgtacaaaaaaaatagagaagaatt

SEQ ID NO: 786468 - DNA, 120 bp, Artificial Sequence; identical to SEQ ID NO: 581635
  ENSG00000260691_13 (sequence is synthesized)

SEQ ID NO: 786469 - DNA, 120 bp, Artificial Sequence
  ENSG00000260691_14 (sequence is synthesized)
aattgcattttgaaggcagatattgctatactcagacaggaaatatgtacaatgaaaaatgacaacttggaaaaagaaaataaatatcttaaggacattaaaattgttaaagaaacaaat

SEQ ID NO: 786470 - DNA, 85 bp, Artificial Sequence
  ENSG00000260691_15 (sequence is synthesized)
taaatatcttaaggacattaaaattgttaaagaaacaaatgctgcccttgaaaagtatataaaactcaatgaggaaatgataaca

SEQ ID NO: 786471 - DNA, 120 bp, Artificial Sequence
  ENSG00000260691_16 (sequence is synthesized)
ggctcaatgccgaactgttgaaggaaaaagaaagcaagaaaagactggaagctgacattgaatcttatcagtctagactggctgctgctataagcaaacacagtgaaagtgtgaaaacag

SEQ ID NO: 786472 - DNA, 120 bp, Artificial Sequence
  ENSG00000260691_17 (sequence is synthesized)
ttagagagaacacgagatgtttctgtacaagtagaaatgagttctgctatttccaaagtaaaagctgagaatgagtttcttactgaacaactttctgaaacacaaattaaattcaatgcc

SEQ ID NO: 786473 - DNA, 120 bp, Artificial Sequence
  ENSG00000260691_18 (sequence is synthesized)
ttaaaagataagttccgtaagacaagagatagtctcagaaaaaagtcattggctttagaaactgtacaaaacgacctaagccaaacacagcagcaaacacaggaaatgaaagagatgtat

SEQ ID NO: 786474 - DNA, 120 bp, Artificial Sequence
  ENSG00000260691_19 (sequence is synthesized)
aagtgaataattccactggaaagtggaactgtgtagaagagaggatatgtcacctccaacgtgaaaatgcgtggcttgtacagcaactagatgacgttcatcagaaagaggatcataaag

SEQ ID NO: 786475 - DNA, 70 bp, Artificial Sequence
  ENSG00000260691_20 (sequence is synthesized)
gctttattgagagtggaaagaaagacctcgtgctagaagagaaaatatgagagagagaaaacagaaggag

SEQ ID NO: 786476 - DNA, 70 bp, Artificial Sequence
  ENSG00000260691_21 (sequence is synthesized)
gatcatttaaaagaaagtctctttcagtatgagagagagaaaacagaaaatttaaacatttggttctgga

SEQ ID NO: 786477 - DNA, 75 bp, Artificial Sequence
  ENSG00000260691_22 (sequence is synthesized)
gtatagggacaaaaagtagattcatgtttgcaaggggctggggctggaagctggtagtgactgctaatgggcatg

SEQ ID NO: 786478 - DNA, 120 bp, Artificial Sequence
  ENSG00000260691_23 (sequence is synthesized)
gacaaaaagtagattcatgtttgcaaggggctggggctggaagctggtagtgactgctaatgggcatgaggaatcttacagtgatggaaatgctctaaagttggattgtagagatggctg

SEQ ID NO: 786479 - DNA, 86 bp, Artificial Sequence; identical to SEQ ID NO: 652094
  ENSG00000260691_24 (sequence is synthesized)

SEQ ID NO: 786480 - DNA, 120 bp, Artificial Sequence
  ENSG00000260691_25 (sequence is synthesized)
tttaatgtctttatgttgccacatgttaagaccataatgtagttataaatggaaatgtttacacctgaagtgagtattttcaaattaaaatttaattaagtgattttcttcgacacttaa

SEQ ID NO: 786481 - DNA, 120 bp, Artificial Sequence
  ENSG00000260691_26 (sequence is synthesized)
atgcaatcagaacatgaagtctaggaaccggcatgcgcataacctccgtatataaatgatgctgaaaaactgttacggtttttttttttttagggttcggtgttttactgttgagctgct

SEQ ID NO: 786482 - DNA, 120 bp, Artificial Sequence
  ENSG00000260691_27 (sequence is synthesized)
cagtgcccagcttagaggaccaggaaaaggagtcaccggccgtatgctggaggcttgagacacggcacagcggcgcagctcgcctcgctatgtcctttaggttgtttgagggacattcat

SEQ ID NO: 786483 - DNA, 120 bp, Artificial Sequence
  ENSG00000260691_28 (sequence is synthesized)
caaggaaaccggagaaacttaaaatgctcttccgcttctttggaacagtcacagagaaaagtgaactcctttcattcttgcagtaatttttcttgctgatgggaacagttcaagtcaagt

SEQ ID NO: 786484 - DNA, 120 bp, Artificial Sequence
  ENSG00000260691_29 (sequence is synthesized)
gacataacctactgggttggtgacatttacaagacagagtcttgaggattttccagaacgggaaagattttgaaagaacaaagaggaactacagaatcattgcttacattgacaccggcc

SEQ ID NO: 786485 - DNA, 120 bp, Artificial Sequence
  ENSG00000260691_30 (sequence is synthesized)
ctgttgtcccaatggatgggttttttttggatgaacgtcaaaattgaccctgctgttaaagcttgaaacttggatctgttgtatctgagttctctcctcaaaaaaagaccttcaggaagt

SEQ ID NO: 786486 - DNA, 120 bp, Artificial Sequence
  ENSG00000260691_31 (sequence is synthesized)
atcagataactgaaacataccagatcacagcaccacatgcctcctgcccctccctaatttctgttctcttatacattgttaaatttttttcctgcccctattagtcaagcccatggattt

SEQ ID NO: 786487 - DNA, 120 bp, Artificial Sequence
  ENSG00000260691_32 (sequence is synthesized)
gagactgagctcccagctcctgggccgcagcaccaggttaaagctttcttccttggcagtacttgtcacctcagtgactggctttttctccgatgagcaggaggacctggacgaaacccc

SEQ ID NO: 786488 - DNA, 120 bp, Artificial Sequence
  ENSG00000260691_33 (sequence is synthesized)
tagtgtttggtcaaggaacttgatgctccctaaatccaaatattacggttaaaagaagagagaggaaatgtgtgcagagaaagtgtattttacaaatgaattaaaggtggattctgagat

SEQ ID NO: 786489 - DNA, 120 bp, Artificial Sequence
  ENSG00000260691_34 (sequence is synthesized)
aagtgtattttacaaatgaattaaaggtggattctgagatacaggtttatagatttacctagagttttgagttcagatggagtttcactctcgtcacccaggctggagtgcagcagcgcg

SEQ ID NO: 786490 - DNA, 75 bp, Artificial Sequence
  ENSG00000260691_35 (sequence is synthesized)
ccctgccaccacgcctggctgatttcttgtattttagtagatatgaggtttcaccatgttggcccaggctggtct

SEQ ID NO: 786491 - DNA, 120 bp, Artificial Sequence
  ENSG00000260691_36 (sequence is synthesized)
ctcctgaactcaggaagccatcattctttagagggcaatgaccaaacagtaccagcagaaattgaagtaccagcagaaggctaagaagggatcatggcacaagctgcagtttccaccctg

SEQ ID NO: 786492 - DNA, 120 bp, Artificial Sequence
  ENSG00000260691_37 (sequence is synthesized)
tggaagatgaggagtccgttgaagatgagtctgttgaagatgagtccgcagagaacaggatggtggtgacattgctcatatcagctcttgagtccatggatcatggcacaagttgcagtt

SEQ ID NO: 786493 - DNA, 120 bp, Artificial Sequence; identical to SEQ ID NO: 581654
  ENSG00000260691_38 (sequence is synthesized)

SEQ ID NO: 786494 - DNA, 120 bp, Artificial Sequence
  ENSG00000260691_39 (sequence is synthesized)
gagagaaaacagaaggagtagtggttgtgagacaacttcaacaagaagtggctgacagcgtaaaaaaattaacgacgttagagtctccactggaaggtatatcacgttgtcatattaatt

SEQ ID NO: 786495 - DNA, 120 bp, Artificial Sequence
  ENSG00000260691_40 (sequence is synthesized)
tggatgagacacaggcctcaaataagaaattatttcaagtgaaaagtcaacctaaaaaagaaaatgaagaattaagaaaactttttgagttaatatcatcactgaagtataatgtgaatc

SEQ ID NO: 786496 - DNA, 120 bp, Artificial Sequence
  ENSG00000260691_41 (sequence is synthesized)
gaataagaaagaaaaatgatgaattagaagaagaggcaactggatataagaaactcctggaaatgacaataaatatgttaaatgtatttggaaatgaagactttgattgccatggagact

SEQ ID NO: 786497 - DNA, 120 bp, Artificial Sequence
  ENSG00000260691_42 (sequence is synthesized)
taaaaacagatcaactgaaaatggatattctgattaagaagctaaaacagaagtttgatgatcttacggcagagaaggaagctttatcttcaaaatgtgtcaatttggctaaagacaatc

SEQ ID NO: 786498 - DNA, 120 bp, Artificial Sequence
  ENSG00000260691_43 (sequence is synthesized)
ctaaagacaatcaagttcttcaacaggagtttttatctatgaaaaaagtacaacagcaatgtgagaaacttgaggaggataaaaagatgttgaaagaagaaatattaaatcttaagacac

SEQ ID NO: 786499 - DNA, 79 bp, Artificial Sequence
  ENSG00000260691_44 (sequence is synthesized)
ttaaatcttaagacacatatggaaaacaatagggtagaacttagtaaactacaagaatataaattggagctagatgaaa

SEQ ID NO: 786500 - DNA, 82 bp, Artificial Sequence
  ENSG00000260691_45 (sequence is synthesized)
gaaatccatttacaggaacaagcacaatatgaaaaacaattagagcagttaagcaaggataatatggcttcactaaataaaa

SEQ ID NO: 786501 - DNA, 120 bp, Artificial Sequence
  ENSG00000260691_46 (sequence is synthesized)
ctttgcagcagcattgaaagctaacaattccatgtcaaaaaaattaacaaaatcaaataagaaaatagcagtgatcagcatgaagctccttatggagaaagagcagatgaaatattttct

SEQ ID NO: 786502 - DNA, 82 bp, Artificial Sequence
  ENSG00000260691_47 (sequence is synthesized)
atagcagtgatcagcatgaagctccttatggagaaagagcagatgaaatattttctcagtgctcttcctacaaggcgagacc

SEQ ID NO: 786503 - DNA, 120 bp, Artificial Sequence
  ENSG00000260691_48 (sequence is synthesized)
gaaatgttattctctatttatttttatatagattatagtctttatctaactgttcttagttcatttgaactaaaccaatgaatttgtcaacagaacaagccttaccagtggcttcagagg

SEQ ID NO: 786504 - DNA, 120 bp, Artificial Sequence
  ENSG00000260734_0 (sequence is synthesized)
aagcccagcctccaggaagccttcccgactgccctgcggcaccaagcctccgtcctctggttgccccgagggacctcagcgcccccgccacggggatcaggacacactgggaacctggtg

SEQ ID NO: 786505 - DNA, 120 bp, Artificial Sequence
  ENSG00000260734_1 (sequence is synthesized)
tctgtttggcgggtctatttgtcaagtcctagaaccgggtggtccagacacctcactgatctaagaacatgagtggagagaaggaagaggcatcgctcagaatgttcggggcttatggtg

SEQ ID NO: 786506 - DNA, 120 bp, Artificial Sequence
  ENSG00000260734_2 (sequence is synthesized)
agccagaggagaggagggatgtgctggaaagctctggcgtttcctctcagcctgagccacaagtgcagcagcaactgggcagtctgttgggagtgccctggcagcccccgggccccccaa

SEQ ID NO: 786507 - DNA, 120 bp, Artificial Sequence
  ENSG00000260734_3 (sequence is synthesized)
tacagcacagccctgctgatcaagagacaagcacggtgacccagcagcagtggcacctccagggcctgggtagatctgagctccaggccgctgggctccctgatgcacaaccaggagaag

SEQ ID NO: 786508 - DNA, 120 bp, Artificial Sequence
  ENSG00000260734_4 (sequence is synthesized)
cagcagagtccagcccaagcttcctactgggttctgaggttggccagccttactcttcttcctctcccagtgaagaagtcctctcattgctcagagcaattccccccattccagatgaag

SEQ ID NO: 786509 - DNA, 120 bp, Artificial Sequence
  ENSG00000260734_5 (sequence is synthesized)
ttgtggtcaggcagaagagggccccacagggctcctggaaggttggcacactcttccatggaaagagagtctacgctgtggccatcagcggctcaacccaccacgtgtacacgtgtggct

SEQ ID NO: 786510 - DNA, 120 bp, Artificial Sequence
  ENSG00000260734_6 (sequence is synthesized)
cagcatccccaggaccgtgttgttacctgcaagctgttccctgatgagcggagcctgatcacagggggtgcgtcccaggccgtgactctctgggacttggcacccaccccccaggtcagg

SEQ ID NO: 786511 - DNA, 120 bp, Artificial Sequence
  ENSG00000260734_7 (sequence is synthesized)
gcacagctgacctcgacgggccccacgtgctattctctggctgtctcctctgatgcccatatctgtttggcttgtttccatggatttgttgagatttgggatttgcagaaccaaatcttg

SEQ ID NO: 786512 - DNA, 120 bp, Artificial Sequence
  ENSG00000260734_8 (sequence is synthesized)
atcaggaagcacgaagttcctgtatacgggtcccgatgtgtggacatcaccggcaatatattctggacaggaggtgaagacaccatcctgtattcctgggacctgaggagctaccagagg

SEQ ID NO: 786513 - DNA, 120 bp, Artificial Sequence
  ENSG00000260734_9 (sequence is synthesized)
ctgcaccaacacaacttacagaatgagatcctcagcattacccacgaccccggtgaagaatgggtattggcgggcctgagaacgagtgatatcgtgttccttcacactcgtcggaatgag

SEQ ID NO: 786514 - DNA, 120 bp, Artificial Sequence
  ENSG00000260734_10 (sequence is synthesized)
cagtttaaggctctcatgaaaaaatacacccgccaccacagcctcaagtttgcctcctgtgggagctattttgtgaccgcgatagatacgcgcctcagtggcttggaggcaccttctctg

SEQ ID NO: 786515 - DNA, 120 bp, Artificial Sequence
  ENSG00000260734_11 (sequence is synthesized)
caaaagttgtttcagatagaggagtcttcaggtatcctgtgctgtgacgtgtcctctgacaaccagtatctggtcatgggctctagcagcagtgccaccatctaccagctcttgtattaa

SEQ ID NO: 786516 - DNA, 120 bp, Artificial Sequence
  ENSG00000260802_0 (sequence is synthesized)
ctacctttcccgcatactctaaactgttgcctgcgaaagaggaactggggacttagactaattcaggctgctttcattcaaatgttccagagggcacacacacatccaaacagacttctc

SEQ ID NO: 786517 - DNA, 120 bp, Artificial Sequence
  ENSG00000260802_1 (sequence is synthesized)
tttgcttttcagagcttataaggagcaggcatctgaagctgcactctgaagctctattccagagatgttcctgaacaagttacctgttggtgaaagcttcaaaagggatacttaagtgac

SEQ ID NO: 786518 - DNA, 120 bp, Artificial Sequence
  ENSG00000260802_2 (sequence is synthesized)
caatcctattcatactgtgggccaggagaggaaaatcaatatctgttggagaatctgaagagccaaatctcctgagcctaggcctactgctgtcagcatctctgagacctctctcacctg

SEQ ID NO: 786519 - DNA, 120 bp, Artificial Sequence
  ENSG00000260802_3 (sequence is synthesized)
agaattaccaggtctgacaacactttccctccagcctacagtgagggatgtcaacaaagctacagaaaactcacattctgtagacttacaagctgtgcagctgggcaggaaccttacaat

SEQ ID NO: 786520 - DNA, 120 bp, Artificial Sequence
  ENSG00000260802_4 (sequence is synthesized)
ctccatccttagggaaggttcagaaatacagataaacggggtgaaaactcagataagctgagcctgatatatacaaaagccttcagatagtctcctcgcagaagagcccaattaagtcca

SEQ ID NO: 786521 - DNA, 120 bp, Artificial Sequence
  ENSG00000260802_5 (sequence is synthesized)
cataattagtccacacatctagattaggtataggcaaaacgagccttttctccatctacgaaaacagagcaaaacactgatataatactctaaaagattcttgttctaataacagtatta

SEQ ID NO: 786522 - DNA, 120 bp, Artificial Sequence
  ENSG00000260802_6 (sequence is synthesized)
taaagcagtttcacccatatttattttaatcagtataaaagtaggagtgtggaaaataaaacattacttgtatttttaaaaattgattaagaagctctgataaaacctattggaggggcg

SEQ ID NO: 786523 - DNA, 120 bp, Artificial Sequence
  ENSG00000260802_7 (sequence is synthesized)
attgctgtgctgaaggatagagagggtgttgcaattgtcaaatagcatcaccattttctgcttgtgtgctattgccttagctctgagagtgattggtttttaccagattgttagaacacg

SEQ ID NO: 786524 - DNA, 120 bp, Artificial Sequence
  ENSG00000260802_8 (sequence is synthesized)
tccaatagatttagagacagtctaagtgactgtgaaatgcctcaagggcagtagaaatcaaatagaaacacatactaactcaagtcttgagtgatgatggaggcgcattttaaataccat

SEQ ID NO: 786525 - DNA, 120 bp, Artificial Sequence
  ENSG00000260802_9 (sequence is synthesized)
ggaaatctcactgggcgtgcccattttcccactctggcaacagaggttgatacctcttcagacaagtattccaacctgtacatgtatgtgggcttattcctgagcctcctggccattctc

SEQ ID NO: 786526 - DNA, 120 bp, Artificial Sequence
  ENSG00000260802_10 (sequence is synthesized)
ctcatcctgctcttcacaatgctccttcggctcaaacatgtcatctcgcccatcaactctgacagcacagaaagtgttcctcagttcacagatgtagagatgcagagtcgaatccccact

SEQ ID NO: 786527 - DNA, 120 bp, Artificial Sequence
  ENSG00000260802_11 (sequence is synthesized)
ccctaaagccaggatgaaggtgagctttagtggatctgggtaaacccttatatatggatgtccaggagagcttgctttcttgcatgaagcttcccatgtagggaatccacaagttgttca

SEQ ID NO: 786528 - DNA, 120 bp, Artificial Sequence
  ENSG00000260802_12 (sequence is synthesized)
tttaacagcaagctgttcatgttttctttgtgttattcttcatctttactctgcttgtgggctatctaaaacgtttaagactcactctgaaaggaatataggaaaagacagctggttggg

SEQ ID NO: 786529 - DNA, 120 bp, Artificial Sequence
  ENSG00000260802_13 (sequence is synthesized)
agggctggtttccatagtaaccaaacagtgcctgggccttgcacaaacctcagaccacagaaattcatgcgcagtggttgtaagaagcacagggtccctggaagctccaaaaacaaacaa

SEQ ID NO: 786530 - DNA, 120 bp, Artificial Sequence
  ENSG00000260802_14 (sequence is synthesized)
agaagatttgcttttgaaagggctgatccttcaaagaggatatcccaagaaaaggacaagttctaatttagtgttttgatcctagagaatcacctctatacaaagttaaattatgtcaga

SEQ ID NO: 786531 - DNA, 120 bp, Artificial Sequence
  ENSG00000260802_15 (sequence is synthesized)
agttaatggaagagaagccctttccctaaacagcagtgatttgatcatcttaggcaatccggtttgtttcaaatgaaagaagagatttaaagaaactgtttcagtttagagagcaagttt

SEQ ID NO: 786532 - DNA, 120 bp, Artificial Sequence
  ENSG00000260802_16 (sequence is synthesized)
tcagaaagaagtttctagtaaacaaactcatctagagagagaaaaatgtgcatattatatccatattaattctattcatgcagcttctttgtctttttctctctccctctcacactctag

SEQ ID NO: 786533 - DNA, 120 bp, Artificial Sequence
  ENSG00000260802_17 (sequence is synthesized)
gatagagttgcacacaaatatgagctttgtttaaaaggtgcctttgcaaacaagactcaactgtactttagagcagaaataaaatgatgttggtattctgttgttgaatatggctttgga

SEQ ID NO: 786534 - DNA, 120 bp, Artificial Sequence
  ENSG00000260802_18 (sequence is synthesized)
caaaacattcaagccttctgagtcccagggtttttgtgctgaaaaatgattagagagctatttagtcatcactatactctttagatctgagcataaaaaaaagagagagagacaaaggag

SEQ ID NO: 786535 - DNA, 120 bp, Artificial Sequence
  ENSG00000260802_19 (sequence is synthesized)
ttgagatcaatgtcctcaaatgtcacatttgtatttcccagaaaatgttcctcccttcctgatccctgccaaaagatgaagtgtttcacttattacctataagagaattatattttgaaa

SEQ ID NO: 786536 - DNA, 120 bp, Artificial Sequence
  ENSG00000260802_20 (sequence is synthesized)
aattccattctcataagtagccctagtatgccagtagtgtggagagaatttaatttttaaaactaacttttcaaagggaaaccaaaggagatgagtaccatttacaaatcagaatttaaa

SEQ ID NO: 786537 - DNA, 120 bp, Artificial Sequence
  ENSG00000260802_21 (sequence is synthesized)
aaactggtcatattcttgccaccaaaggacgagtacacctgtgttaaattttacttgctaaaacaaaaaataagttatcttttgtacctaaaggggggtcatcaaatttcacagagtact

SEQ ID NO: 786538 - DNA, 120 bp, Artificial Sequence
  ENSG00000260802_22 (sequence is synthesized)
ctctcaggaactgtaatgatggtaagagagaaatcaaatagatgttagattaatgccacctccaccagaaatgtagctctttgtagtctgtaaccaatttagattggccctttttctctg

SEQ ID NO: 786539 - DNA, 120 bp, Artificial Sequence
  ENSG00000260802_23 (sequence is synthesized)
atctaaatctagattggtagtgaaattcccaagtgctttccacttttatacacagtcatttgtcaatgctcctctctccaaggggctgcaagtgtgaaatccctacatgcagagctaaac

SEQ ID NO: 786540 - DNA, 120 bp, Artificial Sequence
  ENSG00000260802_24 (sequence is synthesized)
ttagcagtaagactgactctgccacacctgttacaactgtgcactgtcagagatgggagctgcactctgcatcattcaaaacaaattagcagataggctaagacttggatagggcatata

SEQ ID NO: 786541 - DNA, 120 bp, Artificial Sequence
  ENSG00000260802_25 (sequence is synthesized)
tttttcaaaactcaaagtgactcacattattacaccttgatggtctaagttgtgtgtttattcaacacccagattcagtggaccctttaaaatttgagctttggcagccaaacatggact

SEQ ID NO: 786542 - DNA, 120 bp, Artificial Sequence
  ENSG00000260802_26 (sequence is synthesized)
tcctcaagactggcaacaccccccctccagaacttcttaagaacacacatcttccctcattccaggctctcacttttgtgcccacagtatttgaatgcactttacatttgagaagtcagt

SEQ ID NO: 786543 - DNA, 120 bp, Artificial Sequence
  ENSG00000260802_27 (sequence is synthesized)
ggctggctaaatgaaggaactgattatactttcaacagcagtgaatagcaagatacaaaataccttgttgctgaatctaatagagatacagactgaaaatctattctctgcccatctgac

SEQ ID NO: 786544 - DNA, 120 bp, Artificial Sequence
  ENSG00000260802_28 (sequence is synthesized)
cttcccaacccaaatttcaggagaataaaactgctttttaagcactgacttggatgaagatttctaatttatgattaggttactcacatggaaaactatcaacctctttcatcacaacta

SEQ ID NO: 786545 - DNA, 120 bp, Artificial Sequence
  ENSG00000260802_29 (sequence is synthesized)
ccccatggggatccagctcgtcactgagcattaaccaaagcacacagcacagattacaccaaaatagcagcataacaccccccacccaatttccagtgacaatataaatggaaatgcttt

SEQ ID NO: 786546 - DNA, 120 bp, Artificial Sequence
  ENSG00000260802_30 (sequence is synthesized)
taagcagatgtgtcattataatgactcacatggtatttaatctttaggaaaataaactgaatgtttttattgtagcaaacttactgtaaagaaaagaatttttacattatatttattccc

SEQ ID NO: 786547 - DNA, 120 bp, Artificial Sequence
  ENSG00000260802_31 (sequence is synthesized)
caatgtattaacatatattactgctcaaaaaggcagccagagtaaccagacggcacaatttgaatttatccttctattcgaaatgctgacttggattgccttcccccacccccactccct

SEQ ID NO: 786548 - DNA, 120 bp, Artificial Sequence
  ENSG00000260802_32 (sequence is synthesized)
ccaaaattgcacattagccagtatataaacaggtaggttatttatatatatgtgtactctgttttaagatgaaaagaacaattcttcactttttattagctgaaccatatgaaattgcca

SEQ ID NO: 786549 - DNA, 120 bp, Artificial Sequence
  ENSG00000260802_33 (sequence is synthesized)
tttgataggccaaaaaatgctcaaatatcaccaacttcataaaattcaacctaatacaaagactcaccacattaattctgtaaatagtaaattctcctaatatgtttaaaaagaatccaa

SEQ ID NO: 786550 - DNA, 120 bp, Artificial Sequence
  ENSG00000260802_34 (sequence is synthesized)
gaatccaattttttaaaatatattttgcatatatttcagaatcatgggttgtacaaaatgaagtatattgtaaaaggcttatgtattatgtattatgtattaagtaggaaatattaaggt

SEQ ID NO: 786551 - DNA, 120 bp, Artificial Sequence
  ENSG00000260802_35 (sequence is synthesized)
taaagatgaattcatccagcctaacctttccatccatgccaaatctgaagctttggactcataactgagtttgactgctgcagatcccaccatacttactaagtaggtataagggatcca

SEQ ID NO: 786552 - DNA, 120 bp, Artificial Sequence
  ENSG00000260802_36 (sequence is synthesized)
ttttaatacatttcaatggttatatttagtaatacattttattcacttgcatttgtacaaaagaacttttttttaacaaaatgaagaattgtgtggaataaaaaattgagtttcttttgt

SEQ ID NO: 786553 - DNA, 120 bp, Artificial Sequence
  ENSG00000260802_37 (sequence is synthesized)
ttgaaattattaatgtttgaaatagattcatattgtataaaaatggaaatatatttgcattaatatttagcatgtcatttttgatccctggacaataaataatgactggtttgatgataa

SEQ ID NO: 786554 - DNA, 120 bp, Artificial Sequence
  ENSG00000260802_38 (sequence is synthesized)
tctttgcttttcagagcttataaggagcaggcatctgaagctgcactctgaagctgtaagtggtaactgacattttaagtaacattttaagtaatagaaggtgtttttctgtttttctgc

SEQ ID NO: 786555 - DNA, 80 bp, Artificial Sequence
  ENSG00000260903_0 (sequence is synthesized)
gctccccgcctccctctccgccaacatggccgcgaagtcggatggagcggcggcctcggccagcccggacccggaggggg

SEQ ID NO: 786556 - DNA, 120 bp, Artificial Sequence
  ENSG00000260903_1 (sequence is synthesized)
ggccgggcccccgggggtcgtcggggcgggcggcccggggccgcgctacgagctgcgggactgctgctgggtgctgtgcgcgctgctcgtgttcttctccgacggtgccacggacctgtg

SEQ ID NO: 786557 - DNA, 120 bp, Artificial Sequence
  ENSG00000260903_2 (sequence is synthesized)
cacggacctgtggctggcggcctcctactacctgcagaatcaacacacctacttcagcctcaccttgctgttcgtgctcctgccctcgctggtcgtgcagttactgagcttccgctggtt

SEQ ID NO: 786558 - DNA, 120 bp, Artificial Sequence
  ENSG00000260903_3 (sequence is synthesized)
cgtctacgactactcggagcccgcagggtccccgggacccgccgtcagcaccaaggacagcgtagccggcggagccgccatcagcaccaaggacagcgccggcgccttccggaccaaaga

SEQ ID NO: 786559 - DNA, 120 bp, Artificial Sequence
  ENSG00000260903_4 (sequence is synthesized)
aggcagccccgagccgggtccccagcctgcgccctcctcggccagcgcctaccgccgccgctgctgccgcctctgcatctggctgctgcagaccctcgtccacctcctgcagctcggcca

SEQ ID NO: 786560 - DNA, 120 bp, Artificial Sequence
  ENSG00000260903_5 (sequence is synthesized)
ggtctggaggtacctgcgcgccctgtacctggggctgcagagccgctggcgcggggagcggctgcggcgccacttctactggcagatgctgttcgagagcgccgacgtgagcatgctgcg

SEQ ID NO: 786561 - DNA, 120 bp, Artificial Sequence
  ENSG00000260903_6 (sequence is synthesized)
cttgctggagaccttcctgcgcagcgcgccgcagctagtgctgcagctcagcctgctggtgcaccgcggtggcgcgcccgacctgctgccggccctctccacctccgcctccctcgtgtc

SEQ ID NO: 786562 - DNA, 120 bp, Artificial Sequence
  ENSG00000260903_7 (sequence is synthesized)
tctggcctggacgctggcctcctaccagaaggtgctgcgggactcgcgggacgacaagcggccgctgtcctacaagggcgccgtggcacaggtgctgtggcacctgttcagcattgccgc

SEQ ID NO: 786563 - DNA, 120 bp, Artificial Sequence
  ENSG00000260903_8 (sequence is synthesized)
ccgcggcctggccttcgcgctcttcgccagcgtctacaagctctattttggcatcttcatcgtggcccactggtgcgtcatgaccttctgggtcatccaaggggagacggacttctgcat

SEQ ID NO: 786564 - DNA, 120 bp, Artificial Sequence
  ENSG00000260903_9 (sequence is synthesized)
gtccaagtgggaggagatcatctacaacatggtcgtgggcatcatctacatcttctgctggttcaacgtcaaggagggccgcagccgccgccgcatgaccctctaccactgcatcgtcct

SEQ ID NO: 786565 - DNA, 120 bp, Artificial Sequence
  ENSG00000260903_10 (sequence is synthesized)
gctggagaacgccgcgctcaccggcttctggtactccagccgcaacttctcaaccgacttctactcgctcatcatggtctgcgtagtggcctccagctttgcgctgggcatattcttcat

SEQ ID NO: 786566 - DNA, 120 bp, Artificial Sequence
  ENSG00000260903_11 (sequence is synthesized)
gtgtgtctactactgtctcctgcaccccaatgggcccatgctgggtccccaggcacctggttgcatcttccgtaaggcctcagagccctgtggcccacccgctgacgccatcacgagtcc

SEQ ID NO: 786567 - DNA, 120 bp, Artificial Sequence
  ENSG00000260903_12 (sequence is synthesized)
ccccaggtccctgccaaggactacaggtgctgagcgggatggggcctcggcgggagagcgtgcagggacccccaccccacctgtcttccaggtgcggcctggcttgcctcccacaccagt

SEQ ID NO: 786568 - DNA, 120 bp, Artificial Sequence
  ENSG00000260903_13 (sequence is synthesized)
ggcccgcaccttgcggacagaggggcctgtcatccggattgacttgcctcgcaagaagtacccggcctgggatgctcattttattgaccgccggctccggaagaccatcctggcactgga

SEQ ID NO: 786569 - DNA, 120 bp, Artificial Sequence
  ENSG00000260903_14 (sequence is synthesized)
gtactcctcacctgccacgccccggttgcagtaccggagtgtggggacttcccaggagctgctggagtatgagaccacagtgtaggctacagtgtcccagcacaaaagggacaggcttgg

SEQ ID NO: 786570 - DNA, 120 bp, Artificial Sequence
  ENSG00000260903_15 (sequence is synthesized)
ctgatcccacatccgccgcagtgttgtgccccgaatttcagggccaccaggctaagggggagtggatctgttggtccaagggtagagtggccccactcttgggttctttcaggggagggg

SEQ ID NO: 786571 - DNA, 120 bp, Artificial Sequence
  ENSG00000260903_16 (sequence is synthesized)
gcagccttgcggaggccccagccctgggccccgttttcagccttgtggcccattccctaaattcccctgacccagggcctggggaatcatctggtgctacacttttcgagctgccctgct

SEQ ID NO: 786572 - DNA, 120 bp, Artificial Sequence
  ENSG00000260903_17 (sequence is synthesized)
ttcatggggcctccacacctctcccctgcctggcgttgcccatgtgttgcccctgctggacttgccagagaaagggcactgtctggggtccatgacctagaccctgtgctcctcaggggt

SEQ ID NO: 786573 - DNA, 120 bp, Artificial Sequence
  ENSG00000260903_18 (sequence is synthesized)
tgtggagagtgggctgcctctatggtgggaaaagatctctgagaaggatggaggtggccgtggaagggatggggtgaggttggagcattgtgtggacagggatggcgtggctcctgtagc

SEQ ID NO: 786574 - DNA, 120 bp, Artificial Sequence
  ENSG00000260903_19 (sequence is synthesized)
atctgaggcctggagccagggcaagagggagctgaagaagggagttggggtggggcagggtgttggggtggggggctggcagtgctggagatggataggagaaagaactggggggggggt

SEQ ID NO: 786575 - DNA, 120 bp, Artificial Sequence
  ENSG00000260903_20 (sequence is synthesized)
ctaggctggcagaagcatggaggggtggaagacttgggggaggggaacctgcaatccagagcatagcgaacaagaatgaactccttaggagacgtctcttgttgtgttgtgggctctgtg

SEQ ID NO: 786576 - DNA, 120 bp, Artificial Sequence
  ENSG00000260903_21 (sequence is synthesized)
aaggatgaagttccacacacctcaggtgaaatgtttgaaggagccattttttgttctagatgtgcacctggaacgtggcttctagatacaggtcttcaacacagcagataagatgtctgg

SEQ ID NO: 786577 - DNA, 120 bp, Artificial Sequence
  ENSG00000260903_22 (sequence is synthesized)
aaagatctctgggctcaagtgcaggtgaggttttagcacagttatcagaggaactgatccagaagcaggcttagttctagattgagttctagagtgctaggctgataaaatgtcccaggg

SEQ ID NO: 786578 - DNA, 120 bp, Artificial Sequence
  ENSG00000260903_23 (sequence is synthesized)
agccactctgatctgtgtattctgttgtgaggaggaggacactggaggcctgctgctctgctgtgggggattctagcacctgtcacagtggtgggggagaagaggttctagagcccagcg

SEQ ID NO: 786579 - DNA, 120 bp, Artificial Sequence
  ENSG00000260903_24 (sequence is synthesized)
tgaatggaattttctaggaatgggtgctctcattctagacttctggggctcatgggagctctaggcccctgttaccttggtccatagccatctttctaaaaggaaattgtcctcagaacc

SEQ ID NO: 786580 - DNA, 120 bp, Artificial Sequence
  ENSG00000260903_25 (sequence is synthesized)
cctgagacatttcagctgccaactggttcccagctggaaaaaaaaatagctctggggacgtgacatgaatcctggctctcagccactctgcaaatggggctccctggagcggcatctggg

SEQ ID NO: 786581 - DNA, 120 bp, Artificial Sequence
  ENSG00000260903_26 (sequence is synthesized)
aaactgacttgttttgccttagatctgatgactccccaggacctgtggtctattcccatggcctgaacatcctggagtgcccaggggactcacccagggcccctcctcccacctaggaca

SEQ ID NO: 786582 - DNA, 120 bp, Artificial Sequence
  ENSG00000260903_27 (sequence is synthesized)
gccagtgctggattgagggggcgtatgggagaggggaagtaggcagttccatggggtgaggagacagagcctctagcagagctgggaacccaacccaccccccacccccccacacacaca

SEQ ID NO: 786583 - DNA, 120 bp, Artificial Sequence
  ENSG00000260903_28 (sequence is synthesized)
ctcccacagcaacttaggtgtgattggtgggagaggacagcagcggatgttaaggacagatgccaacctgatcctggagtgaggtgggccatgagaatcctagactatgcaaattagagg

SEQ ID NO: 786584 - DNA, 120 bp, Artificial Sequence
  ENSG00000260903_29 (sequence is synthesized)
gatgcttagccctccctggttcagcctctcttgggttacagatgggaaactgaggcccagagtggcagccactctctcaaggtcccagactctgggctgcccatcaaaaggtgatgggta

SEQ ID NO: 786585 - DNA, 120 bp, Artificial Sequence
  ENSG00000260903_30 (sequence is synthesized)
atgatgaattgctggggatgcagggtaaccccaaaggcagggagggccagactgcccacatacacacaagcacaagcacaaccatgatacgggtcaccctccccaccagcacacaggccg

SEQ ID NO: 786586 - DNA, 120 bp, Artificial Sequence
  ENSG00000260903_31 (sequence is synthesized)
agatggtgtacgcatcatccctcctgccaacacagcaagagtgcttttccttctttctgctgctaagcaccctcaggaacgaggcctcgagggtgacgggaggtgggagaagcccaaggc

SEQ ID NO: 786587 - DNA, 120 bp, Artificial Sequence
  ENSG00000260903_32 (sequence is synthesized)
ctgttgggttcatccatcctccaaatccatctttggaggctgaattcacacacaaagccgttgtgagatgggagctctgaagatgcggacccagacccagaaacagactgtttctccagg

SEQ ID NO: 786588 - DNA, 120 bp, Artificial Sequence
  ENSG00000260903_33 (sequence is synthesized)
gccaactttgtgccaggaattttcaccccatgtcgtttcacttacactctcctctggtcacgacgtccctgcaagagaggtattatcaacccatcttacagacgaggaaactgaggccca

SEQ ID NO: 786589 - DNA, 120 bp, Artificial Sequence
  ENSG00000260903_34 (sequence is synthesized)
gagatgtagcatgagggtcacccttggcaagttattctcctccccagtatcccagaatggcccatctggctgctgccttctagaggaaaagtcctagctggggtcctttacactccagga

SEQ ID NO: 786590 - DNA, 120 bp, Artificial Sequence
  ENSG00000260903_35 (sequence is synthesized)
gactcccaaggggcagggatgtgctggcagggcttggcatggtctgaggctcgcagggaagccatggctacatttttggattttactccacccccactccccacctcttctcaaccccac

SEQ ID NO: 786591 - DNA, 120 bp, Artificial Sequence
  ENSG00000260903_36 (sequence is synthesized)
acacccttccctcagggcttctgcctgcagggacatctgggcacaggaatggccacagtcaaagggcccagggagagggctgcaggcacctcctcctgcttctcaccctcagaagagtct

SEQ ID NO: 786592 - DNA, 120 bp, Artificial Sequence
  ENSG00000260903_37 (sequence is synthesized)
cagcccttaaaggactctccacccaggagctcgggaccaggcctgaggccccctgctccactggcttgtcccttcatttcactgggatagaggagtcagatgagggaggggtccatcccc

SEQ ID NO: 786593 - DNA, 120 bp, Artificial Sequence
  ENSG00000260903_38 (sequence is synthesized)
ttggagctgttttgtttttctttctgtgacacaatctacctcagccagtctctcccctagcagaactgacccccctggtcctctgcctcctgtcccctgacccccaccccagtctggatg

SEQ ID NO: 786594 - DNA, 120 bp, Artificial Sequence
  ENSG00000260903_39 (sequence is synthesized)
ttcagtccttccctgtccttcccaccctgccagggtccttgcagcccagagggtccctgagggttccttaagccacctgccctccacatccattagacaggagaaagtgagacccagaga

SEQ ID NO: 786595 - DNA, 120 bp, Artificial Sequence
  ENSG00000260903_40 (sequence is synthesized)
ggaccaaggactcaccaaaggccacacaggaagtcagtggcagttaggatttccctggggatgagaggtagttgggtgtgtcttaattttgccaggaacagaagagaacaggatgctttg

SEQ ID NO: 786596 - DNA, 120 bp, Artificial Sequence
  ENSG00000260903_41 (sequence is synthesized)
ggtaccaaatatggcaggccctgccctcagttacctctaaccccaggagaccagtgtccccatctccagggcagacttctgtctacctgttttcttagaactgacccccacgctgttgac

SEQ ID NO: 786597 - DNA, 120 bp, Artificial Sequence
  ENSG00000260903_42 (sequence is synthesized)
tgtgttccccaaacctctgcaggcaccacacacacccacatcacggcgcctcctggcactgatgtgccatgtgccttgtaactgtcaccccagctgaacagcacagacctccccactccc

SEQ ID NO: 786598 - DNA, 120 bp, Artificial Sequence
  ENSG00000260903_43 (sequence is synthesized)
ccacacagggctccccaatgagggagccttgcttgatcccctcctgtcatctgcctcattcttgtgtctcccccaaatctgccttacccccagccagctccctgctacacctgtgtccca

SEQ ID NO: 786599 - DNA, 120 bp, Artificial Sequence
  ENSG00000260903_44 (sequence is synthesized)
cagaggcatgtcacccatgagagtcgggaaagacagagggcagggaaggtgaggcctggggaaagtccaggcctctggataagggctgagggagctgggaatatccagggaaggtctcgc

SEQ ID NO: 786600 - DNA, 120 bp, Artificial Sequence
  ENSG00000260903_45 (sequence is synthesized)
ttgcagtcaacaccctcctaagtactcgagttctgcaggttcttcccttggaattaatctggacctggagtccacagaagcctcagacaatagggagaaggttttctgggacgaaggctg

SEQ ID NO: 786601 - DNA, 120 bp, Artificial Sequence
  ENSG00000260903_46 (sequence is synthesized)
catgggatgcaaactcaaatgcctcgagataatgaaactaagagtaatggagacaatagggagtgttggggactctggcagacaggagagtgagtgtgtgccctgcctgtaggtactaaa

SEQ ID NO: 786602 - DNA, 120 bp, Artificial Sequence
  ENSG00000260903_47 (sequence is synthesized)
attcaaatgtttgggaaactgctggccactcatatttggcccacgtgccaccagtttgagacttacggttcaaaatgttgagaaggttctggagtgtcctgccaagtggaaacccctcag

SEQ ID NO: 786603 - DNA, 120 bp, Artificial Sequence
  ENSG00000260903_48 (sequence is synthesized)
cggaagtcagggacagaggctgtggctccctctgagactttgctagtccaaccctaaatccccatcacctggctatctgagaactgagcccactgccctctcagctgaaaagggaaatct

SEQ ID NO: 786604 - DNA, 120 bp, Artificial Sequence
  ENSG00000260903_49 (sequence is synthesized)
ggggggtccacagggtccctggtttgggaatcatctgataagggctacaggcccctccagtgcctcatggggttagaggctgctggagtcttctccagcttgggggcccctggttaggag

SEQ ID NO: 786605 - DNA, 120 bp, Artificial Sequence
  ENSG00000260903_50 (sequence is synthesized)
gaatctacattgggttgcaggggagtccaggtgcaggatgtggactgaaagccaggacccaagagtcccattctgtgctggcccctgccacctttggcacctgtctccctcccagttcaa

SEQ ID NO: 786606 - DNA, 120 bp, Artificial Sequence
  ENSG00000260903_51 (sequence is synthesized)
gctgtggtggggcctgcagtagaggttggtagggggagctgtagtttctatattaaagtgctttgcagtgtctcaatggaagggaacaagtgggtgtcaagccgcatgggcagtagtagg

SEQ ID NO: 786607 - DNA, 120 bp, Artificial Sequence
  ENSG00000260903_52 (sequence is synthesized)
gttggggtttgagcccccttcccaaccatagaggcttctgagacctggggctggggaggaaaggagcttcaatgtgccattctggttggggagaggataggacatttctgggtccttggc

SEQ ID NO: 786608 - DNA, 120 bp, Artificial Sequence
  ENSG00000260903_53 (sequence is synthesized)
tgctgccggtagaggtatggggaggaaaaactctagagtgggagatgtggaagtggaaaaggaaggccctgtccaggcctggcctggtttctggagacagaaaactccccaggggacaga

SEQ ID NO: 786609 - DNA, 120 bp, Artificial Sequence
  ENSG00000260903_54 (sequence is synthesized)
gaggttacccccttgtgcttagcttctgccacccttcccttctctggaggagaaggctgccctctcctcagcaaccctggcctttattctatgcataaccactgcaagggcacccctggc

SEQ ID NO: 786610 - DNA, 120 bp, Artificial Sequence
  ENSG00000260903_55 (sequence is synthesized)
caggctgaatgggtgggggtcccagggcacctgcaataatctcagaatggagggtatcctgggacaaagagggggtacagaaggtgccaggggggaaaaggtgattcctccatctctctc

SEQ ID NO: 786611 - DNA, 120 bp, Artificial Sequence
  ENSG00000260903_56 (sequence is synthesized)
tcacccaaatccccccagatcgaatctgacccttttccctggtctccattgtgctaaaccaccgaacttggaggagcctcatataaacatagcccccagccccactggctttccgaaccc

SEQ ID NO: 786612 - DNA, 120 bp, Artificial Sequence
  ENSG00000260903_57 (sequence is synthesized)
atcatgaaatagctggaaggtatctgaaccgttcccatagctccctcattattttcttccctgaggatcctgtggtttaggagatttttctcccaaaccagcctcatttcttgaagaaga

SEQ ID NO: 786613 - DNA, 120 bp, Artificial Sequence
  ENSG00000260903_58 (sequence is synthesized)
attcattttcccatattaaattaactcaagctgagcttctgattgcagataaatgtttctaaggcctcaagtcaacttctagggcttgaaggtgggggaatatatgtattttattgagtt

SEQ ID NO: 786614 - DNA, 120 bp, Artificial Sequence
  ENSG00000260903_59 (sequence is synthesized)
gcttaatacaaaattctcaaaagcacttgtgggcactcattcctgccttcacaggccctcagggtctgggaccccacgttgggaatcaatggtttagacatccagcatcctattttactg

SEQ ID NO: 786615 - DNA, 120 bp, Artificial Sequence
  ENSG00000260903_60 (sequence is synthesized)
aaggggcaagcccagagatgggagatggccagcccaaggtcacacagcaagttggtggcagggtgagaccagaacccggttcttttgagggtcccaccagaatatccccagccctgatcc

SEQ ID NO: 786616 - DNA, 120 bp, Artificial Sequence
  ENSG00000260903_61 (sequence is synthesized)
tcccctccatgcccctggaactctaggaatcactagccatgcctgaggggctaatctccctctgtcagcacaattccgagtgattcttcccctccctgtcgtctcttcctccctaacggg

SEQ ID NO: 786617 - DNA, 120 bp, Artificial Sequence
  ENSG00000260903_62 (sequence is synthesized)
ccctcacccctgtcctcttctgtttccttttcctggtcccacctcctggtatttactacatctgtgccatccctcatccccctgacccccattcaccctccgagcttcccccaggagggg

SEQ ID NO: 786618 - DNA, 120 bp, Artificial Sequence
  ENSG00000260903_63 (sequence is synthesized)
gagggggagggggccccgagctggggcctctttactgagactcttttgtacaccacaaactttttgtatatttttaattttgctgcgacatgagatattaaaagtcatttcagtacgtgc

SEQ ID NO: 786619 - DNA, 120 bp, Artificial Sequence
  ENSG00000260916_0 (sequence is synthesized)
ggatgttgtggggatctgcggccgcctggcccagcttcccgcagccgcccggcggcggcctgcgctccacttcgggagtggtagttcttctcttcaccgctgccgggcaggaggcgcagg

SEQ ID NO: 786620 - DNA, 120 bp, Artificial Sequence
  ENSG00000260916_1 (sequence is synthesized)
cgggactacgcgtcacggcatgcactgcggcgcccagccggtcaccgcctgccggctgcagacgcctgcgagcaggttgtttttataagaggcgtcattggcgcccgagctgtgaccgcc

SEQ ID NO: 786621 - DNA, 120 bp, Artificial Sequence
  ENSG00000260916_2 (sequence is synthesized)
gccactggggcagccagcacaatcgggcggaggtggcgctgccccttcagacctgaaagatgtctgaaaattccagtgacagtgattcatcttgtggttggactgtcatcagtcatgagg

SEQ ID NO: 786622 - DNA, 120 bp, Artificial Sequence
  ENSG00000260916_3 (sequence is synthesized)
ggtcagatatagaaatgttgaattctgtgacccccactgacagctgtgagcccgccccagaatgttcatctttagagcaagaggagcttcaagcattgcagatagagcaaggagaaagca

SEQ ID NO: 786623 - DNA, 120 bp, Artificial Sequence
  ENSG00000260916_4 (sequence is synthesized)
gccaaaatggcacagtgcttatggaagaaactgcttatccagctttggaggaaaccagctcaacaattgaggcagaggaacaaaagatacccgaagacagtatctatattggaactgcca

SEQ ID NO: 786624 - DNA, 120 bp, Artificial Sequence
  ENSG00000260916_5 (sequence is synthesized)
gtgatgattctgatattgttacccttgagccacctaagttagaagaaattggaaatcaagaagttgtcattgttgaagaagcacagagttcagaagactttaacatgggctcttcctcta

SEQ ID NO: 786625 - DNA, 120 bp, Artificial Sequence
  ENSG00000260916_6 (sequence is synthesized)
gcagccagtatactttctgtcagccagaaactgtattttcatctcagcctagtgacgatgaatcaagtagtgatgaaaccagtaatcagcccagtcctgcctttagacgacgccgtgcta

SEQ ID NO: 786626 - DNA, 120 bp, Artificial Sequence
  ENSG00000260916_7 (sequence is synthesized)
ggaagaagaccgtttctgcttcagaatctgaagaccggctagttgctgaacaagaaactgaaccttctaaggagttgagtaaacgtcagttcagtagtggtctcaataagtgtgttatac

SEQ ID NO: 786627 - DNA, 120 bp, Artificial Sequence
  ENSG00000260916_8 (sequence is synthesized)
ttgctttggtgattgcaatcagcatgggatttggccatttctatggcacaattcagattcagaagcgtcaacagttagtcagaaagatacatgaagatgaattgaatgatatgaaggatt

SEQ ID NO: 786628 - DNA, 120 bp, Artificial Sequence
  ENSG00000260916_9 (sequence is synthesized)
atctttcccagtgtcaacaggaacaagaatcttttatagattataagtcattgaaagaaaatcttgcaaggtgttggacacttactgaagcagagaagatgtcctttgaaactcagaaaa

SEQ ID NO: 786629 - DNA, 120 bp, Artificial Sequence
  ENSG00000260916_10 (sequence is synthesized)
cgaaccttgctacagaaaatcagtatttaagagtatccttggagaaggaagaaaaagccttatcctcattacaggaagagttaaacaaactaagagaacagattagaatattggaagata

SEQ ID NO: 786630 - DNA, 120 bp, Artificial Sequence
  ENSG00000260916_11 (sequence is synthesized)
aagggacaagtactgaattagttaaagaaaatcagaaacttaagcagcatttggaagaggaaaagcagaaaaaacacagctttcttagtcaaagggagactctgttgacagaagcaaaga

SEQ ID NO: 786631 - DNA, 120 bp, Artificial Sequence
  ENSG00000260916_12 (sequence is synthesized)
tgctaaagagagaactggagagagaacgactagtaactacggctttaaggggggaactccagcagttaagtggtagtcagttacatggcaagtcagattctcccaatgtatatactgaaa

SEQ ID NO: 786632 - DNA, 120 bp, Artificial Sequence
  ENSG00000260916_13 (sequence is synthesized)
aaaaggaaatagcaatcttacgggaaagactcactgagctggaacggaagctaaccttcgaacagcagcgttctgatttgtgggaaagattgtatgttgaggcaaaagatcaaaatggaa

SEQ ID NO: 786633 - DNA, 120 bp, Artificial Sequence
  ENSG00000260916_14 (sequence is synthesized)
aacaaggaacagatggaaaaaagaaagggggcagaggaagccacagggctaaaaataagtcaaaggaaacatttttgggttcagttaaggaaacatttgatgccatgaagaattctacca

SEQ ID NO: 786634 - DNA, 120 bp, Artificial Sequence
  ENSG00000260916_15 (sequence is synthesized)
aggagtttgtaaggcatcataaagagaaaattaagcaggctaaagaagctgtgaaggaaaatctgaaaaaattctcagattcagttaaatccactttcagacactttaaagataccacca

SEQ ID NO: 786635 - DNA, 120 bp, Artificial Sequence
  ENSG00000260916_16 (sequence is synthesized)
agaatatctttgatgaaaagggtaataaaagatttggtgctacaaaagaagcagctgaaaaaccaagaacagtttttagtgactatttacatccacagtataaggcacctacagaaaacc

SEQ ID NO: 786636 - DNA, 120 bp, Artificial Sequence
  ENSG00000260916_17 (sequence is synthesized)
atcataatagaggccctactatgcaaaatgatggaaggaaagaaaagccagttcactttaaagaattcagaaaaaatacaaattcaaagaaatgcagtcctgggcatgattgtagagaaa

SEQ ID NO: 786637 - DNA, 120 bp, Artificial Sequence
  ENSG00000260916_18 (sequence is synthesized)
attctcattctttcagaaaggcttgttctggtgtatttgattgtgctcaacaagagtccatgagcctttttaacacagtggtgaatcctataaggatggatgaatttagacagataattc

SEQ ID NO: 786638 - DNA, 120 bp, Artificial Sequence
  ENSG00000260916_19 (sequence is synthesized)
aaaggtacatgttaaaagaactggatactttttgtcactggaacgaacttgatcagttcatcaataagtttttcctaaacggtgtctttatacatgatcagaagctcttcactgactttg

SEQ ID NO: 786639 - DNA, 120 bp, Artificial Sequence
  ENSG00000260916_20 (sequence is synthesized)
ttaatgatgttaaagattatcttagaaacatgaaggaatatgaagtagataatgatggagtatttgagaagttggatgaatatatatatagacacttctttggtcacactttttcccctc

SEQ ID NO: 786640 - DNA, 120 bp, Artificial Sequence
  ENSG00000260916_21 (sequence is synthesized)
catatggacccaggtcggtttacataaaaccgtgtcattacagtagtttgtaacatttgtagattggatagcatttttatgatttgatgagtttcttgtaaggttaccgtttctaagagt

SEQ ID NO: 786641 - DNA, 120 bp, Artificial Sequence
  ENSG00000260916_22 (sequence is synthesized)
tgtgctttatggccactgagagaattcagaataaattgaaagatggagtctaaaaattattagctgttacaaatggaacatttcattataacgtgatcactttgacttgagcaaatggtt

SEQ ID NO: 786642 - DNA, 120 bp, Artificial Sequence
  ENSG00000260916_23 (sequence is synthesized)
taatttttatcttaaaaatcagttaagaatatataaaatcctactttggccaagtttgtttcttttcattatagtttatatgaaaagatcaccttaagtgaaattattttcctttaatct

SEQ ID NO: 786643 - DNA, 120 bp, Artificial Sequence
  ENSG00000260916_24 (sequence is synthesized)
tttatgtatttattcacttttggaagctaggaatgagcaacacaaattttactctgaagtcagaagagctcatatataataattctaatgtcccacctattttcacttgtccattccatg

SEQ ID NO: 786644 - DNA, 120 bp, Artificial Sequence
  ENSG00000260916_25 (sequence is synthesized)
taccagcttagttatgatacttagtcacataattatctttgataaaggtagaggcacaaagaggcaaactaagcaagtcaaattctaatgtgtgtacttcataataattttttatccatt

SEQ ID NO: 786645 - DNA, 120 bp, Artificial Sequence
  ENSG00000260916_26 (sequence is synthesized)
ttcatctttatattctgtaacatgaaacttacctaatcttcaaatgttagcttcattttttacctttgaaatacttaatctttctgaataaatataatgtgtctataaaataatgagact

SEQ ID NO: 786646 - DNA, 120 bp, Artificial Sequence
  ENSG00000260916_27 (sequence is synthesized)
gattctggtgtctttagtcattaagctggtatctagtcctataatgaacaaaggtgaagctgccttgaggagacaagtgaaaaatttttgcttcaaaggagctcacaagctaagtaaata

SEQ ID NO: 786647 - DNA, 120 bp, Artificial Sequence
  ENSG00000260916_28 (sequence is synthesized)
tagcttttggaagagaaatgaggatttgctatgcagacagggaagggaatttcacttaaaaggaaggtcatttggagatgtgaagatacactgctttaaggaagcagggtagagctggag

SEQ ID NO: 786648 - DNA, 120 bp, Artificial Sequence
  ENSG00000260916_29 (sequence is synthesized)
gataagagatgcagaccatgaagggccccattttatgctaaaggttttgtcctgtaggacatggagaacttctgaagaattttcaaggcgggtgggataagattatattgtattttagat

SEQ ID NO: 786649 - DNA, 120 bp, Artificial Sequence
  ENSG00000260916_30 (sequence is synthesized)
tacagtagtccccccttatcttcaggatatatgttccaagacccccagtggatgctggaaaccagggatagaacataattctatatatactatgcatgaatttctttttccttctttaca

SEQ ID NO: 786650 - DNA, 120 bp, Artificial Sequence
  ENSG00000260916_31 (sequence is synthesized)
atctcacacataggtttgttcttactatagatcttaccaatctcagcatacttttatttctcttgagaaccttcaccctttcacttaaaggaggcgctttatagcttctctttggcatat

SEQ ID NO: 786651 - DNA, 120 bp, Artificial Sequence
  ENSG00000260916_32 (sequence is synthesized)
ccaaatgccagcatcactgttgtattttggggtcattattaagttacttaatcatccttaatccttatcttagggatacttgaacacaaacactgtggtaggataacagtatatctgatt

SEQ ID NO: 786652 - DNA, 120 bp, Artificial Sequence
  ENSG00000260916_33 (sequence is synthesized)
aacagactgctactaggtgattaatgggtgggtagtgtaaatacacaagaaaaggatgattcacatcccatgtgggatggagcagaactgcattatttcattacattactcagaacaggc

SEQ ID NO: 786653 - DNA, 120 bp, Artificial Sequence
  ENSG00000260916_34 (sequence is synthesized)
ttatttcattacattactcagaacaggcatataattgaaaacttatgaattatttttttttaattatttgagatggaatcttgctttgtcagccaggctggagtgcagtgacacgatctc

SEQ ID NO: 786654 - DNA, 86 bp, Artificial Sequence
  ENSG00000260916_35 (sequence is synthesized)
accccgcctaaaactgatgaattatttctgaaattttctatttaacattttcagaccacagttgaccacaggtaacggaaacctca

SEQ ID NO: 786655 - DNA, 120 bp, Artificial Sequence
  ENSG00000260916_36 (sequence is synthesized)
attttcagaccacagttgaccacaggtaacggaaacctcaatcacagaaagtaaagccgtggatacggtgggactaatgtattggtagcagcctagaggattgatgggaaaggtatgaag

SEQ ID NO: 786656 - DNA, 120 bp, Artificial Sequence
  ENSG00000260916_37 (sequence is synthesized)
ctagaaggtggtcaatataatacagacatgagctgatgaacatctaaactgggactatactagtaggagaggaaaggaaaaaacatttggaaaatagtaacattgatatttcttgtgaag

SEQ ID NO: 786657 - DNA, 120 bp, Artificial Sequence
  ENSG00000260916_38 (sequence is synthesized)
gagaagtagaaagtaacagtgacttctagatttctgggttgggtcatcttgttggatagtagtaccactgagatagggaattcaaggtttggggcaagggtaattggagatgagaattgt

SEQ ID NO: 786658 - DNA, 120 bp, Artificial Sequence
  ENSG00000260916_39 (sequence is synthesized)
gtttggaggtaactactgacattcaagtggagagggttagttggcagttagttctatggtcatctcttttgccgagactgtatatttatcagactcctgggagaacaccaacatccatgg

SEQ ID NO: 786659 - DNA, 120 bp, Artificial Sequence
  ENSG00000260916_40 (sequence is synthesized)
ggttgtagggaaggctaaggacaggagtggggagtggtaccttgaaaatccaaaagccatctcaagtaaaaggaataaatgtgtcatgctttttaaaaagttgatgtgcggaaaatgttt

SEQ ID NO: 786660 - DNA, 120 bp, Artificial Sequence
  ENSG00000260916_41 (sequence is synthesized)
tcttggcttggaaactgggcggccaggggatgacagtatggacttccagtgaagtagtgacggaagcctgatcatagacattaaggaaagcggtgtaggtgttgtgagcttttgctgtaa

SEQ ID NO: 786661 - DNA, 120 bp, Artificial Sequence
  ENSG00000260916_42 (sequence is synthesized)
gaaaaagttgagacttttgttttgctttgtttgtgagagatgtgtatgtatttctgctgagtgataaagccagcggggagggactgatttttataggaaaggaggaaaaataatggaaac

SEQ ID NO: 786662 - DNA, 120 bp, Artificial Sequence
  ENSG00000260916_43 (sequence is synthesized)
acatctcattattttattgtcacatttcttttctttgttatcttttgagtgtttcccttttttgccagtagagttattgtctattttttctttctataggacaaaaaaactaatacagac

SEQ ID NO: 786663 - DNA, 120 bp, Artificial Sequence
  ENSG00000260916_44 (sequence is synthesized)
aaaaactaatacagactcctttatttttatatggatatactaggattgtaattcagatatttaatatcttttatcagtgttcagatcatagattaatggagaaaacatttaaaattgttt

SEQ ID NO: 786664 - DNA, 120 bp, Artificial Sequence
  ENSG00000260916_45 (sequence is synthesized)
gaactctaacatagatgaaaaatgtgtttactgctttcagtcgacctgataaaaagcaacgtatggtaaatattgaaaactccaggcatcgaaaacaagagcagaagcaccttcagccac

SEQ ID NO: 786665 - DNA, 120 bp, Artificial Sequence
  ENSG00000260916_46 (sequence is synthesized)
agccttataaaagggaaggtaaatggcataaatatggtcgcactaatggaagacaaatggcaaatcttgaaatagaattggggcaattaccttttgatcctcaatactgattcacaattg

SEQ ID NO: 786666 - DNA, 120 bp, Artificial Sequence
  ENSG00000260916_47 (sequence is synthesized)
agttaaattagacaactgtaagagaaaaatttatgctttgtataatgtttggtattgaaactaatgaaattaccaagatgacaatgtcttttcttttgtttctaagtatcagtttgataa

SEQ ID NO: 786667 - DNA, 120 bp, Artificial Sequence
  ENSG00000260916_48 (sequence is synthesized)
ctttatattattcctcagaagcattagttaaaagtctactaacctgcattttcctgtagtttagcttcgttgaattttttttgacactggaaatgttcaactgtagttttattaaggaag

SEQ ID NO: 786668 - DNA, 120 bp, Artificial Sequence
  ENSG00000260916_49 (sequence is synthesized)
ccaggcatgcaacagattttgtgcatgaaatgagacttcctttcagtgtaagagcttaaagcaagctcagtcatacatgacaaagtgtaattaacactgatgtttgtgttaaatttgcag

SEQ ID NO: 786669 - DNA, 120 bp, Artificial Sequence
  ENSG00000260916_50 (sequence is synthesized)
cagagcttgagaaaagtacattgttctggaatttcatcattaacattttataatcttacactcacttcttgtctttttgtgggttcaagagccctctgacttgtgaagaatttgctgccc

SEQ ID NO: 786670 - DNA, 120 bp, Artificial Sequence
  ENSG00000260916_51 (sequence is synthesized)
tcttaagagcttgctgacttgttttcttgtgaaattttttgcacatctgaatatcgtggaagaaacaataaaactacaccatgaggaaaactaaaggtctttatttaaaatctggcattg

SEQ ID NO: 786671 - DNA, 120 bp, Artificial Sequence
  ENSG00000260916_52 (sequence is synthesized)
tattaacatgtaattttatactatgtggtattttatacatttcctcagtagtgatatttggtaaagcagttcatacagcttttttctaagttccatgaatcttacccagtgtttaccgaa

SEQ ID NO: 786672 - DNA, 120 bp, Artificial Sequence
  ENSG00000260916_53 (sequence is synthesized)
gtatttaagcagcatctgaatatttccacccagcaatgttaatttatctaggaaagttcagaatttcatcttcatgttgaatttcccttttaacttccgttcatagacatatatgtgact

SEQ ID NO: 786673 - DNA, 120 bp, Artificial Sequence
  ENSG00000260916_54 (sequence is synthesized)
tccaattcgaccctctggcaagtgagtgtggaagaaaacagcagttcttttataattgcttgaaattaggaaagcgcttatttcctagaagcaaataaatgtttaagtaaataaaggcta

SEQ ID NO: 786674 - DNA, 120 bp, Artificial Sequence
  ENSG00000260916_55 (sequence is synthesized)
tcctcgggccgtgcgcgagtgcacagctccggaggcccgagccgaccctggggcgtccggtccggtggtcttgcagcctccaaaccccgagtgctataccgaactgcgcgccaagggtgg

SEQ ID NO: 786675 - DNA, 120 bp, Artificial Sequence
  ENSG00000260916_56 (sequence is synthesized)
gagagctgacggcctgggccacccttcttccttcactgggcaggctttgaggtgcttgtcggtctggactgatgaaaatccatatgacctgaaagatgtctgaaaattccagtgacagtg

SEQ ID NO: 786676 - DNA, 120 bp, Artificial Sequence
  ENSG00000260916_57 (sequence is synthesized)
tcagaaagatacatgaagatgaattgaatgatatgaaggattatctttcccagtgtcaacaggaacaagaatcttttatagattataagtcgacctgataaaaagcaacgtatggtaaat

SEQ ID NO: 786677 - DNA, 88 bp, Artificial Sequence
  ENSG00000260916_58 (sequence is synthesized)
gtgagttcaagcgatttgcctgccttggcctcccaaagtattggaattacagacgtgagccaacgggcccggcctgtggcttttcgtg

SEQ ID NO: 786678 - DNA, 120 bp, Artificial Sequence
  ENSG00000260916_59 (sequence is synthesized)
atgaaatccttcttaactgttattttttcttctttaagtattaatgtgttccttgttaatttgtaaaactagatttttgagattcaaagtgagaatcaaacttatattttggcagtctaa

SEQ ID NO: 786679 - DNA, 120 bp, Artificial Sequence
  ENSG00000260916_60 (sequence is synthesized)
ggccccacctccaacagtggggatcaaatttcaactaaggtttaggggacaaacgtccaaactacagcaagcccatcctacagcaaggcccgagaagatacagtttgttctcaattattt

SEQ ID NO: 786680 - DNA, 120 bp, Artificial Sequence
  ENSG00000260916_61 (sequence is synthesized)
gggaagggctcatctgacttctggaaacctatgttaaaatacagtgctttgaaccttgatcatgggctaattaggttggaaatgaaactagagaccagatacacccaaggaaacttttgg

SEQ ID NO: 786681 - DNA, 120 bp, Artificial Sequence
  ENSG00000260916_62 (sequence is synthesized)
tagttattttactttataagtcacaggaaatgcttgtgtactttcctgtgttccttaaatagttgcacttaaattacctctttgaaactgaatgaagagacagagagtattttttttctt

SEQ ID NO: 786682 - DNA, 120 bp, Artificial Sequence
  ENSG00000260916_63 (sequence is synthesized)
tccagaaataatacttgtttatacctgtaatagcaatgaaattttgtttcttttgagacagagttttgctctgtctcccagtctggagtatagtggcaggatctcagctcactgcaacct

SEQ ID NO: 786683 - DNA, 64 bp, Artificial Sequence
  ENSG00000260916_64 (sequence is synthesized)
caatgaaacttgaggctatgcgaatgaaggattgttctaagagtgtaaactataaggcgaggag

SEQ ID NO: 786684 - DNA, 120 bp, Artificial Sequence
  ENSG00000260916_65 (sequence is synthesized)
tgaaggattgttctaagagtgtaaactataaggcgaggaggattaaataaaaaaacagagataggctctcaaagcaccaaatagtatgattaacagattcttgtgtatcacatttgaaat

SEQ ID NO: 786685 - DNA, 120 bp, Artificial Sequence
  ENSG00000260916_66 (sequence is synthesized)
gctttatgttttggctttatgttgatgagttgaaaacccgtgtttttgtttatgttgtttggtttttgtttttggctatcttatgtagaaaggcatgtaagggatggcattgattattct

SEQ ID NO: 786686 - DNA, 120 bp, Artificial Sequence; identical to SEQ ID NO: 755993
  ENSG00000261052_0 (sequence is synthesized)

SEQ ID NO: 786687 - DNA, 120 bp, Artificial Sequence; identical to SEQ ID NO: 755994
  ENSG00000261052_1 (sequence is synthesized)

SEQ ID NO: 786688 - DNA, 120 bp, Artificial Sequence; identical to SEQ ID NO: 755995
  ENSG00000261052_2 (sequence is synthesized)

SEQ ID NO: 786689 - DNA, 120 bp, Artificial Sequence; identical to SEQ ID NO: 755996
  ENSG00000261052_3 (sequence is synthesized)

SEQ ID NO: 786690 - DNA, 120 bp, Artificial Sequence
  ENSG00000261052_4 (sequence is synthesized)
aaggacgtggcggtctcctactaccatttccaccgtatggaaaaggcgcaccctgagcctgggacctgggacagcttcctggaaaagttcatggctggagaagtgtcctacgggtcctgg

SEQ ID NO: 786691 - DNA, 120 bp, Artificial Sequence
  ENSG00000261052_5 (sequence is synthesized)
taccagcacgtgcaggagtggtgggagctgagccgcacccaccctgttctctacctcttctatgaagacatgaaggagaaccccaaaagggagattcaaaagatcctggagtttgtgggg

SEQ ID NO: 786692 - DNA, 120 bp, Artificial Sequence
  ENSG00000261052_6 (sequence is synthesized)
cgctccctgccagaggagaccatggacttcatggttcagcacacgtcgttcaaggagatgaagaagaaccctatgaccaactacaccaccgtcccccaggagctcatggaccacagcatc

SEQ ID NO: 786693 - DNA, 120 bp, Artificial Sequence
  ENSG00000261052_7 (sequence is synthesized)
tcccccttcatgaggaaaggcatggctggggactggaagaccaccttcaccgtggcgcagaatgagcgcttcgatgcggactatgcggagaagatggcaggctgcagcctcagcttccgc

SEQ ID NO: 786694 - DNA, 120 bp, Artificial Sequence
  ENSG00000261052_8 (sequence is synthesized)
tctgagctgtgagaggggctcctggagtcactgcagagggagtgtgcgaatctaccctgaccaatgggctcaagaataaagtatgatttttgagtcaggcacagtggctcatgtctgcaa

SEQ ID NO: 786695 - DNA, 120 bp, Artificial Sequence
  ENSG00000261052_9 (sequence is synthesized)
ccacgaatttgagaccagcctggtaaaatagtgagacctcatctctacaaagatgtaaaaaaattagccacatgtgctggcacttacctgtagtcccagctacttgggaagcagaggctg

SEQ ID NO: 786696 - DNA, 120 bp, Artificial Sequence
  ENSG00000261052_10 (sequence is synthesized)
gaggatcatttcagcccaggaggttgtggatacagtgagttatgacatgcccattcactacagcctggatgacaagcaagaccctccctccaaagaaaataaagctcaattaaaataaaa

SEQ ID NO: 786697 - DNA, 120 bp, Artificial Sequence
  ENSG00000261052_11 (sequence is synthesized)
gggacccaccaaggccacccagccccgtccctgggcggctcccacagcaagcccggattccccatcctacctccctggcccaggcccccccactgcagccccacctggcagcaggctcgg

SEQ ID NO: 786698 - DNA, 120 bp, Artificial Sequence
  ENSG00000261052_12 (sequence is synthesized)
cacagctttcatcttctgcacctgagtcagctgcatgggtggccacggatcagatacttagtcctattgcttatcctcaccaaagggtgtgccacccagggccacagtcatggaagaaga

SEQ ID NO: 786699 - DNA, 120 bp, Artificial Sequence
  ENSG00000261052_13 (sequence is synthesized)
ccatcccggtcctcacccataggcgccaagccctgttcatgatgggatcacagggcagagatcaattcattttactccagagactagggccccaggggttgaggctctttggggtttcta

SEQ ID NO: 786700 - DNA, 120 bp, Artificial Sequence; identical to SEQ ID NO: 756004
  ENSG00000261052_14 (sequence is synthesized)

SEQ ID NO: 786701 - DNA, 87 bp, Artificial Sequence
  ENSG00000261052_15 (sequence is synthesized)
aaaaaaaaaattagctgagcatggttgtacatgcttgtaatcccagctacttgggatgccgaggcgggaggattgcttgaacccaag

SEQ ID NO: 786702 - DNA, 90 bp, Artificial Sequence
  ENSG00000261052_16 (sequence is synthesized)
aaattagctgagcatggttgtacatgcttgtaatcccagctacttgggatgccgaggcgggaggattgcttgaacccaagaggcactgca

SEQ ID NO: 786703 - DNA, 120 bp, Artificial Sequence
  ENSG00000261115_0 (sequence is synthesized)
acctgcctcagaggatgcccaggagcccgcgggagcctctccggatcagaactttttaggccgcccgcccccatccccgcagtccccgggccgtgctccggtaggcgggggccgaggggg

SEQ ID NO: 786704 - DNA, 120 bp, Artificial Sequence
  ENSG00000261115_1 (sequence is synthesized)
cgccgcggcgcgagtccctctcctgccccctcccccagctcggccgcccgccgctttgttccgggtgcggcgagggaaggcgaggctgcggcggatcatgcccatggtgtagccgccaag

SEQ ID NO: 786705 - DNA, 120 bp, Artificial Sequence
  ENSG00000261115_2 (sequence is synthesized)
cggaggcatggctgccggaaggttactgctctacactggcctctcgctagcgctctgcgccctcggcatgctggccgtggccatctgctcggaccactggtacgagacggacgccaggaa

SEQ ID NO: 786706 - DNA, 120 bp, Artificial Sequence
  ENSG00000261115_3 (sequence is synthesized)
gcacagggacaggtgcaaggccttcaacacccgccgggtcgaccccggcttcatttacaacaataacaacaacttgccgctccgggcgagccgctcgcgcctggaccgctgggagggcaa

SEQ ID NO: 786707 - DNA, 120 bp, Artificial Sequence
  ENSG00000261115_4 (sequence is synthesized)
actcctccgggcccggaatcgccggcagctgttcgccatgagccccgcggacgagtgcagccggcagtacaactccaccaacatgggcctctggaggaagtgccaccggcagggcttcga

SEQ ID NO: 786708 - DNA, 120 bp, Artificial Sequence
  ENSG00000261115_5 (sequence is synthesized)
ccccgagatcgccgccctcattcggaaaggagaaattgagcgatgtacgtacatcaaataccactactcctcagcaaccatccccaggaacctcactttcaatatcacgaagaccatccg

SEQ ID NO: 786709 - DNA, 120 bp, Artificial Sequence
  ENSG00000261115_6 (sequence is synthesized)
tcaggatgagtggcatgccctacacctgcgcagaatgacggctggcttcatgggcatggcggtggccatcatcctctttggctggatcatcggcgtgctgggctgctgctgggaccgagg

SEQ ID NO: 786710 - DNA, 120 bp, Artificial Sequence
  ENSG00000261115_7 (sequence is synthesized)
ccttatgcagtacgtggcagggctgctcttcctcatgggaggaaccttctgcatcatttcactgtgcacctgtgtggccgggatcaactttgagctgtcacgctacccacgctacctgta

SEQ ID NO: 786711 - DNA, 120 bp, Artificial Sequence
  ENSG00000261115_8 (sequence is synthesized)
cggactccctgatgacatcagccatggctatggctggtccatgttctgtgcatgggggggcctgggcctcacactcatctcgggattcttctgtaccttagccccttctgttcaacctgt

SEQ ID NO: 786712 - DNA, 120 bp, Artificial Sequence
  ENSG00000261115_9 (sequence is synthesized)
cccgaggaccaactaccctaaatccagacccgagaatgggacagtgtgctaaaaaacaaacccatacatacatatatatatataaatatatatatataatatacatatataaaacaaaac

SEQ ID NO: 786713 - DNA, 120 bp, Artificial Sequence
  ENSG00000261115_10 (sequence is synthesized)
aaaactaaatcaagacgatgccagtgccaaggtagagttgagttggctcaggcacctgcatctcgccggactttgtgttgcctcatctctgagatggggaaagtttttccatcctgtggc

SEQ ID NO: 786714 - DNA, 120 bp, Artificial Sequence
  ENSG00000261115_11 (sequence is synthesized)
tcttccatcagttcttgacttttggcttcatggtctcttgaagacagagcaaacaccaccacttgcgaccgcgtcttgatccccatcactggcgaggatggggtggtgaagggacagtgg

SEQ ID NO: 786715 - DNA, 120 bp, Artificial Sequence
  ENSG00000261115_12 (sequence is synthesized)
aaggggtctgaggcagcacagatgtagagaaggaagtgccacccactgggtcaacgggagaggacgccacccctaaccagtcatatcacagggtaacaaagccctcagttcctagaatgt

SEQ ID NO: 786716 - DNA, 120 bp, Artificial Sequence
  ENSG00000261115_13 (sequence is synthesized)
aaccaaattattgaggccattttcagaatcacttcttctcctgctcttcctgttcggacttccttcccagcccaccagcaacacacaaggagtggaagagaaaacaaactgagaaggacg

SEQ ID NO: 786717 - DNA, 120 bp, Artificial Sequence
  ENSG00000261115_14 (sequence is synthesized)
ttttctctttgctgccaaacttttggaccatgtttcataggtgggaagggaagagaacatgctgagaggcaagatctgcatcaatgaaaggacgcttcggtggatgctcagacaacccag

SEQ ID NO: 786718 - DNA, 120 bp, Artificial Sequence
  ENSG00000261115_15 (sequence is synthesized)
tcttaccttccagctgccttacacccagtgaaacaagaggccaccctgtccccagccgcacctgcactccctgggcagactggagccttggagtcatgctgtgatgtgtgtgtgtgggtg

SEQ ID NO: 786719 - DNA, 120 bp, Artificial Sequence
  ENSG00000261115_16 (sequence is synthesized)
tgcgtgcatgtgtactttgggcggtttcctttttttcttttctaccttttaaatggaaatactgcattatgactgttgtctctcttatcactgtagtggtttcatggccccagatagagg

SEQ ID NO: 786720 - DNA, 120 bp, Artificial Sequence
  ENSG00000261115_17 (sequence is synthesized)
ttcatggccccagatagaggcccagagacctagaaattgtcatgagggacaggcctataagggtgccaattctgcagctacagatccctggagtggtgtgtgtgtgcgtgtgtgtgtgtg

SEQ ID NO: 786721 - DNA, 120 bp, Artificial Sequence
  ENSG00000261115_18 (sequence is synthesized)
tgtggtggatgtttcttgagcgtggggttttattgtttgtgttgtgtttttttaaattgtttctggtatagctgaaatttccagagggcagaaccaagaacaaagccactgggccagagg

SEQ ID NO: 786722 - DNA, 120 bp, Artificial Sequence
  ENSG00000261115_19 (sequence is synthesized)
acccccgtggttctccacattacagctctgggactctgcacgatttagtcctctaattttggaagttcaagacacagctgggcacataagccatgagagaagagggggaacacacagttc

SEQ ID NO: 786723 - DNA, 120 bp, Artificial Sequence
  ENSG00000261115_20 (sequence is synthesized)
aggagagagaagaaatgttgctctggttgctgttgtacaagaacataaaccaacaagaccttcactccccattatagaagctgtcctttgtcactggacatctcccctttccctaggggt

SEQ ID NO: 786724 - DNA, 120 bp, Artificial Sequence
  ENSG00000261115_21 (sequence is synthesized)
gacctctgtacaaacgaaaggaagtgggtcacatgcagagagagcacctccatttcccatgggctcaagtttgtatgatattgtgtaaattaatgcagaactcttgactctttccatcct

SEQ ID NO: 786725 - DNA, 120 bp, Artificial Sequence
  ENSG00000261115_22 (sequence is synthesized)
cttcctttccctcttgatattcaaggccatgaatcccaaaataacagtcttagtggctagcacccaaacagaggtggaataaatccaccccagtgtctcgggctcatttgagcaaattag

SEQ ID NO: 786726 - DNA, 120 bp, Artificial Sequence
  ENSG00000261115_23 (sequence is synthesized)
cactgcaggtgctggcaagcaaagtcagccagagagttgtgaacgctgtaggggtgggagtctgctggagtgggctggagccgctcacagtcatctcagtgagcctgctggtgcccagca

SEQ ID NO: 786727 - DNA, 120 bp, Artificial Sequence
  ENSG00000261115_24 (sequence is synthesized)
gccctggggaggccaggtgagaatccctgagctggtgtagccatggtcaactgtgtagcagagaatccccttgtttcataaacaaatatgctttgggagctttgccaggcactcagcagc

SEQ ID NO: 786728 - DNA, 120 bp, Artificial Sequence
  ENSG00000261115_25 (sequence is synthesized)
ctttcttccactgctgtgtaatctgtttcatttacacgtcttccaacccatcttcctaccactctcctccttttctcacctactaaccacttaccttctctctcttctatcttccaccct

SEQ ID NO: 786729 - DNA, 120 bp, Artificial Sequence
  ENSG00000261115_26 (sequence is synthesized)
catctgctcctttgaactgcgtgtatgtaattcatatctggatatgatatgacatctgatgtgcatgaatggggttgaatgtggatctctctgtatgtgtatctctctggtgcattttgt

SEQ ID NO: 786730 - DNA, 120 bp, Artificial Sequence
  ENSG00000261115_27 (sequence is synthesized)
gtacgtttgtgtcagtacacacctgcacacaggtgtgggtgccctactcaagacttccttaccggggactctggtcagcttctgcaaaaggtctcatgtgtgagttccctgtgtgtgggt

SEQ ID NO: 786731 - DNA, 120 bp, Artificial Sequence
  ENSG00000261115_28 (sequence is synthesized)
gtgctgggcgatagggtaaggtgtgcaacgggaaaagttgttagcttccagttggggttctaaggattatttttaaaacaaaggatttattctatgagaagggaaataattttcaggaaa

SEQ ID NO: 786732 - DNA, 120 bp, Artificial Sequence
  ENSG00000261115_29 (sequence is synthesized)
acccagtttttcaattgggcattttatttctaattttctttgaaaagttagatttctcccttaaggggaagggcatacttgggcttaaggaaaagtgaagaaaagtatctcagattgaga

SEQ ID NO: 786733 - DNA, 120 bp, Artificial Sequence
  ENSG00000261115_30 (sequence is synthesized)
ggccttttgtcttccttccaagcgtcctgaaggggctctgccgaggaagggacagacaggttcacaagcatccatttgggggagagggcttgtctatgaccacactgaaattccagcttt

SEQ ID NO: 786734 - DNA, 120 bp, Artificial Sequence
  ENSG00000261115_31 (sequence is synthesized)
tttccagttgcaggagagaggggaaaaattctaaatggggaaatttgctatgaaccatttaaactttttgtaagtaatcatgtttgaggatgctggctcacagacctatcattatttata

SEQ ID NO: 786735 - DNA, 120 bp, Artificial Sequence
  ENSG00000261115_32 (sequence is synthesized)
tcctctttttaaaaaaaaatcccatactttcaatgaatagattatctgctctatccaattattgtctttgtgacagacatttagcaaagcttactgcatccctttgaaaccttgagagtt

SEQ ID NO: 786736 - DNA, 120 bp, Artificial Sequence
  ENSG00000261115_33 (sequence is synthesized)
cctgaaatgttagaaagctcccaggaaagacgtaaacaacctgggctcaactcaccagcccagagcaggggctttgagtgacttctttgatagcaggaccagataaatacgaacacactt

SEQ ID NO: 786737 - DNA, 120 bp, Artificial Sequence
  ENSG00000261115_34 (sequence is synthesized)
tgggatctgatcctgctgggaagcaaaagacgcccagccacatgaccaggatagaggcccctttcagacggcaagtcctggccaatgggaggacttctcaggtgaccttgatccctctag

SEQ ID NO: 786738 - DNA, 120 bp, Artificial Sequence
  ENSG00000261115_35 (sequence is synthesized)
cataagggcttgaccacagattaaaacatgtgactccaaccagttacggaagctttctggctgtgaggtagctgagggagatgaggaggaggaagagaggagccttgacttgtgaggctc

SEQ ID NO: 786739 - DNA, 120 bp, Artificial Sequence
  ENSG00000261115_36 (sequence is synthesized)
tgtaggtcagactctgctaactccaaatcaaagtggaacccaaccttatgagggcatttagggtcaatgacctcactaaagtcaccagccgcaaccccaggtcaagttcaaacttcttac

SEQ ID NO: 786740 - DNA, 120 bp, Artificial Sequence
  ENSG00000261115_37 (sequence is synthesized)
tggcatatgaacatgtatgtgctttgagctccatgcaagtcaaccttgagcctggggcccattgcaacttttatttccttccctactctactaccttgagattcaggaaagtgaggtatt

SEQ ID NO: 786741 - DNA, 120 bp, Artificial Sequence
  ENSG00000261115_38 (sequence is synthesized)
ctacctagagagaggtcccatatctttttctccttattttgggagttacggtttcttcttctgtttccgtttcctctctctctactcactcctactttctcctgcatcaactttggtcaa

SEQ ID NO: 786742 - DNA, 120 bp, Artificial Sequence
  ENSG00000261115_39 (sequence is synthesized)
ttaacatagacaagtgattcatctgtagagaggctcctagactccaagcagcccccttccttgttcattgtggctgtaggttttataaggaggtctgtggctccctggcatcaaaatatg

SEQ ID NO: 786743 - DNA, 120 bp, Artificial Sequence
  ENSG00000261115_40 (sequence is synthesized)
aaaaataaaatctgtgcctgttccagcttcaatcctcctccaagccttagcttttcaacaaccctaccctttcaacttcagggatcatggagtcacagagactggacaactcctccaaat

SEQ ID NO: 786744 - DNA, 120 bp, Artificial Sequence
  ENSG00000261115_41 (sequence is synthesized)
ctagacaaagactttcttaagcgccctgagcccaggtgcatatcttcccatcagggatgagtggtcccacctagcaatgcttgcctctcctgtgacaagagggtaggatatcctaggact

SEQ ID NO: 786745 - DNA, 120 bp, Artificial Sequence
  ENSG00000261115_42 (sequence is synthesized)
ctgagactgggccctatatctcaatattcatccacactcatgataagatgccggaaatgaatgcactgtgtgtagctgtcttgatttagtgggaggatgtgctgcttaggtctccaaaga

SEQ ID NO: 786746 - DNA, 120 bp, Artificial Sequence
  ENSG00000261115_43 (sequence is synthesized)
tgcccacctgggtcaaattcagaataatgaactcaggtacatcacccagaggcatttagaatggactctctcttcacctggattatgtgctgagtgttaagtgatttttcaaatatctgg

SEQ ID NO: 786747 - DNA, 120 bp, Artificial Sequence
  ENSG00000261115_44 (sequence is synthesized)
ttgtgggggatacttggttgattcttgtagttaaagtgaagttgcttttctgaaaatgttccctgtcttcaggggacttacccatcccaggggacacatccatcccaggggacacagcca

SEQ ID NO: 786748 - DNA, 120 bp, Artificial Sequence
  ENSG00000261115_45 (sequence is synthesized)
gccctttccagggaaatacgatgtttctgagtgagaggtgatttcagtgcagataggaagagctggtgcacaccagcagggttgccttccatgccatcttccagctggtgtgggatagac

SEQ ID NO: 786749 - DNA, 120 bp, Artificial Sequence
  ENSG00000261115_46 (sequence is synthesized)
taagggggcagatttttaagaaccccaccagagttgacatacacacgtgattctcgtgtctgtctctcaaagctctcaatgtctggggctgtgtttgccctcttttcattgatgctgcca

SEQ ID NO: 786750 - DNA, 120 bp, Artificial Sequence
  ENSG00000261115_47 (sequence is synthesized)
tgatgcaaaatgtttcttaaacattattcctggttcttagaatatgtgattactgagtattggatttctttcctgaataataactgctcattgtagaaaataagaaaaataaaatacaaa

SEQ ID NO: 786751 - DNA, 120 bp, Artificial Sequence
  ENSG00000261115_48 (sequence is synthesized)
aaagactacaagatttttcataatccagtcactctgaggcatctaccgcgggcccaatccaaatggtcatgacctcaaaacttccccaatgagtgcttgtctctgggttggcagctgggg

SEQ ID NO: 786752 - DNA, 120 bp, Artificial Sequence
  ENSG00000261115_49 (sequence is synthesized)
ccatgtgagcagtgtacaccacagaaccgcactggtctgcgttgagttgaccctgtgttcctggcagcaagagtgcagggccctgagcccccagagatagcaaagaggcctaaaagttta

SEQ ID NO: 786753 - DNA, 120 bp, Artificial Sequence
  ENSG00000261115_50 (sequence is synthesized)
atgccagaccttaggggcaggatggagcagggctaaaagatgtctctttgggcctgtctgcctgctttccttccttccttttctttcctttttttttttggtcagttgccatctcaatct

SEQ ID NO: 786754 - DNA, 120 bp, Artificial Sequence
  ENSG00000261115_51 (sequence is synthesized)
aatcatagatgtaagaatgcggaagccagagtaactcactcattaagctacacttgtgtaacagttactgtaaatttcactacagctctgcactgaaatgatttgtgactctgggcactg

SEQ ID NO: 786755 - DNA, 120 bp, Artificial Sequence
  ENSG00000261115_52 (sequence is synthesized)
tgtcttctccatacttgaacttcctcatctacaaaatgaggataagtgataacaccttacctcatggtatattaagggtgacaaagaaattgcaaagtgatttgcaaacatgaagtgtca

SEQ ID NO: 786756 - DNA, 120 bp, Artificial Sequence
  ENSG00000261115_53 (sequence is synthesized)
tatgagttatgtatgttctaattatccctcagaagaccccccgctggaatggaattctcacatcaagtgtctgtgcctcgctgctgaaggataacccagagtgcaaggtcatctttgttg

SEQ ID NO: 786757 - DNA, 120 bp, Artificial Sequence
  ENSG00000261115_54 (sequence is synthesized)
ctgaacagggctggacctgtcgcacttaagcacacttaaaggattctattcttcattcaggtcccccagagaaattggctccttatttttctttacctattcctagacttccttttgtct

SEQ ID NO: 786758 - DNA, 120 bp, Artificial Sequence
  ENSG00000261115_55 (sequence is synthesized)
agagccagttttgcaaagggcacttttatccatctcagttattcccagaggtgacagaatgagtaaaccatatggggcaaatagcatatatgagctaaaccagttaactgttaaccaagg

SEQ ID NO: 786759 - DNA, 120 bp, Artificial Sequence
  ENSG00000261115_56 (sequence is synthesized)
cacatggtcaatgccttagtatttttttttttaattctcctaacgttatttctagctgtacattcccaaaaggaatgggtggaagcaaatcagattctgaaaggtttcaatgatctttca

SEQ ID NO: 786760 - DNA, 120 bp, Artificial Sequence
  ENSG00000261115_57 (sequence is synthesized)
agtttaggatgagaccaagtctcaaggagctgggatcttctttctcttgtcagttgctgaagccagtagcttcgtcaaaaacatatgaattcatataaggaagccctttagatggtacat

SEQ ID NO: 786761 - DNA, 120 bp, Artificial Sequence
  ENSG00000261115_58 (sequence is synthesized)
tcactaagacgtgtctgggtgtgatcctgtttgggaaaaacagaatcctaggttctaaacaagaaaagaacgcccttcccaaagggtccgcacactttctgctttgcagcggatcaagtg

SEQ ID NO: 786762 - DNA, 120 bp, Artificial Sequence
  ENSG00000261115_59 (sequence is synthesized)
tccttgtgagggtgagacttccttcaagggaagggaagccattgctctctctgtagatagagcccagctggtaacgggggagccacccaactgcaggggggtgtatgttcaggtgtgaaa

SEQ ID NO: 786763 - DNA, 120 bp, Artificial Sequence
  ENSG00000261115_60 (sequence is synthesized)
aacagaaaactgggtctgaacatgaagagttgcacagcagtagttcgaagaagctggcatctctttggcaaacaccaacctcagcaaatgcaactcctacacttcattcccaaggaccag

SEQ ID NO: 786764 - DNA, 120 bp, Artificial Sequence
  ENSG00000261115_61 (sequence is synthesized)
gtgttgctccttaaggaactctgtatccctctctcctctccagaaccccattcctcccactggctgagcttttcctttcctttccgggtcacccatagaccctctccgtctgtaccagtg

SEQ ID NO: 786765 - DNA, 120 bp, Artificial Sequence
  ENSG00000261115_62 (sequence is synthesized)
cgtctgtgttgtgagcgtgacgaagcctttcctgtgaagagctttcatgaactcattctcatactccttccccatttccacccatggtgtgactgttttgctattcaagactatctgtaa

SEQ ID NO: 786766 - DNA, 120 bp, Artificial Sequence
  ENSG00000261115_63 (sequence is synthesized)
aaatgtacaaataaaagtgaaaactgaaaataaaggggagggagattgagattaaacaaatgcaatgatgtagcccttagttttctgaggacttctgtggacggccctaaaatcctgagt

SEQ ID NO: 786767 - DNA, 120 bp, Artificial Sequence
  ENSG00000261115_64 (sequence is synthesized)
tagggtgggatatgaagggagggataccattgacacaggaggtttttttctggttgtttctctcacagtcatcagtgtctgcttagaactctctgttctaaaggtttttccctgtaaagt

SEQ ID NO: 786768 - DNA, 120 bp, Artificial Sequence
  ENSG00000261115_65 (sequence is synthesized)
agaatgcacttcccccaaaataaaagtaaatcagcaatgtttgaagggtcatggcaagggtcatgacaaagacctgactctggggtggcatgagtggccctgtcaccggctcactcaggg

SEQ ID NO: 786769 - DNA, 120 bp, Artificial Sequence
  ENSG00000261115_66 (sequence is synthesized)
ccttgggggagtctcattacctcaccttgtctccacgtcttctcagccaaatggggatcaggggcttccagggctctgggggtgcgcagtccccttgtgtattttgctgctatttctaga

SEQ ID NO: 786770 - DNA, 120 bp, Artificial Sequence
  ENSG00000261115_67 (sequence is synthesized)
gagactttgagcccttgctagtgcgtgcttactgcatggaggtaaattaggagatgttttctctctgctactcctggcctctgctttcgcccctcagaaagtgaccttgagctagcagcc

SEQ ID NO: 786771 - DNA, 120 bp, Artificial Sequence
  ENSG00000261115_68 (sequence is synthesized)
agtttgcactcagagtccagagccttctatctaccgtttcattctcagattccttttcccacccactttgacgatctcattttactatcagtctctactgactgagctttgctgcactgg

SEQ ID NO: 786772 - DNA, 120 bp, Artificial Sequence
  ENSG00000261115_69 (sequence is synthesized)
gctggggtaggagaaagagcatccaaggagatgatgtgtgaattgctttgtaatttatgactcaccatataaatgtggcttgcagtgtcagaagcagggagtctggccaagggttgctac

SEQ ID NO: 786773 - DNA, 120 bp, Artificial Sequence
  ENSG00000261115_70 (sequence is synthesized)
caaataagactgaagatggtggaggcagtggtggcgtggaggcagtaggcagaagatgtgggttgggagcagaggtaagatgaacggagctttgggaaggacagatggcagaagcaccag

SEQ ID NO: 786774 - DNA, 120 bp, Artificial Sequence
  ENSG00000261115_71 (sequence is synthesized)
aaaatcctcagcaaggcagcagagaaggatcctcaaagcagtaaccctgaagtaataggaagtaggaaagaggagcagggattaggtaaatctgcagcataaacagctgtctccctgcag

SEQ ID NO: 786775 - DNA, 120 bp, Artificial Sequence
  ENSG00000261115_72 (sequence is synthesized)
gactgagaagaccagctgccccagagaggggaggcacgtcgagcttggccagtgacccaacccatgattagaggcaccttcaatcccaactttcctctcctctgctgggtcacagtgatg

SEQ ID NO: 786776 - DNA, 120 bp, Artificial Sequence
  ENSG00000261115_73 (sequence is synthesized)
gaaccagcttcaggaaggtagtatagaccagcgtcatccaatggaaccatgatccaagccacatatgcaatttaaaatattctagtagccacattttttaaagtccaaagaaacagctaa

SEQ ID NO: 786777 - DNA, 120 bp, Artificial Sequence
  ENSG00000261115_74 (sequence is synthesized)
aatcagtgaaattaatttttagactacattttaacctaacatgtcaaaaatagtatcacttcagcatggaatcaatataaaaattactgggatattttacattcttttttccaaatgaag

SEQ ID NO: 786778 - DNA, 120 bp, Artificial Sequence
  ENSG00000261115_75 (sequence is synthesized)
tcttcaaaatccaatgtgattttcctcttagaaaacatctcagtctggcccagccctatttccagtgttcaatagccacacctgactactggttgctgtataggacagcacggacttagg

SEQ ID NO: 786779 - DNA, 120 bp, Artificial Sequence
  ENSG00000261115_76 (sequence is synthesized)
ttcttcattaggagactgatggggggggtccttcctggtgggtcactcactgccatagctcttgtcatagctgatgaaggcaggagtgagtcttattatgttggcctagagtagaaagca

SEQ ID NO: 786780 - DNA, 120 bp, Artificial Sequence
  ENSG00000261115_77 (sequence is synthesized)
cagagctatgtcgaggctgctgtctcagcctctggaagttctgcttcacctgcttagtaagaggagatgaccactcctgtggactgcatgtcccatctgcccccagagggtgtcggcgct

SEQ ID NO: 786781 - DNA, 120 bp, Artificial Sequence
  ENSG00000261115_78 (sequence is synthesized)
gccccagtcatgtcccttatgacctgtccaagtcctagaggccaaagcaggtcatattcttcagctgcaggaatgtcagctactgcctcccaccccttaacctgatccccttatcatata

SEQ ID NO: 786782 - DNA, 120 bp, Artificial Sequence
  ENSG00000261115_79 (sequence is synthesized)
gtggggaaggggcaggcaggccttctctctgtcaagaacaaagatctctacaacatttcgtcacctgggccagtcacctgctaatatcatctcaccaatatttggagctgttttctgaat

SEQ ID NO: 786783 - DNA, 120 bp, Artificial Sequence
  ENSG00000261115_80 (sequence is synthesized)
cccttaattttcttaaatatttatcttaaagtcaaatgctataaaggagataccctgggaagggcagtggccacaggcagactgggtctcctaggaggtggtggtgttggtgacaagttc

SEQ ID NO: 786784 - DNA, 120 bp, Artificial Sequence
  ENSG00000261115_81 (sequence is synthesized)
tacttggactgggactcaacccaccattgcctacctctcttccctgcctggagaccttccttaggattgaagaaacctcttttgtttgtgaaaaagataggtatcgagatcttaatggag

SEQ ID NO: 786785 - DNA, 120 bp, Artificial Sequence
  ENSG00000261115_82 (sequence is synthesized)
agaacagaataaaatgcaaggagccaacccctgggtattctcaaagcatttcaacggtcagtataacaaggtttgattgatttaaaatataacattctgagccctgtgttactgagcaaa

SEQ ID NO: 786786 - DNA, 120 bp, Artificial Sequence
  ENSG00000261115_83 (sequence is synthesized)
aatgagctgatttggtgagtatgttttatatatggtcattagacagggaccataactgacaaaactctcaaacgcctggagtgtttatggcccaccagattattgctcagtcaatataaa

SEQ ID NO: 786787 - DNA, 120 bp, Artificial Sequence
  ENSG00000261115_84 (sequence is synthesized)
tttatttacctttattttaatttgcatagtgctttctgattggtcagacaaggagtggtgtgtactgcaggattctaacaatgcctctgcccttggaggcagcaattcctgtggttattg

SEQ ID NO: 786788 - DNA, 120 bp, Artificial Sequence
  ENSG00000261115_85 (sequence is synthesized)
gtgctaaaataagataaaatattatgttaatttgttctgatatgatgtgaataaatgtgttgtttaatcttaacaagaatgctacatcttatcagatctattgtactgtctgttccttct

SEQ ID NO: 786789 - DNA, 120 bp, Artificial Sequence
  ENSG00000261115_86 (sequence is synthesized)
cataattaattaattacaggaaaggcgattcaaaccagatcttgaaactattgtgatgttctgagaggtaaatttaacagggaagtgggaggggggatgaaaagggaaattgccaggttc

SEQ ID NO: 786790 - DNA, 120 bp, Artificial Sequence
  ENSG00000261115_87 (sequence is synthesized)
ctgtgactttgaaaggactgaggaagcagagagcatttggggacttcactgaaactgactgcatcttgcaattttctttttcgaattggcagaaatattgtatttccattgattgaagaa

SEQ ID NO: 786791 - DNA, 120 bp, Artificial Sequence
  ENSG00000261115_88 (sequence is synthesized)
aaacaagtgtctggtaattaattaaatgacttgttcatggaaaaaataaataatctgtcagttgtggaatgtaaactgattaaacaattaaataaagaagattatgttgtgtgttttaaa

SEQ ID NO: 786792 - DNA, 120 bp, Artificial Sequence
  ENSG00000261150_0 (sequence is synthesized)
actgcggaccgagcggcgagcgggcaggacagaggtggacctcagcaggctctgcataaccagccgtgtgtgatgagtggccacaccttgcctcctcttcccgtcccaggcaccaacagc

SEQ ID NO: 786793 - DNA, 120 bp, Artificial Sequence
  ENSG00000261150_1 (sequence is synthesized)
acagagcaggccagtgtacccagagccatggcagccacgctgggagccggcacgccccccaggccccaggccaggagcatagctggggtgtatgtggaggcctcgggccaggcccagagt

SEQ ID NO: 786794 - DNA, 120 bp, Artificial Sequence
  ENSG00000261150_2 (sequence is synthesized)
gtctacgccgccatggagcagggcctcctgcctgctgggctcgggcaggctctgctagaggcccaggcagccactgggggcctggtggacctcgcccggggccagctgctccctgtgtcc

SEQ ID NO: 786795 - DNA, 120 bp, Artificial Sequence
  ENSG00000261150_3 (sequence is synthesized)
aaggccctgcagcagggtctggtggggctggagctgaaggagaagctgctggccgctgagcgtgccactacgggctatcctgacccctacggcggtgagaagctggccctctttcaggcc

SEQ ID NO: 786796 - DNA, 120 bp, Artificial Sequence
  ENSG00000261150_4 (sequence is synthesized)
atcgggaaggaggttgtggacagggccctggggcagagctggctggaggtccaactggccactgggggcctggtggaccccgcccagggagtgctcgtggcccctgagccagcctgccac

SEQ ID NO: 786797 - DNA, 120 bp, Artificial Sequence
  ENSG00000261150_5 (sequence is synthesized)
cagggcctcctggaccgggagacatggcacaagctgtcagagcttgagcctggcacaggtgacctgcgcttcctcgaccccaacacgctggagcggctgacataccaccagctgctggaa

SEQ ID NO: 786798 - DNA, 120 bp, Artificial Sequence
  ENSG00000261150_6 (sequence is synthesized)
aggtgtgtgcgtgcccccggctcggggctagccttgctgcccctcaagatcaccttccgctccatgggcggggcggtgagtgcagctgagctgctggaggtgggcatcctggacgagcag

SEQ ID NO: 786799 - DNA, 120 bp, Artificial Sequence
  ENSG00000261150_7 (sequence is synthesized)
gctgtgcagggtctgcgggagggcaggctggccgcagtggacgtgagtgcacgtgccgaggtgcggcgctacctggagggtaccggcagcgtggccggggttgtcctgctgcccgaaggc

SEQ ID NO: 786800 - DNA, 120 bp, Artificial Sequence
  ENSG00000261150_8 (sequence is synthesized)
cacaagaagagctttttccaggctgccaccgagcacctgctcccaatgggcaccgcgctgccactcctagaggcccaggctgccacccacaccctggtggaccccatcacaggccagcgg

SEQ ID NO: 786801 - DNA, 120 bp, Artificial Sequence
  ENSG00000261150_9 (sequence is synthesized)
ctgtgggtagacgaggcagtcagggcgggcctggtcagcccagagctccatgagcagctcctggtggccgagcaggccgtgacagggcaccacgaccccttcagtggctcccaaatcccc

SEQ ID NO: 786802 - DNA, 120 bp, Artificial Sequence
  ENSG00000261150_10 (sequence is synthesized)
cttttccaggccatgaagaaggggctagtggacaggccactggcactgcggctcttggatgcccagctggccacaggcgggctggtctgtccagcacgcaggctccggctgcccctggag

SEQ ID NO: 786803 - DNA, 120 bp, Artificial Sequence
  ENSG00000261150_11 (sequence is synthesized)
gccgccctgcgctgcggctgcctggatgaagacactcagcggcagctctcgcaggctggcagcttctcagacggcacgcacggcggcctgcgctatgaacagctgctggccctctgtgtc

SEQ ID NO: 786804 - DNA, 120 bp, Artificial Sequence
  ENSG00000261150_12 (sequence is synthesized)
accgacccagagaccgggcttgccttcctgccactctcagggggaccccggggaggggagccccagggacccccattcatcaagtacagcactcggcaggccctgagcacggccacagcc

SEQ ID NO: 786805 - DNA, 120 bp, Artificial Sequence
  ENSG00000261150_13 (sequence is synthesized)
accgtctctgtggggaagttccggggccggcccgtgtccctctgggagctgctcttctctgaggccatctcctcagagcagagggcgatgctggcccagcagtaccaggaagggaccctc

SEQ ID NO: 786806 - DNA, 120 bp, Artificial Sequence
  ENSG00000261150_14 (sequence is synthesized)
tccgtggagaagctggccgctaagctgagcgccaccctcgagcaggctgcagccactgccagggtcaccttttctgggctgagggacaccgtgacaccaggagagctgctgaaagccgag

SEQ ID NO: 786807 - DNA, 120 bp, Artificial Sequence
  ENSG00000261150_15 (sequence is synthesized)
atcatcgaccaggacctgtacgagcggctggagcatggacaggccacagccaaggatgtgggcagcctggcctcggtgcagaggtacctgcagggtacgggctgcattgctggcctgctg

SEQ ID NO: 786808 - DNA, 120 bp, Artificial Sequence
  ENSG00000261150_16 (sequence is synthesized)
ctccctggctcccaggaacgcctgagcatctatgaggcccgatgcaaggggctcctccggcccggcactgccctcatccttctggaggcacaagctgccacaggcttcatcatcgaccca

SEQ ID NO: 786809 - DNA, 120 bp, Artificial Sequence
  ENSG00000261150_17 (sequence is synthesized)
aaagcaaacaaggggcactccgttgaggaggcactgagggctgctgtcattgggcctgatgtgttcgcgaagctgctgtcggctgagcgcgctgtcactggctacactgacccctacacc

SEQ ID NO: 786810 - DNA, 120 bp, Artificial Sequence
  ENSG00000261150_18 (sequence is synthesized)
gagcgcgctgtcactggctacactgacccctacaccgggcagcagatctccctcttccaggccatgcagaagggcctcatcgtccgggagcacggcatccgcctgctggaggcccagatc

SEQ ID NO: 786811 - DNA, 120 bp, Artificial Sequence
  ENSG00000261150_19 (sequence is synthesized)
cgcgtgcccgtggacgtggcctaccggcgcggctacttcgatcagatgctgaacttgatcctgttggacccttctgacgacaccaagggcttcttcgaccccaacacgcacgagaacctc

SEQ ID NO: 786812 - DNA, 120 bp, Artificial Sequence
  ENSG00000261150_20 (sequence is synthesized)
acgtacctgcagcttctggagcgctgtgtgcgtgaccccgagacgggcctgtacctcctgccactcagcagcacgcagtccccgctggtggacagtgccacccagcaggccttccagaac

SEQ ID NO: 786813 - DNA, 120 bp, Artificial Sequence
  ENSG00000261150_21 (sequence is synthesized)
ctgctgctctccgtgaagtatggacggtttcaggggcagagggtctccgcgtgggagctgatcaactctgagtacttcagcgagggccgcaggaggcagctgctgcgtcgctaccggcag

SEQ ID NO: 786814 - DNA, 120 bp, Artificial Sequence
  ENSG00000261150_22 (sequence is synthesized)
cgcgaggtcacgctggggcaggtggcaaagctgctggaggcggagacgcagagacaggcggacatcatgctgcccgcactgcggagccgggtcaccgtccaccagctcctggaggccggt

SEQ ID NO: 786815 - DNA, 120 bp, Artificial Sequence
  ENSG00000261150_23 (sequence is synthesized)
atcattgaccagcagctgttggaccaagtgctggccgggacaatcagcccggaggccctcctactcatggacggcgtccgcaggtacctgtgcggcctgggagctgtgggcggtgtgcgg

SEQ ID NO: 786816 - DNA, 120 bp, Artificial Sequence
  ENSG00000261150_24 (sequence is synthesized)
ctgctgccctctggccagcggctcagcctctaccaggccatgaggcagaagctgctggggcccagggtggccctggccctgctggaggcccaggcggccaccggaaccatcatggaccct

SEQ ID NO: 786817 - DNA, 120 bp, Artificial Sequence
  ENSG00000261150_25 (sequence is synthesized)
cacagcccagagagcctctcggtggatgaggccgtgcgcaggggtgtggtggggccggagctgtatggcaggctgaagcgggctgagggtgccattgctggcttcagagaccccttctct

SEQ ID NO: 786818 - DNA, 120 bp, Artificial Sequence
  ENSG00000261150_26 (sequence is synthesized)
gggaagcaggtgtctgtgttccaggccatgaagaaaggtctcatcccttgggagcaagctgcccgcctcctggaggctcaagtggccacaggagggatcattgaccccaccagccaccac

SEQ ID NO: 786819 - DNA, 120 bp, Artificial Sequence
  ENSG00000261150_27 (sequence is synthesized)
cacctccccatgccagtggccattcagcgtggctatgttgaccaggagatggagacagccttgtccagctcctccgaaaccttccccacaccggacggccaggggcgcacgagctatgcc

SEQ ID NO: 786820 - DNA, 120 bp, Artificial Sequence
  ENSG00000261150_28 (sequence is synthesized)
cagctcctggaggagtgccccagggatgagacttctggccttcacctcctgcccctgccagaaagtgctcctgccctccccaccgaggagcaggtccagaggagcctgcaggccgtgccg

SEQ ID NO: 786821 - DNA, 120 bp, Artificial Sequence
  ENSG00000261150_29 (sequence is synthesized)
ggggccaaggatggcacatccctctgggacctgctcagctcctgccacttcaccgaggagcaacggaggggcctgctggaggacgtgcaggaggggaggaccactgtgccacagctgcta

SEQ ID NO: 786822 - DNA, 120 bp, Artificial Sequence
  ENSG00000261150_30 (sequence is synthesized)
gcctctgtgcagaggtgggtacaggagaccaagctcctggcccaggcccgcgtcatggtgcccggcccacggggtgaggtacccgctgtctggctgctggatgctggcatcatcacccag

SEQ ID NO: 786823 - DNA, 120 bp, Artificial Sequence
  ENSG00000261150_31 (sequence is synthesized)
gagacccttgaggccctggctcagggcacgcagtcgcccgcccaggtcgccgagcagccggcggtgaaggcctgcctgtggggcacaggctgcgtggccggtgtgctgctacagccctct

SEQ ID NO: 786824 - DNA, 120 bp, Artificial Sequence
  ENSG00000261150_32 (sequence is synthesized)
ggggccaaggccagcatcgcccaggccgtgagggatggcctcctgcccacaggcctgggccagaggctgctggaagcccaggtggcatctggcttccttgttgaccccctgaacaaccag

SEQ ID NO: 786825 - DNA, 120 bp, Artificial Sequence
  ENSG00000261150_33 (sequence is synthesized)
agactgtcagtggaggacgcggttaaggtcggcctggtgggcagggagctgagtgagcagctcgggcaggccgagagggcggcggccgggtacccagatccctactctagggcctccctc

SEQ ID NO: 786826 - DNA, 120 bp, Artificial Sequence
  ENSG00000261150_34 (sequence is synthesized)
tctctgtggcaggccatggagaaggggctcgtgccacagaacgagggcttgcccctcctgcaggtgcagctggccacagggggtgtggtggaccctgtccacggggtgcacctgccccag

SEQ ID NO: 786827 - DNA, 120 bp, Artificial Sequence
  ENSG00000261150_35 (sequence is synthesized)
gcggcagcctgcagactcggccttctggacacacagacgagccaggtgctgactgcagttgacaaggacaacaagttcttctttgaccccagtgcgcgggaccaggtgacctaccagcag

SEQ ID NO: 786828 - DNA, 120 bp, Artificial Sequence
  ENSG00000261150_36 (sequence is synthesized)
ctcagggagcgctgcgtgtgcgactccgagaccggattgttgctgttgccactgccctcagacacagtgcttgaggtggacgaccacaccgcggtggctctgagggccatgaaggtgccc

SEQ ID NO: 786829 - DNA, 120 bp, Artificial Sequence
  ENSG00000261150_37 (sequence is synthesized)
gtcagcacagggaggtttaaggggtgtagcgtgtcactctgggacctgctgctctccgaatacgttggcgctgacaagcggcgggagctggtggcactctgtcggtctgggagggctgcg

SEQ ID NO: 786830 - DNA, 120 bp, Artificial Sequence
  ENSG00000261150_38 (sequence is synthesized)
gccctgcggcaggtggtcagcgcagtcaccaccctggtcgaggctgcagagaggcagcccctgcaggccaccttcagagggctccggaagcaggtgtcagccagggacctgttcagggcg

SEQ ID NO: 786831 - DNA, 120 bp, Artificial Sequence
  ENSG00000261150_39 (sequence is synthesized)
cagctgatcagcaggaagacgctggacgagctgagccaggggacaacgactgtgaaggaggtggcggagatggacagcgtgaagcggtccctggagggaggcaacttcattgccggggtc

SEQ ID NO: 786832 - DNA, 120 bp, Artificial Sequence
  ENSG00000261150_40 (sequence is synthesized)
cttatccagggcacccaggagaggatgagcatcccagaggccctgaggaggcacatcctgcggcctggcacagccctggtgctgctggaggcacaggcagctaccggcttcatcatcgac

SEQ ID NO: 786833 - DNA, 120 bp, Artificial Sequence
  ENSG00000261150_41 (sequence is synthesized)
cccgtggagaaccggaagctgaccgtggaggaggcgttcaaagcaggaatgttcgggaaagaaacctacgtgaagctgctgtcggccgagcgcgccgtcaccggctacaccgacccctat

SEQ ID NO: 786834 - DNA, 120 bp, Artificial Sequence
  ENSG00000261150_42 (sequence is synthesized)
agcgcgccgtcaccggctacaccgacccctataccgggcagcagatctccctcttccaggccatgcagaaggacctcatcgtccgggagcacggcatccgcctgctggaggcccagatcg

SEQ ID NO: 786835 - DNA, 120 bp, Artificial Sequence
  ENSG00000261150_43 (sequence is synthesized)
caccgcgtgcccgtggacgtggcctaccgctgcggctacttcgacgaggagatgaaccgcatcctggcggaccccagcgacgacaccaagggcttcttcgaccccaacacgcacgagaac

SEQ ID NO: 786836 - DNA, 120 bp, Artificial Sequence
  ENSG00000261150_44 (sequence is synthesized)
ctcacgtacctgcagcttctggagcgctgtgtggaggaccccgagacgggcctgtacctgctacaaatcataaagaaaggagaaaactacgtgtacatcaatgaggccacgagacacgtg

SEQ ID NO: 786837 - DNA, 120 bp, Artificial Sequence
  ENSG00000261150_45 (sequence is synthesized)
ttgcaatccagaactgcaaaaatgcgcgtggggaggtttgctgaccaggtggtctctttctgggacctgctgtcctctccatacttcacagaggacaggaagcgggagctcatccaggag

SEQ ID NO: 786838 - DNA, 120 bp, Artificial Sequence
  ENSG00000261150_46 (sequence is synthesized)
tatggagcccagagtgggggcctggagaaattgctggaaatcatcaccacgacaattgaagaaacagagacgcaaaaccaaggcatcaaagtggcggccatcagaggggaggtgacagct

SEQ ID NO: 786839 - DNA, 120 bp, Artificial Sequence
  ENSG00000261150_47 (sequence is synthesized)
gcagacctgttcaactccagggtcatcgatcagaagaccctgcacacacttcgtgtggggaggactgggggacaggcactcagcacgctggagtgtgtgaagccctatctggaaggcagc

SEQ ID NO: 786840 - DNA, 120 bp, Artificial Sequence
  ENSG00000261150_48 (sequence is synthesized)
ggctgcattgcgggggtcacggtgccctccaccagggaggtcatgagcctccatgaggccagcaggaaggagctcatccctgcagcatttgcgacttggctgctggaggcgcaggccgcc

SEQ ID NO: 786841 - DNA, 120 bp, Artificial Sequence
  ENSG00000261150_49 (sequence is synthesized)
accgggttcctcctggacccctgcacccgccagaagctctctgtggatgaggctgtggatgtgggcctggtgaacgaggagctgcgggagaggctcctgaaggctgaaagagctgccacg

SEQ ID NO: 786842 - DNA, 120 bp, Artificial Sequence
  ENSG00000261150_50 (sequence is synthesized)
ggctacagggatccggccacaggagacacgatcccgctgttccaggccatgcagaagcagctcatcgagaaggcggaggcactgaggctgctggaggtgcaggtggccacggggggtgtc

SEQ ID NO: 786843 - DNA, 120 bp, Artificial Sequence
  ENSG00000261150_51 (sequence is synthesized)
atcgacccacagcaccaccaccggctcccactggaaacagcctacagacggggctgtctgcacaaggacatctatgcgctcatttccgaccagaagcacatgaggaaacggtttgtggac

SEQ ID NO: 786844 - DNA, 120 bp, Artificial Sequence
  ENSG00000261150_52 (sequence is synthesized)
ccgaacacgcaagagaaggtctcgtaccgagagctgcaggagaggtgccgcccacaagaggacacgggctggctgctgttcccagtgaacaaggctgcacgggactccgagcacatcgat

SEQ ID NO: 786845 - DNA, 120 bp, Artificial Sequence
  ENSG00000261150_53 (sequence is synthesized)
gacgagacgagaagggccctggaggcagagcaagtggaaatcacagtgggaaggttcagaggccagaaaccaacactgtgggcactactgaattccgaatacgtgacagaggagaagaag

SEQ ID NO: 786846 - DNA, 120 bp, Artificial Sequence
  ENSG00000261150_54 (sequence is synthesized)
ctccagctggtgaggatgtatagaacacacaccagacgggcactgcagacggtagcgcagctcatcttagagttgatcgagaagcaggaaaccagcaacaaacacctgtggttccaagga

SEQ ID NO: 786847 - DNA, 120 bp, Artificial Sequence
  ENSG00000261150_55 (sequence is synthesized)
attagacgacagatcacagcttctgaactcctcagctcagccataatcacggaggaaatgctccaggacctggaaacgggacggagcacgacgcaagagctcatggaggacgaccgcgtc

SEQ ID NO: 786848 - DNA, 120 bp, Artificial Sequence
  ENSG00000261150_56 (sequence is synthesized)
aagcgctacctggagggcaccagctgcatcgcgggcgtcctggtgcccgccaaggaccagcccggccgccaggagaagatgagcatctaccaggccatgtggaagggcgtgctgcggccc

SEQ ID NO: 786849 - DNA, 120 bp, Artificial Sequence
  ENSG00000261150_57 (sequence is synthesized)
ggcacggccctggtgctgctggaggcgcaggcggccaccggcttcgtcatcgaccccgtgcgcaacctgaggctgtcggtggaggaggccgtggccgcgggcgtggtgggcggcgagatc

SEQ ID NO: 786850 - DNA, 120 bp, Artificial Sequence
  ENSG00000261150_58 (sequence is synthesized)
caggagaagctgctgtcggccgagcgcgccgtcaccggctacaccgacccctacaccgggcagcagatctccctcttccaggccatgcagaaggacctcatcgtccgggagcacggcatc

SEQ ID NO: 786851 - DNA, 120 bp, Artificial Sequence
  ENSG00000261150_59 (sequence is synthesized)
ggaggcccagatcgccacgggcggcgtcatcgaccccgtgcacagccaccgcgtgcccgtggacgtggcctaccggcgcggctacttcgacgaggagatgaaccgtgtcctggccgaccc

SEQ ID NO: 786852 - DNA, 120 bp, Artificial Sequence
  ENSG00000261150_60 (sequence is synthesized)
gccgaccccagcgacgacaccaagggcttcttcgaccccaacacgcacgagaacctcacgtacgtgcagctgctgcgccgctgcgtgcccgacccggacaccgggctctacatgctgcag

SEQ ID NO: 786853 - DNA, 120 bp, Artificial Sequence
  ENSG00000261150_61 (sequence is synthesized)
ctggcaggccggggctccgccgtgcaccagctgagcgaggagctgcgctgtgccctgcgcgacgcccgcgtgacgccaggctcgggcgccctccagggccagagcgtctccgtctgggag

SEQ ID NO: 786854 - DNA, 120 bp, Artificial Sequence
  ENSG00000261150_62 (sequence is synthesized)
ctcctcttctaccgcgaggtgtccgaggaccggcgccaggacctgctgagcagataccgggcgggcacgctgaccgtggaggagctgggcgccaccctcacctcgctgctggcccaggcc

SEQ ID NO: 786855 - DNA, 120 bp, Artificial Sequence
  ENSG00000261150_63 (sequence is synthesized)
gagcccgcgcccagacccccgggaggccctgcgtgcggccaccatggaggtcaaggtgggccgcctccgggggcgcgcggtgcccgtgtgggacgtgctggcgtccggctacgtgagcag

SEQ ID NO: 786856 - DNA, 120 bp, Artificial Sequence
  ENSG00000261150_64 (sequence is synthesized)
tgggacgtgctggcgtccggctacgtgagcagggccgcccgggaggagctgctggccgagtttggctcggggaccctggacttgcccgcgctgacccgccggctgaccgccatcatcgag

SEQ ID NO: 786857 - DNA, 80 bp, Artificial Sequence
  ENSG00000261150_65 (sequence is synthesized)
caggacgcctggcgcggcccgcgggagccagggccagccgggcgaggggacggcgactcggggcgctcccagcgagaggg

SEQ ID NO: 786858 - DNA, 120 bp, Artificial Sequence
  ENSG00000261150_66 (sequence is synthesized)
gccgccgcccgccgccaggagcagaccctgcgtgatgccaccatggaggtgcagcgcgggcagttccaggggcggccggtctccgtgtgggacgtcctcttctcctcgtacctgagcgag

SEQ ID NO: 786859 - DNA, 120 bp, Artificial Sequence
  ENSG00000261150_67 (sequence is synthesized)
gcccgccgagacgagctcctggcccagcacgcggccggcgccctgggcctgcccgacctcgtcgccgtcctcacccgggtcatcgaggagaccgaggagcggctcagcaaggtgtccttc

SEQ ID NO: 786860 - DNA, 120 bp, Artificial Sequence
  ENSG00000261150_68 (sequence is synthesized)
cgcggcctgaggcgccaggtgtccgcctccgagctgcacacgtccgggatcctgggccccgagaccctgcgggacctggcccagggcactaagacgctgcaggaggtgacggagatggac

SEQ ID NO: 786861 - DNA, 120 bp, Artificial Sequence
  ENSG00000261150_69 (sequence is synthesized)
tcggtcaagcgctacctggagggcaccagctgcatcgcgggcgtcctggtgcccgccaaggaccagcccggccgccaggagaagatgagcatctaccaggccatgtggaagggcgtgctg

SEQ ID NO: 786862 - DNA, 120 bp, Artificial Sequence
  ENSG00000261150_70 (sequence is synthesized)
cggcccggcacggccctggtgctgctggaggcgcaggcggccaccggcttcgtcatcgaccccgtgcgcaacctgaggctgtcggtggaggaggccgtggccgcgggcgtggtgggcggc

SEQ ID NO: 786863 - DNA, 120 bp, Artificial Sequence
  ENSG00000261150_71 (sequence is synthesized)
gagatccaggagaagctgctgtcggccgagcgcgccgtcaccggctacaccgacccctacaccgggcagcagatctccctcttccaggccatgcagaaggacctcatcgtccgggagcac

SEQ ID NO: 786864 - DNA, 120 bp, Artificial Sequence
  ENSG00000261150_72 (sequence is synthesized)
ctggaggcccagatcgccacgggcggcgtcatcgaccccgtgcacagccaccgcgtgcccgtggacgtggcctaccagcgcggctacttcgacgaggagatgaaccgtgtcctggccgac

SEQ ID NO: 786865 - DNA, 120 bp, Artificial Sequence
  ENSG00000261150_73 (sequence is synthesized)
gtcctggccgaccccagcgacgacaccaagggcttcttcgaccccaacacgcacgagaacctcacgtacgtgcagctgctgcgccgctgcgtgcccgacccggacaccgggctctacatg

SEQ ID NO: 786866 - DNA, 120 bp, Artificial Sequence
  ENSG00000261150_74 (sequence is synthesized)
ctgcagctggcaggccggggctccgccgtgcaccagctgagcgaggagctgcgctgtgccctgcgcgacgcccgcgtgacgccaggctcgggcgccctccagggccagagcgtctccgtc

SEQ ID NO: 786867 - DNA, 120 bp, Artificial Sequence
  ENSG00000261150_75 (sequence is synthesized)
tgggagctcctcttctaccgcgaggtgtccgaggaccggcgccaggacctgctgagcagataccgggcgggcacgctgaccgtggaagagctgggcgccaccctcacctcgctgctggcc

SEQ ID NO: 786868 - DNA, 80 bp, Artificial Sequence
  ENSG00000261150_76 (sequence is synthesized)
ccagacccccgggaggccctgcgtgcggccaccatggaggtcaaggtgggccgcctccgggggcgcgcggtgcccgtgtg

SEQ ID NO: 786869 - DNA, 120 bp, Artificial Sequence
  ENSG00000261150_77 (sequence is synthesized)
cccgtgtgggacgtgctggcgtccggctacgtgagcagggccgcccgggaggagctgctggccgagtttggctcggggaccctggacttgcccgcgctgacccgccggctgaccgccatc

SEQ ID NO: 786870 - DNA, 80 bp, Artificial Sequence
  ENSG00000261150_78 (sequence is synthesized)
tccaggacgcctggcgcggcccgcgggagccagggccagccgggcgaggggacggcgactcggggcgctcccagcgagag

SEQ ID NO: 786871 - DNA, 120 bp, Artificial Sequence
  ENSG00000261150_79 (sequence is synthesized)
ggccagggggagggcgagacccaggaggccgccgccgccgcccgccgccaggagcagaccctgcgtgatgccaccatggaggtgcagcgcgggcagttccaggggcggccggtctccgtg

SEQ ID NO: 786872 - DNA, 120 bp, Artificial Sequence
  ENSG00000261150_80 (sequence is synthesized)
tgggacgtcctcttctcctcgtacctgagcgaggcccgccgagacgagctcctggcccagcacgcggccggcgccctgggcctgcccgacctcgtcgccgtcctcacccgggtcatcgag

SEQ ID NO: 786873 - DNA, 120 bp, Artificial Sequence
  ENSG00000261150_81 (sequence is synthesized)
gagacggaggagcggctcagcaaggtgtccttccgcggcctgaggtgccaggtgtccgcctccgagctgcacacgtccgggatcctgggccccgagaccctgcgggacctggcccagggc

SEQ ID NO: 786874 - DNA, 120 bp, Artificial Sequence
  ENSG00000261150_82 (sequence is synthesized)
actaagacgctgcaggaggtgacggagatggactcggtcaagcgctacctggagggcaccagctgcatcgcgggcgtcctggtgcccgccaaggaccagcccggccgccaggagaagatg

SEQ ID NO: 786875 - DNA, 120 bp, Artificial Sequence
  ENSG00000261150_83 (sequence is synthesized)
agcatctaccaggccatgtggaagggcgtgctgcggcccggcacggccctggtgctgctggaggcgcaggcggccaccggcttcgtcatcgaccccgtgcgcaacctgaggctgtcggtg

SEQ ID NO: 786876 - DNA, 120 bp, Artificial Sequence
  ENSG00000261150_84 (sequence is synthesized)
gaggaggccgtggccgcgggcgtggtgggcggcgagatccaggagaagctgctgtcggccgagcgcgccgtcaccggctacaccgacccctacaccgggcagcagatctccctcttccag

SEQ ID NO: 786877 - DNA, 87 bp, Artificial Sequence
  ENSG00000261150_85 (sequence is synthesized)
tcatcgaccccgtgcacagccaccgcgtgcccgtggacgtggcctaccggcgcggctacttcgacgaggagatgaaccgtgtcctgg

SEQ ID NO: 786878 - DNA, 120 bp, Artificial Sequence
  ENSG00000261150_86 (sequence is synthesized)
cggcgcggctacttcgacgaggagatgaaccgtgtcctggccgaccccagcgacgacaccaagggcttcttcgaccccaacacgcacgagaacctcacgtacgtgcagctgctgcgccgc

SEQ ID NO: 786879 - DNA, 120 bp, Artificial Sequence
  ENSG00000261150_87 (sequence is synthesized)
tgcgtgcccgacccggacaccgggctctacatgctgcagctggcaggccggggctccgccgtgcaccagctgagcgaggagctgcgctgtgccctgcgcgacgcccgcgtgacgccaggc

SEQ ID NO: 786880 - DNA, 120 bp, Artificial Sequence
  ENSG00000261150_88 (sequence is synthesized)
tcgggcgccctccagggccagagcgtctccgtctgggagctcctcttctaccgcgaggtgtccgaggaccggcgccaggacctgctgagcagataccgggcgggcacgctgaccgtggag

SEQ ID NO: 786881 - DNA, 80 bp, Artificial Sequence
  ENSG00000261150_89 (sequence is synthesized)
ccgtggaggagctgggcgccaccctcacctcgctgctggcccaggcccaggcccaggcccgggccgaggccgaggccggg

SEQ ID NO: 786882 - DNA, 120 bp, Artificial Sequence
  ENSG00000261150_90 (sequence is synthesized)
gtcaaggtgggccgcctccgggggcgcgcggtgcccgtgtgggacgtgctggcgtccggctacgtgagcagggccgcccgggaggagctgctggccgagtttggctcggggaccctggac

SEQ ID NO: 786883 - DNA, 120 bp, Artificial Sequence
  ENSG00000261150_91 (sequence is synthesized)
gagtttggctcggggaccctggacttgcccgcgctgacccgccggctgaccgccatcatcgaggaggccgaggaggcccccggggcccggccgcagctccaggacgcctggcgcggcccg

SEQ ID NO: 786884 - DNA, 120 bp, Artificial Sequence
  ENSG00000261150_92 (sequence is synthesized)
ctcccagcgagagggccagggggagggcgagacccaggaggccgccgccgccaccgccgccgcccgccgccaggagcagaccctgcgtgatgccaccatggaggtgcagcgcgggcagtt

SEQ ID NO: 786885 - DNA, 120 bp, Artificial Sequence
  ENSG00000261150_93 (sequence is synthesized)
gaggtgcagcgcgggcagttccaggggcggccggtctccgtgtgggacgtcctcttctcctcgtacctgagcgaggcccgccgagacgagctcctggcccagcacgcggccggcgccctg

SEQ ID NO: 786886 - DNA, 120 bp, Artificial Sequence
  ENSG00000261150_94 (sequence is synthesized)
ggcctgcccgacctcgtcgccgtcctcacccgggtcatcgaggagacggaggagcggctcagcaaggtgtccttccgcggcctgaggcgccaggtgtccgcctccgagctgcacacgtcc

SEQ ID NO: 786887 - DNA, 120 bp, Artificial Sequence
  ENSG00000261150_95 (sequence is synthesized)
gggatcctgggccccgagaccctgcgggacctggcccagggcactaagacgctgcaggaggtgacggagatggactcggtcaagcgctacctggagggcaccagctgcatcgcgggcgtc

SEQ ID NO: 786888 - DNA, 120 bp, Artificial Sequence
  ENSG00000261150_96 (sequence is synthesized)
ctggtgcccgccaaggaccagcccggccgccaggagaagatgagcatctaccaggccatgtggaagggcgtgctgcggcccggcacggccctggtgctgctggaggcgcaggcggccacc

SEQ ID NO: 786889 - DNA, 120 bp, Artificial Sequence
  ENSG00000261150_97 (sequence is synthesized)
ggcttcgtcatcgaccccgtgcgcaacctgaggctgtcggtggaggaggccgtggccgcgggcgtggtgggcggcgagatccaggagaagctgctgtcggccgagcgcgccgtcaccggc

SEQ ID NO: 786890 - DNA, 120 bp, Artificial Sequence
  ENSG00000261150_98 (sequence is synthesized)
ccgagcgcgccgtcaccggctacaccgacccctacaccgggcagcagatctccctcttccaggccatgcagaaggacctcatcgtccgggagcacggcatccgcctgctggaggcccaga

SEQ ID NO: 786891 - DNA, 120 bp, Artificial Sequence
  ENSG00000261150_99 (sequence is synthesized)
gaccccgtgcacagccaccgcgtgcccgtggacgtggcctaccggcgcggctacttcgacgaggagatgaaccgtgtcctggccgaccccagcgacgacaccaagggcttcttcgacccc

SEQ ID NO: 786892 - DNA, 120 bp, Artificial Sequence
  ENSG00000261150_100 (sequence is synthesized)
aacacgcacgagaacctcacgtacgtgcagctgctgcgccgctgcgtgcccgacccggacaccgggctctacatgctgcagctggcaggccggggctccgccgtgcaccagctgagcgag

SEQ ID NO: 786893 - DNA, 120 bp, Artificial Sequence
  ENSG00000261150_101 (sequence is synthesized)
gagctgcgctgtgccctgcgcgacgcccgcgtgacgccaggctcgggcgccctccagggccagagcgtctccgtctgggagctcctcttctaccgcgaggtgtccgaggaccggcgccag

SEQ ID NO: 786894 - DNA, 120 bp, Artificial Sequence
  ENSG00000261150_102 (sequence is synthesized)
gacctgctgagcagataccgggcgggcacgctgaccgtggaggagctgggcgccaccctcacctcgctgctggcccaggcccaggcccaggcccgggccgaggccgaggccgggagcccg

SEQ ID NO: 786895 - DNA, 120 bp, Artificial Sequence
  ENSG00000261150_103 (sequence is synthesized)
cgggaggccctgcgtgcggccaccatggaggtcaaggtgggccgcctccgggggcgcgcggtgcccgtgtgggacgtgctggcgtccggctacgtgagcagggccgcccgggaggagctg

SEQ ID NO: 786896 - DNA, 120 bp, Artificial Sequence
  ENSG00000261150_104 (sequence is synthesized)
cgggaggagctgctggccgagtttggctcggggaccctggacttgcccgcgctgacccgccggctgaccgccatcatcgaggaggccgaggaggcccccggggcccggccgcagctccag

SEQ ID NO: 786897 - DNA, 80 bp, Artificial Sequence
  ENSG00000261150_105 (sequence is synthesized)
gaggggacggcgactcggggcgctcccagcgagagggccagggggagggcgagacccaggaggccgccgccgccaccgcc

SEQ ID NO: 786898 - DNA, 120 bp, Artificial Sequence
  ENSG00000261150_106 (sequence is synthesized)
gccgcccgccgccaggagcagaccctgcgtgatgccaccatggaggtgcagcgcgggcagttccaggggcggccggtctccgtgtgggacgtcctcttctcctcgtacctgagcgaggcc

SEQ ID NO: 786899 - DNA, 120 bp, Artificial Sequence
  ENSG00000261150_107 (sequence is synthesized)
cgccgagacgagctcctggcccagcacgcggccggcgccctgggcctgcccgacctcgtcgccgtcctcacccgggtcatcgaggagacggaggagcggctcagcaaggtgtccttccgc

SEQ ID NO: 786900 - DNA, 120 bp, Artificial Sequence
  ENSG00000261150_108 (sequence is synthesized)
ggcctgaggcgccaggtgtccgcctccgagctgcacacgtccgggatcctgggccccgagaccctgcgggacctggcccagggcactaagacgctgcaggaggtgacggagatggactcg

SEQ ID NO: 786901 - DNA, 120 bp, Artificial Sequence
  ENSG00000261150_109 (sequence is synthesized)
gtcaagcgctacctggagggcaccagctgcatcgcgggcgtcctggtgcccgccaaggaccagcccggccaccaggagaagatgagcatctaccaggccatgtggaagggcgtgctgcgg

SEQ ID NO: 786902 - DNA, 120 bp, Artificial Sequence
  ENSG00000261150_110 (sequence is synthesized)
cccggcacggccctggtgctgctggaggcgcaggcggccaccggcttcgtcatcgaccccgtgcgcaacctgaggctgtcggtggaggaggccgtggccgcgggcgtggtgggcggcgag

SEQ ID NO: 786903 - DNA, 120 bp, Artificial Sequence
  ENSG00000261150_111 (sequence is synthesized)
atccaggagaagctgctgtcggccgagcgcgccgtcaccggctacaccgacccctacaccgggcagcagatctccctcttccaggccatgcagaaggacctcatcgtccgggagcacggc

SEQ ID NO: 786904 - DNA, 120 bp, Artificial Sequence
  ENSG00000261150_112 (sequence is synthesized)
gctggaggcccagatcgccacgggcggcgtcatcgaccccgtgcacagccaccgcgtgcccgtggacgtggcctaccggcgcggctacttcgacgaggagatgaaccgtgtcctggccca

SEQ ID NO: 786905 - DNA, 120 bp, Artificial Sequence
  ENSG00000261150_113 (sequence is synthesized)
ctggcccaccccagcgacgacaccaagggcttcttcgaccccaacacgcacgagaacctcacgtacgtgcagctgctgcgccgctgcgtgcccgacccggacaccgggctctacatgctg

SEQ ID NO: 786906 - DNA, 120 bp, Artificial Sequence
  ENSG00000261150_114 (sequence is synthesized)
cagctggcaggccggggctccgccgtgcaccagctgagcgaggagctgcgctgtgccctgcgcgacgcccgcgtgatgccaggctcgggcgccctccagggccagagcgtctccgtctgg

SEQ ID NO: 786907 - DNA, 120 bp, Artificial Sequence
  ENSG00000261150_115 (sequence is synthesized)
gagctcctcttctaccgcgaggtgtccgaggaccggcgccaggacctgctgagcagataccgggcgggcacgctgaccgtggaggagctgggcgccaccctcacctcgctgctggcccag

SEQ ID NO: 786908 - DNA, 80 bp, Artificial Sequence
  ENSG00000261150_116 (sequence is synthesized)
ggagcccgcgcccagacccccgggaggccctgcgtgcggccaccatggaggtcaaggtgggccgcctccgggggcgcgcg

SEQ ID NO: 786909 - DNA, 120 bp, Artificial Sequence
  ENSG00000261150_117 (sequence is synthesized)
gtgcccgtgtgggacgtgctggcgtccggctacgtgagcggggccgcccgggaggagctgctggccgagtttggctcggggaccctggacttgcccgcgctgacccgccggctgaccgcc

SEQ ID NO: 786910 - DNA, 80 bp, Artificial Sequence
  ENSG00000261150_118 (sequence is synthesized)
cgccatcatcgaggaggccgaggaggcccccggggcccggccgcagctccaggacgcctggcgcggcccgcgggagccag

SEQ ID NO: 786911 - DNA, 120 bp, Artificial Sequence
  ENSG00000261150_119 (sequence is synthesized)
gagggccagggggagggcgagacccaggaggccgccgccgccgcccgccgccaggagcagaccctgcgtgatgccaccatggaggtgcagcgcgggcagttccaggggcggccggtctcc

SEQ ID NO: 786912 - DNA, 120 bp, Artificial Sequence
  ENSG00000261150_120 (sequence is synthesized)
gtgtgggacgtcctcttctcctcgtacctgagcgaggcccaccgagacgagctcctggcccagcacgcggccggcgccctgggcctgcccgacctcgtcgccgtcctcacccgggtcatc

SEQ ID NO: 786913 - DNA, 120 bp, Artificial Sequence
  ENSG00000261150_121 (sequence is synthesized)
gaggagacggaggagcggctcagcaaggtgtccttccgcggcctgaggcgccaggtgtccgcctccgagctgcacacgtccgggatcctgggccccgagaccctgcgggacctggcccag

SEQ ID NO: 786914 - DNA, 120 bp, Artificial Sequence
  ENSG00000261150_122 (sequence is synthesized)
ggcactaagacgctgcaggaggtgacggagatggactcggtcaagcgctacctggagggcaccagctgcatcgcgggcgtcctggtgcccgccaaggaccagcccggccgccaggagaag

SEQ ID NO: 786915 - DNA, 120 bp, Artificial Sequence
  ENSG00000261150_123 (sequence is synthesized)
atgagcatctaccaggccatgtggaagggcgtgctgcggcccggcacggccctggtgctgctggaggcgcaggcggccaccggcttcgtcatcgaccccgtgcgcaacctgaggctgtcg

SEQ ID NO: 786916 - DNA, 120 bp, Artificial Sequence
  ENSG00000261150_124 (sequence is synthesized)
gtggaggaggccgtggccgcgggcgtggtgggcggcgagatccaggagaagctgctgtcggccgagcgcgccgtcaccggctacaccgacccctacaccgggcagcagatctccctcttc

SEQ ID NO: 786917 - DNA, 84 bp, Artificial Sequence
  ENSG00000261150_125 (sequence is synthesized)
tcatcgaccccgtgcacagccaccgcgtgcccgtggacgtggcctaccggcgcggctacttcgacgaggagatgaaccgcgtcc

SEQ ID NO: 786918 - DNA, 120 bp, Artificial Sequence
  ENSG00000261150_126 (sequence is synthesized)
taccggcgcggctacttcgacgaggagatgaaccgcgtcctggccgaccccagcgacgacaccaagggcttcttcgaccccaacacgcacgagaacctcacgtacctgcagcttctgcag

SEQ ID NO: 786919 - DNA, 120 bp, Artificial Sequence
  ENSG00000261150_127 (sequence is synthesized)
agggccaccctggaccctgagacggggctcctatttctttctctctctctacagtgactgggcttcctccgtgcagttttctgcaactctggagaagtggaggcatacttgtgtgtctgg

SEQ ID NO: 786920 - DNA, 120 bp, Artificial Sequence
  ENSG00000261150_128 (sequence is synthesized)
tttttttttttttttgtcattctttaattttgttgttttacccattcgttatctgtggaaaacgttttaagttgtcatgtgacagaaacttttcctttgtccatcgaggtgtttcataag

SEQ ID NO: 786921 - DNA, 120 bp, Artificial Sequence
  ENSG00000261150_129 (sequence is synthesized)
gtgtttcataagttttttggtgtgttttctgggtcgtctatgtgtcatatggttttacttttctctcctttttcgttttcagaacatttttctgtctgttttggattcactgcttccatt

SEQ ID NO: 786922 - DNA, 120 bp, Artificial Sequence
  ENSG00000261150_130 (sequence is synthesized)
ttacagaatgtcactctttagactctcagtccatcatgccatcgggtactcttgttgcagtgtaatttttattacatgcggttatttccctaacgatgtgctattcacgttcatcttcaa

SEQ ID NO: 786923 - DNA, 120 bp, Artificial Sequence
  ENSG00000261150_131 (sequence is synthesized)
actcattttccatcagccagtgtctactatttagtgccctggctctatttcggtcctcctccccgggctttccctggctgctgtgctggccaaaagcatgggctttattctctccattgg

SEQ ID NO: 786924 - DNA, 120 bp, Artificial Sequence
  ENSG00000261150_132 (sequence is synthesized)
ctgctgctccaccttagaggtgtgacctcactagcgttgactgagcgagtctgttgtggagaagaactttttgtagtaatttactaggaaaaattctgaacaagtaaaatatgaaggaaa

SEQ ID NO: 786925 - DNA, 120 bp, Artificial Sequence
  ENSG00000261210_0 (sequence is synthesized)
agtctgtcccagctcctgccaggctccatctgaccctaggagagcaatcctggacccaagctccagccaaaaagcctctctcctccactcaggctgggaggttgctttctaggagctcag

SEQ ID NO: 786926 - DNA, 120 bp, Artificial Sequence
  ENSG00000261210_1 (sequence is synthesized)
gatgcaaaggtggacactgtgggctgcagccttcctgaccctccactctgcacaggcctttccacaaacagacatcagtatcagtccagccctgccagagctgcccctgccttccctgtg

SEQ ID NO: 786927 - DNA, 120 bp, Artificial Sequence
  ENSG00000261210_2 (sequence is synthesized)
ccccctgttctggatggagttcaaaggccactgctatcgattcttccctctcaataagacctgggctgaggccgacctctactgttctgagttctctgtgggcaggaagtccgccaagct

SEQ ID NO: 786928 - DNA, 120 bp, Artificial Sequence
  ENSG00000261210_3 (sequence is synthesized)
ggcctccatccacagctgggaggagaatgtctttgtatatgacctcgtgaacagctgtgttcccggcatcccagctgacgtctggacaggccttcatgatcacagacaggaagggcagtt

SEQ ID NO: 786929 - DNA, 120 bp, Artificial Sequence
  ENSG00000261210_4 (sequence is synthesized)
tgaatggactgatggctcatcctatgactacagctactgggatggcagccagccagatgatggcgtccacgcggacccagaagaagaggactgcgtgcagatatggtacaggcctaccag

SEQ ID NO: 786930 - DNA, 120 bp, Artificial Sequence
  ENSG00000261210_5 (sequence is synthesized)
tgctctgaggtcatggaatgataacacctgcagccggaagttcccctttgtctgcaaaatcccatctctgaccattcattgatcctgtcttgtcctactggtgtgagctcaactctagta

SEQ ID NO: 786931 - DNA, 120 bp, Artificial Sequence
  ENSG00000261210_6 (sequence is synthesized)
tcatcttgtagctgtaaccagtgtagaattgacattgaatacatgtaaaacatacataggaagtaaatctcttggacagagattttaaacaagcagatcttaattatacagggtggtcac

SEQ ID NO: 786932 - DNA, 120 bp, Artificial Sequence
  ENSG00000261210_7 (sequence is synthesized)
ttggccaagtgtcaggaaagccagctcaaattggcttaattttttaaagtgtttttttttttaaattgacccaagtaacaaaaatccaggggttgttctgattcagagttgaatctcact

SEQ ID NO: 786933 - DNA, 120 bp, Artificial Sequence
  ENSG00000261210_8 (sequence is synthesized)
ggcctggctcgggtcacgtgcccatccctgaagcaatcactttggcatatgctaagtggctagctcctgcttagctgtacatctttggacaaaatggggtggaagtcacattatcagagg

SEQ ID NO: 786934 - DNA, 120 bp, Artificial Sequence
  ENSG00000261210_9 (sequence is synthesized)
cgctgggagtgggggaaaatgcgggggggtgttggtcaaagcatacaaacttttggaaataagattaataagtttgggaggcttaatgtacagcgtgatgactatagttaataataatgt

SEQ ID NO: 786935 - DNA, 70 bp, Artificial Sequence
  ENSG00000261210_10 (sequence is synthesized)
caggctgaagtgcaatgtccacctccagtccccagagtaggtgggactacaggacgctacaggcgcatgc

SEQ ID NO: 786936 - DNA, 120 bp, Artificial Sequence
  ENSG00000261210_11 (sequence is synthesized)
cccagagtaggtgggactacaggacgctacaggcgcatgccaccacatctagctaacttttgtatttttttttttaaatagagacgaggtttcatcatgtcatccaagctggtttcgaac

SEQ ID NO: 786937 - DNA, 85 bp, Artificial Sequence
  ENSG00000261210_12 (sequence is synthesized)
caagaatacatcttaaatattcccgtcaacacatgggctcaaagatgaggctggttcttcaaaggaaaacaaaaagattaccaaa

SEQ ID NO: 786938 - DNA, 120 bp, Artificial Sequence
  ENSG00000261210_13 (sequence is synthesized)
tgaggctggttcttcaaaggaaaacaaaaagattaccaaactcataaattgctggtgggaatgtaaaatagtgaagccactgtggaaaagtttggcagttcctcaaaaagttaaacatag

SEQ ID NO: 786939 - DNA, 120 bp, Artificial Sequence
  ENSG00000261210_14 (sequence is synthesized)
aaaaagttaaacatagaattacatctaagccagcaattccactcctagatctcgacctaagagaatcggaaacaggtatttaaatataagtggtcggccaggtgtagtggctcatgcctg

SEQ ID NO: 786940 - DNA, 89 bp, Artificial Sequence
  ENSG00000261210_15 (sequence is synthesized)
agatcataagaaaaattttttaattagccaagcatggtgatgcacatctgtagtcccagctgtttgggaggctgagatgggaggatcac

SEQ ID NO: 786941 - DNA, 80 bp, Artificial Sequence
  ENSG00000261210_16 (sequence is synthesized)
tgatgcacatctgtagtcccagcttatcaaggctgcaatggaccatgattgtgcttctgcactccagcctgggtgacaga

SEQ ID NO: 786942 - DNA, 120 bp, Artificial Sequence
  ENSG00000261210_17 (sequence is synthesized)
ctcaaaaaacaaaaacaaaaaaatgtgatcacagcagcattattgataaaaaccacaaaaaaaatgaagacaacccaagtgctcaccaacagatgaatgactaaacaaatgtggtctatt

SEQ ID NO: 786943 - DNA, 120 bp, Artificial Sequence
  ENSG00000261210_18 (sequence is synthesized)
catagggtggaatattattcaagcataaaaaggaatgaagtaacgatagatactacaacctgaatgaacctgaaaaacattatgcttccagtcacaaaagaccacatgttgtatgattcc

SEQ ID NO: 786944 - DNA, 120 bp, Artificial Sequence
  ENSG00000261210_19 (sequence is synthesized)
atatatatgaaatatccagaataggcaagtctatagagatggaaagtggattagtggttgccaggggatgtgtggagggggaatagaaagtgagtgctaataggtatgggattactttgt

SEQ ID NO: 786945 - DNA, 120 bp, Artificial Sequence
  ENSG00000261210_20 (sequence is synthesized)
gaggtgacaaaaattatctgcaattagatagtggtaatggctgcacaatattgtaaatgtacaagaagccactgaactgtacattttaaaataatagttaaaatgataaattttacatta

SEQ ID NO: 786946 - DNA, 120 bp, Artificial Sequence
  ENSG00000261210_21 (sequence is synthesized)
agatcacagcacagtgctgagaaagtcttggctaggccaatggggagtccccaaggaaagatgcccaagactggaatcctgcactgggcagaatcctgcaccagcaccattacccctgac

SEQ ID NO: 786947 - DNA, 120 bp, Artificial Sequence
  ENSG00000261210_22 (sequence is synthesized)
atgctgagtcactggctaggaacagcctggaggaagcattgtctcactgtgaatgcagtggcagctccaaagaggcagaggcatgtgcttatcacagacaaggcagtgaatccaaggcgg

SEQ ID NO: 786948 - DNA, 120 bp, Artificial Sequence
  ENSG00000261210_23 (sequence is synthesized)
tcaagcctgccagccttcagactggaactacaccagcagctctcctggatctcaggccttcatattcaggcaggaaatataccatcagctctcctgggtctccagcttgcccatccaccc

SEQ ID NO: 786949 - DNA, 120 bp, Artificial Sequence
  ENSG00000261210_24 (sequence is synthesized)
aaagcagtggccattgggcccccttggaagctccagccaggattctattttgatttaataagcttttcacatcagtgccaggtcacggctatgcacacagcatatagagagaaatcagac

SEQ ID NO: 786950 - DNA, 120 bp, Artificial Sequence
  ENSG00000261210_25 (sequence is synthesized)
accaagatgtcacagttacagcatgaccaatttgtgaaagacatttaatgatgtcctactaaatgatgggaacagatagcatggtcagagaaaacctgtttggcttgggttctcttaaaa

SEQ ID NO: 786951 - DNA, 120 bp, Artificial Sequence
  ENSG00000261221_0 (sequence is synthesized)
aagaggcgggcattcaaagcgcaggcgcacctggctcagttcgcccaccggaatcggcccgggctttcactgctcgcgtccccgagtcagtgcgcaagcgcatttcccccctcctggtcc

SEQ ID NO: 786952 - DNA, 120 bp, Artificial Sequence
  ENSG00000261221_1 (sequence is synthesized)
catttcccccctcctggtccccgccaccgcctcctctttccgatcctccacgccggcgcctcgggaacgggcgcgacttccgcttccgggcgggcgggcaggcgggcggtgcggggctgc

SEQ ID NO: 786953 - DNA, 120 bp, Artificial Sequence
  ENSG00000261221_2 (sequence is synthesized)
gcacttccggtcgggccctcgggtctccccggagcggcggcgcctcctccgcctcctcggcctcctcccggcggagaccccggcgccgggtctcccgtctcccacccgccggagatggag

SEQ ID NO: 786954 - DNA, 120 bp, Artificial Sequence
  ENSG00000261221_3 (sequence is synthesized)
gcgaacccagcgggcagcggcgccgggggtggcgggagcagcggcatcgggggcgaggacggggtgcacttccagagctaccccttcgacttcctggaattcctcaaccaccagcgcttc

SEQ ID NO: 786955 - DNA, 120 bp, Artificial Sequence
  ENSG00000261221_4 (sequence is synthesized)
gagcccatggaactgtatggggaacacgccaaggcggtggcggccctgccctgcgcccccggccccccgccgcagcccccgccgcagccccctcccccgcagtatgactacccgccccag

SEQ ID NO: 786956 - DNA, 120 bp, Artificial Sequence
  ENSG00000261221_5 (sequence is synthesized)
tccaccttcaagcccaaggcggaggtgccctcctcgtcctcgtcctcgtcctcctcctcctcctcttcgtcctcctcgtcgtcatcttcgtcctcttcctcttcccaagccaagaagccc

SEQ ID NO: 786957 - DNA, 120 bp, Artificial Sequence
  ENSG00000261221_6 (sequence is synthesized)
gatccgcccctgccgcccgccttcggggcgccccctcctcccctctttgacgctgctttccccactccgcagtggggcatcgtggacctctcggggcaccagcacttgtttgggaacctg

SEQ ID NO: 786958 - DNA, 120 bp, Artificial Sequence
  ENSG00000261221_7 (sequence is synthesized)
caccagcacttgtttgggaacctgaagcgaggagggcccgcgtccgggccgggggtgacgcctgggctgggcgctcccgcgggggccccagggccgcttcctgccccctcgcagaccccg

SEQ ID NO: 786959 - DNA, 120 bp, Artificial Sequence
  ENSG00000261221_8 (sequence is synthesized)
tgcgaccccaccaaggacgacaagggctacttccggagactgaagtacctgatggagcggcgcttcccctgcggcgtgtgccagaagtccttcaagcagtcctcgcacctggtccagcac

SEQ ID NO: 786960 - DNA, 120 bp, Artificial Sequence
  ENSG00000261221_9 (sequence is synthesized)
atgctggtgcactcgggggagaggccctacgaatgcggcgtctgcggccgcacctacaaccacgtgtccagcctcatccgccaccgccgctgccacaaggacgtgccaccggccgcgggg

SEQ ID NO: 786961 - DNA, 80 bp, Artificial Sequence
  ENSG00000261221_10 (sequence is synthesized)
ccaccgccgccgccccctccacggtgtcctcgggccctccagccacgcccgtggcgcctgccccctccgcagacgggagc

SEQ ID NO: 786962 - DNA, 120 bp, Artificial Sequence
  ENSG00000261221_11 (sequence is synthesized)
cctgccccctccgcagacgggagcgccgcccctgctggtgttggggtgccccctcctgccaccgggggtggcgatggcccgttcgcctgcccactctgctggaaggttttcaagaagccc

SEQ ID NO: 786963 - DNA, 120 bp, Artificial Sequence
  ENSG00000261221_12 (sequence is synthesized)
agtcacctccaccagcaccagatcatccacacgggcgagaagcccttctcctgctccgtgtgcagcaaaagcttcaaccgcagggagagtctgaagcgccacgtgaagacgcactcggcc

SEQ ID NO: 786964 - DNA, 120 bp, Artificial Sequence
  ENSG00000261221_13 (sequence is synthesized)
gacctcctgcgcctgccctgcggcatctgcgggaaggccttccgcgacgcctcctacctcctcaagcaccaggcggcccacgcgggggcgggcgccggggggcctcggcccgtgtacccc

SEQ ID NO: 786965 - DNA, 120 bp, Artificial Sequence
  ENSG00000261221_14 (sequence is synthesized)
tgtacccctgcgacctgtgcggcaagtcctactcggctccgcagagcctgctccgccacaaggccgcccacgccccgcccgctgccgctgcggaggcgcccaaggacggggcggcctcgg

SEQ ID NO: 786966 - DNA, 120 bp, Artificial Sequence
  ENSG00000261221_15 (sequence is synthesized)
cgcccaccttccccccgggcccgtacctcctgccccccgaccctcccaccacagacagcgagaaggcggcggcggccgcggcggcggtggtgtacggcgctgtgcccgtcccgctcctgg

SEQ ID NO: 786967 - DNA, 120 bp, Artificial Sequence
  ENSG00000261221_16 (sequence is synthesized)
gcgggaggctcgggcgccagcgtcccaggaaagacgttctgctgcggcatctgcgggcgcggcttcgggcgccgcgagaccctgaagcgccatgagcgcatccacacgggcgagaagccc

SEQ ID NO: 786968 - DNA, 120 bp, Artificial Sequence
  ENSG00000261221_17 (sequence is synthesized)
caccagtgccccgtgtgtgggaagcgcttccgcgaatccttccacttgagcaagcatcacgtggtgcacacgcgcgagcggccctacaagtgcgagctctgcggcaaggtcttcggctac

SEQ ID NO: 786969 - DNA, 120 bp, Artificial Sequence
  ENSG00000261221_18 (sequence is synthesized)
gtcttcggctacccgcagagcctcacccgccaccgccaggtgcaccggctccagctgccctgcgccctggccggggcagccggcctcccctccacccaaggcacaccgggggcctgtggg

SEQ ID NO: 786970 - DNA, 120 bp, Artificial Sequence
  ENSG00000261221_19 (sequence is synthesized)
ggcacgtctgcagggcccaccgatgggctgagctacgcctgctcggactgcggcgagcacttcccggatctctttcacgtcatgagtcacaaggaggtccacatggcagagaagccatac

SEQ ID NO: 786971 - DNA, 120 bp, Artificial Sequence
  ENSG00000261221_20 (sequence is synthesized)
ggctgcgacgcctgcggcaagaccttcggcttcatcgagaacctcatgtggcacaagctggtccaccaggccgcccccgagcgcctgctcccgcccgcacccggcggcctgcagcccccg

SEQ ID NO: 786972 - DNA, 80 bp, Artificial Sequence
  ENSG00000261221_21 (sequence is synthesized)
gacggctccagcggcacggatgcggccagcgtgctggacaacgggctggcgggggaggtgggggcggccgtggcggcact

SEQ ID NO: 786973 - DNA, 120 bp, Artificial Sequence
  ENSG00000261221_22 (sequence is synthesized)
gtggcaggtgctggcgggggtgccagttccggccccgagcgcttcagctgtgccacgtgcggccagagtttcaagcacttcctgggcctcgtgactcacaagtacgtgcacctggtgcga

SEQ ID NO: 786974 - DNA, 120 bp, Artificial Sequence
  ENSG00000261221_23 (sequence is synthesized)
cggaccctgggctgcggcctctgcggccagagcttcgcgggcgcctacgacttgctcctacaccgccgcagccatcggcagaagcggggtttccgctgcccggtgtgcgggaagcgcttc

SEQ ID NO: 786975 - DNA, 120 bp, Artificial Sequence
  ENSG00000261221_24 (sequence is synthesized)
tgggaggcggccctgctgatgcgccaccagcgctgccacacggaacagcggccgtaccgatgtggcgtgtgcggccgaggcttcctgcgctcctggtacctgcggcagcaccgcgtggtg

SEQ ID NO: 786976 - DNA, 120 bp, Artificial Sequence
  ENSG00000261221_25 (sequence is synthesized)
cacactggcgagcgggccttcaagtgcggcgtgtgcgccaagcgcttcgcgcagtcgtccagcctggcagagcaccggcggctgcacgctgtggcccggccccagcgctgcagcgcctgt

SEQ ID NO: 786977 - DNA, 120 bp, Artificial Sequence
  ENSG00000261221_26 (sequence is synthesized)
ggcaagaccttccgctaccgctccaacctgctggagcaccagcggctgcacctgggcgagcgcgcctaccgctgtgagcactgcggcaagggcttcttctacctgagctccgtgctgcgc

SEQ ID NO: 786978 - DNA, 120 bp, Artificial Sequence
  ENSG00000261221_27 (sequence is synthesized)
caccagcgcgcccatgagccgccgcggcccgagctccgctgccccgcctgcctcaaggccttcaaggatcccggctacttccgtaagcacctggctgcccaccagggcggccggcccttc

SEQ ID NO: 786979 - DNA, 120 bp, Artificial Sequence
  ENSG00000261221_28 (sequence is synthesized)
cgctgctcctcctgcggcgagggcttcgccaacacctacggcctcaagaaacaccgcctggcgcacaaggccgagaacctcggggggcctggagcaggggcgggcaccttggccgggaag

SEQ ID NO: 786980 - DNA, 120 bp, Artificial Sequence
  ENSG00000261221_29 (sequence is synthesized)
gatgcctgaccgaggggttcccatcccactcccatcaaaagcccccttctggactcccacctcccaggactgatcagactcttcccccctcctcgctgttgccccatccttcagaacttc

SEQ ID NO: 786981 - DNA, 120 bp, Artificial Sequence
  ENSG00000261221_30 (sequence is synthesized)
acacggactggcgaccttcagggcgcacgcccgacaggctcaagactgaatcactcccatcctcgacctctctgccctcccctcatcccatcagacactgaaccctatcctccgtccaac

SEQ ID NO: 786982 - DNA, 120 bp, Artificial Sequence
  ENSG00000261221_31 (sequence is synthesized)
cctcgtttgtgacccgcatcagcccccgccccagcagcactctgcccccagtaagttttggcggagatgggtctgaaccgcccctccccctcctttggaatctggctggacagtggagta

SEQ ID NO: 786983 - DNA, 120 bp, Artificial Sequence
  ENSG00000261221_32 (sequence is synthesized)
tgagcagagttgggagggcacaagggagtgctgggtgctttttggggtgggggggtggggggcggggtggcagacgcggcttgtacagagcggagaataataaatcttaccatgagggcc

SEQ ID NO: 786984 - DNA, 80 bp, Artificial Sequence
  ENSG00000261236_0 (sequence is synthesized)
ctcctgcgcacgcggcccggtcgctgtcggaagcggctgtgcgggtggcggccggcgcgcggtggggcatggcgggttcg

SEQ ID NO: 786985 - DNA, 120 bp, Artificial Sequence
  ENSG00000261236_1 (sequence is synthesized)
agaagcggcggtctgagcccgaactggagcctgagcccgagccggagccccccctcctctgcacctctcctctcagccacagcaccggcagcgattctggcgtctccgacagcgaggaaa

SEQ ID NO: 786986 - DNA, 120 bp, Artificial Sequence
  ENSG00000261236_2 (sequence is synthesized)
gtgtgttctcaggcctggaagattccggcagtgacagcagtgaggatgatgacgaaggcgacgaggagggagaggacggagcccttgatgacgagggccacagtgggattaaaaagacca

SEQ ID NO: 786987 - DNA, 120 bp, Artificial Sequence
  ENSG00000261236_3 (sequence is synthesized)
ctgaggagcaggtgcaggccagcactccttgcccgaggacagagatggcgagcgcccggattggggatgagtatgcggaggacagctctgatgaggaggacatccggaacacggtgggca

SEQ ID NO: 786988 - DNA, 120 bp, Artificial Sequence
  ENSG00000261236_4 (sequence is synthesized)
acgtgcccttggagtggtacgatgacttcccccacgtgggctacgacctggatggcaggcgcatctacaagcccctgcggacccgggatgagctggaccagttcctggacaagatggacg

SEQ ID NO: 786989 - DNA, 120 bp, Artificial Sequence
  ENSG00000261236_5 (sequence is synthesized)
atcctgactactggcgcaccgtgcaggacccgatgacagggcgggacctgagactgacggatgagcaggtggccctggtgcggcggctgcagagtggccagtttggggatgtgggcttca

SEQ ID NO: 786990 - DNA, 120 bp, Artificial Sequence
  ENSG00000261236_6 (sequence is synthesized)
acccctatgagccggctgtcgacttcttcagcggggacgtcatgatccacccggtgaccaaccgcccggccgacaagcgcagcttcatcccctccctggtggagaaggagaaggtctctc

SEQ ID NO: 786991 - DNA, 120 bp, Artificial Sequence
  ENSG00000261236_7 (sequence is synthesized)
gcatggtgcacgccatcaagatgggctggatccagcctcgccggccccgagaccccacccccagcttctatgacctgtgggcccaggaggaccccaacgccgtgctcgggcgccacaaga

SEQ ID NO: 786992 - DNA, 120 bp, Artificial Sequence
  ENSG00000261236_8 (sequence is synthesized)
tgcacgtacctgctcccaagctggccctgccaggccacgccgagtcgtacaacccaccccctgaatacctgctcagcgaggaggagcgcttggcgtgggaacagcaggagccaggcgaga

SEQ ID NO: 786993 - DNA, 120 bp, Artificial Sequence
  ENSG00000261236_9 (sequence is synthesized)
ggaagctgagctttttgccacgcaagttcccgagcctgcgggccgtgcctgcctacggacgcttcatccaggaacgcttcgagcgctgccttgacctgtacctgtgcccacggcagcgca

SEQ ID NO: 786994 - DNA, 120 bp, Artificial Sequence
  ENSG00000261236_10 (sequence is synthesized)
cctcatccccaagctgcctcggccgagggacctgcagcccttccccacgtgccaggccctggtctacaggggccacagtgaccttgtccggtgcctcagtgtctctcctgggggccagtg

SEQ ID NO: 786995 - DNA, 120 bp, Artificial Sequence
  ENSG00000261236_11 (sequence is synthesized)
gctggtttcaggctctgacgacggctccctgcggctctgggaggtggccactgcccgctgtgtgaggactgttcccgtggggggcgtggtgaagagtgtggcctggaaccccagccccgc

SEQ ID NO: 786996 - DNA, 120 bp, Artificial Sequence
  ENSG00000261236_12 (sequence is synthesized)
tgtctgcctggtggctgcagccgtggaggactcggtgctgctgctgaacccagctctgggggaccggctggtggcgggcagcacagatcagctgttgagcgccttcgtcccgcctgagga

SEQ ID NO: 786997 - DNA, 120 bp, Artificial Sequence
  ENSG00000261236_13 (sequence is synthesized)
gccccccttgcagccggcccgctggctggaggcctcagaggaggagcgccaagtgggcctgcggctgcgcatctgccacgggaagccagtgacgcaggtgacctggcacgggcgtgggga

SEQ ID NO: 786998 - DNA, 120 bp, Artificial Sequence
  ENSG00000261236_14 (sequence is synthesized)
ctacctggccgtggtgctggccacccaaggccacacccaggtgctgattcaccagctgagccgtcgccgcagccagagtccgttccgccgcagccacggacaggtgcagcgagtggcctt

SEQ ID NO: 786999 - DNA, 120 bp, Artificial Sequence
  ENSG00000261236_15 (sequence is synthesized)
ccaccctgcccggcccttcctgttggtggcgtcccagcgcagcgtccgcctctaccacctgctgcgccaggagctcaccaagaagctgatgcccaactgcaagtgggtgtccagcctggc

SEQ ID NO: 787000 - DNA, 120 bp, Artificial Sequence
  ENSG00000261236_16 (sequence is synthesized)
ggtgcaccctgcaggtgacaacgtcatctgtgggagctacgatagcaagctggtgtggtttgacctggatctttccaccaagccatacaggatgctgagacaccacaagaaggctctgcg

SEQ ID NO: 787001 - DNA, 120 bp, Artificial Sequence
  ENSG00000261236_17 (sequence is synthesized)
ggctgtggccttccacccgcggtacccactctttgcgtcaggctcggacgacggcagtgtcatcgtctgccatggcatggtgtacaatgaccttctgcagaaccccttgctggtgcccgt

SEQ ID NO: 787002 - DNA, 120 bp, Artificial Sequence
  ENSG00000261236_18 (sequence is synthesized)
caaggtgctgaagggacacgtgctgacccgagatctgggagtgctggacgtcatcttccaccccacccagccgtgggtcttctcctcgggggcagacgggactgtccgcctcttcaccta

SEQ ID NO: 787003 - DNA, 120 bp, Artificial Sequence
  ENSG00000261236_19 (sequence is synthesized)
gctgttctgcctgcctggggctggggtggtcgtgctgaagtcaacagagcctttaccctgtgctgcctggtgctcccaccttcttgaattggggttgccaacaaagccgcccccaccaca

SEQ ID NO: 787004 - DNA, 120 bp, Artificial Sequence
  ENSG00000261236_20 (sequence is synthesized)
gtccccgtcttatagctgcccacttctgcctaaggcccctgccaggggagggagcccgtgggtgatgaggtcatccctgtctgtggctgcccagagccctggccaaggaatccagtgagg

SEQ ID NO: 787005 - DNA, 120 bp, Artificial Sequence
  ENSG00000261236_21 (sequence is synthesized)
ggggagctctggggttggcaccacttcagtggaaaatgtgaaggtgcagctccggcgcctccgagggcgggggtgggggcagcgtggccgccatgccacgtcagaccccagggctgggga

SEQ ID NO: 787006 - DNA, 120 bp, Artificial Sequence
  ENSG00000261236_22 (sequence is synthesized)
acaggcgtaggtcagggccagtgacctcagggcacttgaggctgggcctgcactccccctgcaaccccctcacctgctcccctgggcggcccgaagcgggggtgggccttgtaggatcag

SEQ ID NO: 787007 - DNA, 120 bp, Artificial Sequence
  ENSG00000261236_23 (sequence is synthesized)
catgtgcgccagcgcctgcctgtgccaggccgtgtgcagggggcgggcacaggcgagtatttaggggcctagagctcagtctctccgcctgtctgtcctgcacctgcctctccaggcttg

SEQ ID NO: 787008 - DNA, 120 bp, Artificial Sequence
  ENSG00000261236_24 (sequence is synthesized)
gcacagactgtgccttctgctagctggccatgtcccctgttcttgtgctgtgtggacctctcaccccgtcggtctccttgccccttcctccttcccccgttcctctccagggccaccagg

SEQ ID NO: 787009 - DNA, 120 bp, Artificial Sequence
  ENSG00000261236_25 (sequence is synthesized)
gatggccccctatctccatggggaggagagggaaggaccctcagcagggggcagggcccaaggggtccctcctgcagcagggggcccggcaggctcccagctgtgctctgtcttgcctgg

SEQ ID NO: 787010 - DNA, 120 bp, Artificial Sequence
  ENSG00000261236_26 (sequence is synthesized)
gcccctccccgtggctactgttgcaggaagcagcctcctgggcagcggtccccaggctggaaggagcgagggtggcggctggcaggggctgcaaccaggaatgacatccggaacacggtg

SEQ ID NO: 787011 - DNA, 120 bp, Artificial Sequence
  ENSG00000261236_27 (sequence is synthesized)
gaccactgaggagcaggtgcagaagtttctgtttttatcagttaatctgcttgtcacagtcaagaatgtgagaaaagactggatgcggtgagccaaacctgtaatcccagcactttggga

SEQ ID NO: 787012 - DNA, 120 bp, Artificial Sequence
  ENSG00000261236_28 (sequence is synthesized)
agaccagcccggccaacatggtgaaacctcatgtgaattgcttgagcctgggaggcggaagttagagtaagctgagatcatgccactgcctccatcctgggtgacagagtgagtgggact

SEQ ID NO: 787013 - DNA, 120 bp, Artificial Sequence
  ENSG00000261236_29 (sequence is synthesized)
aggactgttcccgtggggggcgtggtgaagagtgtggcctggaaccccagccccgctgtctgcctggtggctgcagccgtgtaagtggaggccctgggggctggggagccaggggtggca

SEQ ID NO: 787014 - DNA, 120 bp, Artificial Sequence
  ENSG00000261236_30 (sequence is synthesized)
gggcagggcagtgcaccctgcaggtgagagcgggaacacctgcatcacagcctttggccctaggtgacaacgtcatctgtgggagctacgatagcaagctggtgtggtttgacctggatc

SEQ ID NO: 787015 - DNA, 80 bp, Artificial Sequence; identical to SEQ ID NO: 632445
  ENSG00000261247_0 (sequence is synthesized)

SEQ ID NO: 787016 - DNA, 120 bp, Artificial Sequence; identical to SEQ ID NO: 632446
  ENSG00000261247_1 (sequence is synthesized)

SEQ ID NO: 787017 - DNA, 120 bp, Artificial Sequence; identical to SEQ ID NO: 632447
  ENSG00000261247_2 (sequence is synthesized)

SEQ ID NO: 787018 - DNA, 120 bp, Artificial Sequence; identical to SEQ ID NO: 632448
  ENSG00000261247_3 (sequence is synthesized)

SEQ ID NO: 787019 - DNA, 120 bp, Artificial Sequence; identical to SEQ ID NO: 632449
  ENSG00000261247_4 (sequence is synthesized)

SEQ ID NO: 787020 - DNA, 120 bp, Artificial Sequence
  ENSG00000261247_5 (sequence is synthesized)
cgcagcaaagcacgtacggagtggaagttagagcagtccatgcgggaggagacactactgaaagtgcagctgacacagttgaaggagtcatttcaacaagtccaattagaaagagatgag

SEQ ID NO: 787021 - DNA, 78 bp, Artificial Sequence; identical to SEQ ID NO: 632451
  ENSG00000261247_6 (sequence is synthesized)

SEQ ID NO: 787022 - DNA, 120 bp, Artificial Sequence
  ENSG00000261247_7 (sequence is synthesized)
agagagagtggcaggagagctccaggcccaggtcaaaaagaatcagcgcataagtctcctgaaccagcgacaagaagagaggattcaggagcaggaagagaggcttcggaagcaggagga

SEQ ID NO: 787023 - DNA, 120 bp, Artificial Sequence
  ENSG00000261247_8 (sequence is synthesized)
caggaggagaggattcaggagcagcacaagagccttcagcagctggccaagccacagagcgtcttcgaggagccgaacaatgagaacaagaacgcactgcagttggagcagcaagtaaag

SEQ ID NO: 787024 - DNA, 120 bp, Artificial Sequence
  ENSG00000261247_9 (sequence is synthesized)
gagctacaggagaagcttggcgaggagcacctggaagctgccagccagcagaaccagcagctaacggcccagctgagcctcatggctctccctggggaaggacacggaggagaacatctg

SEQ ID NO: 787025 - DNA, 120 bp, Artificial Sequence; identical to SEQ ID NO: 779620
  ENSG00000261247_10 (sequence is synthesized)

SEQ ID NO: 787026 - DNA, 120 bp, Artificial Sequence; identical to SEQ ID NO: 779621
  ENSG00000261247_11 (sequence is synthesized)

SEQ ID NO: 787027 - DNA, 120 bp, Artificial Sequence; identical to SEQ ID NO: 779622
  ENSG00000261247_12 (sequence is synthesized)

SEQ ID NO: 787028 - DNA, 120 bp, Artificial Sequence; identical to SEQ ID NO: 632458
  ENSG00000261247_13 (sequence is synthesized)

SEQ ID NO: 787029 - DNA, 120 bp, Artificial Sequence
  ENSG00000261272_0 (sequence is synthesized)
aaaaaagaagaaaaataagaagccaaactgtggagcaatttgggggctccccccaaccatgccatctgcctacaaggcttaccctggcactggctggcctttgggtctttttgtgcaact

SEQ ID NO: 787030 - DNA, 120 bp, Artificial Sequence
  ENSG00000261272_1 (sequence is synthesized)
ttattttctatcaaggcccagggggtttgccccttgtctctctgcctctttgacctatccttcctttggaacccaggcatctaaatgacaacttctatgtgcatcatttagagatgagaa

SEQ ID NO: 787031 - DNA, 120 bp, Artificial Sequence
  ENSG00000261272_2 (sequence is synthesized)
gaggaaatatctctcctgctttctggttcctgtggctgcttctctttggacttctgggacccagctctgagaataccacagccttcacaaaaggctccgacaccaccacagcctccatca

SEQ ID NO: 787032 - DNA, 120 bp, Artificial Sequence
  ENSG00000261272_3 (sequence is synthesized)
caggctctgagaccaccatggcctccaccatggcctctacttcggccttaactacaggctctaagatcaccacagactctaccacaggctctgagacaacctcagcctccaccatggctt

SEQ ID NO: 787033 - DNA, 120 bp, Artificial Sequence
  ENSG00000261272_4 (sequence is synthesized)
ctactgcagccttcaccacaggctctgagaccaacacggcctccaccacagactcagggactactatagcctccactaggaccttcaccacaggctctgacacaaccacaggctccactg

SEQ ID NO: 787034 - DNA, 120 bp, Artificial Sequence
  ENSG00000261272_5 (sequence is synthesized)
caggctctgaaactatcgtggcctccaccacagtctctgggaccacaacaacctttactatagcctccactacagtccctgagactaccatggcctccagcacaacctccactgcaggct

SEQ ID NO: 787035 - DNA, 120 bp, Artificial Sequence
  ENSG00000261272_6 (sequence is synthesized)
ctgagaaaacgatggcctcctccataatttctgagaccaccatggcctccaccacaggctctgagactgccacagtctctaccacaggctctgagaccaccaccacctccactgcaagct

SEQ ID NO: 787036 - DNA, 120 bp, Artificial Sequence
  ENSG00000261272_7 (sequence is synthesized)
ctgaggccactaaagtctctaccacaggctctgaaaccaccacagcatctactgcaggttctgagaccaccactacctccacctccatggcaggctctgaggccaccacaacctcaactg

SEQ ID NO: 787037 - DNA, 120 bp, Artificial Sequence
  ENSG00000261272_8 (sequence is synthesized)
cagactccaaggtgatcacggcatccagcatgagctctgagaccactgtggcccccgctgcaggctctaacaccaccacagcctctaccacaggctctgagaccactacaatcctgatta

SEQ ID NO: 787038 - DNA, 120 bp, Artificial Sequence
  ENSG00000261272_9 (sequence is synthesized)
aagcctctgagaccaccacagcctctacagcaggttctgagaccaccaccccctcccccacaggctctcagaccaccatagtctctatttcaggttctgagatcaccaccacctctacgg

SEQ ID NO: 787039 - DNA, 120 bp, Artificial Sequence
  ENSG00000261272_10 (sequence is synthesized)
caggatccgagaacaccacagtctctagtgcaggctctgggaccaccacagcttctatggcaggctctgagaccaccgtctccactgcaggctctgagaccactacagtctctatcacag

SEQ ID NO: 787040 - DNA, 120 bp, Artificial Sequence
  ENSG00000261272_11 (sequence is synthesized)
gcactgagaccaccatggtctctgccatgggctcagagaccaccacaaactctactacaagctctgagaccaccgtcacctctactgcaggctctgagaccaccacagtctccaccgtgg

SEQ ID NO: 787041 - DNA, 120 bp, Artificial Sequence
  ENSG00000261272_12 (sequence is synthesized)
gctctgagaccaccacagcctatactgcagattctgagaccactgcagcctctaccacaggctctgagatgaccacagtcttcactgcaggctcggaaaccatcacaccctctactgcag

SEQ ID NO: 787042 - DNA, 120 bp, Artificial Sequence
  ENSG00000261272_13 (sequence is synthesized)
gctcagagaccaccacagtctctactgcaggctctgagaccactacagtctccaccacaggctctgagaccacaacagcctctactgcacattctgagacgactgcagcctccaccatgg

SEQ ID NO: 787043 - DNA, 120 bp, Artificial Sequence
  ENSG00000261272_14 (sequence is synthesized)
gctctgagaccaccaaagtctcaactgcaggctctgagaccacagtctccactgcaggctctgagaccactgcagcctctactgaagattctgaaaccaacacagcatttactgaagatt

SEQ ID NO: 787044 - DNA, 120 bp, Artificial Sequence
  ENSG00000261272_15 (sequence is synthesized)
ctaagactaccacagcctctactacagggtttgagacaaccgcagcctctactacaggctctgagcctaccatggcatccaccatgggctctgagaccactatggcctctaccataggcc

SEQ ID NO: 787045 - DNA, 120 bp, Artificial Sequence
  ENSG00000261272_16 (sequence is synthesized)
ctgagaccaccaaggtctccactgcaagctctgaggtgaccacagtctttgctgcaggctctgagacaatcagagcctctaccgtaggctctgagaccaccacagtctctaccacaggct

SEQ ID NO: 787046 - DNA, 120 bp, Artificial Sequence
  ENSG00000261272_17 (sequence is synthesized)
accgtaggctctgagaccaccacagtctctaccacaggctctgagaccaccacagcctccatcatgggctctgagaccagcacagattctaccacaggctctgagaccaccacagcctct

SEQ ID NO: 787047 - DNA, 120 bp, Artificial Sequence
  ENSG00000261272_18 (sequence is synthesized)
ctgaggccactacagtctccaccacaggctctgagaccactacagtttctatcacagactcagagaccaccaccacctgtactgaaggctctgagatgactgcagtctccaccacagtct

SEQ ID NO: 787048 - DNA, 120 bp, Artificial Sequence
  ENSG00000261272_19 (sequence is synthesized)
ttgagaccactacagcctctactgaaggctctgagatcacaatagcctctacttcagactctgagaccaccacagcttctactgaaggttctgagaccactacagtcactaccgcaggct

SEQ ID NO: 787049 - DNA, 120 bp, Artificial Sequence
  ENSG00000261272_20 (sequence is synthesized)
ctgagaccaaaacagcctatactacaggctctgagaccaccacagcctctaatacaggcttggagaccaccacagtctttaccataggctctgacaccaccacagcctctactgaaggct

SEQ ID NO: 787050 - DNA, 120 bp, Artificial Sequence
  ENSG00000261272_21 (sequence is synthesized)
ctgagaccactgcagtctctgccacaggctctgagatgaccacagtctctactgaaggctctgagaacactacagtctccaccacaggctctgagaccactacagtttccaccacaggct

SEQ ID NO: 787051 - DNA, 120 bp, Artificial Sequence
  ENSG00000261272_22 (sequence is synthesized)
tggagaccaccaccacttccactgaaggctctgagatgactacagtctccaccacaggtgctgagaccaccacagactctactgaaggctctgggaccactgcagcctccactgcaggct

SEQ ID NO: 787052 - DNA, 120 bp, Artificial Sequence
  ENSG00000261272_23 (sequence is synthesized)
ctgagaccaccacagtctctactgcagattctgagaacaccacagcatctactgcagattctgagaccacctcagcctctactacaggctctgagaccaccacagcctctactacaagct

SEQ ID NO: 787053 - DNA, 120 bp, Artificial Sequence
  ENSG00000261272_24 (sequence is synthesized)
cagcctctactgaaggctctgagaccactacagtctccaccacagactctgagaccaccatggtctctaccacaggctctgagaggaccatcacctctactgaaggctctgagaccacta

SEQ ID NO: 787054 - DNA, 120 bp, Artificial Sequence
  ENSG00000261272_25 (sequence is synthesized)
tgccacaggctctgagaccacagtctctactgaaggctctgggaccactacagtctccatcacaggctctgagaccactaaagtttctaccacaggttcagagaccaccaccacttctac

SEQ ID NO: 787055 - DNA, 120 bp, Artificial Sequence
  ENSG00000261272_26 (sequence is synthesized)
gagaccaccacagcctctactgaaggctccgagaccaccacagcctctactgaaggctccgagaccacctcagcctctactacaggctctgagaccaccacagcctctactacaagctct

SEQ ID NO: 787056 - DNA, 120 bp, Artificial Sequence
  ENSG00000261272_27 (sequence is synthesized)
tacaggctctgagaccaccacagcctctactacaagctctgagaccaccatggcatccatcatgggctctgagaccactatggcctctaccataggctctgagaccaccaaggtctccac

SEQ ID NO: 787057 - DNA, 120 bp, Artificial Sequence
  ENSG00000261272_28 (sequence is synthesized)
tgcaagctctaaaatgaccacagtcttcactgaaaactctgagaccaccatagcctctaccacagcctctgagaccaccacagtctccactgcaggctctgagaccatcccagcctctac

SEQ ID NO: 787058 - DNA, 120 bp, Artificial Sequence
  ENSG00000261272_29 (sequence is synthesized)
cagtctccactgcaggctctgagaccatcccagcctctacagcaggctctgagaccaccaccaccacctctactgaaggctctgagaccactacagcctctactgaaggctctgagacca

SEQ ID NO: 787059 - DNA, 78 bp, Artificial Sequence
  ENSG00000261272_30 (sequence is synthesized)
ccacagcctctactgaaagctctgagaccactacagccactaccattaccaccacctctactgaaggctctgagacca

SEQ ID NO: 787060 - DNA, 84 bp, Artificial Sequence
  ENSG00000261272_31 (sequence is synthesized)
ctcactacagtttctaccacaggctctgagaccatcacagtctctgctgaaggctctgagaccactacagtcactactatgggc

SEQ ID NO: 787061 - DNA, 120 bp, Artificial Sequence
  ENSG00000261272_32 (sequence is synthesized)
tgctgaaggctctgagaccactacagtcactactatgggctctgagaccaccacggcctctactgcaggctcagagaccaccacagtctctactgcaggctctgagaccaccacagcctc

SEQ ID NO: 787062 - DNA, 120 bp, Artificial Sequence
  ENSG00000261272_33 (sequence is synthesized)
tattgaaggctctgagaccactacagtctcctccacaggctctgagaccaccacagtctctaccacaggcactgagactaccatcacctctactgaaggttcagagaccactacagtcac

SEQ ID NO: 787063 - DNA, 120 bp, Artificial Sequence
  ENSG00000261272_34 (sequence is synthesized)
tactgcaggttctgagaccacagcagtctataccacaggctctgagactaccaccacctctactgaaggctctgagacaaccacagtctctaccacgggctctgagaccaccacagcctc

SEQ ID NO: 787064 - DNA, 120 bp, Artificial Sequence
  ENSG00000261272_35 (sequence is synthesized)
taccgcagatttggagaccaccacagtctccacctcaggctctgggaccaccacagcctctaccgcaggctctgagaccacaacagtctatatcacaggctctaagactaccaccgcctc

SEQ ID NO: 787065 - DNA, 120 bp, Artificial Sequence
  ENSG00000261272_36 (sequence is synthesized)
tactgaaggctctgaggccactacagtttctaccactagctctgagaccaccacagcctctaccacaggctctgagatgactacagtctttaccacagtctctgagaccaccacagtctc

SEQ ID NO: 787066 - DNA, 120 bp, Artificial Sequence
  ENSG00000261272_37 (sequence is synthesized)
agtctttaccacagtctctgagaccaccacagtctctaccataggctctgaggccaccacatcctctgctgcaggctctgaggccaccaccacctctactgaaggctctgagaccaccac

SEQ ID NO: 787067 - DNA, 120 bp, Artificial Sequence
  ENSG00000261272_38 (sequence is synthesized)
cactgcaggctctgagaccaccacagcctccacttcaggctctgagaccaacacagcctgtaccacaggttctgagacctccacaccctccagtgcaggctctgagaccaacactgcctt

SEQ ID NO: 787068 - DNA, 120 bp, Artificial Sequence
  ENSG00000261272_39 (sequence is synthesized)
catcataggctctgagagcaccatagcttccactgcaagcttggagcccactgcaacttccctcacaggctctgagaccaccacagtctctatcacagcttctggggccactgcagcctc

SEQ ID NO: 787069 - DNA, 120 bp, Artificial Sequence
  ENSG00000261272_40 (sequence is synthesized)
caccactgtctcttccaccacgtttgtactcaccaaggccactgacgtttctatccagcccatcaccaacacacctatgtcaggcaccagaaccactggaaccagactcactgcctccag

SEQ ID NO: 787070 - DNA, 120 bp, Artificial Sequence
  ENSG00000261272_41 (sequence is synthesized)
ctctgtcaccatggcccctggaatggacttcacggcctctgctgccagccatactgtgccaggaatagtcttaaacacctctggcctgggtacatccactatgggagcatcatctaccac

SEQ ID NO: 787071 - DNA, 120 bp, Artificial Sequence
  ENSG00000261272_42 (sequence is synthesized)
ctcagcccacggcgtcaggaccaccacaggatccacccgtgagccaaccagcagcaccttccaggaaacaggcccggtgtccatgggcacaaacacagttagcatgagccacacacccac

SEQ ID NO: 787072 - DNA, 120 bp, Artificial Sequence
  ENSG00000261272_43 (sequence is synthesized)
aaacgtgatcaaaccaagtggatatttacagccctgggctatcatcctcatttccctggctgcagttgtggctgctgttggattgtcagtaggactgagtttttgtctgagaaacctttt

SEQ ID NO: 787073 - DNA, 120 bp, Artificial Sequence
  ENSG00000261272_44 (sequence is synthesized)
cttccccctgagatattgtggtatttattacccccatggccacagccacagccttggtctggacctgaacttgggcctgggctctgggacattccacagcctgggaaatgcactggttca

SEQ ID NO: 787074 - DNA, 120 bp, Artificial Sequence
  ENSG00000261272_45 (sequence is synthesized)
tggaggagaacttgaaatgggacatggaggaacacacggctttggatatggagtgggccatggactgagccacatccatggagatggctacggagtgaatcatggcgggcattatggaca

SEQ ID NO: 787075 - DNA, 120 bp, Artificial Sequence
  ENSG00000261272_46 (sequence is synthesized)
tggaggaggccactgaggacaccatggagtggatcacagagggagccaccaaggaggccacggcaggacaagatggctgtggccatagattgggtatcaaaacatattatgggtgggagg

SEQ ID NO: 787076 - DNA, 120 bp, Artificial Sequence
  ENSG00000261272_47 (sequence is synthesized)
gggtcatggaggagaaaaaaataatgatcatgaaataattaaaatggagcataggaagcttcccaggatgtgatccatggagatggacatggactaggtcaagaaaagaaccagcaaaag

SEQ ID NO: 787077 - DNA, 120 bp, Artificial Sequence
  ENSG00000261272_48 (sequence is synthesized)
gacctcagagactttgactggcttggaggggacttcaagtcaaagcttctgtgagtttttcctgagtctcagcctctgttgtggggagtcacgacaaccaccctcaggacatcttctctc

SEQ ID NO: 787078 - DNA, 120 bp, Artificial Sequence
  ENSG00000261272_49 (sequence is synthesized)
ccatttcccgccacatcagggtcaacgtttctcatccctgtgtttcctcatggtgctataaatattaccaagacatgtctaagaaacaaaagcacataatgaatgtattatcagggccac

SEQ ID NO: 787079 - DNA, 120 bp, Artificial Sequence
  ENSG00000261308_0 (sequence is synthesized)
gcaacagagcaagaccttgtctcaaaaatgtatatatattttgggctttttttcctaaaacgggaactacaacagcatatttgcgagctgatgagagtgacccagcagagagggaaatgg

SEQ ID NO: 787080 - DNA, 120 bp, Artificial Sequence
  ENSG00000261308_1 (sequence is synthesized)
gagctgatgagagtgacccagcagagagggaaatggatcagctctgttgaagatgcactggacaccagaacacgcccagcccctcaaccagtggccagagcagcacctggacgtctcctc

SEQ ID NO: 787081 - DNA, 120 bp, Artificial Sequence
  ENSG00000261308_2 (sequence is synthesized)
caccaccccgtcgccggcccacaagttggagttgccccctgggggtcgccaacgctgccactacgcttgggcacacgacgacatctcagccctcactgcctccaacctcctaaagcgcta

SEQ ID NO: 787082 - DNA, 120 bp, Artificial Sequence
  ENSG00000261308_3 (sequence is synthesized)
tgcagagaagtactctggggtcttggattctccctacgagcgtccggccctgggcgggtacagcgacgcctccttcctcaacggcgccaaaggggatcccgagccctggccagggccgga

SEQ ID NO: 787083 - DNA, 120 bp, Artificial Sequence
  ENSG00000261308_4 (sequence is synthesized)
gccaccctaccccttggcctcactccacgaaggcctcccaggaaccaaatcgggcggtggcggcggttccggggccctggggggctccccagttttagccgggaacctccctgaacccct

SEQ ID NO: 787084 - DNA, 120 bp, Artificial Sequence
  ENSG00000261308_5 (sequence is synthesized)
gaacccctctacgccggcaatgcgtgcgggggcccatcggcggcgcccgagtacgcggccggctacggcggggggtacctggcgccgggttactgcgcgcagacgggcgccgcgctgccc

SEQ ID NO: 787085 - DNA, 120 bp, Artificial Sequence
  ENSG00000261308_6 (sequence is synthesized)
gccgcgctcctgcagcccccaccgcctccggggtacgggccctcagcgccgctgtacaactatcccgcagggggctacgcagcgcagcccggctatggcgcgctcccgccgcccccaggc

SEQ ID NO: 787086 - DNA, 80 bp, Artificial Sequence
  ENSG00000261308_7 (sequence is synthesized)
ccacgcccctgcccgcgccggcaccgcccaccgcctatggcttccccacggccgcgccgggtgccgaatccgggctgtcg

SEQ ID NO: 787087 - DNA, 120 bp, Artificial Sequence
  ENSG00000261308_8 (sequence is synthesized)
gtcgctgaagcgcaaggccgccgacgaggggcccgagggccgctaccgcaagtacgcgtacgagcccgccaaggcccccgtggctgacggagcctcctaccccgccgcggacaacggcga

SEQ ID NO: 787088 - DNA, 120 bp, Artificial Sequence
  ENSG00000261308_9 (sequence is synthesized)
atgtcggggcaacgggttccgggccaagccgccaggagccgcggaggaggcgtcgggcaagtacggtggcggcgtccccctcaaggtcctgggctcccccgtctacggcccgcaactgga

SEQ ID NO: 787089 - DNA, 120 bp, Artificial Sequence
  ENSG00000261308_10 (sequence is synthesized)
gccctttgaaaagttcccggagcgggccccggctcctcgtggggggttcgccgtgccgtcgggggagactcccaaaggcgtggaccctggggccctggagctggtgacgagcaagatggt

SEQ ID NO: 787090 - DNA, 120 bp, Artificial Sequence
  ENSG00000261308_11 (sequence is synthesized)
aagatggtggactgcgggcccccggtgcagtgggcggatgtggcgggccagggcgcgctcaaggcggcgctggaggaggagctggtgtggcccctgctcaggccgcccgcctacccgggc

SEQ ID NO: 787091 - DNA, 80 bp, Artificial Sequence
  ENSG00000261308_12 (sequence is synthesized)
cccgccgcggaccgtcctgctctttgggccgcggggcgcgggcaaagcgctgctgggccgctgcctcgccacgcagctgg

SEQ ID NO: 787092 - DNA, 120 bp, Artificial Sequence
  ENSG00000261308_13 (sequence is synthesized)
cgagggcgcgcgcctcctccaggccgccttcgcggccgcgcgctgccgcccaccctccgtactcctcatcagcgagctagaggcgctgctccccgcccgggacgacggcgcggcggcagg

SEQ ID NO: 787093 - DNA, 120 bp, Artificial Sequence
  ENSG00000261308_14 (sequence is synthesized)
ccgctcctggcctgcctggacgggggctgcggcgcgggggctgacggcgtgctggttgtgggcaccacctcgcggcccgcggctctggacgaggcgacccgccggcgcttctctctccgc

SEQ ID NO: 787094 - DNA, 120 bp, Artificial Sequence
  ENSG00000261308_15 (sequence is synthesized)
ggcgacccgccggcgcttctctctccgcttctacgtggcgctgcccgacagcccggcccgcgggcagatcctgcagcgggcgctggcccagcagggctgcgcgctcagtgagcgggaact

SEQ ID NO: 787095 - DNA, 120 bp, Artificial Sequence
  ENSG00000261308_16 (sequence is synthesized)
gcgctggtgcagggcacgcagggcttctctgggggcgagctggggcagctgtgccagcaggcggcggccggggcgggcctcccggggctgcagcgccccctctcctacaaggacctggag

SEQ ID NO: 787096 - DNA, 120 bp, Artificial Sequence
  ENSG00000261308_17 (sequence is synthesized)
ggaggcggcgctggccaaggtgggccctagggcctctgccaaggaactggactcgttcgtggagtgggacaaaatgtacggctccggacactgacggcgcgcgggggaggccgcgggagc

SEQ ID NO: 787097 - DNA, 120 bp, Artificial Sequence
  ENSG00000261308_18 (sequence is synthesized)
cgcagtccctccgtccccgccgcctccgcgtgggagggatgtcactgactaaacccggctggcaggggctggagtggtgaatgtgggatcggggacaggaggggtctgccggtggatatt

SEQ ID NO: 787098 - DNA, 120 bp, Artificial Sequence
  ENSG00000261308_19 (sequence is synthesized)
gaaggaaaatgcttctgccaggcagatgccatatgcgccgtgtactcaggtttttcctatttattgtggactggaagctcgccatctccgcccggcagaccgggcagatccggcatgggc

SEQ ID NO: 787099 - DNA, 120 bp, Artificial Sequence
  ENSG00000261308_20 (sequence is synthesized)
tggcacccggggccttaagaactcctgctctcttgccacaacgcttttgtctcctcgctatctgaatggcaccctccttctccctcactctctccatcccattctctgcattctcttggt

SEQ ID NO: 787100 - DNA, 120 bp, Artificial Sequence
  ENSG00000261308_21 (sequence is synthesized)
tttctctcccttttgctttgtcgctgacacccctgcccaccccatgctggccctgtttctctcctgcccctccctccccagctctccatccctcaccctctgtgcttctgtctccatccc

SEQ ID NO: 787101 - DNA, 120 bp, Artificial Sequence
  ENSG00000261308_22 (sequence is synthesized)
tggctctccagcgtccctggccttttggtccctgagctttaatgcctttccctgccttctgttcttatttggactgcagtggccctttgcaggagctctggaggcccaggggctgaggag

SEQ ID NO: 787102 - DNA, 120 bp, Artificial Sequence
  ENSG00000261308_23 (sequence is synthesized)
gagggttacccctctacccatctgaaacctagggtctagggggatcaaggaaaaaaagtccccaaagaaggggaattttttgtttgtttttgaggggagatcccagaaatgtagcttgtt

SEQ ID NO: 787103 - DNA, 120 bp, Artificial Sequence
  ENSG00000261308_24 (sequence is synthesized)
tcatattttagtcttcttatttttgtaaaatgtgtagaatttgctgtttttctttttcttttgacaactcaggaagaaactgacctcagaaagaatgttagactttggctgctctcctgt

SEQ ID NO: 787104 - DNA, 120 bp, Artificial Sequence
  ENSG00000261308_25 (sequence is synthesized)
gtgcccctcacacctgccccctcccccccactccatccaggggaccaaattctcccagacactcaaaaaatgagacttacggggaaggggagaggaagacccagaggcctcagtgaaacc

SEQ ID NO: 787105 - DNA, 120 bp, Artificial Sequence
  ENSG00000261308_26 (sequence is synthesized)
ccagctattcctggtcagaagcagaatgtattcctaagggcttcctccccagggccgaggcctaggcatgaatgtggggagtgggctgtggggtttgagagaagggaggccttattcctc

SEQ ID NO: 787106 - DNA, 120 bp, Artificial Sequence
  ENSG00000261308_27 (sequence is synthesized)
tcctgctgctccccaccccctgccccacccaacccctccgctgagtgttttctgtgaagggctatccagagttaggatgcccttgcccaattccttcctgagacccagaaggtagggtgg

SEQ ID NO: 787107 - DNA, 120 bp, Artificial Sequence
  ENSG00000261308_28 (sequence is synthesized)
gagggcccaaatgggaaggtgacctaagcagaaagtctccagaaaggtcatgtcccctggccctgccttggcagaggtccccagtgacttatgctaggaggattccatctgggtagacag

SEQ ID NO: 787108 - DNA, 120 bp, Artificial Sequence
  ENSG00000261308_29 (sequence is synthesized)
tctggccacaaaatcagctactggacctcagccatctctgctggaggctctgaggaggagtgagcatccctcacttgtgggggctctgtgaggaaatgtgccttccccattcccccggag

SEQ ID NO: 787109 - DNA, 120 bp, Artificial Sequence
  ENSG00000261308_30 (sequence is synthesized)
tcctaggtctggagctccagggctgggagagggtgagggagatgggcaggggtgttttctctgaccttgggggcttagtctcagtcctgcctgaactttccactaggcttggaacccttc

SEQ ID NO: 787110 - DNA, 120 bp, Artificial Sequence
  ENSG00000261308_31 (sequence is synthesized)
caagaaccatatttctctccttcccaccaattttcccttgatgaggctttagcagtttgctcccaccacccccagcccatttcacaactctgatcttagtccaaagcaggggacacgccc

SEQ ID NO: 787111 - DNA, 120 bp, Artificial Sequence
  ENSG00000261308_32 (sequence is synthesized)
ccccaccaccactttttctctctcccatctcagcctcctgtgcagttccttgcctgcccgtgcatttcctagagtctactgcctcccccctggctgggagggtgtctgggggggatcttt

SEQ ID NO: 787112 - DNA, 120 bp, Artificial Sequence
  ENSG00000261308_33 (sequence is synthesized)
caggggccctggcacccagggcctgtgctggcctaggagtgctgaccagaaggctgctctgttcccccccacccccgttgctttctggccccctctttggagccagccacccacagggct

SEQ ID NO: 787113 - DNA, 120 bp, Artificial Sequence
  ENSG00000261308_34 (sequence is synthesized)
ttggtgcctcagaagcagtgggctgccgggtcacagccgcaggctgcaaaagaccctcggagggagcatggagtgaggggttctctctcaggtgtgtatgtattggggggtgggggtggg

SEQ ID NO: 787114 - DNA, 120 bp, Artificial Sequence
  ENSG00000261308_35 (sequence is synthesized)
tggagggtgtcagggaagttggggtgggatcccagccttcccttcaagaggcagggagctctgggaggtggagtccccaccgctttctctactaggctcctcctgttccccaggcttggg

SEQ ID NO: 787115 - DNA, 120 bp, Artificial Sequence
  ENSG00000261308_36 (sequence is synthesized)
gagctttgcacaaggagactgcccccagcctagtggcacctacctcatgggctctggggcaggtaggggaagggccagtccagctctggtaatgctggggggaggcataccaaagaatcc

SEQ ID NO: 787116 - DNA, 120 bp, Artificial Sequence
  ENSG00000261308_37 (sequence is synthesized)
aggggcagggagtggggagggtgacttccgagctggcctctccccttcctctacccagactggggctgggatcctctcctcccgctgtaaccatttctacctcattttgctgcgtgttgt

SEQ ID NO: 787117 - DNA, 120 bp, Artificial Sequence
  ENSG00000261308_38 (sequence is synthesized)
acatggacgtatttatctcctgtctgacgatgctctgcagttgtggtctgtctacctcagaagagactgtattttaaaagaaagtattacacagtattaaagcgatgacatgtggtttgc

SEQ ID NO: 787118 - DNA, 80 bp, Artificial Sequence
  ENSG00000261308_39 (sequence is synthesized)
cactgcccagtcccgctcccgcccgcggcggccgcagcagccgcagcagcagcggctccaggatggtgagcgccactgcc

SEQ ID NO: 787119 - DNA, 120 bp, Artificial Sequence
  ENSG00000261308_40 (sequence is synthesized)
caggcctgtcgcccccggcccgcgccgccgccccggtccccgggccggacgcgcccccaggccgcgcacactcacctaggacccggccgtgatgccgagctctgttgaagatgcactgga

SEQ ID NO: 787120 - DNA, 120 bp, Artificial Sequence
  ENSG00000261341_0 (sequence is synthesized)
acagctcagacattctggactttagaaagcgtcctggggaggtgttgataccggtgttgccatccccactgtgcagatgggaaaactgaggcacagaggattaactacatgcctgaggga

SEQ ID NO: 787121 - DNA, 120 bp, Artificial Sequence
  ENSG00000261341_1 (sequence is synthesized)
aagccgcttgctcgtggtctacctcctgggcaccattggtgcgtccccatgtggcccctgtggcatgccccctcctctggggaagctaatgtgaccctggccatggccttgttcaccatc

SEQ ID NO: 787122 - DNA, 120 bp, Artificial Sequence
  ENSG00000261341_2 (sequence is synthesized)
ctgacctccatctatttcttcaacaaggctcagcagtgagaagacacaggacctccccgcacaagagccctgcctctccctctgccatcgctctgaggccagataaatgtaactgaatcc

SEQ ID NO: 787123 - DNA, 120 bp, Artificial Sequence
  ENSG00000261341_3 (sequence is synthesized)
ctccgacaaccccctctcggagttccagtggcttctcccccctctggctcagaggcccaggaaagagagagaagaccaaccaaggggtggctggagtcccaaggccatgaactttcagga

SEQ ID NO: 787124 - DNA, 72 bp, Artificial Sequence
  ENSG00000261341_4 (sequence is synthesized)
tctgtctctacaaaaaaaaatttaatgagggcatgatggcacatgcctgtcgtcccagctacttgggaggct

SEQ ID NO: 787125 - DNA, 79 bp, Artificial Sequence
  ENSG00000261341_5 (sequence is synthesized)
cgaggctgcagggagctatgaccatgccactctactcccgcctggtcaacaaagcaagaacctgactcaaaaaaaaaaa

SEQ ID NO: 787126 - DNA, 120 bp, Artificial Sequence
  ENSG00000261371_0 (sequence is synthesized)
ggtttccagccatggctgccattacctgaccagcgccacagccggtctctctgcaggcgccgggagaagtgaccagagcaatttctgcttttcacagggcgggtttctcaacggtgactt

SEQ ID NO: 787127 - DNA, 120 bp, Artificial Sequence
  ENSG00000261371_1 (sequence is synthesized)
gtgggcagtgccttctgctgagcgagtcatggcccgaaggcagaactaactgtgcctgcagtcttcactctcaggatgcagccgaggtgggcccaaggggccacgatgtggcttggagtc

SEQ ID NO: 787128 - DNA, 120 bp, Artificial Sequence
  ENSG00000261371_2 (sequence is synthesized)
ctgctgacccttctgctctgttcaagccttgagggtcaagaaaactctttcacaatcaacagtgttgacatgaagagcctgccggactggacggtgcaaaatgggaagaacctgaccctg

SEQ ID NO: 787129 - DNA, 120 bp, Artificial Sequence
  ENSG00000261371_3 (sequence is synthesized)
cagtgcttcgcggatgtcagcaccacctctcacgtcaagcctcagcaccagatgctgttctataaggatgacgtgctgttttacaacatctcctccatgaagagcacagagagttatttt

SEQ ID NO: 787130 - DNA, 120 bp, Artificial Sequence
  ENSG00000261371_4 (sequence is synthesized)
attcctgaagtccggatctatgactcagggacatataaatgtactgtgattgtgaacaacaaagagaaaaccactgcagagtaccaggtgttggtggaaggagtgcccagtcccagggtg

SEQ ID NO: 787131 - DNA, 120 bp, Artificial Sequence
  ENSG00000261371_5 (sequence is synthesized)
acactggacaagaaagaggccatccaaggtgggatcgtgagggtcaactgttctgtcccagaggaaaaggccccaatacacttcacaattgaaaaacttgaactaaatgaaaaaatggtc

SEQ ID NO: 787132 - DNA, 120 bp, Artificial Sequence
  ENSG00000261371_6 (sequence is synthesized)
aagctgaaaagagagaagaattctcgagaccagaattttgtgatactggaattccccgttgaggaacaggaccgcgttttatccttccgatgtcaagctaggatcatttctgggatccat

SEQ ID NO: 787133 - DNA, 120 bp, Artificial Sequence
  ENSG00000261371_7 (sequence is synthesized)
atgcagacctcagaatctaccaagagtgaactggtcaccgtgacggaatccttctctacacccaagttccacatcagccccaccggaatgatcatggaaggagctcagctccacattaag

SEQ ID NO: 787134 - DNA, 120 bp, Artificial Sequence
  ENSG00000261371_8 (sequence is synthesized)
tgcaccattcaagtgactcacctggcccaggagtttccagaaatcataattcagaaggacaaggcgattgtggcccacaacagacatggcaacaaggctgtgtactcagtcatggccatg

SEQ ID NO: 787135 - DNA, 120 bp, Artificial Sequence
  ENSG00000261371_9 (sequence is synthesized)
gtggagcacagtggcaactacacgtgcaaagtggagtccagccgcatatccaaggtcagcagcatcgtggtcaacataacagaactattttccaagcccgaactggaatcttccttcaca

SEQ ID NO: 787136 - DNA, 120 bp, Artificial Sequence
  ENSG00000261371_10 (sequence is synthesized)
catctggaccaaggtgaaagactgaacctgtcctgctccatcccaggagcacctccagccaacttcaccatccagaaggaagatacgattgtgtcacagactcaagatttcaccaagata

SEQ ID NO: 787137 - DNA, 120 bp, Artificial Sequence
  ENSG00000261371_11 (sequence is synthesized)
gcctcaaagtcggacagtgggacgtatatctgcactgcaggtattgacaaagtggtcaagaaaagcaacacagtccagatagtcgtatgtgaaatgctctcccagcccaggatttcttat

SEQ ID NO: 787138 - DNA, 120 bp, Artificial Sequence
  ENSG00000261371_12 (sequence is synthesized)
gatgcccagtttgaggtcataaaaggacagaccatcgaagtccgttgcgaatcgatcagtggaactttgcctatttcttaccaacttttaaaaacaagtaaagttttggagaatagtacc

SEQ ID NO: 787139 - DNA, 120 bp, Artificial Sequence
  ENSG00000261371_13 (sequence is synthesized)
aagaactcaaatgatcctgcggtattcaaagacaaccccactgaagacgtcgaataccagtgtgttgcagataattgccattcccatgccaaaatgttaagtgaggttctgagggtgaag

SEQ ID NO: 787140 - DNA, 120 bp, Artificial Sequence
  ENSG00000261371_14 (sequence is synthesized)
gtgatagccccggtggatgaggtccagatttctatcctgtcaagtaaggtggtggagtctggagaggacattgtgctgcaatgtgctgtgaatgaaggatctggtcccatcacctataag

SEQ ID NO: 787141 - DNA, 120 bp, Artificial Sequence
  ENSG00000261371_15 (sequence is synthesized)
ttttacagagaaaaagagggcaaacccttctatcaaatgacctcaaatgccacccaggcattttggaccaagcagaaggctagcaaggaacaggagggagagtattactgcacagccttc

SEQ ID NO: 787142 - DNA, 120 bp, Artificial Sequence
  ENSG00000261371_16 (sequence is synthesized)
aacagagccaaccacgcctccagtgtccccagaagcaaaatactgacagtcagagtcattcttgccccatggaagaaaggacttattgcagtggttatcatcggagtgatcattgctctc

SEQ ID NO: 787143 - DNA, 120 bp, Artificial Sequence
  ENSG00000261371_17 (sequence is synthesized)
ttgatcattgcggccaaatgttattttctgaggaaagccaaggccaagcagatgccagtggaaatgtccaggccagcagtaccacttctgaactccaacaacgagaaaatgtcagatccc

SEQ ID NO: 787144 - DNA, 120 bp, Artificial Sequence
  ENSG00000261371_18 (sequence is synthesized)
aatatggaagctaacagtcattacggtcacaatgacgatgtcagaaaccatgcaatgaaaccaataaatgataataaagagcctctgaactcagacgtgcagtacacggaagttcaagtg

SEQ ID NO: 787145 - DNA, 120 bp, Artificial Sequence
  ENSG00000261371_19 (sequence is synthesized)
tcctcagctgagtctcacaaagatctaggaaagaaggacacagagacagtgtacagtgaagtccggaaagctgtccctgatgccgtggaaagcagatactctagaacggaaggctccctt

SEQ ID NO: 787146 - DNA, 120 bp, Artificial Sequence
  ENSG00000261371_20 (sequence is synthesized)
gatggaacttagacagcaaggccagatgcacatccctggaaggacatccatgttccgagaagaacagataatccctgtatttcaagacctctgtgcacttatttatgaacctgccctgct

SEQ ID NO: 787147 - DNA, 120 bp, Artificial Sequence
  ENSG00000261371_21 (sequence is synthesized)
cccacagaacacagcaattcctcaggctaagctgccggttcttaaatccatcctgctaagttaatgttgggtagaaagagatacagaggggctgttgaatttcccacataccctccttcc

SEQ ID NO: 787148 - DNA, 120 bp, Artificial Sequence
  ENSG00000261371_22 (sequence is synthesized)
accaagttggaacatccttggaaattggaagagcacaagaggagatccagggcaaggccattgggatattctgaaacttgaatattttgttttgtgcagagataaagaccttttccatgc

SEQ ID NO: 787149 - DNA, 120 bp, Artificial Sequence
  ENSG00000261371_23 (sequence is synthesized)
accctcatacacagaaaccaattttcttttttatactcaatcatttctagcgcatggcctggttagaggctggttttttctcttttcctttggtccttcaaaggcttgtagttttggcta

SEQ ID NO: 787150 - DNA, 120 bp, Artificial Sequence
  ENSG00000261371_24 (sequence is synthesized)
gtccttgttctttggaaatacacagtgctgaccagacagcctccccctgtcccctctatgacctcgccctccacaaatgggaaaaccagactacttgggagcaccgcctgtgaaatacca

SEQ ID NO: 787151 - DNA, 120 bp, Artificial Sequence
  ENSG00000261371_25 (sequence is synthesized)
acctgaagacaccgttcattcaggcaacgcacaaaacagaaaatgaaggtggaacaagcacagatgttcttcaactgtttttgtctacactctttctcttttcctctaccatgctgaagg

SEQ ID NO: 787152 - DNA, 120 bp, Artificial Sequence
  ENSG00000261371_26 (sequence is synthesized)
ctgaaagacaggaagatggtgccatcagcaaatattattcttaattgaaaacttgaaatgtgtatgtttcttactaatttttaaaaatgtattccttgccagggcaggcaaggtggctca

SEQ ID NO: 787153 - DNA, 120 bp, Artificial Sequence
  ENSG00000261371_27 (sequence is synthesized)
gacagagtgagaatccatctcaaaaaaaacaaaaaacaaaattgcttgctaaagaagtggtctcctgaggtcttaagacattcctgacagtgtcttgagtgggtgggagagaggctgctg

SEQ ID NO: 787154 - DNA, 120 bp, Artificial Sequence
  ENSG00000261371_28 (sequence is synthesized)
gggtgggagagaggctgctgtcattgcgctgtggaatttcacagatgagaaccacgcctagccaaaatcacttttcctgtttgcctcagtgacacagctgcagggaccctcgtggatgtt

SEQ ID NO: 787155 - DNA, 120 bp, Artificial Sequence
  ENSG00000261371_29 (sequence is synthesized)
gtattaaataaatttgacctttgctctttgcagatctgtgaaatgttgtcttctgaggggccacatgcatctatagtgctgaggactccttgggcctctgaagtcacagagagaaccgag

SEQ ID NO: 787156 - DNA, 120 bp, Artificial Sequence
  ENSG00000261371_30 (sequence is synthesized)
cacagagagaaccgagcaggtctatgtttttgttttgttgttttgagacggagattcgctcttgttgcccgggctggactgcagcggcgcaacctctgctcactgcaacctccgcctcct

SEQ ID NO: 787157 - DNA, 120 bp, Artificial Sequence
  ENSG00000261371_31 (sequence is synthesized)
acctttggtgatctgcccgccttgtcctcatgtgtgctccacaggcctttgggttgggattgcaggcgtgagccaccatgcccagcctagactcttttgacaatatgatgaaagctgttg

SEQ ID NO: 787158 - DNA, 120 bp, Artificial Sequence
  ENSG00000261371_32 (sequence is synthesized)
gttcctttccccaacacacacacaccgagttgtatcacgaaaatgtcatacaatttccaggttttctgagtggtgggctcagattgaggtcaaaggatcagacgacctctaacgaccttc

SEQ ID NO: 787159 - DNA, 120 bp, Artificial Sequence
  ENSG00000261371_33 (sequence is synthesized)
atgtctctgttgatgatctggggacagccagatcccctgtgtccagggagttccttagtcccttgccaccaccagagaagggcaattgccacgggagctgcaaagaccctattcctactc

SEQ ID NO: 787160 - DNA, 120 bp, Artificial Sequence
  ENSG00000261371_34 (sequence is synthesized)
gggagctgcaaagaccctattcctactcctggtgccttacttatgcagcacgactgaattttttgttttgttttgttttgttgagacaggggcttgctctgttgcccaggctggagtgca

SEQ ID NO: 787161 - DNA, 120 bp, Artificial Sequence
  ENSG00000261371_35 (sequence is synthesized)
tgggctcaagcgatcctcccatctcagcttcctgggtagctgggaccagaggcgtgagccgccatagctggctaatttttaattttttttttgcagagatgaggtttcaccatggtgccc

SEQ ID NO: 787162 - DNA, 87 bp, Artificial Sequence
  ENSG00000261371_36 (sequence is synthesized)
cctccctccttggcctcgccccggcctgtggagcacacatgagtttaaaattactttcccttctgcctatatttccgaggaggaaac

SEQ ID NO: 787163 - DNA, 120 bp, Artificial Sequence
  ENSG00000261371_37 (sequence is synthesized)
aaattactttcccttctgcctatatttccgaggaggaaacttcatgcgcagggatctttcttagtggatttaatggctaaaaggtctgtctgaatccaggacgctggctttagccttcct

SEQ ID NO: 787164 - DNA, 120 bp, Artificial Sequence
  ENSG00000261371_38 (sequence is synthesized)
cggcagctgccgtaaccccggtgtctaaacctgaagcatcccaggagcacccactccaggagttttctcggccgcggaactcattagttagagcgccctcttgtgttctcatgtggtaat

SEQ ID NO: 787165 - DNA, 120 bp, Artificial Sequence
  ENSG00000261371_39 (sequence is synthesized)
cggtcactgaaggacttaaaatggtccttagccaacacacagtaaaacttttccctcttctgaccccaagaggtcagccacccatttcatgagcatatactggtcgccccatcagcgttc

SEQ ID NO: 787166 - DNA, 120 bp, Artificial Sequence
  ENSG00000261371_40 (sequence is synthesized)
tctgattggctaactgaacccactccccgacctagactcaagacaggcgaagtgacgcttaggtcaacattcactcactaaagcaacgactgtcgggcgattttgtctcccgctggtttt

SEQ ID NO: 787167 - DNA, 120 bp, Artificial Sequence
  ENSG00000261371_41 (sequence is synthesized)
ggaatggtgtctggagacatttttggttgtcacagctgggtgggtgtgctcccggcatctggtgggtagaaaccaagcatgctcctaaacatcctacaggcacagaaccgtctcccacga

SEQ ID NO: 787168 - DNA, 120 bp, Artificial Sequence
  ENSG00000261371_42 (sequence is synthesized)
ccaagcatgatcaagtcccaaatgccaataatggccaggttgagaaactctgcacagaagcatccagttatttgtctgtttgctcaacaagcttgtgctcatcatgctctgtgttcctga

SEQ ID NO: 787169 - DNA, 120 bp, Artificial Sequence
  ENSG00000261371_43 (sequence is synthesized)
cgctgtgctgggtgttggcggtgggaagattacaagagtcacatggcagctgtcctcctggaaggtacaacccagtagagatgcagactaacagagagccaattacaaagcagtgtgaca

SEQ ID NO: 787170 - DNA, 120 bp, Artificial Sequence
  ENSG00000261371_44 (sequence is synthesized)
agcgtcatggtggaaaattaaaagctcaaacaagggcacatgggaggggcttccaacacagactttgggggatccaggaaggtctaagaggaaagtgggtctcaccaaagccttgaccat

SEQ ID NO: 787171 - DNA, 120 bp, Artificial Sequence
  ENSG00000261371_45 (sequence is synthesized)
aggcagagggtaccagtggaaaaggtggggtgaagaacattgaggacaaaaggaagaagtgcaggaaggccctgaggcaagggagtggggggtgccctggagggatggcagcagggcagt

SEQ ID NO: 787172 - DNA, 120 bp, Artificial Sequence
  ENSG00000261371_46 (sequence is synthesized)
ctgtcagacccaagtggcctccagccctagaagccaattagtcctcctcaaaaagctgtcactgtcccctaagaattgctgccaggctcccactggcctgactcagtctttgagagtctt

SEQ ID NO: 787173 - DNA, 120 bp, Artificial Sequence
  ENSG00000261371_47 (sequence is synthesized)
aaggaggaggtctctgaaaggtacacaccaagaactctccccagcacagctgtttttaagactctccaccagcgtcattggcgtgttgggaagaaaccctctgccacagaggccagcttc

SEQ ID NO: 787174 - DNA, 120 bp, Artificial Sequence
  ENSG00000261371_48 (sequence is synthesized)
agcctttgcctaacaccgcaagggcaaatggaaaggtaaacgggaaggagatgtctccccagcaggctatttgaggacagtcttccctgcagaagatctcaacctggggtccacagagtg

SEQ ID NO: 787175 - DNA, 120 bp, Artificial Sequence
  ENSG00000261371_49 (sequence is synthesized)
gaaatgttagagtagggagctaggcaaacatgagcaggacaggtgagggcccccacaggaatgtcaggctaccatcaggtgatggtcaggtggttgttaaactgtctctgtaaaataata

SEQ ID NO: 787176 - DNA, 120 bp, Artificial Sequence
  ENSG00000261371_50 (sequence is synthesized)
attggttgcagccagctccaagcaaggacagtctctcaatagatacaaaacaccctgatctggtgatcagccgcttcccgataagatctcaggagctgggcaagcagcctggagcatgcg

SEQ ID NO: 787177 - DNA, 120 bp, Artificial Sequence
  ENSG00000261371_51 (sequence is synthesized)
caccaagaggcaaaatggcggaatttaaccagtatatgacctaccttcctctgggaacgcacgactggtaaggggaaaaatgcctcaagtgagcatgcgcgcaacttcagtaatcacact

SEQ ID NO: 787178 - DNA, 120 bp, Artificial Sequence
  ENSG00000261371_52 (sequence is synthesized)
gtgcatgcgaccccttccaagtgctggcaggtcaccacatacgcggacagcctgctgcaagggaagaatcaggggagatgagacgtaaatcccagaactatgccaaatacataaaacccc

SEQ ID NO: 787179 - DNA, 120 bp, Artificial Sequence
  ENSG00000261371_53 (sequence is synthesized)
aagttaagggtcaggcagggcacttagatctctcaagttgcctgcctgacccaagtgtagtgtacttccttttgttcctgctctaaaactttttaataaactctcactcctgctctaaaa

SEQ ID NO: 787180 - DNA, 120 bp, Artificial Sequence
  ENSG00000261371_54 (sequence is synthesized)
tatagtatcttcatgctgaaatgccaagcttccatgaagtgctgagaatagcctagaaaactcgtagtgggcaggaggaagatcatttctaaatactgtggttatttctgaagtcctctg

SEQ ID NO: 787181 - DNA, 120 bp, Artificial Sequence
  ENSG00000261371_55 (sequence is synthesized)
aaggcgagatctagagaaggtgtttggcctttgggaagcttcagaaacccagagaattgcagtgaagaagcctgaagatgcaagaaatccttctctacacccaagttccacatcagcccc

SEQ ID NO: 787182 - DNA, 120 bp, Artificial Sequence
  ENSG00000261371_56 (sequence is synthesized)
gtacaggagacgttctggctgttctcctgtacatttcctgcaaagacctaatgagatatgattactccatcctacagctttcacaatcaacagtgttgacatgaagagcctgccggactg

SEQ ID NO: 787183 - DNA, 120 bp, Artificial Sequence
  ENSG00000261371_57 (sequence is synthesized)
ggaactgagcacaggcaagcagatggagcatagcacacagtggcgtgaataacagctgtgaatgaatagtgacactggacttaactctccacccatcaccctctcattcatctgcctggc

SEQ ID NO: 787184 - DNA, 120 bp, Artificial Sequence
  ENSG00000261371_58 (sequence is synthesized)
ttaactctccacccatcaccctctcattcatctgcctggcattttccttacctgaatacgtaagcactagacatattcccaataggccaggcccttccttccttccttccttcctttctt

SEQ ID NO: 787185 - DNA, 120 bp, Artificial Sequence
  ENSG00000261371_59 (sequence is synthesized)
ggtagcaggtgaggctgaaaacgcaagtagcaggctaaaaactggtttcaagtcctcaccatctggtgaaacctcagagcccatcagatagaaaatgccagctgggactgtgctaattcg

SEQ ID NO: 787186 - DNA, 120 bp, Artificial Sequence
  ENSG00000261371_60 (sequence is synthesized)
agagaattgcagtgaagaagcctgaagatgcaagagtgagcgagaagggagggagtatgagagcagccaaggcaaaagttctagagaagaaagaatccttctctacacccaagttccaca

SEQ ID NO: 787187 - DNA, 120 bp, Artificial Sequence
  ENSG00000261456_0 (sequence is synthesized)
atggaaacaagagtcttcccctcccacatgggaggaaaattcagtttcagctcagctagggatttagtcttactaaagacgcgggaggaagttctccagcgagcagctttccccaacgtg

SEQ ID NO: 787188 - DNA, 120 bp, Artificial Sequence
  ENSG00000261456_1 (sequence is synthesized)
cagcgagcagctttccccaacgtggaaaggaccacgcaaggacacctgagctttccaacagatgttcagcgccaggggatccacaggtgggtgcacctgtgtggaagtaaagctgttgct

SEQ ID NO: 787189 - DNA, 120 bp, Artificial Sequence
  ENSG00000261456_2 (sequence is synthesized)
ggagggaggtgggcgcggggctatttaaacgttggcggagggcgggctgggtcgctgcgcgtctgctcctccttctcacgtttctcctgccgtcctaatcccgccttggccatgagggag

SEQ ID NO: 787190 - DNA, 120 bp, Artificial Sequence
  ENSG00000261456_3 (sequence is synthesized)
atcgtgctcacgcagatcgggcagtgcgggaatcagatcggcgccaagttctgggaggtgatctctgatgaacatgccatcgactccgctggcacctaccacggggacagccacctgcag

SEQ ID NO: 787191 - DNA, 120 bp, Artificial Sequence
  ENSG00000261456_4 (sequence is synthesized)
ctggagcgcatcaacgtgtactacaacgaggccagcggtggcaggtacgtgccccgcgctgtgctcgtggatctggagccgggcaccatggactctgtgcgctcggggcccttcgggcag

SEQ ID NO: 787192 - DNA, 120 bp, Artificial Sequence
  ENSG00000261456_5 (sequence is synthesized)
gtcttcaggccagacaacttcatcttcggtcagtgtggggccggaaacaactgggccaagggacactacaccgaaggcgcggagctgatggagtcagtgatggacgttgtcagaaaggag

SEQ ID NO: 787193 - DNA, 120 bp, Artificial Sequence
  ENSG00000261456_6 (sequence is synthesized)
gctgagagctgtgactgcctgcagggtttccagctgacccactccctgggtggggggactgggtctgggatgggtacccttctgctcagtaagatccgggaggagtacccagacaggatc

SEQ ID NO: 787194 - DNA, 120 bp, Artificial Sequence
  ENSG00000261456_7 (sequence is synthesized)
ttgcatagataacgaagctctgtatgacatatgttccaagaccctaaaactgcccacacccacctatggtgacctgaaccacctggtgtctgctaccatgagtggggtcaccacgtgcct

SEQ ID NO: 787195 - DNA, 120 bp, Artificial Sequence
  ENSG00000261456_8 (sequence is synthesized)
gcgcttcccgggccagctgaatgctgacctgcggaagctggccgtgaacatggtcccgtttccccggctgcatttcttcatgcccggctttgccccactgaccagccggggcagccagca

SEQ ID NO: 787196 - DNA, 120 bp, Artificial Sequence
  ENSG00000261456_9 (sequence is synthesized)
gtaccgggccttgactgtggctgagcttacccagcagatgtttgatgctaagaacatgatggctgcctgtgacccccgtcacggccgctacctaacggcggctgccattttcaggggtcg

SEQ ID NO: 787197 - DNA, 120 bp, Artificial Sequence
  ENSG00000261456_10 (sequence is synthesized)
catgcccatgagggaggtggatgaacaaatgttcaacattcaagataagaacagcagttactttgctgactggctccccaacaacgtaaaaacagccgtctgtgacatcccaccccgggg

SEQ ID NO: 787198 - DNA, 120 bp, Artificial Sequence
  ENSG00000261456_11 (sequence is synthesized)
gctaaaaatgtcagccaccttcattgggaataatacggccatccaggaactcttcaagcgtgtctcagagcagtttacagcaatgttcaggcgcaaggccttcctccactggtacacggg

SEQ ID NO: 787199 - DNA, 120 bp, Artificial Sequence
  ENSG00000261456_12 (sequence is synthesized)
cgagggcatggatgagatggaattcaccgaggccgagagcaacatgaacgacctggtgtctgaatatcagcaatatcaggatgccacggccgaggaggaggaggatgaggagtatgccga

SEQ ID NO: 787200 - DNA, 120 bp, Artificial Sequence
  ENSG00000261456_13 (sequence is synthesized)
ggaggaggtggcctagaactctccttttctaggtaaaggggggaagcagtgtggattctttactgtgttctgacagccatgtgtcactatacgcttgttaatttgtgtcttcacatctcc

SEQ ID NO: 787201 - DNA, 120 bp, Artificial Sequence
  ENSG00000261456_14 (sequence is synthesized)
gaaccgcacggcggcgtcctggggggtccactgtgaggacggggggtccactgtgaggacggggggtccaccgtgaggacggagcttcctctcctcagcacccacccaggaggggccggg

SEQ ID NO: 787202 - DNA, 120 bp, Artificial Sequence
  ENSG00000261456_15 (sequence is synthesized)
gcttgggacacctggggccgcgtccgctgtgaggacagggagacgctgctgcagctccgggacaccgaggcaaaagggtaaatcttttcaagacactaaaacaggtgactcagccctgtg

SEQ ID NO: 787203 - DNA, 120 bp, Artificial Sequence
  ENSG00000261456_16 (sequence is synthesized)
agctttgtgcctgacatgactcaaatggccagcaattttctccttctccagttaaacctgtccaaaattgaggaacctatccaggtgagaactggccactctaatttacccggaagcctt

SEQ ID NO: 787204 - DNA, 120 bp, Artificial Sequence
  ENSG00000261456_17 (sequence is synthesized)
tctgcaggagattcaaatatttgctaatgcttactgacaccttcactggttagatcgaggcattccccaccccatctgaaaaatgtttaccagaagaaataactcctcagtttgggtaat

SEQ ID NO: 787205 - DNA, 120 bp, Artificial Sequence
  ENSG00000261456_18 (sequence is synthesized)
ccaaaagcctgcaaagtgacaatggcccatctttcacagcaggcgtatcccaaaacctgtcctcagctttaagaatccaatatgaccttcactctgctggagaccacagtcctctggaaa

SEQ ID NO: 787206 - DNA, 120 bp, Artificial Sequence
  ENSG00000261456_19 (sequence is synthesized)
ggtgaaagggctaaccctactctaaagaagactccagctaaatcagaggcctgactgtctctaacacccatagcttattgtgggttagaactgctccaaagtaaaacgtataattgagtc

SEQ ID NO: 787207 - DNA, 120 bp, Artificial Sequence
  ENSG00000261456_20 (sequence is synthesized)
cggctccttagccagggcagctcaaaatccaggagtgtgctaaggtcatcctctgggaactgtggagctagggcccctgaacaccctcctatcctccgagtcgagtcgctcaatctgcct

SEQ ID NO: 787208 - DNA, 120 bp, Artificial Sequence
  ENSG00000261456_21 (sequence is synthesized)
tttctcctgccgtcctaatcccgccttggccatgagggagatcgtgctcacgcagatcgggcagtgcgggaatcagatcggcgccaaggtggcaggtacgtgccccgcgctgtgctcgtg

SEQ ID NO: 787209 - DNA, 120 bp, Artificial Sequence; identical to SEQ ID NO: 655225
  ENSG00000261509_0 (sequence is synthesized)

SEQ ID NO: 787210 - DNA, 120 bp, Artificial Sequence; identical to SEQ ID NO: 655226
  ENSG00000261509_1 (sequence is synthesized)

SEQ ID NO: 787211 - DNA, 120 bp, Artificial Sequence; identical to SEQ ID NO: 655227
  ENSG00000261509_2 (sequence is synthesized)

SEQ ID NO: 787212 - DNA, 120 bp, Artificial Sequence; identical to SEQ ID NO: 655228
  ENSG00000261509_3 (sequence is synthesized)

SEQ ID NO: 787213 - DNA, 120 bp, Artificial Sequence; identical to SEQ ID NO: 655229
  ENSG00000261509_4 (sequence is synthesized)

SEQ ID NO: 787214 - DNA, 120 bp, Artificial Sequence; identical to SEQ ID NO: 655230
  ENSG00000261509_5 (sequence is synthesized)

SEQ ID NO: 787215 - DNA, 120 bp, Artificial Sequence; identical to SEQ ID NO: 655231
  ENSG00000261509_6 (sequence is synthesized)

SEQ ID NO: 787216 - DNA, 120 bp, Artificial Sequence; identical to SEQ ID NO: 655232
  ENSG00000261509_7 (sequence is synthesized)

SEQ ID NO: 787217 - DNA, 120 bp, Artificial Sequence
  ENSG00000261509_8 (sequence is synthesized)
cacaagagcagaatctccgtgggacatctctctggagcatcaatattactgcagtatttggaagaaacaaatttaaataagttctaaggtgaagaatggaacatttaagacaagtctgga

SEQ ID NO: 787218 - DNA, 120 bp, Artificial Sequence
  ENSG00000261509_9 (sequence is synthesized)
aagtcatctgcctttaataactgtcgtttgtccttaacgtcagactttctccaagaccaaaactctaagaacttatttccattcttacaaatagtaaaaatgataaatcatatcaagtca

SEQ ID NO: 787219 - DNA, 120 bp, Artificial Sequence
  ENSG00000261509_10 (sequence is synthesized)
attgaaagtcctgcctgctgctttcctaaattgcaatatggccttggtatggttttatttgtacttttgtgggggattcgtggatctttagattaaaaaaaaaaaaataggtttttgaac

SEQ ID NO: 787220 - DNA, 120 bp, Artificial Sequence
  ENSG00000261509_11 (sequence is synthesized)
aatttttgcaagtttgcagctgttagttattgatttatttttccaacccatctaattcttctgtctctctcctctcctcaggctcaataattccatgggtctctaaggctgtgtttattt

SEQ ID NO: 787221 - DNA, 120 bp, Artificial Sequence; identical to SEQ ID NO: 748390
  ENSG00000261509_12 (sequence is synthesized)

SEQ ID NO: 787222 - DNA, 120 bp, Artificial Sequence; identical to SEQ ID NO: 748391
  ENSG00000261509_13 (sequence is synthesized)

SEQ ID NO: 787223 - DNA, 120 bp, Artificial Sequence; identical to SEQ ID NO: 748369
  ENSG00000261509_14 (sequence is synthesized)

SEQ ID NO: 787224 - DNA, 120 bp, Artificial Sequence; identical to SEQ ID NO: 748393
  ENSG00000261509_15 (sequence is synthesized)

SEQ ID NO: 787225 - DNA, 120 bp, Artificial Sequence; identical to SEQ ID NO: 655241
  ENSG00000261509_16 (sequence is synthesized)

SEQ ID NO: 787226 - DNA, 120 bp, Artificial Sequence; identical to SEQ ID NO: 655242
  ENSG00000261509_17 (sequence is synthesized)

SEQ ID NO: 787227 - DNA, 120 bp, Artificial Sequence; identical to SEQ ID NO: 655243
  ENSG00000261509_18 (sequence is synthesized)

SEQ ID NO: 787228 - DNA, 120 bp, Artificial Sequence; identical to SEQ ID NO: 655244
  ENSG00000261509_19 (sequence is synthesized)

SEQ ID NO: 787229 - DNA, 120 bp, Artificial Sequence; identical to SEQ ID NO: 748375
  ENSG00000261509_20 (sequence is synthesized)

SEQ ID NO: 787230 - DNA, 120 bp, Artificial Sequence
  ENSG00000261587_0 (sequence is synthesized)
cgctgccctgtcagtcgcctgtgagctcctgctccttcctgggcctgcagccctggagaatttgctcaccgaggtaggagtgccgctgtgggcagtgggcggcggcagcggacgagcggc

SEQ ID NO: 787231 - DNA, 120 bp, Artificial Sequence
  ENSG00000261587_1 (sequence is synthesized)
caggctgaccacctctgcctgactcagatgcctaagggccgggccggcagcctgcccacgacctccatcggctggcgcttccagctctggttcctaggactcacctgcccggagcgccac

SEQ ID NO: 787232 - DNA, 120 bp, Artificial Sequence
  ENSG00000261587_2 (sequence is synthesized)
ctggccagacgcctcaagaacaatagcttctacccattcgtgcagcaggagccaaacgtcttcgtgctcgaatactacctggacacactgtggaaggggatgctgctcttcatcatcagc

SEQ ID NO: 787233 - DNA, 120 bp, Artificial Sequence
  ENSG00000261587_3 (sequence is synthesized)
gtggtcctggtcagcttcagctccctgagagaggtgcagaagcaagagacctgggtcttcctcgtgtacggcgtgggcgtgggcctgtggctcgtgatctcgtcgctgccgcggcgccgc

SEQ ID NO: 787234 - DNA, 120 bp, Artificial Sequence
  ENSG00000261587_4 (sequence is synthesized)
acgcgcggcgtgtaccacttctccatccagggccgcaccgtgtgccagggccccttgcatctggtctacgtgcgcctggcgctcagctccgatgcccacggaaggtgcttcttccacctg

SEQ ID NO: 787235 - DNA, 120 bp, Artificial Sequence
  ENSG00000261587_5 (sequence is synthesized)
gtcctcggcggccacaggttggagcccctggtgctggtgcagctgtcggagcactacgagcaaatggaatacttgggccgttacatcgcccggaaactcaacatcaactacttcgactac

SEQ ID NO: 787236 - DNA, 120 bp, Artificial Sequence
  ENSG00000261587_6 (sequence is synthesized)
ctggccacctcctaccggcacgtggttcgccactggccaccccctggcgctggcactgtgatgggcaagagccccatgggtcacaagcccagctcctctcagtccagcctggaggtgtga

SEQ ID NO: 787237 - DNA, 120 bp, Artificial Sequence
  ENSG00000261587_7 (sequence is synthesized)
ctctgagggcctcccccacctcgggactgtgttctcggtaacctcccagccccactctggggcagatcaaatgtgagtcccactcactggccttcctttcaataaagctgcctcagcttc

SEQ ID NO: 787238 - DNA, 120 bp, Artificial Sequence
  ENSG00000261587_8 (sequence is synthesized)
gatgacaccgatcactgtttaaggtctttgggtggggccgtttccgcacgcagagggtaaatacaacacggtcttcggtgctgggggccgtggagagggcgccggggcttcgggcaggac

SEQ ID NO: 787239 - DNA, 120 bp, Artificial Sequence
  ENSG00000261587_9 (sequence is synthesized)
gggggatgcagcctggtaggggaaggagacgcctggacggcgactcgggtctgtcctgtcccggccccagttgagcgccacctgctcccacagcaaatggaatacttgggccgttacatc

SEQ ID NO: 787240 - DNA, 120 bp, Artificial Sequence
  ENSG00000261587_10 (sequence is synthesized)
gcctctgaggttcggcccatcactagagaggctgggaactccatcccctcttagccagcagcacttaacttgtcctacctgacctcagaggtgctgaccaatgcgtggaatccaggagtc

SEQ ID NO: 787241 - DNA, 120 bp, Artificial Sequence
  ENSG00000261587_11 (sequence is synthesized)
agaatctggcccattctggacccggtgcctgctgctactccaaccagcaatggggtggggtgcggccagagaacaagccctgtgcctggggtgcatgcttgccccagtacccacaaagct

SEQ ID NO: 787242 - DNA, 120 bp, Artificial Sequence
  ENSG00000261587_12 (sequence is synthesized)
gctgccgcttgcctccaagggggtgggcacaagagtcccgggccagggtgcagggcctcctaggagggaggatgtgcagtgccctgacacccgctcgccatgcccgctggaaccccaggc

SEQ ID NO: 787243 - DNA, 120 bp, Artificial Sequence
  ENSG00000261587_13 (sequence is synthesized)
ccgcgcccctgacacccgctcaccgtgcccactggaaccccaggcctgcgcccctgacacccacttgctgtgcctgctggaaccccaggcccacactctcctgtccagtggatcccccag

SEQ ID NO: 787244 - DNA, 120 bp, Artificial Sequence
  ENSG00000261587_14 (sequence is synthesized)
ctatcactgcagcacctgaggcctcctgagtgctgggggctgttgtggaagccgagaaggctgtgggccatggggtcccagggaaagcaggacctggctctccggatcttcaggcattat

SEQ ID NO: 787245 - DNA, 120 bp, Artificial Sequence
  ENSG00000261587_15 (sequence is synthesized)
cagctgaacgtccctgcaaccaggagcagctacataatttgcagggtcccatgccaaatgaaaatttggagcccattgttaggaagttaataagtggggtgcagtggtgtatacctgtag

SEQ ID NO: 787246 - DNA, 120 bp, Artificial Sequence
  ENSG00000261587_16 (sequence is synthesized)
tctcggctgctcaggaggctaaggtgggaggacagcttaaacccaggagttcaaggctagcctggacaacatagtgagaccccagtctctaataaaataaacaataaaaataaaaataaa

SEQ ID NO: 787247 - DNA, 120 bp, Artificial Sequence
  ENSG00000261594_0 (sequence is synthesized)
cggccgcggaagccggaggccggcgcgcagggcgagggcaccgggggcggggggctccgctccccgtctgacccctcttgcccccggccagtcagccagtaagtgcggctcctcagactt

SEQ ID NO: 787248 - DNA, 120 bp, Artificial Sequence
  ENSG00000261594_1 (sequence is synthesized)
aagtgcggctcctcagactttcgagacagcgaacggaccgaccgggactgccagccgctccgggtcaaggactcgccccacccgtgccccccaccaggcgctcccaactcactggtgagc

SEQ ID NO: 787249 - DNA, 80 bp, Artificial Sequence
  ENSG00000261594_2 (sequence is synthesized)
gcgggacagccggggctccaggggctgctgctcgtggcggcggcgctgagccagcccgcggcaccctgccccttccagtg

SEQ ID NO: 787250 - DNA, 120 bp, Artificial Sequence
  ENSG00000261594_3 (sequence is synthesized)
ttccagtgctactgcttcggcggccccaagctgctgctgcgctgcgcgtcgggagccgagctccgccagcctccgcgggacgtgccgcccgacgcgcgcaacctcaccatcgtaggcgcc

SEQ ID NO: 787251 - DNA, 120 bp, Artificial Sequence
  ENSG00000261594_4 (sequence is synthesized)
aacctgacggtgctgcgcgcggccgccttcgccggcggggacggggacggcgaccaggcggcgggcgtgcgcctgccgctcctgagcgcgctgcgcctcacgcacaaccacatcgaggtg

SEQ ID NO: 787252 - DNA, 120 bp, Artificial Sequence
  ENSG00000261594_5 (sequence is synthesized)
cacatcgaggtggtggaggacggcgccttcgacgggctgcccagcctggcggcgctcgacctcagccacaacccgctgcgcgccctgggcggcggcgccttccgcgggctgcccgcgctg

SEQ ID NO: 787253 - DNA, 120 bp, Artificial Sequence
  ENSG00000261594_6 (sequence is synthesized)
ctcaaccacgcgctggtgcgcggcggccccgcgctgctggccgcgctggacgctgcgctggcaccgctggccgagcttcgcctgctgggcctagcgggcaacgcgctgagccgtctgccg

SEQ ID NO: 787254 - DNA, 120 bp, Artificial Sequence
  ENSG00000261594_7 (sequence is synthesized)
acgcgctgagccgtctgccgccagccgccctgcgcctggcgcgcctggagcagctggacgtgcgcctcaacgcgctggccggcctggaccccgacgagctgcgcgcgctggagcgcgatg

SEQ ID NO: 787255 - DNA, 80 bp, Artificial Sequence
  ENSG00000261594_8 (sequence is synthesized)
ctgctgctcgccgacaaccccctgcgctgcggctgtgccgcacgccccctgctggcctggctgcgcaacgccacggagcg

SEQ ID NO: 787256 - DNA, 120 bp, Artificial Sequence
  ENSG00000261594_9 (sequence is synthesized)
gcgctgctagaccggccgctactggacctggacggggcgcggcttcgctgcgcggacagcggcgccgacgctcgcggagaggaggcggaggccgccggcccggagctggaagcctcctac

SEQ ID NO: 787257 - DNA, 120 bp, Artificial Sequence
  ENSG00000261594_10 (sequence is synthesized)
gtgttcttcgggctggtgctggcactcatcggcctcatcttcctcatggtgctctacctaaaccgccgcggcatccagcgctggatgcgcaacctgcgcgaggcgtgccgggaccagatg

SEQ ID NO: 787258 - DNA, 80 bp, Artificial Sequence
  ENSG00000261594_11 (sequence is synthesized)
gatggagggctaccactaccgctacgagcaggacgccgacccgcgccgcgcgcccgcgcccgccgcgcccgcgggctccc

SEQ ID NO: 787259 - DNA, 120 bp, Artificial Sequence
  ENSG00000261594_12 (sequence is synthesized)
ccccgagctctgagaccttcccctgactcggaggcgctaagccgtaccctctcgttcccgcctccgagagctcccaccgtcaaagacccagagatagccggtccgaatccagaaaccccg

SEQ ID NO: 787260 - DNA, 120 bp, Artificial Sequence
  ENSG00000261594_13 (sequence is synthesized)
cctgcccaccctagtttccgaaacctccctcctgaaccactgaaagtccgttccccgtctcggagctcacacagagaatctgtccttcaaggccaaagctctgagacttgcccccagcac

SEQ ID NO: 787261 - DNA, 120 bp, Artificial Sequence
  ENSG00000261594_14 (sequence is synthesized)
cctgtgcttggagctccgacacccgagactgcactgacctccctcgccagctcggagccctcagtcccctccggggcttgagggcccttccatcccattctggactcgaagcacagcacc

SEQ ID NO: 787262 - DNA, 120 bp, Artificial Sequence
  ENSG00000261594_15 (sequence is synthesized)
cccatcagaatggttttgtggattttgagccctttgtcccatcccagagctcagagccctccatcctgcatggaggcccaaccctggggctctgaggattgggcaccctcccctcatcta

SEQ ID NO: 787263 - DNA, 120 bp, Artificial Sequence
  ENSG00000261594_16 (sequence is synthesized)
agaatatatttcatacccctgcccccccttcacccacccccgcctctggctcaggcccttcccttcctcggctcaggcatggggctcagctcctagtctgtccctcccatcccagggaca

SEQ ID NO: 787264 - DNA, 120 bp, Artificial Sequence
  ENSG00000261594_17 (sequence is synthesized)
agcacagcccatctagccttagtgtggagccaactctcagcctttcccaccagggcgctgacctcccgatactcagtgctggtccccagtctcagactctcagctcttcaccccgatctg

SEQ ID NO: 787265 - DNA, 120 bp, Artificial Sequence
  ENSG00000261594_18 (sequence is synthesized)
actttcgtcctcctgcccaagcctttggctcttgaccccccccccatacccaatgctggcactcagcacccacccctgccattcactagtcaaggtccagtgaggaatccgtccctggga

SEQ ID NO: 787266 - DNA, 120 bp, Artificial Sequence
  ENSG00000261594_19 (sequence is synthesized)
tgtcctcatccccttttcgtcccaggacgagctcttcagtcctgccggataggtgcaggtgccatgcacccctagtgcatactggcagatccttgtagggaaggagagagtcttgggtgt

SEQ ID NO: 787267 - DNA, 120 bp, Artificial Sequence
  ENSG00000261594_20 (sequence is synthesized)
gtgaaagggatagtggggcatcgtggcctcagagaggggcaggaagtggggtctgaagggctggaagttgctgcccttcgatttctctatgctctctcccacccctgtggctcttcgccc

SEQ ID NO: 787268 - DNA, 120 bp, Artificial Sequence
  ENSG00000261594_21 (sequence is synthesized)
ttggggattccttgccaccaccgctaccaccaccacctcaccccgtgtatcttctgaaagagaagtaggtctttcctcctgcctcaggcacaagccctcctggttcagggtcagaagctc

SEQ ID NO: 787269 - DNA, 120 bp, Artificial Sequence
  ENSG00000261594_22 (sequence is synthesized)
agcaccttgccttctccatgatcccaaagcacaattggtgagtgggggagaggaccccctctccctgactccccaccctctagatcaggcagaatggctggcctgtgctgcgtctgcaca

SEQ ID NO: 787270 - DNA, 120 bp, Artificial Sequence
  ENSG00000261594_23 (sequence is synthesized)
caggaagtcaccttcctttaatatattggcttgaggcctgcctgccctccccatacccagaaaatctggatctcccttgagcagttttctataaagtctgcaataatctcagatactcta

SEQ ID NO: 787271 - DNA, 120 bp, Artificial Sequence
  ENSG00000261609_0 (sequence is synthesized)
gctccagcttctgctcagagcgcggagagccgggccgggcgggcgcgcgcgcaggactcgggccgctcgaggggtccggccggacggtgtcgggagccggacccgtcggcagaggagcgg

SEQ ID NO: 787272 - DNA, 120 bp, Artificial Sequence
  ENSG00000261609_1 (sequence is synthesized)
acccgtcggcagaggagcgggcgccgcgatggctgagggcagtgccgtgtctgaccctcagcacgccgcgcgtctgctgcgagcgctcagctctttccgcgaggagtctcgcttctgcga

SEQ ID NO: 787273 - DNA, 120 bp, Artificial Sequence
  ENSG00000261609_2 (sequence is synthesized)
cgcgcacctggtcctcgacggggaggagatcccggtgcagaagaacatcctggcggcggccagcccgtacatcaggacaaagttaaactataatcctccaaaagatgatggatcaactta

SEQ ID NO: 787274 - DNA, 120 bp, Artificial Sequence
  ENSG00000261609_3 (sequence is synthesized)
taagattgaacttgaagggatatcggtaatggttatgagagagatcctggattacatcttcagtgggcagatcaggctaaatgaagatacaatccaagatgttgttcaggcagctgacct

SEQ ID NO: 787275 - DNA, 120 bp, Artificial Sequence
  ENSG00000261609_4 (sequence is synthesized)
gctgctactgacggaccttaaaaccctgtgctgtgagtttttggaaggctgcattgctgctgagaactgtattggtatccgtgactttgcactacattactgcctccatcacgttcatta

SEQ ID NO: 787276 - DNA, 120 bp, Artificial Sequence
  ENSG00000261609_5 (sequence is synthesized)
ccttgccacagaatacctggagactcatttccgagacgtcagcagcacggaagaattcttagagctgagtcctcaaaagcttaaagaagtgatttctcttgagaagttaaacgttggcaa

SEQ ID NO: 787277 - DNA, 120 bp, Artificial Sequence
  ENSG00000261609_6 (sequence is synthesized)
tgaaagatatgtctttgaagcagtaattcgatggatagcacatgatacagaaataagaaaggtccacatgaaggatgttatgtcagctctgtgggtttcagggttggactccagttattt

SEQ ID NO: 787278 - DNA, 120 bp, Artificial Sequence
  ENSG00000261609_7 (sequence is synthesized)
acgggaacagatgctgaatgaaccattagtacgagaaattgtcaaagagtgtagcaatataccgctcagccagccgcagcaaggggaggcgatgctggccaacttcaaaccccggggcta

SEQ ID NO: 787279 - DNA, 120 bp, Artificial Sequence
  ENSG00000261609_8 (sequence is synthesized)
ctctgagtgcatcgtgactgttggtggagaagagagagtttcacggaaacccacagcagcgatgcgatgcatgtgccctctctatgaccctaacaggcagctttggatcgaactggcccc

SEQ ID NO: 787280 - DNA, 120 bp, Artificial Sequence
  ENSG00000261609_9 (sequence is synthesized)
tttaagcatgccgagaattaaccatggagttctctcagcagaaggatttttgtttgtattcgggggccaagatgaaaataagcagactcttagctcaggagaaaagtatgatccagatgc

SEQ ID NO: 787281 - DNA, 120 bp, Artificial Sequence
  ENSG00000261609_10 (sequence is synthesized)
aaatacatggacagcattgccacctatgaacgaggcaagacataacttcggaattgtggagatagatgggatgctgtacattttgggaggagaggatggtgaaaaggagctgatttccat

SEQ ID NO: 787282 - DNA, 120 bp, Artificial Sequence
  ENSG00000261609_11 (sequence is synthesized)
ggagtgttacgatatttattctaaaacctggacaaagcaacctgatttgaccatggtcagaaagatcggctgctatgcagctatgaaaaagaaaatctacgccatgggtggaggctccta

SEQ ID NO: 787283 - DNA, 120 bp, Artificial Sequence
  ENSG00000261609_12 (sequence is synthesized)
cggaaagctttttgagtctgtagagtgttatgatcccaggacccagcagtggactgccatatgtccactaaaagagaggaggtttggagcggtggcctgtggagttgctatggagctgta

SEQ ID NO: 787284 - DNA, 120 bp, Artificial Sequence
  ENSG00000261609_13 (sequence is synthesized)
tgtgtttgggggagtccgaagtcgtgaggacgcccagggtagcgagatggtaacttgcaagtccgagttctaccatgatgagtttaaaaggtggatctatcttaacgaccagaatttatg

SEQ ID NO: 787285 - DNA, 120 bp, Artificial Sequence
  ENSG00000261609_14 (sequence is synthesized)
catccccgccagttcctcttttgtttatggagctgtacctataggagccagtatttatgttattggagatcttgatacaggtaccaattacgactacgtgcgtgagtttaaaagaagcac

SEQ ID NO: 787286 - DNA, 120 bp, Artificial Sequence
  ENSG00000261609_15 (sequence is synthesized)
aggaacctggcaccacactaaaccactccttccatccgaccttcgccgtacaggatgtgcagccttacgcattgcgaattgcaagcttttccgcctgcagcttcagcaaggcttattccg

SEQ ID NO: 787287 - DNA, 120 bp, Artificial Sequence
  ENSG00000261609_16 (sequence is synthesized)
tattcgtgttcattccccttgaggaggaagcagagcagagtgcgagatcctgacccaagagcaccataacatagctccgaaagggagagcagagatggcagctgaaactcactctgtgct

SEQ ID NO: 787288 - DNA, 120 bp, Artificial Sequence
  ENSG00000261609_17 (sequence is synthesized)
gggctttggtatggtaactctttggtggttttatgatgcttacaaacttgagctttagctcttgtttgggagaacacgtaactgttgaaaaactacctgggaggagtgagttcctccagt

SEQ ID NO: 787289 - DNA, 120 bp, Artificial Sequence
  ENSG00000261609_18 (sequence is synthesized)
gtgcattttccctgaagggaactcatgtctgactgctgtattcaaatacgtagctttggtaacaaacaaaatccgtatatgcaaatcaacatatccaaacatgccaagactgcttttcca

SEQ ID NO: 787290 - DNA, 120 bp, Artificial Sequence
  ENSG00000261609_19 (sequence is synthesized)
ctgcacttggaaggatatattatgcctaaccctgcccaacaaattaaggtttgtgcctaaaatgttagattggactgtatgccagttagtctccatttattcctagtactctgtcctaag

SEQ ID NO: 787291 - DNA, 120 bp, Artificial Sequence
  ENSG00000261609_20 (sequence is synthesized)
aatctttttaaaactatatcatgatgaattgaaatgaagataaaattgctcttttgtaactttatcttagtaatgtaaagattcagtaaattgatgagtcaggttgcagccctcatgtga

SEQ ID NO: 787292 - DNA, 120 bp, Artificial Sequence
  ENSG00000261609_21 (sequence is synthesized)
actgaaagaagttgctcgcttctgtgttgacttagatcaagacacgtcacgcatcctttctggggtagtacctgtggagccgggaagggtctcctgcagtgccattctgccttctcaatg

SEQ ID NO: 787293 - DNA, 120 bp, Artificial Sequence
  ENSG00000261609_22 (sequence is synthesized)
agcaaaaccattttctaagtatgaggatattagtgagtaggagattttataaaagaaagacctgagtcagacaaataataaaggtctgctgtggctaaaaaagcaaaaacaaaaaagcta

SEQ ID NO: 787294 - DNA, 120 bp, Artificial Sequence
  ENSG00000261609_23 (sequence is synthesized)
tccagacaaaatacatagggatcagaaactttttcatataacctgtctgaaagcacacaaagtcttgtttactactgtttagggtttgaaaacttgtcttagaatgcgaatctgtgttaa

SEQ ID NO: 787295 - DNA, 120 bp, Artificial Sequence
  ENSG00000261609_24 (sequence is synthesized)
gaatctagtctttgtaatagaagtttcccagtggcattcactagtgagagttttagacaaattatgttacgagtaaagtttggctggtagaataaactacctcaacttaatttcattctg

SEQ ID NO: 787296 - DNA, 120 bp, Artificial Sequence
  ENSG00000261609_25 (sequence is synthesized)
ttcatagtagagcaaattaatcttttcctccttccctcctttcctatctctcattctcacctcaacccactttaccccacttctcattgggggaaaaatgtctttcgttcgtggaacgta

SEQ ID NO: 787297 - DNA, 120 bp, Artificial Sequence
  ENSG00000261609_26 (sequence is synthesized)
tcttgtaagatattttgttttccacttgaattacaccaccctagtgtgaaatcggggacttcaaagtgcttgattccttcctaaattgaattttatgcaatgtcaaatttctaatcaatt

SEQ ID NO: 787298 - DNA, 120 bp, Artificial Sequence
  ENSG00000261609_27 (sequence is synthesized)
taatatacagtacttcatttttaattgttttctaaaaaaaaggttttttttttccttttggaatatggctgtaagaagcagcattttgtcttattaacacatgtataaaggtatcctttg

SEQ ID NO: 787299 - DNA, 120 bp, Artificial Sequence
  ENSG00000261609_28 (sequence is synthesized)
gttttaagtcgagaacaggaatttcttctagaaacttcctgtatggaacgtttatatgcaattaacatgcatatgaaaaacatcacttacgttctcccacccatagacataaaaaagggt

SEQ ID NO: 787300 - DNA, 120 bp, Artificial Sequence
  ENSG00000261609_29 (sequence is synthesized)
gacctgtgattttttttcttatacctgctggaagtcagtacaatgcgtcaaaagttgctgaaagatgctgtgcctatggggttctagagagtgttgagtgtggtacattaactctccatt

SEQ ID NO: 787301 - DNA, 120 bp, Artificial Sequence
  ENSG00000261609_30 (sequence is synthesized)
ttagccagaagatacctgataagagaaggtgtaaggtttttatcttatatgccagaggcaccaggccagatgtgccgcacagtcatgtaattcaatcatgtttaatatgtcagtcaaaac

SEQ ID NO: 787302 - DNA, 120 bp, Artificial Sequence
  ENSG00000261609_31 (sequence is synthesized)
caaattcagaattgttttgtgtaccagtcagctgttgtctgcacattttcgtagtgacagtgtggagatctttttaatgaaagcaaactatgtggcctctgcaaagaaaggaagattttt

SEQ ID NO: 787303 - DNA, 120 bp, Artificial Sequence
  ENSG00000261609_32 (sequence is synthesized)
ctttttacaactagatattagttttagaggaaggaaatagctgaaaaactaaatttgctttggtgaaatgtcctgtacagaacagtaccttggcattcagcagctgtaattggggaacat

SEQ ID NO: 787304 - DNA, 120 bp, Artificial Sequence
  ENSG00000261609_33 (sequence is synthesized)
taaaacagtaactgacatccagttaaagccacgatcgtcagcaattctccttttttaatttctgatatttaaagttttttttccagtctacaccaggcctctccaaggagacagttcatt

SEQ ID NO: 787305 - DNA, 120 bp, Artificial Sequence
  ENSG00000261609_34 (sequence is synthesized)
atttaggagtgaatgtgttcctcttgcaatattatcagtacctgcatgacttggtaaattcattttataaaaatagtgttttttttttttaatttcagttcattgactctataactgcag

SEQ ID NO: 787306 - DNA, 120 bp, Artificial Sequence
  ENSG00000261609_35 (sequence is synthesized)
aaattagataatgttttataaaataaatttgccacataatatgggatgcaataaccaacaaagctgctaagtgccaaactgttattttactatatataaatattaaaatattgtgttgaa

SEQ ID NO: 787307 - DNA, 120 bp, Artificial Sequence
  ENSG00000261609_36 (sequence is synthesized)
gtatagggatgtatttaattttactatgctccaacattaatcatgactcttttgtaaattacagttatttcagtattgtaaaataaatgttgactcatttcatgcaggtttgtgttttaa

SEQ ID NO: 787308 - DNA, 120 bp, Artificial Sequence
  ENSG00000261609_37 (sequence is synthesized)
tgtagtttgtccagagtttacggctgacacttggagcaactgaggagccatttgttaagagttacttctgccatactggaagcagacgcctcactacagctctctttttctttcctcctc

SEQ ID NO: 787309 - DNA, 120 bp, Artificial Sequence
  ENSG00000261649_0 (sequence is synthesized)
agtgcagccccggtgacgcctcctgtggctcagtcacatagctgtgtggtacgtgactggaggcatatcactgtcctcgcctggatcacgccaatgtgaccccaaccccaccaccctccc

SEQ ID NO: 787310 - DNA, 120 bp, Artificial Sequence
  ENSG00000261649_1 (sequence is synthesized)
caccccatgatgtccgaaaaaacccaacaaagaaaattggctgggaccaagaaaaagtttacagactatcatcagtggaacagtgctggtgttggtaccggagcaaccgacaccaaaaag

SEQ ID NO: 787311 - DNA, 120 bp, Artificial Sequence
  ENSG00000261649_2 (sequence is synthesized)
aagaaaataaatcatggcgctaaccctgagacaaccacttcggggggctgccactcgcctgaggataaacaacagaaccgagctcagctgaaagaggaaaataaggcaagccaccaacat

SEQ ID NO: 787312 - DNA, 120 bp, Artificial Sequence
  ENSG00000261649_3 (sequence is synthesized)
cagcaagccctaaggaggcagctagaggcccaggatcataccatacgaatccttatgtgtcagaaaactgaactggagacagcgctccatgacagccaggatgctgccaggaaatttgaa

SEQ ID NO: 787313 - DNA, 120 bp, Artificial Sequence
  ENSG00000261649_4 (sequence is synthesized)
gaagattccaaggatctggcagcccgcctgcatcattcctggcactttgcaggagagttacagcgggctctctctgctatgtccgcagagcacgagagggcggacaagtacatcaaggag

SEQ ID NO: 787314 - DNA, 120 bp, Artificial Sequence
  ENSG00000261649_5 (sequence is synthesized)
ttaacaaaggagagggaagccatgagtctggagctgttcaggaacatcataaccaataaggagctgaaggagaaaaatgccgaactacaagaaaaacttcgactggtagaaactgaaaag

SEQ ID NO: 787315 - DNA, 120 bp, Artificial Sequence
  ENSG00000261649_6 (sequence is synthesized)
tctgagatccagctccacatcaaggagctaaaaaggaaactggagacggacaaaatcccgctgccacaggttcaaaccaacactttgcaggagaagatgtggaggcaggaggaggagcta

SEQ ID NO: 787316 - DNA, 120 bp, Artificial Sequence
  ENSG00000261649_7 (sequence is synthesized)
cgggatcaggaggagctacgggatcaggagaagctacggaagcacgaggagaagatgtggagacaggagcagaggctgcgggaccaggagaaggagctgcgggagcaggagcagcagatg

SEQ ID NO: 787317 - DNA, 72 bp, Artificial Sequence
  ENSG00000261649_8 (sequence is synthesized)
gcagataggggagcaggaggagcagatgcgaaagcaggaggagcagatgtggaagcaggaggagcagatggg

SEQ ID NO: 787318 - DNA, 120 bp, Artificial Sequence
  ENSG00000261649_9 (sequence is synthesized)
agcaggaggagcagatgcggaagcaggtggagaggctgcaattcaaggaggagaggctgtgggatgagtatgagaagatgcaggaggaggaggagaagatccggaggcaggtggagaaga

SEQ ID NO: 787319 - DNA, 120 bp, Artificial Sequence
  ENSG00000261649_10 (sequence is synthesized)
gagaagatccggaggcaggtggagaagaggcgggagaagaaggagaggatgggagagcaggagaagacgcaggaggagcggtgctcagagccctgcctccctccctccaaatatccttct

SEQ ID NO: 787320 - DNA, 120 bp, Artificial Sequence
  ENSG00000261649_11 (sequence is synthesized)
gatatgagccaccctggcagcctggagcctgcacgagaggccgggaagggttattcccatgacaaccgcactgcacagatcatgcagctgccccctggaatgaagaacgcccaggagcgc

SEQ ID NO: 787321 - DNA, 120 bp, Artificial Sequence
  ENSG00000261649_12 (sequence is synthesized)
ccaggcttaggcagcacctcctgcatcccattcttctacggaggagacaagaaaaagatcaagatcatcagtatctaaaaagaacggtcaacaaggcctacagaagtgtaagccgccatg

SEQ ID NO: 787322 - DNA, 120 bp, Artificial Sequence
  ENSG00000261649_13 (sequence is synthesized)
tgaccttgtgaatacagtctgagaacaaacttgaaaaaaagaaaatttattttaaattgtggcaaaatactggccgggcacggtggcctgcacctgtaatcacaccactttgggaggcct

SEQ ID NO: 787323 - DNA, 120 bp, Artificial Sequence
  ENSG00000261649_14 (sequence is synthesized)
aaattctacctgaggactctaatatctatgtatgtttctattgttttttttgtttgttttctccttttgtcttgcgttgtcttgtcttatggcatgcctagtaaagttttatctgcctcc

SEQ ID NO: 787324 - DNA, 120 bp, Artificial Sequence
  ENSG00000261649_15 (sequence is synthesized)
ctaaaggtcccttctgcaggatgcagtgtcctgcccagaagacagcatgggccatttcttgctgcttttgtgcgtggttgttagaggcaggttggggctgagtcagctgctgtgggtgag

SEQ ID NO: 787325 - DNA, 120 bp, Artificial Sequence
  ENSG00000261649_16 (sequence is synthesized)
ggacacagagctcggaggccaagtgcccaccccacccatacttggctgtggccttggtcaaatcctaggcggagttgagggtacttgtaccatgaaggtacagaagagtatctttagtat

SEQ ID NO: 787326 - DNA, 79 bp, Artificial Sequence
  ENSG00000261649_17 (sequence is synthesized)
gtattatggtaatatacataaaacatgtttgtaaggattcataaaaaactcaggagagaggaacagtgttgggggaaga

SEQ ID NO: 787327 - DNA, 120 bp, Artificial Sequence
  ENSG00000261649_18 (sequence is synthesized)
cataaaaaactcaggagagaggaacagtgttgggggaagatatttcccttctgtaccttctgaggtttggactatgccaatgtatcattctttcaaaaatcaacaaaggattaatttcct

SEQ ID NO: 787328 - DNA, 120 bp, Artificial Sequence
  ENSG00000261652_0 (sequence is synthesized)
gatccccacaacatccgggagccggcgaccacttccagttgctatggttacgagttgcaacctccagaaagaattcgtggtttcacccgggaaaacagctccccggattaaacggatagg

SEQ ID NO: 787329 - DNA, 120 bp, Artificial Sequence
  ENSG00000261652_1 (sequence is synthesized)
tttacacatactgatccacccagctattcatcttctgtttgctgctttaattgggtgcggttaaaaggccacgtccctaggcgttcaccggctttcttgccatctgctgcatgaaaactg

SEQ ID NO: 787330 - DNA, 120 bp, Artificial Sequence
  ENSG00000261652_2 (sequence is synthesized)
actttgccgaaaaaattaacaaagaagagcgaaaatgacagaccgcaaccgggataagaaaagtacttcaccttcaaattcagacacagaaatgaaatctgaacaactgcctccttgtgt

SEQ ID NO: 787331 - DNA, 120 bp, Artificial Sequence
  ENSG00000261652_3 (sequence is synthesized)
atgttggatccaaagacactccagacagccacctcactatcaaaacctcaaatgattatgtataaaaccaattcaagtcattatggtgaatttctacctattccacagtttttcccctgc

SEQ ID NO: 787332 - DNA, 120 bp, Artificial Sequence
  ENSG00000261652_4 (sequence is synthesized)
aattatactccaaaggagcaagtattttcaagccatatcagagcaactggattttatcaaaataacactctaaatactgcacctgacagaaccagaactcttgattttcctaatattcaa

SEQ ID NO: 787333 - DNA, 120 bp, Artificial Sequence
  ENSG00000261652_5 (sequence is synthesized)
cacactctatgaaaatatattcctttgtatattgaagagaaaatatactcgggaaaaatgagtgttaaatctaagggtagaatacctaataaagaagataaaaagttttgaatcaatttt

SEQ ID NO: 787334 - DNA, 120 bp, Artificial Sequence
  ENSG00000261652_6 (sequence is synthesized)
taaaataagttaaataaagtatttcaactgataactacatgacagtgactttttaaatgaaaatatgttcaaaatagcaaaataaaaggtagaaagtgttttagtccatgtaatccaaaa

SEQ ID NO: 787335 - DNA, 120 bp, Artificial Sequence
  ENSG00000261667_0 (sequence is synthesized)
cgtgattggggttgaccccctcctccccggcctcgggctattttccgcaggaggccgctgcaggcagacgctgaggccctcggggaccccggagccgccccagtacaagagccccgagga

SEQ ID NO: 787336 - DNA, 120 bp, Artificial Sequence
  ENSG00000261667_1 (sequence is synthesized)
ggggctggccggtcccgccccctcggtcccagggctgactcctcctccaggacgcagatccctgcagcccggcaggagagaaggctgagccttctggcgtcatggagaggctcgtcctaa

SEQ ID NO: 787337 - DNA, 120 bp, Artificial Sequence
  ENSG00000261667_2 (sequence is synthesized)
ccctgtgcaccctcccgctggctgtggcgtctgctggctgcgccacgacgccagctcgcaacctgagctgctaccagtgcttcaaggtcagcagctggacggagtgcccgcccacctggt

SEQ ID NO: 787338 - DNA, 120 bp, Artificial Sequence
  ENSG00000261667_3 (sequence is synthesized)
gcagcccgctggaccaagtctgcatctccaacgaggtggtcgtctcttttaaatggagtgtacgcgtcctgctcagcaaacgctgtgctcccagatgtcccaacgacaacatgaagttcg

SEQ ID NO: 787339 - DNA, 120 bp, Artificial Sequence
  ENSG00000261667_4 (sequence is synthesized)
cgtgatcaccaggcgctgctgttcctgggctctctgcaacagggcactgaccccacaggaggggcgctgggccctgcgaggggggctcctgctccaggtgggcctcagcctcctcagggc

SEQ ID NO: 787340 - DNA, 120 bp, Artificial Sequence
  ENSG00000261667_5 (sequence is synthesized)
cctgttgtgagggccctccctttacgccccctcctggccctgctggcccatcccgtctcctgcctccaactgccatcctgcctccgccccttccaggacactggggggggaccctccctc

SEQ ID NO: 787341 - DNA, 120 bp, Artificial Sequence
  ENSG00000261667_6 (sequence is synthesized)
tctgaggtggtggggagggtgccattgcctccatcccggatctagccacctcactcctccccaccgggggcccctttgctggagaaccccaaggattcagcaactgctcctcctggggaa

SEQ ID NO: 787342 - DNA, 120 bp, Artificial Sequence
  ENSG00000261667_7 (sequence is synthesized)
ggacagtgcctctgatgtgggtgatgggaaggacggtgcctctgatgtgggtgatgggaaggacggtgcctctggtgtgggtgatgggaaggacggtgcctctggtgtgggtgatgggat

SEQ ID NO: 787343 - DNA, 120 bp, Artificial Sequence
  ENSG00000261678_0 (sequence is synthesized)
actgcgggctgggaagccgggaccagaggagggaaggaaggaagaggagaggagagaagaggagagaaggaaggaaggattgaaggaaggaaggaaggattgaaggaaggaggaagaaga

SEQ ID NO: 787344 - DNA, 120 bp, Artificial Sequence
  ENSG00000261678_1 (sequence is synthesized)
gggatccggaggggcaacggaggagacgcagggcagcaaggagagaggacaccactcgcgcggcagcatccaaaggccagagtggggacccgcgctgcctccgccgctcctcggatggtg

SEQ ID NO: 787345 - DNA, 120 bp, Artificial Sequence
  ENSG00000261678_2 (sequence is synthesized)
acggggccctgccgccgcagcccccccaagccccggctccgcaggcccacagcgccggagccccgcaggaatcatgcccaggtccttcctggtcaagaaggtcaaacttgacgcgttctc

SEQ ID NO: 787346 - DNA, 120 bp, Artificial Sequence
  ENSG00000261678_3 (sequence is synthesized)
ttcggccgacctggagagcgcctacggacgcgcccgcagcgacctcggcgcgccactgcacgataaagggtacctcagcgactacgtggggccctcgtccgtctacgatggcgacgccga

SEQ ID NO: 787347 - DNA, 120 bp, Artificial Sequence
  ENSG00000261678_4 (sequence is synthesized)
ggctgcgctgctcaaagggccgtcgccggagcccatgtacgcagcagctgtgcgtggagagctgggtccggcggctgcagggtctgcgccgccgcccaccccgcgcccggagctggccac

SEQ ID NO: 787348 - DNA, 120 bp, Artificial Sequence
  ENSG00000261678_5 (sequence is synthesized)
cgctgcgggcggctacatcaacggcgacgcggccgtcagcgagggctacgcggcggacgccttcttcatcaccgacgggcgctcgcggcgtaaggcttccaatgccggcgctgccgccgc

SEQ ID NO: 787349 - DNA, 80 bp, Artificial Sequence
  ENSG00000261678_6 (sequence is synthesized)
cgtaaggcttccaatgccggcgctgccgccgctccctccacagcctcggcggcggcccccgacggcgacgccggaggcgg

SEQ ID NO: 787350 - DNA, 120 bp, Artificial Sequence
  ENSG00000261678_7 (sequence is synthesized)
cgaggcgcgcgcggggccaggggccgcaggtgctggcggccggcacgcgtgcggcgagtgcggcaaaacatacgccacgtcgtcgaacctgagccgccacaagcagacgcaccgcagcct

SEQ ID NO: 787351 - DNA, 120 bp, Artificial Sequence
  ENSG00000261678_8 (sequence is synthesized)
ggacagccagctggcgcggcgctgcccgacgtgcggcaaggtgtacgtgtccatgccggccatggccatgcacctgctcacgcacgacctgcgccacaagtgcggcgtgtgcggcaaagc

SEQ ID NO: 787352 - DNA, 120 bp, Artificial Sequence
  ENSG00000261678_9 (sequence is synthesized)
cttctcgcggccctggctgctgcagggccacatgcgctcgcacaccggcgagaaacccttcggctgcgcgcactgcggcaaggccttcgccgaccgctccaacctgcgcgcgcacatgca

SEQ ID NO: 787353 - DNA, 120 bp, Artificial Sequence
  ENSG00000261678_10 (sequence is synthesized)
gacgcattcggccttcaagcacttccagtgcaagcgctgcaagaagagcttcgcgctcaagtcctatctcaacaagcactacgagtcggcctgcttcaagggcggcgccggaggccccgc

SEQ ID NO: 787354 - DNA, 120 bp, Artificial Sequence
  ENSG00000261678_11 (sequence is synthesized)
ggctcctgcgccgccacagctcagccctgtgcaggcctagggcggcggggcctcccccagccaggtcggctctcagcaatacggccccccagggaagtcttcgctggcgtccgggtggag

SEQ ID NO: 787355 - DNA, 120 bp, Artificial Sequence
  ENSG00000261678_12 (sequence is synthesized)
cggagggcgggcccctcctcacagcaatagggggaggggggcccggtcccaccccgccccgcccgccaggggccttgccggccccttcaagcaatagggtcccgaggggagacccacccc

SEQ ID NO: 787356 - DNA, 120 bp, Artificial Sequence
  ENSG00000261678_13 (sequence is synthesized)
ccccgagccccctcccctcccctccagggtgcccccggctttctcccagcaatagggtcgacgagacctagaaccgaacctcatctccgagttgggtctctgaagacgggggtgaggtga

SEQ ID NO: 787357 - DNA, 120 bp, Artificial Sequence
  ENSG00000261678_14 (sequence is synthesized)
ggtagggagcgccctccttctcccgcctctgcgcccctggatcgcgtcgcagggactcaggtcttccccaccccttcccaagccttctagcgcagggcctgcggcccagacgtccaggga

SEQ ID NO: 787358 - DNA, 120 bp, Artificial Sequence
  ENSG00000261678_15 (sequence is synthesized)
gccggcccctccccggcagcaggccggggcggagcaggagcgggcgggcctgcagggacgcccctgcctagcagccttcgcggaactcccggcagtgttagacgcgttgtgggtcgggga

SEQ ID NO: 787359 - DNA, 120 bp, Artificial Sequence
  ENSG00000261678_16 (sequence is synthesized)
ccctccctcgggttgcttctggggcctcagtcggagccgccctcctaccctcgcctcgcatcctctgccaaatccgaattcttccagcccagcttcccgggctctgtcctccatatcgaa

SEQ ID NO: 787360 - DNA, 120 bp, Artificial Sequence
  ENSG00000261678_17 (sequence is synthesized)
taataatgacacatatcgaatcgcatggacttatccgacctcctcagaccccgcttccgccctgccccgggcccccaccccccacccccgtaccccaggcattcgtgttggaggacggat

SEQ ID NO: 787361 - DNA, 120 bp, Artificial Sequence
  ENSG00000261678_18 (sequence is synthesized)
tcccggggccggcaggcaggcctgggcgctgccctctacacacctctgtcttcgctttgcgggtaaagccccctgggggggttgcggacgcgtcgggtttctttttctgtatttgtacgt

SEQ ID NO: 787362 - DNA, 120 bp, Artificial Sequence
  ENSG00000261678_19 (sequence is synthesized)
tttatttatgaacggattgcactcgggtcagggagggggcgctgaacccccatcttgcccgccgacgccgggggcctgggatgtccgggattactttccacgccccgaggcccgccccta

SEQ ID NO: 787363 - DNA, 120 bp, Artificial Sequence
  ENSG00000261678_20 (sequence is synthesized)
gctgggagcctctagggagcctcaggccccgcctctccgaggcaggcccctcccctgagacccaggccccgcccctgagacccaggccccgcccccactcggttgccaactttcgcccgt

SEQ ID NO: 787364 - DNA, 120 bp, Artificial Sequence
  ENSG00000261678_21 (sequence is synthesized)
ctatgccaaagcctcggcggcgaccccgccccaagggcccgccccattggccgccgcctttgtgacgtcactgcatgcagccccacccctcctcccgatcctacccggggctgcccgctc

SEQ ID NO: 787365 - DNA, 120 bp, Artificial Sequence
  ENSG00000261678_22 (sequence is synthesized)
cccctccctcttaggtagtccgaagccgactatagagcaataatgcgcactgcatgcgaagctgccgccgcctctagagttactgagaatcaggtatcccctcgccctacccaccccata

SEQ ID NO: 787366 - DNA, 120 bp, Artificial Sequence
  ENSG00000261678_23 (sequence is synthesized)
ggcccctagatcagggacgctgcgcggggccggccgcgcagactttctccccacccctccccgacccccacggcagagcccggcggctgtaatggttccatgggcgggggtggggtggtt

SEQ ID NO: 787367 - DNA, 120 bp, Artificial Sequence
  ENSG00000261678_24 (sequence is synthesized)
gcccccaagacccctccttcaggcattaatcattcactgaccgttcattgagcacctactatgtgccaggccaattgctgagtccgccaggagcgcagccacctgctgggaggtgtgttt

SEQ ID NO: 787368 - DNA, 120 bp, Artificial Sequence
  ENSG00000261678_25 (sequence is synthesized)
gcaggacaggggtccaaccggcttgggtgggccagggaagaacggcagatgcagagagaccaggtccctaggttcacatgccccctacactcctccccacctcaaccagtccctgctggg

SEQ ID NO: 787369 - DNA, 120 bp, Artificial Sequence
  ENSG00000261678_26 (sequence is synthesized)
cacaactgggctctacctttgagttaggccttttgactccagctgagggggacagatccagggctcctgggcccccacacaggtggccacttctctgatcctctggccaacacacatctg

SEQ ID NO: 787370 - DNA, 120 bp, Artificial Sequence
  ENSG00000261678_27 (sequence is synthesized)
ccatgtccagccaggggcagagccatggctggagaagaaggtgccagctgtagcctatggtgtggccagcctcacccccagcagcaagcgtggctgcccccacaaggatgacccaccgct

SEQ ID NO: 787371 - DNA, 120 bp, Artificial Sequence
  ENSG00000261678_28 (sequence is synthesized)
ctgcacagcagtgcccacatccaaacaccctacacaaccaggtgtggtgcctgcacagctcccaagctggggcctgcccacctgtgccgcatgcacacgcacacacaggcgcccccacct

SEQ ID NO: 787372 - DNA, 120 bp, Artificial Sequence
  ENSG00000261678_29 (sequence is synthesized)
caccccaccccatactcctgtctacctacctaaggagaaagctggagggctgtgggcccgtcagggtctcctgcttccccctacaccccgccgccgtggaaagccatgggccccctcccg

SEQ ID NO: 787373 - DNA, 120 bp, Artificial Sequence
  ENSG00000261678_30 (sequence is synthesized)
cccccataactaagcagcacaataaccgacttagcgaattcaggtagaaggaacgtttaggtagcacctattttgtactgattctacaagtagggcccgaggtgcgggggccctcgggtg

SEQ ID NO: 787374 - DNA, 120 bp, Artificial Sequence
  ENSG00000261678_31 (sequence is synthesized)
ggggctgcggccgccggcccgcccgcccccacccccgcctgtgccccgccgccttgtacatattcccacccggaataggccgggatttttactcgggccgtgcccctcttccgcccccat

SEQ ID NO: 787375 - DNA, 120 bp, Artificial Sequence
  ENSG00000261678_32 (sequence is synthesized)
ttggggccaggccggccggacagacggacggacggacagacctccttcctaagcacaatagcaccagctccccggagcaccgcacctccacaaggagaataaatgccactcttgatagaa

SEQ ID NO: 787376 - DNA, 120 bp, Artificial Sequence
  ENSG00000261701_0 (sequence is synthesized)
gcactgctcttccagaggcaagaccaaccaagatgagtgacctgggagctgtcatttccctcctgctctggggacgacagctttttgcactgtactcaggcaatgatgtcacggatattt

SEQ ID NO: 787377 - DNA, 120 bp, Artificial Sequence
  ENSG00000261701_1 (sequence is synthesized)
cagatgaccgcttcccgaagccccctgagattgcaaatggctatgtggagcacttgtttcgctaccagtgtaagaactactacagactgcgcacagaaggagatggagtatacaccttaa

SEQ ID NO: 787378 - DNA, 120 bp, Artificial Sequence
  ENSG00000261701_2 (sequence is synthesized)
atgataagaagcagtggataaataaggctgttggagataaacttcctgaatgtgaagcagtatgtgggaagcccaagaatccggcaaacccagtgcagcggatcctgggtggacacctgg

SEQ ID NO: 787379 - DNA, 120 bp, Artificial Sequence
  ENSG00000261701_3 (sequence is synthesized)
atgccaaaggcagctttccctggcaggctaagatggtttcccaccataatctcaccacaggggccacgctgatcaatgaacaatggctgctgaccacggctaaaaatctcttcctgaacc

SEQ ID NO: 787380 - DNA, 120 bp, Artificial Sequence
  ENSG00000261701_4 (sequence is synthesized)
attcagaaaatgcaacagcgaaagacattgcccctactttaacactctatgtggggaaaaagcagcttgtagagattgagaaggtggttctacaccctaactaccaccaggtagatattg

SEQ ID NO: 787381 - DNA, 120 bp, Artificial Sequence
  ENSG00000261701_5 (sequence is synthesized)
atgcccatctgcctaccttcaaagaattatgcagaagtagggcgtgtgggttacgtgtctggctggggacaaagtgacaactttaaacttactgaccatctgaagtatgtcatgctgcct

SEQ ID NO: 787382 - DNA, 120 bp, Artificial Sequence
  ENSG00000261701_6 (sequence is synthesized)
gtggctgaccaatacgattgcataacgcattatgaaggcagcacatgccccaaatggaaggcaccgaagagccctgtaggggtgcagcccatactgaacgaacacaccttctgtgtcggc

SEQ ID NO: 787383 - DNA, 120 bp, Artificial Sequence
  ENSG00000261701_7 (sequence is synthesized)
atgtctaagtaccaggaagacacctgctatggcgatgcgggcagtgcctttgccgttcacgacctggaggaggacacctggtacgcggctgggatcctaagctttgataagagctgtgct

SEQ ID NO: 787384 - DNA, 120 bp, Artificial Sequence
  ENSG00000261701_8 (sequence is synthesized)
gtggctgagtatggtgtgtatgtgaaggtgacttccatccagcactgggttcagaagaccatagctgagaactaatgcaaggctggccggaagcccttgcctgaaagcaagatttcagcc

SEQ ID NO: 787385 - DNA, 120 bp, Artificial Sequence; identical to SEQ ID NO: 784459
  ENSG00000261701_9 (sequence is synthesized)

SEQ ID NO: 787386 - DNA, 120 bp, Artificial Sequence
  ENSG00000261701_10 (sequence is synthesized)
gacacaggaattacgaaatggagaagggggagaagtgagctagtggcagcataaaaagaccagcagatgccccacagcactgctcttccagaggcaagaccaaccaagatgagcaccgag

SEQ ID NO: 787387 - DNA, 120 bp, Artificial Sequence
  ENSG00000261701_11 (sequence is synthesized)
catttgtttccaacaaatttggtggcccatacagggaaaacattgtcctccgggaaagggtctttgatcacctcttgtgaggagacacatcccactgccttgttgcagtggcctcatgag

SEQ ID NO: 787388 - DNA, 120 bp, Artificial Sequence
  ENSG00000261701_12 (sequence is synthesized)
taaggaatcgagacccacctggtctgatgaataaccccagactctcaacaacgtggggagaaaaagacttgcaacactatggtggccaggtaactctgtgcgcagaccaagtgacctggg

SEQ ID NO: 787389 - DNA, 120 bp, Artificial Sequence
  ENSG00000261701_13 (sequence is synthesized)
ctgataagcgttttgtcgccagtagccatggccctttgggcagactaacttttgtcagcctcaggttttctgttttgttaaggggaggtgatgccatgcagcctacctcatgtaaatctc

SEQ ID NO: 787390 - DNA, 120 bp, Artificial Sequence
  ENSG00000261701_14 (sequence is synthesized)
agagtcagatttacatctccagcagatgtgggaaaagaaggaatgctgatgatgatgtcaccctcacctagtgagtcttgctgtcctggcactgctctaagggctttatatttatttgct

SEQ ID NO: 787391 - DNA, 120 bp, Artificial Sequence
  ENSG00000261739_0 (sequence is synthesized)
atggcagaagaaactcgacaaagtaaattggcagcagccaagagaaagttaaaagaatattggcagagaaacagccctggtgttccagcaggagccaagaggaacaggaaaacaaatggc

SEQ ID NO: 787392 - DNA, 120 bp, Artificial Sequence
  ENSG00000261739_1 (sequence is synthesized)
ggaacaggaaaacaaatggcagcatccatgagacagccacttctggtggttgccactcacctggagattcagcaacaggtatccacggggagagccctacatcatctgctaccctgaagg

SEQ ID NO: 787393 - DNA, 120 bp, Artificial Sequence
  ENSG00000261739_2 (sequence is synthesized)
gaactagcagtagtcccagactcgaggtccgtaaaagtcagtcaactgaagaacaccatcaaatctttgaaacaacagaagaaacaagtggtacatcagctggaagaagaaaagaaagca

SEQ ID NO: 787394 - DNA, 120 bp, Artificial Sequence
  ENSG00000261739_3 (sequence is synthesized)
aacaacgagaaacagaaagccgaaagggagctagaggttcaaatccagagattgaacatacagaaagggaaactaaatacggacctgtaccacacgaaacgttctctcagatactttgaa

SEQ ID NO: 787395 - DNA, 120 bp, Artificial Sequence
  ENSG00000261739_4 (sequence is synthesized)
gaagagtccaaggatctggccgtccgtctgcaacattcattgcagcgtaaaggagagttagagcgggctctctctgctgtcaccgccacacagaagaagaaggcggagaggttctccagc

SEQ ID NO: 787396 - DNA, 120 bp, Artificial Sequence
  ENSG00000261739_5 (sequence is synthesized)
cgcagtaaagcacgtacggagtggaagttagagcagtccatgcgggagcaggcactgctgaaagcgcagctgacacagttgaaggagtcacttaaagaagtccagctagagagggatgaa

SEQ ID NO: 787397 - DNA, 80 bp, Artificial Sequence
  ENSG00000261739_6 (sequence is synthesized)
agaggatgagaaaaatgtcgcaggaggtttgctcgttgaagaaggagaagaagcatgataaatatcgggtagagacgaac

SEQ ID NO: 787398 - DNA, 120 bp, Artificial Sequence
  ENSG00000261739_7 (sequence is synthesized)
ggaaggaactagagagagtggcaggagcgctccaggcccaggtggagtacaatcagcgcataagtctcctgaatgaggggcaaaaggagaggcttcgggagcagcaggagaggcttccag

SEQ ID NO: 787399 - DNA, 120 bp, Artificial Sequence
  ENSG00000261739_8 (sequence is synthesized)
caggagaggcttccagagcaggaggagaggcttcagcagctggccgagccacagaacagcttcaaggagctgaacaatgagaacaagagcgtactacagttggagcagcaagtaaaggag

SEQ ID NO: 787400 - DNA, 120 bp, Artificial Sequence
  ENSG00000261739_9 (sequence is synthesized)
ctgcaggagaagctaggcaaggagcgtctggaagctgccagccagcagaaacagcagctaacggcccagttgagcctcatggctctccctggggaaggagatggaggaggacatctggac

SEQ ID NO: 787401 - DNA, 120 bp, Artificial Sequence
  ENSG00000261739_10 (sequence is synthesized)
agtgagggggaggaggcacctcggcccattcctagcatcccacaggacctggagagcagggaggccatgagcagctttatggaccacctggaggagaaggcagacctgagtgagctggtg

SEQ ID NO: 787402 - DNA, 120 bp, Artificial Sequence; identical to SEQ ID NO: 693365
  ENSG00000261739_11 (sequence is synthesized)

SEQ ID NO: 787403 - DNA, 120 bp, Artificial Sequence
  ENSG00000261739_12 (sequence is synthesized)
gcccacaaccctgctgatgagcccggtccaggagccccagccccccaggagcttggggctgcagacaagcatggtgatctttgtgaggtgagcctcacctcctctgcccaaggagaggcc

SEQ ID NO: 787404 - DNA, 83 bp, Artificial Sequence; identical to SEQ ID NO: 439305
  ENSG00000261739_13 (sequence is synthesized)

SEQ ID NO: 787405 - DNA, 120 bp, Artificial Sequence; identical to SEQ ID NO: 439306
  ENSG00000261739_14 (sequence is synthesized)

SEQ ID NO: 787406 - DNA, 77 bp, Artificial Sequence
  ENSG00000261739_15 (sequence is synthesized)
accaccaggagcacccaggcttgggcaacaactgctgtgtgccattcttttgtcaaagagctgctcaagaaattttt

SEQ ID NO: 787407 - DNA, 89 bp, Artificial Sequence
  ENSG00000261739_16 (sequence is synthesized)
tcatttacttcctttgaatgttagagtcacttaagtttatttgtaaaaagttaaaagagagtgggtgtctgtggctctcactgatgttc

SEQ ID NO: 787408 - DNA, 120 bp, Artificial Sequence
  ENSG00000261739_17 (sequence is synthesized)
gctgttgtttgatctaatcttaatcacagtgagctcttcgttagctcaatatgtagtttgcccccaagcgtgcactgtttattactttgtaatatgccactatgagtactgacatttaga

SEQ ID NO: 787409 - DNA, 81 bp, Artificial Sequence
  ENSG00000261739_18 (sequence is synthesized)
ttttctgtgtattggtgatgggagtgaaaccttttgactctggcaggtatgtccaggatagagtgtgtttcatctgttccg

SEQ ID NO: 787410 - DNA, 120 bp, Artificial Sequence
  ENSG00000261739_19 (sequence is synthesized)
cagaagaggaaagtggcctcctctggcaggtatgtccaggatagagtgtgtttcatctgttccggtgccaggaattagcagtgtattatggtggttcccttaggatttgtatgtgctctg

SEQ ID NO: 787411 - DNA, 73 bp, Artificial Sequence
  ENSG00000261739_20 (sequence is synthesized)
gtgctctgggctcatgaagatactgcatcatgagctgcagcagttgtactctttttcttgactgtggatgtgg

SEQ ID NO: 787412 - DNA, 120 bp, Artificial Sequence
  ENSG00000261739_21 (sequence is synthesized)
actttaaaaaataatagaaacattattataaactaatatatgtgagatacttagttgaaacaaaagggagttttagtagacggtattatactatctttgaaaatcaaggagaagtttatg

SEQ ID NO: 787413 - DNA, 120 bp, Artificial Sequence
  ENSG00000261739_22 (sequence is synthesized)
tgtacaaactgcagtgcaatctactgttcgtgaatgtcaatgtattatcaggaaacgtgcctatacaatcacagagttatattttctcacagacttctttacaaagtgaaatatgttttt

SEQ ID NO: 787414 - DNA, 120 bp, Artificial Sequence
  ENSG00000261739_23 (sequence is synthesized)
gtatctctgggtttctgttcgggacatattttgtgcaatatttatgtgattgtgcctatgcatgatgaatgaatgcatttcagttatgtattgcctaaatcgtaacttgatgatgcttgg

SEQ ID NO: 787415 - DNA, 64 bp, Artificial Sequence
  ENSG00000261739_24 (sequence is synthesized)
tttcagaatgataaagaaaaaatgttagaccaaataatgcggctaattaacagtggtacgattt

SEQ ID NO: 787416 - DNA, 120 bp, Artificial Sequence
  ENSG00000261787_0 (sequence is synthesized)
aagccgcctcagcccccggcgtagcctctccggtgggccaggtcctccgcccgacctgccttagccggtcggagcacacacgcctggccgcggggcgcccgcataaaagtcacagccagc

SEQ ID NO: 787417 - DNA, 120 bp, Artificial Sequence
  ENSG00000261787_1 (sequence is synthesized)
ggaggttggaaacagccgtcgacttgggcatcggccggacgaggatggagtgaccagcgcggccctggccacacaggccctgctccacgcccctcgcccgccctcacgacggagcggagc

SEQ ID NO: 787418 - DNA, 120 bp, Artificial Sequence
  ENSG00000261787_2 (sequence is synthesized)
tccactcagccgctccaggaaaggaagcccaagaactccggagttccgcaactctccccagacgtccggaagcaaatcgcgtcccaggcaaaacgagctcgcttgagagcgcccttagcc

SEQ ID NO: 787419 - DNA, 120 bp, Artificial Sequence
  ENSG00000261787_3 (sequence is synthesized)
caaaacgagctcgcttgagagcgcccttagccccgttgggctgctgcgcgcgcggcgcgggaagctgccatggaccgcggccgcccagcgggcagccccctcagcgccagcgccgagccc

SEQ ID NO: 787420 - DNA, 80 bp, Artificial Sequence
  ENSG00000261787_4 (sequence is synthesized)
cgcgttccgggagcgggcggccggcggcggcgaatgcggcgcgggagcgcagccgggtgcagaccctgcggcacgctttc

SEQ ID NO: 787421 - DNA, 120 bp, Artificial Sequence
  ENSG00000261787_5 (sequence is synthesized)
tttcctggagctgcagcgcacgctgccgtccgtgccgcccgacaccaagctgtccaagctggacgtgctgctgctggccaccacctacatcgcgcatctcacccgcagcctgcaggacga

SEQ ID NO: 787422 - DNA, 120 bp, Artificial Sequence
  ENSG00000261787_6 (sequence is synthesized)
cgccgaggcgccggcggacgccgggttgggcgccctgcgcggcgatggctacctgcacccggtcaagaaatggcccatgcgatcaagattgtacatcggtgctactggtcagtttctgaa

SEQ ID NO: 787423 - DNA, 120 bp, Artificial Sequence
  ENSG00000261787_7 (sequence is synthesized)
gcattctgtttctggagaaaaaacaaatcatgacaacactccaacagactcacagccttaggctctcccctggtgggggctggtagaagtggtggctattgtttttaaatactatgacat

SEQ ID NO: 787424 - DNA, 120 bp, Artificial Sequence
  ENSG00000261787_8 (sequence is synthesized)
aattctatatttattatatgagacataacaaaatttctgaaagtttacatgtgaacccatagttggatgttcaggtttatctgtctaaatgtggaatgaaataatcagtgttatataaaa

SEQ ID NO: 787425 - DNA, 120 bp, Artificial Sequence
  ENSG00000261787_9 (sequence is synthesized)
cacacagcttatctgttcagtgtgagagtcactactatatagtgcaagagaaattattagaaaaaagtcacatgaaagcaaacaattgtgtatatagctaaagaatgcaatatagatatt

SEQ ID NO: 787426 - DNA, 120 bp, Artificial Sequence
  ENSG00000261787_10 (sequence is synthesized)
ttcctagtttaaaaagataaaaatctgtgtttataatatacgagtattccttttttgtgaaaaccatactgttcttaagttgatctaagacaccatttcaattgaagaaaactgttgcag

SEQ ID NO: 787427 - DNA, 120 bp, Artificial Sequence
  ENSG00000261787_11 (sequence is synthesized)
taatatgaagatgcaataaattcaataagtagttacttttccctcttagaaaacttgtttggagtattagaaatggtttgctcagaggacagggcttggtcaccttcctagagggttatt

SEQ ID NO: 787428 - DNA, 120 bp, Artificial Sequence
  ENSG00000261787_12 (sequence is synthesized)
ctgtatcttacagtgtttgcaacttgtggaaggcactgggaatccctgcagtccagtgtgaacaggagaccaggtgtcagcggacagcagagttcacaatgtaggtgcatgtcaccacac

SEQ ID NO: 787429 - DNA, 120 bp, Artificial Sequence
  ENSG00000261787_13 (sequence is synthesized)
tttattttttgtagagatggagtctcactgtgttgcctaggctactcttgaaatcctggctcaataaatcctcctgcctcacctaccaaagtgttgggattataggctagagccaccgtg

SEQ ID NO: 787430 - DNA, 120 bp, Artificial Sequence
  ENSG00000261787_14 (sequence is synthesized)
agagccaccgtgcctggcccagttttattgttttaatgtgaatatactcataatgtgacagaagcatatctttttgcaagaaagatatataatagttctctacatattaatatgtagaaa

SEQ ID NO: 787431 - DNA, 120 bp, Artificial Sequence
  ENSG00000261787_15 (sequence is synthesized)
agtacttgcatatttaaatatttgtaaacatatttacctactcatggaaagaaataaaaagtaaaatgagatttggattcagccattcactattataagttattgacataagaagtgcta

SEQ ID NO: 787432 - DNA, 120 bp, Artificial Sequence
  ENSG00000261787_16 (sequence is synthesized)
aaaagaatctttatcctaaggaatgaaatcaaaacttcttcaaagttacctcaaactgaattgtaaacactaaatttaacagcaagaatttcagaaaaatgattttcttgctaataattc

SEQ ID NO: 787433 - DNA, 120 bp, Artificial Sequence
  ENSG00000261787_17 (sequence is synthesized)
ttaagatttattagtttggctagtttttaaagcatttaactggggaaaaaactatgtgttgaataattagatttctaagtcatcctgttaaatagttagtagagctttgcctttgatggt

SEQ ID NO: 787434 - DNA, 120 bp, Artificial Sequence
  ENSG00000261787_18 (sequence is synthesized)
attactttttaattcttctcatccagttacaagttgtattaatgccaaagaagtgtatttgttacagattttcataacattttattaaattgctagatatgatgataggttttggtatgt

SEQ ID NO: 787435 - DNA, 120 bp, Artificial Sequence
  ENSG00000261787_19 (sequence is synthesized)
ttacagaggagaaattgcatattttcactcagattcaaaagagcatgctcttttaatgctttaatggtgaatggtcatgataagaggtattataaaaataaagtactaatttgaaaatta

SEQ ID NO: 787436 - DNA, 80 bp, Artificial Sequence
  ENSG00000261794_0 (sequence is synthesized)
agaaacagcaggagcgaacaggaacaggaaaacaaatggcagtgtccctgagaaagccacttctggtggttgccagccac

SEQ ID NO: 787437 - DNA, 120 bp, Artificial Sequence
  ENSG00000261794_1 (sequence is synthesized)
agtgtccctgagaaagccacttctggtggttgccagccacctggggattcagcaacaggtttccacagggaaggccctacatcatctgctaccctgaaagatctggagagcccgtgccaa

SEQ ID NO: 787438 - DNA, 120 bp, Artificial Sequence; identical to SEQ ID NO: 632447
  ENSG00000261794_2 (sequence is synthesized)

SEQ ID NO: 787439 - DNA, 120 bp, Artificial Sequence
  ENSG00000261794_3 (sequence is synthesized)
aacaacaagaaacagaaagccaaaagggtgctagaggttcaaatccagacattgaacatacagaaagggaaactaaatacggacctgtaccacatgaaacgttctctcagatactttgaa

SEQ ID NO: 787440 - DNA, 120 bp, Artificial Sequence
  ENSG00000261794_4 (sequence is synthesized)
gaaaagtccaaggatctggctgtctgcctgcaacattcattgcagcgtaaaggagagttagagagtgttctctctaatgtcatggccacacagaagaagaaggcaaaccagttgtccagc

SEQ ID NO: 787441 - DNA, 120 bp, Artificial Sequence
  ENSG00000261794_5 (sequence is synthesized)
cgcagcaaagcacgtacggagtggaagttagagcagtccatgcgggaggaggcactactgaaagtgcagctgacacagttgaaggagtcatttcaacaagtccaattagaaagagatgag

SEQ ID NO: 787442 - DNA, 78 bp, Artificial Sequence; identical to SEQ ID NO: 632451
  ENSG00000261794_6 (sequence is synthesized)

SEQ ID NO: 787443 - DNA, 120 bp, Artificial Sequence
  ENSG00000261794_7 (sequence is synthesized)
tagagagagtggcaggagagctccaggcccaggtcaaaaagaatcagcgcataagtctcctgaaccagcgacaagaagagaggattcaggagcaggaagagaggcttcggaagcaggagg

SEQ ID NO: 787444 - DNA, 120 bp, Artificial Sequence
  ENSG00000261794_8 (sequence is synthesized)
gcaggaggagaggattcaggagcagcacaagagccttcagcagctggccaagccacagagcgtcttcgaggagccgaacaatgagaacaagaacgcactgcagttggagcagcaagtaaa

SEQ ID NO: 787445 - DNA, 120 bp, Artificial Sequence; identical to SEQ ID NO: 632454
  ENSG00000261794_9 (sequence is synthesized)

SEQ ID NO: 787446 - DNA, 120 bp, Artificial Sequence; identical to SEQ ID NO: 632455
  ENSG00000261794_10 (sequence is synthesized)

SEQ ID NO: 787447 - DNA, 120 bp, Artificial Sequence
  ENSG00000261794_11 (sequence is synthesized)
aagaaaaaagaactctgcttcatccaccactggcgagacagatgccatcagaaaacccatcaccttttatcagaaccagggggccgtgccaaagatgcggcactgggaggaggacaccat

SEQ ID NO: 787448 - DNA, 120 bp, Artificial Sequence
  ENSG00000261794_12 (sequence is synthesized)
gcccacaactctgctgatgagcccggtccaggagccccagccccccaggagcttggggctgcagacaagcatggtgatctttgtgaggtgagcctcacctcctctgcccaaggagaggcc

SEQ ID NO: 787449 - DNA, 120 bp, Artificial Sequence
  ENSG00000261857_0 (sequence is synthesized)
actctcttgctcacagtccacgatggcccggtccctggtgtgccttggtgtcatcatcttgctgtctgccttctccggacctggtgtcaggggtggtcctatgcccaagctggctgaccg

SEQ ID NO: 787450 - DNA, 120 bp, Artificial Sequence
  ENSG00000261857_1 (sequence is synthesized)
gaagctgtgtgcggaccaggagtgcagccaccctatctccatggctgtggcccttcaggactacatggcccccgactgccgattcctgaccattcaccggggccaagtggtgtatgtctt

SEQ ID NO: 787451 - DNA, 120 bp, Artificial Sequence
  ENSG00000261857_2 (sequence is synthesized)
tgaagggccgtgggcggctcttctggggaggcagcgttcagggagattactatggagatctggctgctcgcctgggctatttccccagtagcattgtccgagaggaccagaccctgaaac

SEQ ID NO: 787452 - DNA, 120 bp, Artificial Sequence
  ENSG00000261857_3 (sequence is synthesized)
ctggcaaagtcgatgtgaagacagacaaatgggatttctactgccagtgagctcagcctaccgctggccctgccgtttcccctccttggctttatgcaaatacaatcagcccagtgcaaa

SEQ ID NO: 787453 - DNA, 120 bp, Artificial Sequence
  ENSG00000261857_4 (sequence is synthesized)
aggtagacagaaaagttctccaagtcctcaccggcccagaggcccagccatcttcacctctcaagctgtctgtagaggtccacgtgtcaagaaaactgaggacagaggccctcagtccag

SEQ ID NO: 787454 - DNA, 120 bp, Artificial Sequence
  ENSG00000261857_5 (sequence is synthesized)
ttcccacaagcaactgcatctccccaacagctgcctgaatgagtttggaagcagtcctcccaccattcagccttcagatgaaactgcacccctggctgacaggctgattgcagccttata

SEQ ID NO: 787455 - DNA, 120 bp, Artificial Sequence
  ENSG00000261857_6 (sequence is synthesized)
agacttacttgggtgttcagaaagggcctctgaacaggtggcatttaagctgagattcatatgacaaggatggagcagttatgtggagatcagggagaagggagaatgcaaaggccttca

SEQ ID NO: 787456 - DNA, 120 bp, Artificial Sequence
  ENSG00000261873_0 (sequence is synthesized)
actccagagccaatgtagctattccgatgctctaagatctgctctctgcaatgcccaaactgaccccaattgcctttctctagacccacttctccaccgtgggagaagtgatggaattct

SEQ ID NO: 787457 - DNA, 120 bp, Artificial Sequence
  ENSG00000261873_1 (sequence is synthesized)
acttggagatcgaccctgttaccttgaacctgatcatcctagttgcgagctacgtcatcttgctcctggtcttcctcatctcctgcgtgctatacgactgccgaggcaaggatcccagta

SEQ ID NO: 787458 - DNA, 120 bp, Artificial Sequence
  ENSG00000261873_2 (sequence is synthesized)
aggagtacgcgcccgaggccactctcgaggcccagccctccatccggttggtggtgatgcacccaagtgtcgctgggccccactggccaaaggggcctggcctttctttgggggatcctg

SEQ ID NO: 787459 - DNA, 120 bp, Artificial Sequence
  ENSG00000261873_3 (sequence is synthesized)
ctccactaggaaagaaaagcaccatggtatgaggctggctaagggacactggggagagaccactagactttccatagagacaaactgctccctatcgtggctccaattctctcagcacat

SEQ ID NO: 787460 - DNA, 120 bp, Artificial Sequence
  ENSG00000261873_4 (sequence is synthesized)
ctctcagcacatgtatcccgcttgatgaaggaagtgagagctctgtcttacttgctgttttctcgtcaccttctttgtgacaaaagtaactgtttaagatggagtctcactctgttgccc

SEQ ID NO: 787461 - DNA, 66 bp, Artificial Sequence
  ENSG00000261873_5 (sequence is synthesized)
aggagctccacaaaggtgtcttaagagacactgcaaagaaacaaggtgatggaactgactggcccc

SEQ ID NO: 787462 - DNA, 120 bp, Artificial Sequence
  ENSG00000261873_6 (sequence is synthesized)
gacactgcaaagaaacaaggtgatggaactgactggccccaatagaaattagactgacagctaataaaaagaagcttttgaatctatagctcttaacaagccccactgctctttctgcct

SEQ ID NO: 787463 - DNA, 120 bp, Artificial Sequence
  ENSG00000261873_7 (sequence is synthesized)
gctgtggcttactgtcatgggaaaccatccttagggacatttcgtggcctctggatgtgggcagacattataacaaacactgtaagccaggagtatgaaatcaaggtgtcagaggggctg

SEQ ID NO: 787464 - DNA, 120 bp, Artificial Sequence
  ENSG00000261873_8 (sequence is synthesized)
tactccctccgaaggctgcaggagaaaatctattgcttgcctcttctaccttttggtggttccaggagttccttggcttgtgatcacatcactgaaatcttaacctacctggtcatactg

SEQ ID NO: 787465 - DNA, 120 bp, Artificial Sequence
  ENSG00000261873_9 (sequence is synthesized)
ctgcctcttcttctctctcaaaacttctcctgcctctcttcatacttgtgattgcatttagggtccatctgggtactccaggaaaaactcctactgtcaagatttaacttaatcatatct

SEQ ID NO: 787466 - DNA, 120 bp, Artificial Sequence
  ENSG00000261873_10 (sequence is synthesized)
tatgtcatataaagtcatgttcaatattttacaacataaaataatagtcacagtttctggagataaggacatgggcgtgtcttttgggggatcatccttcaatccattgcatctatctat

SEQ ID NO: 787467 - DNA, 120 bp, Artificial Sequence
  ENSG00000261873_11 (sequence is synthesized)
cataatattttcaggtatccatttttcctttttccagggtccctattccatgacttttgtttctttcatttctccttcatagtgctcaatattgggctttgcacagagtagacggttact

SEQ ID NO: 787468 - DNA, 120 bp, Artificial Sequence
  ENSG00000261873_12 (sequence is synthesized)
gcacagagtagacggttactcaatgagtgctgctcccaaaagaaacttccagaaaccctttagtaagagtatcctgggccaggcgcagtgcctcactcctgtaatcccagcattttggga

SEQ ID NO: 787469 - DNA, 120 bp, Artificial Sequence
  ENSG00000261873_13 (sequence is synthesized)
acatggcgaaaccccctctctactaaagatacaaaaaaatgagctgggcgtggcagcatgattctgtagtcccagctatttgggaggccgaagcacgagaatcacttgaactggggaggt

SEQ ID NO: 787470 - DNA, 80 bp, Artificial Sequence
  ENSG00000261873_14 (sequence is synthesized)
tcagagcaagactctgtcataaaataataaaaataattttaaaaaagagtatcctatccatttcccttaaaactcgaagt

SEQ ID NO: 787471 - DNA, 120 bp, Artificial Sequence
  ENSG00000261873_15 (sequence is synthesized)
aaaaaagagtatcctatccatttcccttaaaactcgaagtttggaaaatcagctttacaccagttgatctgtaaggcacaaaagaacatacttagctagatgtaaagtgatcaagatttt

SEQ ID NO: 787472 - DNA, 120 bp, Artificial Sequence
  ENSG00000261873_16 (sequence is synthesized)
agtccctactctaaaccaacttgtttatgaccctggatagacaggtccctccagctgtctagacatttgctttctaaagagagggacttactacagttggcttccccagaagcccttata

SEQ ID NO: 787473 - DNA, 120 bp, Artificial Sequence
  ENSG00000261873_17 (sequence is synthesized)
ccacttacattccacaagaattcaagaataaatatggtctttctcaggatcctttgaaatacattatttcctttaagttacagaagaaaaacacaaccttttgccctatcctactgcata

SEQ ID NO: 787474 - DNA, 120 bp, Artificial Sequence
  ENSG00000261873_18 (sequence is synthesized)
ttggcatgaagtagctgccctagaagaagaaaaggatgaagtgaggtaaaacatcttcattttccagtcctgatggcccagatctgaacacttggggcttttgcaataaggagggtcaag

SEQ ID NO: 787475 - DNA, 120 bp, Artificial Sequence
  ENSG00000261873_19 (sequence is synthesized)
tttcaaagatcgctatctctgcagtaagcactattaccgttttggaaaaagttaacagatccttcagccagcaaatattcttaggcttagcaacatataactaactggatgtctgtttct

SEQ ID NO: 787476 - DNA, 120 bp, Artificial Sequence
  ENSG00000261873_20 (sequence is synthesized)
gtcttctaccctcatcctgcccatctcccccacctccccctcccaacacccgaccatatcctctggaatacttcctcccgtaaataatttgaagagccaagcattaattagagaagttat

SEQ ID NO: 787477 - DNA, 120 bp, Artificial Sequence
  ENSG00000261873_21 (sequence is synthesized)
aacagagaaatcaaaagaggcacagaaataggaaaagaattatccggtccctttcatcacactcctttacttgggccttaaaggaaatataagaacttttggccaggcgtggtggctcaa

SEQ ID NO: 787478 - DNA, 120 bp, Artificial Sequence
  ENSG00000261873_22 (sequence is synthesized)
ctaacaagggaccacgccctcctctaccctgcacttcccttccccggtttcctattatttaaagagaccagggtcttcccttcccagcactcccatattaattccacgcaagtggaagtc

SEQ ID NO: 787479 - DNA, 120 bp, Artificial Sequence
  ENSG00000261873_23 (sequence is synthesized)
cagaaggaatattaattaaactgctgtcgctgcagattgtgactgggggcctgtttgcttggatgtaggaacaattggagaaactgacactggtggtcagctgctaatgacccttccgct

SEQ ID NO: 787480 - DNA, 120 bp, Artificial Sequence
  ENSG00000261873_24 (sequence is synthesized)
agctctgtcttacttgctgttttctcgtcaccttctttgtgacaaaagtaactgtttaaggtgtctgaggagctccacaaaggtgtcttaagagacactgcaaagaaacaagagtctagc

SEQ ID NO: 787481 - DNA, 120 bp, Artificial Sequence
  ENSG00000261873_25 (sequence is synthesized)
gtcttaagagacactgcaaagaaacaagagtctagctccatcgcccaagctggagtgcaatggtataatcatagctcactgcagcctcaaccctctgggctcaagcaatcctcctgtctc

SEQ ID NO: 787482 - DNA, 120 bp, Artificial Sequence
  ENSG00000261873_26 (sequence is synthesized)
gaggacctgaggtcataggtggatctcctcacggagtgagggcgaagacaggggaccggtctcccgaaggagtccttctgtcccaggtctttggcaccaaatgttacacgtgtccgtgtg

SEQ ID NO: 787483 - DNA, 72 bp, Artificial Sequence
  ENSG00000261873_27 (sequence is synthesized)
ggaccggtctcccgaaggagtccttctgtcccaggtctttggcaccaaatgttacacgtgtccgtgtgaaga

SEQ ID NO: 787484 - DNA, 120 bp, Artificial Sequence
  ENSG00000261934_0 (sequence is synthesized)
atggcagctccaaccaaatgccagctccgcggaagattagtcctgctatgctcgctcctggggatgctatgggaggccagggccagtcagattcgctactcagtgcctgaagagacagaa

SEQ ID NO: 787485 - DNA, 120 bp, Artificial Sequence
  ENSG00000261934_1 (sequence is synthesized)
aagggctatattgtgggcaacatctccaaggacctggctctggagccccgggagctggcggagcgccgagtccgcatcgtctctagaggtaggacgcagcttttctctctgaacccgcgc

SEQ ID NO: 787486 - DNA, 120 bp, Artificial Sequence
  ENSG00000261934_2 (sequence is synthesized)
agcggcaccttggtcaccgcgggtaggatagaccgggaggagctctgtgctcagagcccgcggtgtctggtgaactttaaagtcctggttgaagacagagtgaaactgtacggaatagaa

SEQ ID NO: 787487 - DNA, 120 bp, Artificial Sequence
  ENSG00000261934_3 (sequence is synthesized)
atagaagtaactgatattaacgacagcgccccaaagttccaggccgaaagtctggaagtaaaaattaacgaaatcgcggttcctggagcacgttatccacttccagaagctattgatccg

SEQ ID NO: 787488 - DNA, 120 bp, Artificial Sequence
  ENSG00000261934_4 (sequence is synthesized)
gatgttggcgtgaactccctccagagctaccagctcagccccaatcaccacttctccctgaacgtgcagactggagacaatggagccataaacccagagctggtgctggagcgcgccctg

SEQ ID NO: 787489 - DNA, 120 bp, Artificial Sequence
  ENSG00000261934_5 (sequence is synthesized)
gacagggaggaggcaactgcccaccacctggtcctcacggcctcggatggcggcgagccgcgtcgctccagcacagtgcgcatccatgtgacagtgttggatacaaatgataatgccccg

SEQ ID NO: 787490 - DNA, 120 bp, Artificial Sequence
  ENSG00000261934_6 (sequence is synthesized)
gtttttgctcaacggatttaccgagttaaagtccttgagaacgtgcccccaggcacctggctgcttactgcaacagccagcgacctggatgagggaatcaacggaaaagtggcatacaaa

SEQ ID NO: 787491 - DNA, 120 bp, Artificial Sequence
  ENSG00000261934_7 (sequence is synthesized)
ttctggaaaattaatgaaaaacaatctctgctattccagcttaatgaaaatactggggaaatatcaacagcaaaaagtctagattatgaagaatgttcattttatgaaatggaaatacaa

SEQ ID NO: 787492 - DNA, 120 bp, Artificial Sequence
  ENSG00000261934_8 (sequence is synthesized)
gctgaagatggtgggggattgaaagggtggacaaaagtgctcatttcggtggaagatgtaaatgacaatagacctgaagtgaccattacatctctgtttagcccagtgagagaagacgca

SEQ ID NO: 787493 - DNA, 120 bp, Artificial Sequence
  ENSG00000261934_9 (sequence is synthesized)
cctcagggaacagtaattcttcttttcaatgctcatgaccgagactccgggaagaatggtcaagttgtctgttctatccaggagaatctatcttttacattagaaaattcagaagaagat

SEQ ID NO: 787494 - DNA, 120 bp, Artificial Sequence
  ENSG00000261934_10 (sequence is synthesized)
tattacagattgttgacggcccaaattcttgaccgagaaaaagcctcagaatataatatcacggtgactgcaacagacagaggaactccgcccctgtccacagaaattcacatcaccctg

SEQ ID NO: 787495 - DNA, 120 bp, Artificial Sequence
  ENSG00000261934_11 (sequence is synthesized)
caagtgactgacatcaatgataatccacctgctttctctcaagcctcctactcagtctacctcccggaaaacaacgccagaggtacttccatcttctccgtgattgcctatgaccctgat

SEQ ID NO: 787496 - DNA, 120 bp, Artificial Sequence
  ENSG00000261934_12 (sequence is synthesized)
agcaatgagaattctagagttatttactccttggcagaggataccatccaagggtctcctctctccacctatgtctctattaactcagacactggtgtgctgtatgctctgtgctccttt

SEQ ID NO: 787497 - DNA, 120 bp, Artificial Sequence
  ENSG00000261934_13 (sequence is synthesized)
gactatgagcagtttagagatttgcaaatgcaggtgacggcaagtgacagtggaagcccaccacttagcagcaatgtgtcattgagactgtttgttttggaccagaatgacaatgcccca

SEQ ID NO: 787498 - DNA, 120 bp, Artificial Sequence
  ENSG00000261934_14 (sequence is synthesized)
gaaatcctgtaccctgccctccccactgatggttctactggtgtggagctggcaccccgctctgcagagcctggctacctggtgaccaaggtggtggcagtggacagagactcaggccag

SEQ ID NO: 787499 - DNA, 120 bp, Artificial Sequence
  ENSG00000261934_15 (sequence is synthesized)
aatgcttggctctcctaccgcctattcaaggccagtgagccagggctcttctcggtggggctgcacacaggtgaagtgcgcacagctcgggccctgctagatagagatgcgctcaaacag

SEQ ID NO: 787500 - DNA, 120 bp, Artificial Sequence
  ENSG00000261934_16 (sequence is synthesized)
agccttgtggtggctgtacaggaccatggccagccccctctctcggccactgtcacgctcacagtagccatagctgacagcatcccagacatcctggctgacctgggcagtcttcagatc

SEQ ID NO: 787501 - DNA, 120 bp, Artificial Sequence
  ENSG00000261934_17 (sequence is synthesized)
cctgcagacctggaggcctcagaccttaccctctacctcgttgtggctgtggcagtcgtctcctgtgtcttcctcaccttcgttatcacgctgctggccctcaggctgaggcactggcac

SEQ ID NO: 787502 - DNA, 120 bp, Artificial Sequence
  ENSG00000261934_18 (sequence is synthesized)
tcctcgcatctgctgcgggctaccagtgatgggttggctggtgtgcccacctcacactttgtgggtgtagatggggttcgagctttcctacagacctattctcaggagttctccctcacc

SEQ ID NO: 787503 - DNA, 120 bp, Artificial Sequence
  ENSG00000261934_19 (sequence is synthesized)
gcagacacactcatcagccagcagagctgtgagaaaaatgagcctttgtgcgtctctgttgattccaagtttcctatagaagacacccctttggttccgcaagccccgcccaacacggac

SEQ ID NO: 787504 - DNA, 120 bp, Artificial Sequence; identical to SEQ ID NO: 773797
  ENSG00000261934_20 (sequence is synthesized)

SEQ ID NO: 787505 - DNA, 120 bp, Artificial Sequence; identical to SEQ ID NO: 773798
  ENSG00000261934_21 (sequence is synthesized)

SEQ ID NO: 787506 - DNA, 120 bp, Artificial Sequence; identical to SEQ ID NO: 773799
  ENSG00000261934_22 (sequence is synthesized)

SEQ ID NO: 787507 - DNA, 120 bp, Artificial Sequence; identical to SEQ ID NO: 773800
  ENSG00000261934_23 (sequence is synthesized)

SEQ ID NO: 787508 - DNA, 120 bp, Artificial Sequence; identical to SEQ ID NO: 773801
  ENSG00000261934_24 (sequence is synthesized)

SEQ ID NO: 787509 - DNA, 120 bp, Artificial Sequence; identical to SEQ ID NO: 773802
  ENSG00000261934_25 (sequence is synthesized)

SEQ ID NO: 787510 - DNA, 120 bp, Artificial Sequence; identical to SEQ ID NO: 773803
  ENSG00000261934_26 (sequence is synthesized)

SEQ ID NO: 787511 - DNA, 120 bp, Artificial Sequence; identical to SEQ ID NO: 773804
  ENSG00000261934_27 (sequence is synthesized)

SEQ ID NO: 787512 - DNA, 120 bp, Artificial Sequence; identical to SEQ ID NO: 773805
  ENSG00000261934_28 (sequence is synthesized)

SEQ ID NO: 787513 - DNA, 120 bp, Artificial Sequence; identical to SEQ ID NO: 773806
  ENSG00000261934_29 (sequence is synthesized)

SEQ ID NO: 787514 - DNA, 120 bp, Artificial Sequence; identical to SEQ ID NO: 773807
  ENSG00000261934_30 (sequence is synthesized)

SEQ ID NO: 787515 - DNA, 120 bp, Artificial Sequence; identical to SEQ ID NO: 773808
  ENSG00000261934_31 (sequence is synthesized)

SEQ ID NO: 787516 - DNA, 120 bp, Artificial Sequence; identical to SEQ ID NO: 773809
  ENSG00000261934_32 (sequence is synthesized)

SEQ ID NO: 787517 - DNA, 120 bp, Artificial Sequence; identical to SEQ ID NO: 773810
  ENSG00000261934_33 (sequence is synthesized)

SEQ ID NO: 787518 - DNA, 120 bp, Artificial Sequence; identical to SEQ ID NO: 773811
  ENSG00000261934_34 (sequence is synthesized)

SEQ ID NO: 787519 - DNA, 120 bp, Artificial Sequence; identical to SEQ ID NO: 773812
  ENSG00000261934_35 (sequence is synthesized)

SEQ ID NO: 787520 - DNA, 120 bp, Artificial Sequence; identical to SEQ ID NO: 773813
  ENSG00000261934_36 (sequence is synthesized)

SEQ ID NO: 787521 - DNA, 120 bp, Artificial Sequence; identical to SEQ ID NO: 773814
  ENSG00000261934_37 (sequence is synthesized)

SEQ ID NO: 787522 - DNA, 120 bp, Artificial Sequence
  ENSG00000261949_0 (sequence is synthesized)
aggaacagagacacaaagagaaggacaaagacagagtggccgaggaagaaatagagagaaagaatgggaacgacagaaaaagaaaggaaaaggaagaaaacaagaaaagagagcgaagga

SEQ ID NO: 787523 - DNA, 120 bp, Artificial Sequence
  ENSG00000261949_1 (sequence is synthesized)
gatggaaacgaacagtcagatggagatggaggagggaaagaaaaggctctcagaaagacagacggaaatggaaggacgtcctggtctggaaggagctgcccagagataaatacagcagcg

SEQ ID NO: 787524 - DNA, 120 bp, Artificial Sequence
  ENSG00000261949_2 (sequence is synthesized)
agaggcccagaaagatcgaggctctgcttatctgctgttaccttggacaccagagcagctataggtatctgccagagctatgaaatcattcagccggatcctcttcctcgtcttcctcct

SEQ ID NO: 787525 - DNA, 120 bp, Artificial Sequence
  ENSG00000261949_3 (sequence is synthesized)
cgccggcctgaggtccaaggccgctccctcagcccctctgcctttgggctgtggctttccggacatggcccacccctctgagacttcccctctgaagggtgcttctgaaaattccaaacg

SEQ ID NO: 787526 - DNA, 120 bp, Artificial Sequence
  ENSG00000261949_4 (sequence is synthesized)
agatcgccttaacccagaatttcctgggactccttaccctgagccttccaagctacctcatacggtttccctggaaaccttcccacttgacttcactgagcccctcaaccctgacctccg

SEQ ID NO: 787527 - DNA, 120 bp, Artificial Sequence
  ENSG00000261949_5 (sequence is synthesized)
agaaaccccgcacccagagtctcctgagacccccaaagctgactcactcacaacctcaatatcagaatccctggacatgcccaaaactaacctctccaaaatggcacacccagagtcttc

SEQ ID NO: 787528 - DNA, 120 bp, Artificial Sequence
  ENSG00000261949_6 (sequence is synthesized)
tgagacccccacacctggcccaactgaaatgccacacccaggatcccctgagacccccaaacctaacttctccaaaacttcacgcccagaatttcctgagaccccaaacactgaccttat

SEQ ID NO: 787529 - DNA, 120 bp, Artificial Sequence
  ENSG00000261949_7 (sequence is synthesized)
acctcaaacactaaccctaccaagacccctgaccccaaatccccagaaaagcatgacctcaactccactgagaccccaaactctgaatttctccaagctctccatcctgacccttctaaa

SEQ ID NO: 787530 - DNA, 120 bp, Artificial Sequence
  ENSG00000261949_8 (sequence is synthesized)
accccccacccagaatcccatgtgacccacaatcccagccccaccgaaatttcccaaacagaattccccacaacctactaccaaaatgcaacagatgtacccaggacctccgaccctcaa

SEQ ID NO: 787531 - DNA, 120 bp, Artificial Sequence
  ENSG00000261949_9 (sequence is synthesized)
atctccactagtctctacccagaaacacctgtgcccttcaaggatgacgccactgctctaaatgagctgtccctgaatcccaaaccaggaacacctgcagccatccagcccgactcccca

SEQ ID NO: 787532 - DNA, 120 bp, Artificial Sequence
  ENSG00000261949_10 (sequence is synthesized)
aaattgcccacttcagattctccaggaatggttgagctgaaggccccccagaactctggccctaaggagtccaacgtccctcctccctcagcccggattgcaggtccccctgctcttcca

SEQ ID NO: 787533 - DNA, 120 bp, Artificial Sequence
  ENSG00000261949_11 (sequence is synthesized)
gggcgccccagtcagttggcccctgccactctgcgggcaccccagaggcacagccgaggtgagggagtcaacaccatcatcgtggtggagcgagtgaaggagaccggcgtgactctggtg

SEQ ID NO: 787534 - DNA, 120 bp, Artificial Sequence
  ENSG00000261949_12 (sequence is synthesized)
gggcgaccacgtggcgcagcaggcggggccctctgcctgttcttcgcggggaccgcgctgctgatcggcatctttgtgctgctgtggtgtctttaccgccgggcagctagacagcggccc

SEQ ID NO: 787535 - DNA, 120 bp, Artificial Sequence
  ENSG00000261949_13 (sequence is synthesized)
ttcgcacatcaccggcttccggacgacggagatgaaccggttctgcatttggacgccccgaaagacccctacgacctctacttttatgctccggatacctgggtcccttcccacatcgcc

SEQ ID NO: 787536 - DNA, 120 bp, Artificial Sequence
  ENSG00000261949_14 (sequence is synthesized)
accaagcagcccccgcccacacctcctctgccaccaaagctgcccccgccgccccgcgggggtcgcccgcagcgtctggaggccctgtcccccgccacgctccccaacaacttcgtgtga

SEQ ID NO: 787537 - DNA, 120 bp, Artificial Sequence
  ENSG00000262165_0 (sequence is synthesized)
cgcctccactgttgagatgggtctgaagggggcatggtgtttcccatggtgcgggtgccggaggcagcgggggactgaaagaggagcaggcctgagtcctgctgcccctccagatcccag

SEQ ID NO: 787538 - DNA, 120 bp, Artificial Sequence
  ENSG00000262165_1 (sequence is synthesized)
agggaggggtaccctcgccagggcctggtgcctacttcagcaggaaagcccgactctccttccgccaccagctgcatgacatagcatcggccaatgactccaccatttgaaggggacgac

SEQ ID NO: 787539 - DNA, 120 bp, Artificial Sequence
  ENSG00000262165_2 (sequence is synthesized)
gaggaggtgaacctccaggaaggcttagcaagcttccttccccagatttctcagcgatcctaatgtccacctccccaagtcctttctaaccttctcatcaaatgtgttcatagttgctaa

SEQ ID NO: 787540 - DNA, 80 bp, Artificial Sequence
  ENSG00000262165_3 (sequence is synthesized)
gcccagtgcgccaccgagagccccgggcagggggccgccctgtgccctgcagggccgcggggccgcgtagctctctcggt

SEQ ID NO: 787541 - DNA, 120 bp, Artificial Sequence
  ENSG00000262179_0 (sequence is synthesized)
gcaaatccagccagagactgattctgagcagcagttctgcccggcactgactcactggccctgccatgcccacgccactgctcccgctgctgcttcgattgctgctgtcctgcctgctgc

SEQ ID NO: 787542 - DNA, 120 bp, Artificial Sequence
  ENSG00000262179_1 (sequence is synthesized)
tgcctgctgcccgcctggcccgccaatacctcctgcccctgctgcgccgattggcccgccgcctgggctcccaggacatgcgagaggctttgctgggctgtctgctgttcattctcagcc

SEQ ID NO: 787543 - DNA, 120 bp, Artificial Sequence
  ENSG00000262179_2 (sequence is synthesized)
agcgacactcgccagacgctggggaggcctcaagagtggaccgcctggagaggagggagaggttaggcccccaaaagtgaggccacaagtcctggcagcagctgtatccacaaaatgctt

SEQ ID NO: 787544 - DNA, 120 bp, Artificial Sequence
  ENSG00000262179_3 (sequence is synthesized)
tccactcccaacagaaatgtctttctggaagaatgccttgcatctagcacaaaactgattattgcccctctgtcctccagcagttcctcccaaagaccactcctaatcacctctggcctc

SEQ ID NO: 787545 - DNA, 120 bp, Artificial Sequence
  ENSG00000262179_4 (sequence is synthesized)
aggcgggaggggaactaacacccacccacccctgccctccctgcaaatgggaacatcaaggttcccagtgcttaactgagggacaagtgacaatttagcagagaggcaagatttgaatcc

SEQ ID NO: 787546 - DNA, 120 bp, Artificial Sequence
  ENSG00000262179_5 (sequence is synthesized)
agactgtcttccagactcaggacctaccttaaaataatatctgagttgcttatggaggcagacctgcctgcaaagcccagcactcagcaagtgctcaataaatatttgatttgaattctt

SEQ ID NO: 787547 - DNA, 120 bp, Artificial Sequence
  ENSG00000262180_0 (sequence is synthesized)
ccattattgttaaagatttaccttagcagacacattagtatactcttctatttaaaaatcctttataaaagtggtattatatggctatcctggtattctttcatattgttagtactttga

SEQ ID NO: 787548 - DNA, 120 bp, Artificial Sequence
  ENSG00000262209_0 (sequence is synthesized)
gcactctctatcaggcttcctgcagcggagacacccattagagaacccaagcacaaagacaaagcaaatagttggtcctgctcggagaactcttgggattatttaaagatctcctctcct

SEQ ID NO: 787549 - DNA, 120 bp, Artificial Sequence
  ENSG00000262209_1 (sequence is synthesized)
cggatttagaaaggcaaaggcgcagagagcgggatgggaaatagctccggatggaggggcccagcagggcagaggcgaatgctatttctcttcctgctctctttgttagaccaggctctc

SEQ ID NO: 787550 - DNA, 120 bp, Artificial Sequence
  ENSG00000262209_2 (sequence is synthesized)
tccgaaccgatccgctacgctattcccgaggagctggacaggggctcgctggtagggaacctcgccaaggacctggggtttggcgtgggggatttacctactaggaacctgcgggttatt

SEQ ID NO: 787551 - DNA, 120 bp, Artificial Sequence
  ENSG00000262209_3 (sequence is synthesized)
gcagagaagaaattctttaccgtgagccccgaaaatgggaacttacttgtgagcgaccgtatagaccgagaggagatttgtggcaagaagtcgacgtgtgttctggaatttgaaatggtt

SEQ ID NO: 787552 - DNA, 120 bp, Artificial Sequence
  ENSG00000262209_4 (sequence is synthesized)
gctgaaaagcctttaaacttttttcatgtaactgtgctgatccaggatattaacgacaacccaccgacctttagccaaaatatcactgagctggaaatcagcgaactggctctcactgga

SEQ ID NO: 787553 - DNA, 120 bp, Artificial Sequence
  ENSG00000262209_5 (sequence is synthesized)
gccacatttgccctggaatctgcgcaagatcctgatgtaggtgtcaattcgctgcagcagtactacctcagccctgatccgcacttctctttgattcagaaggagaacctggatggcagt

SEQ ID NO: 787554 - DNA, 120 bp, Artificial Sequence
  ENSG00000262209_6 (sequence is synthesized)
aggtacccagagctagtactgaaagcacccctggacagggaagagcagccacatcaccacctggtcctcacagctgtggatgggggcgagccctccagaagctgtaccacccagatcagg

SEQ ID NO: 787555 - DNA, 120 bp, Artificial Sequence
  ENSG00000262209_7 (sequence is synthesized)
gtaattgtcgcagatgcaaatgataaccccccagtatttactcaggacatgtacagggtcaatgttgcagagaacctgcccgctggctcctccgtattaaaagtgatggccattgacatg

SEQ ID NO: 787556 - DNA, 120 bp, Artificial Sequence
  ENSG00000262209_8 (sequence is synthesized)
gatgagggcatcaatgccgaaatcatctatgccttcatcaatattggcaaggaagtgagacaactgttcaagctggacagtaaaacgggggaactcaccactattggagaactggacttt

SEQ ID NO: 787557 - DNA, 120 bp, Artificial Sequence
  ENSG00000262209_9 (sequence is synthesized)
gaagagagagatagctacacaattggggtggaagcaaaggatggtggacatcacactgcatattgtaaagtacagatagatatttcagatgaaaatgacaatgccccggagataaccctg

SEQ ID NO: 787558 - DNA, 120 bp, Artificial Sequence
  ENSG00000262209_10 (sequence is synthesized)
gcttctgaatcccaacatatacaagaagatgctgagctggggactgccgttgccctgatcaaaacacatgatctagattctggatttaatggagaaatcctatgccaactaaaaggaaac

SEQ ID NO: 787559 - DNA, 120 bp, Artificial Sequence
  ENSG00000262209_11 (sequence is synthesized)
ttcccctttaaaatcgttcaagataccaaaaacacatacaggttggtgacagatggagccctggaccgggagcagatcccagaatacaatgtgacgatcacagctaccgacaaaggcaat

SEQ ID NO: 787560 - DNA, 120 bp, Artificial Sequence
  ENSG00000262209_12 (sequence is synthesized)
ccaccgctctcctccagcaagaccatcactctgcacatccttgatgtcaacgacaacgttcccgttttccaccaggcctcctacaccgtgcatgtagctgagaacaatccgcctggagcc

SEQ ID NO: 787561 - DNA, 120 bp, Artificial Sequence
  ENSG00000262209_13 (sequence is synthesized)
tccattgcgcatgtcagagcctcggatcccgacttgggacctaatggccttgtctcctactacatcgtggccagtgacctggagccgcgggagctgtcgtcctacgtgtccgtgagcgcg

SEQ ID NO: 787562 - DNA, 120 bp, Artificial Sequence
  ENSG00000262209_14 (sequence is synthesized)
cggagcggggtggtgttcgcgcagcgagccttcgaccacgagcagctgcgtgccttcgagctcactctgcaggcccgcgaccagggctcgcctacgctcagcgccaacgtgagcctgcgc

SEQ ID NO: 787563 - DNA, 120 bp, Artificial Sequence
  ENSG00000262209_15 (sequence is synthesized)
gtgttggtggacgaccgcaacgacaatgcaccgctggtgctgtacccagctctggggcccgaaggctctgcgctcttcgatatggtgccgcgctctgcagagcctggctacctggtgacc

SEQ ID NO: 787564 - DNA, 120 bp, Artificial Sequence
  ENSG00000262209_16 (sequence is synthesized)
aaggtggtggcggtggacgcagactcgggatacaacgcctggctgtcctaccacattgtgcaggccagcgagcccgggctgttcagcctgggcctgcgcacgggtgaggtgcgcacggcg

SEQ ID NO: 787565 - DNA, 120 bp, Artificial Sequence
  ENSG00000262209_17 (sequence is synthesized)
cgtaccttgggcgacagggaggccgcccgccagcgcctgctggtcactgtgcgtgatggaggacagcagcctctttcagccaccgtcatgctgcacctaatcttcgcagatagcttgcaa

SEQ ID NO: 787566 - DNA, 120 bp, Artificial Sequence
  ENSG00000262209_18 (sequence is synthesized)
gagatacaacctgaccttagcgaccgccccactccctctgaccctcaggcggagctacagtttcacctagtagtggcgttggccttgatctcagtgctcttcctcctcgcggtgattctg

SEQ ID NO: 787567 - DNA, 120 bp, Artificial Sequence
  ENSG00000262209_19 (sequence is synthesized)
ctgcttcaagactgtacctggagttctccccacctacagcgaaaggactttgccttattcctacaatccgtgtgctgcctcacattcctcaaacaccgagtttaaatttctcaatataaa

SEQ ID NO: 787568 - DNA, 120 bp, Artificial Sequence
  ENSG00000262209_20 (sequence is synthesized)
ggctgaaaatgctgcaccacaagatcttctatgtgatgaagcctcttggtttgaaagtaatgacaatccagaaatgccttctaattcaggcaatttgcaaaagcaagccccgcccaacac

SEQ ID NO: 787569 - DNA, 120 bp, Artificial Sequence; identical to SEQ ID NO: 80682
  ENSG00000262209_21 (sequence is synthesized)

SEQ ID NO: 787570 - DNA, 120 bp, Artificial Sequence; identical to SEQ ID NO: 80683
  ENSG00000262209_22 (sequence is synthesized)

SEQ ID NO: 787571 - DNA, 120 bp, Artificial Sequence; identical to SEQ ID NO: 80684
  ENSG00000262209_23 (sequence is synthesized)

SEQ ID NO: 787572 - DNA, 120 bp, Artificial Sequence; identical to SEQ ID NO: 80685
  ENSG00000262209_24 (sequence is synthesized)

SEQ ID NO: 787573 - DNA, 120 bp, Artificial Sequence; identical to SEQ ID NO: 80686
  ENSG00000262209_25 (sequence is synthesized)

SEQ ID NO: 787574 - DNA, 120 bp, Artificial Sequence; identical to SEQ ID NO: 80687
  ENSG00000262209_26 (sequence is synthesized)

SEQ ID NO: 787575 - DNA, 120 bp, Artificial Sequence; identical to SEQ ID NO: 80688
  ENSG00000262209_27 (sequence is synthesized)

SEQ ID NO: 787576 - DNA, 120 bp, Artificial Sequence; identical to SEQ ID NO: 80689
  ENSG00000262209_28 (sequence is synthesized)

SEQ ID NO: 787577 - DNA, 120 bp, Artificial Sequence; identical to SEQ ID NO: 80690
  ENSG00000262209_29 (sequence is synthesized)

SEQ ID NO: 787578 - DNA, 120 bp, Artificial Sequence; identical to SEQ ID NO: 80691
  ENSG00000262209_30 (sequence is synthesized)

SEQ ID NO: 787579 - DNA, 120 bp, Artificial Sequence; identical to SEQ ID NO: 80692
  ENSG00000262209_31 (sequence is synthesized)

SEQ ID NO: 787580 - DNA, 120 bp, Artificial Sequence; identical to SEQ ID NO: 80693
  ENSG00000262209_32 (sequence is synthesized)

SEQ ID NO: 787581 - DNA, 120 bp, Artificial Sequence; identical to SEQ ID NO: 80694
  ENSG00000262209_33 (sequence is synthesized)

SEQ ID NO: 787582 - DNA, 120 bp, Artificial Sequence; identical to SEQ ID NO: 80695
  ENSG00000262209_34 (sequence is synthesized)

SEQ ID NO: 787583 - DNA, 120 bp, Artificial Sequence; identical to SEQ ID NO: 80696
  ENSG00000262209_35 (sequence is synthesized)

SEQ ID NO: 787584 - DNA, 120 bp, Artificial Sequence; identical to SEQ ID NO: 80697
  ENSG00000262209_36 (sequence is synthesized)

SEQ ID NO: 787585 - DNA, 120 bp, Artificial Sequence; identical to SEQ ID NO: 80698
  ENSG00000262209_37 (sequence is synthesized)

SEQ ID NO: 787586 - DNA, 120 bp, Artificial Sequence; identical to SEQ ID NO: 80699
  ENSG00000262209_38 (sequence is synthesized)

SEQ ID NO: 787587 - DNA, 120 bp, Artificial Sequence
  ENSG00000262246_0 (sequence is synthesized)
agtcgcggttgctcagcgtgcacctgagacccgacgcccggggtcctcgaagacgcgtccgccgccgtgcccgtcgccatgaaccgcttcagggtgtccaagttccggcacaccgaggct

SEQ ID NO: 787588 - DNA, 120 bp, Artificial Sequence
  ENSG00000262246_1 (sequence is synthesized)
cggccgccccgccgcgagtcctggatcagtgacattcgagcaggaaccgccccttcatgcaggaaccacatcaaatcaagctgcagcttgatcgccttcaactccgaccgtcctggtgta

SEQ ID NO: 787589 - DNA, 120 bp, Artificial Sequence
  ENSG00000262246_2 (sequence is synthesized)
ctgggcattgtgcctctgcaaggccaaggagaggacaagcgacgcgtggcccacctgggctgccattcagacctagtcaccgacttggacttctcgccctttgatgacttcctcctggcc

SEQ ID NO: 787590 - DNA, 120 bp, Artificial Sequence
  ENSG00000262246_3 (sequence is synthesized)
acaggctcggctgacaggacggtaaaactctggcgactgccagggcctggccaggccctgccctcagcacccggggtggtgctgggccccgaggacctcccagtggaggtactgcagttc

SEQ ID NO: 787591 - DNA, 120 bp, Artificial Sequence
  ENSG00000262246_4 (sequence is synthesized)
caccccacctctgacggcattctggtgagcgcagcaggcaccactgtgaaggtctgggacgcagccaagcagcagcccctgacagagctggcagcccatggggacctggtgcagagcgcc

SEQ ID NO: 787592 - DNA, 120 bp, Artificial Sequence
  ENSG00000262246_5 (sequence is synthesized)
gtctggagccgagatggagccctggtgggcacggcgtgcaaggacaagcagctgcggatctttgaccccagaacaaagccgcgggcctctcagagcacgcaggcccatgagaacagcagg

SEQ ID NO: 787593 - DNA, 120 bp, Artificial Sequence
  ENSG00000262246_6 (sequence is synthesized)
gatagccggctggcatggatgggcacctgggagcaccttgtgtctactggattcaaccagatgcgtgagcgcgaagtgaagctgtgggacacgcggttcttctccagcgccctggcctcc

SEQ ID NO: 787594 - DNA, 120 bp, Artificial Sequence
  ENSG00000262246_7 (sequence is synthesized)
ctcaccttggacacctcgcttgggtgtctcgtgcctctgctggaccctgactctgggctcctggtcctggcaggaaagggcgagaggcagctgtactgttacgaggtggtcccgcagcag

SEQ ID NO: 787595 - DNA, 120 bp, Artificial Sequence
  ENSG00000262246_8 (sequence is synthesized)
ccggcgctgagcccagtgacccagtgtgtcctggagagcgtgctgcgtggggctgcccttgtgccccggcaggcgctggccgtcatgagctgcgaggtactccgcgtcctacagctgagc

SEQ ID NO: 787596 - DNA, 120 bp, Artificial Sequence
  ENSG00000262246_9 (sequence is synthesized)
gacacagccatcgtgcccatcggctaccatgtgccccgcaaggctgtggagttccacgaggacctgttcccggacactgccggctgtgtgcctgccaccgacccccatagctggtgggct

SEQ ID NO: 787597 - DNA, 120 bp, Artificial Sequence
  ENSG00000262246_10 (sequence is synthesized)
ggggacaaccagcaggtgcagaaggtcagcctcaaccccgcctgccggccccacccgagcttcacttcctgtctggtgccccctgcggagcccctccctgacacagcccagcctgcggtg

SEQ ID NO: 787598 - DNA, 120 bp, Artificial Sequence
  ENSG00000262246_11 (sequence is synthesized)
atggagacacccgtgggtgatgcagacgcaagcgagggtttctcttcccctcccagttcgctgacctcgccctccacgccctccagcctggggccctcactctccagcaccagtggcatc

SEQ ID NO: 787599 - DNA, 120 bp, Artificial Sequence
  ENSG00000262246_12 (sequence is synthesized)
gggaccagccccagtttgaggtcgctgcagagcctgctgggccccagttccaagttccgccatgctcagggcactgtcctgcaccgagacagccacatcaccaacctcaaggggctcaac

SEQ ID NO: 787600 - DNA, 120 bp, Artificial Sequence
  ENSG00000262246_13 (sequence is synthesized)
ctcaccacacctggtgagagtgacggcttctgtgccaacaagctgcgtgtggccgtgccgctgctcagcagcgggggacaggtggctgtgcttgagctacggaagcctggccgcctgccc

SEQ ID NO: 787601 - DNA, 120 bp, Artificial Sequence
  ENSG00000262246_14 (sequence is synthesized)
ggcgggtacccgcagagggcctggaagaggtgctcaccacgccagagactgtgctcacaggccacacggagaagatctgctccctgcgcttccacccactggcagccaatgtgctggcct

SEQ ID NO: 787602 - DNA, 120 bp, Artificial Sequence
  ENSG00000262246_15 (sequence is synthesized)
cgtcctcctatgacctcactgttcgcatctgggaccttcaggctggagctgatcggctgaagctgcagggccaccaagaccagatcttcagcctggcctggagtcctgatgggcagcagc

SEQ ID NO: 787603 - DNA, 120 bp, Artificial Sequence
  ENSG00000262246_16 (sequence is synthesized)
tggccactgtctgcaaggatgggcgtgtgcgggtctacaggccccggagtggccctgagcccctgcaggaaggcccagggcccaagggaggacgcggagctcgcattgtctgggtatgtg

SEQ ID NO: 787604 - DNA, 120 bp, Artificial Sequence
  ENSG00000262246_17 (sequence is synthesized)
atggtcgctgtctgctggtgtctggctttgacagccaaagtgagcgccagctgctcctatatgaagctgaggccctggccggcggacccttggcagtgttgggcctggacgtggctccct

SEQ ID NO: 787605 - DNA, 120 bp, Artificial Sequence
  ENSG00000262246_18 (sequence is synthesized)
caaccctgctgcccagctacgacccagacactggcctggtgctcctgaccggcaagggcgacacccgtgtattcctgtacgagctgctccccgagtcccctttcttcctggagtgcaaca

SEQ ID NO: 787606 - DNA, 120 bp, Artificial Sequence
  ENSG00000262246_19 (sequence is synthesized)
gcttcacgtcgcctgacccccacaagggcctcgtcctcctgcctaagacggagtgcgacgtgcgggaagtggagctgatgcggtgcctgcggctgcgtcagtcctccctggagcctgtgg

SEQ ID NO: 787607 - DNA, 120 bp, Artificial Sequence
  ENSG00000262246_20 (sequence is synthesized)
ccttccggctgccccgagtccggaaagagttcttccaggatgacgtgttcccagacacggctgtgatctgggagcctgtgctcagtgccgaggcctggctgcaaggcgctaatgggcagc

SEQ ID NO: 787608 - DNA, 120 bp, Artificial Sequence
  ENSG00000262246_21 (sequence is synthesized)
cctggcttctcagcctgcagcctcctgacatgagcccagtgagccaagccccccgagaggcccctgctcgtcgggccccatcctcagcgcagtacctggaagaaaagtctgaccagcaaa

SEQ ID NO: 787609 - DNA, 120 bp, Artificial Sequence
  ENSG00000262246_22 (sequence is synthesized)
agaaggaggagctgctgaatgccatggtggcaaaactggggaaccgggaggacccactcccccaggactcctttgaaggcgtggacgaggacgagtgggactagcctgcgcccccgtcac

SEQ ID NO: 787610 - DNA, 120 bp, Artificial Sequence
  ENSG00000262246_23 (sequence is synthesized)
ctccacctcacctgtgctgccacttcctagtgcacacctcacggctcatcctcaagctggaagatacctctctggccccggcacatgtcacccctgcactcctgccttcccgtgggcact

SEQ ID NO: 787611 - DNA, 120 bp, Artificial Sequence
  ENSG00000262246_24 (sequence is synthesized)
tccacatcctctgggcctctggcagttcccagggactgttttcacctctgctgtctctggggtcagctgctgctcatcagctgcccgctagcatgtggccaggggtgcagggtggcgggg

SEQ ID NO: 787612 - DNA, 120 bp, Artificial Sequence
  ENSG00000262246_25 (sequence is synthesized)
ggtcagcagcatgtccctgggcaggccctgggcaccctgtctcccctggtctcactgctgacctgggctggtcccagcctggattggcctcatccaggatctttggtcaccccacgctgc

SEQ ID NO: 787613 - DNA, 120 bp, Artificial Sequence
  ENSG00000262246_26 (sequence is synthesized)
cccatcttgcctgctgttccagttctggtcaagggccttgggggctggccccccaccaggccttctagagcagcaccagtctcagggccctgggaccagctgccctacttcccaggtttg

SEQ ID NO: 787614 - DNA, 120 bp, Artificial Sequence
  ENSG00000262246_27 (sequence is synthesized)
tagccaggagaagggggcatcacagagctgatggtccaataaggggggtgtgagccccgcagggactggcccgcacctgccttggatgttttcagcaattaaacttttttaagctggcca

SEQ ID NO: 787615 - DNA, 120 bp, Artificial Sequence
  ENSG00000262246_28 (sequence is synthesized)
gtggctgtgcttgagatgagggagaagaggcacagagaggtttagtgacctgcccgggtcacacagctgtctacggaagcctggccgcctgcccgacacggcactgcccacgctgcagaa

SEQ ID NO: 787616 - DNA, 120 bp, Artificial Sequence
  ENSG00000262246_29 (sequence is synthesized)
gtacaccgcaaagactccacagcaaatcctgcacacaaaatcgcgaatgctgcagccgagaccccacgcaagcaagcaccgcaggagacgtgggctgacagctgcgccccacgtgacctc

SEQ ID NO: 787617 - DNA, 120 bp, Artificial Sequence
  ENSG00000262246_30 (sequence is synthesized)
agtgcgtggtttcctcctgctgaccctgagacttacgacgaattgcggatagcaggaaggctgattgttggggagccagtattttctattatgaagcagagaactcttaaggagtggagt

SEQ ID NO: 787618 - DNA, 120 bp, Artificial Sequence
  ENSG00000262246_31 (sequence is synthesized)
tgggtcgggggtcagagtcctgggctggggctgggcctggggctgtgcccagtgactggcaagaagagttgctgctggaattatttaggaattttgagagccattgtcatactcaaccat

SEQ ID NO: 787619 - DNA, 120 bp, Artificial Sequence
  ENSG00000262246_32 (sequence is synthesized)
ttatttaggaattttgagagccattgtcatactcaaccattattaaaaatcatactgtaggccgggtacggtggcctggaatcccaacacttcggaaggctgaggcaggagaattgcttg

SEQ ID NO: 787620 - DNA, 120 bp, Artificial Sequence
  ENSG00000262246_33 (sequence is synthesized)
ccccatctctacaaaacaaacaaaaaattgcactagataaggttaaactatatgaacctacaatatgaacctaaaaataatattaaaaaccaaagtaataaacactcagtttatcacttc

SEQ ID NO: 787621 - DNA, 120 bp, Artificial Sequence
  ENSG00000262246_34 (sequence is synthesized)
ctcggcctcccaaactgctgggattacagccttgagccaccacgcctggccccaaccttctttgtcaagtgtaacagagacagagaaacacgtggagcataaagaaggaacttgcacagt

SEQ ID NO: 787622 - DNA, 120 bp, Artificial Sequence
  ENSG00000262246_35 (sequence is synthesized)
tggagcataaagaaggaacttgcacagtgctttctaaattgggcaaacacttaaaaagcaagaattttcatacagatctagatttctggcttctcttaaaatactggcagatctaaccca

SEQ ID NO: 787623 - DNA, 120 bp, Artificial Sequence
  ENSG00000262246_36 (sequence is synthesized)
ctgggcacaccctcctgcagggctgggagccagcagctgccacttgctgtccccgcggtctgaagctcggctgcttccctgtgtgtctgcgtttatgcccgtgccccccgccgctcctgt

SEQ ID NO: 787624 - DNA, 120 bp, Artificial Sequence
  ENSG00000262246_37 (sequence is synthesized)
cgcatgcccacagtgggggctcctccagtccgcagggggcccagagtggtgaccctggagtccgctggcaccccctccttttggccagtacacctaggagcaggctggctgaccccatgc

SEQ ID NO: 787625 - DNA, 120 bp, Artificial Sequence
  ENSG00000262246_38 (sequence is synthesized)
gcagctgtgcggaggtgacagagtcctggctgcacctggccacggccccttagttctccatccccaacccagactgggacagcagccacatgtcacgtccccttcacaccagagcctggt

SEQ ID NO: 787626 - DNA, 120 bp, Artificial Sequence
  ENSG00000262246_39 (sequence is synthesized)
ggggagaccttccagagccctaccactgaccatggggcccgggaagtgggggagggcagtgggagccctgccctggccaggccaaacccagcctaagccggcagttctgggcccaagtgc

SEQ ID NO: 787627 - DNA, 120 bp, Artificial Sequence
  ENSG00000262246_40 (sequence is synthesized)
ttttgggaccttggagtatattttgagcacttgaggccatgtgcagagatagtagcccttgtatctggtgccacatgccgcagcctctcagtctcttactccccctgtctcttctttgtg

SEQ ID NO: 787628 - DNA, 120 bp, Artificial Sequence
  ENSG00000262246_41 (sequence is synthesized)
tctttttcaatagaaacccatcgattttgtcagggctgtaattaaaatggctcttttgaggccgggcacggtggttcatgtctgtaatcctaacactttgggagcccaaggcaggcggat

SEQ ID NO: 787629 - DNA, 120 bp, Artificial Sequence
  ENSG00000262246_42 (sequence is synthesized)
ggtgctttgacaacagagaaaatgtgtggaccttgcagatcttagtttcagaaacgtgctcctctgcctccccttgggtgggggtgtttcttttactgacttatgagactttgtggaaag

SEQ ID NO: 787630 - DNA, 120 bp, Artificial Sequence
  ENSG00000262246_43 (sequence is synthesized)
ccgccttctcggtgcctagaggggagtttgggtcccgtctgacccagcttccaaacttccctacccattgttcatggggacacctacccccttctgctgagatgctgaaactcatggaag

SEQ ID NO: 787631 - DNA, 120 bp, Artificial Sequence
  ENSG00000262246_44 (sequence is synthesized)
ccccaggctggtgggagggtcccaggtcttgccctgtccctccccaacagatgcccgtgtgccctgggcacctggtcaatgtctcaggacagcccgtttctccctctgcagaaagagttc

SEQ ID NO: 787632 - DNA, 120 bp, Artificial Sequence
  ENSG00000262246_45 (sequence is synthesized)
agcccaggtgcaccgagggactgggtgtggggaggaagcgggatgggggttggagaaagggacagaaggcccaggttgaagttccattcctgttggcacgcagaatcctctggcctttgg

SEQ ID NO: 787633 - DNA, 120 bp, Artificial Sequence
  ENSG00000262246_46 (sequence is synthesized)
gagggtggagtggctgtgtcaatcagtctctgagccagtggagggcagggctcgtggtctgtgttttcatcacaggtccccacccctaacacacacacacacgcacacactgtggtgtct

SEQ ID NO: 787634 - DNA, 120 bp, Artificial Sequence
  ENSG00000262246_47 (sequence is synthesized)
acacactgtggtgtctagggcagggcttatacagtgaggctccattgactgttaataccacctcttagatctgcgccatagaaatcccctaggtcggccaggcgcggtggctcatgcctg

SEQ ID NO: 787635 - DNA, 80 bp, Artificial Sequence
  ENSG00000262246_48 (sequence is synthesized)
cgtggtgggcgcctgcaatcccaaaggaggcggaggttgcagtcagcctaggtcacatcattgcactccagcctgggcaa

SEQ ID NO: 787636 - DNA, 120 bp, Artificial Sequence
  ENSG00000262246_49 (sequence is synthesized)
ttaggtagactcgccgtgcagaacctcgctattctgtgctagacaaccaatgggtgtacgttatcggtgtaaggacgtggttgaatgtagccgaacttaagtggtccgaggggtctggct

SEQ ID NO: 787637 - DNA, 120 bp, Artificial Sequence
  ENSG00000262246_50 (sequence is synthesized)
aagggcgagactacaagtcccagcatacaacgcggtcctccgtcgcgccgctcccagcatgtagtgcgtggtttcctcctgctgaccctgagacttacgacgaattgcgaagaggtagat

SEQ ID NO: 787638 - DNA, 120 bp, Artificial Sequence
  ENSG00000262246_51 (sequence is synthesized)
actctcttgattgctagtggtaactcagaccctcaagctggcttaagcaaaaaatggataatgtttcagcctaactaagagatcaggggcttcaggcagatcggtgcccaaaggctcaca

SEQ ID NO: 787639 - DNA, 120 bp, Artificial Sequence
  ENSG00000262246_52 (sequence is synthesized)
tgtactgtcggccctgacctctctgggtctctcagctctgccaccttgggtgttggcttctttctcaagtaaaagtgcgaaaagtggctgacggtagctgcaagccccatacgaaagccc

SEQ ID NO: 787640 - DNA, 120 bp, Artificial Sequence
  ENSG00000262246_53 (sequence is synthesized)
gcggagggccttagctacccacacaacacagggagcacaaaccttgtgtcaggctcctgcccgcctgtcctgtgatcctcccagccacctgccatggggcctgccacttttatccccatt

SEQ ID NO: 787641 - DNA, 120 bp, Artificial Sequence
  ENSG00000262246_54 (sequence is synthesized)
ttacagatgagggagaagaggcacagagaggtttagtgacctgcccgggtcacacagctgtgtaagtggtggagctgggatccgaagcccggccacctgagccctaagccggagcttttc

SEQ ID NO: 787642 - DNA, 120 bp, Artificial Sequence
  ENSG00000262246_55 (sequence is synthesized)
ctctctggggccttgtggttggcacttggggctcagagcgcaaggtggtcagggcagagagcttgggtcacccagcggtgggagcctctgctgcagagggtgggctcccagacatgctgc

SEQ ID NO: 787643 - DNA, 120 bp, Artificial Sequence
  ENSG00000262246_56 (sequence is synthesized)
ttgcccgcagcccctggggactggcttttctgcctggtactgatgggcctcggggtgggggcacctcccacagctacggaagcctggccgcctgcccgacacggcactgcccacgctgca

SEQ ID NO: 787644 - DNA, 120 bp, Artificial Sequence
  ENSG00000262246_57 (sequence is synthesized)
ccttggacacctcgcttgggtaggagctgcggcacgcaggtgggctggggggctgatgacccaaggcgccgcaggtgagggcacctgatccggcctgtcagtgaggcgggctgatctccg

SEQ ID NO: 787645 - DNA, 120 bp, Artificial Sequence
  ENSG00000262246_58 (sequence is synthesized)
gggtgttctggggtacctgatctgggctgcaaggccttgcaacagacacctggccctgtacccccggagcttccagatgtcacgagcagcaggtgctcaggtgcccctctggcccctggt

SEQ ID NO: 787646 - DNA, 120 bp, Artificial Sequence
  ENSG00000262246_59 (sequence is synthesized)
ctttatctcggtgatgctgccacggctgggtggggcctggggaagcctgagcaggtggagccccaaagaattgctgagccaggtgccgggagacccttcggacccccgaaacggcaggag

SEQ ID NO: 787647 - DNA, 120 bp, Artificial Sequence
  ENSG00000262246_60 (sequence is synthesized)
cccagcctccccgagtccctggtagccccgtgtggctgtgtgccaactcagtctggcctgctgggtgccccccatccctacccagttgaccctcccatgggggccctcctgaccgggcag

SEQ ID NO: 787648 - DNA, 120 bp, Artificial Sequence
  ENSG00000262246_61 (sequence is synthesized)
cctgactccctcccacctcttggtgtttcgccccaggactagcctgcgcccccgtcacctccacctcacctgtgctgccacttcctagtgcacacctcacggctcatcctcaagctggaa

SEQ ID NO: 787649 - DNA, 120 bp, Artificial Sequence
  ENSG00000262406_0 (sequence is synthesized)
agaaaggaacacagtaaactgaattgatccgtttagaagtttacaatgaagtttcttctaatactgctcctgcaggccactgcttctggagctcttcccctgaacagctctacaagcctg

SEQ ID NO: 787650 - DNA, 120 bp, Artificial Sequence
  ENSG00000262406_1 (sequence is synthesized)
gaaaaaaataatgtgctatttggtgaaagatacttagaaaaattttatggccttgagataaacaaacttccagtgacaaaaatgaaatatagtggaaacttaatgaaggaaaaaatccaa

SEQ ID NO: 787651 - DNA, 120 bp, Artificial Sequence
  ENSG00000262406_2 (sequence is synthesized)
gaaatgcagcacttcttgggtctgaaagtgaccgggcaactggacacatctaccctggagatgatgcacgcacctcgatgtggagtccccgatgtccatcatttcagggaaatgccaggg

SEQ ID NO: 787652 - DNA, 120 bp, Artificial Sequence
  ENSG00000262406_3 (sequence is synthesized)
gggcccgtatggaggaaacattatatcacctacagaatcaataattacacacctgacatgaaccgtgaggatgttgactacgcaatccggaaagctttccaagtatggagtaatgttacc

SEQ ID NO: 787653 - DNA, 120 bp, Artificial Sequence
  ENSG00000262406_4 (sequence is synthesized)
cccttgaaattcagcaagattaacacaggcatggctgacattttggtggtttttgcccgtggagctcatggagacttccatgcttttgatggcaaaggtggaatcctagcccatgctttt

SEQ ID NO: 787654 - DNA, 120 bp, Artificial Sequence
  ENSG00000262406_5 (sequence is synthesized)
ggacctggatctggcattggaggggatgcacatttcgatgaggacgaattctggactacacattcaggaggcacaaacttgttcctcactgctgttcacgagattggccattccttaggt

SEQ ID NO: 787655 - DNA, 120 bp, Artificial Sequence
  ENSG00000262406_6 (sequence is synthesized)
cttggccattctagtgatccaaaggccgtaatgttccccacctacaaatatgttgacatcaacacatttcgcctctctgctgatgacatacgtggcattcagtccctgtatggagaccca

SEQ ID NO: 787656 - DNA, 120 bp, Artificial Sequence
  ENSG00000262406_7 (sequence is synthesized)
atcctgacaattcagaaccagctctctgtgaccccaatttgagttttgatgctgtcactaccgtgggaaataagatctttttcttcaaagacaggttcttctggctgaaggtttctgaga

SEQ ID NO: 787657 - DNA, 120 bp, Artificial Sequence
  ENSG00000262406_8 (sequence is synthesized)
gaccaaagaccagtgttaatttaatttcttccttatggccaaccttgccatctggcattgaagctgcttatgaaattgaagccagaaatcaagtttttctttttaaagatgacaaatact

SEQ ID NO: 787658 - DNA, 120 bp, Artificial Sequence
  ENSG00000262406_9 (sequence is synthesized)
ggttaattagcaatttaagaccagagccaaattatcccaagagcatacattcttttggttttcctaactttgtgaaaaaaattgatgcagctgtttttaacccacgtttttataggacct

SEQ ID NO: 787659 - DNA, 120 bp, Artificial Sequence
  ENSG00000262406_10 (sequence is synthesized)
acttctttgtagataaccagtattggaggtatgatgaaaggagacagatgatggaccctggttatcccaaactgattaccaagaacttccaaggaatcgggcctaaaattgatgcagtct

SEQ ID NO: 787660 - DNA, 120 bp, Artificial Sequence
  ENSG00000262406_11 (sequence is synthesized)
tctactctaaaaacaaatactactatttcttccaaggatctaaccaatttgaatatgacttcctactccaacgtatcaccaaaacactgaaaagcaatagctggtttggttgttagaaat

SEQ ID NO: 787661 - DNA, 120 bp, Artificial Sequence
  ENSG00000262406_12 (sequence is synthesized)
ggtgtaattaatggtttttgttagttcacttcagcttaataagtatttattgcatatttgctatgtcctcagtgtaccactacttagagatatgtatcataaaaataaaatctgtaaacc

SEQ ID NO: 787662 - DNA, 120 bp, Artificial Sequence
  ENSG00000262406_13 (sequence is synthesized)
ataggtaatgattatataaaatacataatatttttcaattttgaaaactctaattgtccattcttgcttgactctactattaagtttgaaaatagttaccttcaaaggccaagagaattc

SEQ ID NO: 787663 - DNA, 120 bp, Artificial Sequence
  ENSG00000262406_14 (sequence is synthesized)
tatttgaagcatgctctgtaagttgcttcctaacatccttggactgagaaattatacttacttctggcataactaaaattaagtatatatattttggctcaaataaaattgaaaaaaaaa

SEQ ID NO: 787664 - DNA, 120 bp, Artificial Sequence
  ENSG00000262461_0 (sequence is synthesized)
aacaatgggacttccacagcaatgggatttccttccgcattcagtttgtgcctttcccatgagcgagagactcctaggagagccgcagcccgttaggaagccatgtgggaactcatccac

SEQ ID NO: 787665 - DNA, 79 bp, Artificial Sequence
  ENSG00000262461_1 (sequence is synthesized)
gcagcccgttaggaagccatgtgggaactcatccaccccaacacgcttcaagctttgagtggagaggacacagcctctg

SEQ ID NO: 787666 - DNA, 71 bp, Artificial Sequence
  ENSG00000262461_2 (sequence is synthesized)
gttggcatgagtcggcacctgggagttcagttggacaacagtaacttctcagagctgttctccactcctga

SEQ ID NO: 787667 - DNA, 120 bp, Artificial Sequence
  ENSG00000262461_3 (sequence is synthesized)
cttctcccagcctcgagaattgataacacactcttctggatcccagcagtgtccagaagaagaccaaggacagaacagagactaggtttggtgagatgggacagattttgggaaagatca

SEQ ID NO: 787668 - DNA, 85 bp, Artificial Sequence
  ENSG00000262461_4 (sequence is synthesized)
actaggtttggtgagatgggacagattttgggaaagatcatgatgagccatcaaccgcagccccaggaagagcggagcccccagc

SEQ ID NO: 787669 - DNA, 120 bp, Artificial Sequence
  ENSG00000262461_5 (sequence is synthesized)
tgacatggaggaggacgacgaggcccccaaacaaaacatcttctacttcctgtacgaggagacccgctctcatatacccttgctcagtgagctttggttccagttatgccgttacatgaa

SEQ ID NO: 787670 - DNA, 120 bp, Artificial Sequence
  ENSG00000262461_6 (sequence is synthesized)
cccgagggccaggaagaactgctctcagatagccttgttccggaagtatcggttccacttcttttgttccatgcgctgcagggcttgggtttccctggaggagttggaagagatccaggc

SEQ ID NO: 787671 - DNA, 78 bp, Artificial Sequence
  ENSG00000262461_7 (sequence is synthesized)
agaagaacctggaccattcttgacagagctgaatacagtgatcacgttgtcctccaaggagcaggggtggggtggggt

SEQ ID NO: 787672 - DNA, 120 bp, Artificial Sequence
  ENSG00000262461_8 (sequence is synthesized)
cggaacctggaggtcctgtttcttatggacttggttgtcacagtccaggagcatttgaaggcacagtgcaggggctcagattggcacagaattctttgtgaaatatgagtgccacagact

SEQ ID NO: 787673 - DNA, 120 bp, Artificial Sequence
  ENSG00000262461_9 (sequence is synthesized)
atttgaaggcacagtgcaggggctcagattggcacagaattctttgtgaaatatgagtgccacagactgtaacagatagcttcatgcacactatgcattttattggtttgtttggaaaat

SEQ ID NO: 787674 - DNA, 79 bp, Artificial Sequence
  ENSG00000262461_10 (sequence is synthesized)
ccagtgaaagtcattctcccctctctcatccacctcacccgcggccacaatcctgagacttcacggaaaccctgtcctg

SEQ ID NO: 787675 - DNA, 120 bp, Artificial Sequence
  ENSG00000262484_0 (sequence is synthesized)
atgccgccccgagggccagcctctgagctgctgctgctgcggctgctcctgctgggggcggccaccgctgctcccttggcaccgagaccctccaaggaggagctgacccgctgtctggca

SEQ ID NO: 787676 - DNA, 120 bp, Artificial Sequence
  ENSG00000262484_1 (sequence is synthesized)
gaggtggtcacagaggtgctgaccgtgggccaggtccagagaggaccctgcactgctcttctccacaaggagttgtgcgggacagagccccacggctgtgcgtccaccgaggagaaaggc

SEQ ID NO: 787677 - DNA, 120 bp, Artificial Sequence
  ENSG00000262484_2 (sequence is synthesized)
ctgctgcttggggatttcaagaagcaggaggctgggaagatgaggtccagccaggaggtgagggatgaggaagaggaggaggtagcagagaggacccacaagtctgaggtccaggaacaa

SEQ ID NO: 787678 - DNA, 120 bp, Artificial Sequence
  ENSG00000262484_3 (sequence is synthesized)
gccatccgcatgcaagggcatcgccagctccaccaggaggaggacgaggaggaggagaaggaggagaggaagagggggcccatggagacctttgaggacctgtggcagcggcatctagag

SEQ ID NO: 787679 - DNA, 120 bp, Artificial Sequence
  ENSG00000262484_4 (sequence is synthesized)
gggaccgcagcctgtggcagggggccgagagaggcggaggagagaggcgcgaggacttgccccaccaccaccaccaccaccaccagccagaggctgagcccaggcaggagaaggaggagg

SEQ ID NO: 787680 - DNA, 120 bp, Artificial Sequence
  ENSG00000262484_5 (sequence is synthesized)
cttcggagagggaggaaaaggaggtggagcagctggagcacttgagagacgaactgaagaaggtgacagagacgctgggggagcagctcaggagggagggctgacccctacctcagtccc

SEQ ID NO: 787681 - DNA, 120 bp, Artificial Sequence
  ENSG00000262484_6 (sequence is synthesized)
tccttcctcctgacacaccctgtggcttaggactgttgaccccgaagcctccacctcacctagcaccccacgccacccctacccaaacaggggaggaggcggacgtgccttggaaccaca

SEQ ID NO: 787682 - DNA, 120 bp, Artificial Sequence
  ENSG00000262484_7 (sequence is synthesized)
cccaaggaggtgagtctgagctgggccgggggctgggctcagccctgacacaggaagcacccccacacctatgcactcccactccaacccttctgagtgaataaagcacaaagaaacgca

SEQ ID NO: 787683 - DNA, 120 bp, Artificial Sequence
  ENSG00000262543_0 (sequence is synthesized)
ggtctctctggttggtttctttcccctgttgccattcatcagaggacgagtttaccaacagccatcagccaagcacatccaaactggatccaggccaagagcaagcagcattgttgaaat

SEQ ID NO: 787684 - DNA, 120 bp, Artificial Sequence
  ENSG00000262543_1 (sequence is synthesized)
ctgggcagcaaggtggaagggtggccagggcatcagctggatgaaaacatgcggggactgctgggcagcagctggaagaagtttggacatgctggccgggggacatatgagtggttaacc

SEQ ID NO: 787685 - DNA, 120 bp, Artificial Sequence
  ENSG00000262543_2 (sequence is synthesized)
agcgagcccggcctgcctctcctggagacccagctgcagggcacccagggggtgagctccacccaggaggatgtggagcccttcctgtgcatccttctgccggccaccatcctgctcttc

SEQ ID NO: 787686 - DNA, 120 bp, Artificial Sequence
  ENSG00000262543_3 (sequence is synthesized)
ctgttcctgtaccgccgctgcaagtccccaccgccccaggggcaggtgttcagcattgacctaccagagcacccacctgcaggagaggtgacagacctcctgcccggcctggcctggagc

SEQ ID NO: 787687 - DNA, 120 bp, Artificial Sequence
  ENSG00000262543_4 (sequence is synthesized)
agtgaggacttcccctactccccactgcccccggaggccactctcccctcccagtgtttaccgccctcctacgaagaggccaccagaaatcctcctggggaggaggcccagggatgcagt

SEQ ID NO: 787688 - DNA, 120 bp, Artificial Sequence
  ENSG00000262543_5 (sequence is synthesized)
ccttcagtatgaaaagggctcacctggactggaagagcaaaaataaactgctcttgggaatcatacaaaacacagctctccacctttaatacagcacccatgagaagagggagaagggcc

SEQ ID NO: 787689 - DNA, 120 bp, Artificial Sequence
  ENSG00000262543_6 (sequence is synthesized)
cctagacccaagaagctgctattcattggccaacctctgacaatggggcacttcaggctgagggcaaagcttggcaaatgccaatctggttaacctatcttcacattccttaggggaaag

SEQ ID NO: 787690 - DNA, 120 bp, Artificial Sequence
  ENSG00000262576_0 (sequence is synthesized)
agaatcacaagatttctgcagcacaaagcactggctctggagctttatgaaagcttcaagcggaagccctgagagctctggctgtgaatgcactttattttggacccagaagatcctggg

SEQ ID NO: 787691 - DNA, 120 bp, Artificial Sequence
  ENSG00000262576_1 (sequence is synthesized)
gctcctcaggcctcgacagagggaaaaccgaagcacaggcgactccgcggcggggttgtaatggcggcgcctcctgctcgcccagaccacacccggctgctccagatctgccttctcctg

SEQ ID NO: 787692 - DNA, 120 bp, Artificial Sequence
  ENSG00000262576_2 (sequence is synthesized)
ggggttctggtggaaatcagggccgaacagattctctactcggtgtttgaggagcaggaagaaggctcagtggtgggcaacatcgccaaggacctggggttggcgccccgggagctggcg

SEQ ID NO: 787693 - DNA, 120 bp, Artificial Sequence
  ENSG00000262576_3 (sequence is synthesized)
gagcgcggagtccgcatcgtctccagaggtaggacgcagcttttcgccctgaacccgcgcagcggcaccttggtcaccgcgggtaggatagacagggaggagctctgcgacagatctcca

SEQ ID NO: 787694 - DNA, 120 bp, Artificial Sequence
  ENSG00000262576_4 (sequence is synthesized)
aactgtgtgacaaacctggagattcttctagaagatacagtgaagattttgcgggtagaggtggaaataatcgatgttaatgataacccacccagttttgggacagaacagagggaaata

SEQ ID NO: 787695 - DNA, 120 bp, Artificial Sequence
  ENSG00000262576_5 (sequence is synthesized)
aaagttgctgaaaatgaaaatcctggggcaagatttcctcttcctgaagcttttgatccggatgtaggtgtaaactccctgcagggttaccagctcaactcaaacggttacttttccctg

SEQ ID NO: 787696 - DNA, 120 bp, Artificial Sequence
  ENSG00000262576_6 (sequence is synthesized)
gacgtgcaaagtggggccgatgggattaagtacccagagctggtgctggaacgcgctctagatcgcgaggaagaggcggttcaccacctcgttctcacggccttcgatggaggtgacccg

SEQ ID NO: 787697 - DNA, 120 bp, Artificial Sequence
  ENSG00000262576_7 (sequence is synthesized)
gttcgctctggcactgccaggattctcataatacttgtggataccaacgataatgctcccgtgttcactcagcccgagtaccacgtaagtgttcgtgagaacgttcctgtaggcactcgg

SEQ ID NO: 787698 - DNA, 120 bp, Artificial Sequence
  ENSG00000262576_8 (sequence is synthesized)
ctactcaccgtaaaagccactgatccagatgaaggagccaatggagacgtgacgtattctttccggaaagtaagagacaaaatatcacagctatttcagttgaattctctgagtggggat

SEQ ID NO: 787699 - DNA, 120 bp, Artificial Sequence
  ENSG00000262576_9 (sequence is synthesized)
ataacaatattggggggtctagattatgaggactctggattctatgacatagatgtagaagcccatgatgggcctggtctccgagctagaagcaaggtactggtgacagttctggatgaa

SEQ ID NO: 787700 - DNA, 120 bp, Artificial Sequence
  ENSG00000262576_10 (sequence is synthesized)
aatgacaacgcaccagaagtcacagttacatctctcaccagctcagtccaggaatcttcttccccgggtacagtaattgcacttttcaacgtgcatgacagtgactcaggaggaaatggc

SEQ ID NO: 787701 - DNA, 120 bp, Artificial Sequence
  ENSG00000262576_11 (sequence is synthesized)
ctagtcacatgttctattccagataatctgccattcacacttgaaaagacctatggaaattattatcggttgttgacacacagaacactggacagggaagaagtctcagaatataacatc

SEQ ID NO: 787702 - DNA, 120 bp, Artificial Sequence
  ENSG00000262576_12 (sequence is synthesized)
actgtaactgccactgaccagggaactcctccactgtctacagaaactcatatttcactgcaagtgatggacatcaatgacaacccacccactttccctcatgcttcctactctgcttac

SEQ ID NO: 787703 - DNA, 120 bp, Artificial Sequence
  ENSG00000262576_13 (sequence is synthesized)
attcctgaaaacaaccccagaggagcctccatcttatctatgactgctcaagaccctgacagtggtgacaatgcccgaatcacttactccctggccgaagacaccttccagggtgcacct

SEQ ID NO: 787704 - DNA, 120 bp, Artificial Sequence
  ENSG00000262576_14 (sequence is synthesized)
ctgtcctcctatgtctccatcaactccaatacagggatcctatatgctctttgctccttcgactatgagcagtttagagacctgcagctgctgatgacagccagtgacagtggagaccct

SEQ ID NO: 787705 - DNA, 120 bp, Artificial Sequence
  ENSG00000262576_15 (sequence is synthesized)
ccactcagcagcaatgtgtcactgagcctctttgtgctggaccagaacgacaatgtccctgagatcctgtaccccaccttccctactgatggctccactggtgtggagctggcaccccgc

SEQ ID NO: 787706 - DNA, 120 bp, Artificial Sequence
  ENSG00000262576_16 (sequence is synthesized)
tccgcagattccggctacctggtgaccaaagtggtggcagtggacagagactcaggtcagaatgcctggctgtcctacagcctactcaagtccagcgagccgggactatttgcagtgggg

SEQ ID NO: 787707 - DNA, 120 bp, Artificial Sequence
  ENSG00000262576_17 (sequence is synthesized)
ctgcacacaggcgaggtgcgcaccgcacgggccctgctggacagagacgcgctcaagcagaggcttgtagtggtcgtccaggaccatggccagccccctctctcggccaccgtcacactc

SEQ ID NO: 787708 - DNA, 120 bp, Artificial Sequence
  ENSG00000262576_18 (sequence is synthesized)
actgtggctgtggccgacagcatcccagatgtcctggctgacttgggcagcctcaagccttcagcagacccagacgactcgggcctcacactctatctcgtggtggcagtggccgctgtc

SEQ ID NO: 787709 - DNA, 120 bp, Artificial Sequence
  ENSG00000262576_19 (sequence is synthesized)
aggtgtgcctgcctcgcactttgtgggcgtggacggggttcgggctttcctgcagacctattcccacgaggtctccctcaccgcggactcgcggaagagtcacctgatcttctcccaacc

SEQ ID NO: 787710 - DNA, 120 bp, Artificial Sequence
  ENSG00000262576_20 (sequence is synthesized)
cagctatgcagacacgctcatcagccgggagagttgtgagaaaagcgagcctcttctgataactcaggatttacttgaaacaaaaggagaccctaatcttcagcaagccccgcccaacac

SEQ ID NO: 787711 - DNA, 120 bp, Artificial Sequence; identical to SEQ ID NO: 80682
  ENSG00000262576_21 (sequence is synthesized)

SEQ ID NO: 787712 - DNA, 120 bp, Artificial Sequence; identical to SEQ ID NO: 80683
  ENSG00000262576_22 (sequence is synthesized)

SEQ ID NO: 787713 - DNA, 120 bp, Artificial Sequence; identical to SEQ ID NO: 80684
  ENSG00000262576_23 (sequence is synthesized)

SEQ ID NO: 787714 - DNA, 120 bp, Artificial Sequence; identical to SEQ ID NO: 80685
  ENSG00000262576_24 (sequence is synthesized)

SEQ ID NO: 787715 - DNA, 120 bp, Artificial Sequence; identical to SEQ ID NO: 80686
  ENSG00000262576_25 (sequence is synthesized)

SEQ ID NO: 787716 - DNA, 120 bp, Artificial Sequence; identical to SEQ ID NO: 80687
  ENSG00000262576_26 (sequence is synthesized)

SEQ ID NO: 787717 - DNA, 120 bp, Artificial Sequence; identical to SEQ ID NO: 80688
  ENSG00000262576_27 (sequence is synthesized)

SEQ ID NO: 787718 - DNA, 120 bp, Artificial Sequence; identical to SEQ ID NO: 80689
  ENSG00000262576_28 (sequence is synthesized)

SEQ ID NO: 787719 - DNA, 120 bp, Artificial Sequence; identical to SEQ ID NO: 80690
  ENSG00000262576_29 (sequence is synthesized)

SEQ ID NO: 787720 - DNA, 120 bp, Artificial Sequence; identical to SEQ ID NO: 80691
  ENSG00000262576_30 (sequence is synthesized)

SEQ ID NO: 787721 - DNA, 120 bp, Artificial Sequence; identical to SEQ ID NO: 80692
  ENSG00000262576_31 (sequence is synthesized)

SEQ ID NO: 787722 - DNA, 120 bp, Artificial Sequence; identical to SEQ ID NO: 80693
  ENSG00000262576_32 (sequence is synthesized)

SEQ ID NO: 787723 - DNA, 120 bp, Artificial Sequence; identical to SEQ ID NO: 80694
  ENSG00000262576_33 (sequence is synthesized)

SEQ ID NO: 787724 - DNA, 120 bp, Artificial Sequence; identical to SEQ ID NO: 80695
  ENSG00000262576_34 (sequence is synthesized)

SEQ ID NO: 787725 - DNA, 120 bp, Artificial Sequence; identical to SEQ ID NO: 80696
  ENSG00000262576_35 (sequence is synthesized)

SEQ ID NO: 787726 - DNA, 120 bp, Artificial Sequence; identical to SEQ ID NO: 80697
  ENSG00000262576_36 (sequence is synthesized)

SEQ ID NO: 787727 - DNA, 120 bp, Artificial Sequence; identical to SEQ ID NO: 80698
  ENSG00000262576_37 (sequence is synthesized)

SEQ ID NO: 787728 - DNA, 120 bp, Artificial Sequence; identical to SEQ ID NO: 80699
  ENSG00000262576_38 (sequence is synthesized)

SEQ ID NO: 787729 - DNA, 120 bp, Artificial Sequence
  ENSG00000262576_39 (sequence is synthesized)
ctaatcttcaggtgagtcaatcttataatagatcataccacactgaaatatagacaaagagttgtgtaaatgtctctcattttatatgtaatatatcaaataaagttgcctcttttaata

SEQ ID NO: 787730 - DNA, 120 bp, Artificial Sequence
  ENSG00000262628_0 (sequence is synthesized)
atggatggagataaccagagtgagaactcacagttccttctcctggggatctcagagagtcctgagcagcagcggatcctgttttggatgttcctgtccatgtacctggtcacggtgctg

SEQ ID NO: 787731 - DNA, 120 bp, Artificial Sequence
  ENSG00000262628_1 (sequence is synthesized)
ggaaatgtgctcatcatcctggccatcagctctgattcccacctgcacacccccatgtacttcttcctggccaacctctccttcactgacctcttctttgtcaccaacacaatccccaag

SEQ ID NO: 787732 - DNA, 120 bp, Artificial Sequence
  ENSG00000262628_2 (sequence is synthesized)
atgctggtgaacttccagtcccagaacaaagccatctcctatgcagggtgtctgacacagctctacttcctggtctccttggtgaccctggacaacctcatcctggccgtgatggcgtat

SEQ ID NO: 787733 - DNA, 120 bp, Artificial Sequence
  ENSG00000262628_3 (sequence is synthesized)
ctctatggcctcctcctcaccttcctcctgaccagggtgaccttctgtgggcctcgagagatccactacctcttctgtgacatgtacatcctgctgtggctggcatgttccaacacccac

SEQ ID NO: 787734 - DNA, 120 bp, Artificial Sequence
  ENSG00000262628_4 (sequence is synthesized)
atcattcacacagcgttgattgccactggctgcttcatcttcctcacccccttagggttcatgaccacatcctatgtacgtattgtcagaaccatccttcaaatgccctcggcctctaag

SEQ ID NO: 787735 - DNA, 120 bp, Artificial Sequence
  ENSG00000262628_5 (sequence is synthesized)
aaatacaaaaccttctctacctgtgcctcccatttgggtgtggtctccctcttttatgggacgcttgctatggtgtacctgcagcccctccatacctactccatgaaggactcagtagcc

SEQ ID NO: 787736 - DNA, 120 bp, Artificial Sequence
  ENSG00000262628_6 (sequence is synthesized)
acagtgatgtatgctgtgctgacacctatgatgaaccctttcatctacaggctgaggaacaaagacatgcatggggctccgggaagagtcctatggagaccctttcagaggcctaaatga

SEQ ID NO: 787737 - DNA, 120 bp, Artificial Sequence
  ENSG00000262655_0 (sequence is synthesized)
agctcagcgcagctccgcggccgccaagccgaggcgggcacggtctccgagtcgcggacgccagctccgagctccctctctccgccgcgcctccgccaggtcgcgccttcgtcgggacca

SEQ ID NO: 787738 - DNA, 120 bp, Artificial Sequence
  ENSG00000262655_1 (sequence is synthesized)
cttcgggcaggagtcgcgtggcgaaggcctgcggccgcggcacaaagttgggggccgcgaagatgaggctgtccccggcgcccctgaagctgagccggactccggcactgctggccctgg

SEQ ID NO: 787739 - DNA, 120 bp, Artificial Sequence
  ENSG00000262655_2 (sequence is synthesized)
cgctgcccctggccgcggcgctggccttctccgacgagaccctggacaaagtgcccaagtcagagggctactgcagccgtatcctgcgcgcccagggcacgcggcgcgagggctacaccg

SEQ ID NO: 787740 - DNA, 120 bp, Artificial Sequence
  ENSG00000262655_3 (sequence is synthesized)
agttcagcctccgcgtggagggcgaccccgacttctacaagccgggaaccagctaccgcgtaacactttcagctgctcctccctcctacttcagaggattcacattaattgccctcagag

SEQ ID NO: 787741 - DNA, 120 bp, Artificial Sequence
  ENSG00000262655_4 (sequence is synthesized)
agaacagagagggtgataaggaagaagaccatgctgggaccttccagatcatagacgaagaagaaactcagtttatgagcaattgccctgttgcagtcactgaaagcactccacggagga

SEQ ID NO: 787742 - DNA, 120 bp, Artificial Sequence
  ENSG00000262655_5 (sequence is synthesized)
ggacccggatccaggtgttttggatagcaccaccagcgggaacaggctgcgtgattctgaaggccagcatcgtacaaaaacgcattatttattttcaagatgagggctctctgaccaaga

SEQ ID NO: 787743 - DNA, 120 bp, Artificial Sequence
  ENSG00000262655_6 (sequence is synthesized)
aactttgtgaacaagattccacatttgatggggtgactgacaaacccatcttagactgctgtgcctgcggaactgccaagtacagactcacattttatgggaattggtccgagaagacac

SEQ ID NO: 787744 - DNA, 120 bp, Artificial Sequence
  ENSG00000262655_7 (sequence is synthesized)
acccaaaggattaccctcgtcgggccaaccactggtctgcgatcatcggaggatcccactccaagaattatgtactgtgggaatatggaggatatgccagcgaaggcgtcaaacaagttg

SEQ ID NO: 787745 - DNA, 120 bp, Artificial Sequence
  ENSG00000262655_8 (sequence is synthesized)
cagaattgggctcacccgtgaaaatggaggaagaaattcgacaacagagtgatgaggtcctcaccgtcatcaaagccaaagcccaatggccagcctggcagcctctcaacgtgagagcag

SEQ ID NO: 787746 - DNA, 120 bp, Artificial Sequence
  ENSG00000262655_9 (sequence is synthesized)
caccttcagctgaattttccgtggacagaacgcgccatttaatgtccttcctgaccatgatgggccctagtcccgactggaacgtaggcttatctgcagaagatctgtgcaccaaggaat

SEQ ID NO: 787747 - DNA, 120 bp, Artificial Sequence
  ENSG00000262655_10 (sequence is synthesized)
gtggctgggtccagaaggtggtgcaagacctgattccctgggacgctggcaccgacagcggggtgacctatgagtcacccaacaaacccaccattccccaggagaaaatccggcccctga

SEQ ID NO: 787748 - DNA, 120 bp, Artificial Sequence
  ENSG00000262655_11 (sequence is synthesized)
ccagcctggaccatcctcagagtcctttctatgacccagagggtgggtccatcactcaagtagccagagttgtcatcgagagaatcgcacggaagggtgaacaatgcaatattgtacctg

SEQ ID NO: 787749 - DNA, 120 bp, Artificial Sequence
  ENSG00000262655_12 (sequence is synthesized)
acaatgtcgatgatattgtagctgacctggctccagaagagaaagatgaagatgacacccctgaaacctgcatctactccaactggtccccatggtccgcctgcagctcctccacctgtg

SEQ ID NO: 787750 - DNA, 120 bp, Artificial Sequence
  ENSG00000262655_13 (sequence is synthesized)
acaaaggcaagaggatgcgacagcgcatgctgaaagcacagctggacctcagcgtcccctgccctgacacccaggacttccagccctgcatgggccctggctgcagtgacgaagacggct

SEQ ID NO: 787751 - DNA, 120 bp, Artificial Sequence
  ENSG00000262655_14 (sequence is synthesized)
ccacctgcaccatgtccgagtggatcacctggtcgccctgcagcatctcctgcggcatgggcatgaggtcccgggagaggtatgtgaagcagttcccggaggacggctccgtgtgcacgc

SEQ ID NO: 787752 - DNA, 120 bp, Artificial Sequence
  ENSG00000262655_15 (sequence is synthesized)
tgcccactgaggaaacggagaagtgcacggtcaacgaggagtgctctcccagcagctgcctgatgaccgagtggggcgagtgggacgagtgcagcgccacctgcggcatgggcatgaaga

SEQ ID NO: 787753 - DNA, 120 bp, Artificial Sequence
  ENSG00000262655_16 (sequence is synthesized)
agcggcaccgcatgatcaagatgaaccccgcagatggctccatgtgcaaagccgagacatcacaggcagagaagtgcatgatgccagagtgccacaccatcccatgcttgctgtccccat

SEQ ID NO: 787754 - DNA, 120 bp, Artificial Sequence
  ENSG00000262655_17 (sequence is synthesized)
ggtccgagtggagtgactgcagcgtgacctgcgggaagggcatgcgaacccgacagcggatgctcaagtctctggcagaacttggagactgcaatgaggatctggagcaggtggagaagt

SEQ ID NO: 787755 - DNA, 120 bp, Artificial Sequence
  ENSG00000262655_18 (sequence is synthesized)
gcatgctccctgaatgccccattgactgtgagctcaccgagtggtcccagtggtcggaatgtaacaagtcatgtgggaaaggccacgtgattcgaacccggatgatccaaatggagcctc

SEQ ID NO: 787756 - DNA, 120 bp, Artificial Sequence
  ENSG00000262655_19 (sequence is synthesized)
agtttggaggtgcaccctgcccagagactgtgcagcgaaaaaagtgccgcatccgaaaatgccttcgaaatccatccatccaaaagctacgctggagggaggcccgagagagccggcgga

SEQ ID NO: 787757 - DNA, 120 bp, Artificial Sequence
  ENSG00000262655_20 (sequence is synthesized)
gtgagcagctgaaggaagagtctgaaggggagcagttcccaggttgtaggatgcgcccatggacggcctggtcagaatgcaccaaactgtgcggaggtggaattcaggaacgttacatga

SEQ ID NO: 787758 - DNA, 120 bp, Artificial Sequence
  ENSG00000262655_21 (sequence is synthesized)
gattcaaaagctcccagtttaccagctgcaaagacaagaaggagatcagagcatgcaatgttcatccttgttagcaagggtacgagttccccagggctgcactctagattccagagtcac

SEQ ID NO: 787759 - DNA, 120 bp, Artificial Sequence
  ENSG00000262655_22 (sequence is synthesized)
caatggctggattatttgcttgtttaagacaatttaaattgtgtacgctagttttcatttttgcagtgtggttcgcccagtagtcttgtggatgccagagacatcctttctgaatacttc

SEQ ID NO: 787760 - DNA, 120 bp, Artificial Sequence
  ENSG00000262655_23 (sequence is synthesized)
ttgatgggtacaggctgagtggggcgccctcacctccagccagcctcttcctgcagaggagtagtgtcagccaccttgtactaagctgaaacatgtccctctggagcttccacctggcca

SEQ ID NO: 787761 - DNA, 120 bp, Artificial Sequence
  ENSG00000262655_24 (sequence is synthesized)
gggaggacggagactttgacctactccacatggagaggcaaccatgtctggaagtgactatgcctgagtcccagggtgcggcaggtaggaaacattcacagatgaagacagcagattccc

SEQ ID NO: 787762 - DNA, 120 bp, Artificial Sequence
  ENSG00000262655_25 (sequence is synthesized)
cacattctcatctttggcctgttcaatgaaaccattgtttgcccatctcttcttagtggaactttaggtctcttttcaagtctcctcagtcatcaatagttcctggggaaaaacagagct

SEQ ID NO: 787763 - DNA, 120 bp, Artificial Sequence
  ENSG00000262655_26 (sequence is synthesized)
ggtagacttgaagaggagcattgatgttgggtggcttttgttctttcactgagaaattcggaatacatttgtctcacccctgatattggttcctgatgcccccccaacaaaaataaataa

SEQ ID NO: 787764 - DNA, 120 bp, Artificial Sequence
  ENSG00000262655_27 (sequence is synthesized)
ataaattatggctgctttatttaaatataaggtagctagtttttacacctgagataaataataagcttagagtgtatttttcccttgcttttgggggttcagaggagtatgtacaattct

SEQ ID NO: 787765 - DNA, 120 bp, Artificial Sequence
  ENSG00000262655_28 (sequence is synthesized)
tctgggaagccagccttctgaactttttggtactaaatccttattggaaccaagacaaaggaagcaaaattggtctctttagagaccaatttgcctaaattttaaaatcttcctacacac

SEQ ID NO: 787766 - DNA, 120 bp, Artificial Sequence
  ENSG00000262655_29 (sequence is synthesized)
atctagacgttcaagtttgcaaatcagtttttagcaagaaaacatttttgctatacaaacattttgctaagtctgcccaaagcccccccaatgcattccttcaacaaaatacaatctctg

SEQ ID NO: 787767 - DNA, 120 bp, Artificial Sequence
  ENSG00000262655_30 (sequence is synthesized)
tactttaaagttattttagtcatgaaattttatatgcagagagaaaaagttaccgagacagaaaacaaatctaagggaaaggaatattatgggattaagctgagcaagcaattctggtgg

SEQ ID NO: 787768 - DNA, 120 bp, Artificial Sequence
  ENSG00000262655_31 (sequence is synthesized)
aaagtcaaacctgtcagtgctccacaccagggctgtggtcctcccagacatgcataggaatggccacaggtttacactgccttcccagcaattataagcacaccagattcagggagactg

SEQ ID NO: 787769 - DNA, 120 bp, Artificial Sequence
  ENSG00000262655_32 (sequence is synthesized)
accaccaagggatagtgtaaaaggacattttctcagttgggtccatcagcagtttttcttcctgcatttattgttgaaaactattgtttcatttcttcttttataggccttattactgct

SEQ ID NO: 787770 - DNA, 120 bp, Artificial Sequence
  ENSG00000262655_33 (sequence is synthesized)
taatccaaatgtgtaccattggtgagacacatacaatgctctgaatacactacgaatttgtattaaacacatcagaatatttccaaatacaacatagtatagtcctgaatatgtactttt

SEQ ID NO: 787771 - DNA, 120 bp, Artificial Sequence
  ENSG00000262655_34 (sequence is synthesized)
aacacaagagagactattcaataaaaactcactgggtctttcatgtctttaagctaagtaagtgttcagaaggttcttttttatattgtcctccacctccatcattttcaataaaagata

SEQ ID NO: 787772 - DNA, 120 bp, Artificial Sequence
  ENSG00000262655_35 (sequence is synthesized)
gggcttttgctcccttgttcttggagggaccattattacatctctgaactacctttgtatccaacatgttttaaatccttaaatgaattgctttctcccaaaaaaagcacaatataaaga

SEQ ID NO: 787773 - DNA, 120 bp, Artificial Sequence
  ENSG00000262655_36 (sequence is synthesized)
aacacaagatttaattatttttctacttggggggaaaaaagtcctcatgtagaagcacccacttttgcaatgttgttctaagctatctatctaactctcagcccatgataaagttcctta

SEQ ID NO: 787774 - DNA, 120 bp, Artificial Sequence
  ENSG00000262655_37 (sequence is synthesized)
agctggtgattcctaatcaaggacaagccaccctagtgtctcatgtttgtatttggtcccagttgggtacattttaaaatcctgattttggagacttaaaaccaggttaatggctaagaa

SEQ ID NO: 787775 - DNA, 120 bp, Artificial Sequence
  ENSG00000262655_38 (sequence is synthesized)
tgggtaacatgactcttgttggattgttattttttgtttgcaatggggaatttataagaagcatcaagtctctttcttaccaaagtcttgttaggtggtttatagttcttttggctaaca

SEQ ID NO: 787776 - DNA, 120 bp, Artificial Sequence
  ENSG00000262655_39 (sequence is synthesized)
aatcattttggaaataaagattttttactacaaaaatgaaatttgtttggacttccacttgagacagtaaagagagtattagacacccagtaaaaactgccatataaagaagttgtaatt

SEQ ID NO: 787777 - DNA, 120 bp, Artificial Sequence
  ENSG00000262655_40 (sequence is synthesized)
gtttgttgtgtatgtatttttttcaatgccaaaccagctgtgatccaatttacatccacattttaggtccaacagcaagaagttcagagagagatttcccaaccagacattgggtcactc

SEQ ID NO: 787778 - DNA, 120 bp, Artificial Sequence
  ENSG00000262655_41 (sequence is synthesized)
actggtcaccttgccagtgcattttattagaagggaatctgttgtagcaaatgggaataaacctgggtttctatagacccagaactgaaaaaataaacatcgtgctgtttttaatttgaa

SEQ ID NO: 787779 - DNA, 120 bp, Artificial Sequence
  ENSG00000262655_42 (sequence is synthesized)
ctgaaagtcctccaaagccttcttgagtcatagagggagcatagaatgggtgatgacctggcaccaatcctgcctctgctgcttaccaaccacacgggctgaagtcagcctgcctctttg

SEQ ID NO: 787780 - DNA, 120 bp, Artificial Sequence
  ENSG00000262655_43 (sequence is synthesized)
gagcctcagtttcttcttctgtaaaatagcatgacacagcacctgctttgcatccctcataggcttgttgagatgttcaaaggagagcgtgaccatatcttgtttcagacatgtgataca

SEQ ID NO: 787781 - DNA, 120 bp, Artificial Sequence
  ENSG00000262664_0 (sequence is synthesized)
gcttccgtcgctccttgccgggcataatggccgcgcagcgacccctgcgggtcctgtgcctggcgggcttccggcagagcgagcggggcttccgtgagaagaccggggcgctgaggaagg

SEQ ID NO: 787782 - DNA, 120 bp, Artificial Sequence
  ENSG00000262664_1 (sequence is synthesized)
cgctgcggggtcgcgccgagctcgtgtgcctcagcggcccgcacccggtccccgaccccccgggccccgagggcgccagatcagacttcgggtcctgccctccggaggagcagcctcgag

SEQ ID NO: 787783 - DNA, 120 bp, Artificial Sequence
  ENSG00000262664_2 (sequence is synthesized)
gctggtggttttcagagcaggaggccgacgttttctccgcattggaagagcccgccgtctgcaggggcctggaggaatcactggggatggtggcacaggcactgaacaggctggggcctt

SEQ ID NO: 787784 - DNA, 120 bp, Artificial Sequence
  ENSG00000262664_3 (sequence is synthesized)
ttgacggccttcttggtttcagccaaggggctgcgctagcagcccttgtgtgtgccctgggccaggcaggcgatccccgcttccccttgccacggtttatcctcttggtgtctggtttct

SEQ ID NO: 787785 - DNA, 120 bp, Artificial Sequence
  ENSG00000262664_4 (sequence is synthesized)
ggggacactgacaaagtcatcccctctcaggagagtgtgcaactggccagccaatttcccggagccatcaccctcacccactctggtggccacttcattccagcagctgcaccccagcgt

SEQ ID NO: 787786 - DNA, 120 bp, Artificial Sequence
  ENSG00000262664_5 (sequence is synthesized)
caggcctacctcaagttcttggaccagtttgcagagtgaaagatcaagaaatgtctctgctcctacatccagctcctctaggggcagcctccgtcatccatgccctcccaggaccctcca

SEQ ID NO: 787787 - DNA, 120 bp, Artificial Sequence
  ENSG00000262664_6 (sequence is synthesized)
ctcactgctgtgagtgcgcctcaccagaaccagttaagagacaactatcaattcttgagacccaaattataagggccctgccctgtactgaagaaaaggggagcacaaggccttaatgga

SEQ ID NO: 787788 - DNA, 120 bp, Artificial Sequence
  ENSG00000262664_7 (sequence is synthesized)
cattgacttgtgaaaacgcaaacatgaatatggttggagagccctggattaggagggtgacatggggaaggcagaggctggcaccatggtgactgccacataataaagtggtgatttgga

SEQ ID NO: 787789 - DNA, 120 bp, Artificial Sequence
  ENSG00000262814_0 (sequence is synthesized)
gtcatttccggctcgaatgcccggcagccgtggcggctagagcgttcctccccagctcgaatgcccggcggccgaggcggctagagcgtcgcctcctcccggggaaccgcgtgtgacctt

SEQ ID NO: 787790 - DNA, 120 bp, Artificial Sequence
  ENSG00000262814_1 (sequence is synthesized)
ccagcccgcggaccgatgctgccggcggccgctcgccccctgtgggggccttgccttgggcttcgggccgctgcgttccgccttgccaggcgacaggtgccatgtgtctgtgccgtgcga

SEQ ID NO: 787791 - DNA, 120 bp, Artificial Sequence
  ENSG00000262814_2 (sequence is synthesized)
catatgaggagcagcggccatcagaggtgtgaggccctcgctggtgcacccctggataacgcccccaaggagtacccccccaagatacagcagctggtccaggacatcgccagcctcact

SEQ ID NO: 787792 - DNA, 120 bp, Artificial Sequence
  ENSG00000262814_3 (sequence is synthesized)
ctcttggaaatctcagacctcaacgagctcctgaagaaaacgttgaagatccaggatgtcgggcttgtgccgatgggtggtgtgatgtctggggctgtccctgctgcagcagcccaggag

SEQ ID NO: 787793 - DNA, 120 bp, Artificial Sequence
  ENSG00000262814_4 (sequence is synthesized)
tccgcctgaccgaggcgaagcccgtggacaaagtgaagctgatcaaggaaatcaagaactacatccaaggcatcaacctcgtccaggcaaagaagctggtggagtccctgccccaggaaa

SEQ ID NO: 787794 - DNA, 120 bp, Artificial Sequence
  ENSG00000262814_5 (sequence is synthesized)
tcaaagccaatgtcgccaaagctgaggcggagaagatcaaggcggccctggaggcggtgggcggcaccgtggttctggagtagcctccagctcggaggacttgtgttcaggggtcctggg

SEQ ID NO: 787795 - DNA, 120 bp, Artificial Sequence
  ENSG00000262814_6 (sequence is synthesized)
ccccgggcgaggtcccgccctcccgtggtcactggctccgcccccagcaccaggcgcccagtggagccgtttgggagaattgcctgcgccacgcagcggggccggacaggccgcacagac

SEQ ID NO: 787796 - DNA, 120 bp, Artificial Sequence
  ENSG00000262814_7 (sequence is synthesized)
ctactgtggcgggagggaggggcggctgctgcctggtgacggcacccggaggcccaccaggacgcgccaccggtgaatgtgcctctggtggctgctgagaaaaatacactgtgcagctca

SEQ ID NO: 787797 - DNA, 120 bp, Artificial Sequence
  ENSG00000262874_0 (sequence is synthesized)
ccctccccaaccttcccgggcccccgaaggatctcggaggcgaagttgctagaagatacgtaagagggccccagtggagatggaacaaccaaaggacggggctgggcctgaagggaacaa

SEQ ID NO: 787798 - DNA, 120 bp, Artificial Sequence
  ENSG00000262874_1 (sequence is synthesized)
cctgtccctgccgtcatctgggaccgagccatggccccctgcgcctctcccagcccctccacccttgctcctgaactccacagaccccacccacctggggctcccggagagcgtggcctc

SEQ ID NO: 787799 - DNA, 120 bp, Artificial Sequence
  ENSG00000262874_2 (sequence is synthesized)
tgtcaccgtgcccatacgcctggacaccctctcctgcctcctgcacagcgccctgctgggggcctacaccttccaacaggccttgccctcttgcccctgctgctcccaggcaggccactc

SEQ ID NO: 787800 - DNA, 120 bp, Artificial Sequence
  ENSG00000262874_3 (sequence is synthesized)
ccagccgggggcagttaggaggcctcccaggggacgcggaggctgggaagtcaggcacaggccaggctggggccgaggcctgcatcgacggggccttgggagagctgagcagccagagag

SEQ ID NO: 787801 - DNA, 120 bp, Artificial Sequence
  ENSG00000262874_4 (sequence is synthesized)
gggccgggcggggggccctggggctggccccaggaccccaccaatgacactgccatcaccaccaacactgcctgcccaggatgggaagaaagaagctcgaggtccagagccacccctgga

SEQ ID NO: 787802 - DNA, 120 bp, Artificial Sequence
  ENSG00000262874_5 (sequence is synthesized)
tgaggactgggagacagagtactaggaccttggagggtcaggcacctgagattgcagtcacccaggagggttttcctggggcccagagtgatctcagccctgtcagaagaaccccaagaa

SEQ ID NO: 787803 - DNA, 120 bp, Artificial Sequence
  ENSG00000262874_6 (sequence is synthesized)
acatcttccatcctcccctctccccaaaaccacaatcccaggagtagctcctgtgaggcacttggtgaacctgacctaagtcacctgaatcccaagtgagaagaaaatcctaaacctcgt

SEQ ID NO: 787804 - DNA, 120 bp, Artificial Sequence
  ENSG00000262874_7 (sequence is synthesized)
acccaaacctgtctccttgatggcctcaaccccattcccaatgccatccccaaccacaaccacaatccttacctcattctcaacccccagggctcctccaaccccattccctatcctctc

SEQ ID NO: 787805 - DNA, 120 bp, Artificial Sequence
  ENSG00000262874_8 (sequence is synthesized)
cctaatcccaaagccactcctacctgcctctctcttccccactctcaataccctgttcccaaacccattcattcccatccctgtcaccagtcccagctccacttctgcgcctcaacccta

SEQ ID NO: 787806 - DNA, 120 bp, Artificial Sequence
  ENSG00000262874_9 (sequence is synthesized)
acccaccctctttaccaacccctttctcctcattgcctgtgtacctcagcccatctttaatgtcctctgaatctacagccccaaagagctccatcctcaacctcagccacagccctgtgt

SEQ ID NO: 787807 - DNA, 120 bp, Artificial Sequence
  ENSG00000262874_10 (sequence is synthesized)
ccatccccacaaagaaccgcattggccccacatacccagacacctgtgactccccaccccactgcctgctcttcaggtagaaagccctggttgaacaataaacgcatgactctccctgaa

SEQ ID NO: 787808 - DNA, 120 bp, Artificial Sequence
  ENSG00000262874_11 (sequence is synthesized)
ggatctcggaggcgaagttgctagaagatacgtaagagggccccagtggagatggaacaaccaaaggacggggctgggcctgaagggtgagacaaacaaagacctcctgagagggggaca

SEQ ID NO: 787809 - DNA, 120 bp, Artificial Sequence
  ENSG00000262919_0 (sequence is synthesized)
ccgcggcgcctcatggaagccccggagggcggcggaggggggcctgcagcgcggggcccggaggggcagccggcgcccgaagccagggtgcacttccgagtggcgaggttcatcatggag

SEQ ID NO: 787810 - DNA, 120 bp, Artificial Sequence
  ENSG00000262919_1 (sequence is synthesized)
tgcacttccgagtggcgaggttcatcatggaggcaggtgtcaagctagggatgcggtccattcccattgccactgcttgcaccatttaccataagttcttttgcgagaccaacctggacg

SEQ ID NO: 787811 - DNA, 120 bp, Artificial Sequence
  ENSG00000262919_2 (sequence is synthesized)
cctatgacccttacctgattgccatgtcttcaatttacttggccggcaaagtggaagagcagcacctgcggactcgtgacatcatcaatgtgtccaacaggtactttaacccaagcggtg

SEQ ID NO: 787812 - DNA, 120 bp, Artificial Sequence
  ENSG00000262919_3 (sequence is synthesized)
agcccctggaattggactcccgcttctgggaactccgggacagcatcgtgcagtgtgagcttctcatgctgagagttctgcgcttccaggtctccttccagcatccacacaagtacctgc

SEQ ID NO: 787813 - DNA, 120 bp, Artificial Sequence
  ENSG00000262919_4 (sequence is synthesized)
tgcgggacagctaccatggggcgctgtgcctccgcttccaggcccagcacatcgccgtggcggtgctctacctggccctgcaggtctacggagttgaggtgcccgccgaggtcgaggctg

SEQ ID NO: 787814 - DNA, 120 bp, Artificial Sequence
  ENSG00000262919_5 (sequence is synthesized)
agaagccgtggtggcagatttataccatggacacagagatcccctaaggtcctggcccaggcctgcccaaagagaagcccaggatggtcggctgcctggggacattgtcaccacgtcgcc

SEQ ID NO: 787815 - DNA, 120 bp, Artificial Sequence
  ENSG00000262919_6 (sequence is synthesized)
atgacggctggtccccacaggaccagctgggaggactggttgtgctgctggagaagggctggagaaggcaatggcatgctgccgctttgccagtccctagaagtcgcggtgcaggtgatg

SEQ ID NO: 787816 - DNA, 120 bp, Artificial Sequence
  ENSG00000262919_7 (sequence is synthesized)
gtgggagccgcgcctccagcgggcaggccgggagtgtactgtgtgcagctgacccaaggcagccacatctgcgtttgtcctttgagaggactttgactacaatacaggcatgacatcaat

SEQ ID NO: 787817 - DNA, 120 bp, Artificial Sequence
  ENSG00000262919_8 (sequence is synthesized)
gaaaggaaagtcatgaaatcgatgagactgaatccctacggatttcttaaaagccagatttgtagggagaatgaatgtgcaacgtggctgaaatctattttgtgtaataaaaggtgatac

SEQ ID NO: 787818 - DNA, 120 bp, Artificial Sequence
  ENSG00000262919_9 (sequence is synthesized)
gcacttccgagtggcgaggttcatcatggaggcaggaggctaaatattgatttcccaaagatgtccctatcctaatccctggaacctgtgaatgtcatcttatatagcaaaagagatttt

SEQ ID NO: 787819 - DNA, 120 bp, Artificial Sequence
  ENSG00000262919_10 (sequence is synthesized)
gaagatgtgattagagaccttaagatgggagatcatcctagattatctgggtgtaaccacacccatccttataaggcaaaggcaggaggagtcaccgtcagagaaggccacgtgaggaca

SEQ ID NO: 787820 - DNA, 120 bp, Artificial Sequence
  ENSG00000262919_11 (sequence is synthesized)
ttgtagcaatgatctgaatgtatcagaatgactccagtgactgtcactaacttgggagtgagtacctttggggttctatgtccctaaagcctgatgcaccatttcctgcttgtggaagac

SEQ ID NO: 787821 - DNA, 120 bp, Artificial Sequence
  ENSG00000263001_0 (sequence is synthesized)
aaagaaaaaaaaaaggaggaggaggaggagggtgagagagaagctgggagagcagagaaaaggggccaccggtcgcccccccgcttccccgcacgcgctctccagccgcggccgcccgcc

SEQ ID NO: 787822 - DNA, 120 bp, Artificial Sequence
  ENSG00000263001_1 (sequence is synthesized)
tgccgcggtcaccccggcctctgcctctgtcccccagtgatcggatcaaggcgctgagcgaggccctgcctgcggggcggccatgcggcggtgacaggagcgcgaccgacacgcacgggc

SEQ ID NO: 787823 - DNA, 80 bp, Artificial Sequence
  ENSG00000263001_2 (sequence is synthesized)
ccctcgccccctctcgcctcccgtccgctcgccagctcccctcagccgaggctgctccgcggcggccgcagcccgcgcgc

SEQ ID NO: 787824 - DNA, 120 bp, Artificial Sequence
  ENSG00000263001_3 (sequence is synthesized)
ctgcctggaggcggccgcactcggggatcatggcccaagttgcaatgtccaccctccccgttgaagatgaggagtcctcggagagcaggatggtggtgacattcctcatgtcagctctcg

SEQ ID NO: 787825 - DNA, 120 bp, Artificial Sequence
  ENSG00000263001_4 (sequence is synthesized)
agtccatgtgtaaagaactggccaagtccaaagccgaagtggcctgcattgcagtgtatgaaacagacgtgtttgtcgtcggaactgaaagaggacgtgcttttgtcaataccagaaagg

SEQ ID NO: 787826 - DNA, 120 bp, Artificial Sequence
  ENSG00000263001_5 (sequence is synthesized)
attttcaaaaagattttgtaaaatattgtgttgaagaagaagaaaaagctgcagagatgcataaaatgaaatctacaacccaggcaaatcggatgagtgtagatgctgtagaaattgaaa

SEQ ID NO: 787827 - DNA, 120 bp, Artificial Sequence
  ENSG00000263001_6 (sequence is synthesized)
cactcagaaaaacagttgaggactatttctgcttttgctatgggaaagctttaggcaaatccacagtggtacctgtaccatatgagaagatgctgcgagaccagtcggctgtggtagtgc

SEQ ID NO: 787828 - DNA, 120 bp, Artificial Sequence
  ENSG00000263001_7 (sequence is synthesized)
aggggcttccggaaggtgttgcctttaaacaccccgagaactatgatcttgcaaccctgaaatggattttggagaacaaagcagggatttcattcatcattaagagaccttttttagagc

SEQ ID NO: 787829 - DNA, 120 bp, Artificial Sequence
  ENSG00000263001_8 (sequence is synthesized)
caaagaagcatgtaggtggtcgtgtgatggtaacagatgctgacaggtcaatactatctccaggtggaagttgtggccccatcaaagtgaaaactgaacccacagaagattctggcattt

SEQ ID NO: 787830 - DNA, 120 bp, Artificial Sequence
  ENSG00000263001_9 (sequence is synthesized)
ccctggaaatggcagctgtgacagtaaaggaagaatcagaagatcctgattattatcaatataacattcaagcaggcccttctgaaactgatgatgttgatgaaaaacagcccctatcga

SEQ ID NO: 787831 - DNA, 120 bp, Artificial Sequence
  ENSG00000263001_10 (sequence is synthesized)
agcctttgcaaggaagccaccattcttcagagggcaatgaaggcacagaaatggaagtaccagcagaagattctactcaacatgtcccttcagaaacaagtgaggaccctgaagttgagg

SEQ ID NO: 787832 - DNA, 120 bp, Artificial Sequence
  ENSG00000263001_11 (sequence is synthesized)
tgactattgaagatgatgattattctccaccgtctaagagaccaaaggccaatgagctaccgcagccaccagtcccggaacccgccaatgctgggaagcggaaagtgagggagttcaact

SEQ ID NO: 787833 - DNA, 120 bp, Artificial Sequence
  ENSG00000263001_12 (sequence is synthesized)
tcgagaaatggaatgctcgcatcactgatctacgtaaacaagttgaagaattgtttgaaaggaaatatgctcaagccataaaagccaaaggtccggtgacgatcccgtaccctcttttcc

SEQ ID NO: 787834 - DNA, 120 bp, Artificial Sequence
  ENSG00000263001_13 (sequence is synthesized)
agtctcatgttgaagatctttatgtagaaggacttcctgaaggaattccttttagaaggccatctacttacggaattcctcgcctggagaggatattacttgcaaaggaaaggattcgtt

SEQ ID NO: 787835 - DNA, 120 bp, Artificial Sequence
  ENSG00000263001_14 (sequence is synthesized)
ttgtgattaagaaacatgagcttctgaattcaacacgtgaagatttacagcttgataagccagcttcaggagtaaaggaagaatggtatgccagaatcactaaattaagaaagatggtgg

SEQ ID NO: 787836 - DNA, 120 bp, Artificial Sequence
  ENSG00000263001_15 (sequence is synthesized)
atcagcttttctgcaaaaaatttgcggaagccttggggagcactgaagccaaggctgtaccgtaccaaaaatttgaggcacacccgaatgatctgtacgtggaaggactgccagaaaaca

SEQ ID NO: 787837 - DNA, 120 bp, Artificial Sequence
  ENSG00000263001_16 (sequence is synthesized)
ttcctttccgaagtccctcatggtatggaatcccaaggctggaaaaaatcattcaagtgggcaatcgaattaaatttgttattaaaagaccagaacttctgactcacagtaccactgaag

SEQ ID NO: 787838 - DNA, 120 bp, Artificial Sequence
  ENSG00000263001_17 (sequence is synthesized)
ttactcagccaagaacgaatacaccagtcaaagaagattggaatgtcagaattaccaagctacggaagcaagtggaagagatttttaatttgaaatttgctcaagctcttggactcaccg

SEQ ID NO: 787839 - DNA, 120 bp, Artificial Sequence
  ENSG00000263001_18 (sequence is synthesized)
cacgacttgaaaggatcgtccgcgggagtaataaaatcaagttcgttgttaaaaaacctgaactagttatttcctacttgcctcctgggatggctagtaaaataaacactaaagctttgc

SEQ ID NO: 787840 - DNA, 120 bp, Artificial Sequence
  ENSG00000263001_19 (sequence is synthesized)
agtcccccaaaagaccacgaagtcctgggagtaattcaaaggttcctgaaattgaggtcaccgtggaaggccctaataacaacaatcctcaaacctcagctgttcgaaccccgacccaga

SEQ ID NO: 787841 - DNA, 120 bp, Artificial Sequence
  ENSG00000263001_20 (sequence is synthesized)
ctaacggttctaacgttcccttcaagccacgagggagagagttttcctttgaggcctggaatgccaaaatcacggacctaaaacagaaagttgaaaatctcttcaatgagaaatgtgggg

SEQ ID NO: 787842 - DNA, 120 bp, Artificial Sequence
  ENSG00000263001_21 (sequence is synthesized)
aagctcttggccttaaacaagctgtgaaggtgccgttcgcgttatttgagtctttcccggaagacttttatgtggaaggcttacctgagggtgtgccattccgaagaccatcgacttttg

SEQ ID NO: 787843 - DNA, 120 bp, Artificial Sequence
  ENSG00000263001_22 (sequence is synthesized)
gcattccgaggctggagaagatactcagaaacaaagccaaaattaagttcatcattaaaaagcccgaaatgtttgagacggcgattaaggagagcacctcctctaagagccctcccagaa

SEQ ID NO: 787844 - DNA, 120 bp, Artificial Sequence
  ENSG00000263001_23 (sequence is synthesized)
aaataaattcatcacccaatgttaatactactgcatcaggtgttgaagaccttaacatcattcaggtgacaattccagatgatgataatgaaagactctcgaaagttgaaaaagctagac

SEQ ID NO: 787845 - DNA, 120 bp, Artificial Sequence
  ENSG00000263001_24 (sequence is synthesized)
agctaagagaacaagtgaatgacctctttagtcggaaatttggtgaagctattggtatgggttttcctgtgaaagttccctacaggaaaatcacaattaaccctggctgtgtggtagttg

SEQ ID NO: 787846 - DNA, 120 bp, Artificial Sequence
  ENSG00000263001_25 (sequence is synthesized)
atggcatgcccccgggggtgtccttcaaagcccccagctacctggaaatcagctccatgagaaggatcttagactctgccgagtttatcaaattcacggtcattagaccatttccaggac

SEQ ID NO: 787847 - DNA, 120 bp, Artificial Sequence
  ENSG00000263001_26 (sequence is synthesized)
ttgtgattaataaccagctggttgatcagagtgagtcagaaggccccgtgatacaagaatcagctgaaccaagccagttggaagttccagccacagaagaaataaaagagactgatggaa

SEQ ID NO: 787848 - DNA, 120 bp, Artificial Sequence
  ENSG00000263001_27 (sequence is synthesized)
gctctcagatcaagcaagaaccagaccccacgtggtagacctcttccctcctaggcttaaagtatcagtggttgagaagagcttttcggacctgttactaccccaagctgtgtaatatac

SEQ ID NO: 787849 - DNA, 120 bp, Artificial Sequence
  ENSG00000263001_28 (sequence is synthesized)
ttgtataacagaaataccttctatacaaacctttttttctacttttagatagaaatgtctactttttcagcagttctgtgaattaaagagcagagtgactgtgggtctggaatggctggt

SEQ ID NO: 787850 - DNA, 120 bp, Artificial Sequence
  ENSG00000263001_29 (sequence is synthesized)
gtacttgggaatgtactatcaggattttacagcaatgctgggaaatgacagggaaaatgacaggaatgaatctcaccagattttttatgtactcagcagagccttgagttacggtgttta

SEQ ID NO: 787851 - DNA, 120 bp, Artificial Sequence
  ENSG00000263001_30 (sequence is synthesized)
ttttccaatcaagtgaagatatctcctacttctcctactggaacatctcagcttctgcagtgaagaaaaattcctgtgatagttcagttctttagtttttctatttgaaaaaaaaaaatc

SEQ ID NO: 787852 - DNA, 120 bp, Artificial Sequence
  ENSG00000263001_31 (sequence is synthesized)
atttaaatgatcctttgttcacggctctccttaatgactgagtgaacagttcctatctgtatatttgactaaaccttttcctaagctatctctcatggttcctatgtttttttatcataa

SEQ ID NO: 787853 - DNA, 120 bp, Artificial Sequence
  ENSG00000263001_32 (sequence is synthesized)
ttaaaagcaaaaccatctggatcacctaacagtcagaggtcagtatctcagcgtgtgaattatagaggaaatacagagagaacctcttccacttttacttttcgtccaaataaaatgcat

SEQ ID NO: 787854 - DNA, 120 bp, Artificial Sequence
  ENSG00000263001_33 (sequence is synthesized)
ggtgtaccagaagttgaagatcgggttgaggattggggctagctcgatgacactaaggccccaacatcgcgggacctgctgtggcgcggattcttaggaacgctgttctagccggccccc

SEQ ID NO: 787855 - DNA, 120 bp, Artificial Sequence
  ENSG00000263001_34 (sequence is synthesized)
tctccaggggtcgccgtggccggcattatttcctagttcttcttgtaaccctgaggtgccagcgcggggagtgaggaggggtcagggggctaaggatgcaacctctgacgttctgcgcct

SEQ ID NO: 787856 - DNA, 120 bp, Artificial Sequence
  ENSG00000263001_35 (sequence is synthesized)
tcctaggagagtcttacatgtgttgagatttcacaagcaatgcgagttgtaaaataccagctctacaagaagctaggctctgtgacggcatagttttcagtagctttatcacaatattca

SEQ ID NO: 787857 - DNA, 120 bp, Artificial Sequence
  ENSG00000263001_36 (sequence is synthesized)
caatggagaattatatgacatggtagcagaaataggcccttttatgtgttgcttctattttacctcaaattgtagatatagggtaatcaataaaatccatccatgcctttcacacactaa

SEQ ID NO: 787858 - DNA, 120 bp, Artificial Sequence
  ENSG00000263001_37 (sequence is synthesized)
gtaattttatcatgtagttatagtaactaatattaaatccccaaacctacttaggtctactctgtatttgtgttttcaaataatttttttagcttccaaatagaagcgttgtattctttt

SEQ ID NO: 787859 - DNA, 120 bp, Artificial Sequence
  ENSG00000263001_38 (sequence is synthesized)
ctgaattagaaaacattgttcgacttaactgctaaagagttagacaatcattttgcatatgtttattatgtcttagattgtttgcattgttacctagattctctttcatctttcaatgtc

SEQ ID NO: 787860 - DNA, 120 bp, Artificial Sequence
  ENSG00000263001_39 (sequence is synthesized)
atgttaaacttagaatcactctgttccctgctctgcgtttctattttttgtttttcctccatttactagtagcttaacactttctaacagtgttcttattattgatacgtatctatctct

SEQ ID NO: 787861 - DNA, 120 bp, Artificial Sequence
  ENSG00000263001_40 (sequence is synthesized)
tccataagcttataaggtcacggataatacttctcattgtagtacgtaaatgacgtgggctagatatgagttgaataaacagttatacctgtaaattcttacagagtgaaaataaattgt

SEQ ID NO: 787862 - DNA, 120 bp, Artificial Sequence
  ENSG00000263001_41 (sequence is synthesized)
tatactttacaatttgtttctctctttagaccatttccaggacttgtgattaataaccgtgagtattttgtgaagtgttttgtttttgttttttcctggggtctgacgtgtgtgcgtgtg

SEQ ID NO: 787863 - DNA, 120 bp, Artificial Sequence
  ENSG00000263001_42 (sequence is synthesized)
agtgtgtatacatgcttaacgtatatcacgttacttcacctatgtcagtaaccaggccaaatacttgttttagccctcagtaaaaacaccaggcacttcctagttgtaaaattattcaag

SEQ ID NO: 787864 - DNA, 120 bp, Artificial Sequence
  ENSG00000263001_43 (sequence is synthesized)
cttcttaacttcctatcctcgatgcacttaatcataaaatggtaataatagcaccgattttgggggagtcgttccagtagatggaaagcatctggaacaggtgtcagcaagctcctgccg

SEQ ID NO: 787865 - DNA, 120 bp, Artificial Sequence
  ENSG00000263001_44 (sequence is synthesized)
acgtgtatgcataaagttttattgaaaccaccatcgtgtccatttgtttatggcagaactgagagatggcagcagcaagtgtgtgcctgcaaaacctaaaatatttactaattggctctg

SEQ ID NO: 787866 - DNA, 120 bp, Artificial Sequence
  ENSG00000263001_45 (sequence is synthesized)
caagaaaagagtttgcatccccctaacctagaacagtgtctagcctctagtatgtgtttagcctacagtatgtgctcagcgaatacaatctatatttattactgcttttatgactgttat

SEQ ID NO: 787867 - DNA, 120 bp, Artificial Sequence
  ENSG00000263001_46 (sequence is synthesized)
aattactgtgcttggatttcgttacaaagtaagtcacaatgtgcctgcttctgttagtatttcagcacagtgcctggcacacatggggctctcaaatattgctgagcgagtgaacaaatg

SEQ ID NO: 787868 - DNA, 120 bp, Artificial Sequence
  ENSG00000263001_47 (sequence is synthesized)
tcctttcaattccttaacgttgatgtcattttcaatagtattttgagccaaacttaattttgcgagtgtgttttgttttcttaactttattattaaaaatgtataaaagtgaggccaggc

SEQ ID NO: 787869 - DNA, 120 bp, Artificial Sequence
  ENSG00000263001_48 (sequence is synthesized)
agtgtggtatagagttttatggtaattactgtgaattagtgattctgagggacatatcagaactctgaggtttgtttccttctcatcttgagggaaacagcaaatgtatgttaaaatgct

SEQ ID NO: 787870 - DNA, 120 bp, Artificial Sequence
  ENSG00000263001_49 (sequence is synthesized)
tgctgtgtggtgtccatctgaaccccctgcatacgcgtagctaatgtgatctccccactttcacataagatggtggccctgccttcagggaatgtgggagccaggtgggagccttcccgg

SEQ ID NO: 787871 - DNA, 120 bp, Artificial Sequence
  ENSG00000263001_50 (sequence is synthesized)
atatttaagctagaagattctacagggagattctccttggatcaatatatgtctctcagtcaaagatgtaaaagcacttttgccttaaaaagaatgttctgtttctaaatagagtcaacg

SEQ ID NO: 787872 - DNA, 120 bp, Artificial Sequence
  ENSG00000263001_51 (sequence is synthesized)
ttgtcctcctcattggaattcactatgagtcagaatcattagactgacttttttttttccatagtaatagtattttgcagagtctcacagagctgcagatcttttgttcatcttgcagag

SEQ ID NO: 787873 - DNA, 120 bp, Artificial Sequence
  ENSG00000263001_52 (sequence is synthesized)
ttaacaagtctgatcctgttagtccagatttcttaaatttggccaagttataataggagcagtagcttgagacccgaagtcaggaaactttgacaatggatttttttttttaatccagag

SEQ ID NO: 787874 - DNA, 120 bp, Artificial Sequence
  ENSG00000263001_53 (sequence is synthesized)
acttgtactggaatttgccttaccctgtcagctcatggacttaaggtttcatcccgctttatgagtgcttctgaatccaagtcattgttacctgaatttgcaaattaagttgtgatattc

SEQ ID NO: 787875 - DNA, 120 bp, Artificial Sequence
  ENSG00000263001_54 (sequence is synthesized)
gtgactgttaaattcctgtaattagattaacctctttgcttgcttgtttgttttctctcctattttagcttaaagtatcagtggttgagaagagcttttcggacctgttactaccccaag

SEQ ID NO: 787876 - DNA, 120 bp, Artificial Sequence
  ENSG00000263001_55 (sequence is synthesized)
ctttgctttctaaggtattttatttaatggaactatttttcttttttttttttaaaaaaacaaaacatttcattggaaatgtcacatttgcaatcccagttcattcatgttttcacagct

SEQ ID NO: 787877 - DNA, 120 bp, Artificial Sequence
  ENSG00000263001_56 (sequence is synthesized)
ttgttgagcccctgtggaggattacactacaagtttaattctgcaggtttctttgaaaagaaccaaactgtatgaattttaatactctgctcttataaagcatctccttctgtatttttt

SEQ ID NO: 787878 - DNA, 120 bp, Artificial Sequence
  ENSG00000263001_57 (sequence is synthesized)
aatatcaactctgtttctacagaccagaacttctgactcacagtaccactgaagttactcagccaagaacgaatacaccaggttaacctcagcatgcttttgatttggtcaagcaatcaa

SEQ ID NO: 787879 - DNA, 120 bp, Artificial Sequence
  ENSG00000263001_58 (sequence is synthesized)
aacatgatgaaacctgtagaaaccttcatttctcaagacaaagctcaaattcaaggttgtgaggaatgcagtcaccacttttgttaggggcagttgtgacagtgagtgactgcaaaaact

SEQ ID NO: 787880 - DNA, 120 bp, Artificial Sequence
  ENSG00000263001_59 (sequence is synthesized)
taatttgaaatttggtaagtaaaagccagtatttatgtctttaataacatatcaacaaagggccatgtctgaatgaagtatagaagttcgggaccagccgggtgcagtggctcacgcctg

SEQ ID NO: 787881 - DNA, 120 bp, Artificial Sequence
  ENSG00000263001_60 (sequence is synthesized)
agtcacttgggagccgtctgggttatcagatcaactgtctgcaagtattgcattgtttgtgttcaaatcacccttattttccatcataatggccccaaagcacaagagtagtgatgctgg

SEQ ID NO: 787882 - DNA, 120 bp, Artificial Sequence
  ENSG00000263001_61 (sequence is synthesized)
gaatttggataggccaaagagaagccgtaaagtgcttcctctaagtgaaaaggtgaaagttctcgacttaatcaggaaagacaaaaaatcctatgctgaggttgctaagatctacgggaa

SEQ ID NO: 787883 - DNA, 120 bp, Artificial Sequence
  ENSG00000263001_62 (sequence is synthesized)
gaatgaatcttccatccgtgaaattgtgaagaaggaaaaagaaattcgtgctagttttgctgtctcacctccaactgctaaagtgacggccacagtgcgtgataagtgcttagttaagat

SEQ ID NO: 787884 - DNA, 120 bp, Artificial Sequence
  ENSG00000263001_63 (sequence is synthesized)
gaagagatgaacagaaaacgtgtccccattgacagcaacatgttgcgccagaaagccttgagcctataccaagacttcagcaagggatgctctgaaactgacaccaagccatttactgcg

SEQ ID NO: 787885 - DNA, 120 bp, Artificial Sequence
  ENSG00000263001_64 (sequence is synthesized)
tgcgagtaagggatggttacacagattcaggcatagattctcacatcattacaagaagaagaagggcggatcacctgaggttgggagctcgagatcagcctgaccaacacggagaaaccc

SEQ ID NO: 787886 - DNA, 120 bp, Artificial Sequence
  ENSG00000263001_65 (sequence is synthesized)
ggctcagcaagaaagagtgtttcagttgattgggtgtgtctgtcatggagaaggaactcaagctcttggactcaccgaggcagtaaaagtaccatatcctgtgtttgaatcaaacccgga

SEQ ID NO: 787887 - DNA, 120 bp, Artificial Sequence
  ENSG00000263001_66 (sequence is synthesized)
agactgcgccattgcactccagcctgggaacaagagcaaaactccgtctcaggaaaaaaaaaaaaaagatttagttgtgctcaagcatccagattatcttttcttttcaaaaccagcctt

SEQ ID NO: 787888 - DNA, 120 bp, Artificial Sequence
  ENSG00000263001_67 (sequence is synthesized)
gcgaatctggagctcatgaggctgactcttctaaaatgcagccacaggtagtcatcgaatccggcttcctatgctgtgcaatcaacaaatcaaaataacttgtgtcatcattagaatgtc

SEQ ID NO: 787889 - DNA, 120 bp, Artificial Sequence
  ENSG00000263001_68 (sequence is synthesized)
agatgtgcttctacgaactaagctgactcttttaattctttggcaaagggttggcaaactaggactgtttgccaaattcaggctgcctcctatttttagagtcttcctgaaacacagcta

SEQ ID NO: 787890 - DNA, 120 bp, Artificial Sequence
  ENSG00000263001_69 (sequence is synthesized)
cacccgtattatccatggctgctttcctgtcacagtgagtaagtagctgggactgagaaggcatggcctccaaagtctaaaatatttactctctagcactttgtagaaaaaccttagcta

SEQ ID NO: 787891 - DNA, 120 bp, Artificial Sequence
  ENSG00000263001_70 (sequence is synthesized)
gaaggttaggagaaaaagagattgcatattttccactatttgttgtatgtttattctattttatagattctattatccttaaaacaccttatttggaaataaaaggtgattcccttggta

SEQ ID NO: 787892 - DNA, 120 bp, Artificial Sequence
  ENSG00000263001_71 (sequence is synthesized)
cctgactaccctgcctctgaccactcgaactgagtgctgcttagctgtatcgtagacaccgcctgtttgtgaacagacaccctgcttcttgatgataacacaaaggccagcagggtccac

SEQ ID NO: 787893 - DNA, 120 bp, Artificial Sequence
  ENSG00000263001_72 (sequence is synthesized)
caagaaaaaaagaactttgtcaacctctgtcttagggcgccttgtcacaggcttcgggtcagacggattcaaccttgcatcagccatttgttagccaggtcactctgttctttgtctgta

SEQ ID NO: 787894 - DNA, 120 bp, Artificial Sequence
  ENSG00000263001_73 (sequence is synthesized)
aatgagattgatcgttgttcccactgagagtgtcagctccttcccgtagagcaggcatgatgattgtactcacctctgacaccattgtgagtgccacattccttcccacgtccttgtcac

SEQ ID NO: 787895 - DNA, 120 bp, Artificial Sequence
  ENSG00000263001_74 (sequence is synthesized)
tgtaagagatgcccacctgagcaccaaccccaggttatcttcccctttgtcttccagccccccagaaacagctacgactcaacctacccaatcatttcatcatcagattgccactgtctc

SEQ ID NO: 787896 - DNA, 120 bp, Artificial Sequence
  ENSG00000263001_75 (sequence is synthesized)
tagttcaggtctcttggaactggcactcagaaatctcataataaatcctcttgaggcttctcatacactcgtcttcttccaatcttctttccctcaaaatctcatattttggttccactt

SEQ ID NO: 787897 - DNA, 120 bp, Artificial Sequence
  ENSG00000263001_76 (sequence is synthesized)
atttccagagagcaggaagcacagagaaggcccgtgggtcgcccttggggtgctttccatcctgcagggctcgctgcctgccctgaaagttctgataaagacataggaccttcatcacca

SEQ ID NO: 787898 - DNA, 120 bp, Artificial Sequence
  ENSG00000263001_77 (sequence is synthesized)
ggggcgccccgtgggctgttgctgtagcgtctgtcccccatttcttacacacattgagtgtgattgttaccagtggagggtgtccaatggaagaagcaccaaaagccgagatttattgaa

SEQ ID NO: 787899 - DNA, 120 bp, Artificial Sequence
  ENSG00000263002_0 (sequence is synthesized)
agtggagtcgcgggcacttccgctccagggaagagggggcgattgtcacggcacattccacggtagtttcttccagttccgcgactcgcgggcccctcctaatgtcagggacttaagatt

SEQ ID NO: 787900 - DNA, 120 bp, Artificial Sequence
  ENSG00000263002_1 (sequence is synthesized)
ggggctcgctgggacctggtggtccggttatgggaaaagaagcctcgtgggagagcagagcctgaaaaaggactgcgcggactgacttcttggctactgaaagcaaagctccactgttcc

SEQ ID NO: 787901 - DNA, 120 bp, Artificial Sequence
  ENSG00000263002_2 (sequence is synthesized)
aggcacgattctgccttctctcaaatggcataactcaggactctgcaaattcccagaaacaggaggaaaaatgaccacattcaaggagggactgaccttcaaggatgtggctgtggtctt

SEQ ID NO: 787902 - DNA, 120 bp, Artificial Sequence
  ENSG00000263002_3 (sequence is synthesized)
cactgaggaggagctggggctgctggaccctgtccagaggaatctgtaccaagatgtgatgctggagaacttcaggaacctgctgtcagtggggcatcaccccttcaaacatgatgtatt

SEQ ID NO: 787903 - DNA, 120 bp, Artificial Sequence
  ENSG00000263002_4 (sequence is synthesized)
ccttttagaaaaggaaaaaaagcttgatataatgaagacagcaactcaaagaaaagggaaatcagcagacaagatccaaagtgaggtggagactgttccagaagcaggacgacatgaaga

SEQ ID NO: 787904 - DNA, 120 bp, Artificial Sequence
  ENSG00000263002_5 (sequence is synthesized)
gctttactgggggcaaatctggaaacagattgcaagtgatttaatcaagtatgaagactctatgataagtatttctcggttccccagacaaggtgatttgtcctgccaggttagggcagg

SEQ ID NO: 787905 - DNA, 120 bp, Artificial Sequence
  ENSG00000263002_6 (sequence is synthesized)
actatatacaactcacacaggacagaaattttaccaatgtgatgagtacaaaaaatccttcactgatgtcttcaactttgatcttcatcaacagttacactcaggagagaagtctcatac

SEQ ID NO: 787906 - DNA, 120 bp, Artificial Sequence
  ENSG00000263002_7 (sequence is synthesized)
atgtgatgagtgtggaaaaagcttctgttacatctcagcccttcatattcatcaaagagtccacatgggagagaaatgctataagtgtgacgtgtgtggtaaggaatttagtcagagctc

SEQ ID NO: 787907 - DNA, 120 bp, Artificial Sequence
  ENSG00000263002_8 (sequence is synthesized)
acatcttcaaactcatcagagagtccacactgtagagaaaccattcaaatgtgtggaatgtgggaaaggcttcagtcgtagatcaacacttactgtacattgcaaattacactcaggaga

SEQ ID NO: 787908 - DNA, 120 bp, Artificial Sequence
  ENSG00000263002_9 (sequence is synthesized)
gaaaccttacaattgtgaggaatgtggaagggccttcatacatgcttcccatcttcaggaacatcagagaattcatactggggagaaaccattcaaatgtgatacatgtggtaagaactt

SEQ ID NO: 787909 - DNA, 120 bp, Artificial Sequence
  ENSG00000263002_10 (sequence is synthesized)
ccgtcgtagatcagcacttaataatcattgcatggtccacacaggagagaaaccatacaaatgtgaggactgtggtaagtgtttcacttgtagctcaaaccttcgtatccatcaaagggt

SEQ ID NO: 787910 - DNA, 120 bp, Artificial Sequence
  ENSG00000263002_11 (sequence is synthesized)
gaaaccttacaagtgtgaagaatgtggtaagtgctttattcagccttcacaatttcaggcccatcggagaatccacactggagagaaaccatacgtatgtaaagtgtgtggtaagggttt

SEQ ID NO: 787911 - DNA, 120 bp, Artificial Sequence
  ENSG00000263002_12 (sequence is synthesized)
tggtaagggtttcatttacagttcaagttttcaggcccatcagggagtccacactggagagaagccatacaaatgcaatgagtgtgggaagagcttcagaatgaaaattcattatcaagt

SEQ ID NO: 787912 - DNA, 120 bp, Artificial Sequence
  ENSG00000263002_13 (sequence is synthesized)
gcatctggtagtccacacaggggaaaaaccctataaatgtgaagtatgtggtaaagccttccgtcagagttcatatcttaaaatccatctgaaagcacatagtgtacagaaaccttttaa

SEQ ID NO: 787913 - DNA, 120 bp, Artificial Sequence
  ENSG00000263002_14 (sequence is synthesized)
gtgtgaagagtgtgggcagggcttcaatcagagctcacgacttcagattcaccagctgatccataccggtgagaaaccatacaaatgtgaagagtgcggaaagggatttagtcgtagagc

SEQ ID NO: 787914 - DNA, 120 bp, Artificial Sequence
  ENSG00000263002_15 (sequence is synthesized)
agatcttaaaattcattgtaggatccacacaggggagaaaccatataattgtgaggagtgtgggaaggtcttcagtcaggcctcgcatcttctaacccatcagagagttcacagtgggga

SEQ ID NO: 787915 - DNA, 120 bp, Artificial Sequence
  ENSG00000263002_16 (sequence is synthesized)
aaaaccatttaaatgtgaagagtgtgggaagagcttcagtcggagtgcacaccttcaagcccatcaaaaagtccacactggagaaaagccatacaaatgtggggagtgtggaaagggctt

SEQ ID NO: 787916 - DNA, 120 bp, Artificial Sequence
  ENSG00000263002_17 (sequence is synthesized)
caagtggagcttgaaccttgacatgcatcagagggtgcacacaggagaaaaaccctatacatgtggggagtgtgggaagcacttcagtcaggcctcaagtctccaacttcatcagagtgt

SEQ ID NO: 787917 - DNA, 120 bp, Artificial Sequence
  ENSG00000263002_18 (sequence is synthesized)
ccacacaggagagaaaccatacaaatgtgatgtatgtggtaaagtcttcagtcggtcttcacaattacagtatcataggcgagttcacactggggaaaaaccttacaaatgtgagatatg

SEQ ID NO: 787918 - DNA, 120 bp, Artificial Sequence
  ENSG00000263002_19 (sequence is synthesized)
ttcatgctgctggtacattttatgaaaatgatgagaatagtaagaacatcagagagttgtcagagggaggaagttctacaaggtgattaaaaaaaaaaaaacagaactcatgtacaacct

SEQ ID NO: 787919 - DNA, 120 bp, Artificial Sequence
  ENSG00000263002_20 (sequence is synthesized)
gaatgcttgtaattagatttcataggagggaaaaattttctttatcaacctctttgaatttatttgatttgtaacgctccacatttccacctagacttttttttgttttttattttttgt

SEQ ID NO: 787920 - DNA, 120 bp, Artificial Sequence
  ENSG00000263002_21 (sequence is synthesized)
acctagacttttttttgttttttattttttgttttgaaacagaatctcgctctgttgcccatgctggatgcagtggtgctatctcagctcactgtaacctccacttcccgggttcaagtg

SEQ ID NO: 787921 - DNA, 120 bp, Artificial Sequence
  ENSG00000263002_22 (sequence is synthesized)
acaggcatgagccaccgcccctggcctccatctagactttgaaatgattgccttctaattacagtagcattctcttatttaaaatatttgttttatttaagtcagtgtttaagcaatagc

SEQ ID NO: 787922 - DNA, 120 bp, Artificial Sequence
  ENSG00000263002_23 (sequence is synthesized)
tagctcagcatatcccagtggtccagtgaccacacagctgagaacccttgttaagtggtacagtaaagcattctgtcaaaactttgacatttatgacatgttacctaggaaataggactt

SEQ ID NO: 787923 - DNA, 120 bp, Artificial Sequence
  ENSG00000263002_24 (sequence is synthesized)
agaaaatgagtttgacctgggctttaaaaaagtatactgatgaaggtgccagaattgatgtccattagactgtaagctccatgggggcaggaactttgctaccgaatctatacaacctta

SEQ ID NO: 787924 - DNA, 120 bp, Artificial Sequence
  ENSG00000263002_25 (sequence is synthesized)
acattgactagtgcttgtaggtgtgctcaatacttgtttgttaactgaatcaaaaggagtaaatgcacaatatttgaacattgtatccaaaggaagaaacctgcgaaataaaattatttg

SEQ ID NO: 787925 - DNA, 120 bp, Artificial Sequence
  ENSG00000263002_26 (sequence is synthesized)
cagaaatgaacatttgttgaaatgcagaaaaccactggatactgcagcctacaatattaatatgatattactcttttacagttgacacctgtcctctctgtagtctcttctctcaaattt

SEQ ID NO: 787926 - DNA, 120 bp, Artificial Sequence
  ENSG00000263002_27 (sequence is synthesized)
ggttcttattgagagcctgtctagtttcccaaaggttttataaaacataagttgaagtacctttatttttaattttatttttgagacaggacctcgctctgtcaccgaggctggagtgca

SEQ ID NO: 787927 - DNA, 86 bp, Artificial Sequence
  ENSG00000263002_28 (sequence is synthesized)
gtggcataatcatggctcactgcagcctcgtcctcccaggctccatccatctgcccatctctccctctgagtagctgggaccacgg

SEQ ID NO: 787928 - DNA, 90 bp, Artificial Sequence
  ENSG00000263002_29 (sequence is synthesized)
accacattgcccaggctggtcttgaacacctgagctcaagcaatccaacctccttggcctcccagtgttaaagttgaagtatattttgtg

SEQ ID NO: 787929 - DNA, 120 bp, Artificial Sequence
  ENSG00000263002_30 (sequence is synthesized)
aagttgaagtatattttgtgatttttctgacagtgcagactgaaaaaaatttaattaacctgacaagagtttactgaatatcacacaattgagtttttaatccattaatgttaaggcagg

SEQ ID NO: 787930 - DNA, 120 bp, Artificial Sequence
  ENSG00000263002_31 (sequence is synthesized)
ggtttactctaacacttttaaagtgtcagaagtagttgccaatgccaaatttttatcagcccccttgaatttatttgatttctgactttccacatttccatccagactttgacatgattg

SEQ ID NO: 787931 - DNA, 76 bp, Artificial Sequence
  ENSG00000263002_32 (sequence is synthesized)
tctgactttccacatttccatccagactttgacatgattgccgtctaataactgtagcattctcttattaaaacag

SEQ ID NO: 787932 - DNA, 64 bp, Artificial Sequence
  ENSG00000263002_33 (sequence is synthesized)
ttctgaggtaggggctgtaccatatttttgccccacacccattaagcgaataccaaaaacaact

SEQ ID NO: 787933 - DNA, 120 bp, Artificial Sequence
  ENSG00000263002_34 (sequence is synthesized)
tttttgccccacacccattaagcgaataccaaaaacaacttgtggaaatttgataattttatcaaatttattatttgggcaggattggcatttaccatgcttttccctattgctggcagt

SEQ ID NO: 787934 - DNA, 120 bp, Artificial Sequence
  ENSG00000263002_35 (sequence is synthesized)
aaaacatgggtttaaggaagagtgtttttcagaatttacactgtatatctctgatttggaagttatataattggaatttatgattatgagattaaaataccaaaaagactaagtaacata

SEQ ID NO: 787935 - DNA, 120 bp, Artificial Sequence
  ENSG00000263002_36 (sequence is synthesized)
agtagagtgcccactggaacccactggagcccactgtacctatgcccacaaaaggagaagaaaccttttcctgggagcccgctgactatacagaggacaaaggcattcttatgccaggcc

SEQ ID NO: 787936 - DNA, 120 bp, Artificial Sequence
  ENSG00000263002_37 (sequence is synthesized)
ttgctcctttatctgagcgagctggagggcatcaccccttcaaacatgatgtattccttttagaaaaggaaaaaaagcttgatataatgaagacagcaactcaaagaaaagggaaatcag

SEQ ID NO: 787937 - DNA, 120 bp, Artificial Sequence
  ENSG00000263002_38 (sequence is synthesized)
aggcgcgcagtcacttttttacagtgcaaggttggcgtgttaatctccctgggcctctccttgctgttctttaaaatggggacgttaggaccatctttgtagaatcgttttggtaactgg

SEQ ID NO: 787938 - DNA, 120 bp, Artificial Sequence
  ENSG00000263002_39 (sequence is synthesized)
aataggttacacaacacaaacagtccctgtcacttggtgagtggtggtttcttgttactttcccacgaaacctgttaggtcccccggtggggtcagagctccagcagcaggggcctcagc

SEQ ID NO: 787939 - DNA, 120 bp, Artificial Sequence
  ENSG00000263002_40 (sequence is synthesized)
aggacgctggacgatcccggacgccttctgacctctttttaggcaggcgagggttgcgtccacttccacgaagggaggggagcatttaacttttctcagggacagcgacccagtcaggat

SEQ ID NO: 787940 - DNA, 120 bp, Artificial Sequence
  ENSG00000263002_41 (sequence is synthesized)
gtttcacagctttctccttccccagcctgaaaaaggactgcgcggactgacttcttggctactgaaagcaaagctccacgagggactgaccttcaaggatgtggctgtggtcttcactga

SEQ ID NO: 787941 - DNA, 120 bp, Artificial Sequence
  ENSG00000263155_0 (sequence is synthesized)
cttcgcggtgcagctgaggctgcaagtagccggcgccgtcccgcgtcgcccccgcgcagggcgggccccgcacgcttattctgcccgggaggaacgccggcgtccagcccgctaccgacc

SEQ ID NO: 787942 - DNA, 120 bp, Artificial Sequence
  ENSG00000263155_1 (sequence is synthesized)
gccgctgcgggatgctgcgctccacgtccacggtcaccctgctctcgggcggcgccgccaggacgcccggggcgcccagcaggagggcaaatgtttgcagactacggctgaccgtacctc

SEQ ID NO: 787943 - DNA, 120 bp, Artificial Sequence
  ENSG00000263155_2 (sequence is synthesized)
ctgagagtccagttcctgagcaatgtgaaaagaagattgagagaaaagagcagcttcttgacctgagcaatggagaacctaccaggaaacttcctcagggtgttgtttatggtgtggtgc

SEQ ID NO: 787944 - DNA, 120 bp, Artificial Sequence
  ENSG00000263155_3 (sequence is synthesized)
gaagatcagatcaaaatcagcagaaagaaatggtggtgtatgggtggtccaccagtcagctgaaagaagagatgaactacatcaaagatgtgagagccactttggaaaaggtgagaaagc

SEQ ID NO: 787945 - DNA, 120 bp, Artificial Sequence
  ENSG00000263155_4 (sequence is synthesized)
gaatgtatggagactatgatgagatgagacagaagattcgacagctcacccaggaactatcagtttcccatgctcagcaggagtatctggagaatcacatccaaacccagtcgtctgccc

SEQ ID NO: 787946 - DNA, 120 bp, Artificial Sequence
  ENSG00000263155_5 (sequence is synthesized)
tggatcgttttaatgccatgaactcagccttggcatcagattccattggcctgcagaaaaccctcgtggatgtgactttggaaaacagcaacattaaggatcaaatcagaaatctgcagc

SEQ ID NO: 787947 - DNA, 120 bp, Artificial Sequence
  ENSG00000263155_6 (sequence is synthesized)
agacgtatgaagcatccatggacaagctgagggaaaagcagaggcagttggaggtagcgcaagttgaaaaccagctgctaaaaatgaaggtggaatcgtcccaagaagccaatgctgagg

SEQ ID NO: 787948 - DNA, 120 bp, Artificial Sequence
  ENSG00000263155_7 (sequence is synthesized)
tgatgcgagagatgaccaagaagctgtacagccagtatgaggagaagctgcaggaagaacagaggaagcacagtgctgagaaggaggctcttttggaagaaaccaatagttttctgaaag

SEQ ID NO: 787949 - DNA, 120 bp, Artificial Sequence
  ENSG00000263155_8 (sequence is synthesized)
cgattgaagaagccaataaaaagatgcaagcagcagagatcagcctagaggagaaagaccagaggatcggggagctggacaggctgattgagcgcatggaaaaggaacgtcatcaactgc

SEQ ID NO: 787950 - DNA, 120 bp, Artificial Sequence
  ENSG00000263155_9 (sequence is synthesized)
agatgacatggtgcattgccagcagaagaaagtcaagcagatggtcgaggagattgaatcattaaagaaaaagttgcaacagaaacagctcttaatactgcagcttttagaaaagatatc

SEQ ID NO: 787951 - DNA, 120 bp, Artificial Sequence
  ENSG00000263155_10 (sequence is synthesized)
tttcttagaaggagagaataatgaactacaaagcaggttggactatttaacagaaacccaggccaagaccgaagtggaaaccagagagataggagtgggctgtgatcttctacccagcca

SEQ ID NO: 787952 - DNA, 120 bp, Artificial Sequence
  ENSG00000263155_11 (sequence is synthesized)
aacaggcaggactcgtgaaattgtgatgccttctaggaactacaccccatacacaagagtcctggagttaaccatgaagaaaactctgacttaggcactcagaggcatacactttttaca

SEQ ID NO: 787953 - DNA, 120 bp, Artificial Sequence
  ENSG00000263155_12 (sequence is synthesized)
gatggacaaaagctctggaaccctgtggcttcaaatcctttgggaagggtgactgttgtttcccctacacacagtgtaagccggaatgggaatcgctgaggctctgatccacttctaaga

SEQ ID NO: 787954 - DNA, 120 bp, Artificial Sequence
  ENSG00000263155_13 (sequence is synthesized)
caggaaggaaagtgaaggcagagtgagcaggtaagagagggatatacaaggtcacatttcagacacccactcggcataccctgccgtactgcatcatcatttgttttctttgtagacact

SEQ ID NO: 787955 - DNA, 120 bp, Artificial Sequence
  ENSG00000263155_14 (sequence is synthesized)
gaaatcctatcaggaggattccttcacaatgtattttatttgctagactttggttgggagggaaaaggacattaatttgaagtttcatgttattcatgccaggattgtttgatagagcat

SEQ ID NO: 787956 - DNA, 120 bp, Artificial Sequence
  ENSG00000263155_15 (sequence is synthesized)
gaaggttttgtttacccataaaagtattagaggcagcgtttctctgatacagagaggcctgtccacaagaagcatgggcacccagccaaacttgaacctggaagggagggttcccggcct

SEQ ID NO: 787957 - DNA, 120 bp, Artificial Sequence
  ENSG00000263155_16 (sequence is synthesized)
gcaggtgctctttcctcttggtcccaagcatctgtgcagggtcgtgggagccacactgagagacttgtgtgggccagacaagcttcattctgatgcgctagtcccttggtttaatttgtg

SEQ ID NO: 787958 - DNA, 120 bp, Artificial Sequence
  ENSG00000263155_17 (sequence is synthesized)
ccttatgctttcattggaccagctgaaatcactgtatttattcaactagtgatttttttttctttctcactttaacttaaagagaattttatatgtcttggaaatttaataatttagtgt

SEQ ID NO: 787959 - DNA, 120 bp, Artificial Sequence
  ENSG00000263155_18 (sequence is synthesized)
tctcagtatcaattggtgtttttgttaaacgaatgaatcatctgttcatgcatgctctactttgatattataacctatgtcacatgtgtttaataaataccatatattttgttctactaa

SEQ ID NO: 787960 - DNA, 120 bp, Artificial Sequence
  ENSG00000263155_19 (sequence is synthesized)
aataggtgctcagtaactgagtaataaagtatgctgagtccagcttcctgctttgatctcctggaaggaacccttgcccccagggacagctggttcggtagcagtggtgttcagggcact

SEQ ID NO: 787961 - DNA, 120 bp, Artificial Sequence
  ENSG00000263201_0 (sequence is synthesized)
ccttaggtgacttcacagggtagtgatgacctcacaagcttccaaagtttccatggcagcgtgactacacacctgcgtcctagagaagcctccctaccatttctctgtaagataccaatc

SEQ ID NO: 787962 - DNA, 120 bp, Artificial Sequence
  ENSG00000263201_1 (sequence is synthesized)
tgtttggttggctgagagagaatgactgaccggatcctctatattgtctctaacatgtcctctgtcccctgggagggcagcgcagcagctgcagtgcctgccacttctcctcccacacct

SEQ ID NO: 787963 - DNA, 120 bp, Artificial Sequence
  ENSG00000263201_2 (sequence is synthesized)
gggcactaccatgttctctaccgagggtgtggagaaactcaggtaggctggcatggggagacgtactgcctggttggtggctaccgggtccatggggatgctcctttggccaccccaaca

SEQ ID NO: 787964 - DNA, 120 bp, Artificial Sequence
  ENSG00000263201_3 (sequence is synthesized)
aaggctgaagcagagaagccagcccccaggcgtgctcccaagagacgtcaagctacgatagagtcagataaagacctgggttgctctagccccaaaattcggcgcttggagcatcgtggc

SEQ ID NO: 787965 - DNA, 120 bp, Artificial Sequence
  ENSG00000263201_4 (sequence is synthesized)
cccaccactgcagatagagcctgagtcattctgcctatgccttcctcatccagaagcccccttccatgctaactacccatggccaaggagcctcagaaactgtggtttaaaatgagaggt

SEQ ID NO: 787966 - DNA, 120 bp, Artificial Sequence
  ENSG00000263201_5 (sequence is synthesized)
tgctttgaacatcccaaggctgaagacggcctggaagaaaacctgatgttcctctactcatctctccagagtccctttttgggcagaagatagaaatagtctgcactctgctagccgagg

SEQ ID NO: 787967 - DNA, 120 bp, Artificial Sequence
  ENSG00000263201_6 (sequence is synthesized)
agtcaagtgcagagagggagtgcagcatagcccagtaagggcttgatctaccagatgggtctttgctttgagtcactgccagcaactaccagcacaaaccaggagggccaggacttgctg

SEQ ID NO: 787968 - DNA, 120 bp, Artificial Sequence
  ENSG00000263201_7 (sequence is synthesized)
aaactggaagcagcagcccatggctagtcacagcaggagaaagcctcctgcttggcatctcaggaggtagaagaaagagacctggggagacctgccacctacagcaagaacaataaggag

SEQ ID NO: 787969 - DNA, 120 bp, Artificial Sequence
  ENSG00000263201_8 (sequence is synthesized)
gaagttgagcaacatccccctgaagctcacatgttactttatttcctgcccattatggccccagtgaggtccctactgctcaatttaaaaaaaaattaaaaaaattatttttccataaca

SEQ ID NO: 787970 - DNA, 120 bp, Artificial Sequence
  ENSG00000263264_0 (sequence is synthesized)
cctgcatgcgcagggctgaggggtgggagcagggctctctgcctccagaacccccatcctctgggctctttttaggcccctagattggcctgcagctgggagcagagtggcaagcatgca

SEQ ID NO: 787971 - DNA, 120 bp, Artificial Sequence
  ENSG00000263264_1 (sequence is synthesized)
ggcaggcagttgagaaagaggaagtcgaggtgctattgggtcattctgtggttatcccaggctctacccagccagcggttcccttgggccagctcgaaacgctggccgtaggtcatggga

SEQ ID NO: 787972 - DNA, 120 bp, Artificial Sequence
  ENSG00000263264_2 (sequence is synthesized)
gctgcaggagctgttagccaggctaggtgcctgcaggttgaagaactgagctctatctggctctgagcccaagtcatgtgtccagccttttgactctggagctgtggcttcagccaccaa

SEQ ID NO: 787973 - DNA, 120 bp, Artificial Sequence
  ENSG00000263264_3 (sequence is synthesized)
gagcagcagtggatcctggaaacctgagaacccagacttcttctctgccatgggggatgatcaggaggatgattttcccaggcggctcagcgagagtatggaggacctcagcctggattt

SEQ ID NO: 787974 - DNA, 120 bp, Artificial Sequence
  ENSG00000263264_4 (sequence is synthesized)
gggggcccttcagggcagcgagtatctgcaggacctgggccttggggccccttcccacagccagcctggggagaccccagacagccgccccaccggtgaagaaccaggaagagattctct

SEQ ID NO: 787975 - DNA, 120 bp, Artificial Sequence
  ENSG00000263264_5 (sequence is synthesized)
tttctccagcttggcagggtcccaagacctgtcaaggcggcgcagctgggaaaggtcgcggagctgctcagagagctggcggaggctcagcctcgatgcctcagctgtggatgaggaacc

SEQ ID NO: 787976 - DNA, 120 bp, Artificial Sequence
  ENSG00000263264_6 (sequence is synthesized)
tgtgacagccccaagaaaagagggaggtcaaggtccgttcctgtgtccttctatgagatccgctctccggaaatctctccgggtttggaagtgcccactccacctgttcaaggcctggaa

SEQ ID NO: 787977 - DNA, 120 bp, Artificial Sequence
  ENSG00000263264_7 (sequence is synthesized)
cctccagtgctggagtgcatggaaaaagaccatgtggaaccagatcacgtgctgattgtccagcaggtgcttcaagaacttcgacagtaccatggggcccggcagagggcttgcatgtca

SEQ ID NO: 787978 - DNA, 120 bp, Artificial Sequence
  ENSG00000263264_8 (sequence is synthesized)
gccagccccggaggagcccactcgaacctgacctggtttgaattcctgtcggagagcgaggacggtgctggcaagaacgagaagagtgacaagagtaccagtgtgaagcgcaggctgagc

SEQ ID NO: 787979 - DNA, 120 bp, Artificial Sequence
  ENSG00000263264_9 (sequence is synthesized)
tgcctccgcagtcgagtgaccaggcagaaggagaaggggaagagcccagcacatctgaaggacaagggccaggatgcacgagagaggcgggagtgtgtcaatgggcaccagctgttgcaa

SEQ ID NO: 787980 - DNA, 120 bp, Artificial Sequence
  ENSG00000263264_10 (sequence is synthesized)
gggaccttctccggcccctccagctgccccctgtgtggcaaacctttcttgagctcaggtaagtctggtggcccaatccatcctcctggagggcagccactttctcttcttcacgtcctt

SEQ ID NO: 787981 - DNA, 120 bp, Artificial Sequence
  ENSG00000263264_11 (sequence is synthesized)
tcaatcatactcctggggtctcttttgatgtgtgcatcctcgttctgttttgccctctcctcggcggctccctggagagaaccagggatcagtccctgggcacagggacccttgggctaa

SEQ ID NO: 787982 - DNA, 120 bp, Artificial Sequence
  ENSG00000263264_12 (sequence is synthesized)
cgcatggcccccatggctgactcggtgctcaaccactcctggccggccttctccaagctgtggctgaagcggtgggccttcaagagaggctctgagcccaagtcatgtgtccagcctttt

SEQ ID NO: 787983 - DNA, 120 bp, Artificial Sequence
  ENSG00000263353_0 (sequence is synthesized)
actataaagacagtaaaaagatcagtggttatctttgcagacgccaccatcactgtgagccctgtactatcagccatggtcaactccgtcgtcttttttgacatcaccgtcgacggcaag

SEQ ID NO: 787984 - DNA, 120 bp, Artificial Sequence
  ENSG00000263353_1 (sequence is synthesized)
caactccgtcgtcttttttgacatcaccgtcgacggcaagcccttgggccgcatctccatcaaactgtttgcagacaagattctaaagacagcggaaaactttcgtgctctgagcactgg

SEQ ID NO: 787985 - DNA, 120 bp, Artificial Sequence
  ENSG00000263353_2 (sequence is synthesized)
ggtggtgacttcacacgccataatggcactggtgacaagtccatctatggggagaaatttgatgatgagaacctcatccgaaagcatacaggttctggcatcttgtccatggcaaatgct

SEQ ID NO: 787986 - DNA, 90 bp, Artificial Sequence
  ENSG00000263353_3 (sequence is synthesized)
ctttggcaaggtgaaagaacgtgtgaatattgtggaagccatggagcactttgggtacaggaatagcaagaccagcaagaagatcaccat

SEQ ID NO: 787987 - DNA, 120 bp, Artificial Sequence
  ENSG00000263353_4 (sequence is synthesized)
atcaccattgctgactgtggacaattctaatgagtttgacttgtgttttattttcaccaccagacccattccttctgtagctcaggagagcacccctccaccacatttgcttgcaatatc

SEQ ID NO: 787988 - DNA, 120 bp, Artificial Sequence
  ENSG00000263429_0 (sequence is synthesized)
gtggctccaagaagcgccagctcgctcatttgctcacacccagcaggcagagaaggcagcagcaggcaggaccgccaccctcccatgcaaatcacccccgggagtgcagctgggctcctc

SEQ ID NO: 787989 - DNA, 120 bp, Artificial Sequence
  ENSG00000263429_1 (sequence is synthesized)
ccgctcctcctgggcaatgctcctggggagtctgtggggaagatgccatccagggcgctgtgcgctcttcctcatcctcgccctcctgctggacgcggtcggcctggtccttttgctgct

SEQ ID NO: 787990 - DNA, 120 bp, Artificial Sequence
  ENSG00000263429_2 (sequence is synthesized)
ggggatcttggcccccctgagttcctgggacttcttcatctacacaggtgccctgatcctggctctcagcctactgctctggatcatctggtattccctcaacattgaggtgtctcctga

SEQ ID NO: 787991 - DNA, 120 bp, Artificial Sequence
  ENSG00000263429_3 (sequence is synthesized)
aaaactggacctgtaatttggccatgggaagaggagaagagacgcaggtgctgtatgcagacatgtctgtgaacctggggctcttgggcagcaacacgttgcagcttccacctagcaagc

SEQ ID NO: 787992 - DNA, 120 bp, Artificial Sequence
  ENSG00000263429_4 (sequence is synthesized)
cacgccgggaccaggtcccatctgatggaggagaatcaattcaaggagatgcccttcctttacagaacaccctttaacagcatccaggaggaacgagaggctgcaatactgaggctttca

SEQ ID NO: 787993 - DNA, 120 bp, Artificial Sequence
  ENSG00000263429_5 (sequence is synthesized)
aagtactcacgaggatgtccgagaatggctgtgatgccaggcttctggcaggttccagactccatcacaagcccagcatccctgcaccagatctgacatcgctgctgttgtgccagctgt

SEQ ID NO: 787994 - DNA, 120 bp, Artificial Sequence
  ENSG00000263429_6 (sequence is synthesized)
ttcttgtgaatgtccttttagaaaaacaattagaaccaaccacaagcaccaaagtcctaatgggatctcctgcgagcacatatcaagcaggattgttgctatttctcctcactggctctt

SEQ ID NO: 787995 - DNA, 120 bp, Artificial Sequence
  ENSG00000263429_7 (sequence is synthesized)
tggacagactgtgtgagctcctggagggttccactgtatctaccctttgacactgaccagttggcacatggtgacatattccaatgtgttgattgcaaatgtgaacgtacagccagtgct

SEQ ID NO: 787996 - DNA, 120 bp, Artificial Sequence
  ENSG00000263429_8 (sequence is synthesized)
gtgtgcgggaggactctctcctcctcagtggggccacaccgtgcactattaatggagccccactcctttgcacagcctggccatgcagtggctcatattgaggttttagccaactgaaat

SEQ ID NO: 787997 - DNA, 120 bp, Artificial Sequence
  ENSG00000263429_9 (sequence is synthesized)
ctcccgtgcatttttctgacaagccagctaggcctctgctatgctgtccttgtgtctttcatttgatgaccttaagggtgggactgttttatcttaagttacaggtggtcaagtccagcc

SEQ ID NO: 787998 - DNA, 120 bp, Artificial Sequence
  ENSG00000263429_10 (sequence is synthesized)
caaggacagcaactctgagggtcaagcctcataggctaactggatagatgttctctgctttgccacccactggagcccgacctgccccactaatttatatttcccctggtctcattttgt

SEQ ID NO: 787999 - DNA, 120 bp, Artificial Sequence
  ENSG00000263429_11 (sequence is synthesized)
actttttatttataattcacccttaaagtgtatgtgtctcttataagctgcctccgatctttcatggtatgaggtggttacctaaataaagaaggagatttggcctttgtttttatgtaa

SEQ ID NO: 788000 - DNA, 120 bp, Artificial Sequence
  ENSG00000263429_12 (sequence is synthesized)
ctagagagcaacatgatcaagctttgcctgtagaagagtaactgagcatcgtgtgcagaatggatgagagagaagcagcagagagacagcaaggccattcagcaagctcaggtggcaggt

SEQ ID NO: 788001 - DNA, 120 bp, Artificial Sequence
  ENSG00000263464_0 (sequence is synthesized)
gccaccatcgctgtgagccctgtactatcagccatggtcaactccgtcgtcttttttgacatcaccgtcgacggcaagcccttgggccgcatctccatcaaactgtttgcagacaagatt

SEQ ID NO: 788002 - DNA, 68 bp, Artificial Sequence
  ENSG00000263464_1 (sequence is synthesized)
cttgggccgcatctccatcaaactgtttgcagacaagattgttataagggttcctgctttcacagaat

SEQ ID NO: 788003 - DNA, 120 bp, Artificial Sequence
  ENSG00000263464_2 (sequence is synthesized)
tggtgacttcacacgccctaatggcaccggtgacaagtccatctatggggagaaatttgatgatgagaacctcatccgaaagcatacaggttctggcatcttgtccatggcaaatgctgg

SEQ ID NO: 788004 - DNA, 120 bp, Artificial Sequence
  ENSG00000263464_3 (sequence is synthesized)
ctgagtggttggatggcaagcatgtggcctttggcaaggtgaaagaacgtgtgaatattgtggaagccatggagcactttgggtacaggaatagcaagaccagcaagaagatcaccattg

SEQ ID NO: 788005 - DNA, 77 bp, Artificial Sequence
  ENSG00000263464_4 (sequence is synthesized)
tctaatgagtttgacttgtgttttattttcaccaccagacccattccttctgtagctcaggagagcacccctccacc

SEQ ID NO: 788006 - DNA, 120 bp, Artificial Sequence
  ENSG00000263465_0 (sequence is synthesized)
agtttccgggcccgggctgctctcggagccatgagctgcggccgcccccctcccgacgtggacggcatgatcaccctcaaggtggacaacctgacctaccgcacctctcccgacagcttg

SEQ ID NO: 788007 - DNA, 120 bp, Artificial Sequence
  ENSG00000263465_1 (sequence is synthesized)
aggcgcgtgttcgagaagtacgggcgcgtgggcgacgtgtacatcccgcgggagccccacaccaaggcgccccggggcttcgctttcgtccgctttcacgaccggcgcgacgcccaagac

SEQ ID NO: 788008 - DNA, 120 bp, Artificial Sequence
  ENSG00000263465_2 (sequence is synthesized)
agacgccgaggccgccatggacggggcggagctggacggacgcgagctgcgggtgcaggtggcgcgctatggccgccgggacctgccccgcagccgccagggagagccacgcggcaggtc

SEQ ID NO: 788009 - DNA, 120 bp, Artificial Sequence
  ENSG00000263465_3 (sequence is synthesized)
ggcggcggctacggacggcggagccgcagctacgggcggcggagccgcagccccaggcggcgacaccgcagccgatcccggggtcccagctgctccaggtcccgcagccgatctcgctat

SEQ ID NO: 788010 - DNA, 120 bp, Artificial Sequence
  ENSG00000263465_4 (sequence is synthesized)
aggggttctcgctatagccggtctccctacagccgatctccttacagccggtcgcgctacagccgctctccctacagcagatctcgctacagggaatctcgctacggcggatctcactac

SEQ ID NO: 788011 - DNA, 120 bp, Artificial Sequence
  ENSG00000263465_5 (sequence is synthesized)
agctcatctggttacagtaactctcgctacagccgatatcacagcagccggtctcactcgaagtctgggtcctccactagctctcgctctgcatcaacctccaaatcgagctctgcgcga

SEQ ID NO: 788012 - DNA, 120 bp, Artificial Sequence
  ENSG00000263465_6 (sequence is synthesized)
cgatccaagtcctcctcggtctccaggtctcgctcgcggtccaggtcttcatctatgaccaggagtcctccccgggtatccaagaggaaatccaagtcaaggtcgcgatccaagaggccc

SEQ ID NO: 788013 - DNA, 120 bp, Artificial Sequence
  ENSG00000263465_7 (sequence is synthesized)
cccaagtctcctgaagaggaaggacagatgtcctcttaagaaaatgatgcatcaggaagcaacgtgatggaggacttgggggaaaaggatcacatactcagtctatggaagcaacgtccc

SEQ ID NO: 788014 - DNA, 120 bp, Artificial Sequence
  ENSG00000263465_8 (sequence is synthesized)
tggaagaagaggctgcctattgaaaaggttgtgtcacacttttctacctttttgccagtttgaagctttgcatcaggtggcaaaattcattctatgtgccgttttgttgttattcacatt

SEQ ID NO: 788015 - DNA, 120 bp, Artificial Sequence
  ENSG00000263465_9 (sequence is synthesized)
ttattgtaacttaggaggtgaacgacctaagattacgttattgggtttggatatttgaggcaaaaatttatttttatttctatagtgatgactgttttggtttgaaatgaacagattggt

SEQ ID NO: 788016 - DNA, 120 bp, Artificial Sequence
  ENSG00000263465_10 (sequence is synthesized)
aacctaatttgtggcctcctgacttttaaggaaacgtgtgcagccattacacacagcctaacgctgtcaagacatgcttcaacattgccttcattccttaaaaacctacaaaaggtggtg

SEQ ID NO: 788017 - DNA, 120 bp, Artificial Sequence
  ENSG00000263465_11 (sequence is synthesized)
taaattaatatggataattttatttacctccaggtctaaaaggtagtgtgacccaaatttgtataaagatttttcatgtgaaaggactggggttttagcaaacacaggtctaatctcttt

SEQ ID NO: 788018 - DNA, 120 bp, Artificial Sequence
  ENSG00000263465_12 (sequence is synthesized)
tgtgtttttgtgcaccaggcccggctgcgtagcagttgagtgatgctggttagctattaaggtggcctgttgcagtgcagagtgctgagctgcttcctgttttcttctgattgctcctgg

SEQ ID NO: 788019 - DNA, 120 bp, Artificial Sequence
  ENSG00000263465_13 (sequence is synthesized)
ggaaaacacgccttgtcctgaagaacaaatggctgtccagtttattaaaatgcctgtcaactgcacttccagtcacccaggccttgcagataaataatggagcatgcagtgagcacatct

SEQ ID NO: 788020 - DNA, 120 bp, Artificial Sequence
  ENSG00000263465_14 (sequence is synthesized)
agctgacgataatcacaccttttcccccgtcttttctgaaaaattgtaaatctgatcatatcaacatgtatgaacttaaaatatggagaatgttatggaagaaatagtttataagtttgt

SEQ ID NO: 788021 - DNA, 120 bp, Artificial Sequence
  ENSG00000263465_15 (sequence is synthesized)
taagtacttataacatggtttatctttttgattattaattttttacgctaaccattgtttctgtagttaaaattgttttcttggtgttatcttttctcagaataaaattagaaacttttg

SEQ ID NO: 788022 - DNA, 120 bp, Artificial Sequence
  ENSG00000263465_16 (sequence is synthesized)
accaagtgtttctcaaaatataatttttaaaaaatccttaataggcttttagctatgtgctttattgttttatcacaatgcagtttatttgtagtttctctcttttttcctcacacctat

SEQ ID NO: 788023 - DNA, 120 bp, Artificial Sequence
  ENSG00000263465_17 (sequence is synthesized)
ggtttttttacttccaaaattattttcaaataatccatttttggctttcatcattatccctactagatgttatgtgttcttttgcaattgtttctgcttatacctttactagcaaaggga

SEQ ID NO: 788024 - DNA, 120 bp, Artificial Sequence
  ENSG00000263465_18 (sequence is synthesized)
aaaataacaatttggtgtcaatgatctggtgacaataggattacattggagccaattgaataaatttattctttcaatcatatggatcttcattaatatttttgactgaattatcaatta

SEQ ID NO: 788025 - DNA, 120 bp, Artificial Sequence
  ENSG00000263465_19 (sequence is synthesized)
aaaatatttcattccctttgtgcagaaactgctaaatccagggttcgattcttgaatgaactggcaaggtggctgtggtctgtagatatacatcccacattttgttgttataacagttag

SEQ ID NO: 788026 - DNA, 120 bp, Artificial Sequence
  ENSG00000263465_20 (sequence is synthesized)
tagttagtattgctttcatatatagactccagaatctaaattttacgataatgacatttcttctggtcatgacaaatgtaatattttacaaatataaatctacgtagaatccaaagacac

SEQ ID NO: 788027 - DNA, 120 bp, Artificial Sequence
  ENSG00000263465_21 (sequence is synthesized)
acacagagcagtcctgtctgagaaataaaaaatcaggacacccatggcatcgtagtagcccctcgcgtccagcaggtggcgaagggaggtgaggtatatttattaaatgggaccgagtgg

SEQ ID NO: 788028 - DNA, 120 bp, Artificial Sequence
  ENSG00000263465_22 (sequence is synthesized)
gacggggacggggcagccctaagggtagggaagcattgtcaatttctggggatagaatgagacccaggcatagctggagtttgaagctttgaagcaaaaatatctgtagaacatcttaaa

SEQ ID NO: 788029 - DNA, 120 bp, Artificial Sequence
  ENSG00000263465_23 (sequence is synthesized)
ttgaagcaaaaatatctgtagaacatcttaaacgtgaccaaaatatgatgttaaaatcagcaactctttatacgttaaaaactttgaaacctgtggccgggcatggtggctcgcgcctgt

SEQ ID NO: 788030 - DNA, 76 bp, Artificial Sequence
  ENSG00000263465_24 (sequence is synthesized)
atcccagctactcggaggctgaggcaggataatcgcttgaaaccgggagggggcaacaagagcaaaacttcatctc

SEQ ID NO: 788031 - DNA, 120 bp, Artificial Sequence
  ENSG00000263465_25 (sequence is synthesized)
gaaaaaggaaaaaaacaaacaaacaacaactttgaaacctaggaacaattttggacctgttggagcagaaatgtgtagttgtcattgaaggtgtgaacataccctacctctactctacat

SEQ ID NO: 788032 - DNA, 120 bp, Artificial Sequence
  ENSG00000263465_26 (sequence is synthesized)
gtggaagacctgacccacagaggacatgaacccatgaagaagagtgatgtgacatgttttgcattttattagtaccatgatctaaccaactgagctaactggccacaccattttatcctt

SEQ ID NO: 788033 - DNA, 120 bp, Artificial Sequence
  ENSG00000263465_27 (sequence is synthesized)
tataatgatcactatgagggctgagtgcagaatggagtgtatgtggtcaagagtggaagctgtgaggctattgcagtaatccagaaagaaaggtgacaatggcttagacttcagtggtag

SEQ ID NO: 788034 - DNA, 120 bp, Artificial Sequence
  ENSG00000263465_28 (sequence is synthesized)
tgttggaaatggacataaatagacatattcaggaaatatattgatcttagatctaataagacacgtaatagattagaagtagggaaattaatgaaaaagcagaattaaggatgacttctc

SEQ ID NO: 788035 - DNA, 120 bp, Artificial Sequence
  ENSG00000263465_29 (sequence is synthesized)
actggcttgaaatgctaaatggatgacggtgctgtttagtgagttggggaagactgggcgtggtgatgggtgtagaaattgagaaaggaaaatcaagaatttccagaactttcagagcaa

SEQ ID NO: 788036 - DNA, 120 bp, Artificial Sequence
  ENSG00000263465_30 (sequence is synthesized)
tgttaaatactttccttgatagtgggtcagtcatcatttataagtgcatttctaaaaatattgcttaattttgtttttgagctttgtataagtggaattttgtgtgtactgattattttg

SEQ ID NO: 788037 - DNA, 120 bp, Artificial Sequence
  ENSG00000263465_31 (sequence is synthesized)
ctcaatactatgtctttaagattctctgtattgttgcatgtggctgagtttatttttgatgctgtgtagtgttttactaattaataaatcataattcagtttttactgttctattgatgg

SEQ ID NO: 788038 - DNA, 120 bp, Artificial Sequence
  ENSG00000263513_0 (sequence is synthesized)
gaaaaccaacgtgttcggtgacagaccccagcgccgactgagcctctaaagcgacttcagctctgccccaccaacaccaccgcgcgcccgggaacagccgctccgggaagaaacctgagg

SEQ ID NO: 788039 - DNA, 120 bp, Artificial Sequence
  ENSG00000263513_1 (sequence is synthesized)
ggactgcggggggcacgagggacagctgagggaagggaggacgcgagagaaacagcgcgagcacgctgagggccgggggttgccaggagaggggcccgcggacccgcagagcggaggaag

SEQ ID NO: 788040 - DNA, 120 bp, Artificial Sequence
  ENSG00000263513_2 (sequence is synthesized)
gtccgggagaaaaggggcgggacggaggagaatccgggatcgcctggcagaaaaagagaagggagtttctgaatcctgggaagaggaggcgtgggtagggacgcttagcccgagatccga

SEQ ID NO: 788041 - DNA, 120 bp, Artificial Sequence
  ENSG00000263513_3 (sequence is synthesized)
cagcagggaaccggagcgctccgggggaggggcttaatgctggggaagggatgtcttaaaagaggagaagctttaaattagacgatcggagaaggctgagggaattgctatgaaggggcg

SEQ ID NO: 788042 - DNA, 120 bp, Artificial Sequence
  ENSG00000263513_4 (sequence is synthesized)
ggagctgaagtgtagaggactcctttagacagcagaaagggaaagccgttgagaagttcccttcaaactccacctgcctcctctccaattcaaactccactcccttctccaaaagttaaa

SEQ ID NO: 788043 - DNA, 120 bp, Artificial Sequence
  ENSG00000263513_5 (sequence is synthesized)
aggaaagccaagtttgccacgctcccctgttcctactcaataaatacttcttctactccgccaccgggaaaacagaaaaaaaaactaatttccttcccaatattaggacttagaaaagct

SEQ ID NO: 788044 - DNA, 120 bp, Artificial Sequence
  ENSG00000263513_6 (sequence is synthesized)
ctaggtcccgcaatttgaattttagcctaggggaatcaaaatagtaggagcattactcttgtttcctttttcaaaatcccacacctcatccttcctgcgacgccatgtccaccaacattt

SEQ ID NO: 788045 - DNA, 120 bp, Artificial Sequence
  ENSG00000263513_7 (sequence is synthesized)
gtagtttcaaggacaggtgcgtgtccatcctgtgttgcaaattctgtaaacaagtgctcagctctaggggaatgaaggctgttttgctggctgatactgaaatagaccttttctctacag

SEQ ID NO: 788046 - DNA, 120 bp, Artificial Sequence
  ENSG00000263513_8 (sequence is synthesized)
acatccctcctaccaacgcagtggacttcactggaagatgctatttcaccaaaatctgcaaatgtaaactgaaggacatcgcatgtttaaaatgtgggaacattgtagtttatcatgtga

SEQ ID NO: 788047 - DNA, 120 bp, Artificial Sequence
  ENSG00000263513_9 (sequence is synthesized)
tgtcttctttcctgcaacaacagacacttctggatgtttcacagccaggcagtttatgatattaacagactagactccacaggtgtaaacgtcctacttcggggcaacttgccagagata

SEQ ID NO: 788048 - DNA, 120 bp, Artificial Sequence
  ENSG00000263513_10 (sequence is synthesized)
gaagagagtacagatgaagatgtgttaaatatctcagcagaggagtgtattagataaatggaattatgatatatatgatatacaaacttttttctatttaaaaatatattaatggatcaa

SEQ ID NO: 788049 - DNA, 120 bp, Artificial Sequence
  ENSG00000263513_11 (sequence is synthesized)
ctttaaaattgttagttgccagtgatcttttttggaaaacaaaaatggggcatttgttgatttatttattttctgtctctaattagttacctcagtttgattgaagccagtggagttgtg

SEQ ID NO: 788050 - DNA, 120 bp, Artificial Sequence
  ENSG00000263513_12 (sequence is synthesized)
cttttcctctacttctacttcctctcccccacctttttctgcccagtgtaggtgtattcttaaattcagacgggaagattctttcacatatcactcagttacctcccaatctgggggagt

SEQ ID NO: 788051 - DNA, 120 bp, Artificial Sequence
  ENSG00000263513_13 (sequence is synthesized)
ttttcttacaacttgataccagataccattaattttacattcctgaataaaggcctagtacccacgcatatttcaaccatgcatatatcaagttcaaccgagttttaataggggattaaa

SEQ ID NO: 788052 - DNA, 120 bp, Artificial Sequence
  ENSG00000263513_14 (sequence is synthesized)
aaaacaagctgttaggtttccatgggcactggttctcataggttctattggtgataactgctttaacatggagcaagagtttgtgaatcaggaaatagaataaattaaaatttaaaatat

SEQ ID NO: 788053 - DNA, 120 bp, Artificial Sequence
  ENSG00000263513_15 (sequence is synthesized)
atagaggaatcctcttgattgctcagcatgatgttagataaatgagtttgtcagaaaatatcagtatacgctgtttaccaatgttatttatttacattcttctaaagccattatggatat

SEQ ID NO: 788054 - DNA, 120 bp, Artificial Sequence
  ENSG00000263513_16 (sequence is synthesized)
tgtattatgagagctaaacctaaataagttatcctgttccctaggaccttctctgtaaatagtgaattttagacgagtagtctgtcctaaatcttaaatagaaaaaaaaactaaagcgat

SEQ ID NO: 788055 - DNA, 120 bp, Artificial Sequence
  ENSG00000263513_17 (sequence is synthesized)
ttgcttaagccattgtacattataaagagctgttttgttttgctttgctttgctttgttttgttttttttaaagctgcattcagagccacaaaggaataggaaagtagggtagtgttgga

SEQ ID NO: 788056 - DNA, 120 bp, Artificial Sequence
  ENSG00000263513_18 (sequence is synthesized)
ttctggttttatgtaactctaaaataaatgtatctctttaatatctcagttgtagggattttgtcaataccaaagcagactgagttgtggttttgtaaataaagttttttctaaaaatga

SEQ ID NO: 788057 - DNA, 120 bp, Artificial Sequence
  ENSG00000263528_0 (sequence is synthesized)
agtgctgagcttggtgtcccaccgccacaaggaggcagggaagaaacccactagtcccagctcctggggtggcacagacattgcaactggccctgcctgtgggtcctaggggcccttggc

SEQ ID NO: 788058 - DNA, 120 bp, Artificial Sequence
  ENSG00000263528_1 (sequence is synthesized)
taccaggaggctaagaacactgctcatgaatgacagtgagccctgaaagctctgggggtgtcacccagtcccacaagcctgcatcccctgcagtggagatgggctcagctcctggacgtg

SEQ ID NO: 788059 - DNA, 120 bp, Artificial Sequence
  ENSG00000263528_2 (sequence is synthesized)
ccacagacagaaagcataacatacactcgccaggaagagcctttgcctgactcagggcagctcagagtgtggggcagaaggtgaccagccagctcagggcaggagatgcagagcacagcc

SEQ ID NO: 788060 - DNA, 120 bp, Artificial Sequence
  ENSG00000263528_3 (sequence is synthesized)
aattacctgtggcacacagatgacctgctggggcagggggccactgccagtgtgtacaaggcccgcaacaagaaatccggagagctggttgctgtgaaggtcttcaacactaccagctac

SEQ ID NO: 788061 - DNA, 120 bp, Artificial Sequence
  ENSG00000263528_4 (sequence is synthesized)
ctgcggccccgcgaggtgcaggtgagggagtttgaggtcctgcggaagctgaaccaccagaacattgtcaagctctttgcggtggaggagacgggcggaagccggcagaaggtactggtg

SEQ ID NO: 788062 - DNA, 120 bp, Artificial Sequence
  ENSG00000263528_5 (sequence is synthesized)
atggagtactgctccagtgggagcctgctgagtgtgctggagagccctgagaatgcctttgggctgcctgaggatgagttcctggtggtgctgcgctgtgtggtggccggcatgaaccac

SEQ ID NO: 788063 - DNA, 120 bp, Artificial Sequence
  ENSG00000263528_6 (sequence is synthesized)
ctgcgggagaacggcattgtgcatcgcgacatcaagccggggaacatcatgcgcctcgtaggggaggaggggcagagcatctacaagctgacagacttcggcgctgcccgggagctggat

SEQ ID NO: 788064 - DNA, 120 bp, Artificial Sequence
  ENSG00000263528_7 (sequence is synthesized)
gatgatgagaagttcgtctcggtctatgggactgaggagtacctgcatcccgacatgtatgagcgggcggtgcttcgaaagccccagcaaaaagcgttcggggtgactgtggatctctgg

SEQ ID NO: 788065 - DNA, 120 bp, Artificial Sequence
  ENSG00000263528_8 (sequence is synthesized)
agcattggagtgaccttgtaccatgcagccactggcagcctgcccttcatcccctttggtgggccacggcggaacaaggagatcatgtaccggatcaccacggagaagccggctggggcc

SEQ ID NO: 788066 - DNA, 120 bp, Artificial Sequence
  ENSG00000263528_9 (sequence is synthesized)
attgcaggtgcccagaggcgggagaacgggcccctggagtggagctacaccctccccatcacctgccagctgtcactggggctgcagagccagctggtgcccatcctggccaacatcctg

SEQ ID NO: 788067 - DNA, 120 bp, Artificial Sequence
  ENSG00000263528_10 (sequence is synthesized)
gaggtggagcaggccaagtgctggggcttcgaccagttctttgcggagaccagtgacatcctgcagcgagttgtcgtccatgtcttctccctgtcccaggcagtcctgcaccacatctat

SEQ ID NO: 788068 - DNA, 120 bp, Artificial Sequence
  ENSG00000263528_11 (sequence is synthesized)
atccatgcccacaacacgatagccattttccaggaggccgtgcacaagcagaccagtgtggccccccgacaccaggagtacctctttgagggtcacctctgtgtcctcgagcccagcgtc

SEQ ID NO: 788069 - DNA, 120 bp, Artificial Sequence
  ENSG00000263528_12 (sequence is synthesized)
tcagcacagcacatcgcccacacgacggcaagcagccccctgaccctcttcagcacagccatccctaaggggctggccttcagggaccctgctctggacgtccccaagttcgtccccaaa

SEQ ID NO: 788070 - DNA, 120 bp, Artificial Sequence
  ENSG00000263528_13 (sequence is synthesized)
gtggacctgcaggcggattacaacactgccaagggcgtgttgggcgccggctaccaggccctgcggctggcacgggccctgctggatgggcaggagctaatgtttcgggggctgcactgg

SEQ ID NO: 788071 - DNA, 120 bp, Artificial Sequence
  ENSG00000263528_14 (sequence is synthesized)
gtcatggaggtgctccaggccacatgcagacggactctggaagtggcaaggacatccctcctctacctcagcagcagcctgggaactgagaggttcagcagcgtggctggaacgcctgag

SEQ ID NO: 788072 - DNA, 120 bp, Artificial Sequence
  ENSG00000263528_15 (sequence is synthesized)
atccaggaactgaaggcggctgcagaactgaggtccaggctgcggactctagcggaggtcctctccagatgctcccaaaatatcacggagacccaggagagcctgagcagcctgaaccgg

SEQ ID NO: 788073 - DNA, 120 bp, Artificial Sequence
  ENSG00000263528_16 (sequence is synthesized)
gagctggtgaagagccgggatcaggtacatgaggacagaagcatccagcagattcagtgctgtttggacaagatgaacttcatctacaaacagttcaagaagtctaggatgaggccaggg

SEQ ID NO: 788074 - DNA, 120 bp, Artificial Sequence
  ENSG00000263528_17 (sequence is synthesized)
cttggctacaacgaggagcagattcacaagctggataaggtgaatttcagtcatttagccaaaagactcctgcaggtgttccaggaggagtgcgtgcagaagtatcaagcgtccttagtc

SEQ ID NO: 788075 - DNA, 120 bp, Artificial Sequence
  ENSG00000263528_18 (sequence is synthesized)
acacacggcaagaggatgagggtggtgcacgagaccaggaaccacctgcgcctggttggctgttctgtggctgcctgtaacacagaagcccagggggtccaggagagtctcagcaagctc

SEQ ID NO: 788076 - DNA, 120 bp, Artificial Sequence
  ENSG00000263528_19 (sequence is synthesized)
ctggaagagctatctcaccagctccttcaggaccgagcaaagggggctcaggcctcgccgcctcccatagctccttaccccagccctacacgaaaggacctgcttctccacatgcaagag

SEQ ID NO: 788077 - DNA, 120 bp, Artificial Sequence
  ENSG00000263528_20 (sequence is synthesized)
ctctgcgaggggatgaagctgctggcatctgacctcctggacaacaaccgcatcatcgaacggctaaatagagtcccagcacctcctgatgtctgagctccatggggcacatgaggcatc

SEQ ID NO: 788078 - DNA, 120 bp, Artificial Sequence
  ENSG00000263528_21 (sequence is synthesized)
ctgaagcattagaatgattccaacactgctcttctgcaccatgagaccaacccagggcaagatcccatcccatcacatcagcctacctccctcctggctgctggccaggatgtcgccagc

SEQ ID NO: 788079 - DNA, 120 bp, Artificial Sequence
  ENSG00000263528_22 (sequence is synthesized)
attaccttccactgcctttctccctgggaagcagcacagctgagactgggcaccaggccacctctgttgggacccacaggaaagagtgtggcagcaactgcctggctgacctttctatct

SEQ ID NO: 788080 - DNA, 120 bp, Artificial Sequence
  ENSG00000263528_23 (sequence is synthesized)
tctctaggctcaggtactgctcctccatgcccatggctgggccgtggggagaagaagctctcatacgccttcccactccctctggtttataggacttcactccctagccaacaggagagg

SEQ ID NO: 788081 - DNA, 120 bp, Artificial Sequence
  ENSG00000263528_24 (sequence is synthesized)
aggcctcctggggtttccccagggcagtaggtcaaacgacctcatcacagtcttccttcctcttcaagcgtttcatgttgaacacagctctctccgctcccttgtgatttctgagggtca

SEQ ID NO: 788082 - DNA, 120 bp, Artificial Sequence
  ENSG00000263528_25 (sequence is synthesized)
ccactgccagcctcaggcaacatagagagcctcctgttctttctatgcttggtctgactgagcctaaagttgagaaaatgggtggccaaggccagtgccagtgtcttggggcccctttgg

SEQ ID NO: 788083 - DNA, 120 bp, Artificial Sequence
  ENSG00000263528_26 (sequence is synthesized)
ctctccctcactctctgaggctccagctggtcctgggacatgcagccaggactgtgagtctgggcaggtccaaggcctgcaccttcaagaagtggaataaatgtggcctttgcttctgtt

SEQ ID NO: 788084 - DNA, 120 bp, Artificial Sequence
  ENSG00000263528_27 (sequence is synthesized)
ggcctgttccagcaggttccgggcatgctgcaggcttgggcacaccactttcccatctggttgctggaacgagttcttccagctcttcctccccaacccaccctgccccaccatcttggt

SEQ ID NO: 788085 - DNA, 120 bp, Artificial Sequence
  ENSG00000263528_28 (sequence is synthesized)
cctagctcttcaggatattctcttagaacgctcctattgcctgcttaaggaggataggtctgggcccccacccctgacagtctccatgtcctgggagggcagggggctgcagagccagct

SEQ ID NO: 788086 - DNA, 120 bp, Artificial Sequence
  ENSG00000263528_29 (sequence is synthesized)
agtgctggggagaggtggtagagacaagaggtttgtctctgcagaatgacctgcctcaggaggggcttcaagggaacgtggggagccaggacaggcagcaggtggaacaggcagaaggtg

SEQ ID NO: 788087 - DNA, 120 bp, Artificial Sequence
  ENSG00000263528_30 (sequence is synthesized)
cctccaccctcagaccagcggcaggcctgggacagatgctgacaggactcaggtgtctgactcctgctaatcattccatttaaaattccaacttaaaaattaaacctaaaaaagattgta

SEQ ID NO: 788088 - DNA, 120 bp, Artificial Sequence
  ENSG00000263639_0 (sequence is synthesized)
gtacctgtctataaggagtcctgcttatcacaatgaatgttctcctgggcagcgttgtgatctttgccaccttcgtgactttatgcaatgcatcatgctatttcatacctaatgagggag

SEQ ID NO: 788089 - DNA, 120 bp, Artificial Sequence
  ENSG00000263639_1 (sequence is synthesized)
ttccaggagattcaaccaggaaatgcatggatctcaaaggaaacaaacacccaataaactcggagtggcagactgacaactgtgagacatgcacttgctacgaaacagaaatttcatgtt

SEQ ID NO: 788090 - DNA, 120 bp, Artificial Sequence
  ENSG00000263639_2 (sequence is synthesized)
ttgtttctacacctgtgggttatgacaaagacaactgccaaagaatcttcaagaaggaggactgcaagtatatcgtggtggagaagaaggacccaaaaaagacctgttctgtcagtgaat

SEQ ID NO: 788091 - DNA, 120 bp, Artificial Sequence
  ENSG00000263639_3 (sequence is synthesized)
ggataatctaatgtgcttctagtaggcacagggctcccaggccaggcctcattctcctctggcctctaatagtcaatgattgtgtagccatgcctatcagtaaaaagatttttgagcaaa

SEQ ID NO: 788092 - DNA, 120 bp, Artificial Sequence
  ENSG00000263639_4 (sequence is synthesized)
agagaattcaagcctctactaacggccagagacacaggctttcttggcacaagttcaggtagagcactgaaaccacactgctgcttggctccagcaagaccaccttgctaccagtcacag

SEQ ID NO: 788093 - DNA, 120 bp, Artificial Sequence
  ENSG00000263639_5 (sequence is synthesized)
tcacagcccccatgcactgacactgcacactggactccaagaaacccttgccctaagagccagaaccctccacaccatcattcctagggagattctgcatgatgccagtgtccttggacc

SEQ ID NO: 788094 - DNA, 120 bp, Artificial Sequence
  ENSG00000263639_6 (sequence is synthesized)
ctctctgaagaggactttttgagaggagagtgtttgtggagccgaggtttgtgcctgtaccctggagtcaaccctctgtaaacactcaatgtgttctcaccttgttatcattcccaatga

SEQ ID NO: 788095 - DNA, 120 bp, Artificial Sequence
  ENSG00000263761_0 (sequence is synthesized)
agataagacgtcggagcgcggcatcgaggaccagataagcacaagtggaggacaatccagcccggcagcgggtgagagtgggtgctggccaggacggttccttcagagcaaacagcaggg

SEQ ID NO: 788096 - DNA, 120 bp, Artificial Sequence
  ENSG00000263761_1 (sequence is synthesized)
agatgccggcccgctccttcccagctcctccccgtgcccgctaacacagcacggccgcctgcagtctcctctctgggtgattgcgcgggcctaagatgtgtcctggggcactgtgggtgg

SEQ ID NO: 788097 - DNA, 120 bp, Artificial Sequence
  ENSG00000263761_2 (sequence is synthesized)
ccctgcccctgctgtccctgctggctggctccctacaggggaagccactgcagagctggggacgagggtctgctgggggaaacgcccacagcccactgggggtgcctggaggtgggctgc

SEQ ID NO: 788098 - DNA, 120 bp, Artificial Sequence
  ENSG00000263761_3 (sequence is synthesized)
ctgagcacaccttcaacctgaagatgtttctggagaacgtgaaggtggatttcctgcgcagccttaacctgagtggggtcccttcgcaggacaaaaccagggtggagccgccgcagtaca

SEQ ID NO: 788099 - DNA, 120 bp, Artificial Sequence
  ENSG00000263761_4 (sequence is synthesized)
tgattgacctgtacaacaggtacacgtccgataagtcgactacgccagcgtccaacattgtgcggagcttcagcatggaagatgccatctccataactgccacagaggacttccccttcc

SEQ ID NO: 788100 - DNA, 120 bp, Artificial Sequence
  ENSG00000263761_5 (sequence is synthesized)
agaagcacatcttgctcttcaacatctccattcctaggcatgagcagatcaccagagctgagctccgactctatgtctcctgtcaaaatcacgtggacccctctcatgacctgaaaggaa

SEQ ID NO: 788101 - DNA, 120 bp, Artificial Sequence
  ENSG00000263761_6 (sequence is synthesized)
gcgtggtcatttatgatgttctggatggaacagatgcctgggatagtgctacagagaccaagaccttcctggtgtcccaggacattcaggatgagggctgggagaccttggaagtgtcca

SEQ ID NO: 788102 - DNA, 120 bp, Artificial Sequence
  ENSG00000263761_7 (sequence is synthesized)
gcgccgtgaagcgctgggtccggtccgactccaccaagagcaaaaataagctggaagtgactgtggagagccacaggaagggctgcgacacgctggacatcagtgtccccccaggttcca

SEQ ID NO: 788103 - DNA, 120 bp, Artificial Sequence
  ENSG00000263761_8 (sequence is synthesized)
gaaacctgcccttctttgttgtcttctccaatgaccacagcagtgggaccaaggagaccaggctggagctgagggagatgatcagccatgaacaagagagcgtgctcaagaagctgtcca

SEQ ID NO: 788104 - DNA, 120 bp, Artificial Sequence
  ENSG00000263761_9 (sequence is synthesized)
aggacggctccacagaggcaggtgagagcagtcacgaggaggacacggatggccacgtggctgcggggtcgactttagccaggcggaaaaggagcgccggggctggcagccactgtcaaa

SEQ ID NO: 788105 - DNA, 120 bp, Artificial Sequence
  ENSG00000263761_10 (sequence is synthesized)
agacctccctgcgggtaaacttcgaggacatcggctgggacagctggatcattgcacccaaggagtatgaagcctacgagtgtaagggcggctgcttcttccccttggctgacgatgtga

SEQ ID NO: 788106 - DNA, 120 bp, Artificial Sequence
  ENSG00000263761_11 (sequence is synthesized)
cgccgacgaaacacgctatcgtgcagaccctggtgcatctcaagttccccacaaaggtgggcaaggcctgctgtgtgcccaccaaactgagccccatctccgtcctctacaaggatgaca

SEQ ID NO: 788107 - DNA, 120 bp, Artificial Sequence
  ENSG00000263761_12 (sequence is synthesized)
tgggggtgcccaccctcaagtaccattacgagggcatgagcgtggcagagtgtgggtgcaggtagtatctgcctgcggggctggggaggcaggccaaaggggctccacatgagaggtcct

SEQ ID NO: 788108 - DNA, 120 bp, Artificial Sequence
  ENSG00000263761_13 (sequence is synthesized)
tctccctccccacaccccacccaaagcatacaccgctgagctcaactgccagggaaggctaaggaaatggggatttgagcacaacaggaaagcctgggagggttgttgggatgcaaggag

SEQ ID NO: 788109 - DNA, 120 bp, Artificial Sequence
  ENSG00000263761_14 (sequence is synthesized)
gtgatgaaaaggagacagggggaaaaataatccatagtcagcagaaaacaacagcagtgagccagaggagcacaggcgggcaggtcactgcagagactgatggaagttagagaggtggag

SEQ ID NO: 788110 - DNA, 120 bp, Artificial Sequence
  ENSG00000263761_15 (sequence is synthesized)
gaggccagctcgctccaaaacccttggggagtagagggaaggagcaggccgcgtgtcacacccatcattgtatgttatttcccacaacccagttggaggggcatggcttccaatttagag

SEQ ID NO: 788111 - DNA, 120 bp, Artificial Sequence
  ENSG00000263761_16 (sequence is synthesized)
acataaaacacaggcagatcaagtagcattgatcaatggcatgattccaactcagatttgtgggacaccaaagcccaggatcttcccaagtgccctgctgcagtttagcaggtcctctcc

SEQ ID NO: 788112 - DNA, 120 bp, Artificial Sequence
  ENSG00000263761_17 (sequence is synthesized)
agctaaagagcagtgagacattgggagcccaggagtgttgaggccaggccaggctgaggcccatcagtcacaggtgtgactgggctgcttgtcacacacagggcgtggtctggccactgt

SEQ ID NO: 788113 - DNA, 120 bp, Artificial Sequence
  ENSG00000263761_18 (sequence is synthesized)
tgccagtgctcactcagcggccacatgctttttaatatgacccctgaggcactgaaaaataaccccaggccaactgcaggatagagagagaggtcaggacagcagccctgtgggctgcat

SEQ ID NO: 788114 - DNA, 120 bp, Artificial Sequence
  ENSG00000263761_19 (sequence is synthesized)
gatacactgtggctggagttattgtgaccccctggtgcagtgctcccacggccagtggtgcacacagggccattcactgtccatagactgaaaccatgtgaccatttgagagggccgggc

SEQ ID NO: 788115 - DNA, 120 bp, Artificial Sequence
  ENSG00000263761_20 (sequence is synthesized)
acactttcccctgagggatggggcagcctgtggccagcacctctgcagttactctgcatagccagctcaccagcatgccatgcccagggtgccccccagtgacaacctcatgggagacgg

SEQ ID NO: 788116 - DNA, 120 bp, Artificial Sequence
  ENSG00000263761_21 (sequence is synthesized)
gcctggatttgaatttgttggaattaaatgtgctctggctttggtctttgaaacatatctatttttattccttggtgacatgtccttaagtgacaagactccagccttcctgggcgaggc

SEQ ID NO: 788117 - DNA, 120 bp, Artificial Sequence
  ENSG00000263761_22 (sequence is synthesized)
ctctccagcctcggaagagctgcagtccttatcggctatcactggctctgcctgcatttgccggctctcttgagtcacgtgcatcccagcaccccgcctgggctcggactgtgggaccag

SEQ ID NO: 788118 - DNA, 120 bp, Artificial Sequence
  ENSG00000263761_23 (sequence is synthesized)
actcagcctccccgaacacaagggaagataaggcttccatttgctctgtgtttcaccctctcctctgtctctccaggccacacatggaacggggcggtatgaggaagagtctgaaagtgg

SEQ ID NO: 788119 - DNA, 120 bp, Artificial Sequence
  ENSG00000263761_24 (sequence is synthesized)
tgaagagtgcacctatggccctctgacctccagccagagcagggcctaggggaggcttagagaggccagggcctctccccgtggttgaagctcccatttatttaagaaaaagtggggggt

SEQ ID NO: 788120 - DNA, 120 bp, Artificial Sequence
  ENSG00000263761_25 (sequence is synthesized)
ggggaaaacgttatgttaaatgtttacatggaaccaatgaacaactttaacacacaaatacaacgaaacattcttgtttaattactggcgttatagaaaatatgaattcctgctacatgc

SEQ ID NO: 788121 - DNA, 120 bp, Artificial Sequence
  ENSG00000263761_26 (sequence is synthesized)
cgggcagtgtagtgttacaatgctattccaagttgggtgttgagcatcttctttcagtcctggtggtgtgcttctgtgcctgcttgaaaatttcactcggaaataaagtcaaatgtctaa

SEQ ID NO: 788122 - DNA, 120 bp, Artificial Sequence
  ENSG00000263874_0 (sequence is synthesized)
cacgaaacttttgtctgtgtctccccataatgtgacctttagaagttgccaatggcccacccaatacccaaccatgatttttctgagataatctgcccgaggtgtgtgagaggaaacgcg

SEQ ID NO: 788123 - DNA, 120 bp, Artificial Sequence
  ENSG00000263874_1 (sequence is synthesized)
aagaaggcagtcaggaggattcactcttgggggagctgggtaggatcctatctcctcctacatccagagcatgcaggctccatttagatacaaaggggtgggattgggttcctggggaga

SEQ ID NO: 788124 - DNA, 120 bp, Artificial Sequence
  ENSG00000263874_2 (sequence is synthesized)
aattgagcccctttgattctgcggttctgtgggtctaaatctggcatctccttggctatccacccccaggctttgtgattggttggctgtggttggtgggggggcaggaagctgctggtg

SEQ ID NO: 788125 - DNA, 120 bp, Artificial Sequence
  ENSG00000263874_3 (sequence is synthesized)
gagctgcagcatccttcagtctcaggcccctgggagggggaggggaaagaaccagggctgagctgtggagtgaaggggagccatttctctccaccgactgcaacctccgtgctcacagct

SEQ ID NO: 788126 - DNA, 120 bp, Artificial Sequence
  ENSG00000263874_4 (sequence is synthesized)
cacggttcaccagaatccaggggcttggtcggcctaggaatccacaatgctggatattttcatcctgatgttctttgccatcataggcctggtcattctgtcctacattatctatctgct

SEQ ID NO: 788127 - DNA, 120 bp, Artificial Sequence
  ENSG00000263874_5 (sequence is synthesized)
ctagtggcctggagctgcggccggagcctgctggagaacagctcagaaggaaggatggagatgaatggccgagtgccctgcttgctgacgcaccggtggatttttgcttctgctgttatc

SEQ ID NO: 788128 - DNA, 120 bp, Artificial Sequence
  ENSG00000263874_6 (sequence is synthesized)
tcggctcctggtctctccagtccaacaagaggcctctcatccacagaagcagtcctactgcccagcagacctctttcagagccttccagacatggctgacccctggcaagcaaggggctt

SEQ ID NO: 788129 - DNA, 120 bp, Artificial Sequence
  ENSG00000263874_7 (sequence is synthesized)
tttgagctgagaggcacttggctgggacttcaggaattcatggacagggctggcagatactgcatatgtttgagctgtagatgggattgagaacagaaagttgaaatggagacttattaa

SEQ ID NO: 788130 - DNA, 120 bp, Artificial Sequence
  ENSG00000263874_8 (sequence is synthesized)
agttaccgtggagaactgctcaaaaattcattttgaattaaggaaacttaaattcattttaagtttccttagatctaaatgcaactgcacattacactcaaatatgttccttccttctca

SEQ ID NO: 788131 - DNA, 120 bp, Artificial Sequence
  ENSG00000263874_9 (sequence is synthesized)
cacacaggactcccttgtgaaactcaaggggaagttcaagttgtccatcttcatctatgaagtagtcactttatcactgtctttacagattgcacagtctggggttttgtggtttctctt

SEQ ID NO: 788132 - DNA, 120 bp, Artificial Sequence
  ENSG00000263874_10 (sequence is synthesized)
gtctcactctccagccaggaagaacttgtcatttgagtttttaaaatgtatcatttcttccccacctcaaaccacttgtatcccagtttctcatttaaagggagaaatggttatatagtc

SEQ ID NO: 788133 - DNA, 120 bp, Artificial Sequence
  ENSG00000263874_11 (sequence is synthesized)
ggttatatagtcctctctttgcacctgattgaattataaatgatagaaacaagatggctatacttatttaggaaaaatctcttaccccaaaatgagtgtgtgtgtgtgtgtgtgtgtgcg

SEQ ID NO: 788134 - DNA, 120 bp, Artificial Sequence
  ENSG00000263874_12 (sequence is synthesized)
tgtgtgttttaatcaaagatcttttctggaaaaaactttccacatagttctctgacccattagagttgaagaaactatgtattttgggattcagagtagaattggcctgcaaatctgggg

SEQ ID NO: 788135 - DNA, 120 bp, Artificial Sequence
  ENSG00000263874_13 (sequence is synthesized)
gcaaatctggggtgtttattccttttacaagtctatcataattgttctacatttaattttcctttcttgcttaaaagtaaacaaggagagtcaggagtggtggctcatgcctgtaatccc

SEQ ID NO: 788136 - DNA, 120 bp, Artificial Sequence
  ENSG00000263874_14 (sequence is synthesized)
tgggagacatagcgagattccgtctcaaataaaataaaataaataaataaataaacaaggagaaagattagtttttagtaataacattgtgtccaatttccatgttttaaaacaaaaatt

SEQ ID NO: 788137 - DNA, 120 bp, Artificial Sequence
  ENSG00000263874_15 (sequence is synthesized)
cattgtgtccaatttccatgttttaaaacaaaaattgaggcattatatgtcacaactgaaatggaaaagttgtgtttaaaaattatggacaaggccgggcacggtggctcacgcctggaa

SEQ ID NO: 788138 - DNA, 88 bp, Artificial Sequence
  ENSG00000263874_16 (sequence is synthesized)
aggtgacacagcaagaccccatctcaaaaaaaaataataataaaaacataaaaattatggacaagaaaaaacactattctggaagctt

SEQ ID NO: 788139 - DNA, 120 bp, Artificial Sequence
  ENSG00000263874_17 (sequence is synthesized)
taaaaattatggacaagaaaaaacactattctggaagctttgttttggcaacaaattatatgacctgacctttcataagtcatttaaactttagggctaggccaggtgctatggcgcatg

SEQ ID NO: 788140 - DNA, 120 bp, Artificial Sequence
  ENSG00000263874_18 (sequence is synthesized)
cctataatcccagcatttagggaagtagaagcaggaggatagcttgaggccaagaattccagaccagcccaggcaatatagcgagacccccgtctccacaaaaataaaaaataaaataaa

SEQ ID NO: 788141 - DNA, 120 bp, Artificial Sequence
  ENSG00000263874_19 (sequence is synthesized)
aataaataaatacataaactttaggtcctctgtttattctgtcaaatgaaagtgttaggccaaggtcgcattatctctttggaaactacatcgagaacagaattcccatggaacgaactc

SEQ ID NO: 788142 - DNA, 120 bp, Artificial Sequence
  ENSG00000263874_20 (sequence is synthesized)
ttaatagttcactggtagtcccccttttctgaatattcttcccaacatgacactttataacaaaaatttaactgcaaaactctttttttttcaccaacagccagattttgatgagaaaat

SEQ ID NO: 788143 - DNA, 120 bp, Artificial Sequence
  ENSG00000263874_21 (sequence is synthesized)
ggccatatttatttactccaaatatatattatgtctgtgataatttgcctaaactgtttaaggaatattaacaagtatgatactgcatcgtggtatgtagcaaaaagataggtaatctga

SEQ ID NO: 788144 - DNA, 120 bp, Artificial Sequence
  ENSG00000263874_22 (sequence is synthesized)
catacatggatgcaagcagcatggctgtgaacctggatatatttagaaatgatcttcagtggagtccttgatgtgacattttccactaaaacattcttctaactctggtatatcttagtg

SEQ ID NO: 788145 - DNA, 120 bp, Artificial Sequence
  ENSG00000263874_23 (sequence is synthesized)
tttcgaactataatttccgtcttcaagccaagacagcagctctacatccttacctaggtaattcaggcatgcgccagtattttggaggggtccaaattagagttagttatgatggtatag

SEQ ID NO: 788146 - DNA, 120 bp, Artificial Sequence
  ENSG00000263874_24 (sequence is synthesized)
atctttaaagtatagtctaaccaagcttgctctggtcttttgtgacatcaaggcttctcagtctgtattcacataaagttgaaacaactaatcaattcagtgaaaaaaaatcagcagatt

SEQ ID NO: 788147 - DNA, 120 bp, Artificial Sequence
  ENSG00000263874_25 (sequence is synthesized)
tcactcatacactggtgatatataccactggtattgggtacaatgtaaggagagaggattacccatctcttcagttacttgtaaaatatgattttaaaaaaataaatcaatacattttgg

SEQ ID NO: 788148 - DNA, 120 bp, Artificial Sequence
  ENSG00000263874_26 (sequence is synthesized)
aaaaattatatgactttgtgcttatatttatgcaacaatatgctagcttataacagggttttactgtgttattttgatagttgtttaaattttacatttaaactatttgtattttggcat

SEQ ID NO: 788149 - DNA, 120 bp, Artificial Sequence
  ENSG00000263874_27 (sequence is synthesized)
cccaaaacataataaaacactgcaaaaagttacctctgtaatataagattttgtataaattttataaatttgtgtcatagggtaattttgtccaataaaatgtcaatgagataaaaacca

SEQ ID NO: 788150 - DNA, 75 bp, Artificial Sequence
  ENSG00000263956_0 (sequence is synthesized)
ctggcacgctggccacaatctacctcactcttatcagagtctgagcagtgctttcagctctgagttgaggcacct

SEQ ID NO: 788151 - DNA, 86 bp, Artificial Sequence
  ENSG00000263956_1 (sequence is synthesized)
gagaaattgcgcccccagttggcagagaacaaacagcagttcagaaacctcaaagagagatgttttctaactcaactggccggctt

SEQ ID NO: 788152 - DNA, 86 bp, Artificial Sequence
  ENSG00000263956_2 (sequence is synthesized)
gaagatgaggatgaagatgttcaagttgaggaggatgagaaagtactggaatcatctgcccccagggaggtgcagaaggctgaaga

SEQ ID NO: 788153 - DNA, 120 bp, Artificial Sequence
  ENSG00000263956_3 (sequence is synthesized)
tccatccagcctcacaagaacatcaaaatcacatttgaggaagacaaagtcaactcatctctggttgtagacagagaatcctctcatgatggatgtcaggatgctctaaacattctccca

SEQ ID NO: 788154 - DNA, 120 bp, Artificial Sequence
  ENSG00000263956_4 (sequence is synthesized)
gcagagaagaaacagcagttcagaagcctcaaagagaaatgttttgtaactcaagtggcctgcttcctggccaagcagcagaacaaatacaaatatgaagagtgcaaagacctcataaaa

SEQ ID NO: 788155 - DNA, 68 bp, Artificial Sequence
  ENSG00000263956_5 (sequence is synthesized)
gaacaaatacaaatatgaagagtgcaaagacctcataaaatgaagcaagctgaggagctcaggcaata

SEQ ID NO: 788156 - DNA, 82 bp, Artificial Sequence
  ENSG00000263956_6 (sequence is synthesized)
tgtgccatcacttgttcaaatagccatggcccttatgactccaaccagccacatagaaaaaccaaaatcacatttgaggaag

SEQ ID NO: 788157 - DNA, 120 bp, Artificial Sequence
  ENSG00000263956_7 (sequence is synthesized)
aaacccaccatgccccaggctcagcagcgtgctgatggaagtggaagtgcctgaagtcttacaggactcactggatagatattattcgactccatcaatgtactttgaactacctgactc

SEQ ID NO: 788158 - DNA, 83 bp, Artificial Sequence
  ENSG00000263956_8 (sequence is synthesized)
agcacatcagctttgcccttgacatggacaataggttttttactttgacggtgagaagtctccacctggtcttccagatggga

SEQ ID NO: 788159 - DNA, 120 bp, Artificial Sequence
  ENSG00000263956_9 (sequence is synthesized)
tttgacggtgagaagtctccacctggtcttccagatgggagtcatattcccacaataagcagcccttactaagccgagaggtgtcattcctgcaggcaggacctataggcacctgaagat

SEQ ID NO: 788160 - DNA, 75 bp, Artificial Sequence
  ENSG00000263956_10 (sequence is synthesized)
agcatgccagtggcaacctgtgctcagtctgaagacaatggacccacgttaggtgtgacacgttcacataactgt

SEQ ID NO: 788161 - DNA, 120 bp, Artificial Sequence
  ENSG00000263956_11 (sequence is synthesized)
gcagcacatgccgggagtgatcagtcggacattttaatttgaaccacgtatctctgggtagctacaaaattcctcagggatttcattttgcaggcatgtctctgagcttctatacctgct

SEQ ID NO: 788162 - DNA, 80 bp, Artificial Sequence
  ENSG00000263956_12 (sequence is synthesized)
tatctctgggtagctacaaaattcctcagggatttcattttgcaggcatgtctctgagcttctatacctgctcaaggtca

SEQ ID NO: 788163 - DNA, 71 bp, Artificial Sequence
  ENSG00000263956_13 (sequence is synthesized)
ttatagaggacaggtcagctattaaattcagcctaaactttttgacgggaacactgcagagacaatgctgt

SEQ ID NO: 788164 - DNA, 89 bp, Artificial Sequence
  ENSG00000263956_14 (sequence is synthesized)
ctgctgttgcaaaaagaagaaaacattcttttttaatctatacaattaaaaccttttgcctatcactctggacttttggattgtttttt

SEQ ID NO: 788165 - DNA, 120 bp, Artificial Sequence
  ENSG00000263956_15 (sequence is synthesized)
gttaattttaatctatacaattaaaaccttttgcctatcactctggacttttggattgttttttacattcagtgttataatatttgattatgctgattggttttggtgggtactgatgcg

SEQ ID NO: 788166 - DNA, 120 bp, Artificial Sequence
  ENSG00000263956_16 (sequence is synthesized)
ccggaagtcagactatggggcggtgcggcagcgcgaagcctgcagtcctaaacgcggggtagctccgggcttccgagggggtgtgtctcccgcctctttaacctggcaggggcggttcaa

SEQ ID NO: 788167 - DNA, 120 bp, Artificial Sequence
  ENSG00000263956_17 (sequence is synthesized)
gtggccggggaaatcagcgaattgcagggtcaagggctggtgctttgaaagagaggcggaggggagagagggattttcccgtccccgctgcgctctgtcctccattactccttttctcgg

SEQ ID NO: 788168 - DNA, 120 bp, Artificial Sequence
  ENSG00000263956_18 (sequence is synthesized)
cccgcggcccgaacccgctgtgcggtagaggcagccgggtccctttaaggcccagctgcgcctgtgccttgggctctcctgacacggcccatccggaccctgaggagccagcgggccgca

SEQ ID NO: 788169 - DNA, 120 bp, Artificial Sequence
  ENSG00000263956_19 (sequence is synthesized)
agcaagttgctgggcggcggtggagatagcggcggtgctgggaggggtaggtgagggtcgcgaggctgcctgagcttctgagtgagcctggtgattttgggaacgcgggacgggcgacct

SEQ ID NO: 788170 - DNA, 120 bp, Artificial Sequence
  ENSG00000263956_20 (sequence is synthesized)
gcggcgccaggagcggggccgaggtacggcggcacggctgcagcctggatgggaagttcaagtttactgcgaagtccacccagcgttccggaggtgagggcgccgcgccaggccgggcgg

SEQ ID NO: 788171 - DNA, 120 bp, Artificial Sequence
  ENSG00000263956_21 (sequence is synthesized)
gaggcattctgaaggcaaatcctgtttagacccaggcaaaggttcctggtgacccaggctctcatgagcagattgtcccttatcattctcctgaggatgtctggagcttcagtgctgtgt

SEQ ID NO: 788172 - DNA, 120 bp, Artificial Sequence
  ENSG00000263956_22 (sequence is synthesized)
gctcttggcctccacactgggggtgccaccaactcccactgtccagggcttctggtggactctccgaggcaccgatgtagaaacttacccattcagtgcaccaagagcagcttcacatgg

SEQ ID NO: 788173 - DNA, 120 bp, Artificial Sequence
  ENSG00000263956_23 (sequence is synthesized)
tgtgggccgacatgaagagctgccagatccaacagaaatgtgattgataacagtaaagccacactcctcaagtgcctgaaatacccctcattgtcttcttcaggtggcaagggctctgga

SEQ ID NO: 788174 - DNA, 120 bp, Artificial Sequence
  ENSG00000263956_24 (sequence is synthesized)
taaggatggtcaaacaaaataatatcatacctggagaaactcagatcttgctaagatttactggttgggaatccaaagttaatgccaagaagcagctgccagttgggatcaaatgtgagc

SEQ ID NO: 788175 - DNA, 82 bp, Artificial Sequence
  ENSG00000263956_25 (sequence is synthesized)
tttactggttgggaatccaaagttaatgccaagaagcagctgccagttgggatcaaatgtgagcctatggatcaagtccctg

SEQ ID NO: 788176 - DNA, 61 bp, Artificial Sequence
  ENSG00000263956_26 (sequence is synthesized)
ggatagatgttattcaactccttcagtttatcttggttggcttggctgttgacatggatga

SEQ ID NO: 788177 - DNA, 65 bp, Artificial Sequence
  ENSG00000263961_0 (sequence is synthesized)
ctccagcaccctgccggtggcactactgagagacgaggtgccagggtggttcctgaaagtgcctg

SEQ ID NO: 788178 - DNA, 120 bp, Artificial Sequence
  ENSG00000263961_1 (sequence is synthesized)
ctgagagacgaggtgccagggtggttcctgaaagtgcctgagccccaacttatcagcaaggagctcatcatgctgacagaagtcatggaggtctggcatggcttagtgatcgcggtggtg

SEQ ID NO: 788179 - DNA, 120 bp, Artificial Sequence
  ENSG00000263961_2 (sequence is synthesized)
tccctcttcctgcaggcctgcttcctcaccgccatcaactacctgctcagcaggcacatggcccacaagagtgaacagatactgaaagcggccagtctccaggttcccaggcccagccct

SEQ ID NO: 788180 - DNA, 120 bp, Artificial Sequence
  ENSG00000263961_3 (sequence is synthesized)
ggccaccatcatccacctgctgtcaaagagatgaaggagactcagacagagagagacatcccaatgtctgattccctttacaggcatgacagcgacacaccctcagatagcttggatagc

SEQ ID NO: 788181 - DNA, 120 bp, Artificial Sequence
  ENSG00000263961_4 (sequence is synthesized)
tcctgcagttcgcctcctgcctgccaggccacagaggatgtggattacacacaagtcgtcttttctgaccctggagaactaaaaaatgactccccgctggactatgagaacataaaggaa

SEQ ID NO: 788182 - DNA, 120 bp, Artificial Sequence
  ENSG00000263961_5 (sequence is synthesized)
agattatgtcaatgtcaatccagaaagacacaagcccagtttctggtattttgtcaaccctgctctgtctgagccagcggaatatgatcaagtggccatgtgaattccaaatatttttaa

SEQ ID NO: 788183 - DNA, 120 bp, Artificial Sequence
  ENSG00000263961_6 (sequence is synthesized)
tggggtccagttctctatggattcttacatttaatttgtagggaaatgccatttttcccccttaaacaaggcatggggctcacaagtctatggagacaggccaaaaagaatgtggagaag

SEQ ID NO: 788184 - DNA, 120 bp, Artificial Sequence
  ENSG00000263961_7 (sequence is synthesized)
aaaactgataaatacacagaggtcctcaagacccatggactcctggtctgtacccaaaaaagctgttcgttcctcaaaaacaaaaacaaggcttggctgggaaaacaggccaatgccccg

SEQ ID NO: 788185 - DNA, 120 bp, Artificial Sequence
  ENSG00000263961_8 (sequence is synthesized)
gcaagaaaggttgagatcagatgttaggaagaactttcaggtaaagtatgagaactatggagtccatcagcagagatagtagtgaagtctctccccagggaaaattttaaaaaggttgaa

SEQ ID NO: 788186 - DNA, 120 bp, Artificial Sequence
  ENSG00000263961_9 (sequence is synthesized)
tcagctgttgtagagttctatttggcaatctcatggttaaatgacttccctttgagctctttaattattggcaataaacaacttctttaaaagttttaaataaaatagcaaccaccacca

SEQ ID NO: 788187 - DNA, 120 bp, Artificial Sequence
  ENSG00000263961_10 (sequence is synthesized)
atgggtaactggctcagcatcctcttccctcctagtcactctcagagaccattctcgagcctccagcaggacaagacccctttggagttcccaaacgtcactcaaaaacctaccagagga

SEQ ID NO: 788188 - DNA, 120 bp, Artificial Sequence
  ENSG00000263961_11 (sequence is synthesized)
cccaccggccaaattccttcccaccgctccccctccccccaataactgtatctgggtaatccccactctgacctcaccttttaaccaactatttctggctggaagtggccatccacatcc

SEQ ID NO: 788189 - DNA, 120 bp, Artificial Sequence
  ENSG00000263961_12 (sequence is synthesized)
gtctactacccagaccttctgcctagacacagcttttgcaatgcctacgaggaagtgctcgtgtaacctggtctaattaattttcttcatccctgttaaaggactgaatatgaagaaatg

SEQ ID NO: 788190 - DNA, 120 bp, Artificial Sequence
  ENSG00000264006_0 (sequence is synthesized)
atgatgacggatctgaagcaaagccattcagtgaggctgaatgatggacccttcatgccagtgctgggatttggcacttatgctcctgatcatactcccaaaagccaggctgccgaggcc

SEQ ID NO: 788191 - DNA, 120 bp, Artificial Sequence
  ENSG00000264006_1 (sequence is synthesized)
accaaagtggctattgacgtaggcttccgccatattgattcagcatacttataccaaaatgaggaggaggttggacaggccatttgggagaagatcgctgatggtaccgtcaagagagag

SEQ ID NO: 788192 - DNA, 120 bp, Artificial Sequence
  ENSG00000264006_2 (sequence is synthesized)
gaaatattctacaccatcaagctttgggctactttctttcgggcagaattggttcacccggccctagaaaggtcactgaagaaacttggaccggactatgtagatctcttcattattcat

SEQ ID NO: 788193 - DNA, 120 bp, Artificial Sequence
  ENSG00000264006_3 (sequence is synthesized)
gtaccatttgctatgaagcctgggaaagaattactgccaaaggatgccagtggagagattattttagaaactgtggagctttgtgacacttgggaggccctggagaagtgcaaagaagca

SEQ ID NO: 788194 - DNA, 120 bp, Artificial Sequence
  ENSG00000264006_4 (sequence is synthesized)
gtgtccaatttcaatcacaagctgctggaactcatcctcaacaagccagggctcaagtacaagcccacctgcaaccaggtggaatgtcacccttacctcaaccagagcaaactcctggag

SEQ ID NO: 788195 - DNA, 120 bp, Artificial Sequence
  ENSG00000264006_5 (sequence is synthesized)
ttctgcaagtccaaggacattgttctagttgcctacagtgccctgggatcccaaagagacccacagtgggtggatcccgactgcccacatctcttggaggagccgatcttgaaatccatt

SEQ ID NO: 788196 - DNA, 120 bp, Artificial Sequence
  ENSG00000264006_6 (sequence is synthesized)
gccaagaaacacagtggaagcccaggccaggtcgccctgcgctaccagctgcagcggggagtggtggtgctggccaagagcttctctcaggagagaatcaaagagaacttccagattttt

SEQ ID NO: 788197 - DNA, 120 bp, Artificial Sequence
  ENSG00000264006_7 (sequence is synthesized)
gactttgagttgactccagaggacatgaaagccattgatggcctcaacagaaatctccgatatgacaagttacaatttgctgctaatcacccttattttccattttctgaagaatattga

SEQ ID NO: 788198 - DNA, 120 bp, Artificial Sequence
  ENSG00000264006_8 (sequence is synthesized)
tacaattgtaagtgatgcttgtagattctctcacaggctgttttctgtagtatgcagggaaatggggaacacatcttccctacatcaggaagacaggcccaaattcaggcatggggtgaa

SEQ ID NO: 788199 - DNA, 120 bp, Artificial Sequence
  ENSG00000264006_9 (sequence is synthesized)
cagaccagaggtttcctccaggactcaatctctgacccagcagaaatgtgtctgtaagtgaaactgccaatgtctgcaccattgtgaatccaattcttgaaggcccttactatctgtgcc

SEQ ID NO: 788200 - DNA, 120 bp, Artificial Sequence
  ENSG00000264006_10 (sequence is synthesized)
tgggtctagcactcagggcccactgcctatgagtctagaaggctcagtgtgtaggacctacaaacctataggggcccatcataacgttctctttaatttatattaaaatcagaagaaaaa

SEQ ID NO: 788201 - DNA, 120 bp, Artificial Sequence
  ENSG00000264006_11 (sequence is synthesized)
tgaatacaataataatgcatatgtaataatgactccatccagctctatctttgtgtttacatcatggcaatggaaacacaatttaagtattaatacaggatgggcccatgaaggcaaagg

SEQ ID NO: 788202 - DNA, 120 bp, Artificial Sequence
  ENSG00000264006_12 (sequence is synthesized)
tgcctgtctcctagggaagccttaatgtggtattccctcttcaggataccaactatttctgcaaaaatttatgtctttcttggccctctttacctaccacaactcccatttcctcagcta

SEQ ID NO: 788203 - DNA, 120 bp, Artificial Sequence
  ENSG00000264006_13 (sequence is synthesized)
tataatctcaccatgctgaattgtgaatgaattatgagattaatagaccctcaaatgctagtgactgaggtgtcaatagcctttaccaagataagatcctttggagtttctctggatcct

SEQ ID NO: 788204 - DNA, 120 bp, Artificial Sequence
  ENSG00000264006_14 (sequence is synthesized)
caaggcatgactcttactccagtgtcatctttgtccacctgaagtccacctctggagagcccaacatcccttgactttggtttatttataaacgtgacgttccagttgctcaactactgc

SEQ ID NO: 788205 - DNA, 120 bp, Artificial Sequence
  ENSG00000264006_15 (sequence is synthesized)
aggatctcaggactaaggagagagaaggctaaatagagaggagtttagaggaaagtttagaagcaggggaaatacaattttggttgccagagtaaagactcagtctccaaaaaagatctg

SEQ ID NO: 788206 - DNA, 120 bp, Artificial Sequence
  ENSG00000264006_16 (sequence is synthesized)
aagaatcctcctttatgtaaaaccacaccaagattctgagaggaaacattttcaatgagaaaaatgtgggaagtaacttttctgtacccagaggctaagtataagtctgtgatctgcctt

SEQ ID NO: 788207 - DNA, 120 bp, Artificial Sequence
  ENSG00000264006_17 (sequence is synthesized)
atgagactgtgaatgcattgtcttactcatgtctgtggccctgtgtcaatatgactcctggcacatttaactgcttagaaggtactctttaatgtcacccaattaaaaagaacaaattgt

SEQ ID NO: 788208 - DNA, 120 bp, Artificial Sequence
  ENSG00000264230_0 (sequence is synthesized)
agacgtgtggagtcccagcagaggccaacctgtgtctcttcatctccgtgagaaaggtgcccccgaagtgaaagagatggcctggtggaaagcctggattgaacaggagggtgtcacagt

SEQ ID NO: 788209 - DNA, 120 bp, Artificial Sequence
  ENSG00000264230_1 (sequence is synthesized)
gaagagcagctcccacttcaacccagaccctgatgcagagaccctctacaaagccatgaaggggatcgggaccaacgagcaggctatcatcgatgtgctcaccaagagaagcaacacgca

SEQ ID NO: 788210 - DNA, 120 bp, Artificial Sequence
  ENSG00000264230_2 (sequence is synthesized)
gcggcagcagatcgccaagtccttcaaggctcagttcggcaaggacctcactgagaccttgaagtctgagctcagtggcaagtttgagaggctcattgtggcccttatgtatccgccata

SEQ ID NO: 788211 - DNA, 120 bp, Artificial Sequence
  ENSG00000264230_3 (sequence is synthesized)
cagatacgaagccaaggagctgcatgacgccatgaagggcttaggaaccaaggagggtgtcatcattgagatcctggcctctcggaccaagaaccagctgcgggagataatgaaggcgta

SEQ ID NO: 788212 - DNA, 120 bp, Artificial Sequence
  ENSG00000264230_4 (sequence is synthesized)
tgaggaagactatgggtccagcctggaggaggacatccaagcagacacaagtggctacctggagaggatcctggtgtgcctcctgcagggcagcagggatgatgtgagcagctttgtgga

SEQ ID NO: 788213 - DNA, 120 bp, Artificial Sequence
  ENSG00000264230_5 (sequence is synthesized)
cccggcactggccctccaagacgcacaggatctgtatgcggcaggcgagaagattcgtgggactgatgagatgaaattcatcaccatcctgtgcacgcgcagtgccactcacctgctgag

SEQ ID NO: 788214 - DNA, 120 bp, Artificial Sequence
  ENSG00000264230_6 (sequence is synthesized)
agtgtttgaagagtatgagaaaattgccaacaagagcattgaggacagcatcaagagtgagacccatggctcactggaggaggccatgctcactgtggtgaaatgcacccaaaacctcca

SEQ ID NO: 788215 - DNA, 120 bp, Artificial Sequence
  ENSG00000264230_7 (sequence is synthesized)
caaatgtcacttcaagaagatgtacggcaagaccctcagcagcatgatcatggaagacaccagcggcgactacaagaacgccctgctgagcctggtgggcagcgacccctgaggcacaga

SEQ ID NO: 788216 - DNA, 120 bp, Artificial Sequence
  ENSG00000264230_8 (sequence is synthesized)
agaacaagagcaaagaccatgaagccagagtctccaggactcctcactcaacctcggccatggacgcaggttgggtgtgaggggggtcccagcctttcggtcttctatttccctatttcc

SEQ ID NO: 788217 - DNA, 120 bp, Artificial Sequence
  ENSG00000264230_9 (sequence is synthesized)
agtgctttccagccgggtttctgacccagagggtggaaccggcctggactcctcttcccaacttcctccaggtcatttcccagtgtgagcacaatgccaaccttagtgtttctccagcca

SEQ ID NO: 788218 - DNA, 120 bp, Artificial Sequence
  ENSG00000264230_10 (sequence is synthesized)
gacagatgcctcagcatgaagggcttggggacttgtggatcattccttcctccctgcaggagcttcccaagctggtcacagagtctcctgggcacaggttatacagaccccagccccatt

SEQ ID NO: 788219 - DNA, 120 bp, Artificial Sequence
  ENSG00000264230_11 (sequence is synthesized)
cccatctactgaaacagggtctccacaagaggggccagggaatatgggtttttaacaagcgtcttacaaaacacttctctatcatgcagccggagagctggctgggagcccttttgtttt

SEQ ID NO: 788220 - DNA, 120 bp, Artificial Sequence
  ENSG00000264230_12 (sequence is synthesized)
agaacacacatccttcagcagctgagaaatgaacacgaatccatcccaaccgagatgccattaacattcatctaaaaatgttaggctctaaatggacgaaaaattctctcgccatcttaa

SEQ ID NO: 788221 - DNA, 120 bp, Artificial Sequence
  ENSG00000264230_13 (sequence is synthesized)
taacaaaataaactacaaattcctgacccaaggacactgtgttataagaggcgtgggctcccctggtggctgaccaggtcagctgccctggccttgcacccctctgcatgcagcacagaa

SEQ ID NO: 788222 - DNA, 120 bp, Artificial Sequence
  ENSG00000264230_14 (sequence is synthesized)
gggtgtgaccatgccctcagcaccactcttgtccccactgaacggcaactgagactgggtacctggagattctgaagtgcctttgctgtggttttcaaaataataaagatttgtattcaa

SEQ ID NO: 788223 - DNA, 120 bp, Artificial Sequence
  ENSG00000264230_15 (sequence is synthesized)
gcggcagcagatcgccaagtccttcaaggctcagttcggcaaggcaaggggaaggctggtgggggtggggataggtgagccttggggttgggggtacagcctgggaggcagctccattct

SEQ ID NO: 788224 - DNA, 120 bp, Artificial Sequence
  ENSG00000264230_16 (sequence is synthesized)
ggacgactttcccctagagccagcccactggtagcatgggcacatggaacctgtttgcatgaaaacaattgttctttattgaaattcaaatgtaactggctgccctgtgttttatctggc

SEQ ID NO: 788225 - DNA, 120 bp, Artificial Sequence
  ENSG00000264230_17 (sequence is synthesized)
acttttaggtgtcagagcccgggccgggggctggccttccttgcttcctttcctgcctcttctctcacagcattccttctcatgcacccaacaggccccactggaggtctgtctccctgc

SEQ ID NO: 788226 - DNA, 120 bp, Artificial Sequence
  ENSG00000264230_18 (sequence is synthesized)
ccccaggctatctcgccctgccctctgagcccagaccaccttctcttttccatgccccaggcatgcaggcctggctttgctctgttctggggcgtgggcatgctttcctcagtcgagctg

SEQ ID NO: 788227 - DNA, 120 bp, Artificial Sequence
  ENSG00000264230_19 (sequence is synthesized)
cttgcacccacacctcgtcccttctgccacctgggaattctaagagcctggagtaagcatgccaggccctttgtttctcctcccacctgcactccacccctaggacaaagcctgacattt

SEQ ID NO: 788228 - DNA, 120 bp, Artificial Sequence
  ENSG00000264230_20 (sequence is synthesized)
gggggtacacagtaaacacaggattaaatatgtgcacagccatggttgcctcaagcctctagtgactcatatcattagtttggagatgtaacgaaggaagatcagctcaaatattctctt

SEQ ID NO: 788229 - DNA, 120 bp, Artificial Sequence
  ENSG00000264230_21 (sequence is synthesized)
ctgggtggggcctgggagccacaggagacgcccaaagccaggcagagcccgggggcgagggggcggcaggcaggtgtagcgctgccctgggagggcttgcacccccacacccaagtgagc

SEQ ID NO: 788230 - DNA, 120 bp, Artificial Sequence
  ENSG00000264230_22 (sequence is synthesized)
caccaagcagctgccttcgccttcccctcctccgccctcaccagtgtgtcaccctgggggcagcagggtcacttgtgctgtaaccctgcagggaccaacgagcaggctatcatcgatgtg

SEQ ID NO: 788231 - DNA, 120 bp, Artificial Sequence
  ENSG00000264343_0 (sequence is synthesized)
gctgcacacccgagaaagtttcagccaaacttcgggcggcggctgaggcggcggccgaggagcggcggactcggggcgcggggagtcgaggcatttgcgctgggcttcggagcgtagcgc

SEQ ID NO: 788232 - DNA, 120 bp, Artificial Sequence
  ENSG00000264343_1 (sequence is synthesized)
cagggcctgagcctttgaagcaggaggaggggaggagagagtggggctcctctatcgggaccccctccccatgtggatctgcccaggcggccgcggcggcggcggcggaggaggcgaccg

SEQ ID NO: 788233 - DNA, 120 bp, Artificial Sequence
  ENSG00000264343_2 (sequence is synthesized)
agaagatacccgccctgcgccccgctctgctgtgggcgctgctggcgctctggctgtgctgcgcgacccccgcgcatgcattgcagtgtcgagatggctatgaaccctgtgtaaatgaag

SEQ ID NO: 788234 - DNA, 120 bp, Artificial Sequence
  ENSG00000264343_3 (sequence is synthesized)
gaatgtgtgttacctaccacaatggcacaggatactgcaaatgtccagaaggcttcttgggggaatattgtcaacatcgagacccctgtgagaagaaccgctgccagaatggtgggactt

SEQ ID NO: 788235 - DNA, 120 bp, Artificial Sequence
  ENSG00000264343_4 (sequence is synthesized)
gtgtggcccaggccatgctggggaaagccacgtgccgatgtgcctcagggtttacaggagaggactgccagtactcgacatctcatccatgctttgtgtctcgaccttgcctgaatggcg

SEQ ID NO: 788236 - DNA, 120 bp, Artificial Sequence
  ENSG00000264343_5 (sequence is synthesized)
gcacatgccatatgctcagccgggatacctatgagtgcacctgtcaagtcgggtttacaggtaaggagtgccaatggaccgatgcctgcctgtctcatccctgtgcaaatggaagtacct

SEQ ID NO: 788237 - DNA, 120 bp, Artificial Sequence
  ENSG00000264343_6 (sequence is synthesized)
gtaccactgtggccaaccagttctcctgcaaatgcctcacaggcttcacagggcagaagtgtgagactgatgtcaatgagtgtgacattccaggacactgccagcatggtggcacctgcc

SEQ ID NO: 788238 - DNA, 120 bp, Artificial Sequence
  ENSG00000264343_7 (sequence is synthesized)
ccctgtgcaccctcgccttgtgtcaatggaggcacctgtcggcagactggtgacttcacttttgagtgcaactgccttccagaaacagtgagaagaggaacagagctctgggaaagagac

SEQ ID NO: 788239 - DNA, 120 bp, Artificial Sequence
  ENSG00000264343_8 (sequence is synthesized)
agggaagtctggaatggaaaagaacacgatgagaattagacactggaaaatatgtatgtgtggttaataaagtgctttaaactgaattgacattaacagtgggtgatcaactttactatg

SEQ ID NO: 788240 - DNA, 120 bp, Artificial Sequence
  ENSG00000264343_9 (sequence is synthesized)
tgcttgtgcttttgcttttgatggagtaattcattgttttcttatccacctaaatgcacccagctgcccttgattttctctgggctactggccttcacaaccctctcccatgtaccctct

SEQ ID NO: 788241 - DNA, 120 bp, Artificial Sequence
  ENSG00000264343_10 (sequence is synthesized)
ctgactttggggtaaccctcccctaacttaaagctagagaattctgaaactgaggaggggatcctctgttaatcagtgagcactttttgatgagctgatagatgatatatgagagactat

SEQ ID NO: 788242 - DNA, 120 bp, Artificial Sequence
  ENSG00000264343_11 (sequence is synthesized)
gcgtggcacaatactttgttacactcttcactgatacaagtgttctagagtgtacacacaacccaaagatagaaataaaaagaggagcagtgtcggggagcttggggcctggtgttccat

SEQ ID NO: 788243 - DNA, 120 bp, Artificial Sequence
  ENSG00000264343_12 (sequence is synthesized)
ggagagggagaaaggaacaagcttgaccaattcattcaactccttataaaaatgatgaggaggctgaaaaccaagaattttgattgggaacagaatacaagcagctgaatcagatgaatt

SEQ ID NO: 788244 - DNA, 120 bp, Artificial Sequence
  ENSG00000264343_13 (sequence is synthesized)
actaagcaacaaagatcctgtttttatacaaatatccttagtacaaaaacaaaagaaggaaaactgtaggggggagtaatgtgctaagtaagcagaattgcctcaaaaagaagttgttct

SEQ ID NO: 788245 - DNA, 120 bp, Artificial Sequence
  ENSG00000264343_14 (sequence is synthesized)
agttactctttcagagtgggaatcttagattctggtattgtggatatggttcacatataatgggattgtgtgttttattttggagggattaaaggtcatagtttggtcctcagtataaaa

SEQ ID NO: 788246 - DNA, 120 bp, Artificial Sequence
  ENSG00000264343_15 (sequence is synthesized)
agcaacatggccaatctttcctaagctgctcagcttacaagaaaaggaatcatactgctaagaattcaaacttcagcagtcatagggagccttgggaggaccccgaatcactgatggaat

SEQ ID NO: 788247 - DNA, 120 bp, Artificial Sequence
  ENSG00000264343_16 (sequence is synthesized)
tgcgcagtgcatggagatggctcagcaggatgagggtaaatgcaggggcaagtccaggccatactgagagacaatgagtggcgctgatgaggacaaagataaaatcaaaagtttgtgctt

SEQ ID NO: 788248 - DNA, 120 bp, Artificial Sequence
  ENSG00000264343_17 (sequence is synthesized)
catcttcaaaaactcaagctgataacaaacttggcctgatgagaaataataagtatttttctatttacatgagaatttaatctcaaaacagaaatcagaaaaatatgaagtccagggcat

SEQ ID NO: 788249 - DNA, 120 bp, Artificial Sequence
  ENSG00000264343_18 (sequence is synthesized)
aaaacctaaaactattgctcatatttattctttctaaatagagcaaagtgtacaatcttctccataagacatacattgtggttataaaaaggcaaaagtcttagtgagaatcattggtat

SEQ ID NO: 788250 - DNA, 120 bp, Artificial Sequence
  ENSG00000264343_19 (sequence is synthesized)
tccatagaagagtgaattaaacacagccaagggaagacccacgtctcatacttctcttgtatattccaaagttccagggaaattccaggtgatagaggttatttcccatactgttaaagc

SEQ ID NO: 788251 - DNA, 120 bp, Artificial Sequence
  ENSG00000264343_20 (sequence is synthesized)
aaggtttcagacacttctgaattttggtcccagtactctagaagggcacacctctgtcctggaaaataatacaagaatgaatactcttcccgtgacccattctggtcattcttccagcat

SEQ ID NO: 788252 - DNA, 120 bp, Artificial Sequence
  ENSG00000264343_21 (sequence is synthesized)
cacaaaaaccaaaaaatggaaatatggccaaatacgtgattagctgtccctcatcttcaggtttcttatctgttacttatagataatagcattaccttaaggattatgatgaagatacaa

SEQ ID NO: 788253 - DNA, 120 bp, Artificial Sequence
  ENSG00000264343_22 (sequence is synthesized)
tgtccaaatataaacacagttttgagcaaaatgccttgtacgaattggtcaatgaataattactaaatatgtgaatatttactggattgtatggatcctatgaataattactgaataatt

SEQ ID NO: 788254 - DNA, 120 bp, Artificial Sequence
  ENSG00000264343_23 (sequence is synthesized)
ggtgtcactggaagatggtgcgggctgcagagagggatgctttcaaatgggattaaccagtcctccttccttcacttccacatgaatgctgggcagcccagggtcaacccactgcaccct

SEQ ID NO: 788255 - DNA, 80 bp, Artificial Sequence
  ENSG00000264364_0 (sequence is synthesized)
gcgggcgggcggcgtgaggcggagcgcgggcggccggcgaaactccaagggcggaccgcggcagggagcgatcggcctcg

SEQ ID NO: 788256 - DNA, 120 bp, Artificial Sequence
  ENSG00000264364_1 (sequence is synthesized)
cggcctcgggctgcgggagccggagaccgcggcggcggcggctgctgcagctgcaggaggagcccagggaacaccgcccctgcctgtgctctgcctcgggccatcgctcctccccagggc

SEQ ID NO: 788257 - DNA, 120 bp, Artificial Sequence
  ENSG00000264364_2 (sequence is synthesized)
ccagtgcggactcgcctccgtgaagtgtcacaccatgtctgaccggaaggcagtgatcaagaacgcagacatgtctgaggacatgcaacaggatgccgttgactgcgccacgcaggccat

SEQ ID NO: 788258 - DNA, 120 bp, Artificial Sequence
  ENSG00000264364_3 (sequence is synthesized)
ggagaagtacaatatagagaaggacattgctgcctatatcaagaaggaatttgacaagaaatataaccctacctggcattgtatcgtgggccgaaattttggcagctacgtcacacacga

SEQ ID NO: 788259 - DNA, 120 bp, Artificial Sequence
  ENSG00000264364_4 (sequence is synthesized)
gacaaagcacttcatctatttttacttgggtcaagttgcaatcctcctcttcaagtcaggctaggtggccatggtgaaggtgtcagtggcggcggcagcgatggcaagcaggcggcgttg

SEQ ID NO: 788260 - DNA, 120 bp, Artificial Sequence
  ENSG00000264364_5 (sequence is synthesized)
ctgggactgttttgcactggagccagcatcaggatgtcctctccaatggctgtgctactgcatggactgtatactcgatttcatgtgtatgtcgcagtaaacaaaaccaaacctctttct

SEQ ID NO: 788261 - DNA, 120 bp, Artificial Sequence
  ENSG00000264364_6 (sequence is synthesized)
gtttagttgcctgggggaagaaggctgctttatgtttatttttcaagactttaaaaatattttttggttgtattgcactaggaaatctctcccacctctcccttttctctttctttccct

SEQ ID NO: 788262 - DNA, 120 bp, Artificial Sequence
  ENSG00000264364_7 (sequence is synthesized)
atacaaaataaaaggcccaccatagagactaggcggccgaaagactaggagggctgaggaaaagaaataggtctctggaggtggaactaaaactgtgcagctgcctcttcctggcggtgg

SEQ ID NO: 788263 - DNA, 120 bp, Artificial Sequence
  ENSG00000264364_8 (sequence is synthesized)
atgctgctttgggagggccagggaggctgcagggggacagtgttgggattgtcaaggaaaaaggggtaggaaggaaggtggagggattgatctagtaccagggagaatattccactgaac

SEQ ID NO: 788264 - DNA, 120 bp, Artificial Sequence
  ENSG00000264364_9 (sequence is synthesized)
tgtgattctatggcttggggcggagggtggggtggggatgccttctttaggggccctgagatgtgtttgtctgtggtgtgtgggagtggggagcagatttgtcttgctgtctttgtcaga

SEQ ID NO: 788265 - DNA, 120 bp, Artificial Sequence
  ENSG00000264364_10 (sequence is synthesized)
atttctaagtaagggctgtgtctttgtggattaccttcttttgttcttcctgccagagatcatgacaggaggatgctggggtaggattagcttgaatcttttttttctttacatttttct

SEQ ID NO: 788266 - DNA, 120 bp, Artificial Sequence
  ENSG00000264364_11 (sequence is synthesized)
cctgtctgctccctgcttagccctcagtttcctcattcctctggagttctcttagagcagcccctgttgttagttggctggcaagggaatttctggtgactgtagttccttagttaggtc

SEQ ID NO: 788267 - DNA, 120 bp, Artificial Sequence
  ENSG00000264364_12 (sequence is synthesized)
ttagcaatcaaaccaaattgatgtctcccttgactcttctgtgtatatgtgtgaatatgtgtgtatatgtgtgtgtatgtgtgtgtggggtttggggtagaagggagggagggggcagga

SEQ ID NO: 788268 - DNA, 120 bp, Artificial Sequence
  ENSG00000264364_13 (sequence is synthesized)
cagtgtggaatctctagggtgtatgggtaggtagggggcacagttagttctaagtgggcttttatgctaaaagcctctggggatatctgttttgaaaataaagataggtgtcccctcctt

SEQ ID NO: 788269 - DNA, 120 bp, Artificial Sequence
  ENSG00000264364_14 (sequence is synthesized)
gctgtcatctagcccagacactctgcttgctctctggctgtctgctccctgggaaggctttaggaggaccacccaggacaggatgaccatgctgccatctgctctggagctgggtctcag

SEQ ID NO: 788270 - DNA, 120 bp, Artificial Sequence
  ENSG00000264364_15 (sequence is synthesized)
tgcagagggacagtgactgtggatggttgcagtctctggtgggaggtgaggatagaagtgataaagagctaagaggagcttctgggagccttggaggaggtcagtcttgcagtggtgaag

SEQ ID NO: 788271 - DNA, 120 bp, Artificial Sequence
  ENSG00000264364_16 (sequence is synthesized)
ccaggacataggagatggagcagggctgtgagaggaggagattctgaggaggatgcaggggaaatcttgtctgttaatgaaataggagtggggtggggtttggggtggggtggtcattgc

SEQ ID NO: 788272 - DNA, 120 bp, Artificial Sequence
  ENSG00000264364_17 (sequence is synthesized)
cgtttgagctgctgattttcatgagtcgccttcaaaactctcgtgtagggttgacaatgtgggggggtgggggatccagcttattcttttattttcaagtccattcttggggctggtggg

SEQ ID NO: 788273 - DNA, 120 bp, Artificial Sequence
  ENSG00000264364_18 (sequence is synthesized)
gaggcaggagaatacccctccctaagcccttagtgtgtgccgagcttgctttgtgatgttggcaggggaggggagacctgggtggtgactgagttccctttatcaaacccttcagtgggc

SEQ ID NO: 788274 - DNA, 120 bp, Artificial Sequence
  ENSG00000264364_19 (sequence is synthesized)
acaaaattgagtgcttgattttaggttttatttttttatgaatgtccaaatctgtgtttccccctgccctcccagactgtgtggccagttgaaagtgtctggtttgtgttcatctctccc

SEQ ID NO: 788275 - DNA, 120 bp, Artificial Sequence
  ENSG00000264364_20 (sequence is synthesized)
tcatttctggagcagggcctgagaccctgccacatctcctatgctctgcatccacgcctcttttggacattaaaggttgattgatgcacctctgcactgtttgggtctctttggggatga

SEQ ID NO: 788276 - DNA, 120 bp, Artificial Sequence
  ENSG00000264364_21 (sequence is synthesized)
ggggttggcatggtggcagtggtgccacacagtgggtgagggtggagagtctccagggtggaatagaatggggactgaagggaagaccagccactagatactgattggcctgtagcagca

SEQ ID NO: 788277 - DNA, 120 bp, Artificial Sequence
  ENSG00000264364_22 (sequence is synthesized)
cttatttgtgcctaggcttatgccccttaagtagaggaaaactaaccagcagcactcacccttaagggctcctgggttctgccttccttggtggtgatggccaggtgaatcatattttgt

SEQ ID NO: 788278 - DNA, 120 bp, Artificial Sequence
  ENSG00000264364_23 (sequence is synthesized)
gtctttgggatagtaactgctaccttcccagctgccgtcatggacctgcctgagctttgctgcttcaacttttgcccaaagctcttatctttcatactcctcccttctcggctttcctga

SEQ ID NO: 788279 - DNA, 120 bp, Artificial Sequence
  ENSG00000264364_24 (sequence is synthesized)
acctggagactatttagcaaagggtctggccactcagaaatggaaagctggggatatttagaaagatggcacctcttttggtggaacctaagtgattctctgaatcctctgttgcccaga

SEQ ID NO: 788280 - DNA, 120 bp, Artificial Sequence
  ENSG00000264364_25 (sequence is synthesized)
cacacaactcgagaaatcagcagtgccaagacttctgagagtgtctgcccacccctgactccaccatcgtgtgactgcaattctcttggaggtgttagggagccagaggtgctttgccct

SEQ ID NO: 788281 - DNA, 120 bp, Artificial Sequence
  ENSG00000264364_26 (sequence is synthesized)
ctttgtgttactatttctttactcaaaaatatttaagagttcttgtatgcttgggcctaggatgctgttcacagaggagaatgagacaagtaagttctaggcttctatgacatacacatt

SEQ ID NO: 788282 - DNA, 120 bp, Artificial Sequence
  ENSG00000264364_27 (sequence is synthesized)
cttatgtgtagagcagacatacacacactgatcaactttttccaatagtgataaatgtgttatcaaggaaatgaactgggcaatgagctattgagtgttggaggtaggtagatagggttc

SEQ ID NO: 788283 - DNA, 120 bp, Artificial Sequence
  ENSG00000264364_28 (sequence is synthesized)
tagagccccaacttctgttactgctttagctgtcgtgagtaatttgacagagctggagctttgggagggagagtgaggccacagttcacatttcatcagggatgagtgtctccagggcca

SEQ ID NO: 788284 - DNA, 120 bp, Artificial Sequence
  ENSG00000264364_29 (sequence is synthesized)
aagctcatctactttcttccctgatgaaagaggcagtccaggtggcatctgtgaacaacacattcctgcacaggtaggtgcacagtgctcatctggaagactaatcctgcagggcttcct

SEQ ID NO: 788285 - DNA, 120 bp, Artificial Sequence
  ENSG00000264364_30 (sequence is synthesized)
ggaggagatgagcctccacttttcggggcccaggatgggaaagtatgtgagcatgtgtcactgaagggactgtggaaagcagatggaaattgtggaattctctcggaacaatgcagccat

SEQ ID NO: 788286 - DNA, 120 bp, Artificial Sequence
  ENSG00000264364_31 (sequence is synthesized)
tattagaactgtgcccataggagcatcaatatccctgctccttgtatcctgttctccagtcttctggggaccccctttgactgaacccaaccaaatggcagatgacaaggcagacccagg

SEQ ID NO: 788287 - DNA, 120 bp, Artificial Sequence
  ENSG00000264364_32 (sequence is synthesized)
atgcagtctgtagggttcagtccccctccccactgggaacagcaggaaagggcaaggtggtgacaatctaagggaggcaaatggataataaccagcatggtagggaatcttctttgttgc

SEQ ID NO: 788288 - DNA, 120 bp, Artificial Sequence
  ENSG00000264364_33 (sequence is synthesized)
tgtggcactgtcgatctctgttccctgaactctagtgtcctccagactagatttaaggtgtggttccccgctaaattattctctcacctcctttcagtctttgctcaaacatccttttat

SEQ ID NO: 788289 - DNA, 120 bp, Artificial Sequence
  ENSG00000264364_34 (sequence is synthesized)
cagagaggctttctgacatcctgtgcaagatagcacctctcccccatcgctgttatccttacccagtttaattccacgtagcatctgccaacgcttgacatatttgttttttgtttactt

SEQ ID NO: 788290 - DNA, 120 bp, Artificial Sequence
  ENSG00000264364_35 (sequence is synthesized)
tctggcctgtgacaactagaatataagctctgtgagagcatttttctcttaactgcttatcttcaagtaaacagaacagtgcctgtcctgtaggaagtgtttgatacatacagattgctc

SEQ ID NO: 788291 - DNA, 120 bp, Artificial Sequence
  ENSG00000264364_36 (sequence is synthesized)
aaatgaaaaaagaagggtgcgagcaagcctggacaggcctggtgccccagggcagccttgccttttctgaagagaatggctgccttaggcacggctctccttgctgcccaagccttgcca

SEQ ID NO: 788292 - DNA, 120 bp, Artificial Sequence
  ENSG00000264364_37 (sequence is synthesized)
ccttgaaaggcgtgagagggtcactcccaggtgtattcaagcaagagtgcctgagccactcttgcttggcagtatgggaggatgaaatagtgtgttcataaagtgcattttatttttaaa

SEQ ID NO: 788293 - DNA, 120 bp, Artificial Sequence
  ENSG00000264364_38 (sequence is synthesized)
gcatttcagtttatgttgctgaaacctgagagcgcccccctgagctagactcagtaatcattagacacatttttggataagcaaactgaatcagagaaggtgagtggcaaagcccatgta

SEQ ID NO: 788294 - DNA, 120 bp, Artificial Sequence
  ENSG00000264364_39 (sequence is synthesized)
gctggtggcattactagaacttagcactgtgatgcacaaaggcttaactgggtttggcagcaagggtctcatggatactctttaagatgtaggcccagatctcttagtagtgaatccctg

SEQ ID NO: 788295 - DNA, 120 bp, Artificial Sequence
  ENSG00000264364_40 (sequence is synthesized)
atgttccctctcttggggctctggtttagcaaggacagcgaggatactttcctctctccctcctccttactcctctctactaaggattaaggagccacctcttcctccttaaggcctttg

SEQ ID NO: 788296 - DNA, 120 bp, Artificial Sequence
  ENSG00000264364_41 (sequence is synthesized)
ggagagatgggtctcctggtattagaaaggagagcagacgcctagagttctgacctcttgggcctcccctaaacaaaaagcatagccccttcactaccctagtaacaagtatgacctgtt

SEQ ID NO: 788297 - DNA, 120 bp, Artificial Sequence
  ENSG00000264364_42 (sequence is synthesized)
gcctgttgaggtcaggtgtacctgtgtgtctctctctgtgatgtatgtgggcttggtgtccacatcaatgtgcgtgaatactcctacccacagactgctactgtgccaatatagaggttc

SEQ ID NO: 788298 - DNA, 120 bp, Artificial Sequence
  ENSG00000264364_43 (sequence is synthesized)
ataagaaagataaaagagaaccagcagaaccccaggttctgcctctccttcctccctttgcccagataaaggtgtacagtgtttgtggtgaggctgctggacactgctgttttgggcttt

SEQ ID NO: 788299 - DNA, 120 bp, Artificial Sequence
  ENSG00000264364_44 (sequence is synthesized)
ctagagagaatgcaaacatgcaaaaacagtgtggtagtgtaggcagaacaagatctagaatcagaagacctggagtcgaatctcagctccaacacccactggatgaacgtggacaagctg

SEQ ID NO: 788300 - DNA, 120 bp, Artificial Sequence
  ENSG00000264364_45 (sequence is synthesized)
cttgatctctcagatcctcgatttcttcatctgtaagatggaaacaatatgtgtcttttctaaggggaaagatcaaatgacatcatgtatgtgaaaatgcttagaaatgggtgatgatga

SEQ ID NO: 788301 - DNA, 120 bp, Artificial Sequence
  ENSG00000264364_46 (sequence is synthesized)
tgatgatgatactgattattagggtatctaataaagttggggaaagaacaaaatccccccctcacaccctattgcaccaccagccttctccctccctgctcaattatacccatgttatag

SEQ ID NO: 788302 - DNA, 120 bp, Artificial Sequence
  ENSG00000264364_47 (sequence is synthesized)
ggaaggaaatagggaagaaacttgtctaaggtcacatggatgttcgcaacaattgggatgcagaacttgatctgactcccaggccaggtttgattttgatttgcagtggcagagaggact

SEQ ID NO: 788303 - DNA, 120 bp, Artificial Sequence
  ENSG00000264364_48 (sequence is synthesized)
aattttttactaggttctgagccctgtactgaactctggattgccctgtacttggtggtggtatacagttcagcagtttttagcatatacacgaatttgtgcagccataaccactatcta

SEQ ID NO: 788304 - DNA, 120 bp, Artificial Sequence
  ENSG00000264364_49 (sequence is synthesized)
attctagaacatttttatcacccccaaaagaaatcatgtacccatttgcagtcacttgccattccctcttctccccagccctgggaaaccactgacctaccttatatctctatgaatttg

SEQ ID NO: 788305 - DNA, 120 bp, Artificial Sequence
  ENSG00000264364_50 (sequence is synthesized)
cctaatctggacatttcatataaatgcaattgtacatgtggccttttgtttctggcttctttcacttagcatgttttcaaggttcatttgtgctgtagcatttatcagtactttgttcct

SEQ ID NO: 788306 - DNA, 120 bp, Artificial Sequence
  ENSG00000264364_51 (sequence is synthesized)
ttttctagctgagtaacgtgtgggtatatcacattttgtttattcatctgttgagggatgtttgggttgtttctactttttgactattgtgattagtgctgctatgaacattgatgtaca

SEQ ID NO: 788307 - DNA, 120 bp, Artificial Sequence
  ENSG00000264364_52 (sequence is synthesized)
gatttttgtgtagatatgttttcaattatcttggggcatcttttatttttaatgtcagttttctatttttaaaaaatctagacaggttggcaaatcatttctgtaaagagtcagtaaata

SEQ ID NO: 788308 - DNA, 120 bp, Artificial Sequence
  ENSG00000264364_53 (sequence is synthesized)
ttttagcctttgtggtccatgacattaggtatacagattacaatttctgaactctgccattccagtgtgagagcagccatagataatatgtaaacaaatgagcatggctatgttccaata

SEQ ID NO: 788309 - DNA, 120 bp, Artificial Sequence
  ENSG00000264364_54 (sequence is synthesized)
aaacttttaaaaagcaggggacagattgggcctgtggaccatagtataccaacccttaatctaaatgacacattcacatgatacattattctaaaggcacaaaaagcaaaaattctccct

SEQ ID NO: 788310 - DNA, 120 bp, Artificial Sequence
  ENSG00000264364_55 (sequence is synthesized)
cccacctctgtcttccagctacggggttaccttccttgaagcagttaatgttatgagattttgtgtctccttttagacacagttaataatgagcattaaagtggctatatactattccaa

SEQ ID NO: 788311 - DNA, 120 bp, Artificial Sequence
  ENSG00000264424_0 (sequence is synthesized)
atccttcctcaaaattcttgaagtagttgtctgctttgagcctgccaccttcttcatctgataatacaagaggtatacctagtccagtactgccatcaataacctgcagccatgagttct

SEQ ID NO: 788312 - DNA, 120 bp, Artificial Sequence
  ENSG00000264424_1 (sequence is synthesized)
gactctgagatggccatttttggggaggctgctcctttcctccgaaagtctgaaaaggagcgaattgaagctcagaacaagccttttgatgccaagacatcagtctttgtggtggaccct

SEQ ID NO: 788313 - DNA, 120 bp, Artificial Sequence
  ENSG00000264424_2 (sequence is synthesized)
aaggagtcctacgtgaaagcaatagtgcagagcagggaaggggggaaggtgacagccaagaccgaagctggagctactgtaactgtgaaagaagaccaagtcttctccatgaaccctccc

SEQ ID NO: 788314 - DNA, 120 bp, Artificial Sequence
  ENSG00000264424_3 (sequence is synthesized)
aaatatgacaagatcgaggacatggccatgatgactcacctgcatgagcctgctgtgctgtataacctcaaagagcgttacgcagcctggatgatctacacctactcgggcctcttctgt

SEQ ID NO: 788315 - DNA, 120 bp, Artificial Sequence
  ENSG00000264424_4 (sequence is synthesized)
gtcaccgtcaacccctacaagtggctgccggtgtacaaccctgaggtggtgacagcctaccgaggcaaaaagcgccaggaggccccaccccatatcttctccatctctgacaatgcctat

SEQ ID NO: 788316 - DNA, 120 bp, Artificial Sequence
  ENSG00000264424_5 (sequence is synthesized)
cagttcatgctaactgatcgtgaaaaccagtcaatcttgattactggagaatctggtgcagggaagactgtgaacacgaagcgtgtcatccagtactttgcaacaattgcagttactgga

SEQ ID NO: 788317 - DNA, 120 bp, Artificial Sequence
  ENSG00000264424_6 (sequence is synthesized)
gagaagaaaaaagaggaacctgcctctggcaaaatgcaggggacccttgaagatcaaatcatcagtgctaaccccctactggaagccttcggcaatgccaagaccgtgaggaatgacaac

SEQ ID NO: 788318 - DNA, 120 bp, Artificial Sequence
  ENSG00000264424_7 (sequence is synthesized)
tcctctcgctttggtaaattcatcaggatccattttggtgccacaggcaaactggcttctgcagatattgaaacatatctgctagagaagtcccgagttacttttcagctaaaggctgaa

SEQ ID NO: 788319 - DNA, 120 bp, Artificial Sequence
  ENSG00000264424_8 (sequence is synthesized)
agaagctaccacatattttatcaaatcctgtccaataagaaaccagagctcattgaaatgcttctgatcaccaccaacccatatgacttcgcatttgtcagccaaggggaaattactgtg

SEQ ID NO: 788320 - DNA, 120 bp, Artificial Sequence
  ENSG00000264424_9 (sequence is synthesized)
cccagcattgatgaccaggaagagctgatggccacagatagtgctgtggacatcctgggtttcactgctgatgaaaaggtggccatttacaagctcactggagccgtgatgcattatggg

SEQ ID NO: 788321 - DNA, 120 bp, Artificial Sequence
  ENSG00000264424_10 (sequence is synthesized)
aacatgaaattcaagcaaaagcaaagggaagagcaggcagagccagatggcacggaagttgctgacaaagctgcttatctgacaagtctgaactctgctgacctgctcaaatctctctgc

SEQ ID NO: 788322 - DNA, 120 bp, Artificial Sequence
  ENSG00000264424_11 (sequence is synthesized)
tatcccagagtcaaggtcggcaatgagttcgtaaccaaaggccagactgtgcagcaggtgtacaatgcagtgggtgctctggccaaagccatctacgagaagatgttcctgtggatggtc

SEQ ID NO: 788323 - DNA, 120 bp, Artificial Sequence
  ENSG00000264424_12 (sequence is synthesized)
acccgcatcaaccagcagctggacaccaagcagcccaggcagtacttcatcggggtcttggacattgctggctttgagatctttgatttcaacagcctggagcagctgtgcatcaacttc

SEQ ID NO: 788324 - DNA, 120 bp, Artificial Sequence
  ENSG00000264424_13 (sequence is synthesized)
accaacgagaaactgcaacagtttttcaaccaccacatgttcgtgctggagcaggaagagtacaagaaggaaggcatcgagtgggagttcattgacttcgggatggacctggctgcctgc

SEQ ID NO: 788325 - DNA, 120 bp, Artificial Sequence
  ENSG00000264424_14 (sequence is synthesized)
atcgagctcatcgagaagcctatgggcatcttctccatcctagaagaggagtgcatgttccccaaggcaacagacacctccttcaagaacaagctgtatgaacaacatcttggaaaatcc

SEQ ID NO: 788326 - DNA, 120 bp, Artificial Sequence
  ENSG00000264424_15 (sequence is synthesized)
aacaacttccagaagcccaagcctgccaaaggcaagcctgaggctcacttctcactggtgcactatgccggcaccgtggactacaacatcgccggctggctggacaaaaacaaggacccc

SEQ ID NO: 788327 - DNA, 120 bp, Artificial Sequence
  ENSG00000264424_16 (sequence is synthesized)
ctgaatgagactgtggtggggctgtaccagaagtctgcaatgaagactctggctttcctcttctctggggcacaaactgctgaagcagagggtggtggtggaaagaaaggtggcaaaaag

SEQ ID NO: 788328 - DNA, 120 bp, Artificial Sequence
  ENSG00000264424_17 (sequence is synthesized)
aagggttcttctttccagacagtgtcagctcttttcagggagaatttgaataagctgatgaccaacttgaggagcactcacccccactttgtgcggtgcatcatccccaatgaaactaaa

SEQ ID NO: 788329 - DNA, 120 bp, Artificial Sequence
  ENSG00000264424_18 (sequence is synthesized)
actcctggtgccatggagcatgagcttgtcctgcatcagctgaggtgtaacggtgtgctggaaggcatccgcatctgcaggaaaggcttcccaagcagaatcctttatgcagacttcaaa

SEQ ID NO: 788330 - DNA, 120 bp, Artificial Sequence
  ENSG00000264424_19 (sequence is synthesized)
cagagatacaaggttctaaatgcgagtgctatcccagagggtcagttcattgacagcaagaaggcttctgagaaacttctagggtctattgaaattgaccacacccagtacaaattcggt

SEQ ID NO: 788331 - DNA, 120 bp, Artificial Sequence
  ENSG00000264424_20 (sequence is synthesized)
cataccaaggttttcttcaaagctggcctgctgggaactctagaggaaatgcgagatgaaaagctagctcaactcatcacgcgcactcaagccatatgcagagggttcctgatgagagtg

SEQ ID NO: 788332 - DNA, 120 bp, Artificial Sequence
  ENSG00000264424_21 (sequence is synthesized)
gagttcagaaagatgatggagaggagagagtccatcttctgcattcagtacaacatccgtgctttcatgaatgtgaagcactggccctggatgaagctgtatttcaagatcaagcccctc

SEQ ID NO: 788333 - DNA, 120 bp, Artificial Sequence
  ENSG00000264424_22 (sequence is synthesized)
ctcaagagtgcagagacagagaaggagatggccaacatgaaggaagaatttgagaaaaccaaagaagagctggctaagacagaggcaaaaaggaaagaactagaagaaaagatggtgacg

SEQ ID NO: 788334 - DNA, 120 bp, Artificial Sequence
  ENSG00000264424_23 (sequence is synthesized)
ctaatgcaagagaaaaatgacttacaactccaagttcaagctgaagcagatgccttggctgatgcagaggaaagatgtgatcagttgattaaaaccaaaatccaacttgaggccaaaatc

SEQ ID NO: 788335 - DNA, 120 bp, Artificial Sequence
  ENSG00000264424_24 (sequence is synthesized)
aaagaggtaactgaaagagctgaggatgaggaagagatcaatgctgagctgacagccaagaagaggaaactggaggatgaatgttcagagctcaagaaagacattgatgaccttgagctg

SEQ ID NO: 788336 - DNA, 120 bp, Artificial Sequence
  ENSG00000264424_25 (sequence is synthesized)
agaaggagaaacatgccacagagaacaaggtgaaaaacctcacagaagagatggcaggtctggatgaaaccattgctaagctgaccaaggagaagaaggctctccaggaggcccaccagc

SEQ ID NO: 788337 - DNA, 120 bp, Artificial Sequence
  ENSG00000264424_26 (sequence is synthesized)
agaccctggatgacctgcagatggaggaggacaaagtcaacaccctgaccaaagctaaaaccaagctagaacagcaagtggacgatcttgaaggatctctggaacaagaaaagaaacttt

SEQ ID NO: 788338 - DNA, 120 bp, Artificial Sequence
  ENSG00000264424_27 (sequence is synthesized)
gcatggacttagaaagagccaagagaaaactggagggtgacctaaaattggcccaagaatccacaatggatacagaaaatgacaaacagcaacttaatgagaaactcaaaaagaaagagt

SEQ ID NO: 788339 - DNA, 120 bp, Artificial Sequence
  ENSG00000264424_28 (sequence is synthesized)
ttgaaatgagcaatctgcaaggcaagattgaagatgaacaagcccttgcaatacagctacaaaagaagatcaaagaattacaggcccgcattgaggagctggaggaggaaatcgaggcag

SEQ ID NO: 788340 - DNA, 120 bp, Artificial Sequence
  ENSG00000264424_29 (sequence is synthesized)
agcgggcctcccgggccaaagcagagaagcagcgctctgacctctcccgggagctggaggagatcagtgagaggctggaagaagccggtggggccacttcagcccagattgagatgaaca

SEQ ID NO: 788341 - DNA, 120 bp, Artificial Sequence
  ENSG00000264424_30 (sequence is synthesized)
agaagcgggaggctgagttccagaaaatgcgcagggacctggaagagtccaccctgcagcacgaagccacggcagctgctcttcggaagaagcacgcagatagtgtggctgagcttgggg

SEQ ID NO: 788342 - DNA, 120 bp, Artificial Sequence
  ENSG00000264424_31 (sequence is synthesized)
agcagattgacagccttcagcgggtcaagcagaagctggagaaggaaaagagtgagctgaagatggagatcaatgaccttgctagtaacatggagactgtctccaaagccaaggcaaact

SEQ ID NO: 788343 - DNA, 120 bp, Artificial Sequence
  ENSG00000264424_32 (sequence is synthesized)
ttgagaaaatgtgccgcaccctagaggaccagcttagtgaaataaaaacaaaggaagaagagcaacaacgcttaataaatgagttgtcagcccagaaggcacgtttacacacagaatcag

SEQ ID NO: 788344 - DNA, 120 bp, Artificial Sequence
  ENSG00000264424_33 (sequence is synthesized)
gtgagttttcacgacagctagatgaaaaagatgctatggtttctcagctatcccgaggcaaacaagcatttacacaacagattgaagaattaaagaggcagctagaagaggagactaagg

SEQ ID NO: 788345 - DNA, 120 bp, Artificial Sequence
  ENSG00000264424_34 (sequence is synthesized)
ccaagagcactctggcccatgccctgcagtcagcccgccatgactgtgacctgctgcgggaacagtatgaggaggagcaggaagccaaggctgagctgcagaggggaatgtccaaggcca

SEQ ID NO: 788346 - DNA, 120 bp, Artificial Sequence
  ENSG00000264424_35 (sequence is synthesized)
acagtgaggttgcccagtggaggaccaagtacgagacggacgccatccagcgcacagaggagctggaggaggccaagaagaagctagcccagcgtctgcaggatgcagaagaacatgtag

SEQ ID NO: 788347 - DNA, 120 bp, Artificial Sequence
  ENSG00000264424_36 (sequence is synthesized)
aagctgtgaattccaaatgtgcttctcttgaaaagacaaagcagaggctacagaatgaagtagaggacctcatgattgatgtggaacgatctaatgctgcctgcatagctctcgataaga

SEQ ID NO: 788348 - DNA, 120 bp, Artificial Sequence
  ENSG00000264424_37 (sequence is synthesized)
agcaaagaaactttgacaaggttctggcagaatggaaacagaagtatgaggaaactcaggctgaacttgaggcctcccagaaggagtcgcgttctctcagcactgagctgttcaaggtga

SEQ ID NO: 788349 - DNA, 120 bp, Artificial Sequence
  ENSG00000264424_38 (sequence is synthesized)
agaatgcctacgaggaatccctggatcatcttgaaactctaaagcgagagaataagaacttacaacaggagatttctgacctgacagagcaaattgcagagggtggaaagcatatccatg

SEQ ID NO: 788350 - DNA, 120 bp, Artificial Sequence
  ENSG00000264424_39 (sequence is synthesized)
aactggagaaagtaaagaaacaacttgatcatgagaagagtgaactacagacttccctagaggaagcagaggcatctcttgagcatgaagaaggcaaaattcttcgcattcaacttgagc

SEQ ID NO: 788351 - DNA, 120 bp, Artificial Sequence
  ENSG00000264424_40 (sequence is synthesized)
taaatcaggtgaaatctgagattgaccgaaaaattgctgaaaaagatgaagaactcgatcagctaaagaggaaccatctcagagttgtggagtcaatgcagagtacactggatgctgaga

SEQ ID NO: 788352 - DNA, 120 bp, Artificial Sequence
  ENSG00000264424_41 (sequence is synthesized)
tcaggagcagaaatgatgctctgaggatcaagaagaagatggagggagatcttaatgaaatggaaatccagctgaaccatgccaaccgccaggctgctgaggcactaaggaatcttagaa

SEQ ID NO: 788353 - DNA, 120 bp, Artificial Sequence
  ENSG00000264424_42 (sequence is synthesized)
acacacaaggaatactgaaggacactcagctacatttggatgatgccatcagaggccaagatgaccttaaggaacaactggcaatggttgagcgcagagctaacctgatgcaggctgaag

SEQ ID NO: 788354 - DNA, 120 bp, Artificial Sequence
  ENSG00000264424_43 (sequence is synthesized)
ttgaagagctcagggcatccctggaacggactgagagaggcaggaaaatggcagagcaagagcttctggatgccagtgaacgtgtgcaacttctgcacactcagaacaccagcctgatca

SEQ ID NO: 788355 - DNA, 120 bp, Artificial Sequence
  ENSG00000264424_44 (sequence is synthesized)
acaccaagaagaagctggaaacagacatttcccaaatccagggagagatggaggacatcgtccaggaagcccgcaatgcagaggagaaggccaagaaggccatcactgatgctgccatga

SEQ ID NO: 788356 - DNA, 120 bp, Artificial Sequence
  ENSG00000264424_45 (sequence is synthesized)
tggctgaggagctgaagaaggaacaggacaccagcgcccacctggagcggatgaagaagaacatggagcagaccgtgaaggatctgcagctccgtctggatgaggctgagcagctggcgc

SEQ ID NO: 788357 - DNA, 120 bp, Artificial Sequence
  ENSG00000264424_46 (sequence is synthesized)
tgaagggtgggaagaagcagatccagaaactggaggccagggtgagagagcttgaaagtgaggtggaaagtgaacagaagcacaatgttgaggctgtcaagggtcttcgcaaacatgaga

SEQ ID NO: 788358 - DNA, 120 bp, Artificial Sequence
  ENSG00000264424_47 (sequence is synthesized)
gaagagtgaaggaactcacttaccagactgaggaggaccgcaagaatattctcaggctgcaggacttggtggacaaattgcaaaccaaagtcaaagcttacaagagacaagctgaagagg

SEQ ID NO: 788359 - DNA, 120 bp, Artificial Sequence
  ENSG00000264424_48 (sequence is synthesized)
ctgaggaacaatccaatgtcaaccttgccaagttccgcaagctccagcacgagctggaggaggccaaggaacgggctgacattgctgagtcccaagtcaacaagctgagagtgaagagtc

SEQ ID NO: 788360 - DNA, 120 bp, Artificial Sequence
  ENSG00000264424_49 (sequence is synthesized)
gggaggttcacacaaaagtcataagtgaagagtaattcattctaatgaaagaaaatgtgaccaaagaaatgcacgaaatgtgaagttctttgtcactgtcctgtatatcaaggaaataaa

SEQ ID NO: 788361 - DNA, 120 bp, Artificial Sequence
  ENSG00000264522_0 (sequence is synthesized)
accgatcctgaaccagccgccggagccggagtggcgaccgggtgcggagtgggcaaaaagccactgggggaggccagtcccgatcagtcctttctggctccagctccagatcccgtgcgg

SEQ ID NO: 788362 - DNA, 120 bp, Artificial Sequence
  ENSG00000264522_1 (sequence is synthesized)
agcaacagctgcggtcgcagtctccaccaccgcctccacctccatcgccgtcgggggaggggccggccggaccccggggtcactgccgaggaatgaagagaggcggccgggccccgcgct

SEQ ID NO: 788363 - DNA, 120 bp, Artificial Sequence
  ENSG00000264522_2 (sequence is synthesized)
ccgccccggcctagggccttgccccgggagcccgcgagggtggaggcctgaattttgatctatgttctacctacatccagctggctgaaagtacttgaggatcacatgaccctggacatg

SEQ ID NO: 788364 - DNA, 120 bp, Artificial Sequence
  ENSG00000264522_3 (sequence is synthesized)
gatgctgttctgtcagattttgtccgttccacaggagcagagccagggctagcgcgagatctcctagaaggaaagaattgggatgtgaatgccgccctcagtgattttgaacagctacgt

SEQ ID NO: 788365 - DNA, 120 bp, Artificial Sequence
  ENSG00000264522_4 (sequence is synthesized)
caagtccatgctggaaacctacccccatcctttagtgaggggagtggtggctccaggacccctgaaaaagggttttctgacagagagcctactcgccctccccgacccatcctccagcgg

SEQ ID NO: 788366 - DNA, 120 bp, Artificial Sequence
  ENSG00000264522_5 (sequence is synthesized)
caggatgacatcgttcaagaaaaacgcctgtctaggggcatctcccacgccagctccagcattgtttccctggcccggtcccatgtctcctccaatggtgggggtggggggagcaatgag

SEQ ID NO: 788367 - DNA, 120 bp, Artificial Sequence
  ENSG00000264522_6 (sequence is synthesized)
caccccctggaaatgcccatctgtgccttccagcttccagatctcactgtatacaatgaagacttccgcagcttcatagagagagacctcattgagcagtccatgctggttgccttggaa

SEQ ID NO: 788368 - DNA, 120 bp, Artificial Sequence
  ENSG00000264522_7 (sequence is synthesized)
caggcagggcgtttgaactggtgggtgagtgtggatcccacctctcagaggctgcttcctttggcaactactggagatgggaactgcctcctgcatgcagcctcccttggaatgtggggt

SEQ ID NO: 788369 - DNA, 120 bp, Artificial Sequence
  ENSG00000264522_8 (sequence is synthesized)
ttccatgatcgggacttgatgctgcggaaagctttgtatgcactgatggagaagggagttgagaaggaagcgttgaaaaggcgctggaggtggcagcagacacagcagaataaagagtca

SEQ ID NO: 788370 - DNA, 120 bp, Artificial Sequence
  ENSG00000264522_9 (sequence is synthesized)
gggctggtatacacagaagatgaatggcagaaggagtggaatgaactgatcaagcttgcctcaagtgaaccccgaatgcatctaggtaccaatggagccaactgtggtggggtggagagt

SEQ ID NO: 788371 - DNA, 120 bp, Artificial Sequence
  ENSG00000264522_10 (sequence is synthesized)
tctgaggagcctgtatatgagagccttgaagagtttcacgtctttgtccttgctcatgtgcttaggaggcccatagtcgtcgtggcagacaccatgctgagggactccggaggggaagca

SEQ ID NO: 788372 - DNA, 120 bp, Artificial Sequence
  ENSG00000264522_11 (sequence is synthesized)
tttgcccctattccctttggaggaatctatctgcctttggaggtcccagccagccagtgtcaccgctcccctctggtgctcgcctatgatcaggcccacttttctgcactcgtgtccatg

SEQ ID NO: 788373 - DNA, 120 bp, Artificial Sequence
  ENSG00000264522_12 (sequence is synthesized)
gagcagaaggagaataccaaggaacaagctgtgatcccacttacagattcagagtataagctgctgcccttgcactttgctgtggaccctggaaagggctgggagtggggcaaagatgat

SEQ ID NO: 788374 - DNA, 120 bp, Artificial Sequence
  ENSG00000264522_13 (sequence is synthesized)
agtgacaatgtccgattggccagtgtaattctgtccctagaggtcaaattgcatctgctgcatagctacatgaatgtgaagtggatcccactgtcctctgatgcacaggctcctctggcc

SEQ ID NO: 788375 - DNA, 120 bp, Artificial Sequence
  ENSG00000264522_14 (sequence is synthesized)
cagcctgagtcccccaccgcctcagctggagatgagccccggtccactcctgagtctggagactcagacaaggagtcagttggcagcagttccaccagcaacgagggcggccggcggaag

SEQ ID NO: 788376 - DNA, 120 bp, Artificial Sequence
  ENSG00000264522_15 (sequence is synthesized)
gagaagtcaaagcgagatcgggagaaggacaagaagagagcagattctgtggctaacaaactgggcagctttggcaaaaccttgggcagcaagctcaagaagaacatggggggcctgatg

SEQ ID NO: 788377 - DNA, 120 bp, Artificial Sequence
  ENSG00000264522_16 (sequence is synthesized)
cacagcaagggttcaaagcctggaggggtggggacagggttgggaggaagcagcggcactgagacactggagaagaagaagaaaaactcactgaagagctggaagggtggcaaggaggag

SEQ ID NO: 788378 - DNA, 120 bp, Artificial Sequence
  ENSG00000264522_17 (sequence is synthesized)
gcagctggggatgggcctgtgtctgagaagcccccagctgagtctgttggtaacggagggagcaagtatagccaggaggtgatgcagagcctgagcattctgaggactgccatgcaaggg

SEQ ID NO: 788379 - DNA, 120 bp, Artificial Sequence
  ENSG00000264522_18 (sequence is synthesized)
gaggggaagtttatttttgttggaaccctgaagatgggtcaccgtcaccagtatcaggaggaaatgatccagcgctacctttctgatgctgaggagagattcctggcagaacagaagcag

SEQ ID NO: 788380 - DNA, 120 bp, Artificial Sequence
  ENSG00000264522_19 (sequence is synthesized)
aaggaggcagagaggaagatcatgaatggaggaatagggggtggccctcctccagccaaaaagccagagccagatgctagggaagagcagccgaccggtcccccagcagagtccagggca

SEQ ID NO: 788381 - DNA, 120 bp, Artificial Sequence
  ENSG00000264522_20 (sequence is synthesized)
atggcattttccactggctaccctggggactttactatccctcggccgtctgggggcggagtccactgccaggaaccccggaggcagttggcagggggtccatgtgtcgggggcctacca

SEQ ID NO: 788382 - DNA, 120 bp, Artificial Sequence
  ENSG00000264522_21 (sequence is synthesized)
ccatatgccaccttccccagacagtgccctcctgggcgaccctacccccaccaggacagcatcccttctctggagccaggcagccactctaaggatggacttcacaggggtgccttgtta

SEQ ID NO: 788383 - DNA, 120 bp, Artificial Sequence
  ENSG00000264522_22 (sequence is synthesized)
ccacccccctaccgagtggctgattcctatagcaatggctacagagagccccctgagccagatggatgggctggaggtctccggggccttcccccaactcagaccaaatgcaaacaaccg

SEQ ID NO: 788384 - DNA, 120 bp, Artificial Sequence
  ENSG00000264522_23 (sequence is synthesized)
aactgcagcttctatggacaccctgagacaaacaacttctgttcctgttgttacagggaagaactgaggaggagggagcgggaaccggatggggagctcctggtgcacaggttctgaacg

SEQ ID NO: 788385 - DNA, 120 bp, Artificial Sequence
  ENSG00000264522_24 (sequence is synthesized)
ggtggaacactgaagggcaaggaggctaaacaaagttaagctcaactaattggctcatcaagaacacagtccccatgttgagggggaaaatgcagtaatgtttgtgggagcctggctgga

SEQ ID NO: 788386 - DNA, 120 bp, Artificial Sequence
  ENSG00000264522_25 (sequence is synthesized)
aacttttaagtgtgtgcacacaggagtgctgccaggctggcaagagcaggtcggggctggatggcacctcaggggctgtactattcctctgcagagcttgacttgatgaggtttgaggta

SEQ ID NO: 788387 - DNA, 120 bp, Artificial Sequence
  ENSG00000264522_26 (sequence is synthesized)
caaggggaaaagatggcgattctgtcttataacctcctgggtcccatccagggacctaagagaaagtagcaggggaaggtttggtgtgtgggggtgggaggtgggcagaagtcttgggga

SEQ ID NO: 788388 - DNA, 120 bp, Artificial Sequence
  ENSG00000264522_27 (sequence is synthesized)
ggaatgggcaaaggaggttctcagtcaataaaaccaaagttctttaggttgggaaaaagcacatggtggagtgagaagtgtggaggggaagtgggaaattggacacatttgctattgatt

SEQ ID NO: 788389 - DNA, 120 bp, Artificial Sequence
  ENSG00000264522_28 (sequence is synthesized)
tgaattaagctagaaattaaggttggataaattcttccccttgaaggatctggaaagacaaggcagtaatgtgtcctcatgggtgcctgttaggaggtgggggtagtttaaatccgtttg

SEQ ID NO: 788390 - DNA, 120 bp, Artificial Sequence
  ENSG00000264522_29 (sequence is synthesized)
tttagatgggaaagggaggaacttaagagggaaatccttttcctcttaaggtttatttccttccaagcagtcatatgtcatctgttacagtttgagaagagattgctgattaccccctgt

SEQ ID NO: 788391 - DNA, 120 bp, Artificial Sequence
  ENSG00000264522_30 (sequence is synthesized)
cttttcctcatctaagtctttaattgtatttgtttaaagggaagagtgtggtgagaacagccgtcatgtgtgttgcattttctccaggtgaattggggcagagctgatctattttttaac

SEQ ID NO: 788392 - DNA, 120 bp, Artificial Sequence
  ENSG00000264522_31 (sequence is synthesized)
cacagcaataaccatacgttggggtttgagtgcaccttgggaggggtgggaggacagacattttagccagaggctgtttcaaacaaaaccaaaaacctaagtagagcattacaggcctct

SEQ ID NO: 788393 - DNA, 120 bp, Artificial Sequence
  ENSG00000264522_32 (sequence is synthesized)
gtggctgctgcgtttctgtagaaagcaacttattttattgacttttttttttaaggaaaagaaataaaaagaccccagcaagcaaaaacatttaaaaaatgattttttttcctcctactt

SEQ ID NO: 788394 - DNA, 120 bp, Artificial Sequence
  ENSG00000264522_33 (sequence is synthesized)
aagtggttctttctccctttgctctacttttggagaatgaacttaacatcccggcttcttttgttaagccatagctgaccttaatctgtggttagtttattaaaataattaaaaatactt

SEQ ID NO: 788395 - DNA, 120 bp, Artificial Sequence
  ENSG00000264522_34 (sequence is synthesized)
tctaagaagagatatttttgatattaggactgatgttgaaacatataggggcaatttataaaaaggtagttagagaaatatattttagtgaactataaccacagagcacagatgactccc

SEQ ID NO: 788396 - DNA, 120 bp, Artificial Sequence
  ENSG00000264522_35 (sequence is synthesized)
aatgagctgatctgtctttaggtttctccctttccctgacccttccctgttctctaggggctgggagtggggatgcggacacagtagggggagctccttcgcattttgcacaaagcacaa

SEQ ID NO: 788397 - DNA, 120 bp, Artificial Sequence
  ENSG00000264522_36 (sequence is synthesized)
gtctgaacagcctatgctctggccagagccatttctaagagctttaaaccggaagacctatcctgggccaattttcctttttctttatatttttttccgggaaaaaaagtcaactatgca

SEQ ID NO: 788398 - DNA, 120 bp, Artificial Sequence
  ENSG00000264522_37 (sequence is synthesized)
gtacttatgtgtccagagtattaactggggctgtttttctgtgtttggatttctcttttgaggtatgtactcataacccatcccttggaacgtaatccccacatttgatctaaagcactt

SEQ ID NO: 788399 - DNA, 120 bp, Artificial Sequence
  ENSG00000264522_38 (sequence is synthesized)
gagcgtgcatgcatgtgcgtgcgtgcatatgtgtgtgtgttttcctcctcggtagccagtcaagattgtccttgttggaaatgctcacggtttataaaggttattttctcctcaacaaac

SEQ ID NO: 788400 - DNA, 120 bp, Artificial Sequence
  ENSG00000264522_39 (sequence is synthesized)
tcagaagtcacctattttccaaatctgatttaataatttcctatggctattaattcttagggttttctttgaaaatagatttgtgttaaggaagcagtgagattccaaaggaagggatgt

SEQ ID NO: 788401 - DNA, 120 bp, Artificial Sequence
  ENSG00000264522_40 (sequence is synthesized)
gtatatgtctaggcaggtctggaacctggtatgagatgagcactcccctaagttgcaaaatttaagggttactataaaactcattaatcaagatactataaaaaatgcagtatttaaaaa

SEQ ID NO: 788402 - DNA, 120 bp, Artificial Sequence
  ENSG00000264522_41 (sequence is synthesized)
aattaatgcaaaaaatttatgttggataaaatagcgaaatcttacaggatctgacaggactgagattaggaggagggaagtgaggctgaattgaataagtatggggatgaatccttctta

SEQ ID NO: 788403 - DNA, 120 bp, Artificial Sequence
  ENSG00000264522_42 (sequence is synthesized)
tttaaatttttgatacattgtccatcatagactttttacattaattgtgattttttaaaaatgttgcattaaaatagtatttatcttggttactgggttttttggcactccttaaatttt

SEQ ID NO: 788404 - DNA, 120 bp, Artificial Sequence
  ENSG00000264522_43 (sequence is synthesized)
gtgcccaaggtgagtgctttgctcacctcaccctagttacgtccctgtttctgtgatttgaacactagcgagaacaccactgtgtgcgcctccacccccatcacacaccaaacaacaggt

SEQ ID NO: 788405 - DNA, 120 bp, Artificial Sequence
  ENSG00000264522_44 (sequence is synthesized)
ggctcagacaccctgaatttgcacagctcacctagctttcctaatttaggccttcatatcatagaatggtggcctggaccaataggaatgaaaacagaccaggggttttcccagagaata

SEQ ID NO: 788406 - DNA, 120 bp, Artificial Sequence
  ENSG00000264522_45 (sequence is synthesized)
aagccggaaaagttttgattctccactggactgctgtgtttggatttgatctgttgttagattctagttaacacttttgtttttaaaaactaaggacaaatgaacaaaaaaccttgtatc

SEQ ID NO: 788407 - DNA, 120 bp, Artificial Sequence
  ENSG00000264522_46 (sequence is synthesized)
atgtttgtttttatttataagttagccaatcccaattccgtttgctttattttcaaataaaaaaagatggaaattttgaggggtggtctaggggtgaatatggtaaaatggggctttagg

SEQ ID NO: 788408 - DNA, 120 bp, Artificial Sequence
  ENSG00000264522_47 (sequence is synthesized)
ccttatagctttttattaagaaataaattattttttttatttgggagggtaactatttattgaggcattgaaaaacctctccattctaaggatgagagaccctgagacaatggatatttt

SEQ ID NO: 788409 - DNA, 120 bp, Artificial Sequence
  ENSG00000264522_48 (sequence is synthesized)
ttataggagatagtgaagtttgttttgcttcattctttcggggagggtcttggtgggatggggggaggtgaaggaataatgcctgggaaattaatatagattcagcttggtttgtggtat

SEQ ID NO: 788410 - DNA, 120 bp, Artificial Sequence
  ENSG00000264522_49 (sequence is synthesized)
tttgggaagatgagggaatagaagaggcaagcccatgtcgttactgggttggggagaaggaaagaaggggcatatggcctgcactcgaaatgggcagaaaaattccttagttaaggaggg

SEQ ID NO: 788411 - DNA, 120 bp, Artificial Sequence
  ENSG00000264522_50 (sequence is synthesized)
gtgtgtgagtgaagggggaaggtagaccctttaaccccaagtgagggatgatatcatctctcaggcttaaatttaagtgcacttagttcctttaatccagggcaactggggtacctactg

SEQ ID NO: 788412 - DNA, 120 bp, Artificial Sequence
  ENSG00000264522_51 (sequence is synthesized)
aagtttttaatggagaggggagattttcagggttcttgtttttccctttttgatgttagacagtgctactccctccctgctgtgctctctgccccatctccaatggagtaagtattactg

SEQ ID NO: 788413 - DNA, 120 bp, Artificial Sequence
  ENSG00000264522_52 (sequence is synthesized)
taggataggcctccgcttctcccttaacctatgctgcatttattgaaagttacaagatttaaccagaagtttttcctccatactggtttttatcaacaaaataaaaagattatatccaaa

SEQ ID NO: 788414 - DNA, 120 bp, Artificial Sequence
  ENSG00000264522_53 (sequence is synthesized)
gattttttaaagattcagtctttttaaggagtggagatggtgttaaactcagtgctgtagagggcagtggaagggaagtaccttccctctattagctcagtttttttttttctatcaagc

SEQ ID NO: 788415 - DNA, 120 bp, Artificial Sequence
  ENSG00000264522_54 (sequence is synthesized)
gaaactaaggcccacagacaaacaagaattagcagtgacttcgtgttgtatatctgcggggtgatactgagcccaaaagaataaagctggttttgaatgtgttctgagaacctagctttt

SEQ ID NO: 788416 - DNA, 120 bp, Artificial Sequence
  ENSG00000264522_55 (sequence is synthesized)
gccattcttaactccttttagccatgtgtccaaggttccagtcacatttttttttctcaataaagagtatttcagagatgattgtctctgaattactcagacacctctggactctgagtc

SEQ ID NO: 788417 - DNA, 89 bp, Artificial Sequence
  ENSG00000264522_56 (sequence is synthesized)
tgaattactcagacacctctggactctgagtcttctttcggtttgagacggagtctcgctcagctgcccaggctggagtgcagtggtgc

SEQ ID NO: 788418 - DNA, 60 bp, Artificial Sequence
  ENSG00000264522_57 (sequence is synthesized)
gtgcaatctcggctcactccaaccacacccgcaatcatgcccggctaatttttgtatttt

SEQ ID NO: 788419 - DNA, 75 bp, Artificial Sequence
  ENSG00000264522_58 (sequence is synthesized)
ctgtgtcttccttctccaatgagtcagtgccccagacatatagccacaggtgagaagacagaattagaagcccct

SEQ ID NO: 788420 - DNA, 120 bp, Artificial Sequence
  ENSG00000264522_59 (sequence is synthesized)
acatatagccacaggtgagaagacagaattagaagccccttcccggcctggaatcacctgcactccagatttttctaatttccttctttccctccaggcctttcaactatagatctggat

SEQ ID NO: 788421 - DNA, 120 bp, Artificial Sequence
  ENSG00000264522_60 (sequence is synthesized)
gagtcatgcaggcattctgtctcttctactttgcagacagccagtctgcaaatcacagggtattttgccaccatacatcagttgggtaacaaaatattacgatgtccccatgtagacttt

SEQ ID NO: 788422 - DNA, 120 bp, Artificial Sequence
  ENSG00000264522_61 (sequence is synthesized)
ctctgtgccatctcttgcattggccaagtgggtaaggggcagtacaaaagagcaacggaagctggctggcagcagttaagaggagtaggggtgggaaggaccttggcctctttctgtgct

SEQ ID NO: 788423 - DNA, 120 bp, Artificial Sequence
  ENSG00000264522_62 (sequence is synthesized)
tataactggatctgtgactcatcttgtgagtcactcagctccacctccctcctccggctgcccctcccagcagcctttactcctggcacaaacctgcagccagaacaggattctgaaaat

SEQ ID NO: 788424 - DNA, 120 bp, Artificial Sequence
  ENSG00000264522_63 (sequence is synthesized)
ggaaaaatctgatatagccccttgcctctccacccttcccttcatctagtgcttctactgggggtgtgtggggtggtgagaggcagccttaaccctcagctcctgcccactccattcctg

SEQ ID NO: 788425 - DNA, 120 bp, Artificial Sequence
  ENSG00000264522_64 (sequence is synthesized)
agccttaaccctcagctcctgcccactccattcctggttaagtattgatccaaatcgcccaattcttttctcctcctgatttccccccaccccgcttttttttttttttttttttgagac

SEQ ID NO: 788426 - DNA, 67 bp, Artificial Sequence
  ENSG00000264522_65 (sequence is synthesized)
agacagagtttcgctcttgtcgcccaggatggagtgcaatggcgcgatcccggctcactgcaacctt

SEQ ID NO: 788427 - DNA, 120 bp, Artificial Sequence
  ENSG00000264522_66 (sequence is synthesized)
gcatgagccaccacacccctaccccccgattttttttctccgtgttcctccactgtctccacacctcaaagtgctaaagaatagaatgaggctcttgaatgaaggatggtggtgagaagg

SEQ ID NO: 788428 - DNA, 80 bp, Artificial Sequence
  ENSG00000264522_67 (sequence is synthesized)
atagaatgaggctcttgaatgaaggatggtggtgagaaggaaagtggataatgggatttaaaagttatggtacacacctc

SEQ ID NO: 788429 - DNA, 120 bp, Artificial Sequence
  ENSG00000264522_68 (sequence is synthesized)
ttttcagtagagatggggcttcatcatgttggccaggtggtcctgaactcctgacctcaagtaatctgcctgccttggccttccaaaatgcttgggattacaggcgtgagccactgcgcc

SEQ ID NO: 788430 - DNA, 120 bp, Artificial Sequence
  ENSG00000264522_69 (sequence is synthesized)
tctttttacaacagaccttgggaaatattttcttcccccaagaggttgaggcccatggaatgcattaggggcaggtggggtggtggtgctctgtagcctttaggacttctagaatcaggc

SEQ ID NO: 788431 - DNA, 120 bp, Artificial Sequence
  ENSG00000264522_70 (sequence is synthesized)
ttctgggccaccttcttagcaggtgtatacctctttgttccagactgactttctgtctcacaatatcttcactatttccacagttgcagccaagacaggaaactgaaagctgaggccaga

SEQ ID NO: 788432 - DNA, 120 bp, Artificial Sequence
  ENSG00000264522_71 (sequence is synthesized)
agggtggtgtactggggggaggggaaaattgagtgtcactttggaaaactggggcccccatctaaggattgctgcctctgtagattcaaaagcaataaaacagcagctcattaactctta

SEQ ID NO: 788433 - DNA, 120 bp, Artificial Sequence
  ENSG00000264522_72 (sequence is synthesized)
ggcaaaaagccactgggggaggccagtcccgatcagtcctttctggctccagctccagatcccgtgcggagcaacagctgcggcctgaattttgatctatgttctacctacatccagctg

SEQ ID NO: 788434 - DNA, 120 bp, Artificial Sequence
  ENSG00000264522_73 (sequence is synthesized)
aaatatttccaagtgtttaggtcagtgtgactccccttatgatcctgaaaattggagaaaatgcagttaacaccaatggggtaaatgccttctgatgtggtcatgagaactggtggtggg

SEQ ID NO: 788435 - DNA, 120 bp, Artificial Sequence
  ENSG00000264522_74 (sequence is synthesized)
catgagacctacagagaggttatctaacattgtgcttttcccccagtaggtgctttatagcttttagtggcagtgttttgcaaaatgagttatgacaattccataggatttttgtattgt

SEQ ID NO: 788436 - DNA, 120 bp, Artificial Sequence
  ENSG00000264522_75 (sequence is synthesized)
tttgtttttttgcttgtaataaggctagatcaatttttaaagacttatgttttcagcccctatagaaatgtgaatggttaaaatcttttaggacatatataccatttgtttttcatatac

SEQ ID NO: 788437 - DNA, 120 bp, Artificial Sequence
  ENSG00000264522_76 (sequence is synthesized)
tcagttttagtttattttaaattttaaaaagcataaggaaccagcattctaatcacacacacacacaaaaagcatacctatttaattgagtctgaacagtacttctcaggagtttgtcaa

SEQ ID NO: 788438 - DNA, 120 bp, Artificial Sequence
  ENSG00000264522_77 (sequence is synthesized)
tcaaatgttgaggctgctgttatataaggcagtaacaacagattgtttgtacttgccctctccaaaacgggttgcgcaaactatggctattttgtaagaaaaaaaaaaacaaaaaaaaac

SEQ ID NO: 788439 - DNA, 120 bp, Artificial Sequence
  ENSG00000264522_78 (sequence is synthesized)
acaaaaaaaccttttatcagaatacagccctgggcatttcttggatgtttacacgtgtaactgctttcttcctccagcagcacagtagtaacatgtggcctgcacagcccatacttactg

SEQ ID NO: 788440 - DNA, 120 bp, Artificial Sequence
  ENSG00000264522_79 (sequence is synthesized)
actacctggccctttacagaaaaagtttgctgattacttcccttcaataatgacattatgcctttacataaaaataatgaggctccctatttccttttcctgtgattctgtgctatgttt

SEQ ID NO: 788441 - DNA, 120 bp, Artificial Sequence
  ENSG00000264522_80 (sequence is synthesized)
atatctcctgctctttatgtatatctattttttttttgccatgttatggctggatctttctggcatttagtatggcaatatctcttcagaaactttcctttttcatccacctttcttttt

SEQ ID NO: 788442 - DNA, 120 bp, Artificial Sequence
  ENSG00000264522_81 (sequence is synthesized)
ttctcattttattgctgtcataacttgacaatatagaagagtttttttgttttagttatttagaattttatatcctgaagatttaatatgtaagtagaacatgctatgtttcttcctcaa

SEQ ID NO: 788443 - DNA, 120 bp, Artificial Sequence
  ENSG00000264522_82 (sequence is synthesized)
aaacaaataatccagttgttaaaagtagatgatattaagatcagaatcctctccttgagcagccagtcttccccagaagattcctgagggaaataaacccacaggggcaaggccacataa

SEQ ID NO: 788444 - DNA, 120 bp, Artificial Sequence
  ENSG00000264522_83 (sequence is synthesized)
atcagtagtcagttttgtggtagtcagctttgtcctcttcactgttgagttcagataataccggaaccttaaccactgcagaggcaagaaaaggccaaaccagaacatgccaactattaa

SEQ ID NO: 788445 - DNA, 120 bp, Artificial Sequence
  ENSG00000264522_84 (sequence is synthesized)
gtagaaatgacagcaacacccagaaaattaagtgtgcccaattccagttattaaagcaattagttattattctaaagatggggttagattataatggtatttagccaggaaacccagaaa

SEQ ID NO: 788446 - DNA, 120 bp, Artificial Sequence
  ENSG00000264522_85 (sequence is synthesized)
tacccacgttctatccttggccagccagcctttccctctcaaagtcagcctttccatctgaaagtccccaacatgcatagagaatagtggctagtaatggagcaatagttttagtccttt

SEQ ID NO: 788447 - DNA, 120 bp, Artificial Sequence
  ENSG00000264522_86 (sequence is synthesized)
tgctcagcacagtgaaagttcatactgaaaatgtggctttcataattgtcttagcttagaccattcatagcattattacccaccttgggagtgggaatggtaggaggaggataatgaact

SEQ ID NO: 788448 - DNA, 120 bp, Artificial Sequence
  ENSG00000264522_87 (sequence is synthesized)
ggggaagcttcctttagctccccagtaccaaaaccacactaaataagttttgatttcctgggcttccttgttttatgttgaaattggtggtgaggctcagtaatagtttcttaaatgtta

SEQ ID NO: 788449 - DNA, 120 bp, Artificial Sequence
  ENSG00000264522_88 (sequence is synthesized)
aggctagaagttgtacaccacctagtggctgtgtacattaaaacaggaagcagaaaccggccaggaagagggagccggatctggatgtgtctattggagtgactgcagcactccatatag

SEQ ID NO: 788450 - DNA, 120 bp, Artificial Sequence
  ENSG00000264522_89 (sequence is synthesized)
aacctgggcattgctctctttatttttaattgaagtaaaatttgtgatagcattttacaaattgaaaatagctgtgtcatttaaaaaattcccattaaatttgttcccagtacccctcat

SEQ ID NO: 788451 - DNA, 120 bp, Artificial Sequence
  ENSG00000264522_90 (sequence is synthesized)
gtttccagtgatttccttctactctgtcagtgtgcggttaagccgtatagactcattttaatactaatgtcagccaaataaaattaataagttaaacttatttcccttatcattatatac

SEQ ID NO: 788452 - DNA, 120 bp, Artificial Sequence
  ENSG00000264522_91 (sequence is synthesized)
atcctaaagccaatgtattttaaaattgcttgtaccattgcctgctctcctttgataaaaattgtagtttcacttagcatatgtttattgattatagtcacaaaatagaccttgggtgta

SEQ ID NO: 788453 - DNA, 120 bp, Artificial Sequence
  ENSG00000264522_92 (sequence is synthesized)
ttgcataaaacatgatcctagcatagaggaggagatggacatgtaaatacataattgcaacaggttataacatgtatgactcttacaatagacgtctctatagcagttaatgctggccgg

SEQ ID NO: 788454 - DNA, 120 bp, Artificial Sequence
  ENSG00000264522_93 (sequence is synthesized)
ggtgacagagcaagactttgtctcaaacaaacaaacaaaaaaacaacaacaactctatagcagttagggagagaggatacaaaggaaggagtggttgatctgccaagggagatttagaag

SEQ ID NO: 788455 - DNA, 120 bp, Artificial Sequence
  ENSG00000264522_94 (sequence is synthesized)
tttagaagactatttggaggaatgatacctgagttctgtcctaaaagttgagaaattgttcacaaggttgacagaaagtgagctactccaggcagaaggaacagcttagacaaaagctca

SEQ ID NO: 788456 - DNA, 120 bp, Artificial Sequence
  ENSG00000264522_95 (sequence is synthesized)
gtggtataaaacaacatggtatatttcaggaactacagctgattcagtgagatatatctgactagagaagtgggtaggggccagaaagtaggctttgtatgcagcacttctacttgggag

SEQ ID NO: 788457 - DNA, 120 bp, Artificial Sequence
  ENSG00000264717_0 (sequence is synthesized)
gggcacaggagtgcggccgggggcggggccgagtgggccccggtacgaaccctccgggaagccgggcgcgctgcctgcccttggcccggggcgcagagcgtcacactggatctggggagc

SEQ ID NO: 788458 - DNA, 120 bp, Artificial Sequence
  ENSG00000264717_1 (sequence is synthesized)
atcctacccccactgtggacctcagtctcctcacctgagacatgggcggccccatccgcaccctgtaagccgcaagccaaggagattcctggcccccatcctggattcacttaactacat

SEQ ID NO: 788459 - DNA, 120 bp, Artificial Sequence
  ENSG00000264717_2 (sequence is synthesized)
ctcctggtggaagggccctgggatgtgcactttcaacatgcttctagaatgattctgatgtttactgaaggttgagaactgcaaccctgtgggattaataatgactagagaatctgagag

SEQ ID NO: 788460 - DNA, 120 bp, Artificial Sequence
  ENSG00000264717_3 (sequence is synthesized)
gcgtcatccctcaagtgtatcacttagttcaagagtcctggaatcttttcacatccactatgaacacctctcacctcctggccttgctgctcccaaaatctccacaaggtgaaaacagaa

SEQ ID NO: 788461 - DNA, 120 bp, Artificial Sequence
  ENSG00000264717_4 (sequence is synthesized)
gcaaacccctgggcaccccatacaacttctctgaacattgccaggattccgtggacgtgatggtcttcattgtcacttcctacagcattgagactgtcgtgggggtcctgggtaacctct

SEQ ID NO: 788462 - DNA, 120 bp, Artificial Sequence
  ENSG00000264717_5 (sequence is synthesized)
gcctgatgtgtgtaactgtgaggcagaaggagaaagccaacgtgaccaacctgcttatcgccaacctggccttctctgacttcctcatgtgcctcctctgccagccgctgaccgccgtct

SEQ ID NO: 788463 - DNA, 120 bp, Artificial Sequence
  ENSG00000264717_6 (sequence is synthesized)
acaccatcatggactactggatctttggagagaccctctgcaagatgtcggccttcatccagtgcatgtcggtgacggtctccatcctctcgctcgtcctcgtggccctggagaggcatc

SEQ ID NO: 788464 - DNA, 120 bp, Artificial Sequence
  ENSG00000264717_7 (sequence is synthesized)
agctcatcatcaacccaacaggctggaagcccagcatctcacaggcctacctggggattgtgctcatctgggtcattgcctgtgtcctctccctgcccttcctggccaacagcatcctgg

SEQ ID NO: 788465 - DNA, 120 bp, Artificial Sequence; identical to SEQ ID NO: 739666
  ENSG00000264717_8 (sequence is synthesized)

SEQ ID NO: 788466 - DNA, 120 bp, Artificial Sequence
  ENSG00000264717_9 (sequence is synthesized)
gttatgcacgcatctaccggcgcctgcagaggcaggggcgcgtgtttcacaagggcacctacagcttgcgagctgggcacatgaagcaggtcaatgtggtgctggtggtgatggtggtgg

SEQ ID NO: 788467 - DNA, 120 bp, Artificial Sequence; identical to SEQ ID NO: 739668
  ENSG00000264717_10 (sequence is synthesized)

SEQ ID NO: 788468 - DNA, 120 bp, Artificial Sequence; identical to SEQ ID NO: 739669
  ENSG00000264717_11 (sequence is synthesized)

SEQ ID NO: 788469 - DNA, 120 bp, Artificial Sequence; identical to SEQ ID NO: 739670
  ENSG00000264717_12 (sequence is synthesized)

SEQ ID NO: 788470 - DNA, 120 bp, Artificial Sequence; identical to SEQ ID NO: 739671
  ENSG00000264717_13 (sequence is synthesized)

SEQ ID NO: 788471 - DNA, 120 bp, Artificial Sequence; identical to SEQ ID NO: 739672
  ENSG00000264717_14 (sequence is synthesized)

SEQ ID NO: 788472 - DNA, 120 bp, Artificial Sequence; identical to SEQ ID NO: 739673
  ENSG00000264717_15 (sequence is synthesized)

SEQ ID NO: 788473 - DNA, 120 bp, Artificial Sequence
  ENSG00000265107_0 (sequence is synthesized)
ggtgatacagaagaaaagacagtctccattttcaaacagtccctcctgggagaacacagacaggcagaggattacaacacaaggcagcaagcactgggagacgaaagttttggcatctgt

SEQ ID NO: 788474 - DNA, 120 bp, Artificial Sequence
  ENSG00000265107_1 (sequence is synthesized)
tccctggctgtgccaagatgggcgattggagcttcctgggaaatttcctggaggaagtacacaagcactcgaccgtggtaggcaaggtctggctcactgtcctcttcatattccgtatgc

SEQ ID NO: 788475 - DNA, 120 bp, Artificial Sequence
  ENSG00000265107_2 (sequence is synthesized)
tcgtgctgggcacagctgctgagtcttcctggggggatgagcaggctgatttccggtgtgatacgattcagcctggctgccagaatgtctgctacgaccaggctttccccatctcccaca

SEQ ID NO: 788476 - DNA, 120 bp, Artificial Sequence
  ENSG00000265107_3 (sequence is synthesized)
ttcgctactgggtgctgcagatcatcttcgtctccacgccctctctggtgtacatgggccacgccatgcacactgtgcgcatgcaggagaagcgcaagctacgggaggccgagagggcca

SEQ ID NO: 788477 - DNA, 120 bp, Artificial Sequence
  ENSG00000265107_4 (sequence is synthesized)
aagaggtccggggctctggctcttacgagtacccggtggcagagaaggcagaactgtcctgctgggaggaagggaatggaaggattgccctccagggcactctgctcaacacctatgtgt

SEQ ID NO: 788478 - DNA, 120 bp, Artificial Sequence
  ENSG00000265107_5 (sequence is synthesized)
gcagcatcctgatccgcaccaccatggaggtgggcttcattgtgggccagtacttcatctacggaatcttcctgaccaccctgcatgtctgccgcaggagtccctgtccccacccggtca

SEQ ID NO: 788479 - DNA, 120 bp, Artificial Sequence
  ENSG00000265107_6 (sequence is synthesized)
actgttacgtatcccggcccacagagaagaatgtcttcattgtctttatgctggctgtggctgcactgtccctcctccttagcctggctgaactctaccacctgggctggaagaagatca

SEQ ID NO: 788480 - DNA, 120 bp, Artificial Sequence
  ENSG00000265107_7 (sequence is synthesized)
gacagcgatttgtcaaaccgcggcagcacatggctaagtgccagctttctggcccctctgtgggcatagtccagagctgcacaccaccccccgactttaatcagtgcctggagaatggcc

SEQ ID NO: 788481 - DNA, 120 bp, Artificial Sequence
  ENSG00000265107_8 (sequence is synthesized)
ctgggggaaaattcttcaatcccttcagcaataatatggcctcccaacaaaacacagacaacctggtcaccgagcaagtacgaggtcaggagcagactcctggggaaggtttcatccagg

SEQ ID NO: 788482 - DNA, 120 bp, Artificial Sequence
  ENSG00000265107_9 (sequence is synthesized)
ttcgttatggccagaagcctgaggtgcccaatggagtctcaccaggtcaccgccttccccatggctatcatagtgacaagcgacgtcttagtaaggccagcagcaaggcaaggtcagatg

SEQ ID NO: 788483 - DNA, 120 bp, Artificial Sequence
  ENSG00000265107_10 (sequence is synthesized)
acctatcagtgtgaccctcctttatgggaggatcaggaccaggtgggaacaaaggaggctcagagaggaaagacgtgtcccttctgaactgatgctttctcactgtcatcactgcttggc

SEQ ID NO: 788484 - DNA, 120 bp, Artificial Sequence
  ENSG00000265107_11 (sequence is synthesized)
tcctttgagccccgggtctcaatgacgttgctcattaattctagaaactataaccagggctctgggatagtaagagaggtgacaacccacccagactgcagttccctccccaccctctac

SEQ ID NO: 788485 - DNA, 120 bp, Artificial Sequence
  ENSG00000265107_12 (sequence is synthesized)
ccagtatacgaagcctttcagattactcatgaaacagggtagagggaaagaagggaagcatggcaaaagctggcctggaagggatagccagagggatagaatgactctctctctacatac

SEQ ID NO: 788486 - DNA, 120 bp, Artificial Sequence
  ENSG00000265107_13 (sequence is synthesized)
ctcctccaaggaagagctcaaagttcccagccaatagacagcatgaatcaaggaacttgcattatatgtgctcttgaatctgttgtctccatggaccattcctcggagtagtggtgagat

SEQ ID NO: 788487 - DNA, 120 bp, Artificial Sequence
  ENSG00000265107_14 (sequence is synthesized)
ggccttgggttgcccttggcttctcctccctctactcagccttaaaaagggcttcttggaactttaccagcagcctcagctttacaaatgccttggtatgtacctctggcaaatgccctg

SEQ ID NO: 788488 - DNA, 120 bp, Artificial Sequence
  ENSG00000265107_15 (sequence is synthesized)
gtatgtacctctggcaaatgccccaccttggtgatgttgcaacctttccttctgctagggtgtacacctagcctgtgcaggtgtcagccctgctagggagtcactgtacacacaaactct

SEQ ID NO: 788489 - DNA, 120 bp, Artificial Sequence
  ENSG00000265107_16 (sequence is synthesized)
actggaattcctgccaacatctgtcaccctgcagctcctttacagttcaatccaatgatagaaaccatcccttccctttctcccttggctgttcacccagccattccctgaaggccttac

SEQ ID NO: 788490 - DNA, 120 bp, Artificial Sequence
  ENSG00000265107_17 (sequence is synthesized)
caacaggaatatccaagaagctgttgtcctctctcgaaccctgaccagatcatcagccactgaggccagtggaatttccccaggccttgttaaaacaaagaaagcattgtacttctcaga

SEQ ID NO: 788491 - DNA, 120 bp, Artificial Sequence
  ENSG00000265107_18 (sequence is synthesized)
ttccccttgtggaaaaaaaaattctgctgtgaagatgaaaataaaaatggagagaaaacactggaaaactattttcccctcctatttacttcctttgctgactgccaacttagtgccaag

SEQ ID NO: 788492 - DNA, 120 bp, Artificial Sequence
  ENSG00000265107_19 (sequence is synthesized)
aggaggtgtgatgacagctatggaggcccccagatctctctctcctggaggctttagcaggggcaaggaaatagtaggggaatctccagctctcttggcagggcctttatttaaagagcg

SEQ ID NO: 788493 - DNA, 120 bp, Artificial Sequence
  ENSG00000265107_20 (sequence is synthesized)
cagagattcctatgtctccctagtgcccctaatgagactgccaagtgggggctgtagaaaagccttgccttccccagggattggcctggtctctgtattcactggatccataatgggttg

SEQ ID NO: 788494 - DNA, 120 bp, Artificial Sequence
  ENSG00000265107_21 (sequence is synthesized)
ctgttgttttggatgaaggtaaacgatgcttggaattggaaactgagacttatagagggattattacattattaaaatgcacgtgtgtgtgtgtgtgggtgctgatgggatgggtaaagg

SEQ ID NO: 788495 - DNA, 120 bp, Artificial Sequence
  ENSG00000265107_22 (sequence is synthesized)
cttggggagtcctgaaataaggaaaggaaaccacagagaaacttgtgtcttcctgctctcctctccggctgcctggcagttattaacctaaacagatagccacaagaggttgggacagag

SEQ ID NO: 788496 - DNA, 120 bp, Artificial Sequence
  ENSG00000265107_23 (sequence is synthesized)
gagggtaaaggctcagaaggaggttcaacctctgactcacctgcccatctctgggccctctgctgacacttggatgctattgttgggtggaaagataaatgagagtggagaggtggagga

SEQ ID NO: 788497 - DNA, 120 bp, Artificial Sequence
  ENSG00000265107_24 (sequence is synthesized)
aagtgactaggatgccatttaggaaggaatgtctgatcatcccgggtccctggaggggacaccttttaatctattgcctagcattaatattttctctccttctatctctgaaatgtttta

SEQ ID NO: 788498 - DNA, 120 bp, Artificial Sequence
  ENSG00000265107_25 (sequence is synthesized)
tgaaatgagtgttcttgaattagaaattctgtgggatcaatctttgatggtgagggttttagaaaggaaaaatatagtaaaatgtgtaatttgtcttaataaaatctatctctacatcta

SEQ ID NO: 788499 - DNA, 120 bp, Artificial Sequence
  ENSG00000265107_26 (sequence is synthesized)
gaggaacaactgacaggctcaagagcaaaaagcgtgggcagttggagaagaagcagccagagtgtgaagaagcccacggaaggaaagtccagggaggaggaaaagaagcagaagttttgg

SEQ ID NO: 788500 - DNA, 120 bp, Artificial Sequence
  ENSG00000265190_0 (sequence is synthesized)
cccacacccaagtgagcggcctgctcactcctcagctgcaggagccagacgtgtggagtcccagcagaggccaacctgtgtctcttcatctccctgggaaaggtgcccccgaggtgaaag

SEQ ID NO: 788501 - DNA, 120 bp, Artificial Sequence
  ENSG00000265190_1 (sequence is synthesized)
agatggcctggtggaaatcctggattgaacaggagggtgtcacagtgaagagcagctcccacttcaacccagaccctgatgcagagaccctctacaaagccatgaaggggatcgggacca

SEQ ID NO: 788502 - DNA, 120 bp, Artificial Sequence
  ENSG00000265190_2 (sequence is synthesized)
acgagcaggctatcatcgatgtgctcaccaagagaagcaacacgcagcggcagcagatcgccaagtccttcaaggctcagttcggcaaggacctcactgagaccttgaagtctgagctca

SEQ ID NO: 788503 - DNA, 120 bp, Artificial Sequence
  ENSG00000265190_3 (sequence is synthesized)
gtggcaagtttgagaggctcattgtggcccttatgtacccgccatacagatacgaagccaaggagctgcatgacgccatgaagggcttaggaaccaaggagggtgtcatcattgagatcc

SEQ ID NO: 788504 - DNA, 120 bp, Artificial Sequence
  ENSG00000265190_4 (sequence is synthesized)
tggcctctcggaccaagaaccagctgcgggagataatgaaggcgtatgaggaagactatgggtccagcctggaggaggacatccaagcagacacaagtggctacctggagaggatcctgg

SEQ ID NO: 788505 - DNA, 120 bp, Artificial Sequence
  ENSG00000265190_5 (sequence is synthesized)
tgtgcctcctgcagggcagcagggatgatgtgagcagctttgtggacccaggactggccctccaagacgcacaggatctgtatgcggcaggcgagaagattcgtgggactgatgagatga

SEQ ID NO: 788506 - DNA, 120 bp, Artificial Sequence
  ENSG00000265190_6 (sequence is synthesized)
aattcatcaccatcctgtgcacgcgcagtgccactcacctgctgagagtgtttgaagagtatgagaaaattgccaacaagagcattgaggacagcatcaagagtgagacccatggctcac

SEQ ID NO: 788507 - DNA, 120 bp, Artificial Sequence
  ENSG00000265190_7 (sequence is synthesized)
tggaggaggccatgctcactgtggtgaaatgcacccaaaacctccacagctactttgcagagagactctactatgccatgaagggagcagggacgcgtgatgggaccctgataagaaaca

SEQ ID NO: 788508 - DNA, 120 bp, Artificial Sequence
  ENSG00000265190_8 (sequence is synthesized)
tcacttcaagaagatgtacggcaagaccctcagcagcatgatcatggaagacaccagcggtgactacaagaacgccctgctgagcctggtgggcagcgacccctgaggcacagaagaaca

SEQ ID NO: 788509 - DNA, 120 bp, Artificial Sequence
  ENSG00000265190_9 (sequence is synthesized)
agagcaaagaccatgaagccagagtctccaggactcctcactcaacctcggccatggacgcaggttgggtgtgaggggggtcccagcctttcggtcttctatttccctatttccagtgct

SEQ ID NO: 788510 - DNA, 120 bp, Artificial Sequence
  ENSG00000265190_10 (sequence is synthesized)
ttccagccgggtttctgacccagagggtggaaccggcctggactcctcttcccaacttcctccaggtcatttcccagtgtgagcacaatgccaaccttagtgtttctccagccagacaga

SEQ ID NO: 788511 - DNA, 120 bp, Artificial Sequence
  ENSG00000265190_11 (sequence is synthesized)
tgcctcagcatgaagggcttggggacttgtggatcattccttcctccctgcaggagcttcccaagctggtcacagagtctcctgggcacaggttatacagaccccagccccattcccatc

SEQ ID NO: 788512 - DNA, 120 bp, Artificial Sequence
  ENSG00000265190_12 (sequence is synthesized)
tactgaaacagggtctccacaagaggggccagggaatatgggtttttaacaagcgtcttacaaaacacttctctatcatgcagccggagagctggctgggagcccttttgttttagaaca

SEQ ID NO: 788513 - DNA, 120 bp, Artificial Sequence
  ENSG00000265190_13 (sequence is synthesized)
cacatccttcagcagctgagaaacgaacacgaatccatcccaaccgagatgccattaacattcatctaaaaatgttaggctctaaatggacgaaaaattctctcgccatcttaataacaa

SEQ ID NO: 788514 - DNA, 120 bp, Artificial Sequence
  ENSG00000265190_14 (sequence is synthesized)
aataaactacaaattcctgacccaaggacactgtgttataagaggcgtgggctcccctggtggctgaccaggtcagctgccctggccttgcacccctctgcatgcagcacagaagggtgt

SEQ ID NO: 788515 - DNA, 120 bp, Artificial Sequence
  ENSG00000265190_15 (sequence is synthesized)
gaccatgccctcagcaccactcttgtccccactgaacggcaactgagactgggtacctggagattctgaagtgcctttgctgtggttttcaaaataataaagatttgtattcaactcaaa

SEQ ID NO: 788516 - DNA, 120 bp, Artificial Sequence
  ENSG00000265190_16 (sequence is synthesized)
gaagctcaaacgatttccagagacagtggggaagctttacagggacaggcaggggaggatcttaacccggctttcgtaagcctctggcttgagtatggaaggactcaggaattctcccac

SEQ ID NO: 788517 - DNA, 120 bp, Artificial Sequence
  ENSG00000265190_17 (sequence is synthesized)
tccggaatgccttgctgctggggtgaccaggtcttcacttgtgaaacaggagtcggccacctcagccctgcgcctggcctggtggaacatgggtcaccgccccaacctggggcagccgcc

SEQ ID NO: 788518 - DNA, 120 bp, Artificial Sequence
  ENSG00000265190_18 (sequence is synthesized)
ccatcccaacgcagttgctgccgctctccatgcctccctgtgcccagctaaccgggggacttgtcccctgggaaaacctgggtacccaggctgcctttggtttcagcccctactcctctt

SEQ ID NO: 788519 - DNA, 120 bp, Artificial Sequence
  ENSG00000265190_19 (sequence is synthesized)
cccgggctgcctttgctccccggacggcccctttccccgggctgtgttcacatcggctgggaagggtcccttgcagacagatcttggacgaggtcgcgtcccccctcgtgaccagcaaac

SEQ ID NO: 788520 - DNA, 120 bp, Artificial Sequence
  ENSG00000265190_20 (sequence is synthesized)
tcctaaaagccgcccttgccccagagcccctgtagcctccaaccggcagtcaggaggcagcgccgtctcagcgccgcttagtggcgccaggcgtgcctggaaatccgctttcgcagcgcc

SEQ ID NO: 788521 - DNA, 120 bp, Artificial Sequence
  ENSG00000265190_21 (sequence is synthesized)
ccctcgtagccgcctccgcccgcagaaaggcgttccctggacagagaagcgggcgcgcgggggcgggcgcgcggggccttgccggagaacctgactctccgcagcagcagtggaagccag

SEQ ID NO: 788522 - DNA, 120 bp, Artificial Sequence
  ENSG00000265190_22 (sequence is synthesized)
agtgacgcgttgtgttgaacaccagttttctggagcgctgtgtgttctcatagctgagcagtctgtttctccaatcaggtttcaaagccacttcaactgcactggcccctgtgggtcact

SEQ ID NO: 788523 - DNA, 120 bp, Artificial Sequence
  ENSG00000265190_23 (sequence is synthesized)
acaccttggacttaagccgtgagaaaaaaaaaacttcatcagtaagaaacaagtcaatagacaagtaaaagactaggagaaaatatgcataaaacataaaaaagtgacttgattcctgat

SEQ ID NO: 788524 - DNA, 120 bp, Artificial Sequence
  ENSG00000265190_24 (sequence is synthesized)
tctggagtatttaagaattcctataactcaacaaaaagttcagttttttaaaatgagcaaaaggcttgggtaaactattcacaaaggaacatagacaaatgccagtacacacatgagaag

SEQ ID NO: 788525 - DNA, 120 bp, Artificial Sequence
  ENSG00000265190_25 (sequence is synthesized)
cgcatacacatccacaaacttcaaacaagcccacctcatgtatttctagtgagtaaggaaaagaacgcaaacacttttgaaaattgtttggttgtttcttgtaaatttaaacaaataccc

SEQ ID NO: 788526 - DNA, 120 bp, Artificial Sequence
  ENSG00000265190_26 (sequence is synthesized)
tattatattatccagcgagtccatccttaggtttttatccaaggataaagaggtgaaaactcatatctaacaaatagacttctgaaaagatgaaaatagaagctttattcataaaagaca

SEQ ID NO: 788527 - DNA, 120 bp, Artificial Sequence
  ENSG00000265190_27 (sequence is synthesized)
aaaactagaaataacccaaatattcattcacaggagaatgaataaacagactaggttgaatccatacaatggaatggtagcagacaataaaaagaaaatgaactattgatgccccctact

SEQ ID NO: 788528 - DNA, 120 bp, Artificial Sequence
  ENSG00000265190_28 (sequence is synthesized)
gcacagcagaagctctgaatcgtgttcctgaatgaaagaagtcaggtatgaaagaataaacattgtatgattccatttatatgaaaatgaatctgtgatttaaaaatcagactagtatta

SEQ ID NO: 788529 - DNA, 120 bp, Artificial Sequence
  ENSG00000265190_29 (sequence is synthesized)
ggtgcaaaagtaattgcggtttttgccttttttttttttttttttaaatagttgctttggggtttatggatggagtggcatggtagaggttagctgaagggggcatgaaataactttttg

SEQ ID NO: 788530 - DNA, 120 bp, Artificial Sequence
  ENSG00000265190_30 (sequence is synthesized)
tttgggggtgctagagtgttgtaaatcttacagtgggggagggacaggagtgcaggcatttgacaaaacacattgaattgtgaaatttaagatttttgaatttctttgtatgtaaattac

SEQ ID NO: 788531 - DNA, 120 bp, Artificial Sequence
  ENSG00000265190_31 (sequence is synthesized)
gccatggacgcaggtcatttcccagtgtgagcacaatgccaaccttagtgtttctccagccagacagatgcctcagcatgaagggcttggggacttgtggatcattccttcctccctgca

SEQ ID NO: 788532 - DNA, 120 bp, Artificial Sequence
  ENSG00000265190_32 (sequence is synthesized)
gggataggtgagccttggggttgggggtacagcctgggaggcagctccattctggacgactttcccctagagccagcccactggcagcatgggcacatggaacatgtttgcatgaaaaca

SEQ ID NO: 788533 - DNA, 120 bp, Artificial Sequence
  ENSG00000265190_33 (sequence is synthesized)
attgttctttattgaaattcaaatgtaactggctgccctgtgttttatctggcagatctacttttaggtgtcagagcccgggccgggggctggccttccttgcttcctttcctgcctcct

SEQ ID NO: 788534 - DNA, 120 bp, Artificial Sequence
  ENSG00000265190_34 (sequence is synthesized)
ccttctcatgcacccaacaggccccactggaggtctgtctccctgcccccaggctatctcgccctgccctctgagcccagaccaccttctcttttccatgccccaggcatgcaggcctgg

SEQ ID NO: 788535 - DNA, 120 bp, Artificial Sequence
  ENSG00000265190_35 (sequence is synthesized)
ctttgctctgttctggggcgtgggcatgctttcctcagtcgagctgcttgcacccacacctcgtcccttctgccacctgggaattctaagagcctggagtaagcatgccaggccctttgt

SEQ ID NO: 788536 - DNA, 120 bp, Artificial Sequence
  ENSG00000265190_36 (sequence is synthesized)
ttctcctcccacctgcactccacccctaggacaaagcctgacatttgggggtacacagtaaacacaggattaaatatgtgcacagccatggttgcctcaagcctctagtgactcatatca

SEQ ID NO: 788537 - DNA, 120 bp, Artificial Sequence
  ENSG00000265190_37 (sequence is synthesized)
ttagtttggagatgtaacgaaggaagatcagctcaaatattctcttggagaacccagtatgcatttttacagtttccctctcttagtcctcacagtgatacattctttgtattcaaacat

SEQ ID NO: 788538 - DNA, 120 bp, Artificial Sequence
  ENSG00000265190_38 (sequence is synthesized)
ttggggaaactggcactcagagaggttttaagttgcccaaggtcccagagcctgtaatcaacaaggtggggattaaaatccaggtctgacaaagcccttgatctctctgctgctctgtag

SEQ ID NO: 788539 - DNA, 120 bp, Artificial Sequence
  ENSG00000265203_0 (sequence is synthesized)
agaccttctgtccaccagctgagaaggacaagggcggaaggcagctgcacagagcagggccacggccttgcacacagtccagggagcttttgtgcaggagccaggcctccccctgggtcc

SEQ ID NO: 788540 - DNA, 120 bp, Artificial Sequence
  ENSG00000265203_1 (sequence is synthesized)
ccatgatgagagaatgggttctgctcatgtccgtgctgctctgtggcctggctggccccacacacctgttccagccaagcctggtgctggacatggccaaggtcctcttggataactact

SEQ ID NO: 788541 - DNA, 120 bp, Artificial Sequence
  ENSG00000265203_2 (sequence is synthesized)
gcttcccggagaacctgctgggcatgcaggaagccatccagcaggccatcaagagccatgagattctgagcatctcagacccgcagacgctggccagtgtgctgacagccggggtgcaga

SEQ ID NO: 788542 - DNA, 120 bp, Artificial Sequence
  ENSG00000265203_3 (sequence is synthesized)
gctccctgaacgatcctcgcctggtcatctcctatgagcccagcacccccgagcctcccccacaagtcccagcactcaccagcctctcagaagaggaactgcttgcctggctgcaaaggg

SEQ ID NO: 788543 - DNA, 120 bp, Artificial Sequence
  ENSG00000265203_4 (sequence is synthesized)
gcctccgccatgaggttctggagggtaatgtgggctacctgcgggtggacagcgtcccgggccaggaggtgctgagcatgatgggggagttcctggtggcccacgtgtgggggaatctca

SEQ ID NO: 788544 - DNA, 120 bp, Artificial Sequence
  ENSG00000265203_5 (sequence is synthesized)
tgggcacctccgccttagtgctggatctccggcactgcacaggaggccaggtctctggcattccctacatcatctcctacctgcacccagggaacaccatcctgcacgtggacactatct

SEQ ID NO: 788545 - DNA, 120 bp, Artificial Sequence
  ENSG00000265203_6 (sequence is synthesized)
acaaccgcccctccaacaccaccacggagatctggaccttgccccaggtcctgggagaaaggtacggtgccgacaaggatgtggtggtcctcaccagcagccagaccaggggcgtggccg

SEQ ID NO: 788546 - DNA, 120 bp, Artificial Sequence
  ENSG00000265203_7 (sequence is synthesized)
aggacatcgcgcacatccttaagcagatgcgcagggccatcgtggtgggcgagcggactgggggaggggccctggacctccggaagctgaggataggcgagtctgacttcttcttcacgg

SEQ ID NO: 788547 - DNA, 120 bp, Artificial Sequence
  ENSG00000265203_8 (sequence is synthesized)
tgcccgtgtccaggtccctggggccccttggtggaggcagccagacgtgggagggcagcggggtgctgccctgtgtggggactccggccgagcaggccctggagaaagccctggccatcc

SEQ ID NO: 788548 - DNA, 120 bp, Artificial Sequence
  ENSG00000265203_9 (sequence is synthesized)
tcactctgcgcagcgcccttccaggggtagtccactgcctccaggaggtcctgaaggactactacacgctggtggaccgtgtgcccaccctgctgcagcacttggccagcatggacttct

SEQ ID NO: 788549 - DNA, 120 bp, Artificial Sequence
  ENSG00000265203_10 (sequence is synthesized)
ccacggtggtctccgaggaagatctggtcaccaagctcaatgccggcctgcaggctgcgtctgaggatcccaggctcctggtgcgagccatcgggcccacagaaactccttcttggcccg

SEQ ID NO: 788550 - DNA, 120 bp, Artificial Sequence
  ENSG00000265203_11 (sequence is synthesized)
cgcccgacgctgcagccgaagactcaccaggggtggccccagagttgcctgaggacgaggctatccggcaagcactggtggactctgtgttccaggtgtcggtgctgccaggcaatgtgg

SEQ ID NO: 788551 - DNA, 120 bp, Artificial Sequence
  ENSG00000265203_12 (sequence is synthesized)
gctacctgcgcttcgatagttttgctgacgcctccgtcctgggtgtgttggccccatatgtcctgcgccaggtgtgggagccgctacaggacacggagcacctcatcatggacctgcgcc

SEQ ID NO: 788552 - DNA, 120 bp, Artificial Sequence
  ENSG00000265203_13 (sequence is synthesized)
acaaccctggagggccatcctctgctgtgcccctgctcctgtcctacttccagggccctgaggccggccccgtgcacctcttcaccacctatgatcgccgcaccaacatcacgcaggagc

SEQ ID NO: 788553 - DNA, 120 bp, Artificial Sequence
  ENSG00000265203_14 (sequence is synthesized)
acttcagccacatggagctcccgggcccacgctacagcacccaacgtggggtgtatctgctcaccagccaccgcaccgccacggccgcggaggagttcgccttccttatgcagtcgctgg

SEQ ID NO: 788554 - DNA, 120 bp, Artificial Sequence
  ENSG00000265203_15 (sequence is synthesized)
gctgggccacactggtaggtgagatcaccgcgggcaacctgctgcacacccgcacggtgccgctgctggacacacccgaaggcagcctcgcgctcaccgtgccggtcctcaccttcatcg

SEQ ID NO: 788555 - DNA, 120 bp, Artificial Sequence
  ENSG00000265203_16 (sequence is synthesized)
acaatcacggcgaggcctggctgggtggtggagtggtgcccgatgccatcgtgctggccgaggaggccctggacaaagcccaggaagtgctggagttccaccaaagcctgggggccttgg

SEQ ID NO: 788556 - DNA, 120 bp, Artificial Sequence
  ENSG00000265203_17 (sequence is synthesized)
agggcgcctaccgcacagctgtggacttggagtctctggcctctcagctcacagcagacctccaggaggtgtctggggaccaccgcttgctagtgttccacagccctggcgagctggtgg

SEQ ID NO: 788557 - DNA, 120 bp, Artificial Sequence
  ENSG00000265203_18 (sequence is synthesized)
tagaggaagcacccccaccaccccctgctgtcccctctccagaggagctcacctaccttattgaggccctgttcaagacagaggtgctgcccggccagctgggctacctgcgttttgacg

SEQ ID NO: 788558 - DNA, 120 bp, Artificial Sequence
  ENSG00000265203_19 (sequence is synthesized)
ccatggctgaactggagacagtgaaggccgtggggccacagctggtgcggctggtatggcaacagctggtggacacggctgcgctggtgatcgacctgcgctacaaccctggcagctact

SEQ ID NO: 788559 - DNA, 120 bp, Artificial Sequence
  ENSG00000265203_20 (sequence is synthesized)
ccacggccatcccgctgctctgctcctacttctttgaggcagagccccgccagcacctgtattctgtctttgacagggccacctcaaaagtcacggaggtgtggaccttgccccaggtcg

SEQ ID NO: 788560 - DNA, 120 bp, Artificial Sequence
  ENSG00000265203_21 (sequence is synthesized)
ccggccagcgctacggctcacacaaggacctctacatcctgatgagccacaccagtggctctgcggccgaggcctttgcacacaccatgcaggacctgcagcgggccacggtcattgggg

SEQ ID NO: 788561 - DNA, 120 bp, Artificial Sequence
  ENSG00000265203_22 (sequence is synthesized)
agcccacggccggaggcgcactctctgtgggcatctaccaggtgggcagcagccccttatatgcatccatgcccacccagatggccatgagtgccaccacaggcaaggcctgggacctgg

SEQ ID NO: 788562 - DNA, 120 bp, Artificial Sequence
  ENSG00000265203_23 (sequence is synthesized)
ctggtgtggagcccgacatcactgtgcccatgagcgaagccctttccatagcccaggacatagtggctctgcgtgccaaggtgcccacggtgctgcagacggccgggaagctggtggctg

SEQ ID NO: 788563 - DNA, 120 bp, Artificial Sequence
  ENSG00000265203_24 (sequence is synthesized)
ataactatgcctctgccgagctgggggccaagatggccaccaaactgagcggtctgcagagccgctactccagggtgacctcagaagtggccctagccgagatcctgggggctgacctgc

SEQ ID NO: 788564 - DNA, 120 bp, Artificial Sequence
  ENSG00000265203_25 (sequence is synthesized)
agatgctctccggagacccacacctgaaggcagcccatatccctgagaatgccaaggaccgcattcctggaattgtgcccatgcagatcccttcccctgaagtatttgaagagctgatca

SEQ ID NO: 788565 - DNA, 120 bp, Artificial Sequence
  ENSG00000265203_26 (sequence is synthesized)
agttttccttccacactaacgtgcttgaggacaacattggctacttgaggtttgacatgtttggggacggtgagctgctcacccaggtctccaggctgctggtggagcacatctggaaga

SEQ ID NO: 788566 - DNA, 120 bp, Artificial Sequence
  ENSG00000265203_27 (sequence is synthesized)
agatcatgcacacggatgccatgatcatcgacatgaggttcaacatcggtggccccacatcctccattcccatcttgtgctcctacttctttgatgaaggccctccagttctgctggaca

SEQ ID NO: 788567 - DNA, 120 bp, Artificial Sequence
  ENSG00000265203_28 (sequence is synthesized)
agatctacagccggcctgatgactctgtcagtgaactctggacacacgcccaggttgtaggtgaacgctatggctccaagaagagcatggtcattctgaccagcagtgtgacggccggca

SEQ ID NO: 788568 - DNA, 120 bp, Artificial Sequence
  ENSG00000265203_29 (sequence is synthesized)
ccgcggaggagttcacctatatcatgaagaggctgggccgggccctggtcattggggaggtgaccagtgggggctgccagccaccacagacctaccacgtggatgacaccaacctctacc

SEQ ID NO: 788569 - DNA, 120 bp, Artificial Sequence
  ENSG00000265203_30 (sequence is synthesized)
tcactatccccacggcccgttctgtgggggcctcggatggcagctcctgggaaggggtgggggtgacaccccatgtggttgtccctgcagaagaggctctcgccagggccaaggagatgc

SEQ ID NO: 788570 - DNA, 120 bp, Artificial Sequence
  ENSG00000265203_31 (sequence is synthesized)
tccagcacaaccagctgagggtgaagcggagcccaggcctgcaggaccacctgtagggaagggccccataggcagagccccagggcagacagaacctctgggacacacaccaagggcact

SEQ ID NO: 788571 - DNA, 120 bp, Artificial Sequence
  ENSG00000265203_32 (sequence is synthesized)
cctgcaggtggcccggcctgaggttcccaggagcagcaaaggggcctgctgagctctggttaggttacagctggaggtgtgtatatatacacacacacacatgtatatacacatatatat

SEQ ID NO: 788572 - DNA, 120 bp, Artificial Sequence
  ENSG00000265203_33 (sequence is synthesized)
gtgtatgtatatatatgtatatatatatggctttccaataaccacctaaattttaacaaaggttccttctaagtggtagaacttggggtggtatttttaccttccttcttcatactttgc

SEQ ID NO: 788573 - DNA, 120 bp, Artificial Sequence
  ENSG00000265203_34 (sequence is synthesized)
tctttttcttaaatactcattaatgtgcatatatcattattttcagatgcagctatcattattccaaaatacaaaataaagaagataaaataaattatatacccgagccattaaccacaa

SEQ ID NO: 788574 - DNA, 120 bp, Artificial Sequence
  ENSG00000265241_0 (sequence is synthesized)
agagttagcctttgattggtcagcttgactggcgacctttcccctctgcgacagtttcccgaggtacctagtgtctgagcggcacagacgagatctcgatcgaaggcgagatggcggacg

SEQ ID NO: 788575 - DNA, 120 bp, Artificial Sequence
  ENSG00000265241_1 (sequence is synthesized)
tgctagatcttcacgaggctgggggcgaagatttcgccatggatgaggatggggacgagagcattcacaaactgaaagaaaaagcgaagaaacggaagggtcgcggctttggctccgaag

SEQ ID NO: 788576 - DNA, 120 bp, Artificial Sequence
  ENSG00000265241_2 (sequence is synthesized)
aggggtcccgagcgcggatgcgtgaggattatgacagcgtggagcaggatggcgatgaacccggaccacaacgctctgttgaaggctggattctctttgtaactggagtccatgaggaag

SEQ ID NO: 788577 - DNA, 120 bp, Artificial Sequence
  ENSG00000265241_3 (sequence is synthesized)
ccaccgaagaagacatacacgacaaattcgcagaatatggggaaattaaaaacattcatctcaacctcgacaggcgaacaggatatctgaaggggtatactctagttgaatatgaaacat

SEQ ID NO: 788578 - DNA, 120 bp, Artificial Sequence
  ENSG00000265241_4 (sequence is synthesized)
acaaggaagcccaggctgctatggagggactcaatggccaggatttgatgggacagcccatcagcgttgactggtgttttgttcggggtccaccaaaaggcaagaggagaggtggccgaa

SEQ ID NO: 788579 - DNA, 120 bp, Artificial Sequence
  ENSG00000265241_5 (sequence is synthesized)
gacgcagcagaagtccagaccggagacgtcgctgacaggtcctctgttgtccaggtgttctcttcaagattccatttgaccatgcagccttggacaaataggactggggtggaacttgct

SEQ ID NO: 788580 - DNA, 120 bp, Artificial Sequence
  ENSG00000265241_6 (sequence is synthesized)
gtgtttatatttaatctcttaccgtatatgcgtagtatttgagttgcgaataaatgttccatttttgttttctacatttaatgttactttcctgtcctaaaattgaaagttctaaagcat

SEQ ID NO: 788581 - DNA, 120 bp, Artificial Sequence
  ENSG00000265241_7 (sequence is synthesized)
agcaaggctgtatggatcattgtgaagatacttctagggactgaactctatgtatttcttttttttcttttttttgagatagagtcttgctgtgttacccagggtggattgcagctgatc

SEQ ID NO: 788582 - DNA, 120 bp, Artificial Sequence
  ENSG00000265241_8 (sequence is synthesized)
gctgtgttacccagggtggattgcagctgatcatagctcactgcagcttcaaactcttgggctcaagccatccttctgcctcactgtccctagtagttgggattacaggcacatgccacc

SEQ ID NO: 788583 - DNA, 120 bp, Artificial Sequence
  ENSG00000265241_9 (sequence is synthesized)
gatggggtcttgctgtgttacctgggctagttatgtgagtttctatattagacatagtctcaagtttcaggtagggtttaaagtagagacactggtcagtatttcttttttggggggaac

SEQ ID NO: 788584 - DNA, 120 bp, Artificial Sequence
  ENSG00000265241_10 (sequence is synthesized)
taggagagcaggagtagaagtgagatgttaagatcttatggcactaaagacttactattctgttcctacatactctgttaggatcagatagatgttatagaaatgccttttgtttctcct

SEQ ID NO: 788585 - DNA, 120 bp, Artificial Sequence
  ENSG00000265241_11 (sequence is synthesized)
gcccttcttgatgtcacagttttttgtacttccagctgtctaaaggcatgaatctcctcttggagcattctcccagacccttctttagaagagtctatactaagttcttggtgccctctt

SEQ ID NO: 788586 - DNA, 120 bp, Artificial Sequence
  ENSG00000265241_12 (sequence is synthesized)
cggcagccaagggtgaaggccccatagaggagaggatccaaaggagcattgaggaggcccaagaggaaaaggatgtggctcaggctgggagggacttcagttagcatggtgggggagaac

SEQ ID NO: 788587 - DNA, 120 bp, Artificial Sequence
  ENSG00000265241_13 (sequence is synthesized)
cagtaccacatacccagtaggtaataaggtgtccagcagaggatgaaggtcagcaagataagcagggccagtctcagggcccggagacgaacacggggacaattgtcaaaggagcggggg

SEQ ID NO: 788588 - DNA, 120 bp, Artificial Sequence
  ENSG00000265241_14 (sequence is synthesized)
agggcaaattcaccagcaggggctaggaatttagaaaatatactgtaattcagacactcagcttctgatctgagtatagggtgaattgatggaggggcatagctagtgagacagagctcg

SEQ ID NO: 788589 - DNA, 120 bp, Artificial Sequence
  ENSG00000265241_15 (sequence is synthesized)
cctcctacaaggaggagaatgttgcaaaccgttttccccttcccaacctgggactatatgatttcttacccccagggattatgatagaaatatgaagccaccaagtctagacttgatggt

SEQ ID NO: 788590 - DNA, 120 bp, Artificial Sequence
  ENSG00000265241_16 (sequence is synthesized)
gttcaagaataaataatactgattgcctccctagtccttgtccagctaactcagctgtttataattgaagggattcaacaaaattatctctagcatcaggtgctagacatggttagaatc

SEQ ID NO: 788591 - DNA, 120 bp, Artificial Sequence
  ENSG00000265241_17 (sequence is synthesized)
tcaccatggtttagtgactggtagatagctattaggtaggtagataaataaatgatgctagaggcaacaggtctagggttaaggattaaggcctgggaattggagtctcaccatggctcc

SEQ ID NO: 788592 - DNA, 120 bp, Artificial Sequence
  ENSG00000265241_18 (sequence is synthesized)
ccttccttgtctggggcctggacacactgaggacaatgcggctatagcagatggccatggcagtcagtggcagcagaaagaggcagcagaaggtgaagaggttataggtggtctcttgcc

SEQ ID NO: 788593 - DNA, 120 bp, Artificial Sequence
  ENSG00000265241_19 (sequence is synthesized)
attgagccttgaagctgcctttggtgacacactgagtgaaagggactgggccagctcagtggaccgtgtggaacaggaacagctggagtggagttgaggactattagaactggttcccct

SEQ ID NO: 788594 - DNA, 120 bp, Artificial Sequence
  ENSG00000265241_20 (sequence is synthesized)
aattcatccttaattccaagtgaagcagcacagtgctgagaaacagttcatccatggtgccatgttaaagaagttggaaatatatcttgaaaatcctatcttccttttaggcttgaatat

SEQ ID NO: 788595 - DNA, 120 bp, Artificial Sequence
  ENSG00000265241_21 (sequence is synthesized)
gatgctgaacagtaagtttgttaaatcttggaacttaaaacaatcctgctttctcaagtactattctaacattgcgctttataagggatgatatttctaccacctcactcatatttttag

SEQ ID NO: 788596 - DNA, 120 bp, Artificial Sequence
  ENSG00000265241_22 (sequence is synthesized)
ctgaaatgattttcctggtatgtctgttattttgtggaaaaagaaatattgtgtaaaatgggtgctgccaaaattccaggccattttgcagggactctgaagtgacctttagtagtaata

SEQ ID NO: 788597 - DNA, 120 bp, Artificial Sequence
  ENSG00000265241_23 (sequence is synthesized)
gtcttatgtgcagtaactataatggtaaagaatgttaaataataaaatttaacattttccaaatgctattgggctgcccctccccctttttgttaaattgctgggttttccaactgaatc

SEQ ID NO: 788598 - DNA, 120 bp, Artificial Sequence
  ENSG00000265241_24 (sequence is synthesized)
agtaaaaactatttctgtttagagctacaaggttaaagtgcctgctttccagtaatggagattgagtcactattaatttgataaaaggtaagctcagtaggcatcagattcctagataca

SEQ ID NO: 788599 - DNA, 120 bp, Artificial Sequence
  ENSG00000265241_25 (sequence is synthesized)
aggcatttgggaaagtgattttagcagacatgagggacatttaggaaagatgaatagtttcagcctaagagaattttgtgaactgtttggagttacgatcaggctactctgagctagttg

SEQ ID NO: 788600 - DNA, 120 bp, Artificial Sequence
  ENSG00000265241_26 (sequence is synthesized)
ggaaatggtctttcctcttcccatctcttgcattcatatatttctaagtttttttttttgtttttgtttttgtgctctgcctaagaagtgcttgagaattgtgaggagtataaaaatagt

SEQ ID NO: 788601 - DNA, 83 bp, Artificial Sequence
  ENSG00000265241_27 (sequence is synthesized)
gtactaaagatacaaaaaactagccgggactcgggaggctgaggcaggagaatgacctgaacccaggaggcggagcttgcagt

SEQ ID NO: 788602 - DNA, 120 bp, Artificial Sequence
  ENSG00000265241_28 (sequence is synthesized)
cctgggcgacagagtaagactgtctccaaaaaaaaaaaaaataataatcaaagctcttggatttatagtttggtccacagccttgttttgatctttcctttatcctgttttattgccatt

SEQ ID NO: 788603 - DNA, 120 bp, Artificial Sequence
  ENSG00000265241_29 (sequence is synthesized)
ctttcctttatcctgttttattgccatttaccacgtactgtagaaacatccctttcaactgctgataacttggaaacaagcctacaaaaataagtaatttctaactactcctaatactac

SEQ ID NO: 788604 - DNA, 120 bp, Artificial Sequence
  ENSG00000265241_30 (sequence is synthesized)
ctataactacccctaagcccttaccactctaacgtgacattattaaattttttattttattaacactaatattttaactacaattacagcatatgggcaatacagaatttacctaaaagg

SEQ ID NO: 788605 - DNA, 120 bp, Artificial Sequence
  ENSG00000265241_31 (sequence is synthesized)
atactaatttggaacaaaaaaaatcacctttcgcacatgtatcatgtcacaaccagtttgccattgaaacaaatagaggttgcaaatattgtcagattgtcaggctgtaagaaaggatga

SEQ ID NO: 788606 - DNA, 120 bp, Artificial Sequence
  ENSG00000265241_32 (sequence is synthesized)
aattcatttcccattgcatcatcttgtggcccatggatttcaagtgccttagccaaaatcatatagctagttagcagtagagccgagactcagaaaaaaacaaagtaaaacaggcagact

SEQ ID NO: 788607 - DNA, 120 bp, Artificial Sequence
  ENSG00000265241_33 (sequence is synthesized)
gaaacaaaaagtcttctaattcccagtccacatgtaaaatttgcttcatataaacaaacctaattgtaaatggcactgtagcaacaggcttctttttaacacttggattggtaaaggtct

SEQ ID NO: 788608 - DNA, 120 bp, Artificial Sequence
  ENSG00000265241_34 (sequence is synthesized)
tggtaaaggtcttgtttgcaacatattagaagtattatttttctctttcccccccaccccacccccaacagagtctggctctgccgcccacgccggagtgcagtggtgcagtcttggctc

SEQ ID NO: 788609 - DNA, 61 bp, Artificial Sequence
  ENSG00000265241_35 (sequence is synthesized)
ggtgcagtcttggctcactgcagcctccactcaccactatacccggctaatttttgtattt

SEQ ID NO: 788610 - DNA, 75 bp, Artificial Sequence
  ENSG00000265241_36 (sequence is synthesized)
ggcctttctttgttcttaggagtatagtcagactaacttctagtagttatatttctaataattgaggatgtaagt

SEQ ID NO: 788611 - DNA, 120 bp, Artificial Sequence
  ENSG00000265241_37 (sequence is synthesized)
acttctagtagttatatttctaataattgaggatgtaagtaaggatcaaatcttaaatcagtataatgcattgtcattccagagataaatcctagacccttcttggcctccttctgacat

SEQ ID NO: 788612 - DNA, 120 bp, Artificial Sequence
  ENSG00000265241_38 (sequence is synthesized)
aattctaatcctacagtctcagagatgctgttgtatcctgccccccaaccccatgatagtgatagtggtttttgccttgaaggaattgctttgtatttagcttttccccctctagatttc

SEQ ID NO: 788613 - DNA, 120 bp, Artificial Sequence
  ENSG00000265241_39 (sequence is synthesized)
tagttccttttcagtattggattggatttgagatttgattaacctagtactcaggttcagatgctcgcctctttgcaattttaacactcattcgacaataaagtcagtaaaaaacacaaa

SEQ ID NO: 788614 - DNA, 120 bp, Artificial Sequence
  ENSG00000265241_40 (sequence is synthesized)
acggccccctgtagtctgtacctcctaagatggatgatttagcttgcgatctgttcaagatggccacagaaacacttccgtttcccgaggtacctagtgtctgagcggcacagacgagat

SEQ ID NO: 788615 - DNA, 120 bp, Artificial Sequence
  ENSG00000265241_41 (sequence is synthesized)
agcctctgcttctggagactctccatctgttctggaggaggtcacttgttcaactgtcaaggttctgcagggaacgaagatctgggccgcccagtatgcttgctctcttcttggccatgc

SEQ ID NO: 788616 - DNA, 120 bp, Artificial Sequence
  ENSG00000265241_42 (sequence is synthesized)
tgtgagtaataatggaacctgtgaggtatccgtgtctgtggtagtagttagaaaccaataaaatagttaaacgcagtaggaatgggttcagagatagcttaaacaatctgagtccgcact

SEQ ID NO: 788617 - DNA, 120 bp, Artificial Sequence
  ENSG00000265241_43 (sequence is synthesized)
ggtcctctgttgtccagggccgcccagtatgcttgctctcttcttggccatgcgctgcagaggcatggagccagtcctgagttacagaaacagattcgacaactggagagccacctgagc

SEQ ID NO: 788618 - DNA, 120 bp, Artificial Sequence
  ENSG00000265241_44 (sequence is synthesized)
caggtcctctgttgtccagagctacaaggttaaagtgcctgctttccagtaatggagattgagtcactattaatttgataaaagggccgcccagtatgcttgctctcttcttggccatgc

SEQ ID NO: 788619 - DNA, 120 bp, Artificial Sequence
  ENSG00000265354_0 (sequence is synthesized)
aaccggcgcccggaaggtcagcgtgtgaagtaggcgctggcaacgcggggttacccgctgttattgaggagtaacggcccagcggaccacccaggcttgaggcagcggcgggaaccactc

SEQ ID NO: 788620 - DNA, 120 bp, Artificial Sequence
  ENSG00000265354_1 (sequence is synthesized)
ggtttgctgcgataccatggaaggaggcgggggaagcggcaacaaaaccacagggggattggccggctttttcggagccggcggagcaggttactcgcacgcggatttggctggcgtccc

SEQ ID NO: 788621 - DNA, 120 bp, Artificial Sequence
  ENSG00000265354_2 (sequence is synthesized)
gctaactggtatgaaccctctgtctccttatttaaatgtggatccacgatacctcgtgcaggatacagatgagtttattttacctaccggagctaataaaacccggggcagatttgagct

SEQ ID NO: 788622 - DNA, 120 bp, Artificial Sequence
  ENSG00000265354_3 (sequence is synthesized)
ggccttctttacgattggaggatgttgcatgacaggggctgcgtttggtgcaatgaatggtcttcggctaggattgaaggaaacccagaacatggcctggtccaaaccaagaaatgtaca

SEQ ID NO: 788623 - DNA, 120 bp, Artificial Sequence
  ENSG00000265354_4 (sequence is synthesized)
aagatgaccttaacacagtagcagctggaaccatgacaggcatgttgtataaatgtacaggtggtcttcgagggatagcacgaggtggtctgacaggactaacacttaccagcctctatg

SEQ ID NO: 788624 - DNA, 120 bp, Artificial Sequence
  ENSG00000265354_5 (sequence is synthesized)
cactatataataactgggagcacatgaaaggctccttgctccaacagtcactctgaagattttgccaactcatgaatggaggacacttcagtagtcatctagatccttttataagacagt

SEQ ID NO: 788625 - DNA, 120 bp, Artificial Sequence
  ENSG00000265354_6 (sequence is synthesized)
ttggagttattctctctcttctacctacaattagtttgaaaaattggagattttgatttgctgtgatgaaaatcctggatggctgaccaagactggcacttgttccagccattagtgagt

SEQ ID NO: 788626 - DNA, 120 bp, Artificial Sequence
  ENSG00000265354_7 (sequence is synthesized)
tgaagccaaagccctttggtgactcactgagtaccatggttctgttctcctctggagatcttgcacgtatctgttttcctcccccatgaactagaaaaccacttactcccagaattcagg

SEQ ID NO: 788627 - DNA, 120 bp, Artificial Sequence
  ENSG00000265354_8 (sequence is synthesized)
tcgtgcttgttagtactatatcaccaagtccattcatttaatgatccaaaactgtaatgttgcactgtattccaaataaagggtaaaaacagaaccaaagttataactccaacacacaaa

SEQ ID NO: 788628 - DNA, 120 bp, Artificial Sequence
  ENSG00000265491_0 (sequence is synthesized)
gtctctccttcctgcgcctctttggtgctgggaggcgggccgcagggtagctgttggcgccgccgcgtttctgggcctggccaactcacgtgaccgacgcgggctctgaagcggtgggcc

SEQ ID NO: 788629 - DNA, 120 bp, Artificial Sequence
  ENSG00000265491_1 (sequence is synthesized)
gcaccgaggcggcggcggcggcgacgactgcagctcgggaggtagcggcctggcgagggacgggccggctgccctctcggacggccgcggcggagggcaaaaatggcggaggcttcggcg

SEQ ID NO: 788630 - DNA, 120 bp, Artificial Sequence
  ENSG00000265491_2 (sequence is synthesized)
gccggggcggactcgggcgccgctgtagccgcccaccggtttttctgccacttttgcaagggcgaggtcagccccaaactaccggaatatatatgtcccagatgtgaatcaggctttatt

SEQ ID NO: 788631 - DNA, 120 bp, Artificial Sequence
  ENSG00000265491_3 (sequence is synthesized)
gaagaagtgacagatgattccagttttttaggtggtggcggcagtcggatagacaataccacaacaacacattttgcagagctttggggccatttggatcacacgatgttttttcaagat

SEQ ID NO: 788632 - DNA, 120 bp, Artificial Sequence
  ENSG00000265491_4 (sequence is synthesized)
tttagaccctttctaagtagcagtccactggaccaagataatagagccaatgaaaggggtcaccagactcacactgacttctggggagcaagacctccacggttgccattgggtcggaga

SEQ ID NO: 788633 - DNA, 120 bp, Artificial Sequence
  ENSG00000265491_5 (sequence is synthesized)
tacagatctcgaggaagttctcgtcctgacagatctccagctattgaaggaatactacaacacatctttgcaggattctttgcaaattctgccattcctggatctccacaccctttttcc

SEQ ID NO: 788634 - DNA, 120 bp, Artificial Sequence
  ENSG00000265491_6 (sequence is synthesized)
tggagcgggatgctgcactccaaccctggggactatgcctggggtcagacagggcttgatgccattgtaacccagcttttaggacaactggaaaacacaggccctcccccagctgacaag

SEQ ID NO: 788635 - DNA, 120 bp, Artificial Sequence
  ENSG00000265491_7 (sequence is synthesized)
gaaaagatcacatctcttccaacagtgacagtaactcaggaacaagttgatatgggtttagagtgtccagtatgcaaagaagattacacagttgaagaggaagtccggcagttaccttgc

SEQ ID NO: 788636 - DNA, 120 bp, Artificial Sequence
  ENSG00000265491_8 (sequence is synthesized)
aatcacttctttcacagcagttgtattgtgccgtggctagaactgcatgacacatgtcctgtatgtaggaagagcttaaatggtgaggactctactcggcaaagccagagcactgaggcc

SEQ ID NO: 788637 - DNA, 120 bp, Artificial Sequence
  ENSG00000265491_9 (sequence is synthesized)
tctgcaagcaacagatttagcaatgacagtcagctacatgaccgatggactttctgaagctaaagaccacacctgaatcagggctgtggtaatcatcttaccatagctgtaaattgtatc

SEQ ID NO: 788638 - DNA, 120 bp, Artificial Sequence
  ENSG00000265491_10 (sequence is synthesized)
aaaacaaaaaattagtagatggatttaggaatatgtaagaaactcaacacataatataaatgcaatgaatgtttttcttctttaaatttaaagttagtatctacagatggaattgtatct

SEQ ID NO: 788639 - DNA, 120 bp, Artificial Sequence
  ENSG00000265491_11 (sequence is synthesized)
acaaccaaatgcctcttatccctgaattcagagtgataattttataagtgtgaaacttaattatgtagggctccccccgtctgaatagaattaattccttaaagtctagttagggtcctg

SEQ ID NO: 788640 - DNA, 120 bp, Artificial Sequence
  ENSG00000265491_12 (sequence is synthesized)
ctgtctgtcatgttgccttgtaacggatgtttccacctccttctccaacctctaccccaccattagtgtattttactataaaaacagtggaaccacagccctaaagtcctgctgatataa

SEQ ID NO: 788641 - DNA, 120 bp, Artificial Sequence
  ENSG00000265491_13 (sequence is synthesized)
agtccttttgtcttaattgtatttaaaaaaaaaaaaaactactcttgatcacattagctatgaggcgaggtcaaattcaggtatctaagactaatgattttgttttgtcttgatccccag

SEQ ID NO: 788642 - DNA, 120 bp, Artificial Sequence
  ENSG00000265491_14 (sequence is synthesized)
gactaatgattttgttttgtcttgatccccagagagcaaatcaaagaaaaattacagcaagaagagaaaagtggtttatcattgtgtgctttggttttcttattttaattttttttgttt

SEQ ID NO: 788643 - DNA, 70 bp, Artificial Sequence
  ENSG00000265491_15 (sequence is synthesized)
gcagtggcacgatcttggctcattgcaaactctgcctcctgaatttgttaccatgcccagctaatttttt

SEQ ID NO: 788644 - DNA, 120 bp, Artificial Sequence
  ENSG00000265491_16 (sequence is synthesized)
gagccactgcgcctggcctcttattttaatttttaaagactacttcagttgatgcagtttcccaagaaacctacataacatatattgggagccttatgttgataggaatctgattcccat

SEQ ID NO: 788645 - DNA, 120 bp, Artificial Sequence
  ENSG00000265491_17 (sequence is synthesized)
ccattcctttttgggaatgagttgggcagcatacaggcacagaaagacagatgtttgagacctttgcttctgagattttaaaaaatgattaccgctgggcgcggtggctcacgcctgtaa

SEQ ID NO: 788646 - DNA, 72 bp, Artificial Sequence
  ENSG00000265491_18 (sequence is synthesized)
aactccatctcaaaaaaaaaaaaaaaatccccaactcactgctttttttgtttgtgcctcgacctcccaggc

SEQ ID NO: 788647 - DNA, 70 bp, Artificial Sequence
  ENSG00000265491_19 (sequence is synthesized)
tcaagtgatcctcccacctcagcctaccaagtggtagagatagggttttgccgtgttgcccaggctggtc

SEQ ID NO: 788648 - DNA, 120 bp, Artificial Sequence
  ENSG00000265491_20 (sequence is synthesized)
ctgggctcaagtgatctgcctgcctcaacctctcaaagtgctcaactcattgtttactgtcttttttcctagtaatcttaaaataatttgcctcacagaaatagagacagtaagtgtctg

SEQ ID NO: 788649 - DNA, 120 bp, Artificial Sequence
  ENSG00000265491_21 (sequence is synthesized)
tctgcagccagttcactgtttttggtaattcattggtcttcaggagttaagattttacattgtcacattttaatttttaagcctatttttcatctctgaaactttccttttctccttggt

SEQ ID NO: 788650 - DNA, 120 bp, Artificial Sequence
  ENSG00000265491_22 (sequence is synthesized)
tctggctatacttggactcaaactgatcagtgtgatcatgtccaaaacagcttggcctggaagaggtaggccttattttttcagcctagtagtgtcccatgcacatgctctttgtagcat

SEQ ID NO: 788651 - DNA, 120 bp, Artificial Sequence
  ENSG00000265491_23 (sequence is synthesized)
tcaagtgtttaacattggataaattaagaaggtcaagaatgttgttgaaacttcaaggtctcaaaaggaaatgatggggacatagaacaactgttggtgtaccaaaaaaaggtacagagg

SEQ ID NO: 788652 - DNA, 120 bp, Artificial Sequence
  ENSG00000265491_24 (sequence is synthesized)
ggcaccatttgtattgtcacacaacaatgatcagaatgatcagtttagaatgatcagaacaaaaacaccactctttaatgggtctttttcttggctagaagtctttcctcagtttttgtt

SEQ ID NO: 788653 - DNA, 120 bp, Artificial Sequence
  ENSG00000265491_25 (sequence is synthesized)
gactatcatacgctgatttgtgggtgacggaagggggctagagataacgtttctctgtactttggtaaaggatgaaggagtcagagagggaacagaaaaagtgagagagtggcctgctga

SEQ ID NO: 788654 - DNA, 120 bp, Artificial Sequence
  ENSG00000265491_26 (sequence is synthesized)
aataatagcctgcctctaaaagttgtgaccagaaagtatgattcatttgggcccagagggaataaaatatgttttttcatatacctcccatattacacctctgtagtgattgtttatttg

SEQ ID NO: 788655 - DNA, 120 bp, Artificial Sequence
  ENSG00000265491_27 (sequence is synthesized)
gggaatgagatctacttactgtgcgttgcccctgaaatgtagcttgagaatacacactggttttgaattggggaggaggatggaaggaaattagaggtgtattatgaatatttggccact

SEQ ID NO: 788656 - DNA, 120 bp, Artificial Sequence
  ENSG00000265491_28 (sequence is synthesized)
acttagatggaggaaggctatgttgaacttgggacacattgcagttttcaagtacacaatatcagttgtctcagaaaaatcatgacagcctggacatatttgcttgtcagtgtctggaga

SEQ ID NO: 788657 - DNA, 120 bp, Artificial Sequence
  ENSG00000265491_29 (sequence is synthesized)
tgccaggacaggcagttgtagttttacgtacagatagagaaccaatgcctagagaactagaaaggatctgagtacctttaaaaagggtggaaacaaagtactggataggggtctgccttt

SEQ ID NO: 788658 - DNA, 120 bp, Artificial Sequence
  ENSG00000265491_30 (sequence is synthesized)
ttatacacagtatagcaaacagcatcagacaaagttacatgaagttttcttcactttttttgctctggtggatagaggatgtgagactcattttactgtttcccagacctgtcccactta

SEQ ID NO: 788659 - DNA, 120 bp, Artificial Sequence
  ENSG00000265491_31 (sequence is synthesized)
cttaatggatctgttgtgtttcttcttataatggcaggcacctcagatgtccaggttaatttatgttgaggagttaggattcttcagggatttattattattattattattatttattta

SEQ ID NO: 788660 - DNA, 85 bp, Artificial Sequence
  ENSG00000265491_32 (sequence is synthesized)
tgcccagctaattttttatatgtttagtagagacaatagacctcaggtgatctgccagtcgtggcctcccaaagtgctgggatta

SEQ ID NO: 788661 - DNA, 120 bp, Artificial Sequence
  ENSG00000265491_33 (sequence is synthesized)
ctcccaaagtgctgggattacagacgggagccaccatgcccagcctgagatttattataaggaattggttcacacaataatggagtttgagaaatcccaagatctgcagtgggccagcta

SEQ ID NO: 788662 - DNA, 120 bp, Artificial Sequence
  ENSG00000265491_34 (sequence is synthesized)
agctagagatccaggagagctgatggtgtagttccagtctgaaggccagcttggataccctagaagagctgatgtttctgttccagttcagaggcaggaaaagactgaggtcttagttca

SEQ ID NO: 788663 - DNA, 120 bp, Artificial Sequence
  ENSG00000265491_35 (sequence is synthesized)
agcagtcaggcaggaggacttctcccttacttgttctattcagaccttcaactgattggatgagggccacttacattagggagggccatgtgctgtattcagtctactgactgaaatgtt

SEQ ID NO: 788664 - DNA, 120 bp, Artificial Sequence
  ENSG00000265491_36 (sequence is synthesized)
agtctcttccaaaaacaccttcacagacacacccagaatactgtatgaccaaatatctgggcatcatgtggcctagtcaagttgacacataagattaaccatcacaatgaggaaaaacag

SEQ ID NO: 788665 - DNA, 120 bp, Artificial Sequence
  ENSG00000265491_37 (sequence is synthesized)
aaatgatacatgtatacagagtgctcctcatcccaattaagtttcaccaagttaataatgtgtctctatgagaagtggttcaccatgttggtcaggctgttttcaaactcctgacctcaa

SEQ ID NO: 788666 - DNA, 120 bp, Artificial Sequence
  ENSG00000265491_38 (sequence is synthesized)
aagtgctgggattacaggtgtgagctagcactcccagccgacaggtgcttcttaaatgttttctttgagcaggaattggtccaggaattggttctcaagttagaaggaaaatttgagggg

SEQ ID NO: 788667 - DNA, 120 bp, Artificial Sequence
  ENSG00000265491_39 (sequence is synthesized)
aagttagaaggaaaatttgaggggaagaacttgttttttctccaatcagtctctgattaaatagttattaggaaaaactccttgcttatgtctttgtattgcacatttttatatatgtat

SEQ ID NO: 788668 - DNA, 120 bp, Artificial Sequence
  ENSG00000265491_40 (sequence is synthesized)
atatgtgtaaatagagatatttatatattcacagacaaacacgtgtatgcacatttcacaatggaggaagaagggatatggtgtgcactgaggtaaagtgagcagggatacagaagagag

SEQ ID NO: 788669 - DNA, 120 bp, Artificial Sequence
  ENSG00000265491_41 (sequence is synthesized)
ctggagcctcacagtctgattctctcattgtacataacctttagggtctttgtttccctgagttctctggtatggggcactgttggcttgggctggtaccctgttattctctgtgatgaa

SEQ ID NO: 788670 - DNA, 120 bp, Artificial Sequence
  ENSG00000265491_42 (sequence is synthesized)
gggattcactggaggtaaaaacgtaatcatttccaaaggttgagaataaatgactttgaggaaagggtgttcattatccgttgcttctatattataatcagttgaactacaatacggtta

SEQ ID NO: 788671 - DNA, 120 bp, Artificial Sequence
  ENSG00000265491_43 (sequence is synthesized)
tctattgattttttttaatttttctgacaaattattgacaccaaattgaataattcatgacctgcatgcttcagcttctttctccctggtttccaggtgctattccctcaagaaatgcaa

SEQ ID NO: 788672 - DNA, 120 bp, Artificial Sequence
  ENSG00000265491_44 (sequence is synthesized)
attaaatatgtcggtcttaataaatcaggagggaagcatagtctgtgtctgttttaaatgacaacaacaacaaaacagctttggggtttaagaagtggaagacacatttttatttttttg

SEQ ID NO: 788673 - DNA, 60 bp, Artificial Sequence
  ENSG00000265491_45 (sequence is synthesized)
ttggggtttaagaagtggaagacacatttttatttttttgagacacacgctcctgggttc

SEQ ID NO: 788674 - DNA, 120 bp, Artificial Sequence
  ENSG00000265491_46 (sequence is synthesized)
gggattacaggcattagccaccacgcccaggtgagaagacagattttaagagaaggagcagggctggtatctgaataggtatttggatgttaggggaaaaccctttttggcctctgtggt

SEQ ID NO: 788675 - DNA, 120 bp, Artificial Sequence
  ENSG00000265491_47 (sequence is synthesized)
tctgtggtagagcgatcggaaggtaaaagtgctgtttacaagaataatccattggagatctggggattggggacgacttataggatagagtcctcttgttgagaatttcccgaatgaatc

SEQ ID NO: 788676 - DNA, 120 bp, Artificial Sequence
  ENSG00000265491_48 (sequence is synthesized)
tcatgtaggttctgtcacagtaagatggaggaaaactttgatggggtaagtatcacaagtggctgtcctatagggggaaatcctagcctgcagtaatgtcagtgtctcagtattcagcca

SEQ ID NO: 788677 - DNA, 120 bp, Artificial Sequence
  ENSG00000265491_49 (sequence is synthesized)
gcgagccactgagctgctccaggggtttaaaatagaatgcatagaatacaatgtatacagctggtgatgctttccaggatcaaaatagagcccttgtctgatcccattgacattgtaagg

SEQ ID NO: 788678 - DNA, 120 bp, Artificial Sequence
  ENSG00000265491_50 (sequence is synthesized)
tttcgatctctcatacctgccacagacaagtacattgtaggcattcaacttttaaggttttatacatgcaaactttatgttttcctgccacactacacttggtgtccacagaagtgtagt

SEQ ID NO: 788679 - DNA, 120 bp, Artificial Sequence
  ENSG00000265491_51 (sequence is synthesized)
ttgtatgttgcctcttcttcctctttcaaccagaacacttagatctgtgatcataggatgtaagcctgtgattctttactttttctaataagaaatacaattttcaagatccaaaaatta

SEQ ID NO: 788680 - DNA, 60 bp, Artificial Sequence
  ENSG00000265491_52 (sequence is synthesized)
gctcatgcctgtaatctcagcagcacaataaaacaccatgtctactaaaaatacaaaaat

SEQ ID NO: 788681 - DNA, 120 bp, Artificial Sequence
  ENSG00000265491_53 (sequence is synthesized)
caagattgtgccactgcactccagggcaacagagagagaccctgtctcaaaacaaaaacccccaaattattagattcccttccaacaacttgatagccatattattagtatttttgatta

SEQ ID NO: 788682 - DNA, 120 bp, Artificial Sequence
  ENSG00000265491_54 (sequence is synthesized)
aagaatacataacaaaaagctgctatgatttcagtaatgcttttaagttaatttattagtcacaccagaatctacatccaattgaaatatatacaaatatttgaaagatatttattcagg

SEQ ID NO: 788683 - DNA, 120 bp, Artificial Sequence
  ENSG00000265491_55 (sequence is synthesized)
ctgaagattatggtatatagattccttctgataacctcatggcctcacaggttcaaaacccgtgtttgtgaatcactcatacagattggggctaagatgcgtgtccagaaaaccacctat

SEQ ID NO: 788684 - DNA, 120 bp, Artificial Sequence
  ENSG00000265491_56 (sequence is synthesized)
tatgcatgaaaatttgtaggcttatttgaaggcaattgtatcaacacattttgaaagccaagacacaagtattttaagtttctgtttaaccaagtctcgagataagcagagtaaataaac

SEQ ID NO: 788685 - DNA, 120 bp, Artificial Sequence
  ENSG00000265491_57 (sequence is synthesized)
tctttagaagcaagactcagttggtatgtacaaagtgggattgctttgtatatattccgcttagtttgagtcagagctagtaatctgatgctcttaaatgtcttcataaacttgggcagt

SEQ ID NO: 788686 - DNA, 120 bp, Artificial Sequence
  ENSG00000265491_58 (sequence is synthesized)
gatgtttcctttctgtgattatgtgtcacagatttttatatgtggactataattagtatagtacaatggctgaaacttttcctatagttggatatatcttctgagacttccagtgattgt

SEQ ID NO: 788687 - DNA, 120 bp, Artificial Sequence
  ENSG00000265491_59 (sequence is synthesized)
ataatgttgagtagctccagaagattatttgaatagtaaaaacaaaagacatctctacctatgtgagtttattatttagttagaaacacagaactaactatttaaaacaggtagagaaag

SEQ ID NO: 788688 - DNA, 120 bp, Artificial Sequence
  ENSG00000265491_60 (sequence is synthesized)
attaagatgaatgtgatgtagtggagaaagctttggagactttggagtcagaactcaaatggctctaggtcccaaatccagactctcattttgattctcagaacaattctgtggaaagag

SEQ ID NO: 788689 - DNA, 120 bp, Artificial Sequence
  ENSG00000265491_61 (sequence is synthesized)
ctcagaacaattctgtggaaagagaagatacaataggcaatatccctttttacagataggtaaacagaaatagcatctcaaaacctcatttgcactgggtgaggtggctcacgcctgtaa

SEQ ID NO: 788690 - DNA, 120 bp, Artificial Sequence
  ENSG00000265491_62 (sequence is synthesized)
aaaaaaaattcatttgcccaatgacaaatagctggtatgttgcagagccagaatttgaatccaggtctttttgcctccatggctagtccttttatctccatgggatacagtctaaaatcc

SEQ ID NO: 788691 - DNA, 120 bp, Artificial Sequence
  ENSG00000265491_63 (sequence is synthesized)
ttagtttgaggttcaagactatcactaataagagtcttactcatctacttcagccatatctctttccgttcccacaaaccttagctcccacatttggcaggtccttgccaaggagcacag

SEQ ID NO: 788692 - DNA, 120 bp, Artificial Sequence
  ENSG00000265491_64 (sequence is synthesized)
gtaaagtgtctctttccttttaatggctcaccatggagctgtagctaaatttctgtgctcttacccctttattcatgtagttcctcctatcaggaatatcctgcccactctctgcttaac

SEQ ID NO: 788693 - DNA, 120 bp, Artificial Sequence
  ENSG00000265491_65 (sequence is synthesized)
tatgacaagaggtcatctgtccaaagagaaagaagagagtttgtggatttaggagaaaagaaaagactccaaatactgctatgggcatttatttaaaaagagaaatgaccaaagaggtta

SEQ ID NO: 788694 - DNA, 120 bp, Artificial Sequence
  ENSG00000265491_66 (sequence is synthesized)
acaagtatttagatgaagctgggcagttgtagtctgtggtgctcttggtctgcacaaatcttcctcttcctccagcagtgctgtatggatgttgttgaatgttgaggtctgtctgcattt

SEQ ID NO: 788695 - DNA, 120 bp, Artificial Sequence
  ENSG00000265491_67 (sequence is synthesized)
tctcattttcatgccaagtcaatcactggatctggctgtcttcctttctgtcctacctatctttgcttgttttctctctctttcctttgcagtgttaaataaaaatttattcccccaaaa

SEQ ID NO: 788696 - DNA, 120 bp, Artificial Sequence
  ENSG00000265491_68 (sequence is synthesized)
aaccaaaaaaagaaaaaaaaaaaacagggcaaacaataagatattgaaagcctgagaggaaaagctgtagagtgagtttttgtagaggaataggagctttgaaaagctattgtggatgag

SEQ ID NO: 788697 - DNA, 120 bp, Artificial Sequence
  ENSG00000265491_69 (sequence is synthesized)
ggagctttgaaaagctattgtggatgagaaactagaaagccaagtgcacagctcagggcagtatgtgtgctcagaaaagacctgagaaggccattagctttcacctctggcttgtcttta

SEQ ID NO: 788698 - DNA, 120 bp, Artificial Sequence
  ENSG00000265491_70 (sequence is synthesized)
ggttcaacacaaacaggaagtgaatattaaggtagatttataaaggccctgggtaagttttgaaggagtgccccaacagctaatcagtagagacctggcgagcattttacttttcttttt

SEQ ID NO: 788699 - DNA, 90 bp, Artificial Sequence
  ENSG00000265491_71 (sequence is synthesized)
tttttttctttttggtttatttgttttgaaatgtggtcttgccttgctcaggctaatcttgaactcgttggttcaagcgatccttccact

SEQ ID NO: 788700 - DNA, 120 bp, Artificial Sequence
  ENSG00000265491_72 (sequence is synthesized)
ttacaggcacacaccactgtacccatctatttttgtttttattttttacacattataaatgttcagtttttttaaaaaaaattacgaagcatgtgaagaatctagaaaatatgcttcatt

SEQ ID NO: 788701 - DNA, 120 bp, Artificial Sequence
  ENSG00000265491_73 (sequence is synthesized)
cacaagaaaaaagaaatgaacagaaactaccccgaggaagcactaatactagaattactagacaaaaactttaaatcagctgtcttaagtatactcaaagagctaaaggacaccatggac

SEQ ID NO: 788702 - DNA, 120 bp, Artificial Sequence
  ENSG00000265491_74 (sequence is synthesized)
aaagaagtaaaggaattcaagataataatgtctcaacaaatagagaatatcaataaagagaaatttttaaaagtaggcaaagagaaattttggagctgaaggttacaataattgaaatga

SEQ ID NO: 788703 - DNA, 120 bp, Artificial Sequence
  ENSG00000265491_75 (sequence is synthesized)
aaattcactaggggagctcaacaaaagatatgagcagacagaagaatcagcaaacttggagataggtccactgaaattatatagtttgaagagcacacatttaaaagactgaagaaaaat

SEQ ID NO: 788704 - DNA, 120 bp, Artificial Sequence
  ENSG00000265491_76 (sequence is synthesized)
gaacagagtccaggagatgtgtgggataccaacatatatatcatggtaaggagagggagaaaggtgcagaaaacatgtttaagaagtaattgccaaaaccatttcaaatttgacaagaca

SEQ ID NO: 788705 - DNA, 120 bp, Artificial Sequence
  ENSG00000265491_77 (sequence is synthesized)
tgaatatacacatcaagaagctcagctaacacccaagaaggataaactcaaagacatccatacaagacacattataattaaaatttccgaagccagagataaagagagaatcttggaagc

SEQ ID NO: 788706 - DNA, 120 bp, Artificial Sequence
  ENSG00000265491_78 (sequence is synthesized)
agcaagagagaagcaacttgtaaaatataagggatcttaaataagatgaatttctgttgatttcttagcggaaaccatggaggctagaaggcagtgggataacatatttaaagtgatgaa

SEQ ID NO: 788707 - DNA, 120 bp, Artificial Sequence
  ENSG00000265491_79 (sequence is synthesized)
agacagacctgccaaccaagaattctaaatctggcaaaactatccttcaggaattaagaagaaatcatgacatacccagataaacaatagctgagggggcttcattgttaatagacctgc

SEQ ID NO: 788708 - DNA, 120 bp, Artificial Sequence
  ENSG00000265491_80 (sequence is synthesized)
cgtaatttttcttacacagcaaaaccaaaagccccacaatggaaaatcattttctgttcactgattgttaaaaactttttttaaaaaaagtcctgtgacatcaagtgcttgccaggatgt

SEQ ID NO: 788709 - DNA, 120 bp, Artificial Sequence
  ENSG00000265491_81 (sequence is synthesized)
ggcacagtagaaactcttaaacacttggtgggtgtttaaattgctacaaccagtttggaaaacaatttgtcattacccagtaaagttgaagatgtatagatcatgtaatagttttacaga

SEQ ID NO: 788710 - DNA, 120 bp, Artificial Sequence
  ENSG00000265491_82 (sequence is synthesized)
ccaaaaatatagaaactctggtacctctgcagaagaagacatacagtaatattcacagtggccatttgtaatataaaaaactgtaaacaatccaggtgtttattgattgatttttctaac

SEQ ID NO: 788711 - DNA, 120 bp, Artificial Sequence
  ENSG00000265681_0 (sequence is synthesized)
ctgcgttgctccgagggcccaatcctcctgccatcgccgccatcctggcttcgggggcgccggcctccaggcccccgggaggagaactcctagggctactaaatcctcgctggaggcggt

SEQ ID NO: 788712 - DNA, 120 bp, Artificial Sequence
  ENSG00000265681_1 (sequence is synthesized)
ggcttcttatgcgggaggacgtggcggagggcctgactttgggagccggggtcagtcggcctctgaggtgatctgtgaaaatggttcgctattcacttgacccggagaaccccacgaaat

SEQ ID NO: 788713 - DNA, 120 bp, Artificial Sequence
  ENSG00000265681_2 (sequence is synthesized)
catgcaaatcaagaggttccaatcttcgtgttcactttaagaacactcgtgaaactgctcaggccatcaagggtatgcatatacgaaaagccacgaagtatctgaaagatgtcactttac

SEQ ID NO: 788714 - DNA, 120 bp, Artificial Sequence
  ENSG00000265681_3 (sequence is synthesized)
ctggacacaaggtcggtggcccaaaaagagtgctgaatttttgctgcacatgcttaaaaacgcagagagtaatgctgaacttaagggtttagatgtagattctctggtcattgagcatat

SEQ ID NO: 788715 - DNA, 120 bp, Artificial Sequence
  ENSG00000265681_4 (sequence is synthesized)
ccaagtgaacaaagcacctaagatgcgccgccggacctacagagctcatggtcggattaacccatacatgagctctccctgccacattgagatgatccttacggaaaaggaacagattgt

SEQ ID NO: 788716 - DNA, 120 bp, Artificial Sequence
  ENSG00000265681_5 (sequence is synthesized)
tccaaagggttgactggattggtgaggcccgtgtggctacttctgtggaagcagtgctgtagttactggaagataaaagggaaagcaagcccttggtgggggaaagtatggctgcgatga

SEQ ID NO: 788717 - DNA, 120 bp, Artificial Sequence
  ENSG00000265681_6 (sequence is synthesized)
tggcatttcttaggacacctttggattaataatgaaaacaactactctctgagcagctgttcgaatcatctgatatttatactgaatgagttactgtaagtacgtattgacagaattaca

SEQ ID NO: 788718 - DNA, 120 bp, Artificial Sequence
  ENSG00000265681_7 (sequence is synthesized)
aggtatgcgattcatagttgtgatccaacagttcctcatgttccactcaaaaaaggtagctgcagtgatgactttcttaggacacctttggatttaccgtgaaaattaataaattctgag

SEQ ID NO: 788719 - DNA, 120 bp, Artificial Sequence
  ENSG00000265681_8 (sequence is synthesized)
tttgaaaacctagtgtgcagatcaagatggggcattttaattgtaattacatgatgatggaatttaaacgttttatagtgaataaatggagttttggagttttctctagcttcaacgaag

SEQ ID NO: 788720 - DNA, 120 bp, Artificial Sequence
  ENSG00000265681_9 (sequence is synthesized)
tttacctggcttttagtcacaagtttttttaattgccttgcccccaaagaatagaaataactcgacattttgaaaagctgaaaattgaaaatttaacgtttactttaaaaattaaagctt

SEQ ID NO: 788721 - DNA, 120 bp, Artificial Sequence
  ENSG00000265681_10 (sequence is synthesized)
gaagtatctgaaagatgtcactttacagaaacagtgtgtaccattccgacgttacaatggtggagttggcaggtgtgcgcaggtgagaattcttagttgccatttgaaaagacagatttt

SEQ ID NO: 788722 - DNA, 120 bp, Artificial Sequence
  ENSG00000265681_11 (sequence is synthesized)
aatggaaaagtgatgggataggataagaatggctaagatctgtgctgatgaacctatttctggttgctgtaatgacaggacaccttggattgatggtgaaataaaccatatcctaagaaa

SEQ ID NO: 788723 - DNA, 120 bp, Artificial Sequence
  ENSG00000265681_12 (sequence is synthesized)
ttgattttcttgttttcagtaattaactcttaggattttttaaatttctacctgcagtttccacagaatgaaactatttccttttattttttttgagtccctttatggcaaaattctgtg

SEQ ID NO: 788724 - DNA, 120 bp, Artificial Sequence
  ENSG00000265681_13 (sequence is synthesized)
acctttggaataactatgaaagaaaactattctgagcaaccctttcacctgtcttattttggcttttgtaagtttgtttcttgactaataataaatggtaagttttctgtaatcccagca

SEQ ID NO: 788725 - DNA, 120 bp, Artificial Sequence
  ENSG00000265681_14 (sequence is synthesized)
atgagttctcccaaaatccaccgctcttcctctttccctaagcagcctgagggttgactggattggtgaggcccgtgtggctacttctgtggaagcagtgctgtagttactggaagataa

SEQ ID NO: 788726 - DNA, 120 bp, Artificial Sequence
  ENSG00000265763_0 (sequence is synthesized)
acgcgcagtgctcttggccgggaggaggctgtgctgcaccagcacctcttgctccacatctccagagagcccagggccctgtggccgagtgtgtccagcccagtgtcatggggagcttcc

SEQ ID NO: 788727 - DNA, 120 bp, Artificial Sequence
  ENSG00000265763_1 (sequence is synthesized)
atatctcatggctccttgctgggccaagccctccagaaccccaaacccccaaagactgatgaatgccagagtggccaccttgcttatctgtggccccggccctggtgatcaccatggcag

SEQ ID NO: 788728 - DNA, 120 bp, Artificial Sequence
  ENSG00000265763_2 (sequence is synthesized)
ctgggaagggagccccgttgagcccatcggctgaaaacagatggcgacttagcgaacctgagctgggccggggctgcaagccagtgctgctcgagaagacgaaccgcctgggccctgagg

SEQ ID NO: 788729 - DNA, 120 bp, Artificial Sequence
  ENSG00000265763_3 (sequence is synthesized)
ctgctgtgggcagggcgggccgggatgtgggcagtgcggagctggcactgttggtagccccaggcaagccccgacctggcaagccgctgcccccgaagacacgtggagagcagaggcaga

SEQ ID NO: 788730 - DNA, 120 bp, Artificial Sequence
  ENSG00000265763_4 (sequence is synthesized)
gcgccttcacggagctgccgaggatgaaggaccggcaggtggatgctcaggcccaggagagggagcacgatgaccccacaggccaacctggtgccccacagctgacccagaacatcccca

SEQ ID NO: 788731 - DNA, 120 bp, Artificial Sequence
  ENSG00000265763_5 (sequence is synthesized)
gaggcccagctggcagcaaagtcttctctgtgtggcccagcggagcacgaagtgagcaaagaagcgcctttagcaaaccaaccaagcgaccagcagagaggcctgagctaacctcagtct

SEQ ID NO: 788732 - DNA, 120 bp, Artificial Sequence
  ENSG00000265763_6 (sequence is synthesized)
tccctgcaggggaatctgcagatgccctgggggagctgtctggactcctcaacactacagacctcgcttgttggggtcgactttcaactcccaagcttttggttggtgatttgtggaact

SEQ ID NO: 788733 - DNA, 120 bp, Artificial Sequence
  ENSG00000265763_7 (sequence is synthesized)
tgcaagcattgccacagaatgctccactctgtagcacttttctgggtgcccctacactgtggctggagcatacccaggcccaggtgcccccaccctcatcatcctccaccacttcgtggg

SEQ ID NO: 788734 - DNA, 120 bp, Artificial Sequence
  ENSG00000265763_8 (sequence is synthesized)
ccctcctgccacccaccctcacctccctgggcttgtccacccagaactggtgtgcaaagtgcaacctgtcctttcgcctaacgtccgacctggtctttcacatgcgatcccaccacaaaa

SEQ ID NO: 788735 - DNA, 120 bp, Artificial Sequence
  ENSG00000265763_9 (sequence is synthesized)
aggagcatgcggggcctgacccacattctcagaagcggagagaagaggcccttgcctgccctgtgtgccaggagcacttccgggagcgccaccacctctcccggcacatgacttctcaca

SEQ ID NO: 788736 - DNA, 120 bp, Artificial Sequence
  ENSG00000265763_10 (sequence is synthesized)
gctagcaggtgaccgcagaatgacctgctgggtgcagcagccagcctttggcagaggggggctccctgggcctgcgttgagggggctgtcatggtcctttgcagagctgctgcttttggc

SEQ ID NO: 788737 - DNA, 120 bp, Artificial Sequence
  ENSG00000265763_11 (sequence is synthesized)
attcatagataaacagctcaggcataatttgaaaaagccacacctgcatgatgtgttttgaaggaaatgaagtcctgaaataaagtgatgggctttgcaaatccagggtagaggccctaa

SEQ ID NO: 788738 - DNA, 120 bp, Artificial Sequence
  ENSG00000265763_12 (sequence is synthesized)
caggcacagagagcaggggcaactcctggcacacatcatgggctttggaggcacacaagcctggattcgaatctgggctctttcacatactagctgtgaccctggacaaagagctttaac

SEQ ID NO: 788739 - DNA, 120 bp, Artificial Sequence
  ENSG00000265763_13 (sequence is synthesized)
ctgctgagtccccattttctcatctgtgaaatggagatgataacactgtgtcttaggttggcattcaggtcacatgaaaggtgtgtggaaagtggccagcattctgcctgcagaccctga

SEQ ID NO: 788740 - DNA, 120 bp, Artificial Sequence
  ENSG00000265763_14 (sequence is synthesized)
tagttagctattgttattaacaagatctccatggcagacaagctaaagcatctgcctaagtcgtgagtctgtgggttggctcaggttaagctgagcttggctgggcttggcagcaagtct

SEQ ID NO: 788741 - DNA, 120 bp, Artificial Sequence
  ENSG00000265763_15 (sequence is synthesized)
cagatttgatcaagtcatattcgttttcttcttcggctggtgggctacccagagcgagcacgcttctctcgtggtcatgccaagaacacaggagggtgagtctaacaagcacacctcaag

SEQ ID NO: 788742 - DNA, 120 bp, Artificial Sequence
  ENSG00000265763_16 (sequence is synthesized)
cctctgcttgggtcacattgccaatgtcctctcagcccatacaagtggcaggaccaggcccaatattaaggagtggaaaagtgtaggctgcccttggtgaagctgtgacaagggagtgac

SEQ ID NO: 788743 - DNA, 120 bp, Artificial Sequence
  ENSG00000265763_17 (sequence is synthesized)
catccatcccctccacaggagggtgaggaattgggacaggtaattccagccaatacctggtccatagttcttcacattgtgagtatatgaatacggggaaatagaaccccctccccacca

SEQ ID NO: 788744 - DNA, 120 bp, Artificial Sequence
  ENSG00000265763_18 (sequence is synthesized)
cctacacacatgctgttttaccttccaagaataggacatgtgcaaaaactaggcttccagatcgtgaggctggggagcattctaggtaccatttattatctactgcgtttcggtcagtag

SEQ ID NO: 788745 - DNA, 120 bp, Artificial Sequence
  ENSG00000265763_19 (sequence is synthesized)
ctgttgtaggtacccgcatcagcccttgttcctaaggatgtgtggagcccaggctgtactctttgacattccacaggtcagtctgcgtgaaagccctttgtggggagtttccaagccagt

SEQ ID NO: 788746 - DNA, 120 bp, Artificial Sequence
  ENSG00000265763_20 (sequence is synthesized)
gtcgtttttgcactggtttccacctcactgtcagatattgttcttttgatatgcagtttccagccctccaatgagtccccagcacagatctcaggcttgtggctgggaataagcccagct

SEQ ID NO: 788747 - DNA, 120 bp, Artificial Sequence
  ENSG00000265763_21 (sequence is synthesized)
gagcaggtggggatctcagccagcctcccagactgcacctcttctattgctctcctctgtccaccgttccaggcagcagcactcccacctggctgctctgatgtcctcgctccctccatt

SEQ ID NO: 788748 - DNA, 120 bp, Artificial Sequence
  ENSG00000265763_22 (sequence is synthesized)
cctgcctctcaccatgcacgcatccattgtccacacacacacaaccagataatcttctgaaagtgtaactcagatgatgcctccaaccctgtggctgcccttcacacttacaggcctaac

SEQ ID NO: 788749 - DNA, 120 bp, Artificial Sequence
  ENSG00000265763_23 (sequence is synthesized)
cccagcaggacctgccagctgcttcatgaacaagtccctgcctcatgttaattgcaagcactcatttcactctccctgtgtgccaggcaatagcataagcactggaagaatacagatgtt

SEQ ID NO: 788750 - DNA, 120 bp, Artificial Sequence
  ENSG00000265763_24 (sequence is synthesized)
atagtgagtcctacaatagccctggaaggcaagagctgtttcctttccatttctacaatgagtcaattgcagatgatgctataacacttccagtgtttctgacacttccctgaagctata

SEQ ID NO: 788751 - DNA, 120 bp, Artificial Sequence
  ENSG00000265763_25 (sequence is synthesized)
cctgctaccttcatgggccgagcttgcccttatgaggcccacaggtggcagtgggcagaggggaccccgctataccacctcgctgctgttccactgtctgctcccgtgttctgaccacag

SEQ ID NO: 788752 - DNA, 120 bp, Artificial Sequence
  ENSG00000265763_26 (sequence is synthesized)
ctctggtgccgtttctcaagcctgggcttcattcaacattttctatctagctcttcatggtgctgctcctgctatggttccacagggcttcttctcgcaggtcagctccttagagaggtc

SEQ ID NO: 788753 - DNA, 120 bp, Artificial Sequence
  ENSG00000265763_27 (sequence is synthesized)
tcccagattccccgtaaagcagccctgcagcctctgcctctctcagccgcatcaccctgttgcttccttcacagcatgtctcaccatctgcaaccatctttctgtttgtcgtcttgttga

SEQ ID NO: 788754 - DNA, 120 bp, Artificial Sequence
  ENSG00000265763_28 (sequence is synthesized)
tttgctgcctccacactgtcagctccttgggaacagagattggtttgtttactgtgcatccctggtgcccagaacagggcatggcatattgttggtgcataataaatattgtggaaataa

SEQ ID NO: 788755 - DNA, 120 bp, Artificial Sequence
  ENSG00000265808_0 (sequence is synthesized)
acctcagcgggaagcggagacgcaagcagctggatctccggtaactgagacatagggtataactgttgtcgcggcggaggaagtgaggacggcgccaagggccttccgggccagtgttgg

SEQ ID NO: 788756 - DNA, 120 bp, Artificial Sequence
  ENSG00000265808_1 (sequence is synthesized)
atccctgtagtttgtgaagatggtgttgctaacaatgatcgcccgagtggcggacgggctcccgctggccgcctcgatgcaggaggacgaacagtctggccgggaccttcaacaatatca

SEQ ID NO: 788757 - DNA, 120 bp, Artificial Sequence
  ENSG00000265808_2 (sequence is synthesized)
gagtcaggctaagcaactctttcgaaagttgaatgaacagtcccctaccagatgtaccttggaagcaggagccatgacttttcactacattattgagcagggggtgtgttatttggtttt

SEQ ID NO: 788758 - DNA, 120 bp, Artificial Sequence
  ENSG00000265808_3 (sequence is synthesized)
atgtgaagctgccttccctaagaagttggcttttgcctacctagaagatttgcactcagaatttgatgaacagcatggaaagaaggtgcccactgtgtcccgaccctattcctttattga

SEQ ID NO: 788759 - DNA, 120 bp, Artificial Sequence
  ENSG00000265808_4 (sequence is synthesized)
atttgatactttcattcagaaaaccaagaagctctacattgacagtcgtgctcgaagaaatctaggctccatcaacactgaattgcaagatgtgcagaggatcatggtggccaatattga

SEQ ID NO: 788760 - DNA, 120 bp, Artificial Sequence
  ENSG00000265808_5 (sequence is synthesized)
agaagtgttacaacgaggagaagcactctcagcattggattcaaaggctaacaatttgtccagtctgtccaagaaataccgccaggatgcgaagtacttgaacatgcgttccacttatgc

SEQ ID NO: 788761 - DNA, 120 bp, Artificial Sequence
  ENSG00000265808_6 (sequence is synthesized)
caaacttgcagcagtagctgtatttttcatcatgttaatagtgtatgtccgattctggtggctgtgaaataatgaatacagtcactggtaagggagaacctagaacccagtaggtgtata

SEQ ID NO: 788762 - DNA, 120 bp, Artificial Sequence
  ENSG00000265808_7 (sequence is synthesized)
ttttcaggaaactgagctcacagagatgtgtattagaatccaagtggaacttctgcctctaaagaccttgcaagaaaagagatgccctgaaaatgaaaggttgcacctcatttaatgaag

SEQ ID NO: 788763 - DNA, 120 bp, Artificial Sequence
  ENSG00000265808_8 (sequence is synthesized)
cttaaccctatgtagaaagtctctttcgggggcagaggctttctctgggtgccaagccatatatattagggaatagtagattgttaatttcgttttttccctcccagtgcattttaaaaa

SEQ ID NO: 788764 - DNA, 120 bp, Artificial Sequence
  ENSG00000265808_9 (sequence is synthesized)
cagcactggctggggcattctcattctctgatggagccatcaatgagatttaacttagtcaacctgtgctagcaacattctgaaattccttcaaagaaggcagtcctttgggaaggtgtt

SEQ ID NO: 788765 - DNA, 120 bp, Artificial Sequence
  ENSG00000265808_10 (sequence is synthesized)
tttttttttttttttttttttgactctaatcaacattccttttgttggtgacatttgtgattttcagtaatctgagtttttgatggccttttaaacaagactccagtatgtgaaggttaa

SEQ ID NO: 788766 - DNA, 120 bp, Artificial Sequence
  ENSG00000265808_11 (sequence is synthesized)
ttgctgtgctccacagatcttgtctattggcccctgtagaaagttaacctttgttgttttccttttataatttgcttattgcacaattgctttagggtaagtgaattatattaagatgcc

SEQ ID NO: 788767 - DNA, 120 bp, Artificial Sequence
  ENSG00000265808_12 (sequence is synthesized)
ttgaaattatagcactccttgattaagaagctaaaatgtttctctcatttactccttaaacaaaagacttaaattagtttgggtcattattacttttattttgcagcatttggtttgtta

SEQ ID NO: 788768 - DNA, 120 bp, Artificial Sequence
  ENSG00000265808_13 (sequence is synthesized)
ttagcgtaagagcaagtataggatatggagaggcccctggcttcatgagaacaaaggcaggcccaggttataattacagctttctcctgccccttctttactttctctaccacagttttc

SEQ ID NO: 788769 - DNA, 120 bp, Artificial Sequence
  ENSG00000265808_14 (sequence is synthesized)
tccactgtttgttttcctcttgccacaatttgctaacatttaaaaaattttcctgcacccagtagtttcatatcctgtagacatcctcttaggacattctcaaatttcaaaataaaaaat

SEQ ID NO: 788770 - DNA, 120 bp, Artificial Sequence
  ENSG00000265808_15 (sequence is synthesized)
attcatctatgtagttaattaaagttaaagtttttgcagatcaactactcaaactactaaatacatttacctgagaaaaagtctctgagagcacttcattcctgttttagttcgtgtaaa

SEQ ID NO: 788771 - DNA, 120 bp, Artificial Sequence
  ENSG00000265808_16 (sequence is synthesized)
ttctctgagaatgttctggagatagataactcatttacagtggtttctattaactaattaaagtacccatgattttttccttttctgctcagggatgatggagatttccttttaccttct

SEQ ID NO: 788772 - DNA, 120 bp, Artificial Sequence
  ENSG00000265808_17 (sequence is synthesized)
gaggtagaattttttaatggggaaaataggccttttaaatattattgccagggtctgcaatataacttaaaattcctgtacatactgcaaatatttctttaaattgcacaggaaaatgag

SEQ ID NO: 788773 - DNA, 120 bp, Artificial Sequence
  ENSG00000265808_18 (sequence is synthesized)
cgaactttttatttcttaatatctttggcaaaaaactttaaccagtaagcaattttataaccctgagggatcatcaaagatactatcctgattcctggtaaggaaaaatatattatttcc

SEQ ID NO: 788774 - DNA, 120 bp, Artificial Sequence
  ENSG00000265808_19 (sequence is synthesized)
ttataacaaggcaaggagaaatgctattttattcctgataatttatataactagaataatttttttcctttcttttatggacctaaatctgccaattgggaattttgtgcatgaaatatg

SEQ ID NO: 788775 - DNA, 120 bp, Artificial Sequence
  ENSG00000265808_20 (sequence is synthesized)
aagttactttttatagataatcagtgcttttaagtccctaaaaggctcctgctgaagtaatgatgatgttaataataaaagcctttgaaaggctgaaaacctacatagtggtaccatagt

SEQ ID NO: 788776 - DNA, 120 bp, Artificial Sequence
  ENSG00000265808_21 (sequence is synthesized)
atttggagcttctataggagtggagaggggcagctcattgttgagagttgcatgctgcaacctaatggtcagcaatgaaataaatacttgtagaatgttcacttcagtgtgaagttttgt

SEQ ID NO: 788777 - DNA, 120 bp, Artificial Sequence
  ENSG00000265808_22 (sequence is synthesized)
tatctagttaatttatatacatatatcctttgtagatacatttctatctaatcttgttgggctaattaagaaataaggggtggggtaattgtcaacaaagggagaagaaagtggtttaag

SEQ ID NO: 788778 - DNA, 120 bp, Artificial Sequence
  ENSG00000265808_23 (sequence is synthesized)
atcagggcagcagaaaaattagagaacaagaatatcataatatggctcctggttttctttataagaggcagtgggaagatctgactagatgaaatgtatcatcaaccaaactggcatcta

SEQ ID NO: 788779 - DNA, 120 bp, Artificial Sequence
  ENSG00000265808_24 (sequence is synthesized)
aaatagaatgggataaatactgtatggggttattggaggcatattaagaaaggacacctaatttattttgggaagaagtatgttaagagaagactttctagagaaggagaatggggcatt

SEQ ID NO: 788780 - DNA, 120 bp, Artificial Sequence
  ENSG00000265808_25 (sequence is synthesized)
ctaggaagagtcaatggcatgtgcaaaggcatgaataaagacagtgaggcatattttggaaatgtaacagcttgattcagcttagcccatagggtaagcatagacaacagaggagacttg

SEQ ID NO: 788781 - DNA, 120 bp, Artificial Sequence
  ENSG00000265808_26 (sequence is synthesized)
aggaatgagaactagatgggtacactatcataaagggacttgtctatcatgctgaggagtttagaccatcttaatggtagtggccaaggatggcatcagatttatagtttcaagtgatca

SEQ ID NO: 788782 - DNA, 120 bp, Artificial Sequence
  ENSG00000265808_27 (sequence is synthesized)
taatattggcataaaagatatattagggaggaagcctgaagtagggagatgaaaataaggagccatcaaaggcagaatgaaacttaggcagatttcaagtgattttcaaaaatgttgtga

SEQ ID NO: 788783 - DNA, 120 bp, Artificial Sequence
  ENSG00000265808_28 (sequence is synthesized)
ctctttacaccactatataaataaaccttacaaaggattctgctttgaggcatgagagagttaagtcatttgcccaaagtcacagagttagaaagtaatagagctaagatttgaacctag

SEQ ID NO: 788784 - DNA, 120 bp, Artificial Sequence
  ENSG00000265808_29 (sequence is synthesized)
gcagtttggctccagagtctgtgctcttacgctatattaccaccaagaggtcaaataaataccaaagaatgtattttcgaatttaacaatgaggaacttaatcatacaggcagaagtaat

SEQ ID NO: 788785 - DNA, 120 bp, Artificial Sequence
  ENSG00000265808_30 (sequence is synthesized)
tccagagcactggagacagaagccagattgccatatgggttaaagagtgtgtaaaccactaggaagtaaagacatagaactactctcacaagtgcttttctggttattgtgacgctgaac

SEQ ID NO: 788786 - DNA, 120 bp, Artificial Sequence
  ENSG00000265808_31 (sequence is synthesized)
ttcatggcttgttttaattaagacatcttacaagtgtcaaaatttggaaatatttggacactgtacactctggttatttaaatatctaacaatggttcttgagcattttgagaaaccttt

SEQ ID NO: 788787 - DNA, 120 bp, Artificial Sequence
  ENSG00000265808_32 (sequence is synthesized)
gaaaatctgatgaaaggtatgtgccattactctagaaaaatgttcctgtgtacatgcacatcaagtatcacatactgtttcaggctgttcaaagactacaaagtctgttcatgacctaat

SEQ ID NO: 788788 - DNA, 120 bp, Artificial Sequence
  ENSG00000265808_33 (sequence is synthesized)
ggtccatgttccctcagttaagagctccagagataaaggatgtggaactcaaaggtaagtacccagagccttgaaaactccatctgtgacttggaagaattctacaatttgaattaactt

SEQ ID NO: 788789 - DNA, 120 bp, Artificial Sequence
  ENSG00000265808_34 (sequence is synthesized)
tgtggagagagatatatttttgaaaaattgtgtgtaccaaaaaaatttcatatcaaataatattttcctgtagtgcattcaaggatctggttccacagcaaaaaattgttttggtctcag

SEQ ID NO: 788790 - DNA, 120 bp, Artificial Sequence
  ENSG00000265808_35 (sequence is synthesized)
ttcctcaaaatcacatttaaggagcttgagatttatattttctacttaataagtcttacaaaagcaagttaagaaggaaaatggacaatcatttctgcacatatagggtttaataaaaca

SEQ ID NO: 788791 - DNA, 120 bp, Artificial Sequence
  ENSG00000265808_36 (sequence is synthesized)
tgtataataaaatatctcatattttaaatttccaccttattggtagctttcatgacaaagggctagggtgctgatggccatacaattaaggtttttggttagttagttagcagaactaac

SEQ ID NO: 788792 - DNA, 120 bp, Artificial Sequence
  ENSG00000265808_37 (sequence is synthesized)
tgactcctacctggtgggtttttcttttgtttggttggttggttggttggttttttcccagatggctcaggaggaaggtaaatagcagtcattgtatgtgtgacagagtttgagatagaa

SEQ ID NO: 788793 - DNA, 120 bp, Artificial Sequence
  ENSG00000265808_38 (sequence is synthesized)
tgagcatattgaatctcacatcctattcttattactgtcaggcagcgttgacctagcagtataaaactatctgaagcaatgtagtcactcagttctcataaagtttatttcaagtactgt

SEQ ID NO: 788794 - DNA, 120 bp, Artificial Sequence
  ENSG00000265808_39 (sequence is synthesized)
aacaattcatgtttggattagaaaagtcactagaaatttgacttccatatagtaatctatacttttttctctcatttccttcattttttgagccgtaagtgtaaggcattttgctggtat

SEQ ID NO: 788795 - DNA, 120 bp, Artificial Sequence
  ENSG00000265808_40 (sequence is synthesized)
tattacaatggttatgaggagtttctttgcttgcccaaggtcacatagctagcaagttaaagtagattcaaatccaggcctgctagataccaaattattatttaagagtacttttcacta

SEQ ID NO: 788796 - DNA, 120 bp, Artificial Sequence
  ENSG00000265808_41 (sequence is synthesized)
ctcctaaataatgacacagatacgtttgtcttacacatttcactttattgtcaagttattagtatgtttattttcaaaagttattttttgcaatttctttttattattccgtacttttta

SEQ ID NO: 788797 - DNA, 120 bp, Artificial Sequence
  ENSG00000265808_42 (sequence is synthesized)
aatttacttcattatcacgtcttcctttattctttttaaatagtttttgcttttgttattttgttttcccttttttactcttggtttgtaatacctctttccttatttgctcctttctca

SEQ ID NO: 788798 - DNA, 120 bp, Artificial Sequence
  ENSG00000265808_43 (sequence is synthesized)
tttgatctcaatgttaatccaactgttttccacatctgattcactaaaattttagcccttaaaaaaaaaattcctgtttttcctatctccttttgtccattctcttctccttgcctcact

SEQ ID NO: 788799 - DNA, 120 bp, Artificial Sequence
  ENSG00000265808_44 (sequence is synthesized)
tcttttatctttttccattttactttcattttttgtttctctagatgttgttttgacatatgagttaatgtactggtacaattttgcatctgtaaattagagcttcagaatcaactgagt

SEQ ID NO: 788800 - DNA, 120 bp, Artificial Sequence
  ENSG00000265808_45 (sequence is synthesized)
gtatttattctttatttttaggcctaaatttatcttaccttttattgattttataatatactatactctttcattttagtctgcatatgttagccaaagaagatatgcccctgttttaag

SEQ ID NO: 788801 - DNA, 120 bp, Artificial Sequence
  ENSG00000265808_46 (sequence is synthesized)
aaatctctgtaaaaaatgtcaagtgtgacaagaattcttcaagaaacaagctcctctagtttgtcttctatatttagagcttcaacagttacctatattactggtaactcccaaatatac

SEQ ID NO: 788802 - DNA, 120 bp, Artificial Sequence
  ENSG00000265808_47 (sequence is synthesized)
cttcaaacttgttttttgggcccaagttttttgcttcatatatatctgttttgaatatcccataaataattgcatctaaagcatacctccactccattgttctcaaagataaaaccaaac

SEQ ID NO: 788803 - DNA, 120 bp, Artificial Sequence
  ENSG00000265808_48 (sequence is synthesized)
ctgtgctgcttcttatatttctagtatttaagcgtcacctgccacccctttacctgagctacaagtcacgcattgcattagactcctctgctttcttctttcacctctaactagactatt

SEQ ID NO: 788804 - DNA, 120 bp, Artificial Sequence
  ENSG00000265808_49 (sequence is synthesized)
aaccaaaaattttttaatataactttcaaaaggtattttattacatcatttccatcctttatgtttgggttcaagccctcattaactttaacatggattcttggagtaccctccttactg

SEQ ID NO: 788805 - DNA, 120 bp, Artificial Sequence
  ENSG00000265808_50 (sequence is synthesized)
attttgttacacatgtccctcttttagtcagtactaccatgataataccatggataataattttttcatttttatttttagtcttgctctgtcgccgaggctagagtgcagtggcgcgat

SEQ ID NO: 788806 - DNA, 120 bp, Artificial Sequence
  ENSG00000265808_51 (sequence is synthesized)
ctaatcatactacattttctttagaataaaagatcacatacttgtttgccattcgcagtctggccccattgtgccattctagacttacctcctgccactccccaccagctttgttttgtc

SEQ ID NO: 788807 - DNA, 120 bp, Artificial Sequence
  ENSG00000265808_52 (sequence is synthesized)
ttagccacacaaaataatctagcgtctctaaccagtcaaacattttaccttgtgccttggctcactctgtgccttttctccagaatatctttctgtgtacttttctcccatccttttacc

SEQ ID NO: 788808 - DNA, 120 bp, Artificial Sequence
  ENSG00000265808_53 (sequence is synthesized)
tttaaacctgctgctatggtttgcatgttgtttggcccctccaaaactcatgttgtagttcaattgccaatgtaatagtgttgggagatggtacttttaagaggtaattaggttgctaag

SEQ ID NO: 788809 - DNA, 120 bp, Artificial Sequence
  ENSG00000265808_54 (sequence is synthesized)
atggattaacatctttctcttgacactgagactgggttctcctgggaatggttagttcccaagagagtgagttgttataaaacaatgctgcctcttctattttgcgctttttgtttgcac

SEQ ID NO: 788810 - DNA, 120 bp, Artificial Sequence
  ENSG00000265808_55 (sequence is synthesized)
tacattgacagtcgtgctcgaagaaatctaggctccatcaacactgaattgcaagatgtgcagaggatcatggtggccaatattgaagaagtgttacaacgaggagaagcactctcaggc

SEQ ID NO: 788811 - DNA, 81 bp, Artificial Sequence
  ENSG00000265808_56 (sequence is synthesized)
aatggcacgatcttggctcactgcaaccaccatctcctgggttcaagcgatcttcccaccttatcctcctgagtacctggg

SEQ ID NO: 788812 - DNA, 89 bp, Artificial Sequence
  ENSG00000265808_57 (sequence is synthesized)
acgcctggctaatttttgtattttccggctggtcacaaactccagggctcaagcaatccactcacttcagcttcccaaagtgctgggat

SEQ ID NO: 788813 - DNA, 120 bp, Artificial Sequence
  ENSG00000265808_58 (sequence is synthesized)
ccacaacacccagccctttatataattttaaaagtgtaggtaattaggtaaaattaggttaaaagtatatgtatatttacctgatatttaaatattacctaagtgtttaatgtggacatg

SEQ ID NO: 788814 - DNA, 120 bp, Artificial Sequence
  ENSG00000265808_59 (sequence is synthesized)
taagctctttaaagatagtgcttatgtattttatatctgtttcacatactccttatatatcccccacagaaatggtcacaaataggttccttaataagtatttttgaattcagccatgct

SEQ ID NO: 788815 - DNA, 120 bp, Artificial Sequence
  ENSG00000265808_60 (sequence is synthesized)
atatattcattagtaagtgagttttcttttattatgaactacaaactttaacctttttttgagtagtgagcagttattcatttaccttcacactctttaaataccaaattttgagtgagt

SEQ ID NO: 788816 - DNA, 120 bp, Artificial Sequence
  ENSG00000265808_61 (sequence is synthesized)
gagtgtgtaaggttttgtcatacagacttgcaattcctatatgggataaagtagactagcacaggaatttttcttgtatcactcatgcaagactctaaattccttaaaggcagggatcat

SEQ ID NO: 788817 - DNA, 120 bp, Artificial Sequence
  ENSG00000265808_62 (sequence is synthesized)
gtatattttgatcactgttgtatcctcagcacttcacatggtgcctgtcacataaatatttgttaaatgacttctccaagcaatagctttgtctttatgttatcctgtatttcaaaacgt

SEQ ID NO: 788818 - DNA, 120 bp, Artificial Sequence
  ENSG00000265808_63 (sequence is synthesized)
tcatatataaattctctcaactatgacttgtttcatagggtctaataattgttcctctgctgagttattctcagcagatttagattcatttagcaaatgtttattgagcactaactatat

SEQ ID NO: 788819 - DNA, 120 bp, Artificial Sequence
  ENSG00000265808_64 (sequence is synthesized)
tgtatattcttgtaggctctgtaaaaagatgccctgtgcattgtcatggttgtttctcagtccctgactcttcttccgtgactagatgtttttcttactcatgtgatcagttgctaattc

SEQ ID NO: 788820 - DNA, 120 bp, Artificial Sequence
  ENSG00000265808_65 (sequence is synthesized)
agacgtggctgtcatgcctgtgttattaagtaacgccatgtttcccaatcaaaaccagtctctattaagcaactccaaatattccaaaagcattctttaaggaagaaacaaccggattgc

SEQ ID NO: 788821 - DNA, 120 bp, Artificial Sequence
  ENSG00000265808_66 (sequence is synthesized)
aaaatagttttttctgaaatttcaagaagtgaaaagtttgatcagaatttattatgtcaaatggagagtttgtgtttattattaaaatatgccttatattttaatatggtctagcttgtg

SEQ ID NO: 788822 - DNA, 120 bp, Artificial Sequence
  ENSG00000265808_67 (sequence is synthesized)
tctatctggctatttctctaagtgtttagttaactgttataagaagataacaacattacaaatgtccttgggggtgaaaaaacttgccagaaaatactaaaaagcttaatttacttgcgt

SEQ ID NO: 788823 - DNA, 120 bp, Artificial Sequence
  ENSG00000265808_68 (sequence is synthesized)
ttttttttgtagtacttattgtattttagttacaactttcctatgtctattgaaatataaatcctgatagctttaacttcatagtagtctctactatgtggagaatcttagaaatgttag

SEQ ID NO: 788824 - DNA, 120 bp, Artificial Sequence
  ENSG00000265808_69 (sequence is synthesized)
cagtcatcattgaagtatagcttaagactgtgtttggttaattgaattttctggttatctgagtttgttttacatgggttatcattatcgtttttcaaaatataagagaatatgattcag

SEQ ID NO: 788825 - DNA, 120 bp, Artificial Sequence
  ENSG00000265808_70 (sequence is synthesized)
accattagaagattatgaagataataattattaacatgtaataattattataatttatcatgtgcaggcattgttgctcactttacaggcaatctcatgtacatacaactttatgacata

SEQ ID NO: 788826 - DNA, 120 bp, Artificial Sequence
  ENSG00000265808_71 (sequence is synthesized)
gttactgttattatccccaattatagatgaagaaactaggttttaaataggttacatgacttgaccaatgtcacataacttgtacaggtgatatctgaaccaaagagtctgaggccagaa

SEQ ID NO: 788827 - DNA, 120 bp, Artificial Sequence
  ENSG00000265808_72 (sequence is synthesized)
cctgcacttctaaccaccttactatatagcctcaaaaattcagacatcatctgatcagcatcatcagttaattagtatatgcaatgttagccttaaaataaaaatgatgatttaagattc

SEQ ID NO: 788828 - DNA, 120 bp, Artificial Sequence
  ENSG00000265817_0 (sequence is synthesized)
atgatttgtggaaaagaaatagaagtcatgggtgtaatctctccagatgacttcagcagtggcaggtgttttcagcttggaggaggaagtactgctatctcgcattcttctcaggttgcc

SEQ ID NO: 788829 - DNA, 120 bp, Artificial Sequence
  ENSG00000265817_1 (sequence is synthesized)
aggaaatgtttctctaaccctttcaaaagtgtttgtaaaccaagttcaaaggaaaatagacagaatgatttccaaaattgcaaaccacgccatgacccatatacgccaaattccctcgtt

SEQ ID NO: 788830 - DNA, 120 bp, Artificial Sequence
  ENSG00000265817_2 (sequence is synthesized)
atgccacgaccagataagaatcaccagtgggtattcaataagaactgtttccctcttgtggatgtagtgattgatccttaccttgtatatcatcttcgaccacatcagaaagaaggaatc

SEQ ID NO: 788831 - DNA, 120 bp, Artificial Sequence
  ENSG00000265817_3 (sequence is synthesized)
atattcctttatgaatgtgtaatgggaatgagaatgaatggcagatgtggagctattcttgctgatgaaatgggtttagggaagacattgcaatgtatttcgctcatctggaccctgcag

SEQ ID NO: 788832 - DNA, 120 bp, Artificial Sequence
  ENSG00000265817_4 (sequence is synthesized)
tgtcagggaccctatggaggcaagccagtaataaagaagacactaattgtcacacctggaagcttggtgaataattggaagaaagaatttcaaaaatggctaggaagtgaaaggatcaag

SEQ ID NO: 788833 - DNA, 120 bp, Artificial Sequence
  ENSG00000265817_5 (sequence is synthesized)
atatttactgttgatcaggaccacaaagttgaagaattcatcaagtctatattttattctgttcttattatcagttatgaaatgttacttcgttccctggatcaaattaagaatataaaa

SEQ ID NO: 788834 - DNA, 120 bp, Artificial Sequence
  ENSG00000265817_6 (sequence is synthesized)
tttgatcttctaatctgtgacgaggggcatcgtttgaagaacagtgccattaagacaactacagccctcattagcctttcttgtgagaaaagaataattctaactggtactccaattcag

SEQ ID NO: 788835 - DNA, 120 bp, Artificial Sequence
  ENSG00000265817_7 (sequence is synthesized)
aatgatctgcaagaattttttgcattaattgattttgtaaatccaggaatattaggctctttgtcatcttataggaaaatatatgaagaacccatcattttatcgagagaaccttctgct

SEQ ID NO: 788836 - DNA, 120 bp, Artificial Sequence
  ENSG00000265817_8 (sequence is synthesized)
tctgaggaagaaaaggagttaggagaaagaagagcagctgaacttacttgcctcactggactctttatccttagaagaacccaagaaattataaataaatatctcccacctaaaatagag

SEQ ID NO: 788837 - DNA, 120 bp, Artificial Sequence
  ENSG00000265817_9 (sequence is synthesized)
ggagcactacagattgagctttatcgaaagctgttaaattctcaggttgtcaggttctgccttcaagggttgttggaaaatagtccccatctaatatgtataggagctcttaaaaaactg

SEQ ID NO: 788838 - DNA, 120 bp, Artificial Sequence
  ENSG00000265817_10 (sequence is synthesized)
tgcaatcacccctgccttttgttcaactctataaaggaaaaggaatgtagctcaacttgtgataaaaatgaagaaaagagtctatacaaaggcttgctaagtgtgtttcctgctgactac

SEQ ID NO: 788839 - DNA, 120 bp, Artificial Sequence
  ENSG00000265817_11 (sequence is synthesized)
aaccctctcctgtttactgaaaaggagtcaggaaaactacaggtgttgtccaagctcttagcggttatccacgaacttcgacctactgaaaaggtggtgttggtatccaactatacacaa

SEQ ID NO: 788840 - DNA, 120 bp, Artificial Sequence
  ENSG00000265817_12 (sequence is synthesized)
accttgaacattttacaagaagtatgtaagcgtcatggatatgcttatacaagacttgatggacaaacaccaatctctcaaaggcagcagattgttgatggctttaacagtcaacactct

SEQ ID NO: 788841 - DNA, 120 bp, Artificial Sequence
  ENSG00000265817_13 (sequence is synthesized)
tctttttttatttttttgttaagttcaaaagctggtggtgtaggacttaacctcattggaggatctcacttaattctctatgacattgattggaatccagccactgacattcaggcaatg

SEQ ID NO: 788842 - DNA, 120 bp, Artificial Sequence
  ENSG00000265817_14 (sequence is synthesized)
tctagagtatggagagatggtcagaaatatcctgtacatatttacagactcctaactacaggtacaatagaagaaaagatctatcaaaggcagatcagtaagcaaggtctttgtggggca

SEQ ID NO: 788843 - DNA, 120 bp, Artificial Sequence
  ENSG00000265817_15 (sequence is synthesized)
gttgtcgacctcaccaagacatctgaacatattcagttttcagtagaagaacttaaaaatttgttcacattacatgaaagttcagattgtgttactcatgatctgcttgactgtgagtgt

SEQ ID NO: 788844 - DNA, 120 bp, Artificial Sequence
  ENSG00000265817_16 (sequence is synthesized)
acaggagaagaagttcatacaggtgattcgttggaaaaattcattgtctctagagattgtcagcttggtccacatcaccagaaatctaactccctgaaacctctttctatgtcccagctg

SEQ ID NO: 788845 - DNA, 120 bp, Artificial Sequence
  ENSG00000265817_17 (sequence is synthesized)
aagcaatggaaacatttttctggagatcatttaaatcttacagatccttttcttgaaagaataacagaaaatgtgtcattcatttttcagaatataaccactcaagctactggcacatag

SEQ ID NO: 788846 - DNA, 120 bp, Artificial Sequence
  ENSG00000265817_18 (sequence is synthesized)
gtttgtgaaaagagctgagcagagctgaaggctgcatggtggtttcagaaactgcctacttaatttgaaaagaacaatggtaggaaaggctagatcttccaattttaccttatccgaaaa

SEQ ID NO: 788847 - DNA, 120 bp, Artificial Sequence
  ENSG00000265817_19 (sequence is synthesized)
gcttgatttgctaaagcttgtgaagccatatgtgaaaattctcgaagaacacactaataaacattcagtaatagtagaaaagaatagatgttgggatatcatagcagttaactataatgc

SEQ ID NO: 788848 - DNA, 120 bp, Artificial Sequence
  ENSG00000265817_20 (sequence is synthesized)
aattggagtagaccgccctcctcgaacagcacagggcctacgcaccctttataaaaggctcaaagaatatgccaaacaggagctattgcagcaaaaagagacccaatcagattttaaaag

SEQ ID NO: 788849 - DNA, 120 bp, Artificial Sequence
  ENSG00000265817_21 (sequence is synthesized)
caatatttctgagccaaccaagaaagttatggagatgattccccagatttccagtttttgcctggtaagagacaggaaccacatacaaagtgcaaacttggatgaggaggcacaggctgg

SEQ ID NO: 788850 - DNA, 120 bp, Artificial Sequence
  ENSG00000265817_22 (sequence is synthesized)
taccagttcactacaggtaatgttggatcaccatcctgttgctattacagtggaggtgaagcaagaagaagacattaaaccacctcctccactggttttaaattctcaacagagtgatac

SEQ ID NO: 788851 - DNA, 120 bp, Artificial Sequence
  ENSG00000265817_23 (sequence is synthesized)
tttagagcaaagagaagaacatgaattagtacatgttatggaaagatccttgtcgccttcactttcctctgttgatatgagaatgacatcgtctccatcttctattccaaggagagatga

SEQ ID NO: 788852 - DNA, 120 bp, Artificial Sequence
  ENSG00000265817_24 (sequence is synthesized)
tttttttcggcatgagagtggtgaacactttaggtcactattagggtatgatcctcagatcctgcaaatgttgaaagaggagcatcagataattttagaaaatcaaaaaaattttggatt

SEQ ID NO: 788853 - DNA, 120 bp, Artificial Sequence
  ENSG00000265817_25 (sequence is synthesized)
gtatgttcaggagaagagggatggattgaaaagaaggcagcagctagaggaagagctactaagagcaaaaattgaagtggagaagctgaaagcaattcgcttacggcatgatctacctga

SEQ ID NO: 788854 - DNA, 120 bp, Artificial Sequence
  ENSG00000265817_26 (sequence is synthesized)
atataacagtctctaagtttttttttcaatcttgcaatttgataattttgattttggccaaattactttaatttgggaatatcctgaaacagaatacacgttcttgaaaaatgttgttaa

SEQ ID NO: 788855 - DNA, 120 bp, Artificial Sequence
  ENSG00000265817_27 (sequence is synthesized)
tctctattatggaaaaactttttagatataattttctaattattttcttttgagatattaaaatttactggttggttggcatggttatagtttttattgtcttcttttttttttccctaa

SEQ ID NO: 788856 - DNA, 120 bp, Artificial Sequence
  ENSG00000265817_28 (sequence is synthesized)
gtttaattgttgaccttacaaaagatattttattctgatcactaagatatacacaaatgcatatacaaacacatattctttcaaagttctgagtcttcaacatttttagttagaactttg

SEQ ID NO: 788857 - DNA, 120 bp, Artificial Sequence
  ENSG00000265817_29 (sequence is synthesized)
aaagctataattagagatttttaagtcagtctaatttaggagctatactaacctaataccaagaagcttgtctgtatgacattggtttttatgcttttatcttttgaaggagtaaatcct

SEQ ID NO: 788858 - DNA, 120 bp, Artificial Sequence
  ENSG00000265817_30 (sequence is synthesized)
aggattttagagatggaagatatttggagaacactttttttccatctctgcagtttaggggtaatgaaacaggtccagggagaactcaatgacttacttagggtaacaaagctatttatg

SEQ ID NO: 788859 - DNA, 120 bp, Artificial Sequence
  ENSG00000265817_31 (sequence is synthesized)
gcagagcagagaccagcacttagtttttctttgtgtaatttccatcccgctattcgatagaagtaaatatccactaaaacattctctagatttaaatattagaagcatttctttcattaa

SEQ ID NO: 788860 - DNA, 120 bp, Artificial Sequence
  ENSG00000265817_32 (sequence is synthesized)
aattgcctttaaagattgttaggttgtgaaatcaggataattacatcaattacccccattctctctctatttttgttccagcaaaatagataaggtattccattgaagctattatatatt

SEQ ID NO: 788861 - DNA, 120 bp, Artificial Sequence
  ENSG00000265817_33 (sequence is synthesized)
ttggctgtgtgatttaaagacatgtcttaattcattttgaatgtcctgttctggaaaaaatttctttcacagtaaaaatcagaatgaacaaaattaaaattttatgtattttataagtat

SEQ ID NO: 788862 - DNA, 120 bp, Artificial Sequence
  ENSG00000265817_34 (sequence is synthesized)
tgttattttagtattcatggaaataaaacctcaattcttaaagcatacatattaaatttatattaaatctctaatatgtatgttacttaagaatttctatttttgctggggttttgttga

SEQ ID NO: 788863 - DNA, 120 bp, Artificial Sequence
  ENSG00000265817_35 (sequence is synthesized)
gaagggatttttaagccaagttgtagaatggggtgggtgtaatttcagcagtgaaggggaccatgggtgtttgaagtcaagagtgagacgctggaaaaaagacaaaagaatgggaaaaag

SEQ ID NO: 788864 - DNA, 120 bp, Artificial Sequence
  ENSG00000265817_36 (sequence is synthesized)
tggattgagtatataagcacaaatgcagtgctaagccattgattttaagtgaatgtagagagagtcaatttgggctgtagtatcctggactaggaaggacatctccctggactaggtagg

SEQ ID NO: 788865 - DNA, 120 bp, Artificial Sequence
  ENSG00000265817_37 (sequence is synthesized)
gtagctgctgtttagctccagcagaattttcacatgcggggataaaccagaaatctgcattttttaatgaggaatcttccaattttaaaatgtttgcaaataacacaaaatgcttttaaa

SEQ ID NO: 788866 - DNA, 120 bp, Artificial Sequence
  ENSG00000265817_38 (sequence is synthesized)
acattatacagacaacatgtgagtgggcctcactgagccattgggcttccactttgtggcctttggagtagaccaatggttttccaagtatgggtcctgaccagcagcatcagcatcact

SEQ ID NO: 788867 - DNA, 120 bp, Artificial Sequence
  ENSG00000265817_39 (sequence is synthesized)
tgagaacttgttagaaatgtaaatccatttccaagtgaattagaaaccctgggggtgtcagcaatctcttttaataaaccctttagcgattctgatgcatgctaaagtttgagaaccagt

SEQ ID NO: 788868 - DNA, 76 bp, Artificial Sequence
  ENSG00000265817_40 (sequence is synthesized)
tttttgagatggagtcttgctttgtcacctaggttggagtgcagtggtgcgatgttggctcactgcaatctccgtt

SEQ ID NO: 788869 - DNA, 75 bp, Artificial Sequence
  ENSG00000265817_41 (sequence is synthesized)
aaatactatttttaatgagtcagacttaacgtacaatgagaagccattgaatgctttgaattagagggctaattt

SEQ ID NO: 788870 - DNA, 120 bp, Artificial Sequence
  ENSG00000265817_42 (sequence is synthesized)
atgagaagccattgaatgctttgaattagagggctaatttgattatagttgtgatttaggaggagtggcatttagggacaggcattgtattggaagaacttaaatcagaaatttaagtta

SEQ ID NO: 788871 - DNA, 120 bp, Artificial Sequence
  ENSG00000265817_43 (sequence is synthesized)
tggctatagaaatagaaaaaaatgaactcaaggtactattttagcatgttgactacttaatttcattggttggattaaaaagagggtgttttatagctggtagagttaacttctttaatt

SEQ ID NO: 788872 - DNA, 120 bp, Artificial Sequence
  ENSG00000265817_44 (sequence is synthesized)
ataaagatgtcctgaatatataacttgatatatccttttgacaatgttaccttttctctttaatctgtgctatgacttttctttgagtctaatgaatcttgtaattcttaatttgaggta

SEQ ID NO: 788873 - DNA, 120 bp, Artificial Sequence
  ENSG00000265817_45 (sequence is synthesized)
atgtttcccagtataattctagtaaacacatcttggcagtagtaagctttattttttgaaattattgaaagcacatatatgagatgtaattcactttacagtttcagcatgctactaaga

SEQ ID NO: 788874 - DNA, 120 bp, Artificial Sequence
  ENSG00000265817_46 (sequence is synthesized)
attgataatgaatgttcaatttaaatgttggcttttacagcaaatcagagttttcccaagtgtgttctgtggaacattaattctgtgagatgtttctagaaaagagatctgtgttaaaaa

SEQ ID NO: 788875 - DNA, 120 bp, Artificial Sequence
  ENSG00000265817_47 (sequence is synthesized)
aaagtgcagtatacatcttttttatttttggtggttaggttctaaaataattgtggaaggtaaaaattatgtatatacaaaatagcccttgaaaattcctttgctgcccataaaatagca

SEQ ID NO: 788876 - DNA, 120 bp, Artificial Sequence
  ENSG00000265817_48 (sequence is synthesized)
taaacatagtctgctacaatcatatttttctgcagcattgtttaagattgctttttctttagtgtgttaggtgacacaattcattagcatttaggggctgtatacaataagaaacctatt

SEQ ID NO: 788877 - DNA, 120 bp, Artificial Sequence
  ENSG00000265817_49 (sequence is synthesized)
tttacatatttttaaacaccagaatcacactctttgagtttactgcagcaacttttccaagtcaatcttgtttttctccaagtcagtcttgtttacttttaatttgcaaaagtttaaatg

SEQ ID NO: 788878 - DNA, 120 bp, Artificial Sequence
  ENSG00000265817_50 (sequence is synthesized)
catataattctcctcattgtctacctccccttgtataaccatgattaacatagtatagtttatgagaattcctgtataaagaaaattatttatttgaccatagaatccttttccgaggct

SEQ ID NO: 788879 - DNA, 120 bp, Artificial Sequence
  ENSG00000265817_51 (sequence is synthesized)
gtttattatcttacagagtatcttagggtaatttggaaccaaacctttttttttcttcttttttgtattgagacttttttgagttaggggactacttaccaactaacattagcagttttt

SEQ ID NO: 788880 - DNA, 120 bp, Artificial Sequence
  ENSG00000265817_52 (sequence is synthesized)
gttgaggacaagtttcattaaggggaatatataggggaaagtttgctagtacaatggaatgtacacttggctttctatctgcaggtttcacatctgcagattgaactactgtggattgaa

SEQ ID NO: 788881 - DNA, 120 bp, Artificial Sequence
  ENSG00000265817_53 (sequence is synthesized)
aatattcaggcagaaaaataaataacagtacaacaataaaaagtaatacgaaatttaaaaagacggtataactgaggtaggagttgggctaatccccagttttggggctcacttgtcctg

SEQ ID NO: 788882 - DNA, 88 bp, Artificial Sequence
  ENSG00000265817_54 (sequence is synthesized)
gagttgggctaatccccagttttggggctcacttgtcctgtatcctaacaactatttacatagtatttacattatattagccattgaa

SEQ ID NO: 788883 - DNA, 120 bp, Artificial Sequence
  ENSG00000265817_55 (sequence is synthesized)
aagggacttgagtatctgtggatcttgatggggtagggggtgtcctgaaaccaatcccccttggatactgagggatgactatacacttaagccaccagacatcttgcatatcatagacaa

SEQ ID NO: 788884 - DNA, 120 bp, Artificial Sequence
  ENSG00000265817_56 (sequence is synthesized)
ttgtttggggtccatgagctttaattacaaaatgtaatgctgggagaacatagagaagagtgattttgttttttaaatgtagacttgattctgtagaaatatactacatttgataaatat

SEQ ID NO: 788885 - DNA, 120 bp, Artificial Sequence
  ENSG00000265817_57 (sequence is synthesized)
actaagtatatagattatttcatccaatatattagtaatttagatagtggatagccactttcctatctttctcttatccatatgaatgtaatggatatgttgttacaacttatgattttc

SEQ ID NO: 788886 - DNA, 120 bp, Artificial Sequence
  ENSG00000265817_58 (sequence is synthesized)
taaactagctgtgatttataatgacatcctgagaaaagtcagtgaaactcatttctaacgaataccagatttcttaaaatagtcaagtatttttcttttgtgtatgatgagatattaact

SEQ ID NO: 788887 - DNA, 120 bp, Artificial Sequence
  ENSG00000265817_59 (sequence is synthesized)
tggtgttatttcatttttttttttaaggagtcattctaccctgttctatctttacttatgtgaaaatgtttaaactatgagtttttttcatgtgccttcttttggagtaatgtcaacttt

SEQ ID NO: 788888 - DNA, 120 bp, Artificial Sequence
  ENSG00000265817_60 (sequence is synthesized)
taaatacacatgtttaaataacttagagtgtaataaattgtgtttaatatatactgtagataatgatggttaaatgctttgttaacacatgttcttttaaatacaagatactactttgta

SEQ ID NO: 788889 - DNA, 120 bp, Artificial Sequence
  ENSG00000265817_61 (sequence is synthesized)
agcagtgtccaaggaacaagaagagaaatctgatagcctagttaaatatttcagtgttgtttggtgtaagccttcaaagaaaaaacataaaaagtgggaaggtgatgctgttcttattgt

SEQ ID NO: 788890 - DNA, 120 bp, Artificial Sequence
  ENSG00000265972_0 (sequence is synthesized)
aaactaacccctctttttctccaaaggagtgcttgtggagatcggatcttttctccagcaattgggggaaagaaggctttttctctgaattagcttagtgtaaccagcggcgtatatttt

SEQ ID NO: 788891 - DNA, 120 bp, Artificial Sequence
  ENSG00000265972_1 (sequence is synthesized)
ttaggcgccttttcgaaaacctagtagttaatattcatttgtttaaatcttattttatttttaagctcaaactgcttaagaataccttaattccttaaagtgaaataattttttgcaaag

SEQ ID NO: 788892 - DNA, 120 bp, Artificial Sequence
  ENSG00000265972_2 (sequence is synthesized)
gggtttcctcgatttggagctttttttttcttccaccgtcatttctaactcttaaaaccaactcagttccatcatggtgatgttcaagaagatcaagtcttttgaggtggtctttaacga

SEQ ID NO: 788893 - DNA, 120 bp, Artificial Sequence
  ENSG00000265972_3 (sequence is synthesized)
ccctgaaaaggtgtacggcagtggcgagaaggtggctggccgggtgatagtggaggtgtgtgaagttactcgtgtcaaagccgttaggatcctggcttgcggagtggctaaagtgctttg

SEQ ID NO: 788894 - DNA, 120 bp, Artificial Sequence
  ENSG00000265972_4 (sequence is synthesized)
gatgcagggatcccagcagtgcaaacagacttcggagtacctgcgctatgaagacacgcttcttctggaagaccagccaacaggtgagaatgagatggtgatcatgagacctggaaacaa

SEQ ID NO: 788895 - DNA, 120 bp, Artificial Sequence
  ENSG00000265972_5 (sequence is synthesized)
atatgagtacaagttcggctttgagcttcctcaggggcctctgggaacatccttcaaaggaaaatatgggtgtgtagactactgggtgaaggcttttcttgaccgcccgagccagccaac

SEQ ID NO: 788896 - DNA, 120 bp, Artificial Sequence
  ENSG00000265972_6 (sequence is synthesized)
tcaagagacaaagaaaaactttgaagtagtggatctggtggatgtcaatacccctgatttaatggcacctgtgtctgctaaaaaagaaaagaaagtttcctgcatgttcattcctgatgg

SEQ ID NO: 788897 - DNA, 120 bp, Artificial Sequence
  ENSG00000265972_7 (sequence is synthesized)
gcgggtgtctgtctctgctcgaattgacagaaaaggattctgtgaaggtgatgagatttccatccatgctgactttgagaatacatgttcccgaattgtggtccccaaagctgccattgt

SEQ ID NO: 788898 - DNA, 120 bp, Artificial Sequence
  ENSG00000265972_8 (sequence is synthesized)
ggcccgccacacttaccttgccaatggccagaccaaggtgctgactcagaagttgtcatcagtcagaggcaatcatattatctcagggacatgcgcatcatggcgtggcaagagccttcg

SEQ ID NO: 788899 - DNA, 120 bp, Artificial Sequence
  ENSG00000265972_9 (sequence is synthesized)
ggttcagaagatcaggccttctatcctgggctgcaacatccttcgagttgaatattccttactgatctatgttagcgttcctggatccaagaaggtcatccttgacctgcccctggtaat

SEQ ID NO: 788900 - DNA, 120 bp, Artificial Sequence
  ENSG00000265972_10 (sequence is synthesized)
tggcagcagatcaggtctaagcagcagaacatccagcatggccagccgaaccagctctgagatgagttgggtagatctgaacatccctgataccccagaagctcctccctgctatatgga

SEQ ID NO: 788901 - DNA, 120 bp, Artificial Sequence
  ENSG00000265972_11 (sequence is synthesized)
tgtcattcctgaagatcaccgattggagagcccaaccactcctctgctagatgacatggatggctctcaagacagccctatctttatgtatgcccctgagttcaagttcatgccaccacc

SEQ ID NO: 788902 - DNA, 120 bp, Artificial Sequence
  ENSG00000265972_12 (sequence is synthesized)
atcctcaacaacaatgtgcagtgagcatgtggaagaaaagaagcagctttacctacttgtttctttttgtctctcttcctggacactcactttttcagagactcaacagtctctgcaatg

SEQ ID NO: 788903 - DNA, 120 bp, Artificial Sequence
  ENSG00000265972_13 (sequence is synthesized)
gagtgtgggtccaccttagcctctgacttcctaatgtaggaggtggtcagcaggcaatctcctgggccttaaaggatgcggactcatcctcagccagcgcccatgttgtgatacaggggt

SEQ ID NO: 788904 - DNA, 120 bp, Artificial Sequence
  ENSG00000265972_14 (sequence is synthesized)
gtttgttggatgggtttaaaaataactagaaaaactcaggcccatccattttctcagatctccttgaaaattgaggccttttcgatagtttcgggtcaggtaaaaatggcctcctggcgt

SEQ ID NO: 788905 - DNA, 120 bp, Artificial Sequence
  ENSG00000265972_15 (sequence is synthesized)
aagcttttcaaggttttttggaggctttttgtaaattgtgataggaactttggaccttgaacttacgtatcatgtggagaagagccaatttaacaaactaggaagatgaaaagggaaatt

SEQ ID NO: 788906 - DNA, 120 bp, Artificial Sequence
  ENSG00000265972_16 (sequence is synthesized)
gtggccaaaactttgggaaaaggaggttcttaaaatcagtgtttcccctttgtgcacttgtagaaaaaaaagaaaaaccttctagagctgatttgatggacaatggagagagctttccct

SEQ ID NO: 788907 - DNA, 120 bp, Artificial Sequence
  ENSG00000265972_17 (sequence is synthesized)
gtgattataaaaaaggaagctagctgctctacggtcatctttgcttagagtatactttaacctggcttttaaagcagtagtaactgccccaccaaaggtcttaaaagccatttttggagc

SEQ ID NO: 788908 - DNA, 120 bp, Artificial Sequence
  ENSG00000265972_18 (sequence is synthesized)
ctattgcactgtgttctcctactgcaaatattttcatatgggaggatggttttctcttcatgtaagtccttggaattgattctaaggtgatgttcttagcactttaattcctgtcaaatt

SEQ ID NO: 788909 - DNA, 120 bp, Artificial Sequence
  ENSG00000265972_19 (sequence is synthesized)
ttttgttctccccttctgccatcttaaatgtaagctgaaactggtctactgtgtctctagggttaagccaaaagacaaaaaaaattttactacttttgagattgccccaatgtacagaat

SEQ ID NO: 788910 - DNA, 120 bp, Artificial Sequence
  ENSG00000265972_20 (sequence is synthesized)
tatataattctaacgcttaaatcatgtgaaagggttgctgctgtcagccttgcccactgtgacttcaaacccaaggaggaactcttgatcaagatgcccaaccctgtgatcagaacctcc

SEQ ID NO: 788911 - DNA, 120 bp, Artificial Sequence
  ENSG00000265972_21 (sequence is synthesized)
aaatactgccatgagaaactagagggcaggtcttcataaaagccctttgaacccccttcctgccctgtgttaggagatagggatattggcccctcactgcagctgccagcacttggtcag

SEQ ID NO: 788912 - DNA, 120 bp, Artificial Sequence
  ENSG00000265972_22 (sequence is synthesized)
tcactctcagccatagcactttgttcactgtcctgtgtcagagcactgagctccacccttttctgagagttattacagccagaaagtgtgggctgaagatggttggtttcatgtttttgt

SEQ ID NO: 788913 - DNA, 120 bp, Artificial Sequence
  ENSG00000265972_23 (sequence is synthesized)
attatgtatctttttgtatggtaaagactatattttgtacttaaccagatatatttttaccccagatggggatattctttgtaaaaaatgaaaataaagtttttttaatggaaaaaaaaa

SEQ ID NO: 788914 - DNA, 120 bp, Artificial Sequence
  ENSG00000265972_24 (sequence is synthesized)
atgtgtgcataagttgcttattctttgtctacttcctatttgagatgttagtagagaactgtcctgggtgaatctttcagtattgcagggcttggcaacttgctgcccgacaaaatacat

SEQ ID NO: 788915 - DNA, 120 bp, Artificial Sequence
  ENSG00000265972_25 (sequence is synthesized)
cagaatttctctttaagaacaatatgggatggattaaaaaatatatatatgggatgaaattgggggtacttcaataccttgcatgccacccaagcattccttatcacacagatgcatttt

SEQ ID NO: 788916 - DNA, 120 bp, Artificial Sequence
  ENSG00000265972_26 (sequence is synthesized)
aaaacaggaactgggtttaggggcaagggcatgggactggggtagaggaagtgtcattaactatactgagtatcagtaagttttcatctttctcattgctaggtgatgagatttccatcc

SEQ ID NO: 788917 - DNA, 120 bp, Artificial Sequence
  ENSG00000265972_27 (sequence is synthesized)
tgggtagatgcagggtggcttcagcagagaaattgttcatctgttaccacagctgtcttgtttctccagacctctggtgtaataaactgccatcttcctttctagatctatgttagcgtt

SEQ ID NO: 788918 - DNA, 120 bp, Artificial Sequence
  ENSG00000265972_28 (sequence is synthesized)
tttactgttaaatttgtcctaagctttctataagaagttgacttagacggattgctaaactggtttgttctttttgttcttacctgaactgaaatagtctgtttctttctttaggtggat

SEQ ID NO: 788919 - DNA, 120 bp, Artificial Sequence
  ENSG00000266028_0 (sequence is synthesized)
ggttggattttttccgtggatctatcaattcacaattcgaatttggaagaaagaaggaaaacatgacgtctccagccaaattcaaaaaggataaggagatcatagcagagtacgatactc

SEQ ID NO: 788920 - DNA, 120 bp, Artificial Sequence
  ENSG00000266028_1 (sequence is synthesized)
aggtcaaagagatccgtgctcagctcacagagcagatgaaatgcctggaccagcagtgtgagcttcgggtgcaactgttgcaggacctccaggacttcttccgaaagaaggcagagattg

SEQ ID NO: 788921 - DNA, 120 bp, Artificial Sequence
  ENSG00000266028_2 (sequence is synthesized)
agatggactactcccgcaacctggagaagctggcagaacgcttcctggccaagacacgcagcaccaaggaccagcaattcaagaaggatcagaatgttctctctccagtcaactgctgga

SEQ ID NO: 788922 - DNA, 120 bp, Artificial Sequence
  ENSG00000266028_3 (sequence is synthesized)
atctcctcttaaaccaggtgaagcgggaaagcagggaccataccaccctgagtgacatctacctgaataatatcattcctcgatttgtacaagtcagcgaggactcaggaagactcttta

SEQ ID NO: 788923 - DNA, 120 bp, Artificial Sequence
  ENSG00000266028_4 (sequence is synthesized)
aaaagagtaaagaagtcggccagcagctccaagatgatttgatgaaggtcctgaacgagctctactcggtgatgaagacatatcacatgtacaatgccgacagcatcagtgctcagagca

SEQ ID NO: 788924 - DNA, 120 bp, Artificial Sequence
  ENSG00000266028_5 (sequence is synthesized)
aactaaaggaggcggagaagcaggaggagaagcaaattggtaaatcggtaaagcaggaggaccggcagaccccacgctcccctgactccacggccaacgttcgcattgaggagaaacatg

SEQ ID NO: 788925 - DNA, 120 bp, Artificial Sequence
  ENSG00000266028_6 (sequence is synthesized)
tccggaggagctcagtgaagaagattgagaagatgaaggagaagcgtcaagccaagtacacggagaataagctgaaggccatcaaagcccggaatgagtacttgctggctttggaggcaa

SEQ ID NO: 788926 - DNA, 120 bp, Artificial Sequence
  ENSG00000266028_7 (sequence is synthesized)
ccaatgcatctgtcttcaagtactacatccatgacctatctgaccttattgatcagtgttgtgacttaggctaccatgcaagtctgaaccgggctctacgcaccttcctctctgctgagt

SEQ ID NO: 788927 - DNA, 120 bp, Artificial Sequence
  ENSG00000266028_8 (sequence is synthesized)
taaacctggaacagtcgaagcatgagggtctggatgccatcgagaatgcagtagaaaacctggatgccaccagtgacaagcagcgcctcatggagatgtacaacaacgtcttctgccccc

SEQ ID NO: 788928 - DNA, 120 bp, Artificial Sequence
  ENSG00000266028_9 (sequence is synthesized)
ctatgaagtttgagtttcagccccacatgggggatatggcttcccagctctgtgcccagcagcctgtccagagtgagctggtacagagatgccaacaactgcagtctcgcttatccactc

SEQ ID NO: 788929 - DNA, 120 bp, Artificial Sequence
  ENSG00000266028_10 (sequence is synthesized)
taaagattgaaaacgaagaggtaaagaagacaatggaggccaccctgcaaaccatccaggacattgtgactgtcgaggactttgatgtgtctgactgcttccagtacagcaactccatgg

SEQ ID NO: 788930 - DNA, 120 bp, Artificial Sequence
  ENSG00000266028_11 (sequence is synthesized)
agtccgtcaagtccacggtctctgaaaccttcatgagcaagcccagcattgctaagaggagagccaaccagcaagagacagagcagttttatttcacaaaaatgaaagagtacctggagg

SEQ ID NO: 788931 - DNA, 120 bp, Artificial Sequence
  ENSG00000266028_12 (sequence is synthesized)
gcaggaacctcatcaccaagttacaagccaagcatgaccttctgcagaaaaccctgggagaaagtcagcggacagattgcagtctagccaggcgcagctcaactgtgaggaaacaggact

SEQ ID NO: 788932 - DNA, 120 bp, Artificial Sequence
  ENSG00000266028_13 (sequence is synthesized)
ccagccaggcaattcctctggtggtggaaagctgtatccggtttatcagcagacacggactacagcatgaaggaattttccgggtgtcaggatcccaggtggaagtgaatgacatcaaaa

SEQ ID NO: 788933 - DNA, 120 bp, Artificial Sequence
  ENSG00000266028_14 (sequence is synthesized)
atgcctttgagagaggagaggaccccctggctggggaccagaacgaccatgacatggattccatagctggtgtcctgaagctttacttccgggggctggaacaccctctcttccccaagg

SEQ ID NO: 788934 - DNA, 120 bp, Artificial Sequence
  ENSG00000266028_15 (sequence is synthesized)
acatctttcatgacctgatggcctgcgtcacaatggacaacctgcaggagagagctctgcacatccggaaagtcctcctagtcctgcccaaaaccactctgattatcatgagatacctct

SEQ ID NO: 788935 - DNA, 120 bp, Artificial Sequence
  ENSG00000266028_16 (sequence is synthesized)
ttgccttcctcaatcatttatcacagttcagtgaagagaacatgatggacccctacaacctcgccatctgcttcgggccctcgctaatgtcagtgccagagggccacgaccaggtgtcct

SEQ ID NO: 788936 - DNA, 120 bp, Artificial Sequence
  ENSG00000266028_17 (sequence is synthesized)
gccaagcccacgtgaatgagctgatcaaaaccatcatcatccagcatgagaacatcttcccaagccccagggagctggagggccctgtctacagcagaggaggaagcatggaggattact

SEQ ID NO: 788937 - DNA, 120 bp, Artificial Sequence
  ENSG00000266028_18 (sequence is synthesized)
gtgatagccctcatggagagactacctcggttgaagactcaacccaggatgtgaccgcagagcaccacacgagcgatgacgaatgtgagcccatcgaggccattgccaagtttgactacg

SEQ ID NO: 788938 - DNA, 120 bp, Artificial Sequence
  ENSG00000266028_19 (sequence is synthesized)
tgggccggacagcccgagagctatcctttaagaagggagcatccctgctgctttaccagcgggcttccgacgactggtgggaaggccggcacaatggcatcgacggactcatcccccatc

SEQ ID NO: 788939 - DNA, 120 bp, Artificial Sequence
  ENSG00000266028_20 (sequence is synthesized)
agtacatcgtggtccaagacaccgaggacggtgtcgtggagaggtccagccccaagtctgagattgaggtcatttctgagccacctgaagaaaaggtgacagccagagcgggggccagct

SEQ ID NO: 788940 - DNA, 120 bp, Artificial Sequence
  ENSG00000266028_21 (sequence is synthesized)
gtcccagtgggggtcatgtagccgatatttatcttgcaaacatcaacaagcaaaggaagcgtccagaatctgggagcatccggaaaacttttcggagtgacagccatgggctgagcagtt

SEQ ID NO: 788941 - DNA, 120 bp, Artificial Sequence
  ENSG00000266028_22 (sequence is synthesized)
ccctgactgactcctcctccccaggggtgggggctagctgccgcccatcctcccagcccatcatgagccagagcctccccaaagaagggccagataagtgttccatcagtgggcacggga

SEQ ID NO: 788942 - DNA, 120 bp, Artificial Sequence
  ENSG00000266028_23 (sequence is synthesized)
gcctcaactccatcagccgccactcatccctgaagaatcggctggatagtccacagatccggaagactgccacagcgggaaggtcaaaaagcttcaataaccatcggcccatggaccctg

SEQ ID NO: 788943 - DNA, 120 bp, Artificial Sequence
  ENSG00000266028_24 (sequence is synthesized)
aggtcattgctcaggatattgaggcaacaatgaactcggccctgaatgagctacgggaactagaacggcagagcagtgtcaaacacacccctgacgtggttctggacaccttggagcccc

SEQ ID NO: 788944 - DNA, 120 bp, Artificial Sequence
  ENSG00000266028_25 (sequence is synthesized)
tcaaaacctccccagtggtggcccccacgtcagagccctccagccctctgcacacccagctcctcaaggaccccgagcccgccttccagcgcagcgccagtactgctggggacatcgcct

SEQ ID NO: 788945 - DNA, 120 bp, Artificial Sequence
  ENSG00000266028_26 (sequence is synthesized)
gcccaagcccactgtcttccccaaaacaaatgccactagccctggtgtcaactcatcaacttccccacagtctactgacaagtcttgtactgtctgagggataataatttaattgttcta

SEQ ID NO: 788946 - DNA, 120 bp, Artificial Sequence
  ENSG00000266028_27 (sequence is synthesized)
gacaaggggactatagggactgactgttattaaaatcttcctatttaactagcttggggacttcagttgaaaattaggttctaagttgttcttgcaggaattagcctccccgtctcccaa

SEQ ID NO: 788947 - DNA, 120 bp, Artificial Sequence
  ENSG00000266028_28 (sequence is synthesized)
aaccttgagaatgaagcccttggtatcgcctctcccttcccactgccctctgcttcccccagtcgtcgtaattcagccagctgcagtccgtaccgttcttaggttagccagagacaggtt

SEQ ID NO: 788948 - DNA, 120 bp, Artificial Sequence
  ENSG00000266028_29 (sequence is synthesized)
ttcattatcaggtcactgtgaaatctggtaaggcagtcctgaggacatgggctcaagtctcagtcccctcagaccacggtgatgccttgaccagatggttggctactgccatccagcttt

SEQ ID NO: 788949 - DNA, 120 bp, Artificial Sequence
  ENSG00000266028_30 (sequence is synthesized)
cagtggcatcttgttttgggaactgattatagagaatcatatatagtccagtcttcattttacatacacacacatattttacacacacacacattttacacacacacacacacacacaca

SEQ ID NO: 788950 - DNA, 120 bp, Artificial Sequence
  ENSG00000266028_31 (sequence is synthesized)
cacacatatgtttttctagtctctggcatgtgtagcctctcctggtcatagaccagtctctttgtaagttattgtggcagttcacacagtagccaccaggggtctctgtttccatcacaa

SEQ ID NO: 788951 - DNA, 120 bp, Artificial Sequence
  ENSG00000266028_32 (sequence is synthesized)
actttgttctgtctgggccagagaacctagcctttgaaatctctccatcatatgaaacataacgggatgggacaatcccgtaacctgtttggggttgggggctttctctctgtgttcttt

SEQ ID NO: 788952 - DNA, 120 bp, Artificial Sequence
  ENSG00000266028_33 (sequence is synthesized)
ccattgatgtgaattggtcattggtgtttgctcttgcctctcctccatcccctagaagtacacccccgtcttattaaggagcttttaaagtttttctgaatgtatagacatttctcgggt

SEQ ID NO: 788953 - DNA, 120 bp, Artificial Sequence
  ENSG00000266028_34 (sequence is synthesized)
tcctacctttgtctctgatggaccattttccatttaagacattttcctgtataagacagttttatagctggttccttttagggtaaagagtcttaagagagttttattgtgtctatggca

SEQ ID NO: 788954 - DNA, 120 bp, Artificial Sequence
  ENSG00000266028_35 (sequence is synthesized)
ggtttgggaaaggtaagaaatgggtcctttttcctcctaatgtttttggcacttaaaacataaaattcattatcctattaaaaaattaaattcagctttgctaatccagaaattgttccc

SEQ ID NO: 788955 - DNA, 120 bp, Artificial Sequence
  ENSG00000266028_36 (sequence is synthesized)
aaatgaaaacttgttttaagtccaccccttagtttccttattttacaaggtctctcttcagggaccaacaggggcttagagagccttagttagattaaagggagaccctacctcttaaaa

SEQ ID NO: 788956 - DNA, 120 bp, Artificial Sequence
  ENSG00000266028_37 (sequence is synthesized)
ccagttttcatttatgcaaacaaggacaattaagggaaccctgaccccacaggctctcaagtcttcccaaggccagaatcgaaagaaaattaaaatttgaatgctgaatattctggctct

SEQ ID NO: 788957 - DNA, 120 bp, Artificial Sequence
  ENSG00000266028_38 (sequence is synthesized)
actctggccttttttctggttcccttccaaaatgcacaaatcatacccttgtctgctccaattcagtctccaaacctggtgcctgtgctcctggcccccctagcatcatgctatcccagg

SEQ ID NO: 788958 - DNA, 120 bp, Artificial Sequence
  ENSG00000266028_39 (sequence is synthesized)
agtatcaggaccagacacatccacagccaggctcatgggtctcagacagcaacttgagttaaagctgaaactcatccttcttctctgtgttttctggtttaaaagctgcacttatatttt

SEQ ID NO: 788959 - DNA, 120 bp, Artificial Sequence
  ENSG00000266028_40 (sequence is synthesized)
agccttattattttctgtagttccggagagatggtgggttgccattctggtaggaaaatctgagttttcttatctttgacctagaagagattctttttggaccaacctgcgaaattggta

SEQ ID NO: 788960 - DNA, 120 bp, Artificial Sequence
  ENSG00000266028_41 (sequence is synthesized)
gttaggtctatggaaagtggtaggatttttttttttttaatcctgtgcaaaggaaaagaggtgctttgtgggaaatcactaatgagaaggctaacctgcagcaccagagaaacctttcca

SEQ ID NO: 788961 - DNA, 120 bp, Artificial Sequence
  ENSG00000266028_42 (sequence is synthesized)
agtgctaggcaggagaactgaagaactctttcagtgaagtgagtcagcctagaagaggcaacccacagtcttgatttttgttgctgtttcctgacctgttcttgcctgtcacctgggcct

SEQ ID NO: 788962 - DNA, 120 bp, Artificial Sequence
  ENSG00000266028_43 (sequence is synthesized)
acacaggtcccaagccaacggggctttcatacccaaggatctgtttccttgctgaaaatgaaaccctatctttcactttacattcctttcaatccaactgatcaaaactggtacccacac

SEQ ID NO: 788963 - DNA, 120 bp, Artificial Sequence
  ENSG00000266028_44 (sequence is synthesized)
ttgccctttctccctctctccagcacactcccctctaagaaagtaaaagcaaagctttcttaatggcaacactttgggcctgttctgttgctcctgccttatttctctttcaaccctgta

SEQ ID NO: 788964 - DNA, 120 bp, Artificial Sequence
  ENSG00000266028_45 (sequence is synthesized)
catgactcgtgttcaccatccccttgatcagtgtccatccgcgctaatttgcatcatgaactgaacagtgtgtgagtggtcacctactaaacccagctctgggggcagagctgtcttccc

SEQ ID NO: 788965 - DNA, 120 bp, Artificial Sequence
  ENSG00000266028_46 (sequence is synthesized)
catctctggtgctcctaacacctgtgagatggtcctgtcgagaggactaggaaccgataggaggagagtccttctcggcagagctcactgcaaacaactggaattgaggttgcacactgt

SEQ ID NO: 788966 - DNA, 120 bp, Artificial Sequence
  ENSG00000266028_47 (sequence is synthesized)
gatttttacaccgaaaagccaaaaggagctggccatccagggcctagggagaccagccttcctcagctatgcttgccgaaaccagcatgatgcttcaaagagccctgctccacccctcat

SEQ ID NO: 788967 - DNA, 120 bp, Artificial Sequence
  ENSG00000266028_48 (sequence is synthesized)
ggcatggatccttttcctggtgtggactctgaagggtcagtcttcggggaagagaggtggggtggggctactagcatcccaatttagaaaatagaggagtttgtagccagcagcctgtaa

SEQ ID NO: 788968 - DNA, 120 bp, Artificial Sequence
  ENSG00000266028_49 (sequence is synthesized)
actggaaacactggtctcagccaacctcctcagggcgccctggcttctccccaaggagatgaggagcggtgatgccagcaccgggatgcgcagagcactggaagggctggtgcagatcta

SEQ ID NO: 788969 - DNA, 120 bp, Artificial Sequence
  ENSG00000266028_50 (sequence is synthesized)
cttcccatgcagaagagaagtcacatcttccagggaatcgcaatgttgtggcgtctgacttgtatgtcacatttgtgtaaaatggtatattctttaaaatagtgttgataactggaatat

SEQ ID NO: 788970 - DNA, 120 bp, Artificial Sequence
  ENSG00000266028_51 (sequence is synthesized)
tgtatgtatgcttggagatgctttgtgtgaacctaagactgtcactcaacagatgttggattggggaaaatccaaagcacaacttcaaaataaaatacatttttaggtttcgatgctgca

SEQ ID NO: 788971 - DNA, 120 bp, Artificial Sequence
  ENSG00000266028_52 (sequence is synthesized)
gaatttgtcttcctgtactgccaggagagcagctgccagcagcaactctgaacagacccatctcagggacgtggaaactattcaacttgggatgcagcaggaaggatcagaatgttctct

SEQ ID NO: 788972 - DNA, 120 bp, Artificial Sequence
  ENSG00000266028_53 (sequence is synthesized)
atctgtgaccacgcctcggcagtgctagtcacacctccaagttttgccagctcctccccctcattccgggcctctcgggatcagctcttcctattggctatgggccccatcggtcgatag

SEQ ID NO: 788973 - DNA, 120 bp, Artificial Sequence
  ENSG00000266028_54 (sequence is synthesized)
aaaacgggcggtgattggcaagtgaaccggagcaaacgacttccgatccagtctgcgctgttgcggctcccgtttgggatttgatttgcagcatctttgagcctctacgacaaaaaaccg

SEQ ID NO: 788974 - DNA, 120 bp, Artificial Sequence
  ENSG00000266028_55 (sequence is synthesized)
acagctgggcgcgtccacacccccgcagccccacaccatgttgtgcggaaggacttccactccccgcctgtgtcgttgatgtcagaccccaggccagcctccgggcgctgcagttctccc

SEQ ID NO: 788975 - DNA, 120 bp, Artificial Sequence
  ENSG00000266028_56 (sequence is synthesized)
ggctaatgctgaggctgcggctccggctctagcacaggcaccagccgccgccgcacccggccccagcgcccaccgtctgcatgtgcccgccgtagccgtctgcccagcccgcagcccgcg

SEQ ID NO: 788976 - DNA, 120 bp, Artificial Sequence
  ENSG00000266028_57 (sequence is synthesized)
ggcttttaaagagcgtcagcatgcactgcagcactcaagggagatttggaactcagagtccttgttaagtgtctgaaggacaggcgttgaatatcttagatacgaatgtgggcatactca

SEQ ID NO: 788977 - DNA, 120 bp, Artificial Sequence
  ENSG00000266028_58 (sequence is synthesized)
agcatcgcaaacctggtggcaatctgtgcgtggacaggaccctcccaaatttagcattatgacttcaccacaggatcaagagaagatgaattgtgggggagaaggggctttctttgtcat

SEQ ID NO: 788978 - DNA, 120 bp, Artificial Sequence
  ENSG00000266028_59 (sequence is synthesized)
cagtagccagaggggccaggagagcagtggagagacctgggaccggcttggatgctctgagcggggctagaggcgctacgacagtgtgtggcggtgtcctgccacgacgccgccgtctcc

SEQ ID NO: 788979 - DNA, 120 bp, Artificial Sequence
  ENSG00000266028_60 (sequence is synthesized)
agagccaccacacagttgactgtccttacccggcagtgctcaggacctcagccgataaaccacaacctggacttgccgcctccttctccaggaggccgccccagcacggcctccccagga

SEQ ID NO: 788980 - DNA, 120 bp, Artificial Sequence
  ENSG00000266028_61 (sequence is synthesized)
agcagcatggggtagaaggcagatgcctcgaatccaggtgtcccctagccacgctttcctgaggagctgaggagcccgcagaactcagcggattatttatttttatttaaacgacccttc

SEQ ID NO: 788981 - DNA, 120 bp, Artificial Sequence
  ENSG00000266028_62 (sequence is synthesized)
gctgcctgaggcactcttctccagcctcctcagccttccatggagctgcagaccctacatagacctacccctgccgggctccaaacagatccccctacccattcctttcatgtactgttt

SEQ ID NO: 788982 - DNA, 120 bp, Artificial Sequence
  ENSG00000266028_63 (sequence is synthesized)
ggtcctggaagaggctcacacaagttggctttgggttttgcttcaacatagaaaccacgagccttataccttgaatatgggtagtttcattgccagtaatgggaactctggaactgccaa

SEQ ID NO: 788983 - DNA, 120 bp, Artificial Sequence
  ENSG00000266028_64 (sequence is synthesized)
tttttaactagctagtaggctttcactggaaagtttccttctcaggcacaggggatcctgaaaggggaacttcatcttttagttcttggagagtacatacaaatattcataataacacat

SEQ ID NO: 788984 - DNA, 120 bp, Artificial Sequence
  ENSG00000266028_65 (sequence is synthesized)
ttgtttataaaaatctataatctcttctaggtgatatgatgacattattttataacttttattgttgggaaactattttttctaattattgctaaaacttaaaggatgggtaatatgcag

SEQ ID NO: 788985 - DNA, 120 bp, Artificial Sequence
  ENSG00000266028_66 (sequence is synthesized)
gatgggtaatatgcagcattactattttgcacataattccaaaacatcgtattttcttattcatgtatctctagtcttcttttagacagttggacccttttttctttttctttttttttt

SEQ ID NO: 788986 - DNA, 120 bp, Artificial Sequence
  ENSG00000266028_67 (sequence is synthesized)
taacaatcctttggaagtcactactggtctttgtgtgctgctttttaataattgagttattttgagcttgccaagtaggatctattgcctggactaaaatttatttcctaatcttctgat

SEQ ID NO: 788987 - DNA, 120 bp, Artificial Sequence
  ENSG00000266028_68 (sequence is synthesized)
gaccaagaaaggaaaaattaagtttgcagatgtgagatgaaatatagccagtgaatatgcatactgattctgaatgaaaggaattaacttttcagtcaagaaacagtctgcatgcagtaa

SEQ ID NO: 788988 - DNA, 120 bp, Artificial Sequence
  ENSG00000266028_69 (sequence is synthesized)
attgaatttttcctgcaactggaatgatttgtttaattcttctttgaacactgccctttctccagtaagaacactaatgatttgctaatattttttaaagaaatctgtttttttaattag

SEQ ID NO: 788989 - DNA, 120 bp, Artificial Sequence
  ENSG00000266028_70 (sequence is synthesized)
ttaagctcagacttcctcttattttttatcctagagaaaactgctaaaagggaatgatatatcagtactattcttctaaaacaactttttaaaaatgattatacaaagccaaatatgctc

SEQ ID NO: 788990 - DNA, 120 bp, Artificial Sequence
  ENSG00000266028_71 (sequence is synthesized)
attatataaaatttagaaggaaaaagaaggaaataaaaattttccataattctaccagctagagataatggtgttagaatatattcctttctaatctgttttctatgcatgcacaaacac

SEQ ID NO: 788991 - DNA, 120 bp, Artificial Sequence
  ENSG00000266028_72 (sequence is synthesized)
atgcacaaacacatatgtgagcacatatttataattttattctaaaaaataggatactgctgtacatattgttttacaatctaagtcatataattataatattctttaagcatatttatg

SEQ ID NO: 788992 - DNA, 120 bp, Artificial Sequence
  ENSG00000266028_73 (sequence is synthesized)
aaacctatacaaaaaaataatagaatggcattttagctcattcattgatttttgtaaaatatttaacacactccctggtttgtagttagcgttcaataaatgctaaaaatttatcttcac

SEQ ID NO: 788993 - DNA, 71 bp, Artificial Sequence
  ENSG00000266028_74 (sequence is synthesized)
ctttttcgctgcgcagtcccgtatcttcacctattgaaatctcatccttctgctgggggctactgaaagta

SEQ ID NO: 788994 - DNA, 120 bp, Artificial Sequence
  ENSG00000266028_75 (sequence is synthesized)
gactccgtcctggctcacggaccgcagcgcagccggcacccagccgcctctccctttcctccgcacacgggcagccgcggtccaccgtagggcagtcgtcgttggcatcgcgcgtaatca

SEQ ID NO: 788995 - DNA, 120 bp, Artificial Sequence
  ENSG00000266028_76 (sequence is synthesized)
tcggccggcctcctccagtgtctcccagccctggcggacagcccgggtcccagcctaggacccaggaggatgggtgttccgcgcagcttccggggctctccccgagtcccaccccccggc

SEQ ID NO: 788996 - DNA, 120 bp, Artificial Sequence
  ENSG00000266028_77 (sequence is synthesized)
ccgccccgatggacttctcttcgcccactcccatccctagaccacatctcggcccccacagttcctgacatccttgcgcttcacgcaacatcgcggcccatgatcatgccccaattcccc

SEQ ID NO: 788997 - DNA, 120 bp, Artificial Sequence
  ENSG00000266028_78 (sequence is synthesized)
tcacctctaaggcagccttctccttgccgcctcccgccttccgagcgtgtgcaactccaattgtccccgggctcccttccagcctcaggaccccatctcacacccgcctctcgcttcccg

SEQ ID NO: 788998 - DNA, 120 bp, Artificial Sequence
  ENSG00000266028_79 (sequence is synthesized)
cttcccgctcgcctgaaccccgccgcctctgctccctgtcttgttccctcagcgtggccccttcctccagccgcgggaagtgggagacgctagcgggagcttcctcctcccggcgctcgg

SEQ ID NO: 788999 - DNA, 120 bp, Artificial Sequence
  ENSG00000266028_80 (sequence is synthesized)
aggaaaaggaaagaccaagtagaaagggtcgccgctgcggcacgcgagggagctagtcgccgggctccgcgctcccgcttgcgtccctccagccccctgggcctcgtccggggccggatc

SEQ ID NO: 789000 - DNA, 120 bp, Artificial Sequence
  ENSG00000266028_81 (sequence is synthesized)
ttctcgggcaccgcctggtgcgaggagtcaggactgcgacctcaccgacctcctcccatccccagcctgggattgggtgggatatctgggatctctgagcttgggtgtcaaaaaaatatt

SEQ ID NO: 789001 - DNA, 120 bp, Artificial Sequence
  ENSG00000266028_82 (sequence is synthesized)
gggggtggcatttatagtcactatcgtccctagcttgagggaggcgacggctgccttccgctcgccgccccccggttttcccggctccgaccctatcctctaacccgtttcctgcttcag

SEQ ID NO: 789002 - DNA, 120 bp, Artificial Sequence
  ENSG00000266028_83 (sequence is synthesized)
ctgaccacattgttttcctggatgtgtcccgtgccgagcaggctttttcctgcagatttgcccccccccccatcaacattttgctgccaagagaagctagtaaccaaaaacaaaacaact

SEQ ID NO: 789003 - DNA, 120 bp, Artificial Sequence
  ENSG00000266028_84 (sequence is synthesized)
gggaggaggggcgggagaggaagaaaagttgtgccctggtggcttatccctccccggctttgatcccctttgatgtacagggaggtgccccggccgggggtctggggccacgtcgggggc

SEQ ID NO: 789004 - DNA, 120 bp, Artificial Sequence
  ENSG00000266028_85 (sequence is synthesized)
cgctgcccagcgctggcggggctcaggaggccgccgaggtgccgcagtccccgcctggtgccccgcgttcctgcagtccccgcccggagcccgcgcaggcggctgctccaaagtgttttc

SEQ ID NO: 789005 - DNA, 120 bp, Artificial Sequence
  ENSG00000266028_86 (sequence is synthesized)
gcgcaggcggctgctccaaagtgttttctttcagccttaaaatccggagggagcttccttcctccccacctcgtagcgccaggctctgcgggcggggagacgttaagcggacaggaatgg

SEQ ID NO: 789006 - DNA, 120 bp, Artificial Sequence
  ENSG00000266028_87 (sequence is synthesized)
gctctgtggactggtgaggcgtgtatttccaccgtgatttgcaggttgttcatttctttgggtggagcagatgggggcaggctgaccccagaggtggtttcatagatgggtctgaacctc

SEQ ID NO: 789007 - DNA, 120 bp, Artificial Sequence
  ENSG00000266028_88 (sequence is synthesized)
caaaggatgggcaatgccagggggccattgacactggaaaggaatttttgcagtgggctgtaggagtatctttgtggggctgaccatgattttggcagccctttcccccccaagccggac

SEQ ID NO: 789008 - DNA, 120 bp, Artificial Sequence
  ENSG00000266028_89 (sequence is synthesized)
agggtggggggaggggcaggaggctcttagagaaaggcagtttgcctccggttctctgggtcaggtttccttgaaagacaactgaaatctgacaggtgtttggacatttgtttcagagat

SEQ ID NO: 789009 - DNA, 120 bp, Artificial Sequence
  ENSG00000266028_90 (sequence is synthesized)
tgaagaggagtccagacagaaaggcaaccttgggaaggtgtaccatttggagagccttgggagaggcggggtttttcggatgcactatattaaaacatgagatttgcaatggcattggca

SEQ ID NO: 789010 - DNA, 120 bp, Artificial Sequence
  ENSG00000266028_91 (sequence is synthesized)
ccaaaagtccattgccaccttgggtgtaccttgtacctgcctggtctctggtcggcctgcatacaatcagagatcagagaataaggccacccacgcccggtctccgccctcacctaaatc

SEQ ID NO: 789011 - DNA, 120 bp, Artificial Sequence
  ENSG00000266028_92 (sequence is synthesized)
tgaatagagttgggaggatgttagggtagccggttggtgctgattctggaaaatgggaagacataattgtttaacccttctgtgctgtggccctctgctccggaagacatgcttttaaag

SEQ ID NO: 789012 - DNA, 120 bp, Artificial Sequence
  ENSG00000266028_93 (sequence is synthesized)
ccccatttccctctcctgaaaaatgtgaagggtaaagcaaaatgtggactaggagaaaccaagtgacctgtcttctcatctagtcgactgacttgactcatgaataagagcccttactca

SEQ ID NO: 789013 - DNA, 120 bp, Artificial Sequence
  ENSG00000266028_94 (sequence is synthesized)
gatagcgttttttaaaccagcagttcccataggaagggttcctgcctgttaaagagctgcagcatgtgtttgtgcaaggcactgtcccttcctggtcagtcactggaaagagccatgtgg

SEQ ID NO: 789014 - DNA, 120 bp, Artificial Sequence
  ENSG00000266028_95 (sequence is synthesized)
ctccagcccattgagaccttagctggggagtggaagaggtgggtggccttgaatgttacaccacatggttggagctctgggttttcctttgtttcagagtacagagggaggggcccctcc

SEQ ID NO: 789015 - DNA, 120 bp, Artificial Sequence
  ENSG00000266028_96 (sequence is synthesized)
tttccctgcaccagtgcaaggagaccttttcctatcagagaggacttgggaagggccatggctcccctctaatgattgctggggggtgggggtaggtgtagagtttgaaatgggcagctc

SEQ ID NO: 789016 - DNA, 120 bp, Artificial Sequence
  ENSG00000266028_97 (sequence is synthesized)
ccttatctcttggaaggttggaaggtagtctgaagtcctcattgtacctacaggatcttttttatgtcattagtttggtcagtgctggaggtgccctaaggggccttctatccacttggc

SEQ ID NO: 789017 - DNA, 120 bp, Artificial Sequence
  ENSG00000266028_98 (sequence is synthesized)
tgcaaatattggtaggtttattacagagatgggggagttgactgattgatagcttcagttgaactgggattgagagaggtgtggttgtgagttattattgaggtcttggcctcttgtcac

SEQ ID NO: 789018 - DNA, 120 bp, Artificial Sequence
  ENSG00000266028_99 (sequence is synthesized)
tgttcataatccaggcttgtttttgtaaacaataggccactggcctccatgtcctgtccagatgcattgcatttgctcttggaatcccccctgcagttttaaccagatatgtcttttttt

SEQ ID NO: 789019 - DNA, 120 bp, Artificial Sequence
  ENSG00000266028_100 (sequence is synthesized)
ttttttttttttaacacatcctattcttaaactgttgccatcgggagtgttaataactttgatcttcccagatttctctccagaagcacgccatttgactaaggtgcaaagtgactttaa

SEQ ID NO: 789020 - DNA, 120 bp, Artificial Sequence
  ENSG00000266028_101 (sequence is synthesized)
atgtttaatttttggaaggttcaaggctgataggtgttaatagaaccatatctgccaatttcttattggcaaaggatttctcaagagtgtctcaaaattaaacactttggatatttacaa

SEQ ID NO: 789021 - DNA, 120 bp, Artificial Sequence
  ENSG00000266028_102 (sequence is synthesized)
acattgctcattgagatgatgtaatgcagtcggctatttgggttctctcttcaaccttgccacaaacagactattttgctttgctctgatattttcccattgatactattcaggatcata

SEQ ID NO: 789022 - DNA, 120 bp, Artificial Sequence
  ENSG00000266028_103 (sequence is synthesized)
gaattttataggtggctgagcatgatgtcttactccgagaaggtgcctgatgaatgcttatggaactgatttgaatagtttagtccttcattttacagctgaggagaatacagagaactg

SEQ ID NO: 789023 - DNA, 120 bp, Artificial Sequence
  ENSG00000266028_104 (sequence is synthesized)
aagaggcttgtccaaggtcacacggctagatggtggcagatctgaaactagaagcagatttaccaactctcaattctctattctgtatctttactatgaaacatcatctgaccagggtgg

SEQ ID NO: 789024 - DNA, 120 bp, Artificial Sequence
  ENSG00000266028_105 (sequence is synthesized)
actttcattgtggctgttagcaacatcctggggtttaaactccacccacgcccgatctggctgtctagagggattctacgcctgcgtgctgccgcctccccaagaggcattcaggttatt

SEQ ID NO: 789025 - DNA, 120 bp, Artificial Sequence
  ENSG00000266028_106 (sequence is synthesized)
ggagaactaatctcatctcaaggggccagacaccaagtcccaaagcctacagacctctttccgccaggccctgaaacctggccccgtgccagcaggatgacaagccccagggcgctcctg

SEQ ID NO: 789026 - DNA, 120 bp, Artificial Sequence
  ENSG00000266028_107 (sequence is synthesized)
atgaatatggattggagatgatgtacagtttttattcccctctggcttttgaggaatgaaatgatttgcactttgaaaacctgttaaccgtagcctctggacactgagactggaaggaga

SEQ ID NO: 789027 - DNA, 120 bp, Artificial Sequence
  ENSG00000266028_108 (sequence is synthesized)
catatttatacctgatgagtgataacaaggggtttttatttgaccacctatatttcttttctcgaaagatcaggctgggaaaacatttttgttactctcttttttttttaaacaactatg

SEQ ID NO: 789028 - DNA, 120 bp, Artificial Sequence
  ENSG00000266028_109 (sequence is synthesized)
ctcaccccaacctgttgagccactcttccacttgcaaattaaaatgactggttttctaggagaaatccggcttaagcagccttatggaagtgacctagttcatttaaccgagatgaggtt

SEQ ID NO: 789029 - DNA, 120 bp, Artificial Sequence
  ENSG00000266028_110 (sequence is synthesized)
gatatagggtaagatgggggaaggagggaaaaggatgtcaaggaacaaaggaaacctgaactggtcccagagagatctcatctgataggctgttggttgattctcacactttgaagcagt

SEQ ID NO: 789030 - DNA, 120 bp, Artificial Sequence
  ENSG00000266028_111 (sequence is synthesized)
tgtcccgtgggcccacccaagcctgccccctgtccgtttgccctgtctctgtccccagctcccctcccttggatacgatgctgtcagtgtttttagtccttcccttaatattatttttta

SEQ ID NO: 789031 - DNA, 120 bp, Artificial Sequence
  ENSG00000266028_112 (sequence is synthesized)
tccagccaggtgtcgctgctgcctcagagctgtgtggggtcgcgtgtatgtcggggggccatcttgccgatttaacgctgctttttgtgttgttgttgttttccctcctccctgcctgcc

SEQ ID NO: 789032 - DNA, 120 bp, Artificial Sequence
  ENSG00000266028_113 (sequence is synthesized)
accctctggcctaacccccatctccattcctgtgctgcacgtagggctcccagctcccccagcctaacagtttgcatgtggtcattgctgctgcaaggcggacagggctgaggatgctgc

SEQ ID NO: 789033 - DNA, 120 bp, Artificial Sequence
  ENSG00000266028_114 (sequence is synthesized)
tacaagcctcggggcaggtccaggtctccagctagctgccctcgtgctgtggaagggtgctttactgtgtgttcccgcagtgtctgtccacccagacctttgtggcagtcttacagctaa

SEQ ID NO: 789034 - DNA, 120 bp, Artificial Sequence
  ENSG00000266028_115 (sequence is synthesized)
aactttgaccaaagctttggtcactttatgcaacctggttttgtactgtttctcagaggtgccttcttttttccaatccatactcaaataatagtctttgatgtctgtcttccttgaccc

SEQ ID NO: 789035 - DNA, 120 bp, Artificial Sequence
  ENSG00000266028_116 (sequence is synthesized)
gtgttcgtgcaaagattcagagtctgtgtgtggcttctactaggctgatgttacaccaggtgggtttattgagatatcatgtgtctgttcctccccctgtcctgcattcactcctgtgga

SEQ ID NO: 789036 - DNA, 120 bp, Artificial Sequence
  ENSG00000266028_117 (sequence is synthesized)
ggaaaggaggccacgatgtccctaaggaaagctttgtcctgagctcttcattcattggctaacccctagctcccttttcttctgccctttcacaccaggagaaataattttccattttgt

SEQ ID NO: 789037 - DNA, 120 bp, Artificial Sequence
  ENSG00000266028_118 (sequence is synthesized)
tttttctccccgcaggggctcagtcccagcctggtttcatgattcttgtgagatacagttgctgtgtcccatcctcagcccatagggaatgtccctgagccaggctggcacaagagagtt

SEQ ID NO: 789038 - DNA, 120 bp, Artificial Sequence
  ENSG00000266028_119 (sequence is synthesized)
tatattggtggactcatctgccgtgctttggtcctggagcccctgaaatggagcagtctttgctttatctgttccctggtctgtcccactcatggccaccatgccgggcagaaagctgat

SEQ ID NO: 789039 - DNA, 120 bp, Artificial Sequence
  ENSG00000266074_0 (sequence is synthesized)
gagagccgctctggatgggctcgctagagtcgttgttgtggaagcggtgcatttacagtgcaacagtcagcacattgaaaataccaataggaatacaaaacaaagtcacatttactgatt

SEQ ID NO: 789040 - DNA, 120 bp, Artificial Sequence
  ENSG00000266074_1 (sequence is synthesized)
taattgtattgcattcagttgtatccaggaaacagcctccaaccatggacccgcacagcggccgctggctcggtgcgcggccgcccgccgagaagcccagtcctcccgcgtgctgaccgg

SEQ ID NO: 789041 - DNA, 80 bp, Artificial Sequence
  ENSG00000266074_2 (sequence is synthesized)
aagcccagtcctcccgcgtgctgaccggccccgccgccaccaccgcctgtgaccccggacgccgccgcctctgcgccgcc

SEQ ID NO: 789042 - DNA, 120 bp, Artificial Sequence
  ENSG00000266074_3 (sequence is synthesized)
gcatctgctgtcggagcgcgggagcctgggccaccgcagcgccgctgccgccgcgcgtctcgccccggctgggcccgccgcgcagccccccgcacacttccagccgggaaagtacttccc

SEQ ID NO: 789043 - DNA, 120 bp, Artificial Sequence
  ENSG00000266074_4 (sequence is synthesized)
gccccccgcacacttccagccgggaaagtacttcccgtcgccgttgcccatggcttcgcacacagccagcagccgcctgatgggaagttctccggcctcctcgttcatgggcagtttcct

SEQ ID NO: 789044 - DNA, 120 bp, Artificial Sequence
  ENSG00000266074_5 (sequence is synthesized)
caccagcagcctgggctcggcagcctccacgcaccccagcggccccagctcctccccccctgagcaggcctaccgtggctcccaccccaccacctcccagatctggttctcccactccca

SEQ ID NO: 789045 - DNA, 120 bp, Artificial Sequence
  ENSG00000266074_6 (sequence is synthesized)
cgaagctccggggtaccccagattttcggggagtctggcatccaccttcctacccgtgagccacttggatcaccatggaaacagcaacgttctctatgggcagcaccgtttctatggaac

SEQ ID NO: 789046 - DNA, 120 bp, Artificial Sequence
  ENSG00000266074_7 (sequence is synthesized)
ccaaaaagataacttctacctgcgcaacctgccgccccagcccacgctgctgccggccaaccacaacttccccagcgtggcccgggccgcccctgcccaccccatgggctcctgcagccg

SEQ ID NO: 789047 - DNA, 120 bp, Artificial Sequence
  ENSG00000266074_8 (sequence is synthesized)
ggatcgagaccggggtgaggcaggctccctgcagaagggccccaaggacttcgaccgcttcctcgtgggcaaagagctgggcagagagaaggcgggcaaggccgctgagggcaaggagcg

SEQ ID NO: 789048 - DNA, 120 bp, Artificial Sequence
  ENSG00000266074_9 (sequence is synthesized)
gcggcagaggaggacggtggcaaggagcggcacaagctggtgctgcccgtgccagccgacgggcactgcagggagggcggccccgcaccccgaggggcctgcgagggccgccccaagcac

SEQ ID NO: 789049 - DNA, 120 bp, Artificial Sequence
  ENSG00000266074_10 (sequence is synthesized)
gcacctcacctcctgcctcctcaacaccaaggtgctcaacggcgagatgggcagggctgcgctagccagctgtgcagggggcatgctggggcggcctggcacgggggtggtgacctccgg

SEQ ID NO: 789050 - DNA, 120 bp, Artificial Sequence
  ENSG00000266074_11 (sequence is synthesized)
gcgctgtgcaaaggaggcagcaggccccccggagcccgggccggccttcagcgagtgcctggagcggcggcagatgctacaccacaccgcatcctacgccgggccacccccgcccctcag

SEQ ID NO: 789051 - DNA, 120 bp, Artificial Sequence
  ENSG00000266074_12 (sequence is synthesized)
cacagccgccggctccttcccctgcctgcagctgcacgggggccctgacgggctctgcccgctgcaggacaaagccccccgggacctaaaggccagcgggcccaccttcgtgccttctgt

SEQ ID NO: 789052 - DNA, 120 bp, Artificial Sequence
  ENSG00000266074_13 (sequence is synthesized)
gggacacctggccgacaagggccgccccttccaggccgccgaggcctgtgccgtggcaggggagggcaaggaccggcacctggagggaaccatggcccccgaccacgctgcaccctatgg

SEQ ID NO: 789053 - DNA, 120 bp, Artificial Sequence
  ENSG00000266074_14 (sequence is synthesized)
agtctcctatgcccacctgaaggccgagggcaagggcgagcggcggcctgggggctttgaggcggccctcaacccccggctaaagggcctcgactatctcagcagcgcaggccccgaggc

SEQ ID NO: 789054 - DNA, 120 bp, Artificial Sequence
  ENSG00000266074_15 (sequence is synthesized)
ctccttccccggactccctaaaagcggtctggacaaaagcggctacttcgagttgcccacctcttcacaggactgtgcccggcctggtcaccaggacccgctgggcgggaaggcccccca

SEQ ID NO: 789055 - DNA, 120 bp, Artificial Sequence
  ENSG00000266074_16 (sequence is synthesized)
ggcctgctgcactttagataagactgttggcaaggaagccccggccggccccccaggggcacagaaggtggcccgcatcaggcaccagcagcacttgatggccgccgaggtggagcaggg

SEQ ID NO: 789056 - DNA, 120 bp, Artificial Sequence
  ENSG00000266074_17 (sequence is synthesized)
gggcattggggctgaggccaagcgcaagtccctggagctggcatccctgggctacagtgggccccacctgcccccatggggtgtccaggcaggccagggcaccgccatggccatcagcga

SEQ ID NO: 789057 - DNA, 120 bp, Artificial Sequence
  ENSG00000266074_18 (sequence is synthesized)
ggagcgcaaggctggcgcctacctggacccctttggcagtggcctgcagcaggcggctcttctgccccaggaactgcctgcgccgccggacgaggtctcagccatgaagaacctgctcaa

SEQ ID NO: 789058 - DNA, 120 bp, Artificial Sequence
  ENSG00000266074_19 (sequence is synthesized)
atacagcagccaggccctggtggtgggccagaaagcacccttggtgggcctgggtggcctcaaggccagctgcatccagcaggaagcaaagttcctgtcctctaagggcccaggccagtc

SEQ ID NO: 789059 - DNA, 120 bp, Artificial Sequence
  ENSG00000266074_20 (sequence is synthesized)
ggagaggccggactgtgcccgcagcagggagcacgacaccacgcacggcgacggggaggtgcggcagccccctgtgggcattgcagtggccttggcccggcagaaggacacagtgagccg

SEQ ID NO: 789060 - DNA, 120 bp, Artificial Sequence
  ENSG00000266074_21 (sequence is synthesized)
gtctgaggcagcctacggcaccaacactgcgcggcagggccgggccgcccccgccttcaaaggtggcggtgggccccgttccacacacgcgctggacctggaggctgaggaggagaggac

SEQ ID NO: 789061 - DNA, 120 bp, Artificial Sequence
  ENSG00000266074_22 (sequence is synthesized)
gaggctatgtgatgaccgcctggggcttgccagccgcgagctgctgctgcaggacagcaaagaccgcgtagagttcgcccggatccacccaccgagcagctgccctggggacctggcccc

SEQ ID NO: 789062 - DNA, 120 bp, Artificial Sequence
  ENSG00000266074_23 (sequence is synthesized)
ccacctcatgatgcagagcggccagctgggcggggacccagccccccacacccacccccatcccccctggctgccccgcacccgcagcccctccctgtggatgggggggcactcctacgg

SEQ ID NO: 789063 - DNA, 120 bp, Artificial Sequence
  ENSG00000266074_24 (sequence is synthesized)
cctggggcaccctgccctgcaccagaacctgccccccggcttccccgcctccgtggctggccctgtgccctctgtcttccccctcccacaggacgcccccacacagctggtcatcctgcc

SEQ ID NO: 789064 - DNA, 120 bp, Artificial Sequence
  ENSG00000266074_25 (sequence is synthesized)
ctcagagcccacaccccacagcgccccccacgcacttgcggatgtcatggaccaggcgtcactgtggccccccatgtacgggggccggggccccgcctctcacatgcagcacccgggcca

SEQ ID NO: 789065 - DNA, 120 bp, Artificial Sequence
  ENSG00000266074_26 (sequence is synthesized)
gctccctgtgtactcgaggccgcagctcctccggcagcaggagctctatgctttgcagcagcagagggccgcccagttccagcggaagcccgaagaccagcacctggatctggaggagcc

SEQ ID NO: 789066 - DNA, 120 bp, Artificial Sequence
  ENSG00000266074_27 (sequence is synthesized)
cgcccaggagaaggccccaaagtccacccacaagccagttgccttaacccccacggccccgggcgccccctcacccgctgcaggccccaccaagctgccaccttgctgccatccgcccga

SEQ ID NO: 789067 - DNA, 120 bp, Artificial Sequence
  ENSG00000266074_28 (sequence is synthesized)
cccaaagccccccgccagctcccccaccccaccacctcggcccagcgccccgtgcactttaaatgtctgccctgccagcagccccgggcctggctcccgggtgcgcagcgccgaggaaaa

SEQ ID NO: 789068 - DNA, 120 bp, Artificial Sequence
  ENSG00000266074_29 (sequence is synthesized)
gaatggggagggtcagcagtccacggccgacatcatcacatccgaaccagtggcacgtgctcactctgttgcccacgctggtctcgaattcctggcctcaaatgatccatccacctcagc

SEQ ID NO: 789069 - DNA, 120 bp, Artificial Sequence
  ENSG00000266074_30 (sequence is synthesized)
ctcccaaagttttgggattacagacctgcctcccggatacctgcgccccatggctggcctgggcttctccctaccctcagacgtgcactcttctaacctcgaggaccctgaaactatgca

SEQ ID NO: 789070 - DNA, 120 bp, Artificial Sequence
  ENSG00000266074_31 (sequence is synthesized)
aaccaccgccccgggggcccagcctgagcccacaaggacattcctgcctggggagccgcctccctgcagccccaggagcctggaggagcccgggctgctctcaggggccagggaggccac

SEQ ID NO: 789071 - DNA, 120 bp, Artificial Sequence
  ENSG00000266074_32 (sequence is synthesized)
ccaggaccttgccgccaccccctaccctaccgagcggggaccccaggggaaggcagcggaccccagcccactagaggggctacaagaactgcaatgtgcggccctcctggaggcaggggg

SEQ ID NO: 789072 - DNA, 120 bp, Artificial Sequence
  ENSG00000266074_33 (sequence is synthesized)
ccccgaggccaccggccaggctcattctactcagggaggggcacgagaagagaggagcagggaggagggggagcaggggccctcgtcaggggcctcctcccaagtcctggagcagcgagc

SEQ ID NO: 789073 - DNA, 120 bp, Artificial Sequence
  ENSG00000266074_34 (sequence is synthesized)
agggagtccgggtgcccttgaggacgagggggagcagccggcccctgaggaggacgagctggaggaagacgagctggggcagcagagcatggaggactcagaggaggactgtggcggagc

SEQ ID NO: 789074 - DNA, 120 bp, Artificial Sequence
  ENSG00000266074_35 (sequence is synthesized)
tcccgacaacagccacccacccagggcgctaccaggcctggatgccttggtggccgccaccatcaacctgggggacctgcccagcgacagcccaccggaccctcagcccccagcggcctc

SEQ ID NO: 789075 - DNA, 120 bp, Artificial Sequence
  ENSG00000266074_36 (sequence is synthesized)
tgggccccccagcacagtccccctgcctcatagctcagggattcatgggatcgctctgctcagcgagctggctgacctggcaatccagcggcagaggagtgagaggactgtgccagagga

SEQ ID NO: 789076 - DNA, 120 bp, Artificial Sequence
  ENSG00000266074_37 (sequence is synthesized)
ggaagaggacgtgctagccttcaacctgcagcacctggccacgctggccacagcctggtccctggtggaggccgctggcctggacagctccactgccccagcgcagccgcccacagccaa

SEQ ID NO: 789077 - DNA, 120 bp, Artificial Sequence
  ENSG00000266074_38 (sequence is synthesized)
cccctgcagcggccccaggctcaccccccgcatgcagatcctgcagcgcaaggacacctggacccccaagaccaagcctgtgtgccccctgaaggccgccatcgaccggctggacacgca

SEQ ID NO: 789078 - DNA, 120 bp, Artificial Sequence
  ENSG00000266074_39 (sequence is synthesized)
ggaggtggggatgcgcgtgcggctggcggagctgcagcggcgctacaaggagaagcagcgggagctggcccgcctgcagcgcaagcacgaccatgagagagacgagagttcacggagccc

SEQ ID NO: 789079 - DNA, 120 bp, Artificial Sequence
  ENSG00000266074_40 (sequence is synthesized)
tgcacggcgggggcctggccggccgaggaagcgcaaacactcaagctcgctgcctgccccacgtcccacggggccgctccccaggagcgatggcaagaaagtcaaggcggtgcggacaag

SEQ ID NO: 789080 - DNA, 120 bp, Artificial Sequence
  ENSG00000266074_41 (sequence is synthesized)
cctgggtctgctgtgtgcggagctgcgaggaggcagtgggggcgagcctgcgaagaagcgaagcaagctggagaggagcgtctatgcgggcctgcagactgcctccgtggagaaggcgca

SEQ ID NO: 789081 - DNA, 120 bp, Artificial Sequence
  ENSG00000266074_42 (sequence is synthesized)
gtgtaagaagagcagctgtcagggcgggctggcgccctccgtggcccacagggtggcccagctgaaacccaaggtcaagagcaaagggctgcccacaggcctcagctctttccagcagaa

SEQ ID NO: 789082 - DNA, 120 bp, Artificial Sequence
  ENSG00000266074_43 (sequence is synthesized)
ggaggctacccccggggggcgcatccgggagaagctgtcccgagccaagagtgccaaggtgtctggggccacacggcacccacagcccaagggccacggcagccgggagacacccaggtg

SEQ ID NO: 789083 - DNA, 120 bp, Artificial Sequence
  ENSG00000266074_44 (sequence is synthesized)
cccagcccagccctccgtggctgcgtcccaggaggcaggcagtggctatgacagtgaggactgcgagggtctcctggggacagaggcaccacccagggaagcagggctgctgctgcacac

SEQ ID NO: 789084 - DNA, 120 bp, Artificial Sequence
  ENSG00000266074_45 (sequence is synthesized)
ggggccagtgtggccgtgctggggccctcaccctcctctgtggtcaagatggaggccaaccagaaggccaagaagaagaaggagaggcaggggttgctaggggcctgccgcctgtccagc

SEQ ID NO: 789085 - DNA, 120 bp, Artificial Sequence
  ENSG00000266074_46 (sequence is synthesized)
cctgagagtgaggtcaagatcaagaggcggtcggtgaaggccaaggtgggcaccaccctggagcgggccccagggcagaggcccccaggtgcgctgggcaagaagaaagccaagggcaag

SEQ ID NO: 789086 - DNA, 120 bp, Artificial Sequence
  ENSG00000266074_47 (sequence is synthesized)
gccaagggcagcctgcgggcagagccgggggccacccccagcagggacgccctcttcaacccctctcgggccttcgcctgccgtgaggagggcagccagctggccagtgagcgcctcaag

SEQ ID NO: 789087 - DNA, 120 bp, Artificial Sequence
  ENSG00000266074_48 (sequence is synthesized)
agggccacgcgcaagggcacagtgctgcagccagtgctgcggcggaagaacggggccctgtccatcacgctggccacacgcaacgccaaggccatcctggggaagggccggaagctgagc

SEQ ID NO: 789088 - DNA, 120 bp, Artificial Sequence
  ENSG00000266074_49 (sequence is synthesized)
aaggtgaagcacaaggccggcaagcagggcaagggccgggccgtgagccgcctgctggaaagcttcgccgtggaggaagactttgagttcgacgacaacagcagcttctcggaagaggag

SEQ ID NO: 789089 - DNA, 120 bp, Artificial Sequence
  ENSG00000266074_50 (sequence is synthesized)
gaggacgaggaggaagaggaggaggacagcggccctctgagcgcagagcagagcgccgccctagcgcgctcgtgtgccatccacaaggaggacctgcgggacgggctgcccgtgctcatc

SEQ ID NO: 789090 - DNA, 120 bp, Artificial Sequence
  ENSG00000266074_51 (sequence is synthesized)
cccaaggaggatagcctgctgtacgcgggcagcgtcaggaccctgcagccacccgacatctatagcatcgtcatcgagggcgagaggggcaaccggcagaggatctactcactggagcag

SEQ ID NO: 789091 - DNA, 120 bp, Artificial Sequence
  ENSG00000266074_52 (sequence is synthesized)
ctgctgcaggaagcggttctcgatgtgcggccacagtccagccggtacctcccgcccggcacgcgggtctgcgcctactggagtcagaagtctcgatgtctgtacccgggcaacgtggtc

SEQ ID NO: 789092 - DNA, 120 bp, Artificial Sequence
  ENSG00000266074_53 (sequence is synthesized)
cggggggcctccggtgacgaagatgaggacctggactcagtagtggtggaatttgacgatggggatacaggccacatcgccgtctccaacgtcaggctgctgccccctgacttcaagatc

SEQ ID NO: 789093 - DNA, 120 bp, Artificial Sequence
  ENSG00000266074_54 (sequence is synthesized)
cagtgcacagagccctctccagccctgctagtgtctagcagctgccggaggaccaagaaggtatccagtgaggcacccccgcctagtgaagccgccacccccagcctgtcccccaaagca

SEQ ID NO: 789094 - DNA, 120 bp, Artificial Sequence
  ENSG00000266074_55 (sequence is synthesized)
caggacggccccgaagctttgaagacacctgggaaaaaatccattagcaaagacaaagctggtaaagccgaactcctaacctcaggtgccaaatcccccacgggggcctccgaccacttc

SEQ ID NO: 789095 - DNA, 120 bp, Artificial Sequence
  ENSG00000266074_56 (sequence is synthesized)
ctgggccgccgtggcagccccttgctgagctggtccgcggtggcgcagaccaagcggaaggcggtggcagcggccagcaaggggccgggggtgctgcagaacctcttccagctcaacggc

SEQ ID NO: 789096 - DNA, 120 bp, Artificial Sequence
  ENSG00000266074_57 (sequence is synthesized)
agcagcaagaagctgcgggcccgcgaggccctgttccccgtgcacagcgtggccacacccatatttggcaacggcttccgcgccgactccttcagcagcctggccagctcctacgcgccc

SEQ ID NO: 789097 - DNA, 120 bp, Artificial Sequence
  ENSG00000266074_58 (sequence is synthesized)
ttcgtcggggggaccgggccgggcctccccaggggagcccacaagctgctgcgggctaagaaggccgagagggtggaggccgagaagggtgggcggcggcgggcgggcggtgagttcctg

SEQ ID NO: 789098 - DNA, 120 bp, Artificial Sequence
  ENSG00000266074_59 (sequence is synthesized)
gtcaagctggaccacgagggtgtgacctcccccaagaacaagacctgcaaggcgttgctcatgggggacaaggacttcagccccaagctcgggcggcccctgcccagccccagctatgtg

SEQ ID NO: 789099 - DNA, 120 bp, Artificial Sequence
  ENSG00000266074_60 (sequence is synthesized)
cacccggcccttgtgggcaaggacaagaaggggcgggcacccatccccccgctgcccatggggctggcgctgcgcaagtacgcgggccaggcagagttcccgctgccctacgacagcgac

SEQ ID NO: 789100 - DNA, 120 bp, Artificial Sequence
  ENSG00000266074_61 (sequence is synthesized)
tgccacagctccttctcggacgaggacgaggacgggccggggctggcggccggcgtgccctcccgcttcctcgcccgcctgtccgtgtcctcttcctcctctggctcgtccacctcctcc

SEQ ID NO: 789101 - DNA, 120 bp, Artificial Sequence
  ENSG00000266074_62 (sequence is synthesized)
tcctcaggctccgtgtccacctccagcctctgctcctccgacaacgaggactcgtcctacagctcagacgacgaggacccggctctgctgctgcagacctgcctcacccaccccgtgccc

SEQ ID NO: 789102 - DNA, 120 bp, Artificial Sequence
  ENSG00000266074_63 (sequence is synthesized)
accctcctggcccagcccgaggccctgcgctccaagggcagcggccctcacgcgcatgcccagcgctgcttcctgtccagggccacggtggctggcaccggtgcgggctcaggccccagc

SEQ ID NO: 789103 - DNA, 120 bp, Artificial Sequence
  ENSG00000266074_64 (sequence is synthesized)
agcagcagcaaatccaagctcaagcgcaaagaggccctgagcttctccaaagccaaagagctctcccggaggcagcggccgccctccgtggaaaaccggccaaagatctcagccttcctg

SEQ ID NO: 789104 - DNA, 120 bp, Artificial Sequence
  ENSG00000266074_65 (sequence is synthesized)
cccgcccggcagctctggaagtggtcggggaatcccacacagcggcgtggcatgaaggggaaggcccggaagctgttctacaaggccatcgtgcggggcgaggagaccctgcgtgtcggg

SEQ ID NO: 789105 - DNA, 120 bp, Artificial Sequence
  ENSG00000266074_66 (sequence is synthesized)
gactgtgccgtcttcctgtcagctgggcggcccaacctcccctacatcggccgcatcgagagcatgtgggagtcgtggggcagcaacatggtggtcaaggtcaagtggttctaccaccct

SEQ ID NO: 789106 - DNA, 120 bp, Artificial Sequence
  ENSG00000266074_67 (sequence is synthesized)
gaggagaccaagctgggcaagaggcagtgcgacggcaagaatgcgctgtaccagtcctgccacgaggatgagaacgacgtgcagaccatctcccacaagtgccaggtcgtggcgcgcgag

SEQ ID NO: 789107 - DNA, 120 bp, Artificial Sequence
  ENSG00000266074_68 (sequence is synthesized)
cagtatgagcagatggcccggagccgcaagtgccaggaccggcaggacctctactacctggcgggcacctacgaccccaccaccgggcgcctggtgacggctgatggcgtgcccatccta

SEQ ID NO: 789108 - DNA, 120 bp, Artificial Sequence
  ENSG00000266074_69 (sequence is synthesized)
tgctgagccgcccaccgcagatgcctcccacgtgcgccagggaccctgtgtgcggagcctggcgtcggccaagccaccgggcaggaggcagccccggcctcccaagggcgcatctgagca

SEQ ID NO: 789109 - DNA, 120 bp, Artificial Sequence
  ENSG00000266074_70 (sequence is synthesized)
aatatgcaaaagcccacagggcaagacccaggctttcttacggttttccctggaaagagcgctccaggtgtcggaatccagtcccgtcccatcctctgcggagggtcgggctgtggccct

SEQ ID NO: 789110 - DNA, 120 bp, Artificial Sequence
  ENSG00000266074_71 (sequence is synthesized)
catgggtccccggcccgccccacccacagcgccctccgtttcccgcaccggcagttcacgggagatttgaatccaagccatattccctagtacctccgactgtctcccaccagggaaagc

SEQ ID NO: 789111 - DNA, 120 bp, Artificial Sequence
  ENSG00000266074_72 (sequence is synthesized)
agaaatcaggtgtgttgtctatttatttctctatgtaaatattgtatttctgcggggaaattttatggtaaaaagtggaaaagggtttttccccatccgcgtgacaaggtgtgtgtgagc

SEQ ID NO: 789112 - DNA, 120 bp, Artificial Sequence
  ENSG00000266074_73 (sequence is synthesized)
gtgtatgtgtgtgcgcgtgtgtggcgatttttgtcctggggtttcctttggaaatgcactgttctcagcccagctgggttccaacgggggcacctgggacgacagaggcatctcggggca

SEQ ID NO: 789113 - DNA, 120 bp, Artificial Sequence
  ENSG00000266074_74 (sequence is synthesized)
gggggcagaggccacgggagggtcaggtgggacccttgacggcaccctctgatctcttggggggacgaccgtgtaagatgaaagtcggtcaagtttatttgctttcagtgcatctcctag

SEQ ID NO: 789114 - DNA, 120 bp, Artificial Sequence
  ENSG00000266074_75 (sequence is synthesized)
aaaagaagtgttggagcagggggtggtgatgaggggcccgtggggaaaggattcaagaggcaaagcccagaccagggagtgtgacaacagccgtgagcatctcacctgtgttcaaaacaa

SEQ ID NO: 789115 - DNA, 120 bp, Artificial Sequence
  ENSG00000266074_76 (sequence is synthesized)
gacaaagacgaacaaatattttaaagtattgataagaaaaagcaatgtttggattgtatctgctgaatcatattccaacctatatctgatttctgtttccggggccagttggtctgaggc

SEQ ID NO: 789116 - DNA, 120 bp, Artificial Sequence
  ENSG00000266074_77 (sequence is synthesized)
caaggagtctggcctccacccagagcagggaggggctggcccctcgcccccctcaccctcgccgccctggcacactcgggaagcagggcccagctctgagcccctcctcacccctggggt

SEQ ID NO: 789117 - DNA, 120 bp, Artificial Sequence
  ENSG00000266074_78 (sequence is synthesized)
cctaactttcctgaaagtagtaggtgccgtgagaaggggcagtttggccaggttcctgaactgggcagggctcggggcctatgagggcaggttcacagtcccaccagattctctcctcac

SEQ ID NO: 789118 - DNA, 120 bp, Artificial Sequence
  ENSG00000266074_79 (sequence is synthesized)
ccccaagcagaatgcatgcaaaagacaccccttttcccacccaccttattggtgcccccaaacccctggcctgctgcgtagatggtggtgaggccaggccagcagtgctgtggccagggg

SEQ ID NO: 789119 - DNA, 120 bp, Artificial Sequence
  ENSG00000266074_80 (sequence is synthesized)
agaagaaaataaaacgcaggccctgcccttggggaaggcccctttctgggcccccttttccaccagccaaatctgcctggccctcggacccctctgcctgccccaacccctttggaggtt

SEQ ID NO: 789120 - DNA, 120 bp, Artificial Sequence
  ENSG00000266074_81 (sequence is synthesized)
tctcggccttttctgtgccacttggtggggcagatggcctgatgggctagtgcttggggcatagaatgagggtccccctgaccacctgagcccaaatcctggccccaggtgcaagcagca

SEQ ID NO: 789121 - DNA, 120 bp, Artificial Sequence
  ENSG00000266074_82 (sequence is synthesized)
cccctcgagggctctgccccagtatccccagggaattcacacccctccccttctcccacagccaaggacagacaggctgcctggacctgagcccaacagccttcagcctcagaaacgcat

SEQ ID NO: 789122 - DNA, 120 bp, Artificial Sequence
  ENSG00000266074_83 (sequence is synthesized)
ggggggccacacactccttatatcctcccacactaaggttcccctggccccacgggagcttcaggaaagccccccaagttagccactgctctaggacgagctctgtgtcccccacaccac

SEQ ID NO: 789123 - DNA, 120 bp, Artificial Sequence
  ENSG00000266074_84 (sequence is synthesized)
aggcctcgaagcagggtgctggtgggtgccctgtaccccaatcccaggtccccttggccccctatttttctcgggcccattggggcctgtttctcacctgctggctggaccccctgaagg

SEQ ID NO: 789124 - DNA, 120 bp, Artificial Sequence
  ENSG00000266074_85 (sequence is synthesized)
gccgttcccagaggctccccaggaggctcaaggctgggggcttatgttgtggtcgggggtccccgcctccagccccccgctcccacccccgagcctaccctttgtctcgcatgagtgcaa

SEQ ID NO: 789125 - DNA, 120 bp, Artificial Sequence
  ENSG00000266074_86 (sequence is synthesized)
tatttcattcccggtggttgtctggggaggtggttggacgaggtcctgcttgaggctcggggatcagaacgatgtcaagtgaagaaaaatgcacgggggcatgctgagccactggagttc

SEQ ID NO: 789126 - DNA, 120 bp, Artificial Sequence
  ENSG00000266074_87 (sequence is synthesized)
cagagagggccgaggagggtgcagccacggaggttggatcctctgctccgccgcctcgtcctcgtcccgcttctgctgggttccgctttgtccctggttttttcctttctttttctgtgt

SEQ ID NO: 789127 - DNA, 120 bp, Artificial Sequence
  ENSG00000266074_88 (sequence is synthesized)
gcgtgcgaatggtgcggcccctcccctctcaccgtggttaacgtgacgaaggcacgattcctgtaaatgtgtaaactaaggggatggttggattttttttcaatgtaaacactaaaaaca

SEQ ID NO: 789128 - DNA, 120 bp, Artificial Sequence
  ENSG00000266074_89 (sequence is synthesized)
aaatggacaaaaaaacacacaaaggttttatgaacagcagactctatgtaaaggcattttagtatcaaattttttattgataacttgcttaagaataaatatatggactattgtacaggt

SEQ ID NO: 789129 - DNA, 120 bp, Artificial Sequence
  ENSG00000266074_90 (sequence is synthesized)
tgggattacaattagtgtgtggattaaaacggatggcagagacggggctagaaaggaaaacgtcggaaaaagggagggcactcaaagaaaaacgtacattttctagaaaaaaacaaactt

SEQ ID NO: 789130 - DNA, 120 bp, Artificial Sequence
  ENSG00000266074_91 (sequence is synthesized)
gaaattgcttaattgctaacgggcttccagcatttgcagcgccaggagattggaatgggggagccgcccagtggaggggtctccccagcacttcccgggttggcccacacccgcttccct

SEQ ID NO: 789131 - DNA, 120 bp, Artificial Sequence
  ENSG00000266074_92 (sequence is synthesized)
ccctgcctgggcctttggcgaggctgcccttttctctctgttgcccttccttctttttctccctttcttttttctcctctagatttgtaactggaaagagaaggagaaaaagcacttgcc

SEQ ID NO: 789132 - DNA, 120 bp, Artificial Sequence
  ENSG00000266074_93 (sequence is synthesized)
tgagcgatgggtgatttaaaaatatctcttctgctgtccctgtggttatcaagcttgtcttcctgcccctgcatgggagctgctgcccacccggctcaggtgcacggggcgctgaggctg

SEQ ID NO: 789133 - DNA, 120 bp, Artificial Sequence
  ENSG00000266074_94 (sequence is synthesized)
gggccgccctggcagaagggacagctcgccagcctccccaccagcccctcttctggctgaaggctggtggcccccactgggggtagggggattgtgtgcaccccacctccactgtaccgt

SEQ ID NO: 789134 - DNA, 120 bp, Artificial Sequence
  ENSG00000266074_95 (sequence is synthesized)
gccctccagcctggcaagtaacagcacgacagagacaggggcccctgacactgaggcttgcatgttggtgcacaggcaggctggggctgtcccctccgggaggcaaggccaaattcccca

SEQ ID NO: 789135 - DNA, 120 bp, Artificial Sequence
  ENSG00000266074_96 (sequence is synthesized)
tcaggtcaggtcagcactctccctgaccccatgccccagctcacatcctggccaggtccaggccagctgcattctcccccttctgcccttacttccaggtctaggcagcacccgggtagg

SEQ ID NO: 789136 - DNA, 120 bp, Artificial Sequence
  ENSG00000266074_97 (sequence is synthesized)
agaaacggctctgggctctggcctggcctgtgtcctccctgcttcttcttgatcccaggtcctcccagcctccccaagcgcagggtgctctagagggcgctggaggcccctcggggctgc

SEQ ID NO: 789137 - DNA, 120 bp, Artificial Sequence
  ENSG00000266074_98 (sequence is synthesized)
ctctttcagggtctgaagggtcatgtgtccccgtccctggaggccccatttcctcccccctgcggaccgaagagaacgcttgtgctcggagatgttcaacccatttgtgatgggcaactt

SEQ ID NO: 789138 - DNA, 120 bp, Artificial Sequence
  ENSG00000266074_99 (sequence is synthesized)
ggtcatgcagacatccagctagaagcatctgtagctgaaagaaagccttttgaaattgttaagagccagaatattgtattggtttttaaaatttagctgcatgtatttttttaaaaaaag

SEQ ID NO: 789139 - DNA, 120 bp, Artificial Sequence
  ENSG00000266074_100 (sequence is synthesized)
aattataccccagatcactttgctttggtctgtgtctatatatgatctagtttagagagaaaaaagcataattacgttaaacaatttttttgcgtcttgtgtgcggacttccacatggct

SEQ ID NO: 789140 - DNA, 120 bp, Artificial Sequence
  ENSG00000266074_101 (sequence is synthesized)
ggtttggctgccttgcttcccattttcctggatggcttcagtccgcaggccacagctgcagccagcccgcccctccctctgctgactgccccttggaaaggaaaattgacccggattctt

SEQ ID NO: 789141 - DNA, 120 bp, Artificial Sequence
  ENSG00000266074_102 (sequence is synthesized)
cccgcctgtctgggagtagaatccaaccatcggggatggaggccctggcctccatgaggctgcctctttttgctgggctgctcttcctgtgcctgtctggcctggcactgccaccccggc

SEQ ID NO: 789142 - DNA, 120 bp, Artificial Sequence
  ENSG00000266074_103 (sequence is synthesized)
tggactgaggctgttcctgctggctgccggggctgcctttccccaaccccacccaacactttcagaatgtcagtctgaggggccctgatgggtggggacatggggctcccaggcttcttc

SEQ ID NO: 789143 - DNA, 120 bp, Artificial Sequence
  ENSG00000266074_104 (sequence is synthesized)
cattgtttttctaaaaatgaaagtgctgggagctttagactcgggccgcaggttttatggtaaagtgctgttccagtaaccttgtcaccaaaaggtgcaattaaaatgtttggaatcatt

SEQ ID NO: 789144 - DNA, 120 bp, Artificial Sequence
  ENSG00000266074_105 (sequence is synthesized)
agatccatggctgccatggccttaagccgcggtgctgcggcttcctgcccttgtgggcgccctgcacactcacactcagactcacactcacacccacaccacaccctccatgcctcctgg

SEQ ID NO: 789145 - DNA, 120 bp, Artificial Sequence
  ENSG00000266074_106 (sequence is synthesized)
ttcagcccctgtggatcgagggcaggggcctcgaggtaccagttctgagccgggcatcaacagagaggcacctaaccgcccaggggctgtggtttgcagagggcgccctgagagtgcagc

SEQ ID NO: 789146 - DNA, 120 bp, Artificial Sequence
  ENSG00000266074_107 (sequence is synthesized)
cggccgtgggtggggttctccccacccctagagcctttctggagtctcacccggggttgggggtctcagttaaccccttgcagcggtcaggttacccactttcaggggccaggagatggc

SEQ ID NO: 789147 - DNA, 120 bp, Artificial Sequence
  ENSG00000266074_108 (sequence is synthesized)
ccccagtcagccctgcagagcactgaggctggagcctggggttttccctgagcctccaggtcccgttctccctcccaggttgatggcagggggtgggacagggagtcaggcattggcacc

SEQ ID NO: 789148 - DNA, 120 bp, Artificial Sequence
  ENSG00000266094_0 (sequence is synthesized)
ctctcggggctggctcgggagtagcgcagtcgccaaagccgccgctgccaaagctgccgccactagccgggcatggccatggcgtccccggccatcgggcagcgcccgtacccgctacta

SEQ ID NO: 789149 - DNA, 120 bp, Artificial Sequence
  ENSG00000266094_1 (sequence is synthesized)
ttggaccccgagccgccgcgctatctacagagcctgagcggccccgagctaccgccgccgccccccgaccggtcctcgcgcctctgtgtcccggcgcccctctccactgcgcccggggcg

SEQ ID NO: 789150 - DNA, 120 bp, Artificial Sequence
  ENSG00000266094_2 (sequence is synthesized)
aacctggagcccccgccccgggcctcccgacccgctcgcccgctccggcctggtctgcagcagagactgcggcggcggcctggagcgccccgaccccgcgacgtgcggagcatcttcgag

SEQ ID NO: 789151 - DNA, 120 bp, Artificial Sequence
  ENSG00000266094_3 (sequence is synthesized)
gcgccccgaccccgcgacgtgcggagcatcttcgagcagccgcaggatcccagagtcccggcggagcgaggcgaggggcactgcttcgccgagttggtgctgccgggcggccccggctgg

SEQ ID NO: 789152 - DNA, 120 bp, Artificial Sequence
  ENSG00000266094_4 (sequence is synthesized)
tgtgacctgtgcggacgagaggtgctgcggcaggcgctgcgctgcactaactgtaaattcacctgtcacccagaatgccgcagcctgatccagttggactgcagtcagcaggagggttta

SEQ ID NO: 789153 - DNA, 120 bp, Artificial Sequence
  ENSG00000266094_5 (sequence is synthesized)
tcccgggacagaccctctccagaaagcaccctcaccgtgaccttcagccagaatgtctgtaaacctgtggaggagacacagcgcccgcccacactgcaggagatcaagcagaagatcgac

SEQ ID NO: 789154 - DNA, 120 bp, Artificial Sequence
  ENSG00000266094_6 (sequence is synthesized)
agctacaacacgcgagagaagaactgcctgggcatgaaactgagtgaagacggcacctacacgggtttcatcaaagtgcatctgaaactccggcggcctgtgacggtgcctgctgggatc

SEQ ID NO: 789155 - DNA, 120 bp, Artificial Sequence
  ENSG00000266094_7 (sequence is synthesized)
cggccccagtccatctatgatgccatcaaggaggtgaacctggcggctaccacggacaagcggacatccttctacctgcccctagatgccatcaagcagctgcacatcagcagcaccacc

SEQ ID NO: 789156 - DNA, 120 bp, Artificial Sequence
  ENSG00000266094_8 (sequence is synthesized)
accgtcagtgaggtcatccaggggctgctcaagaagttcatggttgtggacaatccccagaagtttgcactttttaagcggatacacaaggacggacaagtgctcttccagaaactctcc

SEQ ID NO: 789157 - DNA, 120 bp, Artificial Sequence
  ENSG00000266094_9 (sequence is synthesized)
attgctgaccgccccctctacctgcgcctgcttgctgggcctgacacggaggtcctcagctttgtgctaaaggagaatgaaactggagaggtagagtgggatgccttctccatccctgaa

SEQ ID NO: 789158 - DNA, 120 bp, Artificial Sequence
  ENSG00000266094_10 (sequence is synthesized)
cttcagaacttcctaacaatcctggaaaaagaggagcaggacaaaatccaacaagtgcaaaagaagtatgacaagtttaggcagaaactggaggaggccttaagagaatcccagggcaaa

SEQ ID NO: 789159 - DNA, 120 bp, Artificial Sequence
  ENSG00000266094_11 (sequence is synthesized)
cctgggtaaccggtcctgcttcctctcctcctggtgcattcagatttatttgtattattaattattattttgcaacagacactttttctcaggacatctctggcaggtgcatttgtgcct

SEQ ID NO: 789160 - DNA, 120 bp, Artificial Sequence
  ENSG00000266094_12 (sequence is synthesized)
gcccagcagttccagctgtggcaaaagtctcttccatggacaagtgtttgcacgagggttcagctgtgcccgcccccaggctgtgccccaccacagattctgccaaggatcagaactcat

SEQ ID NO: 789161 - DNA, 120 bp, Artificial Sequence
  ENSG00000266094_13 (sequence is synthesized)
gtgaaacaaacagctgacgtcctctctcgatctgcaagcctttcaccaaccaaatagttgcctctctcgtcaccaaactggaacctcacaccagccggcaaaggaaggaagaaaggtttt

SEQ ID NO: 789162 - DNA, 120 bp, Artificial Sequence
  ENSG00000266094_14 (sequence is synthesized)
agagctgtgtgttctttctctggcattgattcctctttgagttctcttacttgccacgtacaggaccattatttatgagtgaaaagttgtagcacattccttttgcaggtctgagctaag

SEQ ID NO: 789163 - DNA, 120 bp, Artificial Sequence
  ENSG00000266094_15 (sequence is synthesized)
ttataaagctactggccccagatgctcagggtaaggagcaccaaagctgaggctggctcagagatctccagagaagctgcagcctgccctggccctggctctggccctggcccacattgc

SEQ ID NO: 789164 - DNA, 120 bp, Artificial Sequence
  ENSG00000266094_16 (sequence is synthesized)
acatggaaacccaaaggcatatatctgcgtatgtgtggtacttagtcacatctttgtcaacaaactgttcgtttttaagttacaaatttgaatttaatgttgtcatcatcgtcatgtgtt

SEQ ID NO: 789165 - DNA, 120 bp, Artificial Sequence
  ENSG00000266094_17 (sequence is synthesized)
tccccaaagggaagccagtcattgaccatttaaaaagtctcctgctaagtatggaaatcagacagtaagagaaagccaaaaagcaatgcagagaaaggtgtccaagctgtcttcagcctt

SEQ ID NO: 789166 - DNA, 120 bp, Artificial Sequence
  ENSG00000266094_18 (sequence is synthesized)
ccccagctaaagagcagaggagggcctgggctacttgggttccccatcggcctccagcactgcctccctcctcccactgcgactctgggatctccaggtgctgcccaaggagttgccttg

SEQ ID NO: 789167 - DNA, 120 bp, Artificial Sequence
  ENSG00000266094_19 (sequence is synthesized)
attacagagaggggagcctccaattcggccaacttggagtcctttctgttttgaagcatgggccagacccggcactgcgctcggagagccggtgggcctggcctccccgtcgacctcagt

SEQ ID NO: 789168 - DNA, 120 bp, Artificial Sequence
  ENSG00000266094_20 (sequence is synthesized)
gcctttttgttttcagagagaaataggagtagggcgagtttgcctgaagctctgctgctggcttctcctgccaggaagtgaacaatggcggcggtgtgggagacaaggccaggagagccc

SEQ ID NO: 789169 - DNA, 120 bp, Artificial Sequence
  ENSG00000266094_21 (sequence is synthesized)
gcgttcagtatgggttgagggtcacagacctccctcccatctgggtgcctgagttttgactccaatcagtgataccagaccacattgacagggaggatcaaattcctgacttacatttgc

SEQ ID NO: 789170 - DNA, 120 bp, Artificial Sequence
  ENSG00000266094_22 (sequence is synthesized)
actggcttcttgtttaggctgaatcctaaaataaattagtcaaaaaattccaacaagtagccaggactgcagagacactccagtgcagagggagaaggacttgtaattttcaaagcaggg

SEQ ID NO: 789171 - DNA, 120 bp, Artificial Sequence
  ENSG00000266094_23 (sequence is synthesized)
ctggttttccaacccagcctctgagaaaccatttctttgctatcctctgccttcccaagtccctcttgggtcggttcaagcccaagcttgttcgtgtagcttcagaagttccctctctga

SEQ ID NO: 789172 - DNA, 120 bp, Artificial Sequence
  ENSG00000266094_24 (sequence is synthesized)
cccaggctgagtccatactgcccctgatcccagaaggaatgctgacccctcgtcgtatgaactgtgcatagtctccagagcttcaaaggcaacacaagctcgcaactctaagattttttt

SEQ ID NO: 789173 - DNA, 120 bp, Artificial Sequence
  ENSG00000266094_25 (sequence is synthesized)
aaaccacaaaaaccctggttagccatctcatgctcagccttatcacttccctccctttagaaactctctccctgctgtatattaaagggagcaggtggagagtcattttccttcgtcctg

SEQ ID NO: 789174 - DNA, 120 bp, Artificial Sequence
  ENSG00000266094_26 (sequence is synthesized)
catgtctctaacattaatagaaggcatggctcctgctgcaaccgctgtgaatgctgctgagaacctccctctatggggatggctattttatttttgagaaggaaaaaaaaagtcatgtat

SEQ ID NO: 789175 - DNA, 120 bp, Artificial Sequence
  ENSG00000266094_27 (sequence is synthesized)
atatacacataaaggcatatagctatatataaagagataagggtgtttatgaaatgagaaaattattggacaattcagactttactaaagcacagttagacccaaggcctatgctgaggt

SEQ ID NO: 789176 - DNA, 120 bp, Artificial Sequence
  ENSG00000266094_28 (sequence is synthesized)
ctaaacctctgaaaaaagtatagtatcgagtacccgttccctcccagaggtgggagtaactgctggtagtgccttctttggttgtgttgctcagtgtgtaagtgtttgtttccaggatat

SEQ ID NO: 789177 - DNA, 120 bp, Artificial Sequence
  ENSG00000266094_29 (sequence is synthesized)
tttctttttaaatgtctttcttatatgggttttaaaaaaaagtaataaaagcctgttgcaaaaatgactcatgttagaaacgtctcccttgaacttcaccatcttacggacactgggagc

SEQ ID NO: 789178 - DNA, 120 bp, Artificial Sequence
  ENSG00000266094_30 (sequence is synthesized)
gggggagagagggtgagaatggacatgatcacatgcttcctggtggagtcagattttcttttgccagtgagcagagaaatgaaggctactgttcaaataatttgggaaaaattgtccaaa

SEQ ID NO: 789179 - DNA, 120 bp, Artificial Sequence
  ENSG00000266094_31 (sequence is synthesized)
gaactgctttacgcgaggggcaggaaaggcgcgggaggcgggggaggtgcggagatggcgctctgcacggcggcggagggagggcgctggcgccggggacacgaaaccgcagagcccgga

SEQ ID NO: 789180 - DNA, 120 bp, Artificial Sequence
  ENSG00000266094_32 (sequence is synthesized)
cgagtcagggagtgaggcgcgagccgggcgcccggggctctgcaggcgcaggcggcgcggggacaggagcaggttaccgggccgcccgagcgctcgcaccccgctgaaagaaacgcaggc

SEQ ID NO: 789181 - DNA, 120 bp, Artificial Sequence
  ENSG00000266094_33 (sequence is synthesized)
ggcccgccggctctgcctggtccgctacccgaccagctcccggctcggggctcagagctaggggcttacgccaagcggagcccggggaggggtgcccacctccctccgccgcatcccaag

SEQ ID NO: 789182 - DNA, 120 bp, Artificial Sequence
  ENSG00000266094_34 (sequence is synthesized)
cccggcccccttgatgcgctggcggcctcggccgggaactccggggtagatgaccgtggacagcagcatgagcagtgggtactgcagcctggacgaggaactggaagactgcttcttcac

SEQ ID NO: 789183 - DNA, 120 bp, Artificial Sequence
  ENSG00000266094_35 (sequence is synthesized)
cacataggtgggagccacgcagcacgggcaggaaggtgactgttgagagagtgagcaggggtgggtgatgggcctgggggtcagtgtttcagccaggactctgaacaccctggggtagca

SEQ ID NO: 789184 - DNA, 120 bp, Artificial Sequence
  ENSG00000266094_36 (sequence is synthesized)
cattagggcctgtgtgtggcaaggcctgtggaaagaaaggatttcatgtgctttatttctgaaaactcagggaggagggggaccaagaaactccctgtgctcaggcacaggctgtttttg

SEQ ID NO: 789185 - DNA, 120 bp, Artificial Sequence
  ENSG00000266094_37 (sequence is synthesized)
cttcaaaatggcccgagggctaccaagctccatctctgggctccactgggtatagacgtttttgagccatttgtcctcccttttcttgacctccatcccccaaggggagctaaccagtgt

SEQ ID NO: 789186 - DNA, 120 bp, Artificial Sequence
  ENSG00000266094_38 (sequence is synthesized)
gtagtcttgtggcataaactggagtaaaaccaggccggtgccacccatggcctgagaatgaccaacaggggaaggtctcagtgtttgtcacactgtgttcagtggaggcctagagtttta

SEQ ID NO: 789187 - DNA, 120 bp, Artificial Sequence
  ENSG00000266094_39 (sequence is synthesized)
aggagttttgggagtcactgcggagatttagggatcaaggcagctgggactctgtcccttctccccatttcagcaagggccgctctgctcccatctgctttctttattggcatctgtgca

SEQ ID NO: 789188 - DNA, 120 bp, Artificial Sequence
  ENSG00000266094_40 (sequence is synthesized)
gaatatgtttggaaaaagtactccatggacagtagctgaatgctgctggccctgtggaaagctcaggcactttgaagtgtggagacctgggctctagttccagttctgctgcaatgagct

SEQ ID NO: 789189 - DNA, 120 bp, Artificial Sequence
  ENSG00000266094_41 (sequence is synthesized)
ctgtgattgtgattacgccaccttccctgtgtggacttgaggtttctcacttatccatagcgaggaccaaaccagataaaccttagtactctattgtgctcaaagagcttaggagtctca

SEQ ID NO: 789190 - DNA, 120 bp, Artificial Sequence
  ENSG00000266094_42 (sequence is synthesized)
attgttggccgcacagggcttgtgctcttgggtcagcctgatggaagtccaaattgccttctgccatcagaggccaagtcctttaggggtaggcctgggccagtcaggctctcattatct

SEQ ID NO: 789191 - DNA, 120 bp, Artificial Sequence
  ENSG00000266094_43 (sequence is synthesized)
gctctgccagtcatgggaggtagataccccaatttcccagcagataacaggctgagaagggtggaaagctgtgctcgaggtcacactgctgggagaggtggagtcaggcccaaccccggt

SEQ ID NO: 789192 - DNA, 120 bp, Artificial Sequence
  ENSG00000266094_44 (sequence is synthesized)
ctcctgagtccacgttccactcctccacctgctttctgagggtctgcatgttgggaggctgggtggttccagcatcactgtcaagatctcggctgctacacagaaacttaagattattga

SEQ ID NO: 789193 - DNA, 120 bp, Artificial Sequence
  ENSG00000266094_45 (sequence is synthesized)
gtttcaaaataaaaacatggttcatagactggcaactcttggtcatgagatgccagcatttggaattttgttgctgctatgacaggcatgcaaagcccaggcttcgctgattcagtctgt

SEQ ID NO: 789194 - DNA, 120 bp, Artificial Sequence
  ENSG00000266094_46 (sequence is synthesized)
tcagtagcaaactgtgtgtgaatcacggatgtgaactgggaaggggaaggcagcagggtctctcaggtcgtgtcaacttctaacctgtctcctattctgtttcttcccacaaatctccct

SEQ ID NO: 789195 - DNA, 120 bp, Artificial Sequence
  ENSG00000266094_47 (sequence is synthesized)
atgaccgagggccaggaggagaaggcaaccgctgcctgctttgggacagtcactgctcagctccagcggctcttctgcaggctcccgaagagccgctcggtctccaaaaagcaccagatc

SEQ ID NO: 789196 - DNA, 120 bp, Artificial Sequence
  ENSG00000266094_48 (sequence is synthesized)
tgggagctgtgggcttctcctgagcaccaggggtccagctgcccatgtggtgttcagatctgtggaatccgggcagggaggcaagagcagagtccctgactctgcatgtgacttcaggaa

SEQ ID NO: 789197 - DNA, 120 bp, Artificial Sequence
  ENSG00000266094_49 (sequence is synthesized)
aaccacaccctaggctcccatttcctgatctgtgcaatgggaggaatctgccccaccattcctaatctttcaggagatgatgtgaatggaatcatgctttaaactctgagcagacaccca

SEQ ID NO: 789198 - DNA, 120 bp, Artificial Sequence
  ENSG00000266094_50 (sequence is synthesized)
agataaaaggttattgccctgttcattactgtcatgttcatttcattaaaaggcccgtgtctacttccagttgtacgtaccccacctctgcatttccaatcctttcccgcaagcctgggc

SEQ ID NO: 789199 - DNA, 120 bp, Artificial Sequence
  ENSG00000266094_51 (sequence is synthesized)
aattctgtggctactccctggcaggtcccctccctttcctccggcctccagaggcctccggggtctggaaggctgatagccagagccctcagtggcctccatgtgctttagggaaataga

SEQ ID NO: 789200 - DNA, 120 bp, Artificial Sequence
  ENSG00000266094_52 (sequence is synthesized)
tctgactctcattttttgcttgtgattttgggaagctcttttaactcctcctctgagcttcagtgtaaactaagtgattaaacggtacgtaatgaccaagggcccagtattgcttggcct

SEQ ID NO: 789201 - DNA, 120 bp, Artificial Sequence
  ENSG00000266094_53 (sequence is synthesized)
tgtctcactccgagtccgtgcagttagttccactctgcagggctggatgctcacttcttggttagagaggctttggggagggcgtggttgttccctttctcaccctgagaactactacac

SEQ ID NO: 789202 - DNA, 120 bp, Artificial Sequence
  ENSG00000266173_0 (sequence is synthesized)
agtaaaactgaggaggcggagccaagacggtcggggctgcttgctaactccaggaacaggtttaagtttttgaaactgaagtaggcctacacagtaggaactcatgtcatttcttgtaag

SEQ ID NO: 789203 - DNA, 120 bp, Artificial Sequence
  ENSG00000266173_1 (sequence is synthesized)
taaaccagagcgaatcaggcggtgggtctcggaaaagttcattgttgagggcttaagagatttggaactatttggagagcagcctccgggtgacactcggagaaaaaccaatgatgcgag

SEQ ID NO: 789204 - DNA, 120 bp, Artificial Sequence
  ENSG00000266173_2 (sequence is synthesized)
ctcagagtcaatagcatccttctctaaacaggaggtcatgagtagctttctgccagagggagggtgttacgagctgctcactgtgataggcaaaggatttgaggacctgatgactgtgaa

SEQ ID NO: 789205 - DNA, 120 bp, Artificial Sequence
  ENSG00000266173_3 (sequence is synthesized)
tctagcaaggtacaaaccaacaggagagtacgtgactgtacggaggattaacctagaagcttgttccaatgagatggtaacattcttgcagggcgagctgcatgtctccaaactcttcaa

SEQ ID NO: 789206 - DNA, 120 bp, Artificial Sequence
  ENSG00000266173_4 (sequence is synthesized)
ccatcccaatatcgtgccatatcgagccacttttattgcagacaatgagctgtgggttgtcacatcattcatggcatacggttctgcaaaagatctcatctgtacacacttcatggatgg

SEQ ID NO: 789207 - DNA, 120 bp, Artificial Sequence
  ENSG00000266173_5 (sequence is synthesized)
catgaatgagctggcgattgcttacatcctgcagggggtgctgaaggccctcgactacatccaccacatgggatatgtacacaggagtgtcaaagccagccacatcctgatctctgtgga

SEQ ID NO: 789208 - DNA, 120 bp, Artificial Sequence
  ENSG00000266173_6 (sequence is synthesized)
tgggaaggtctacctgtctggtttgcgcagcaacctcagcatgataagccatgggcagcggcagcgagtggtccacgattttcccaagtacagtgtcaaggttctgccgtggctcagccc

SEQ ID NO: 789209 - DNA, 120 bp, Artificial Sequence
  ENSG00000266173_7 (sequence is synthesized)
cgaggtcctccagcagaatctccagggttatgatgccaagtctgacatctacagtgtgggaatcacagcctgtgaactggccaacggccatgtcccctttaaggatatgcctgccaccca

SEQ ID NO: 789210 - DNA, 120 bp, Artificial Sequence
  ENSG00000266173_8 (sequence is synthesized)
gatgctgctagagaaactgaacggcacagtgccctgcctgttggataccagcaccatccccgctgaggagctgaccatgagcccttcgcgctcagtggccaactctggcctgagtgacag

SEQ ID NO: 789211 - DNA, 120 bp, Artificial Sequence
  ENSG00000266173_9 (sequence is synthesized)
caccagcaccccccggccctccaacggtgactcgccctcccacccctaccaccgaaccttctccccccacttccaccactttgtggagcagtgccttcagcgcaacccggatgccaggcc

SEQ ID NO: 789212 - DNA, 120 bp, Artificial Sequence
  ENSG00000266173_10 (sequence is synthesized)
cagtgccagcaccctcctgaaccactctttcttcaagcagatcaagcgacgtgcctcagaggctttgcccgaattgcttcgtcctgtcacccccatcaccaattttgagggcagccagtc

SEQ ID NO: 789213 - DNA, 120 bp, Artificial Sequence
  ENSG00000266173_11 (sequence is synthesized)
tcaggaccacagtggaatctttggcctggtaacaaacctggaagagctggaggtggacgattgggagttctgagcctctgcaaactgtgcgcattctccagccagggatgcagaggccac

SEQ ID NO: 789214 - DNA, 120 bp, Artificial Sequence
  ENSG00000266173_12 (sequence is synthesized)
ccagaggcccttcctgagggccggccacattcccgccctcctgggcagattgggtagaaaggacattcttccaggaaagttgactgctgactgattgggaaagaaaatcctggagagaca

SEQ ID NO: 789215 - DNA, 120 bp, Artificial Sequence
  ENSG00000266173_13 (sequence is synthesized)
cttcactgctccaaggcttttgagacacaagggaatctcaacaaccagggatcaggagggtccaaagccgacattcccagtcctgtgagctcaggtgacctcctccgcagaagagagatg

SEQ ID NO: 789216 - DNA, 120 bp, Artificial Sequence
  ENSG00000266173_14 (sequence is synthesized)
ctgctctggccctgggagctgaattccaagcccagggtttggctccttaaacccgaggaccgccacctcttcccagtgcttgcgaccagcctcattctatttaactttgctctcagatgc

SEQ ID NO: 789217 - DNA, 120 bp, Artificial Sequence
  ENSG00000266173_15 (sequence is synthesized)
ctcagatgctataggtcagtgaaagggcaagtagtaagctgcctgcctcccttccctcagacctctccctcataattccagagaagggcatttctgtctttttaagcacagactaaggct

SEQ ID NO: 789218 - DNA, 120 bp, Artificial Sequence
  ENSG00000266173_16 (sequence is synthesized)
ggaacagtccatccttatccctcttctggcttgggccctgacacctaagtctttcccacggtttatgtgtgtgcctcattcctttcccaccaagaatccatcttagcgcctcctgccagc

SEQ ID NO: 789219 - DNA, 120 bp, Artificial Sequence
  ENSG00000266173_17 (sequence is synthesized)
tgccctggtgctttctccaagggccatcagtgtcttgcctagcttgagggcttaagtccttatgctgtgttagtttcgttgtcagaacaaattaaaattttcagagacgctgctggagaa

SEQ ID NO: 789220 - DNA, 120 bp, Artificial Sequence
  ENSG00000266173_18 (sequence is synthesized)
aaaactgaggaggcggagccaagacggtcggggctgcttgctaactccaggaacaggtacctgcctggcggggtgcctggtacgctgccggggccagtccctcctggctctgccaccgat

SEQ ID NO: 789221 - DNA, 120 bp, Artificial Sequence
  ENSG00000266173_19 (sequence is synthesized)
tccatctccccaggcccgggccttcgtcggagcggccatcctgggctcacctcaccctccacgggccccctttttaacccgcgtcctcgactcccgcaatgaggcgccgcagcccgagag
